United States Patent Application Publication US 2011/0183924 A1 - sequence listing, part 276

SEQ ID NO: 833879 - protein, 923 aa, Homo sapiens
MEGAKPTLQLVYQAVQALYHDPDPSGKERASFWLGELQRSVHAWEISDQLLQIRQDVESCYFAAQTMKMKIQTSFYELPTDSHASLRDSLLTHIQNLKDLSPVIVTQLALAIADLALQMPSWKGCVQTLVEKYSNDVTSLPFLLEILTVLPEEVHSRSLRIGANRRTEIIEDLAFYSSTVVSLLMTCVEKAGTDEKMLMKVFRCLGSWFNLGVLDSNFMANNKLLALLFEVLQQDKTSSNLHEAASDCVCSALYAIENVETNLPLAMQLFQGVLTLETAYHMAVAREDLDKVLNYCRIFTELCETFLEKIVCTPGQGLGDLRTLELLLICAGHPQYEVVEISFNFWYRLGEHLYKTNDEVIHGIFKAYIQRLLHALARHCQLEPDHEGVPEETDDFGEFRMRVSDLVKDLIFLIGSMECFAQLYSTLKEGNPPWEVTEAVLFIMAAIAKSVDPENNPTLVEVLEGVVRLPETVHTAVRYTSIELVGEMSEVVDRNPQFLDPVLGYLMKGLCEKPLASAAAKAIHNICSVCRDHMAQHFNGLLEIARSLDSFLLSPEAAVGLLKGTALVLARLPLDKITECLSELCSVQVMALKKLLSQEPSNGISSDPTVFLDRLAVIFRHTNPIVENGQTHPCQKVIQEIWPVLSETLNKHRADNRIVERCCRCLRFAVRCVGKGSAALLQPLVTQMVNVYHVHQHSCFLYLGSILVDEYGMEEGCRQGLLDMLQALCIPTFQLLEQQNGLQNHPDTVDDLFRLATRFIQRSPVTLLRSQVVIPILQWAIASTTLDHRDANCSVMRFLRDLIHTGVANDHEEDFELRKELIGQVMNQLGQQLVSQLLHTCCFCLPPYTLPDVAEVLWEIMQVDRPTFCRWLENSLKGLPKETTVGAVTVTHKQLTDFHKQVTSAEECKQVCWALRDFTRLFR

SEQ ID NO: 833880 - protein, 923 aa, Homo sapiens; identical to SEQ ID NO: 833879

SEQ ID NO: 833881 - protein, 957 aa, Homo sapiens
MEGAKPTLQLVYQAVQALYHDPDPSGKERASFWLGELQRSVHAWEISDQLLQIRQDVESCYFAAQTMKMKIQTSFYELPTDSHASLRDSLLTHIQNLKDLSPVIVTQLALAIADLALQMPSWKGCVQTLVEKYSNDVTSLPFLLEILTVLPEEVHSRSLRIGANRRTEIIEDLAFYSSTVVSLLMTCVEKAGTDEKMLMKVFRCLGSWFNLGVLDSNFMANNKLLALLFEVLQQDKTSSNLHEAASDCVCSALYAIENVETNLPLAMQLFQGVLTLETAYHMAVAREDLDKVLNYCRIFTELCETFLEKIVCTPGQGLGDLRTLELLLICAGHPQYEVVEISFNFWYRLGEHLYKTNDEVIHGIFKAYIQRLLHALARHCQLEPDHEGVPEETDDFGEFRMRVSDLVKDLIFLIGSMECFAQLYSTLKEGNPPWEVTEAVLFIMAAIAKSVDPKKPFSNAVCRHSLLFGQNITSEISNCEYLPPVLRENNPTLVEVLEGVVRLPETVHTAVRYTSIELVGEMSEVVDRNPQFLDPVLGYLMKGLCEKPLASAAAKAIHNICSVCRDHMAQHFNGLLEIARSLDSFLLSPEAAVGLLKGTALVLARLPLDKITECLSELCSVQVMALKKLLSQEPSNGISSDPTVFLDRLAVIFRHTNPIVENGQTHPCQKVIQEIWPVLSETLNKHRADNRIVERCCRCLRFAVRCVGKGSAALLQPLVTQMVNVYHVHQHSCFLYLGSILVDEYGMEEGCRQGLLDMLQALCIPTFQLLEQQNGLQNHPDTVDDLFRLATRFIQRSPVTLLRSQVVIPILQWAIASTTLDHRDANCSVMRFLRDLIHTGVANDHEEDFELRKELIGQVMNQLGQQLVSQLLHTCCFCLPPYTLPDVAEVLWEIMQVDRPTFCRWLENSLKGLPKETTVGAVTVTHKQLTDFHKQVTSAEECKQVCWALRDFTRLFR

SEQ ID NO: 833882 - protein, 859 aa, Homo sapiens
MEGAKPTLQLVYQAVQALYHDPDPSGKERASFWLGELQRSVHAWEISDQLLQIRQDVESCYFAAQTMKMKIQTSFYELPTDSHASLRDSLLTHIQNLKDLSPVIVTQLALAIADLALQMPSWKGCVQTLVEKYSNDVTSLPFLLEILTVLPEEVHSRSLRIGANRRTEIIEDLAFYSSTVVSLLMTCVEKAGTDEKMLMKVFRCLGSWFNLGVLDSNFMANNKLLALLFEVLQQDKTSSNLHEAASDCVCSALYAIENVETNLPLAMQLFQGVLTLETAYHMAVAREDLDKVLNYCRIFTELCETFLEKIVCTPGQGLGDLRTLELLLICAGHPQYEVVEISFNFWYRLGEHLYKTNDEVIHGIFKAYIQRLLHALARHCQLEPDHEGVPEETDDFGEFRMRVSDLVKDLIFLIGSMECFAQLYSTLKEGNPPWEVTEAVLFIMAAIAKSVDPENNPTLVEVLEGVVRLPETVHTAVRYTSIELVGEMSEVVDRNPQFLGTALVLARLPLDKITECLSELCSVQVMALKKLLSQEPSNGISSDPTVFLDRLAVIFRHTNPIVENGQTHPCQKVIQEIWPVLSETLNKHRADNRIVERCCRCLRFAVRCVGKGSAALLQPLVTQMVNVYHVHQHSCFLYLGSILVDEYGMEEGCRQGLLDMLQALCIPTFQLLEQQNGLQNHPDTVDDLFRLATRFIQRSPVTLLRSQVVIPILQWAIASTTLDHRDANCSVMRFLRDLIHTGVANDHEEDFELRKELIGQVMNQLGQQLVSQLLHTCCFCLPPYTLPDVAEVLWEIMQVDRPTFCRWLENSLKGLPKETTVGAVTVTHKQLTDFHKQVTSAEECKQVCWALRDFTRLFR

SEQ ID NO: 833883 - protein, 923 aa, Homo sapiens; identical to SEQ ID NO: 833879

SEQ ID NO: 833884 - protein, 206 aa, Homo sapiens
ILETILLFKKLKGGDAQCLEQQNGLQNHPDTVDDLFRLATRFIQRSPVTLLRSQVVIPILQWAIASTTLDHRDANCSVMRFLRDLIHTGVANDHEEDFELRKELIGQVMNQLGQQLVSQLLHTCCFCLPPYTLPDVAEVLWEIMQVDRPTFCRWLENSLKGLPKETTVGAVTVTHKQLTDFHKQVTSAEECKQVCWALRDFTRLFR

SEQ ID NO: 833885 - protein, 837 aa, Homo sapiens
MEGAKPTLQLVYQAVQALYHDPDPSGKERASFWLGELQRSVHAWEISDQLLQIRQDVESCYFAAQTMKMKIQTSFYELPTDSHASLRDSLLTHIQNLKDLSPVIVTQLALAIADLALQMPSWKGCVQTLVEKYSNDVTSLPFLLEILTVLPEEVHSRSLRIGANRRTEIIEDLAFYSSTVVSLLMTCVEKAGTDEKMLMKVFRCLGSWFNLGVLDSNFMANNKLLALLFEVLQQDKTSSNLHEAASDCVCSALYAIENVETNLPLAMQLFQGVLTLETAYHMAVAREDLDKVLNYCRIFTELCETFLEKIVCTPGQGLGDLRTLELLLICAGHPQYEVVEISFNFWYRLGEHLYKTNDEVIHGIFKAYIQRLLHALARHCQLEPDHEGVPEETDDFGEFRMRVSDLVKDLIFLIGSMECFAQLYSTLKEGNPPWEVTEAVLFIMAAIAKSVDPENNPTLVEVLEGVVRLPETVHTAVRYTSIELVGEMSEVVDRNPQFLDPVLGYLMKGLCEKPLASAAAKAIHNICSVCRDHMAQHFNGLLEIARSLDSFLLSPEAAVGLLKGTALVLARLPLDKITECLSELCSVQVMALKKLLSQEPSNGISSDPTVFLDRLAVIFRHTNPIVENGQTHPCQKVIQEIWPVLSETLNKHRADNRIVERCCRCLRFAVRCVGKGSAALLQPLVTQMVNVYHVHQHSCFLYLGSILVDEYGMEEGCRQGLLDMLQALCIPTFQLLEQQNGLQNHPDTVDDLFRLATRFIQRSPVTLLRSQVVIPILQWAIASTTLDHRDANCSVMRFLRDLIHTGVANDFCKGVESEDFRLCRPYSLCCKCSALLL

SEQ ID NO: 833886 - protein, 855 aa, Homo sapiens
MKIQTSFYELPTDSHASLRDSLLTHIQNLKDLSPVIVTQLALAIADLALQMPSWKGCVQTLVEKYSNDVTSLPFLLEILTVLPEEVHSRSLRIGANRRTEIIEDLAFYSSTVVSLLMTCVEKAGTDEKMLMKVFRCLGSWFNLGVLDSNFMANNKLLALLFEVLQQDKTSSNLHEAASDCVCSALYAIENVETNLPLAMQLFQGVLTLETAYHMAVAREDLDKVLNYCRIFTELCETFLEKIVCTPGQGLGDLRTLELLLICAGHPQYEVVEISFNFWYRLGEHLYKTNDEVIHGIFKAYIQRLLHALARHCQLEPDHEGVPEETDDFGEFRMRVSDLVKDLIFLIGSMECFAQLYSTLKEGNPPWEVTEAVLFIMAAIAKSVDPENNPTLVEVLEGVVRLPETVHTAVRYTSIELVGEMSEVVDRNPQFLDPVLGYLMKGLCEKPLASAAAKAIHNICSVCRDHMAQHFNGLLEIARSLDSFLLSPEAAVGLLKGTALVLARLPLDKITECLSELCSVQVMALKKLLSQEPSNGISSDPTVFLDRLAVIFRHTNPIVENGQTHPCQKVIQEIWPVLSETLNKHRADNRIVERCCRCLRFAVRCVGKGSAALLQPLVTQMVNVYHVHQHSCFLYLGSILVDEYGMEEGCRQGLLDMLQALCIPTFQLLEQQNGLQNHPDTVDDLFRLATRFIQRSPVTLLRSQVVIPILQWAIASTTLDHRDANCSVMRFLRDLIHTGVANDHEEDFELRKELIGQVMNQLGQQLVSQLLHTCCFCLPPYTLPDVAEVLWEIMQVDRPTFCRWLENSLKGLPKETTVGAVTVTHKQLTDFHKQVTSAEECKQVCWALRDFTRLFR

SEQ ID NO: 833887 - protein, 565 aa, Homo sapiens
MHRTSRVSPFPEPSARNTVDVFVQKGSGWGAAPSPFLSQLSFPKDTDMYFFSIVRFPSMECFAQLYSTLKEGNPPWEVTEAVLFIMAAIAKSVDPENNPTLVEVLEGVVRLPETVHTAVRYTSIELVGEMSEVVDRNPQFLDPVLGYLMKGLCEKPLASAAAKAIHNICSVCRDHMAQHFNGLLEIARSLDSFLLSPEAAVGLLKGTALVLARLPLDKITECLSELCSVQVMALKKLLSQEPSNGISSDPTVFLDRLAVIFRHTNPIVENGQTHPCQKVIQEIWPVLSETLNKHRADNRIVERCCRCLRFAVRCVGKGSAALLQPLVTQMVNVYHVHQHSCFLYLGSILVDEYGMEEGCRQGLLDMLQALCIPTFQLLEQQNGLQNHPDTVDDLFRLATRFIQRSPVTLLRSQVVIPILQWAIASTTLDHRDANCSVMRFLRDLIHTGVANDHEEDFELRKELIGQVMNQLGQQLVSQLLHTCCFCLPPYTLPDVAEVLWEIMQVDRPTFCRWLENSLKGLPKETTVGAVTVTHKQLTDFHKQVTSAEECKQVCWALRDFTRLFR

SEQ ID NO: 833888 - protein, 923 aa, Homo sapiens; identical to SEQ ID NO: 833879

SEQ ID NO: 833889 - protein, 909 aa, Homo sapiens
MEGAKPTLQLVYQAVQALYHDPDPSGKERASFWLGELQRSVHAWEISDQLLQIRQDVESCYFAAQTMKMKIQTSFYELPTDSHASLRDSLLTHIQNLKDLSPVIVTQLALAIADLALQMPSWKGCVQTLVEKYSNDVTSLPFLLEILTVLPEEVHSRSLRIGANRRTEIIEDLAFYSSTVVSLLMTCVEKAGTDEKMLMKVFRCLGSWFNLGVLDSNFMANNKLLALLFEVLQQDKTSSNLHEAASDCVCSALYAIENVETNLPLAMQLFQGVLTLETAYHMAVAREDLDKVLNYCRIFTELCETFLEKIVCTPGQGLGDLRTLELLLICAGHPQYEVVEISFNFWYRLGEHLYKTNDEVIHGIFKAYIQRLLHALARHCQLEPDHEGVPEETDDFGEFRMRVSDLVKDLIFLIGSMECFAQLYSTLKEGNPPWEVTEAVLFIMAAIAKSVDPENNPTLVEVLEGVVRLPETVHTAVRYTSIELVGEMSEVVDRNPQFLDPVLGYLMKGLCEKPLASAAAKAIHNICSVCRDHMAQHFNGLLEIARSLDSFLLSPEAAVGLLKGTALVLARLPLDKITECLSELCSVQVMALKKLLSQEPSNGISSDPTVFLDRLAVIFRHTNPIVENGQTHPCQKVIQEIWPVLSETLNKHRADNRIVERCCRCLRFAVRCVGKGSAALLQPLVTQMVNVYHVHQHSCFLYLGSILVDEYGMEEGCRQGLLDMLQALCIPTFQLLEQQNGLQNHPDTVDDLFRLATRFIQRSPVTLLRSQVVIPILQWAIASTTLDHRDANCSVMRFLRDLIHTGVANDHEEDFELRKELIGQVMNQLGQQLVSQLLHTCCFCLPPYTLPDVAEVLWEIMQVDRPTFCRWLENSLKGLPKETTVGAVTVTHKQLTDFHKQVTRNVFFN

SEQ ID NO: 833890 - protein, 544 aa, Homo sapiens
ATVPCSEAPGSSVKPVLCLHSAARAGKWSLGSGAEQQRLSPGPPVPSLTCLPSARMATITCTRFTEEYQLFEELGKGAFSVVRRCVKVLAGQEYAAKIINTKKLSARDHQKLEREARICRLLKHPNIVRLHDSISEEGHHYLIFDLVTGGELFEDIVAREYYSEADASHCIQQILEAVLHCHQMGVVHRDLKPENLLLASKLKGAAVKLADFGLAIEVEGEQQAWFGFAGTPGYLSPEVLRKDPYGKPVDLWACGVILYILLVGYPPFWDEDQHRLYQQIKAGAYDFPSPEWDTVTPEAKDLINKMLTINPSKRITAAEALKHPWISHRSTVASCMHRQETVDCLKKFNARRKLKGAILTTMLATRNFSGGKSGGNKKSDGVKKRKSSSSVQLMESSESTNTTIEDEDTKVRKQEIIKVTEQLIEAISNGDFESYTKMCDPGMTAFEPEALGNLVEGLDFHRFYFENLWSRNSKPVHTTILNPHIHLMGDESACIAYIRITQYLDAGGIPRTAQSEETRVWHRRDGKWQIVHFHRSGAPSVLPH

SEQ ID NO: 833891 - protein, 533 aa, Homo sapiens
ATVPCSEAPGSSVKPVLCLHSAARAGKWSLGSGAEQQRLSPGPPVPSLTCLPSARMATITCTRFTEEYQLFEELGKGAFSVVRRCVKVLAGQEYAAKIINTKKLSARDHQKLEREARICRLLKHPNIVRLHDSISEEGHHYLIFDLVTGGELFEDIVAREYYSEADASHCIQQILEAVLHCHQMGVVHRDLKPENLLLASKLKGAAVKLADFGLAIEVEGEQQAWFGFAGTPGYLSPEVLRKDPYGKPVDLWACGVILYILLVGYPPFWDEDQHRLYQQIKAGAYDFPSPEWDTVTPEAKDLINKMLTINPSKRITAAEALKHPWISHRSTVASCMHRQETVDCLKKFNARRKLKGAILTTMLATRNFSGGKSGGNKKSDGVKESSESTNTTIEDEDTKVRKQEIIKVTEQLIEAISNGDFESYTKMCDPGMTAFEPEALGNLVEGLDFHRFYFENLWSRNSKPVHTTILNPHIHLMGDESACIAYIRITQYLDAGGIPRTAQSEETRVWHRRDGKWQIVHFHRSGAPSVLPH

SEQ ID NO: 833892 - protein, 515 aa, Homo sapiens
ATVPCSEAPGSSVKPVLCLHSAARAGKWSLGSGAEQQRLSPGPPVPSLTCLPSARMATITCTRFTEEYQLFEELGKGAFSVVRRCVKVLAGQEYAAKIINTKKLSARDHQKLEREARICRLLKHPNIVRLHDSISEEGHHYLIFDLVTGGELFEDIVAREYYSEADASHCIQQILEAVLHCHQMGVVHRDLKPENLLLASKLKGAAVKLADFGLAIEVEGEQQAWFGFAGTPGYLSPEVLRKDPYGKPVDLWACGVILYILLVGYPPFWDEDQHRLYQQIKAGAYDFPSPEWDTVTPEAKDLINKMLTINPSKRITAAEALKHPWISHRSTVASCMHRQETVDCLKKFNARRKLKGAILTTMLATRNFSGGKSGGNKKSDGVKESSESTNTTIEDEDTKAPVSAPYLELTSWSVTIAHEVGAAVNLILQLRKQRTERPVWSRNSKPVHTTILNPHIHLMGDESACIAYIRITQYLDAGGIPRTAQSEETRVWHRRDGKWQIVHFHRSGAPSVLPH

SEQ ID NO: 833893 - protein, 203 aa, Homo sapiens
ASSAPCSLPSGCVWMLLVLALWALVPCLALLTLYFFSSTGGKSGGNKKSDGVKESSESTNTTIEDEDTKVRKQEIIKVTEQLIEAISNGDFESYTKMCDPGMTAFEPEALGNLVEGLDFHRFYFENLWSRNSKPVHTTILNPHIHLMGDESACIAYIRITQYLDAGGIPRTAQSEETRVWHRRDGKWQIVHFHRSGAPSVLPH

SEQ ID NO: 833894 - protein, 124 aa, Homo sapiens
MRSRPSPSSLWLLSPRKMCDPGMTAFEPEALGNLVEGLDFHRFYFENLWSRNSKPVHTTILNPHIHLMGDESACIAYIRITQYLDAGGIPRTAQSEETRVWHRRDGKWQIVHFHRSGAPSVLPH

SEQ ID NO: 833895 - protein, 105 aa, Homo sapiens
  misc_feature (7)..(7): Xaa can be any naturally occurring amino acid
LDEESSXLATLPRLVSELLDFHRFYFENLWSRNSKPVHTTILNPHIHLMGDESACIAYIRITQYLDAGGIPRTAQSEETRVWHRRDGKWQIVHFHRSGAPSVLPH

SEQ ID NO: 833896 - protein, 467 aa, Homo sapiens
ATVPCSEAPGSSVKPVLCLHSAARAGKWSLGSGAEQQRLSPGPPVPSLTCLPSARMATITCTRFTEEYQLFEELGKGAFSVVRRCVKVLAGQEYAAKIINTKKLSARDHQKLEREARICRLLKHPNIVRLHDSISEEGHHYLIFDLVTGGELFEDIVAREYYSEADASHCIQQILEAVLHCHQMGVVHRDLKPENLLLASKLKGAAVKLADFGLAIEVEGEQQAWFGFAGTPGYLSPEVLRKDPYGKPVDLWACGVILYILLVGYPPFWDEDQHRLYQQIKAGAYDFPSPEWDTVTPEAKDLINKMLTINPSKRITAAEALKHPWISHRSTVASCMHRQETVDCLKKFNARRKLKGAILTTMLATRNFSGGKSGGNKKSDGVKESSESTNTTIEDEDTKVRKQEIIKVTEQLIEAISNGDFESYTKMCDPGMTAFEPEALGNLVEGLDFHRFYFENREQFLLSVVPV

SEQ ID NO: 833897 - protein, 415 aa, Homo sapiens
ATVPCSEAPGSSVKPVLCLHSAARAGKWSLGSGAEQQRLSPGPPVPSLTCLPSARMATITCTRFTEEYQLFEELGKGAFSVVRRCVKVLAGQEYAAKIINTKKLSARDHQKLEREARICRLLKHPNIVRLHDSISEEGHHYLIFDLVTGGELFEDIVAREYYSEADASHCIQQILEAVLHCHQMGVVHRDLKPENLLLASKLKGAAVKLADFGLAIEVEGEQQAWFGFAGTPGYLSPEVLRKDPYGKPVDLWACGVILYILLVGYPPFWDEDQHRLYQQIKAGAYDFPSPEWDTVTPEAKDLINKMLTINPSKRITAAEALKHPWISHRSTVASCMHRQETVDCLKKFNARRKLKGAILTTMLATRNFSGGKSGGNKKSDGVKESSESTNTTIEDEDTKVRKQEIIKVTEQLIEE

SEQ ID NO: 833898 - protein, 533 aa, Homo sapiens; identical to SEQ ID NO: 833891

SEQ ID NO: 833899 - protein, 533 aa, Homo sapiens; identical to SEQ ID NO: 833891

SEQ ID NO: 833900 - protein, 533 aa, Homo sapiens; identical to SEQ ID NO: 833891

SEQ ID NO: 833901 - protein, 533 aa, Homo sapiens; identical to SEQ ID NO: 833891

SEQ ID NO: 833902 - protein, 542 aa, Homo sapiens
ATVPCSEAPGSSVKPVLCLHSAARAGKWSLGSGAEQQRLSPGPPVPSLTCLPSARMATITCTRFTEEYQLFEELGKGAFSVVRRCVKVLAGQEYAAKIINTKKLSARDHQKLEREARICRLLKHPNIVRLHDSISEEGHHYLIFDLVTGGELFEDIVAREYYSEADASHCIQQILEAVLHCHQMGVVHRDLKPENLLLASKLKGAAVKLADFGLAIEVEGEQQAWFGFAGTPGYLSPEVLRKDPYGKPVDLWACGVILYILLVGYPPFWDEDQHRLYQQIKAGAYDFPSPEWDTVTPEAKDLINKMLTINPSKRITAAEALKHPWISHRSTVASCMHRQETVDCLKKFNARRKLKGAILTTMLATRNFSGGKSGGNKKSDGVKESSESTNTTIEDEDTKVRKQEIIKVTEQLIEAISNGDFESYTKMCDPGMTAFEPEALGNLVEGLDFHRFYFENLWSRNSKPVHTTILNPHIHLMGDESACIAYIRITQYLDAGGIPRTAQSEETRVWHRRDGKWQIVHFHRSGAPSVLPHRESVGTELL

SEQ ID NO: 833903 - protein, 465 aa, Homo sapiens
ATVPCSEAPGSSVKPVLCLHSAARAGKWSLGSGAEQQRLSPGPPVPSLTCLPSARMATITCTRFTEEYQLFEELGKGAFSVVRRCVKVLAGQEYAAKIINTKKLSARDHQKLEREARICRLLKHPNIVRLHDSISEEGHHYLIFDLVTGGELFEDIVAREYYSEADASHCIQQILEAVLHCHQMGVVHRDLKPENLLLASKLKGAAVKLADFGLAIEVEGEQQAWFGFAGTPGYLSPEVLRKDPYGKPVDLWACGVILYILLVGYPPFWDEDQHRLYQQIKAGAYDFPSPEWDTVTPEAKDLINKMLTINPSKRITAAEALKHPWISHRSTVASCMHRQETVDCLKKFNARRKLKGAILTTMLATRNFSGGKSGGNKKSDGVKESSESTNTTIEDEDTKVRKQEIIKVTEQLIEAISNGDFESYTKMCDPGMTAFEPEALGNLVEGLDFHRFYFENLWSRNSYLR

SEQ ID NO: 833904 - protein, 127 aa, Homo sapiens
MPKNKGKGGKNRRRGKNENESEKRELVFKEDGQEYAQVIKMLGNGRLEALCFDGVKRLCHIRGKLRKKDNKADVILKYNADEARSLKAYGELPEHAKINETDTFGPGDDDEIQFDDIGDDDEDIDDI

SEQ ID NO: 833905 - protein, 144 aa, Homo sapiens
MPKNKGKGGKNRRRGKNENESEKRELVFKEDGQEYAQVIKMLGNGRLEALCFDGVKRLCHIRGKLRKKVWINTSDIILVGLRDYQDNKADVILKYNADEARSLKAYGELPEHAKINETDTFGPGDDDEIQFDDIGDDDEDIDDI

SEQ ID NO: 833906 - protein, 144 aa, Homo sapiens; identical to SEQ ID NO: 833905

SEQ ID NO: 833907 - protein, 1118 aa, Homo sapiens
RAEGSLKIFISAPYWLINKTGLPLIFRQDNAKTDAAGQFEEHELARSLSPLLFCYADKEQPNLCTMRIGRGIHPEGMPGWCQGFSLDGGSGVRALKVIQQGNRPGLIYNIGIDVKKGRGRYIDTCMVIFAPRYLLDNKSSHKLAFAQREFARGQGTANPEGYISTLPGSSVVFHWPRNDYDQLLCVRLMDVPNCIWSGGFEVNKNNSFHINMRDTLGKCFFLRVEITLRGATYRISFSDTDQLPPPFRIDNFSKVPVVFTQHGVAEPRLRTEVKPMTSLDYAWDEPTLPPFITLTVKGAGSSEINCNMNDFQDNRQLYYENFIYIAATYTFSGLQEGTGRPVASNKAITCAELVLDVSPKTQRVILKKKEPGKRSQLWRMTGTGMLAHEGSSVPHNPNKPSAARSTEGSAILDIAGLAAVTDNRYEPLMLRKPDRRRSTTQTWSFREGKLTCGLHGLVVQAKGGLSGLFDGAEVVLGPDTSMELLGPVPPEQQFINQKMRPGSGMLSIRVIPDGPTRALQITDFCHRKSSRSYEVDELPVTEQELQKLKNPDTEQELEVLVRLEGGIGLSLINKVPEELVFASLTGINVHYTQLATSHMLELSIQDVQVDNQLIGTTQPFMLYVTPLSNENEVIETGPAVQVNAVKFPSKSALTNIYKHLMITAQRFTVQIEEKLLLKLLSFFGYDQAESEVEKYDENLHEKTAEQGGTPIRYYFENLKISIPQIKLSVFTSNKLPLDLKALKSTLGFPLIRFEDAVINLDPFTRVHPYETKEFIINDILKHFQEELLSQAARILGSVDFLGNPMGLLNDVSEGVTGLIKYGNVGGLIRNVTHGVSNSAAKFAGTLSDGLGKTMDNRHQSEREYIRYHAATSGEHLVAGIHGLAHGIIGGLTSVITSTVEGVKTEGGVSGFISGLGKGLVGTVTKPVAGALDFASETAQAVRDTATLSGPRTQAQRVRKPRCCTGPQGLLPRYSESQAEGQEQLFKLTDNIQDEFFIAVENIDSYCVLISSKAVYFLKSGDYVDREAIFLEVKYDDLYHCLVSKDHGKVYVQVTKKAVSTSSGVSIPGPSHQKPMVHVKSEVLAVKLSQEINYAKSLYYEQQLMLRLSENREQLELDS

SEQ ID NO: 833908 - protein, 189 aa, Homo sapiens
MYLLVCFSKYHLLQTGVHDIFRTQAQRVRKPRCCTGPQGLLPRYSESQAEGQEQLFKLTDNIQDEFFIAVENIDSYCVLISSKAVYFLKSGDYVDREAIFLEVKYDDLYHCLVSKDHGKVYVQVTKKAVSTSSGVSIPGPSHQKPMVHVKSEVLAVKLSQEINYAKSLYYEQQLMLRLSENREQLELDS

SEQ ID NO: 833909 - protein, 516 aa, Homo sapiens
ARVTALINIYKHLMITAQRFTVQIEEKLLLKLLSFFGYDQAESDLEFKLEEYLGSRARSCLFNAVFSTLGWNASVYLYSDSHLGACLPEVEKYDENLHEKTAEQGGTPIRYYFENLKISIPQIKLSVFTSNKLPLDLKALKSTLGFPLIRFEDAVINLDPFTRVHPYETKEFIINDILKHFQEELLSQAARILGSVDFLGNPMGLLNDVSEGVTGLIKYGNVGGLIRNVTHGVSNSAAKFAGTLSDGLGKTMDNRHQSEREYIRYHAATSGEHLVAGIHGLAHGIIGGLTSVITSTVEGVKTEGGVSGFISGLGKGLVGTVTKPVAGALDFASETAQAVRDTATLSGPRTQAQRVRKPRCCTGPQGLLPRYSESQAEGQEQLFKLTDNIQDEFFIAVENIDSYCVLISSKAVYFLKSGDYVDREAIFLEVKYDDLYHCLVSKDHGKVYVQVTKKAVSTSSGVSIPGPSHQKPMVHVKSEVLAVKLSQEINYAKSLYYEQQLMLRLSENREQLELDS

SEQ ID NO: 833910 - protein, 916 aa, Homo sapiens
LGASREAPPPRDTLGKCFFLRVEITLRGATYRISFSDTDQLPPPFRIDNFSKVPVVFTQHGVAEPRLRTEVKPMTSLDYAWDEPTLPPFITLTVKGAGSSEINCNMNDFQDNRQLYYENFIYIAATYTFSGLQEGTGRPVASNKAITCAELVLDVSPKTQRVILKKKEPGKRSQLWRMTGTGMLAHEGSSVPHNPNKPSAARSTEGSAILDIAGLAAVTDNRYEPLMLRKPDRRRSTTQTWSFREGKLTCGLHGLVVQAKGGLSGLFDGAEVVLGPDTSMELLGPVPPEQQFINQKMRPGSGMLSIRVIPDGPTRALQITDFCHRKSSRSYEVDELPVTEQELQKLKNPDTEQELEVLVRLEGGIGLSLINKVPEELVFASLTGINVHYTQLATSHMLELSIQDVQVDNQLIGTTQPFMLYVTPLSNENEVIETGPAVQVNAVKFPSKSALTNIYKHLMITAQRFTVQIEEKLLLKLLSFFGYDQAESEVEKYDENLHEKTAEQGGTPIRYYFENLKISIPQIKLSVFTSNKLPLDLKALKSTLGFPLIRFEDAVINLDPFTRVHPYETKEFIINDILKHFQEELLSQAARILGSVDFLGNPMGLLNDVSEGVTGLIKYGNVGGLIRNVTHGVSNSAAKFAGTLSDGLGKTMDNRHQSEREYIRYHAATSGEHLVAGIHGLAHGIIGGLTSVITSTVEGVKTEGGVSGFISGLGKGLVGTVTKPVAGALDFASETAQAVRDTATLSGPRTQAQRVRKPRCCTGPQGLLPRYSESQAEGQEQLFKLTDNIQDEFFIAVENIDSYCVLISSKAVYFLKSGDYVDREAIFLEVKYDDLYHCLVSKDHGKVYVQVTKKAVSTSSGVSIPGPSHQKPMVHVKSEVLAVKLSQEINYAKSLYYEQQLMLRLSENREQLELDS

SEQ ID NO: 833911 - protein, 916 aa, Homo sapiens; identical to SEQ ID NO: 833910

SEQ ID NO: 833912 - protein, 864 aa, Homo sapiens
LGASREAPPPRDTLGKCFFLRVEITLRGATYRISFSDTDQLPPPFRIDNFSKVPVVFTQHGVAEPRLRTEVKPMTSLDYAWDEPTLPPFITLTVKGAGSSEINCNMNDFQDNRQLYYENFIYIAATYTFSGLQEGTGRPVASNKAITCAELVLDVSPKTQRVILKKKEPGKRSQLWRMTGTGMLAHEGSSVPHNPNKPSAARSTEGSAILDIAGLAAVTDNRYEPLMLRKPDRRRSTTQTWSFREGKLTCGLHGLVVQAKGGLSGLFDGAEVVLGPDTSMELLGPVPPEQQFINQKMRPGSGMLSIRVIPDGPTRALQITDFCHRKSSRSYEVDELPVTEQELQKLKNPDTEQELEVLVRLEGGIGLSLINKVPEELVFASLTGINVHYTQLATSHMLELSIQDVQVDNQLIGTTQPFMLYVTPLSNENEVIETGPAVQVNAVKFPSKSALTNIYKHLMITAQRFTVQIEEKLLLKLLSFFGYDQAESEVEKYDENLHEKTAEQGGTPIRYYFENLKISIPQIKLSVFTSNKLPLDLKALKSTLGFPLIRFEDAVINLDPFTRVHPYETKEFIINDILKHFQEELLSQAARILGSVDFLGNPMGLLNDVSEGVTGLIKYGNVGGLIRNVTHGVSNSAAKFAGTLSDGLGKTMDNRHQSEREYIRYHAATSGEHLVAGIHGLAHGIIGGLTSVITSTVEGVKTEGGVSGFISGLGKGLVGTVTKPVAGALDFASETAQAVRDTATLSGPRTQAQRVRKPRCCTGPQGLLPRYSESQAEGQEQLFKLTDNIQDEFFIAVENIDSYCVLISSKAVYFLKSGDYVDREAIFLEVKYDDLYHCLVSKDHGKVYVQVTNKRLGNPLERPQ

SEQ ID NO: 833913 - protein, 916 aa, Homo sapiens; identical to SEQ ID NO: 833910

SEQ ID NO: 833914 - protein, 181 aa, Homo sapiens
FKSEFLYLKHLMITAQRFTVQIEEKLLLKLLSFFGYDQAESEVEKYDENLHEKTAEQGGTPIRYYFENLKISIPQIKLSVFTSNKLPLDLKALKSTLGFPLIRFEDAVINLDPFTRVHPYETKEFIINDILKHFQEDILRARRKDRSSSSNSQTTYRTNSSSLWRTLTATACSSPPKLFTS

SEQ ID NO: 833915 - protein, 916 aa, Homo sapiens; identical to SEQ ID NO: 833910

SEQ ID NO: 833916 - protein, 230 aa, Homo sapiens
VVVGVRVSVGGLVGEVACACRDCIPETMAEGDNRSTNLLAAETASLEEQLQGWGEVMLMADKVLRWERAWFPPAIMGVVSLVFLIIYYLDPSVLSGVSCFVMFLCLADYLVPILAPRIFGSNKWTTEQQQRFHEICSNLVKTRRRAVGWWKRLFTLKEEKPKMYFMTMIVSLAAVAWVGQQVHNLLLTYLIVTSLLLLPGLNQHGIILKYIGMAKREINKLLKQKEKKNE

SEQ ID NO: 833917 - protein, 230 aa, Homo sapiens; identical to SEQ ID NO: 833916

SEQ ID NO: 833918 - protein, 230 aa, Homo sapiens; identical to SEQ ID NO: 833916

SEQ ID NO: 833919 - protein, 230 aa, Homo sapiens; identical to SEQ ID NO: 833916

SEQ ID NO: 833920 - protein, 230 aa, Homo sapiens; identical to SEQ ID NO: 833916

SEQ ID NO: 833921 - protein, 230 aa, Homo sapiens; identical to SEQ ID NO: 833916

SEQ ID NO: 833922 - protein, 288 aa, Homo sapiens
VTSRKHQINHRSKNNCLWTAAMRLTVLCAVCLLPGSLALPLPQEAGGMSELQWEQAQDYLKRFYLYDSETKNANSLEAKLKEMQKFFGLPITGMLNSRVIEIMQKPRCGVPDVAEYSLFPNSPKWTSKVVTYRIVSYTRDLPHITVDRLVSKALNMWGKEIPLHFRKVVWGTADIMIGFARGAHGDSYPFDGPGNTLAHAFAPGTGLGGDAHFDEDERWTDGSSLGINFLYAATHELGHSLGMGHSSDPNAVMYPTYGNGDPQNFKLSQDDIKGIQKLYGKRSNSRKK

SEQ ID NO: 833923 - protein, 159 aa, Homo sapiens
HCESHSCRPETIVLGPMVDLVSKALNMWGKEIPLHFRKVVWGTADIMIGFARGAHGDSYPFDGPGNTLAHAFAPGTGLGGDAHFDEDERWTDGSSLGINFLYAATHELGHSLGMGHSSDPNAVMYPTYGNGDPQNFKLSQDDIKGIQKLYGKRSNSRKK

SEQ ID NO: 833924 - protein, 136 aa, Homo sapiens
RLWKHRYPGFQGKVVVGCNCCHHDQALREVAHGDSYPFDGPGNTLAHAFAPGTGLGGDAHFDEDERWTDGSSLGINFLYAATHELGHSLGMGHSSDPNAVMYPTYGNGDPQNFKLSQDDIKGIQKLYGKRSNSRKK

SEQ ID NO: 833925 - protein, 288 aa, Homo sapiens; identical to SEQ ID NO: 833922

SEQ ID NO: 833926 - protein, 288 aa, Homo sapiens; identical to SEQ ID NO: 833922

SEQ ID NO: 833927 - protein, 270 aa, Homo sapiens
VTSRKHQINHRSKNNCLWTAAMRLTVLCAVCLLPGSLALPLPQEAGGMSELQWEQAQDYLKRFYLYDSETKNANSLEAKLKEMQKFFGLPITGMLNSRVIEIMQKPRCGVPDVAEYSLFPNSPKWTSKVVTYRIVSYTRDLPHITVDRLVSKALNMWGKEIPLHFRKVVWGTADIMIGFARGAHGDSYPFDGPGNTLAHAFAPGTGLGGDAHFDEDERWTDGSSLGINFLYAATHELGHSLGMGHSSDPNADDIKGIQKLYGKRSNSRKK

SEQ ID NO: 833928 - protein, 227 aa, Homo sapiens
GSRVRHVAPRGQSPSTPPNLSDNTCHFEDEKICGYTQDLTDNFDWTRQNALTQNPKRSPNTGPPTDISGTPEGYYMFIETSRPRELGDRARLVSPLYNASAKFYCVSFFYHMYGKHIGSLNLLVRSRNKGALDTHAWSLSGNKGNVWQQAHVPISPSGPFQIIFEGVRGPGYLGDIAIDDVTLKKGECPRKQTDPNKVVVMPGSGAPCQSSPQLWGPMAIFLLALQR

SEQ ID NO: 833929 - protein, 245 aa, Homo sapiens
GSRVRHVAPRGQSPSTPPNLSDNTCHFEDEKICGYTQDLTDNFDWTRQNALTQNPKRSPNTGPPTDISGTPEGYYMFIETSRPRELGDRARLVSPLYNASAKFYCVSFFYHMYGKHIGSLNLLVRSRNKGALDTHAWSLSGNKGNVWQQAHVPISPSGPFQIIFEGVRGPGYLGDIAIDDVTLKKGECPRKQTDPNKGARREGGGGAESGGSCAWRGFLSVEGGCLGLNRGSECLSDGNHVALTV

SEQ ID NO: 833930 - protein, 549 aa, Homo sapiens
HRGFERLTLPKRTMGSNKSKPKDASQRRRSLEPAENVHGAGGGAFPASQTPSKPASADGHRGPSAAFAPAAAEPKLFGGFNSSDTVTSPQRAGPLAGGVTTFVALYDYESRTETDLSFKKGERLQIVNNTEGDWWLAHSLSTGQTGYIPSNYVAPSDSIQAEEWYFGKITRRESERLLLNAENPRGTFLVRESETTKGAYCLSVSDFDNAKGLNVKHYKIRKLDSGGFYITSRTQFNSLQQLVAYYSKHADGLCHRLTTVCPTSKPQTQGLAKDAWEIPRESLRLEVKLGQGCFGEVWMGTWNGTTRVAIKTLKPGTMSPEAFLQEAQVMKKLRHEKLVQLYAVVSEEPIYIVTEYMSKGSLLDFLKGETGKYLRLPQLVDMAAQIASGMAYVERMNYVHRDLRAANILVGENLVCKVADFGLARLIEDNEYTARQGAKFPIKWTAPEAALYGRFTIKSDVWSFGILLTELTTKGRVPYPGMVNREVLDQVERGYRMPCPPECPESLHDLMCQCWRKEPEERPTFEYLQAFLEDYFTSTEPQYQPGENL

SEQ ID NO: 833931 - protein, 536 aa, Homo sapiens
MGSNKSKPKDASQRRRSLEPAENVHGAGGGAFPASQTPSKPASADGHRGPSAAFAPAAAEPKLFGGFNSSDTVTSPQRAGPLAGGVTTFVALYDYESRTETDLSFKKGERLQIVNNTEGDWWLAHSLSTGQTGYIPSNYVAPSDSIQAEEWYFGKITRRESERLLLNAENPRGTFLVRESETTKGAYCLSVSDFDNAKGLNVKHYKIRKLDSGGFYITSRTQFNSLQQLVAYYSKHADGLCHRLTTVCPTSKPQTQGLAKDAWEIPRESLRLEVKLGQGCFGEVWMGTWNGTTRVAIKTLKPGTMSPEAFLQEAQVMKKLRHEKLVQLYAVVSEEPIYIVTEYMSKGSLLDFLKGETGKYLRLPQLVDMAAQIASGMAYVERMNYVHRDLRAANILVGENLVCKVADFGLARLIEDNEYTARQGAKFPIKWTAPEAALYGRFTIKSDVWSFGILLTELTTKGRVPYPGMVNREVLDQVERGYRMPCPPECPESLHDLMCQCWRKEPEERPTFEYLQAFLEDYFTSTEPQYQPGENL

SEQ ID NO: 833932 - protein, 536 aa, Homo sapiens; identical to SEQ ID NO: 833931

SEQ ID NO: 833933 - protein, 536 aa, Homo sapiens; identical to SEQ ID NO: 833931

SEQ ID NO: 833934 - protein, 536 aa, Homo sapiens; identical to SEQ ID NO: 833931

SEQ ID NO: 833935 - protein, 536 aa, Homo sapiens; identical to SEQ ID NO: 833931

SEQ ID NO: 833936 - protein, 373 aa, Homo sapiens [sequence omitted]

SEQ ID NO: 833937 - protein, 180 aa, Homo sapiens
MGSNKSKPKDASQRRRSLEPAENVHGAGGGAFPASQTPSKPASADGHRGPSAAFAPAAAEPKLFGGFNSSDTVTSPQRAGPLAGGVTTFVALYDYESRTETDLSFKKGERLQIVNNTEGDWWLAHSLSTGQTGYIPSNYVAPSDSIQAEEWYFGKITRREVEVEVSQDCATTLQPGKQSK

SEQ ID NO: 833938 - protein, 100 aa, Homo sapiens
SPSFFLSCHSSWCLSNRAVMTGGQAALTFLVPAGAKFPIKWTAPEAALYGRFTIKSDVWSFGILLTELTTKGRVPYPGKKVLMACLWSLNPSALVALGKS

SEQ ID NO: 833939 - protein, 251 aa, Homo sapiens
MGTWNGTTRVAIKTLKPGTMSPEAFLQEAQVMKKLRHEKLVQLYAVVSEEPIYIVTEYMSKGSLLDFLKGETGKYLRLPQLVDMAAQIASGMAYVERMNYVHRDLRAANILVGENLVCKVADFGLARLIEDNEYTARQGAKFPIKWTAPEAALYGRFTIKSDVWSFGILLTELTTKGRVPYPGMVNREVLDQVERGYRMPCPPECPESLHDLMCQCWRKEPEERPTFEYLQAFLEDYFTSTEPQYQPGENL

SEQ ID NO: 833940 - protein, 592 aa, Homo sapiens
PPPPFLSRSVSPGPESIPAWEPERPGRRLPVPLDVPRSALPCVRLPVSPPARRPRTMGSNKSKPKDASQRRRSLEPAENVHGAGGGAFPASQTPSKPASADGHRGPSAAFAPAAAEPKLFGGFNSSDTVTSPQRAGPLAGGVTTFVALYDYESRTETDLSFKKGERLQIVNNTEGDWWLAHSLSTGQTGYIPSNYVAPSDSIQAEEWYFGKITRRESERLLLNAENPRGTFLVRESETTKGAYCLSVSDFDNAKGLNVKHYKIRKLDSGGFYITSRTQFNSLQQLVAYYSKHADGLCHRLTTVCPTSKPQTQGLAKDAWEIPRESLRLEVKLGQGCFGEVWMGTWNGTTRVAIKTLKPGTMSPEAFLQEAQVMKKLRHEKLVQLYAVVSEEPIYIVTEYMSKGSLLDFLKGETGKYLRLPQLVDMAAQIASGMAYVERMNYVHRDLRAANILVGENLVCKVADFGLARLIEDNEYTARQGAKFPIKWTAPEAALYGRFTIKSDVWSFGILLTELTTKGRVPYPGMVNREVLDQVERGYRMPCPPECPESLHDLMCQCWRKEPEERPTFEYLQAFLEDYFTSTEPQYQPGENL

SEQ ID NO: 833941 - protein, 596 aa, Homo sapiens
MGSNKSKPKDASQRRRSLEPAENVHGAGGGAFPASQTPSKPASADGHRGPSAAFAPAAAEPKLFGGFNSSDTVTSPQRAGPLAGGVTTFVALYDYESRTETDLSFKKGERLQIVNNTEGDWWLAHSLSTGQTGYIPSNYVAPSDSIQAEEWVPSLAASTRRPWTLPVQSASPGLGWEVWLSSAPAISREKHCEWAEAWTVSTILRPPTPRWYFGKITRRESERLLLNAENPRGTFLVRESETTKGAYCLSVSDFDNAKGLNVKHYKIRKLDSGGFYITSRTQFNSLQQLVAYYSKHADGLCHRLTTVCPTSKPQTQGLAKDAWEIPRESLRLEVKLGQGCFGEVWMGTWNGTTRVAIKTLKPGTMSPEAFLQEAQVMKKLRHEKLVQLYAVVSEEPIYIVTEYMSKGSLLDFLKGETGKYLRLPQLVDMAAQIASGMAYVERMNYVHRDLRAANILVGENLVCKVADFGLARLIEDNEYTARQGAKFPIKWTAPEAALYGRFTIKSDVWSFGILLTELTTKGRVPYPGMVNREVLDQVERGYRMPCPPECPESLHDLMCQCWRKEPEERPTFEYLQAFLEDYFTSTEPQYQPGENL

SEQ ID NO: 833942 - protein, 536 aa, Homo sapiens; identical to SEQ ID NO: 833931

SEQ ID NO: 833943 - protein, 408 aa, Homo sapiens
MGSNKSKPKDASQRRRSLEPAENVHGAGGGAFPASQTPSKPASADGHRGPSAAFAPAAAEPKLFGGFNSSDTVTSPQRAGPLAGGVTTFVALYDYESRTETDLSFKKGERLQIVNNTEGDWWLAHSLSTGQTGYIPSNYVAPSDSIQAEEWYFGKITRRESERLLLNAENPRGTFLVRESETTKGAYCLSVSDFDNAKGLNVKHYKIRKLDSGGFYITSRTQFNSLQQLVAYYSKHADGLCHRLTTVCPTSKPQTQGLAKDAWEIPRESLRLEVKLGQGCFGEVWMGTWNGTTRVAIKTLKPGTMSPEAFLQEAQVMKKLRHEKLVQLYAVVSEEPIYIVTEYMSKGSLLDFLKGETGKYLRLPQLVDMAAQVSQPLPPPHTLGPQAPRPIWCSQFWPLECPLQEACL

SEQ ID NO: 833944 - protein, 442 aa, Homo sapiens
MQERISYTPPESPVPSYASSTPLHVPVPRALRMEEDSIRLPAHLRLQPIYWSRDDVAQWLKWAENEFSLRPIDSNTFEMNGKALLLLTKEDFRYRSPHSGDVLYELLQHILKQRKPRILFSPFFHPGNSIHTQPEVILHQNHEEDNCVQRTPRPSVDNVHHNPPTIELLHRSRSPITTNHRPSPDPEQRPLRSPLDNMIRRLSPAERAQGPRPHQENNHQESYPLSVSPMENNHCPASSESHPKPSSPRQESTRVIQLMPSPIMHPLILNPRHSVDFKQSRLSEDGLHREGKPINLSHREDLAYMNHIMVSVSPPEEHAMPIGRIADCRLLWDYVYQLLSDSRYENFIRWEDKESKIFRIVDPNGLARLWGNHKNRTNMTYEKMSRALRHYYKLNIIRKEPGQRLLFRFMKTPDEIMSGRTDRLEHLESQELDEQIYQEDEC

SEQ ID NO: 833945 - protein, 106 aa, Homo sapiens
MQERISYTPPESPVPSYASSTPLHVPVPRALRMEEDSIRLPAHLRLQPIYWSRDDVAQWLKWAENEFSLRPIDSNTFEMNGKALLLLTKEDFRYRSPHSDLDSDVT

SEQ ID NO: 833946 - protein, 452 aa, Homo sapiens
MSETPAQCSIKQERISYTPPESPVPSYASSTPLHVPVPRALRMEEDSIRLPAHLRLQPIYWSRDDVAQWLKWAENEFSLRPIDSNTFEMNGKALLLLTKEDFRYRSPHSGDVLYELLQHILKQRKPRILFSPFFHPGNSIHTQPEVILHQNHEEDNCVQRTPRPSVDNVHHNPPTIELLHRSRSPITTNHRPSPDPEQRPLRSPLDNMIRRLSPAERAQGPRPHQENNHQESYPLSVSPMENNHCPASSESHPKPSSPRQESTRVIQLMPSPIMHPLILNPRHSVDFKQSRLSEDGLHREGKPINLSHREDLAYMNHIMVSVSPPEEHAMPIGRIADCRLLWDYVYQLLSDSRYENFIRWEDKESKIFRIVDPNGLARLWGNHKNRTNMTYEKMSRALRHYYKLNIIRKEPGQRLLFRFMKTPDEIMSGRTDRLEHLESQELDEQIYQEDEC

SEQ ID NO: 833947 - protein, 183 aa, Homo sapiens
MSETPAQCSIKQERISYTPPESPVPSYASSTPLHVPVPRALRMEEDSIRLPAHLRLQPIYWSRDDVAQWLKWAENEFSLRPIDSNTFEMNGKALLLLTKEDFRYRSPHSGDVLYELLQHILKQRKPRILFSPFFHPGNSIHTQPEVILHQNHEEEALQRPVASDFEPQGLSEAARWNSKENLL

SEQ ID NO: 833948 - protein, 191 aa, Homo sapiens
NKYGRRSKFGMKGPVAVISGEEDSASPLHHINHGITTPSSLDAGPDTVVIGMTRIPVIENPQYFRQGHNCHKPDTYCRLLWDYVYQLLSDSRYENFIRWEDKESKIFRIVDPNGLARLWGNHKNRTNMTYEKMSRALRHYYKLNIIRKEPGQRLLFRFMKTPDEIMSGRTDRLEHLESQELDEQIYQEDEC

SEQ ID NO: 833949 - protein, 211 aa, Homo sapiens
MTQEPFREELAYDRMPTLERGRQDPASYAPDAKPSDLQLSKRLPPCFSHKTWVFSVLMGCIPSAIVSFTVSRRNANVIPNFQILFVSTFAVTTTCLIWFGCKLVLNPSAININFNLILLLLLELLMAATVIIAARSSEEDCKKKKGSMSDSANILDEVPFPARVLKSYSVVEVIAGISAVLGGIIALNVDDSVSGPHLSVTFFWILVAGRE

SEQ ID NO: 833950 - protein, 358 aa, Homo sapiens
MTQEPFREELAYDRMPTLERGRQDPASYAPDAKPSDLQLSKRLPPCFSHKTWVFSVLMGSCLLVTSGFSLYLGNVFPAEMDYLRCAAGSCIPSAIVSFTVSRRNANVIPNFQILFVSTFAVTTTCLIWFGCKLVLNPSAININFNLILLLLLELLMAATVIIAARSSEEDCKKKKGSMSDSANILDEVPFPARVLKSYSVVEVIAGISAVLGGIIALNVDDSVSGPHLSVTFFWILVAVEVLIAISSLTSPLLFTASGYLSFSIMRIVEMFKDYPPAIKPSYDVLLLLLLLVLLLQAGLNTGTAIQCVRFKVSARLQGASWDTQNGPQERLAGEVARSPLKEFDKEKAWRAVVVQMAQ

SEQ ID NO: 833951 - protein, 347 aa, Homo sapiens
MTQEPFREELAYDRMPTLERGRQDPASYAPDAKPSDLQLSKRLPPCFSHKTWVFSVLMGCIPSAIVSFTVSRRNANVIPNFQILFVSTFAVTTTCLIWFGCKLVLNPSAININFNLILLLLLELLMAATVIIAARSSEEDCKKKKGSMSDSANILDEVPFPARVLKSYSVVEVIAGISAVLGGIIALNVDDSVSGPHLSVTFFWILVACFPSAIASHVAAECPSKCLVEVLIAISSLTSPLLFTASGYLSFSIMRIVEMFKDYPPAIKPSYDVLLLLLLLVLLLQAGLNTGTAIQCVRFKVSARLQGASWDTQNGPQERLAGEVARSPLKEFDKEKAWRAVVVQMAQ

SEQ ID NO: 833952 - protein, 179 aa, Homo sapiens
MVVEVIAGISAVLGGIIALNVDDSVSGPHLSVTFFWILVACFPSAIASHVAAECPSKCLVEVLIAISSLTSPLLFTASGYLSFSIMRIVEMFKDYPPAIKPSYDVLLLLLLLVLLLQAGLNTGTAIQCVRFKVSARLQGASWDTQNGPQERLAGEVARSPLKEFDKEKAWRAVVVQMAQ

SEQ ID NO: 833953 - protein, 377 aa, Homo sapiens
MTQEPFREELAYDRMPTLERGRQDPASYAPDAKPSDLQLSKRLPPCFSHKTWVFSVLMGSCLLVTSGFSLYLGNVFPAEMDYLRCAAGSCIPSAIVSFTVSRRNANVIPNFQILFVSTFAVTTTCLIWFGCKLVLNPSAININFNLILLLLLELLMAATVIIAARSSEEDCKKKKGSMSDSANILDEVPFPARVLKSYSVVEVIAGISAVLGGIIALNVDDSVSGPHLSVTFFWILVACFPSAIASHVAAECPSKCLVEVLIAISSLTSPLLFTASGYLSFSIMRIVEMFKDYPPAIKPSYDVLLLLLLLVLLLQAGLNTGTAIQCVRFKVSARLQGASWDTQNGPQERLAGEVARSPLKEFDKEKAWRAVVVQMAQ

SEQ ID NO: 833954 - protein, 377 aa, Homo sapiens; identical to SEQ ID NO: 833953

SEQ ID NO: 833955 - protein, 377 aa, Homo sapiens; identical to SEQ ID NO: 833953

SEQ ID NO: 833956 - protein, 241 aa, Homo sapiens
MTQEPFREELAYDRMPTLERGRQDPASYAPDAKPSDLQLSKRLPPCFSHKTWVFSVLMGSCLLVTSGFSLYLGNVFPAEMDYLRCAAGSCIPSAIVSFTVSRRNANVIPNFQILFVSTFAVTTTCLIWFGCKLVLNPSAININFNLILLLLLELLMAATVIIAARSSEEDCKKKKGSMSDSANILDEVPFPARVLKSYSVVEVIAGISAVLGGIIALNVDDSVSGPHLSVTFFWILVAGRE

SEQ ID NO: 833957 - protein, 43 aa, Homo sapiens
MTQEPFREELAYDRMPTLERGRQDPASYAPDAKPSDLQLSKRL

SEQ ID NO: 833958 - protein, 377 aa, Homo sapiens; identical to SEQ ID NO: 833953

SEQ ID NO: 833959 - protein, 377 aa, Homo sapiens; identical to SEQ ID NO: 833953

SEQ ID NO: 833960 - protein, 163 aa, Homo sapiens
ATETENSHGCPPKRVCDRENDSLQCFPSAIASHVAAECPSKCLVEVLIAISSLTSPLLFTASGYLSFSIMRIVEMFKDYPPAIKPSYDVLLLLLLLVLLLQAGLNTGTAIQCVRFKVSARLQGASWDTQNGPQERLAGEVARSPLKEFDKEKAWRAVVVQMAQ

SEQ ID NO: 833961 - protein, 377 aa, Homo sapiens; identical to SEQ ID NO: 833953

SEQ ID NO: 833962 - protein, 377 aa, Homo sapiens; identical to SEQ ID NO: 833953

SEQ ID NO: 833963 - protein, 275 aa, Homo sapiens
MTQEPFREELAYDRMPTLERGRQDPASYAPDAKPSDLQLSKRLPPCFSHKTWVFSVLMGSCLLVTSGFSLYLGNVFPAEMDYLRCAAGSCIPSAIVSFTVSRRNANVIPNFQILFVSTFAVTTTCLIWFGCKLVLNPSAININFNLILLLLLELLMAATVIIAARSSEEDCKKKKGSMSDSANILDEVPFPARVLKSYSVVEVIAGISAVLGGIIALNVDDSVSGPHLSVTFFWILVALERFCWLALSYFLILERLKNPEKWGLKELSLSVYIFV

SEQ ID NO: 833964 - protein, 163 aa, Homo sapiens; identical to SEQ ID NO: 833960

SEQ ID NO: 833965 - protein, 61 aa, Homo sapiens
MLGVAYEAPSLATGYGAYLAQPLLREVLEKQPVLSQTEARDLVERCMRVLYYRDAVLTPVS

SEQ ID NO: 833966 - protein, 335 aa, Homo sapiens
KLRRPPVCSKGWTVMAARRGALIVLEGVDRAGKSTQSRKLVEALCAAGHRAELLRFPERSTEIGKLLSSYLKKKSDVEDHSVHLLFSANRWEQVPLIKEKLSQGVTLVVDRYAFSGVAFTGAKENFSLDWCKQPDVGLPKPDLVLFLQLQLADAAKRGAFGHERYENGAFQERALRCFHQLMKDTTLNWKMVDASKSIEAVHEELRVLSEDAIRTATEKPLGELMEVTQGCPLETPLPAVPREVGDSRKAPSPAEIQTPQLQELFPGSRDLQAASSAPELGCTGDPRGGDLGSVDMSRAMEQSPALSPVLMALCCIFLLKFSDNSEQFHCDHCKW

SEQ ID NO: 833967 - protein, 152 aa, Homo sapiens
MLSMLRAAAWKGLCMGRRPFFPGCQARQEPTGNAHHGGSLLHMFFFYPINLCTFDDFDIIFASLIPRVETVSGAVVYARGPVAVRLSSHRVCLVSARGRAVCSIACSFRLGDECFDPARSSAKCIHAVVQQPLDHTALWFMFEITDFKCHVH

SEQ ID NO: 833968 - protein, 75 aa, Homo sapiens
RRRLRSGTAPNQQQPLRWPGNEKGRKMVAAKKTKKSLESINSRLQLVMKSGKYVLGYKQTLKMIRQGKAKIGHSR

SEQ ID NO: 833969 - protein, 93 aa, Homo sapiens
MRKILQSVHTWLSLIQVTLTIIEKRCQNRLVKSKTFSPSKISAGKPLNLGKVSRVDENLLAVKDEQEDKKTETHNEKERMRREMYGEEGRRGG

SEQ ID NO: 833970 - protein, 107 aa, Homo sapiens
  misc_feature (72)..(72): Xaa can be any naturally occurring amino acid
MRGIKRCIEALLSASSRHGIPQKPQPLVSLTGTGLTLPHSGARNASLFAFGPNWGALPSRTVPQVGTKLRLXVVARAQEAAGKKCTLPSFNLNCPQYLRAQTTECEG

SEQ ID NO: 833971 - protein, 74 aa, Homo sapiens
  misc_feature (38)..(38): Xaa can be any naturally occurring amino acid
MYVTGAPVAYEPVPRTQFSLFPRGDRTGPVSPYNGEAXIKFRNKPEFYPGFRHSWAQKDTRHTKTKTPTQQTRV

SEQ ID NO: 833972 - protein, 90 aa, Homo sapiens
TASNAARVTGGWDNLLAVIPGGSSTPLIPKSVCETVLMDFDALVQAQTGLGTAAALDAVTASNALGAVPLLRQEDGGRKEDEKVAGVDQL

SEQ ID NO: 833973 - protein, 74 aa, Homo sapiens
MYVPCVFILGPDPPAPARLAVGWLLACPPCMRFALSLQAWHIASLHTPRALGPQAWDPVTMRVFFAHSVRLQWE

SEQ ID NO: 833974 - protein, 83 aa, Homo sapiens
MNDRSSRRRTMKDDETSRSPFLDEAPLTHDLFAEPSGEIRDLGGWSRPGLMKGQTSAWSGESVRALEDREKDPGAVTISSSDE

SEQ ID NO: 833975 - protein, 61 aa, Homo sapiens; identical to SEQ ID NO: 833965

SEQ ID NO: 833976 - protein, 107 aa, Homo sapiens; identical to SEQ ID NO: 833970
  misc_feature (72)..(72): Xaa can be any naturally occurring amino acid

SEQ ID NO: 833977 - protein, 269 aa, Homo sapiens
ARGVGKRARQLNDKSVEDGWGPAPGGGGARLRAAGRVRTAEAAGLVPALQWVICVSQPQKTSEMAANKSKGQSSLALHKVIMVGSGGVGKSALTLQFMYDEFVEDYEPTKADSYRKKVVLDGEEVQIDILDTAGQEDYAAIRDNYFRSGEGFLLVFSITEHESFTATAEFREQILRVKAEEDKIPLLVVGNKSDLEERRQVPVEEARSKAEEWGVQYVETSAKTRANVDKVFFDLMREIRTKKMSENKDKNGKKSSKNKKSFKERCCLL

SEQ ID NO: 833978 - protein, 206 aa, Homo sapiens
MAANKSKGQSSLALHKVIMVGSGGVGKSALTLQFMYDEFVEDYEPTKADSYRKKVVLDGEEVQIDILDTAGQEDYAAIRDNYFRSGEGFLLVFSITEHESFTATAEFREQILRVKAEEDKIPLLVVGNKSDLEERRQVPVEEARSKAEEWGVQYVETSAKTRANVDKVFFDLMREIRTKKMSENKDKNGKKSSKNKKSFKERCCLL

SEQ ID NO: 833979 - protein, 195 aa, Homo sapiens
MTRNVSKSLAYDKKKYTANKKVEGILEFVEDYEPTKADSYRKKVVLDGEEVQIDILDTAGQEDYAAIRDNYFRSGEGFLLVFSITEHESFTATAEFREQILRVKAEEDKIPLLVVGNKSDLEERRQVPVEEARSKAEEWGVQYVETSAKTRANVDKVFFDLMREIRTKKMSENKDKNGKKSSKNKKSFKERCCLL

SEQ ID NO: 833980 - protein, 114 aa, Homo sapiens
  misc_feature (1)..(1): Xaa can be any naturally occurring amino acid
XFGMRYQSEVGGGGTGPSLQWVICVSQPQKTSEMAANKSKGQSSLALHKVIMVGSGGVGKSALTLQFMYDEFVEDYEPTKADSYRKKVVLDGEEVQIDILDTAGQEDYAAIRDK

SEQ ID NO: 833981 - protein, 269 aa, Homo sapiens; identical to SEQ ID NO: 833977

SEQ ID NO: 833982 - protein, 269 aa, Homo sapiens; identical to SEQ ID NO: 833977

SEQ ID NO: 833983 - protein, 112 aa, Homo sapiens
ARGVGKRARQLNDKSVEDGWGPAPGGGGARLRAAGRVRTAEAAGLVPALQWVICVSQPQKTSEMAANKSKGQSSLALHKVNACVCLISITAHGGLVSLLLSVTHTLPKDVMS

SEQ ID NO: 833984 - protein, 404 aa, Homo sapiens
RDLSITESTSGSTYHTAVPWRGGAGAGRSRKGEAEQGRREPIGLAARGGGGGVNARDPNTRAGRTLQPRRSAAFRRGAGEPPPHLRTPRLRGPDPPASPAPPSQGERGDGCREARATSPSHFSFSPRAPPVFPLSPLITAGWLGEEGRWPRRSLGGRLPLSRQPPWEPEDGGGSSGRPRGGGAEIGGAERGSRERQRPVVAHQNRNQRQPHGHLSRPFLLEPARGACSRDPFLSASPRLPRSRSLGGAVGSVASGARAAQSPFSIPNSSSGPYGSQDSVHSSPEDGGGGRDRPVGGSPGGPRLVIGSLPAHLSPHMFGGFKCPVCSKFVSSDEMDLHLVMCLTKPRITYNEDVLSKDAGECAICLEELQQGDTIARLPCLCIYHKGCIDEWFEVNRSCPEHPSD

SEQ ID NO: 833985 - protein, 242 aa, Homo sapiens
MGAKQSGPAAANGRTRAYSGSDLPSSSSGGANGTAGGGGGARAAAAGRFPAQVPSAHQPSASGGAAAAAAAPAAPAAPRSRSLGGAVGSVASGARAAQSPFSIPNSSSGPYGSQDSVHSSPEDGGGGRDRPVGGSPGGPRLVIGSLPAHLSPHMFGGFKCPVCSKFVSSDEMDLHLVMCLTKPRITYNEDVLSKDAGECAICLEELQQGDTIARLPCLCIYHKGCIDEWFEVNRSCPEHPSD

SEQ ID NO: 833986 - protein, 157 aa, Homo sapiens
MGAKQSGPAAANGRTRAYSGSDLPSSSSGGANGTAGGGGGARAAAAGRFPAQVPSAHQPSASGGAAAAAAAPAAPAAPRSRSLGGAVGSVASGARAAQSPFSIPNSSSGPYGSQDSVHSSPEDGGGGRDRPVGGSPGGPRLVIGSLPAHLSPHMFGD

SEQ ID NO: 833987 - protein, 242 aa, Homo sapiens; identical to SEQ ID NO: 833985

SEQ ID NO: 833988 - protein, 242 aa, Homo sapiens; identical to SEQ ID NO: 833985

SEQ ID NO: 833989 - protein, 224 aa, Homo sapiens
MGAKQSGPAAANGRTRAYSGSDLPSSSSGGANGTAGGGGGARAAAAGRFPAQVPSAHQPSASGGAAAAAAAPAAPAAPRSRSLGGAVGSVASGARAAQSPFSIPNSSSGPYGSQDSVHSSPEDGGGGRDRPVGGSPGGPRLVIGSLPAHLSPHMFGGFKCPVCSKFVSSDEMDLHLVMCLTKPRITYNEDVLSKDAGECAICLEELQQGDTIARLPCLCIYHKG

SEQ ID NO: 833990 - protein, 154 aa, Homo sapiens
AAAAAPAAPAAPRSRSLGGAVGSVASGARAAQSPFSIPNSSSGPYGSQDSVHSSPEDGGGGRDRPVGGSPGGPRLVIGSLPAHLSPHMFGGTDPSPRTRARSSRGCTWAVAAGYFYPSPFLLLPGRRGLPPGPARVGLHPGRNPALNTGGAATA

SEQ ID NO: 833991 - protein, 115 aa, Homo sapiens
IKTQSLREVKRLILCQGVESRLIPMPFNFKIGRLIIGQNGILSTPAVSCIIRKIKAAGGIILTASHCPGGPGGEFGVKFNVANGVLNGALDVEKVDDEQEQNSSFQETYSSIWEM

SEQ ID NO: 833992 - protein, 331 aa, Homo sapiens
MRPALAVGLVFAGCCSNVIFLELLARKHPGCGNIVTFAQFLFIAVEGFLFEADLGRKPPAIPIRYYAIMVTMFFTVSVVNNYALNLNIAMPLHMIFRSGSLIANMILGIIILKKRYSIFKYTSIALVSVGIFICTFMSAKQVTSQSSLSENDGFQAFVWWLLGIGALTFALLMSARMGIFQETLYKRFGKHSKEALFYNHALPLPGFVFLASDIYDHAVLFNKSELYEIPVIGVTLPIMWFYLLMNIITQYVCIRGVFILTTECASLTVTLVVTLRKFVSLIFSILYFQNPFTLWHWLGTLFVFIGTLMYTEVWNNLGTTKSEPQKDSKKN

SEQ ID NO: 833993 - protein, 280 aa, Homo sapiens
MRPALAVGLVFAGCCSNVIFLELLARKHPGCGNIVTFAQFLFIAVEGFLFEADLGRKPPAIPIRYYAIMVTMFFTVSVVNNYALNLNIAMPLHMIFRSGSLIANMILGIIILKKRYSIFKYTSIALVSVGIFICTFMSAKQVTSQSSLSENDGFQAFVWWLLGIGALTFALLMSARMGIFQETLYKRFGKHSKEALFYNHALPLPGFVFLASDIYDHAVLFNKSELYEIPVIGVTLPIMWFYLLMNIITQSDSYLTGREMSIKCLSSFSGSRPCNFMLQR

SEQ ID NO: 833994 - protein, 212 aa, Homo sapiens
MVTMFFTVSVVNNYALNLNIAMPLHMIFRSGSLIANMILGIIILKKRYSIFKYTSIALVSVGIFICTFMSAKQVTSQSSLSENDGFQAFVWWLLGIGALTFALLMSARMGIFQETLYKRFGKHSKEALFYNHALPLPGFVFLASDIYDHAVLFNKSELYEIPVIGVTLPIMWFYLLMNIITQSDSYLTGREMSIKCLSSFSGSRPCNFMLQR

SEQ ID NO: 833995 - protein, 143 aa, Homo sapiens
MYIVPFCDVEVEYNDGFQAFVWWLLGIGALTFALLMSARMGIFQETLYKRFGKHSKEALFYNHALPLPGFVFLASDIYDHAVLFNKSELYEIPVIGVTLPIMWFYLLMNIITQSDSYLTGREMSIKCLSSFSGSRPCNFMLQR

SEQ ID NO: 833996 - protein, 257 aa, Homo sapiens
MRPALAVGLVFAGCCSNVIFLELLARKHPGCGNIVTFAQFLFIAVEGFLFEADLGRKPPAIPIRYYAIMVTMFFTVSVVNNYALNLNIAMPLHMIFRSGSLIANMILGIIILKKRYSIFKYTSIALVSVGIFICTFMSAKQVTSQSSLSENDGFQAFVWWLLGIGALTFALLMSARMGIFQETLYKRFGKHSKEALFYNHALPLPGFVFLASDIYDHAVLFNKSEPLHPVALAGHLVCLHWDLNVHRGVEQPRDHKK

SEQ ID NO: 833997 - protein, 280 aa, Homo sapiens; identical to SEQ ID NO: 833993

SEQ ID NO: 833998 - protein, 280 aa, Homo sapiens; identical to SEQ ID NO: 833993

SEQ ID NO: 833999 - protein, 280 aa, Homo sapiens; identical to SEQ ID NO: 833993

SEQ ID NO: 834000 - protein, 280 aa, Homo sapiens; identical to SEQ ID NO: 833993

SEQ ID NO: 834001 - protein, 331 aa, Homo sapiens; identical to SEQ ID NO: 833992

SEQ ID NO: 834002 - protein, 626 aa, Homo sapiens
MYQGHMQKSKEQGYGKLSSDEDLEIIVDQKQGKGSRAADKAVAMVMKEIPREESAEEKPLLTMTSQLVNEQQESRPLLSPSIDDFLCETKSEAIARPVTSNTAVLTTGLDLLDLSEPVSQTQTKAKKSEPSSKTSSLKKKADGSDLISTDAEQRGQPLRVPETSSLDLDIQTQLEKWDDVKFHGDRNTKGHPMAERKSSSSRTGSKELLWSSEHRSQPELSGGKSALNSESASELELVAPTQARLTKEHRWGSALLSRNHSLEEEFERAKAAVESDTEFWDKMQAEWEEMARRNWISENQEAQNQVTISASEKGYYFHTENPFKDWPGAFEEGLKRLKEGDLPVTILFMEAAILQDPGDAEAWQFLGITQAENENEQAAIVALQRCLELQPNNLKALMALAVSYTNTGHQQDACDALKNWIKQNPKYKYLVKSKKGSPGLTRRMSKSPVDSSVLEGVKELYLEAAHQNGDMIDPDLQTGLGVLFHLSGEFNRAIDAFNAALTVRPEDYSLWNRLGATLANGDRSEEAVEAYTRALEIQPGFIRSRYNLGISCINLGAYREAVSNFLTALSLQRKSRNQQQVPHPAISGNIWAALRIALSLMDQPELFQAANLGDLDVLLRAFNLDP

SEQ ID NO: 834003 - protein, 434 aa, Homo sapiens
MAERKSSSSRTGSKELLWSSEHRSQPELSGGKSALNSESASELELVAPTQARLTKEHRWGSALLSRNHSLEEEFERAKAAVESDTEFWDKMQAEWEEMARRNWISENQEAQNQVTISASEKGYYFHTENPFKDWPGAFEEGLKRLKEGDLPVTILFMEAAILQDPGDAEAWQFLGITQAENENEQAAIVALQRCLELQPNNLKALMALAVSYTNTGHQQDACDALKNWIKQNPKYKYLVKSKKGSPGLTRRMSKSPVDSSVLEGVKELYLEAAHQNGDMIDPDLQTGLGVLFHLSGEFNRAIDAFNAALTVRPEDYSLWNRLGATLANGDRSEEAVEAYTRALEIQPGFIRSRYNLGISCINLGAYREAVSNFLTALSLQRKSRNQQQVPHPAISGNIWAALRIALSLMDQPELFQAANLGDLDVLLRAFNLDP

SEQ ID NO: 834004 - protein, 434 aa, Homo sapiens; identical to SEQ ID NO: 834003

SEQ ID NO: 834005 - protein, 624 aa, Homo sapiens
MYQGHMQVVGVTLKKKWHCLQKSDLTLALGKGSRAADKAVAMVMKEIPREESAEEKPLLTMTSQLVNEQQESRPLLSPSIDDFLCETKSEAIARPVTSNTAVLTTGLDLLDLSEPVSQTQTKAKKSEPSSKTSSLKKKADGSDLISTDAEQRGQPLRVPETSSLDLDIQTQLEKWDDVKFHGDRNTKGHPMAERKSSSSRTGSKELLWSSEHRSQPELSGGKSALNSESASELELVAPTQARLTKEHRWGSALLSRNHSLEEEFERAKAAVESDTEFWDKMQAEWEEMARRNWISENQEAQNQVTISASEKGYYFHTENPFKDWPGAFEEGLKRLKEGDLPVTILFMEAAILQDPGDAEAWQFLGITQAENENEQAAIVALQRCLELQPNNLKALMALAVSYTNTGHQQDACDALKNWIKQNPKYKYLVKSKKGSPGLTRRMSKSPVDSSVLEGVKELYLEAAHQNGDMIDPDLQTGLGVLFHLSGEFNRAIDAFNAALTVRPEDYSLWNRLGATLANGDRSEEAVEAYTRALEIQPGFIRSRYNLGISCINLGAYREAVSNFLTALSLQRKSRNQQQVPHPAISGNIWAALRIALSLMDQPELFQAANLGDLDVLLRAFNLDP

SEQ ID NO: 834006 - protein, 591 aa, Homo sapiens
MYQGHMQKSKEQGYGKLSSDEDLEIIVDQKQLVNEQQESRPLLSPSIDDFLCETKSEAIARPVTSNTAVLTTGLDLLDLSEPVSQTQTKAKKSEPSSKTSSLKKKADGSDLISTDAEQRGQPLRVPETSSLDLDIQTQLEKWDDVKFHGDRNTKGHPMAERKSSSSRTGSKELLWSSEHRSQPELSGGKSALNSESASELELVAPTQARLTKEHRWGSALLSRNHSLEEEFERAKAAVESDTEFWDKMQAEWEEMARRNWISENQEAQNQVTISASEKGYYFHTENPFKDWPGAFEEGLKRLKEGDLPVTILFMEAAILQDPGDAEAWQFLGITQAENENEQAAIVALQRCLELQPNNLKALMALAVSYTNTGHQQDACDALKNWIKQNPKYKYLVKSKKGSPGLTRRMSKSPVDSSVLEGVKELYLEAAHQNGDMIDPDLQTGLGVLFHLSGEFNRAIDAFNAALTVRPEDYSLWNRLGATLANGDRSEEAVEAYTRALEIQPGFIRSRYNLGISCINLGAYREAVSNFLTALSLQRKSRNQQQVPHPAISGNIWAALRIALSLMDQPELFQAANLGDLDVLLRAFNLDP

SEQ ID NO: 834007 - protein, 141 aa, Homo sapiens
MIYLGYTFCGWIVLGPYHDKFENLNTVAECLFSLVNGDDMFATFAQIQQKSILVWLFSRLYLYSFISLFIYMILSLFIALITDSYDTIKKFQQNGFPETDLQEFLKECSSKEEYQKESSAFLSCICCRRRKRSDDHLIPIS

SEQ ID NO: 834008 - protein, 48 aa, Homo sapiens
PCVLSSSQHLGTSALGSQKAFIALVCCIRHYSKTATSLSQAGSGAPGP

SEQ ID NO: 834009 - protein, 827 aa, Homo sapiens
MRGCLRLALLCALPWLLLAASPGHPAKSPRQPPAPRRDPFDAARGADFDHVYSGVVNLSTENIYSFNYTSQPDQVTAVRVYVNSSSENLNYPVLVVVRQQKEVLSWQVPLLFQGLYQRSYNYQEVSRTLCPSEATNETGPLQQLIFVDVASMAPLGAQYKLLVTKLKHFQLRTNVAFHFTASPSQPQYFLYKFPKDVDSVIIKVVSEMAYPCSVVSVQNIMCPVYDLDHNVEFNGVYQSMTKKAAITLQKKDFPGEQFFVVFVIKPEDYACGGSFFIQEKENQTWNLQRKKNLEVTIVPSIKESVYVKSSLFSVFIFLSFYLGCLLVGFVHYLRFQRKSIDGSFGSNDGSGNMVASHPIAASTPEGSNYGTIDESSSSPGRQMSSSDGGPPGQSDTDSSVEESDFDTMPDIESDKNIIRTKMFLYLSDLSRKDRRIVSKKYKIYFWNIITIAVFYALPVIQLVITYQTVVNVTGNQDICYYNFLCAHPLGVLSAFNNILSNLGHVLLGFLFLLIVLRRDILHRRALEAKDIFAVEYGIPKHFGLFYAMGIALMMEGVLSACYHVCPNYSNFQFDTSFMYMIAGLCMLKLYQTRHPDINASAYSAYASFAVVIMVTVLGVVFGKNDVWFWVIFSAIHVLASLALSTQIYYMGRFKIDLGIFRRAAMVFYTDCIQQCSRPLYMDRMVLLVVGNLVNWSFALFGLIYRPRDFASYMLGIFICNLLLYLAFYIIMKLRSSEKVLPVPLFCIVATAVMWAAALYFFFQNLSSWEGTPAESREKNRECILLDFFDDHDIWHFLSATALFFSFLVLLTLDDDLDVVRRDQIPVF

SEQ ID NO: 834010 - protein, 445 aa, Homo sapiens [sequence omitted]

SEQ ID NO: 834011 - protein, 827 aa, Homo sapiens; identical to SEQ ID NO: 834009

SEQ ID NO: 834012 - protein, 827 aa, Homo sapiens; identical to SEQ ID NO: 834009

SEQ ID NO: 834013 - protein, 148 aa, Homo sapiens
WAAPFLSAETLTFPPTLLLLLHSRLSLCLSHFLPSPHPPQCTEEGNRVQTHAAPVLRREGKPRREAAMNVDHEVNLLVEEIHRLGSKNADGKLSVKFGVLFRDDKCANLFEALVGTLKAAKRRKIVTYPGELLLQGVHDDVDIILLQD

SEQ ID NO: 834014 - protein, 148 aa, Homo sapiens; identical to SEQ ID NO: 834013

SEQ ID NO: 834015 - protein, 148 aa, Homo sapiens; identical to SEQ ID NO: 834013

SEQ ID NO: 834016 - protein, 129 aa, Homo sapiens
WAAPFLSAETLTFPPTLLLLLHSRLSLCLSHFLPSPHPPQCTEEGNRVQTHAAPVLRREGKPRREAAMNVDHEVNLLVEEIHRLGSKNADGKLSVKFGVLFRDDKCANLFEALVGTLKADDVDIILLQD

SEQ ID NO: 834017 - protein, 148 aa, Homo sapiens; identical to SEQ ID NO: 834013

SEQ ID NO: 834018 - protein, 148 aa, Homo sapiens; identical to SEQ ID NO: 834013

SEQ ID NO: 834019 - protein, 303 aa, Homo sapiens
MSEAGEATTTTTTTLPQAPTEAAAAAPQDPAPKSPVGSGAPQAAAPAPAAHVAGNPGGDAAPAATGTAAAASLATAAGSEDAEKKVLATKVLGTVKWFNVRNGYGFINRNDTKEDVFVHQTAIKKNNPRKYLRSVGDGETVEFDVVEGEKGAEAANVTGPDGVPVEGSRYAADRRRYRRGYYGRRRGPPRNAGEIGEMKDGVPEGAQLQGPVHRNPTYRPRYRSRGPPRPRPAPAVGEAEDKENQQATSGPNQPSVRRGYRRPYNYRRRPRPPNAPSQDGKEAKAGEAPTENPAPPTQQSSAE

SEQ ID NO: 834020 - protein, 121 aa, Homo sapiens
SAVKKVLATKVLGTVKWFNVRNGYGFINRNDTKEDVFVHQTAIKKNNPRKYLRSVGDGETVEFDVVEGEKGAEAANVTGPDGVPVEGSRYAADRRRYRRGYYGRRRGPPRNVRCLCYLTSD

SEQ ID NO: 834021 - protein, 68 aa, Homo sapiens
DSIRIELGTDSILTGPNQPSVRRGYRRPYNYRRRPRPPNAPSQDGKEAKAGEAPTENPAPPTQQSSAE

SEQ ID NO: 834022 - protein, 372 aa, Homo sapiens
MSEAGEATTTTTTTLPQAPTEAAAAAPQDPAPKSPVGSGAPQAAAPAPAAHVAGNPGGDAAPAATGTAAAASLATAAGSEDAEKKVLATKVLGTVKWFNVRNGYGFINRNDTKEDVFVHQTAIKKNNPRKYLRSVGDGETVEFDVVEGEKGAEAANVTGPDGVPVEGSRYAADRRRYRRGYYGRRRGPPRNYAGEEEEEGSGSSEGFDPPATDRQFSGARNQLRRPQYRPQYRQRRFPPYHVGQTFDRRSRVLPHPNRIQAGEIGEMKDGVPEGAQLQGPVHRNPTYRPRYRSRGPPRPRPAPAVGEAEDKENQQATSGPNQPSVRRGYRRPYNYRRRPRPPNAPSQDGKEAKAGEAPTENPAPPTQQSSAE

SEQ ID NO: 834023 - protein, 372 aa, Homo sapiens; identical to SEQ ID NO: 834022

SEQ ID NO: 834024 - protein, 118 aa, Homo sapiens [sequence omitted]

SEQ ID NO: 834025 - protein, 118 aa, Homo sapiens [sequence omitted]

SEQ ID NO: 834026 - protein, 394 aa, Homo sapiens
MSEAGEATTTTTTTLPQAPTEAAAAAPQDPAPKSPVGSGAPQAAAPAPAAHVAGNPGGDAAPAATGTAAAASLATAAGSEDAEKKVLATKVLGTVKWFNVRNGYGFINRNDTKEDVFVHQHPVLLMWFLLSVCLEPIWLLAWTAIKKNNPRKYLRSVGDGETVEFDVVEGEKGAEAANVTGPDGVPVEGSRYAADRRRYRRGYYGRRRGPPRNYAGEEEEEGSGSSEGFDPPATDRQFSGARNQLRRPQYRPQYRQRRFPPYHVGQTFDRRSRVLPHPNRIQAGEIGEMKDGVPEGAQLQGPVHRNPTYRPRYRSRGPPRPRPAPAVGEAEDKENQQATSGPNQPSVRRGYRRPYNYRRRPRPPNAPSQDGKEAKAGEAPTENPAPPTQQSSAE

SEQ ID NO: 834027 - protein, 265 aa, Homo sapiens
MVQRQKWIWIYKSTAIKKNNPRKYLRSVGDGETVEFDVVEGEKGAEAANVTGPDGVPVEGSRYAADRRRYRRGYYGRRRGPPRNYAGEEEEEGSGSSEGFDPPATDRQFSGARNQLRRPQYRPQYRQRRFPPYHVGQTFDRRSRVLPHPNRIQAGEIGEMKDGVPEGAQLQGPVHRNPTYRPRYRSRGPPRPRPAPAVGEAEDKENQQATSGPNQPSVRRGYRRPYNYRRRPRPPNAPSQDGKEAKAGEAPTENPAPPTQQSSAE

SEQ ID NO: 834028 - protein, 266 aa, Homo sapiens [sequence omitted]

SEQ ID NO: 834029 - protein, 259 aa, Homo sapiens
MFLFSFQTAIKKNNPRKYLRSVGDGETVEFDVVEGEKGAEAANVTGPDGVPVEGSRYAADRRRYRRGYYGRRRGPPRNYAGEEEEEGSGSSEGFDPPATDRQFSGARNQLRRPQYRPQYRQRRFPPYHVGQTFDRRSRVLPHPNRIQAGEIGEMKDGVPEGAQLQGPVHRNPTYRPRYRSRGPPRPRPAPAVGEAEDKENQQATSGPNQPSVRRGYRRPYNYRRRPRPPNAPSQDGKEAKAGEAPTENPAPPTQQSSAE

SEQ ID NO: 834030 - protein, 182 aa, Homo sapiens
MYAGEEEEEGSGSSEGFDPPATDRQFSGARNQLRRPQYRPQYRQRRFPPYHVGQTFDRRSRVLPHPNRIQAGEIGEMKDGVPEGAQLQGPVHRNPTYRPRYRSRGPPRPRPAPAVGEAEDKENQQATSGPNQPSVRRGYRRPYNYRRRPRPPNAPSQDGKEAKAGEAPTENPAPPTQQSSAE

SEQ ID NO: 834031 - protein, 194 aa, Homo sapiens
MTPKKMYLYIQTAIKKNNPRKYLRSVGDGETVEFDVVEGEKGAEAANVTGPDGVPVEGSRYAADRRRYRRGYYGRRRGPPRNAGEIGEMKDGVPEGAQLQGPVHRNPTYRPRYRSRGPPRPRPAPAVGEAEDKENQQATSGPNQPSVRRGYRRPYNYRRRPRPPNAPSQDGKEAKAGEAPTENPAPPTQQSSAE

SEQ ID NO: 834032 - protein, 372 aa, Homo sapiens; identical to SEQ ID NO: 834022

SEQ ID NO: 834033 - protein, 372 aa, Homo sapiens; identical to SEQ ID NO: 834022

SEQ ID NO: 834034 - protein, 196 aa, Homo sapiens
MSEAGEATTTTTTTLPQAPTEAAAAAPQDPAPKSPVGSGAPQAAAPAPAAHVAGNPGGDAAPAATGTAAAASLATAAGSEDAEKKVLATKVLGTVKWFNVRNGYGFINRNDTKEDVFVHQTAIKKNNPRKYLRSVGDGETVEFDVVEGEKVRGNCGWVSKRPRQVKHQLRTLLHPPSRAVLSNTRLLRHLHHRQVT

SEQ ID NO: 834035 - protein, 141 aa, Homo sapiens
MSEAGEATTTTTTTLPQAPTEAAAAAPQDPAPKSPVGSGAPQAAAPAPAAHVAGNPGGDAAPAATGTAAAASLATAAGSEDAEKKVLATKVLGTVKWFNVRNGYGFINRNDTKEDVFVHQAKAGEAPTENPAPPTQQSSAE

SEQ ID NO: 834036 - protein, 372 aa, Homo sapiens; identical to SEQ ID NO: 834022

SEQ ID NO: 834037 - protein, 66 aa, Homo sapiens
ELVYGDLYESDVQAAVCVAVVQLETVDSKRRRPRPPNAPSQDGKEAKAGEAPTENPAPPTQQSSAE

SEQ ID NO: 834038 - protein, 372 aa, Homo sapiens; identical to SEQ ID NO: 834022

SEQ ID NO: 834039 - protein, 372 aa, Homo sapiens; identical to SEQ ID NO: 834022

SEQ ID NO: 834040 - protein, 303 aa, Homo sapiens; identical to SEQ ID NO: 834019

SEQ ID NO: 834041 - protein, 214 aa, Homo sapiens
MSEAGEATTTTTTTLPQAPTEAAAAAPQDPAPKSPVGSGAPQAAAPAPAAHVAGNPGGDAAPAATGTAAAASLATAAGSEDAEKKVLATKVLGTVKWFNVRNGYGFINRNDTKEDVFVHQTAIKKNNPRKYLRSVGDGETVEFDVVEGEKGAEAANVTGPDGVPVEGSRYAADRRRYRRGYYGRRRGPPRNLGRRTFPFSDNPLLGDRHCPCSC

SEQ ID NO: 834042 - protein, 131 aa, Homo sapiens
MSEAGEATTTTTTTLPQAPTEAAAAAPQDPAPKSPVGSGAPQAAAPAPAAHVAGNPGGDAAPAATGTAAAASLATAAGSEDAEKKVLATKVLGTVKWFNVRNGYGFINRNDTKEDVFVHQVRGIINTTFAM

SEQ ID NO: 834043 - protein, 83 aa, Homo sapiens
GNRARIPSVNGPPVEVVIRTEGVASPVSATARFLFFFLVFTVLVIYILKQEILIPHGENPNQRNLKYIVNAFFSVFVHFGCWC

SEQ ID NO: 834044 - protein, 372 aa, Homo sapiens; identical to SEQ ID NO: 834022

SEQ ID NO: 834045 - protein, 372 aa, Homo sapiens; identical to SEQ ID NO: 834022

SEQ ID NO: 834046 - protein, 303 aa, Homo sapiens; identical to SEQ ID NO: 834019

SEQ ID NO: 834047 - protein, 200 aa, Homo sapiens
MSEAGEATTTTTTTLPQAPTEAAAAAPQDPAPKSPVGSGAPQAAAPAPAAHVAGNPGGDAAPAATGTAAAASLATAAGSEDAEKKVLATKVLGTVKWFNVRNGYGFINRNDTKEDVFVHQTAIKKNNPRKYLRSVGDGETVEFDVVEGEKGAEAANVTGPDGVPVEGSRYAADRRRYRRGYYGRRRGPPRNISDVWFNRR

SEQ ID NO: 834048 - protein, 118 aa, Homo sapiens [sequence omitted]

SEQ ID NO: 834049 - protein, 292 aa, Homo sapiens
SAVKKVLATKVLGTVKWFNVRNGYGFINRNDTKEDVFVHQTAIKKNNPRKYLRSVGDGETVEFDVVEGEKGAEAANVTGPDGVPVEGSRYAADRRRYRRGYYGRRRGPPRNYAGEEEEEGSGSSEGFDPPATDRQFSGARNQLRRPQYRPQYRQRRFPPYHVGQTFDRRSRVLPHPNRIQAGEIGEMKDGVPEGAQLQGPVHRNPTYRPRYRSRGPPRPRPAPAVGEAEDKENQQATSGPNQPSVRRGYRRPYNYRRRPRPPNAPSQDGKEAKAGEAPTENPAPPTQQSSAE

SEQ ID NO: 834050 - protein, 372 aa, Homo sapiens
MSEAGEATTTTTTTLPQAPTEAAAAAPQDPAPKSPVGSGAPQAAAPAPAAHVAGNPGGDAAPAATGTAAAASLATAAGSEDAEKKVLATKVLGTVKWFNVRNGYGFINRNDTKEMYLYIQTAIKKNNPRKYLRSVGDGETVEFDVVEGEKGAEAANVTGPDGVPVEGSRYAADRRRYRRGYYGRRRGPPRNYAGEEEEEGSGSSEGFDPPATDRQFSGARNQLRRPQYRPQYRQRRFPPYHVGQTFDRRSRVLPHPNRIQAGEIGEMKDGVPEGAQLQGPVHRNPTYRPRYRSRGPPRPRPAPAVGEAEDKENQQATSGPNQPSVRRGYRRPYNYRRRPRPPNAPSQDGKEAKAGEAPTENPAPPTQQSSAE

SEQ ID NO: 834051 - protein, 372 aa, Homo sapiens; identical to SEQ ID NO: 834022

SEQ ID NO: 834052 - protein, 205 aa, Homo sapiens
GLRGEYFCEAYWRLGFEAQLGRPVYAGEEEEEGSGSSEGFDPPATDRQFSGARNQLRRPQYRPQYRQRRFPPYHVGQTFDRRSRVLPHPNRIQAGEIGEMKDGVPEGAQLQGPVHRNPTYRPRYRSRGPPRPRPAPAVGEAEDKENQQATSGPNQPSVRRGYRRPYNYRRRPRPPNAPSQDGKEAKAGEAPTENPAPPTQQSSAE

SEQ ID NO: 834053 - protein, 372 aa, Homo sapiens; identical to SEQ ID NO: 834022

SEQ ID NO: 834054 - protein, 372 aa, Homo sapiens; identical to SEQ ID NO: 834022

SEQ ID NO: 834055 - protein, 249 aa, Homo sapiens
MSEAGEATTTTTTTLPQAPTEAAAAAPQDPAPKSPVGSGAPQAAAPAPAAHVAGNPGGDAAPAATGTAAAASLATAAGSEDAEKKVLATKVLGTVKWFNVRNGYGFINRNDTKEDVFVHQTAIKKNNPRKYLRSVGDGETVEFDVVEGEKGAEAANVTGPDGVPVEGSRYAADRRRYRRGYYGRRRGPPRNAGEIGEMKDGVPEGAQLQGPVHRNPTYRPRYRSRGPPRPRPAPAVGEAEDKENQQATR

SEQ ID NO: 834056 - protein, 68 aa, Homo sapiens; identical to SEQ ID NO: 834021

SEQ ID NO: 834057 - protein, 163 aa, Homo sapiens
IPDTPSPTVSVITITSDTDEEEEQYTPPPSTVSKQKEKTSSAVSQVHDSPYSDSSSNTSPYSVQQLLGTNNANAFDTKGSLENHCTGNPRTIIVPPLKTQASEVLLECDSLVPVKQPVTTRRPYNYRRRPRPPNAPSQDGKEAKAGEAPTENPAPPTQQSSAE

SEQ ID NO: 834058 - protein, 79 aa, Homo sapiens
VRHGRQTNDGPVRSHKVPKVLCQTLITGIKIPHPHMGHLKMAKRPRQVKHQLRTLLHPPSRAVLSNTRLLRHLHHRQVT

SEQ ID NO: 834059 - protein, 300 aa, Homo sapiens
MSEAGEATTTTTTTLPQAPTEAAAAAPQDPAPKSPVGSGAPQAAAPAPAAHVAGNPGGDAAPAATGTAAAASLATAAGSEDAEKKVLATKVLGTVKWFNVRNGYGFINRNDTKEDVFVHQTAIKKNNPRKYLRSVGDGETVEFDVVEGEKGAEAANVTGPDGVPVEGSRYAADRRRYRRGYYGRRRGPPRNYAGEEEEEGSGSSEGFDPPATDRQFSGARNQLRRPQYRPQYRQRRFPPYHVGQTFDRRSRVLPHPNRIQAGEIGEMKDGVPEGAQLQGPVHRNPTYRPRYRRHLSQPQK

SEQ ID NO: 834060 - protein, 156 aa, Homo sapiens
MSEAGEATTTTTTTLPQAPTEAAAAAPQDPAPKSPVGSGAPQAAAPAPAAHVAGNPGGDAAPAATGTAAAASLATAAGSEDAEKKVLATKVLGTVKWFNVRNGYGFINRNDTKEDVFVHQHPVLLMWFLLSVCLEPIWLLPGLPSRRITHGNICAV

SEQ ID NO: 834061 - protein, 163 aa, Homo sapiens
ARPEGRGRRAARGCKAGGRRLPGPAWAAASAMPLLVEGRRVRLPQSAGDLVRAHPPLEVSGARRGASGRARGEAAGRASAPLTRHRLETWRCWHIRSPGRRLASSPLGVGEFLPSLDFSGLPRRPLSDKGGDGGPERLGDLPKVAQHCGSGTRRDPHSPTGRL

SEQ ID NO: 834062 - protein, 307 aa, Homo sapiens
RAARGAGAAGGPGLQSGGPPPPWACLGGRLRDAAARRGAASAAAAVSRGPRPSPPAFGGSISILGSDDATTCHIVVLRHTGNGATCLTHCDGTDTKAEVPLIMNSIKSFSDHAQCGRLEVHLVGGFSDDRQLSQKLTHQLLSEFDRQEDDIHLVTLCVTELNDREENENHFPVIYGIAVNIKTAEIYRASFQDRGPEEQLRAARTLAGGPMISIYDAETEQLRIGPYSWTPFPHVDFWLHQDDKQILENLSTSPLAEPPHFVEHIRSTLMFLKKHPSPAHTLFPGNKALLYKKNEDGLWEKISSPGS

SEQ ID NO: 834063 - protein, 205 aa, Homo sapiens
MNSIKSFSDHAQCGRLEVHLVGGFSDDRQLSQKLTHQLLSEFDRQEDDIHLVTLCVTELNDREENENHFPVIYGIAVNIKTAEIYRASFQDRGPEEQLRAARTLAGGPMISIYDAETEQLRIGPYSWTPFPHVDFWLHQDDKQILENLSTSPLAEPPHFVEHIRSTLMFLKKHPSPAHTLFPGNKALLYKKNEDGLWEKISSPGS

SEQ ID NO: 834064 - protein, 311 aa, Homo sapiens
MPLLVDVREMLSRDPVAASEHCCVFPVEERARLLRGQSVQQVGPQGLLYVQQRELAVTSPKDGSISILGSDDATTCHIVVLRHTGNGATCLTHCDGTDTKAEVPLIMNSIKSFSDHAQCGRLEVHLVGGFSDDRQLSQKLTHQLLSEFDRQEDDIHLVTLCVTELNDREENENHFPVIYGIAVNIKTAEIYRASFQDRGPEEQLRAARTLAGGPMISIYDAETEQLRIGPYSWTPFPHVDFWLHQDDKQILENLSTSPLAEPPHFVEHIRSTLMFLKKHPSPAHTLFPGNKALLYKKNEDGLWEKISSPGS

SEQ ID NO: 834065 - protein, 285 aa, Homo sapiens
RAARGAGAAGGPGLQSGGPPPPWACLGGRLRDAAARRGAASAAAAVSRGPRPSPPAFGGNGATCLTHCDGTDTKAEVPLIMNSIKSFSDHAQCGRLEVHLVGGFSDDRQLSQKLTHQLLSEFDRQEDDIHLVTLCVTELNDREENENHFPVIYGIAVNIKTAEIYRASFQDRGPEEQLRAARTLAGGPMISIYDAETEQLRIGPYSWTPFPHVDFWLHQDDKQILENLSTSPLAEPPHFVEHIRSTLMFLKKHPSPAHTLFPGNKALLYKKNEDGLWEKISSPGS

SEQ ID NO: 834066 - protein, 117 aa, Homo sapiens
RAARGAGAAGGPGLQSGGPPPPWACLGGRLRDAAARRGAASAAAAVSRGPRPSPPAFGGSISILGSDDATTCHIVVLRHTGNGATCLTHCDGTDTKAEVPLIMNSIKSFSDHAQCGR

SEQ ID NO: 834067 - protein, 106 aa, Homo sapiens
ARPEGRGRRAARGCKAGGRRLPGPAWAAASAMPLLVEGRRVRLPQSAGDLVRAHPPLEVSGARRGASGRARGEAAGRASAPLTRHRLETWRCWHIRSPGRRLASSP

SEQ ID NO: 834068 - protein, 341 aa, Homo sapiens
ARPEGRGRRAARGCKAGGRRLPGPAWAAASAMPLLVEGRRVRLPQSAGDLVRAHPPLEERARLLRGQSVQQVGPQGLLYVQQRELAVTSPKDGSISILGSDDATTCHIVVLRHTGNGATCLTHCDGTDTKAEVPLIMNSIKSFSDHAQCGRLEVHLVGGFSDDRQLSQKLTHQLLSEFDRQEDDIHLVTLCVTELNDREENENHFPVIYGIAVNIKTAEIYRASFQDRGPEEQLRAARTLAGGPMISIYDAETEQLRIGPYSWTPFPHVDFWLHQDDKQILENLSTSPLAEPPHFVEHIRSTLMFLKKHPSPAHTLFPGNKALLYKKNEDGLWEKISSPGS

SEQ ID NO: 834069 - protein, 391 aa, Homo sapiens
ARPEGRGRRAARGCKAGGRRLPGPAWAAASAMPLLVEGRRVRLPQSAGDLVRAHPPLEVSGARRGASGRARGEAAGRASAPLTRHRLETWRCWHIRSPGRRLASSPLGERARLLRGQSVQQVGPQGLLYVQQRELAVTSPKDGSISILGSDDATTCHIVVLRHTGNGATCLTHCDGTDTKAEVPLIMNSIKSFSDHAQCGRLEVHLVGGFSDDRQLSQKLTHQLLSEFDRQEDDIHLVTLCVTELNDREENENHFPVIYGIAVNIKTAEIYRASFQDRGPEEQLRAARTLAGGPMISIYDAETEQLRIGPYSWTPFPHVDFWLHQDDKQILENLSTSPLAEPPHFVEHIRSTLMFLKKHPSPAHTLFPGNKALLYKKNEDGLWEKISSPGS

SEQ ID NO: 834070 - protein, 262 aa, Homo sapiens
GGTCFLSLTRVFWVTAPFWGSDGATTCNIVVMMHTCNGATCLTHCDGTDTKAEVPLIMNSIKSFSDHAQCGRLEVHLVGGFSDDRQLSQKLTHQLLSEFDRQEDDIHLVTLCVTELNDREENENHFPVIYGIAVNIKTAEIYRASFQDRGPEEQLRAARTLAGGPMISIYDAETEQLRIGPYSWTPFPHVDFWLHQDDKQILENLSTSPLAEPPHFVEHIRSTLMFLKKHPSPAHTLFPGNKALLYKKNEDGLWEKISSPGS

SEQ ID NO: 834071 - protein, 273 aa, Homo sapiens
MRTLAGGPMISIYDAETEQLRIGPYSWTPFPHVNFWLHQDDKQILENLSTSPLAEPPHFVEHIRSTLIMNSIKSFSDHAQCGRLEVHLVGGFSDDRQLSQKLTHQLLSEFDRQEDDIHLVTLCVTELNDREENENHFPVIYGIAVNIKTAEIYRASFQDRGPEEQLRAARTLAGGPMISIYDAETEQLRIGPYSWTPFPHVDFWLHQDDKQILENLSTSPLAEPPHFVEHIRSTLMFLKKHPSPAHTLFPGNKALLYKKNEDGLWEKISSPGS

SEQ ID NO: 834072 - protein, 131 aa, Homo sapiens
RQEDDIHLVTLCVTGKSCHLPKAKMWVSGPFCPQSCSGPKHRHTLLSLLGHHLFRLFLWWDGLPLPLALVHHLPSLSSSAAPSSPRKEGTGSQRSCHPCGRQGAQRRWGGSGDRFCSCQFVQYKPPCLGTG

SEQ ID NO: 834073 - protein, 911 aa, Homo sapiens
MADGGGPKEAPSLRSSPGPAPRVPRAVGPSGGGGETPRTAALALRFDKPIKQAFYNTGAVLFVCLCCGAAVLVYFILEAFLRPLLWAVLCGTFLHPFKSSLTRLGRHWLQRLHRAHTPIVLAALLLPLCFVDYGVEALGEQALRRRRLLLLLGAGGPLLYGLYCLGSYLGVQVLLVHAATLICRGLDYFSSLWIWTLVVGYVLTVSFKWNASTERYLRAVSIPVWIILLFHLASLAGSWRIPVFLVIVFLMSVGTLYEKQNGKESSGAELPGQVISMAASTLANLAISITGYESSSEDQPSTQPAEAVDRGESAPTLSTSPSPSSPSPTSPSPTLGRRRPEIGTFLRKKKTSDIYFVSLVWAIVVMQIWLNLWIVQLLPVPIAVWILKKLVIHFGVVDFLEKRYHVWWGIIESFLKERQGALAPWPIVGLGKFLLKVDSKLWHWLNKKMIIWLEKMLDKIISIFIIFLLVIGTLLLALLLTAKVHQESVHMIEVTSNLINETLANHPEWANWLPEAQVVQRALNSAANNVYQYGREWITHKLHKILGDKVNNTAVIEKQVLELWDRLYHSWFVKNVTHSGRHKGQKLHVSRQNSWLGDILDWQDIVSFVHENIETFLSILESLWIVMSRNVSLLFTTVTTLLTILFYSGTALLNFVLSLIIFLTTLFYLLSSSDEYYKPVKWVISLTPLSQPGPSSNIIGQSVEEAIRGVFDASLKMAGFYGLYTWLTHTMFGINIVFIPSALAAILGAVPFLGTYWAAVPAVLDLWLTQGLGCKAILLLIFHLLPTYFVDTAIYSDISGGGHPYLTGLAVAGGAYYLGLEGAIIGPILLCILVVASNIYSAMLVSPTNSVPTPNQTPWPAQPQRTFRDISERSEIFSKVDVVSSAVIFLRKFKFDSEFSSAVAFCPSSCA

SEQ ID NO: 834074 - protein, 118 aa, Homo sapiens
MEAYPDNFGLLSNIIYFLLQRPSRCNSHCSHPKENPSLPFAVPLIEVTEVYFQYKFDFELRFDIELYCLHNSLKMYPPGLTYRMPGQERTCCGLLCILKHSLRVQSWWFAHLTVVKMA

SEQ ID NO: 834075 - protein, 881 aa, Homo sapiens
PLGGGCGGGTMADGGGPKEAPSLRSSPGPAPRVPRAVGPSGGGGETPRTAALALRFDKPIKQAFYNTGAVLFVCLCCGAAVLVYFILEAFLRPLLWAVLCGTFLHPFKSSLTRLGRHWLQRLHRAHTPIVLAALLLPLCFVDYGVEALGEQALRRRRLLLLLGAGGPLLYGLYCLGSYLGVQVLLVHAATLICRGLDYFSSLWIWTLVVGYVLTVSFKWNASTERYLRAVSIPVWIILLFHLASLAGSWRIPVFLVIVFLMSVGTLYEKQNGKESSGAELPGQVISMAASTLANLAISITGYESSSEDQPSTQPAEAVDRGESAPTLSTSPSPSSPSPTSPSPTLGRRRPEIGTFLRKKKTSDIYFVSLVWAIVVMQIWLNLWIVQLLPVPIAVWILKKLVIHFGVVDFLEKRYHVWWGIIESFLKERQGALAPWPIVGLGKFLLKVDSKMIIWLEKMLDKIISIFIIFLLVIGTLLLALLLTAKVHQESVHMIEVTSNLINETLANHPEWANWLPEAQVVQRALNSAANNVYQYGREWITHKLHKILGDKVNNTAVIEKQVLELWDRLYHSWFVKNVTHSGRHKGQKLHVSRQNSWLGDILDWQDIVSFVHENIETFLSILESLWIVMSRNVSLLFTTVTTLLTILFYSGTALLNFVLSLIIFLTTLFYLLSSSDEYYKPVKWVISLTPLSQPGPSSNIIGQSVEEAIRGVFDASLKMAGFYGLYTWLTHTMFGINIVFIPSALAAILGAVPFLGTYWAAVPAVLDLWLTQGLGCKAILLLIFHLLPTYFVDTAIYSDISGGGHPYLTGLAVAGGAYYLGLEGAIIGPILLCILVVASNIYSAMLVSPTNSVPTPNQTPWPAQPQRTFRDISEDLKSSVG

SEQ ID NO: 834076 - protein, 867 aa, Homo sapiens
PLGGGCGGGTMADGGGPKEAPSLRSSPGPAPRVPRAVGPSGGGGETPRTAALALRFDKPIKQAFYNTGAVLFVCLCCGAAVLVYFILEAFLRPLLWAVLCGTFLHPFKSSLTRLGRHWLQRLHRAHTPIVLAALLLPLCFVDYGVEALGEQALRRRRLLLLLGAGGPLLYGLYCLGSYLGVQVLLVHAATLICRGLDYFSSLWIWTLVVGYVLTVSFKWNASTERYLRAVSIPVWIILLFHLASLAGSWRIPVFLVIVFLMSVGTLYEKQNGKESSGAELPGQVISMAASTLANLAISITGYESSSEDQPSTQPAEAVDRGESAPTLSTSPSPSSPSPTSPSPTLGRRRPEIGTFLRKKKTSDIYFVSLVWAIVVMQIWLNLWIVQLLPVPIAVWILKKLVIHFGVVDFLEKRYHVWWGIIESFLKERQGALAPWPIVGLGKFLLKVDSKMIIWLEKMLDKIISIFIIFLLVIGTLLLALLLTAKVHQESVHMIEVTSNLINETLANHPEWANWLPEAQVVQRALNSAANNVYQYGREWITHKLHKILGDKVNNTAVIEKQVLELWDRLYHSWFVKNVTHSGRHKGQKLHVSRQNSWLGDILDWQDIVSFVHENIETFLSILESLWIVMSRNVSLLFTTVTTLLTILFYSGTALLNFVLSLIIFLTTLFYLLSSSDEYYKPVKWVISLTPLSQPGPSSNIIGQSVEEAIRGVFDASLKMAGFYGLYTWLTHTMFGINIVFIPSALAAILGAVPFLGTYWAAVPAVLDLWLTQGLGCKAILLLIFHLLPTYFVDTAIYSDISGGGHPYLTGLAVAGGAYYLGLEGAIIGPILLCILVVASNIYSAMLVSPTNSVPTPNQTPWPAQPQR

SEQ ID NO: 834077 - protein, 123 aa, Homo sapiens
PNEWLCIPISSCGLMRCVVFFFSFSEAVDRGESAPTLSTSPSPSSPSPTSPSPTLGRRRPEIGTFLRKKKTSDIYFVSLVWAIVVMQIWLNLWIVQLLPVPIAGRYLVKYDLVLSLKIDFFLF

SEQ ID NO: 834078 - protein, 881 aa, Homo sapiens; identical to SEQ ID NO: 834075

SEQ ID NO: 834079 - protein, 881 aa, Homo sapiens; identical to SEQ ID NO: 834075

SEQ ID NO: 834080 - protein, 881 aa, Homo sapiens; identical to SEQ ID NO: 834075

SEQ ID NO: 834081 - protein, 144 aa, Homo sapiens
HPFKSSLTRLGRHWLQRLHRAHTPIVLAALLLPLCFVDYGVEALGEQALRRRRLLLLLGAGGPLLYGLYCLGSYLGVQVLLVHAATLICRGLDYFSSLWVSERQSAPVPRPWSRRSGVQSCSCSSRCRGDEGPHLCCSDRPSPL

SEQ ID NO: 834082 - protein, 271 aa, Homo sapiens
MSYNFVLYLAAFRADVDAATLARIDLERRIESLNEEIAFLKKVHEEEIRELQAQLQEQQVQVEMDMSKPDLTAALRDIRAQYETIAAKNISEAEEWYKSKVSDLTQAANKNNDALRQAKQEMMEYRHQIQSYTCEIDALKGTNDSLMRQMRELEDRFASEASGYQDNIARLEEEIRHLKDEMARHLREYQDLLNVKMALDVEIATYRKLLEGEESRINLPIQTYSALNFRETSPEQRGSEVHTKKTVMIKTIETRDGEVVSEATQQQHEVL

SEQ ID NO: 834083 - protein, 179 aa, Homo sapiens
RSEPVSPAQSQFLPLRASFSRSEPVSPAQSQFLPLRASFYTCEIDALKGTNDSLMRQMRELEDRFASEASGYQDNIARLEEEIRHLKDEMARHLREYQDLLNVKMALDVEIATYRKLLEGEESRINLPIQTYSALNFRETSPEQRGSEVHTKKTVMIKTIETRDGEVVSEATQQQHEVL

SEQ ID NO: 834084 - protein, 403 aa, Homo sapiens
RGGEAGADVRRDTNSADGWGPCLPSPHPLSGRPPARRLLRAPASLARAVTMSQAYSSSQRFLEQQNAALAAEVNRLKGREPTRVAELYEEELRELRRQVEVLTNQRARVDVERDNLLDDLQRLKAKLQEEIQLKEEAENNLAAFRADVDAATLARIDLERRIESLNEEIAFLKKVHEEEIRELQAQLQEQQVQVEMDMSKPDLTAALRDIRAQYETIAAKNISEAEEWYKSKVSDLTQAANKNNDALRQAKQEMMEYRHQIQSYTCEIDALKGTNDSLMRQMRELEDRFASEASGYQDNIARLEEEIRHLKDEMARHLREYQDLLNVKMALDVEIATYRKLLEGEESRINLPIQTYSALNFRETSPEQRGSEVHTKKTVMIKTIETRDGEVVSEATQQQHEVL

SEQ ID NO: 834085 - protein, 179 aa, Homo sapiens; identical to SEQ ID NO: 834083

SEQ ID NO: 834086 - protein, 71 aa, Homo sapiens
EPVPFKRRCWRERRARINLPIQTYSALNFRETSPEQRGSEVHTKKTVMIKTIETRDGEVVSEATQQQHEVL

SEQ ID NO: 834087 - protein, 520 aa, Homo sapiens
RGGEAGADVRRDTNSADGWGPCLPSPHPLSGRPPARRLLRAPASLARAVTMSQAYSSSQRVSSYRRTFGGAPGFPLGSPLSSPVFPRAGFGSKGSSSSVTSRVYQVSRTSGGAGGLGSLRASRLGTTRTPSSYGAGELLDFSLADAVNQEFLTTRTNEKVELQELNDRFANYIEKVRFLEQQNAALAAEVNRLKGREPTRVAELYEEELRELRRQVEVLTNQRARVDVERDNLLDDLQRLKAKLQEEIQLKEEAENNLAAFRADVDAATLARIDLERRIESLNEEIAFLKKVHEEEIRELQAQLQEQQVQVEMDMSKPDLTAALRDIRAQYETIAAKNISEAEEWYKSKVSDLTQAANKNNDALRQAKQEMMEYRHQIQSYTCEIDALKGTNDSLMRQMRELEDRFASEASGYQDNIARLEEEIRHLKDEMARHLREYQDLLNVKMALDVEIATYRKLLEGEESRINLPIQTYSALNFRETSPEQRGSEVHTKKTVMIKTIETRDGEVVSEATQQQHEVL

SEQ ID NO: 834088 - protein, 144 aa, Homo sapiens
MLEKERRGEEAESGPAFFHPRTPHPASVLPSQPLTPPHWPSLVVPNSDIAHPCLVTGHAPATSADPSCEPWLLAVSEPGSCAGWSPGGSGGPVPPTSVTSGTSLWLWRQPQSRVLGYCRARTEPRRPPQPLAQERESQAGSQGD

SEQ ID NO: 834089 - protein, 131 aa, Homo sapiens
TLSSPLLLQHLSHFLSFSQPLTPPHWPSLVVPNSDIAHPCLVTGHAPATSADPSCEPWLLAVSEPGSCAGWSPGGSGGPVPPTSVTSGTSLWLWRQPQSRVLGYCRARTEPRRPPQPLAQERESQAGSQGD

SEQ ID NO: 834090 - protein, 520 aa, Homo sapiens; identical to SEQ ID NO: 834087

SEQ ID NO: 834091 - protein, 520 aa, Homo sapiens; identical to SEQ ID NO: 834087

SEQ ID NO: 834092 - protein, 487 aa, Homo sapiens
RGGEAGADVRRDTNSADGWGPCLPSPHPLSGRPPARRLLRAPASLARAVTMSQAYSSSQRVSSYRRTFGGAPGFPLGSPLSSPVFPRAGFGSKGSSSSVTSRVYQVSRTSGGAGGLGSLRASRLGTTRTPSSYGAGELLDFSLADAVNQEFLTTRTNEKVELQELNDRFANYIEKVRFLEQQNAALAAEVNRLKGREPTRVAELYEEELRELRRQVEVLTNQRARVDVERDNLLDDLQRLKAKLQEEIQLKEEAENNLAAFRADVDAATLARIDLERRIESLNEEIAFLKKVHEEEIRELQAQLQEQQVQVEMDMSKPDLTAALRDIRAQYETIAAKNISEAEEWYKSKVSDLTQAANKNNDALRQAKQEMMEYRHQIQSYTCEIDALKGTNDSLMRQMRELEDRFASEASGYQDNIARLEEEIRHLKDEMARHLREYQDLLNVKMALDVEIATYRKLLEGEESRINLPIQTYSALNFRGECLLAGG

SEQ ID NO: 834093 - protein, 520 aa, Homo sapiens; identical to SEQ ID NO: 834087

SEQ ID NO: 834094 - protein, 520 aa, Homo sapiens; identical to SEQ ID NO: 834087

SEQ ID NO: 834095 - protein, 316 aa, Homo sapiens
RVGLDGEIDPALLSLQQLPVGGNLHIQCHLHVEQVLVLAQMAGHLILEVPDFLLQARNVVLVATGLTGKWCSNSRICLNEEIAFLKKVHEEEIRELQAQLQEQQVQVEMDMSKPDLTAALRDIRAQYETIAAKNISEAEEWYKSKVSDLTQAANKNNDALRQAKQEMMEYRHQIQSYTCEIDALKGTNDSLMRQMRELEDRFASEASGYQDNIARLEEEIRHLKDEMARHLREYQDLLNVKMALDVEIATYRKLLEGEESRINLPIQTYSALNFRETSPEQRGSEVHTKKTVMIKTIETRDGEVVSEATQQQHEVL

SEQ ID NO: 834096 - protein, 520 aa, Homo sapiens; identical to SEQ ID NO: 834087

SEQ ID NO: 834097 - protein, 120 aa, Homo sapiens
TDTHTPDKSHTLNTHTPRMHTPRVHTHITIHRAQSFYLLLIPSRRFLPHPHISNLLPVSLAFPSSLGMVIRRVQHAEEPKTSPEQRGSEVHTKKTVMIKTIETRDGEVVSEATQQQHEVL

SEQ ID NO: 834098 - protein, 520 aa, Homo sapiens; identical to SEQ ID NO: 834087

SEQ ID NO: 834099 - protein, 276 aa, Homo sapiens
RGGEAGADVRRDTNSADGWGPCLPSPHPLSGRPPARRLLRAPASLARAVTMSQAYSSSQRVSSYRRTFGGAPGFPLGSPLSSPVFPRAGFGSKGSSSSVTSRVYQVSRTSGGAGGLGSLRASRLGTTRTPSSYGAGELLDFSLADAVNQEFLTTRTNEKVELQELNDRFANYIEKVRFLEQQNAALAAEVNRLKGREPTRVAELYEEELRELRRQVEVLTNQRARVDVERDNLLDDLQRLKAKLQRRSSGRKNQNHWVPSSGRDAVPSAWLGAMDL

SEQ ID NO: 834100 - protein, 228 aa, Homo sapiens
MSYAEKPDEITKDEWMEKLNNLHVQRADMNRLIMNYLVTEGFKEAAEKFRMESGIEPSVDLETLDERIKIREMILKGQIQEAIALINSLHPELLDTNRYLYFHLQQQHLIELIRQRETEAALEFAQTQLAEQGEESRECLTEMERTLALLAFDSPEESPFGDLLHTMQRQKVWSEVNQAVLDYENRESTPKLAKLLKLLLWAQNELDQKKVKYPKMTDLSKGVIEEPK

SEQ ID NO: 834101 - protein, 228 aa, Homo sapiens; identical to SEQ ID NO: 834100

SEQ ID NO: 834102 - protein, 228 aa, Homo sapiens; identical to SEQ ID NO: 834100

SEQ ID NO: 834103 - protein, 228 aa, Homo sapiens; identical to SEQ ID NO: 834100

SEQ ID NO: 834104 - protein, 228 aa, Homo sapiens; identical to SEQ ID NO: 834100

SEQ ID NO: 834105 - protein, 180 aa, Homo sapiens
RLLCKCSGPLAAEGFGLPRRPVLLGRIPLRIQEAIALINSLHPELLDTNRYLYFHLQQQHLIELIRQRETEAALEFAQTQLAEQGEESRECLTEMERTLALLAFDSPEESPFGDLLHTMQRQKVWSEVNQAVLDYENRESTPKLAKLLKLLLWAQNELDQKKVKYPKMTDLSKGVIEEPK

SEQ ID NO: 834106 - protein, 228 aa, Homo sapiens; identical to SEQ ID NO: 834100

SEQ ID NO: 834107 - protein, 123 aa, Homo sapiens [sequence omitted]

SEQ ID NO: 834108 - protein, 69 aa, Homo sapiens
RARYPFWGLCPIQSQSLKLYGSKSSDHNGSYSRDPPPQIRTRVQTPLGTSGRKATSFVVLLVPVILKYL

SEQ ID NO: 834109 - protein, 135 aa, Homo sapiens
IPHGILQGSGAPEPWRIPHGIPLPALSGLCGVRRSPSSRFSFFPPQQRNWRKDIKLSAVDLSAEIFPESMVVLNYLHVSSIFNSGVGLFLISSQKCSALGEGTSPLACHFPGVLYHFDGTLWSAENALSWHASRL

SEQ ID NO: 834110 - protein, 135 aa, Homo sapiens; identical to SEQ ID NO: 834109

SEQ ID NO: 834111 - protein, 325 aa, Homo sapiens
MASSSGSKAEFIVGGKYKLVRKIGSGSFGDIYLAINITNGEEVAVKLESQKARHPQLLYESKLYKILQGGVGIPHIRWYGQEKDYNVLVMDLLGPSLEDLFNFCSRRFTMKTVLMLADQMISRIEYVHTKNFIHRDIKPDNFLMGIGRHCNKLFLIDFGLAKKYRDNRTRQHIPYREDKNLTGTARYASINAHLGIEQSRRDDMESLGYVLMYFNRTSLPWQGLKAATKKQKYEKISEKKMSTPVEVLCKGFPAEFAMYLNYCRGLRFEEAPDYMYLRQLFRILFRTLNHQYDYTFDWTMLKQKAAQQAASSSGQGQQAQTPTGF

SEQ ID NO: 834112 - protein, 337 aa, Homo sapiens
MASSSGSKAEFIVGGKYKLVRKIGSGSFGDIYLAINITNGEEVAVKLESQKARHPQLLYESKLYKILQGGVGIPHIRWYGQEKDYNVLVMDLLGPSLEDLFNFCSRRFTMKTVLMLADQMISRIEYVHTKNFIHRDIKPDNFLMGIGRHCNKLFLIDFGLAKKYRDNRTRQHIPYREDKNLTGTARYASINAHLGIEQSRRDDMESLGYVLMYFNRTSLPWQGLKAATKKQKYEKISEKKMSTPVEVLCKGFPAEFAMYLNYCRGLRFEEAPDYMYLRQLFRILFRTLNHQYDYTFDWTMLKQKAAQQAASSSGQGQQAQTPTGKQTDKTKSNMKGF

SEQ ID NO: 834113 - protein, 325 aa, Homo sapiens; identical to SEQ ID NO: 834111

SEQ ID NO: 834114 - protein, 325 aa, Homo sapiens; identical to SEQ ID NO: 834111

SEQ ID NO: 834115 - protein, 337 aa, Homo sapiens; identical to SEQ ID NO: 834112

SEQ ID NO: 834116 - protein, 353 aa, Homo sapiens
MASSSGSKAEFIVGGKYKLVRKIGSGSFGDIYLAINITNGEEVAVKLESQKARHPQLLYESKLYKILQGGVGIPHIRWYGQEKDYNVLVMDLLGPSLEDLFNFCSRRFTMKTVLMLADQMISRIEYVHTKNFIHRDIKPDNFLMGIGRHCNKCLESPVGKRKRSMTVSTSQDPSFSGLNQLFLIDFGLAKKYRDNRTRQHIPYREDKNLTGTARYASINAHLGIEQSRRDDMESLGYVLMYFNRTSLPWQGLKAATKKQKYEKISEKKMSTPVEVLCKGFPAEFAMYLNYCRGLRFEEAPDYMYLRQLFRILFRTLNHQYDYTFDWTMLKQKAAQQAASSSGQGQQAQTPTGF

SEQ ID NO: 834117 - protein, 337 aa, Homo sapiens; identical to SEQ ID NO: 834112

SEQ ID NO: 834118 - protein, 337 aa, Homo sapiens; identical to SEQ ID NO: 834112

SEQ ID NO: 834119 - protein, 337 aa, Homo sapiens; identical to SEQ ID NO: 834112

SEQ ID NO: 834120 - protein, 337 aa, Homo sapiens; identical to SEQ ID NO: 834112

SEQ ID NO: 834121 - protein, 216 aa, Homo sapiens
MKTVLMLADQMISRIEYVHTKNFIHRDIKPDNFLMGIGRHCNKLFLIDFGLAKKYRDNRTRQHIPYREDKNLTGTARYASINAHLGIEQSRRDDMESLGYVLMYFNRTSLPWQGLKAATKKQKYEKISEKKMSTPVEVLCKGFPAEFAMYLNYCRGLRFEEAPDYMYLRQLFRILFRTLNHQYDYTFDWTMLKQKAAQQAASSSGQGQQAQTPTGF

SEQ ID NO: 834122 - protein, 325 aa, Homo sapiens; identical to SEQ ID NO: 834111

SEQ ID NO: 834123 - protein, 236 aa, Homo sapiens
MDLLGPSLEDLFNFCSRRFTMKTVLMLADQMISRIEYVHTKNFIHRDIKPDNFLMGIGRHCNKLFLIDFGLAKKYRDNRTRQHIPYREDKNLTGTARYASINAHLGIEQSRRDDMESLGYVLMYFNRTSLPWQGLKAATKKQKYEKISEKKMSTPVEVLCKGFPAEFAMYLNYCRGLRFEEAPDYMYLRQLFRILFRTLNHQYDYTFDWTMLKQKAAQQAASSSGQGQQAQTPTGF

SEQ ID NO: 834124 - protein, 110 aa, Homo sapiens
MASSSGSKAEFIVGGKYKLVRKIGSGSFGDIYLAINITNGEEVAVKLESQKARHPQLLYESKLYKILQETTGQGNTYHTEKIKTSLALPDMLASMHILVLSRVAEMTWNH

SEQ ID NO: 834125 - protein, 336 aa, Homo sapiens
MASSSGSKAEFIVGGKYKLVRKIGSGSFGDIYLAINITNGEEVAVKLESQKARHPQLLYESKLYKILQGGVGIPHIRWYGQEKDYNVLVMDLLGPSLEDLFNFCSRRFTMKTVLMLADQMISRIEYVHTKNFIHRDIKPDNFLMGIGRHCNKLFLIDFGLAKKYRDNRTRQHIPYREDKNLTGTARYASINAHLGIEQSRRDDMESLGYVLMYFNRTSLPWQGLKAATKKQKYEKISEKKMSTPVEVLCKGFPAEFAMYLNYCRGLRFEEAPDYMYLRQLFRILFRTLNHQYDYTFDWTMLKQKAAQQAASSSGQGQQAQTPTGKQTDKTKSNMKG

SEQ ID NO: 834126 - protein, 361 aa, Homo sapiens
MASSSGSKAEFIVGGKYKLVRKIGSGSFGDIYLAINITNGEEVAVKLESQKARHPQLLYESKLYKILQGGVGIPHIRWYGQEKDYNVLVMDLLGPSLEDLFNFCSRRFTMKTVLMLADQMISRIEYVHTKNFIHRDIKPDNFLMGIGRHCNKLFLIDFGLAKKYRDNRTRQHIPYREDKNLTGTARYASINAHLGIEQSRRDDMESLGYVLMYFNRTSLPWQGLKAATKKQKYEKISEKKMSTPVEVLCKGFPAEFAMYLNYCRGLRFEEAPDYMYLRQLFRILFRTLNHQYDYTFDWTMLKQKAAQQAAFNKMLKAAAGEFADNPCSSVKRGNMVRAARALLSAVTRLLILADMADVYKL

SEQ ID NO: 834127 - protein, 259 aa, Homo sapiens
MASSSGSKAEFIVGGKYKLVRKIGSGSFGDIYLAINITNGEEVAVKLESQKARHPQLLYESKLYKILQGGVGIPHIRWYGQEKDYNVLVMDLLGPSLEDLFNFCSRRFTMKTVLMLADQMISRIEYVHTKNFIHRDIKPDNFLMGIGRHCNKLFLIDFGLAKKYRDNRTRQHIPYREDKNLTGTARYASINAHLGIEQSRRDDMESLGYVLMYFNRTSLPWQGLKAATKKQKYEKISEKKMSTPVEVLCKGFPAEFAMY

SEQ ID NO: 834128 - protein, 243 aa, Homo sapiens
MASSSGSKAEFIVGGKYKLVRKIGSGSFGDIYLAINITNGEEVAVKLESQKARHPQLLYESKLYKILQGGVGIPHIRWYGQEKDYNVLVMDLLGPSLEDLFNFCSRRFTMKTVLMLADQMISRIEYVHTKNFIHRDIKPDNFLMGIGRHCNKLFLIDFGLAKKYRDNRTRQHIPYREDKNLTGTARYASINAHLGIEQSRRDDMESLGYVLMYFNRTSLPWQGLKLHQGTKYVRLCKECPALE

SEQ ID NO: 834129 - protein, 127 aa, Homo sapiens [sequence omitted]

SEQ ID NO: 834130 - protein, 103 aa, Homo sapiens
MASSSGSKAEFIVGGKYKLVRKIGSGSFGDIYLAINITNGEEVAVKLESQKARHPQLLYESKLYKILQGGVGIPHIRKNPVHIGDPLREARNGEWVEAGNETS

SEQ ID NO: 834131 - protein, 56 aa, Homo sapiens
MASSSGSKAEFIVGGKYKLMGSIDCAYLLPSSMSDETPYQGKPFRTCSFPSSIYNA

SEQ ID NO: 834132 - protein, 117 aa, Homo sapiens
MASSSGSKAEFIVGGKYKLVRKIGSGSFGDIYLAINITNGEEVAVKLESQKARHPQLLYESKLYKILQGGVGIPHIRWYGQEKDYNVLVMDLLGPSLEDLFNFCSRRFTMKKLDLNV

SEQ ID NO: 834133 - protein, 325 aa, Homo sapiens; identical to SEQ ID NO: 834111

SEQ ID NO: 834134 - protein, 325 aa, Homo sapiens; identical to SEQ ID NO: 834111

SEQ ID NO: 834135 - protein, 325 aa, Homo sapiens; identical to SEQ ID NO: 834111

SEQ ID NO: 834136 - protein, 325 aa, Homo sapiens; identical to SEQ ID NO: 834111

SEQ ID NO: 834137 - protein, 122 aa, Homo sapiens [sequence omitted]

SEQ ID NO: 834138 - protein, 182 aa, Homo sapiens
PQQHDMRLQLDEMLRSAEERRRKKAEELAARQREDKNLTGTARYASINAHLGIEQSRRDDMESLGYVLMYFNRTSLPWQGLKAATKKQKYEKISEKKMSTPVEVLCKGFPAEFAMYLNYCRGLRFEEAPDYMYLRQLFRILFRTLNHQYDYTFDWTMLKQKAAQQAASSSGQGQQAQTPTGF

SEQ ID NO: 834139 - protein, 292 aa, Homo sapiens
MASSSGSKAEFIVGGKYKLVRKIGSGSFGDIYLAINITNGEEVAVKLESQKARHPQLLYESKLYKILQGGVGIPHIRWYGQEKDYNVLVMDLLGPSLEDLFNFCSRRFTMKTVLMLADQMISRIEYVHTKNFIHRDIKPDNFLMGIGRHCNKLFLIDFGLAKKYRDNRTRQHIPYREDKNLTGTARYASINAHLGIEQSRRDDMESLGYVLMYFNRTSLPWQGLKAATKKQKYEKISEKKMSTPVEVLCKGFPAEFAMYLNYCRGLRFEEAPDYMYLRQLFRILFRSVFKVF

SEQ ID NO: 834140 - protein, 233 aa, Homo sapiens
MASSSGSKAEFIVGGKYKLVRKIGSGSFGDIYLAINITNGEEVAVKLESQKARHPQLLYESKLYKILQGGVGIPHIRWYGQEKDYNVLVMDLLGPSLEDLFNFCSRRFTMKTVLMLADQMISRIEYVHTKNFIHRDIKPDNFLMGIGRHCNKLFLIDFGLAKKYRDNRTRQHIPYREDKNLTGTARYASINAHLGIEQRLQQRNKNMKRLVKRRCPRLLKFYVRGFLQNLRCT

SEQ ID NO: 834141 - protein, 174 aa, Homo sapiens
  misc_feature (156)..(157): Xaa can be any naturally occurring amino acid
  misc_feature (171)..(171): Xaa can be any naturally occurring amino acid
MASSSGSKAEFIVGGKYKLVRKIGSGSFGDIYLAINITNGEEVAVKLESQKARHPQLLYESKLYKILQGGVGIPHIRWYGQEKDYNVLVMDLLGPSLEDLFNFCSRRFTMKTVLMLADQMISRIEYVHTKNFIHRDIKPDNFLMGIGRHCNKLFLXXFWFGQKVLRHGRDXVPN

SEQ ID NO: 834142 - protein, 147 aa, Homo sapiens
  misc_feature (91)..(91): Xaa can be any naturally occurring amino acid
  misc_feature (95)..(95): Xaa can be any naturally occurring amino acid
  misc_feature (104)..(104): Xaa can be any naturally occurring amino acid
  misc_feature (113)..(113): Xaa can be any naturally occurring amino acid
  misc_feature (121)..(121): Xaa can be any naturally occurring amino acid
MASSSGSKAEFIVGGKYKLVRKIGSGSFGDIYLAINITNGEEVAVKLESQKARHPQLLYESKLYKILQGGVGIPHIRDGQDFNVWSRRVTXKTVXYVADQMISXIAYVQYKNXSQSITRYXYGMGVTDKYLMIGCKVRHSRTIIRSL

SEQ ID NO: 834143 - protein, 86 aa, Homo sapiens
QHQPEKQSSSLHSPAQFTQEQQAASPRGCTAANLLKTSSRHVATCSPALRVQDRGAETTEEALNMQNDCLGQRTKGKGPRCGRCKG

SEQ ID NO: 834144 - protein, 722 aa, Homo sapiens
KARYEAGWLIRQREIPETLAWVNLTDLTYLNLSRNQLSLLPPYICQLPLRVLIVSNNKLGALPPDIGTLGSLRQLDVSSNELQSLPSELCGLSSLRDLNVRRNQLSTLPEELGDLPLVRLDFSCNRVSRIPVSFCRLRHLQVILLDSNPLQSPPAQVCLKGKLHIFKYLSTEAGQRGSALGDLAPSRPPSFSPWYSPRWGGRKPWDTECPFPAPGTPCFLAGGWGAVVQHQADQIRLAGPSPAEDLFPGHRYDGGLDSGFHSVDSGSKRWSGNEVRASCPWVIEGVSPGRAPLNWGPPNCRVPGRSWSCPLPSLCPASREGLAQQRPELESTQDPQVLSPHVQRGHLPSLPLPLQSTDEFSELSFRISELAREPRGPRERKEDGSADGDPVQIDFIDSHVPGEDEERGTVEEQRPPELSPGAGDRERAPSSRREEPAGEERRRPDTLQLWQERERRQQQQSGAWGAPRKDSLLKPGLRAVVGGAAAVSTQAMHNGSPKSSASQAGAAAGQGAPAPAPASQEPLPIAGPATAPAPRPLGSIQRPNSFLFRSSSQSGSGPSSPDSVLRPRRYPQVPDEKDLMTQLRQVLESRLQRPLPEDLAEALASGVILCQLANQLRPRSVPFIHVPSPAVPKLSALKARKNVESFLEACRKMGVPEADLCSPSDLLQGTARGLRTALEAVKRVGGKALPPLWPPSGLGGFVVFYVVLMLLLYVTYTRLLGS

SEQ ID NO: 834145 - protein, 210 aa, Homo sapiens
MPVSPAPVAVSLVPAPATAPAPRPLGSIQRPNSFLFRSSSQSGSGPSSPDSVLRPRRYPQVPDEKDLMTQLRQVLESRLQRPLPEDLAEALASGVILCQLANQLRPRSVPFIHVPSPAVPKLSALKARKNVESFLEACRKMGVPEADLCSPSDLLQGTARGLRTALEAVKRVGGKALPPLWPPSGLGGFVVFYVVLMLLLYVTYTRLLGS

SEQ ID NO: 834146 - protein, 143 aa, Homo sapiens
MTQLRQVLESRLQRPLPEDLAEALASGVILCQLANQLRPRSVPFIHVPSPAVPKLSALKARKNVESFLEACRKMGVPEADLCSPSDLLQGTARGLRTALEAVKRVGGKALPPLWPPSGLGGFVVFYVVLMLLLYVTYTRLLGS

SEQ ID NO: 834147 - protein, 722 aa, Homo sapiens; identical to SEQ ID NO: 834144

SEQ ID NO: 834148 - protein, 722 aa, Homo sapiens; identical to SEQ ID NO: 834144

SEQ ID NO: 834149 - protein, 722 aa, Homo sapiens; identical to SEQ ID NO: 834144

SEQ ID NO: 834150 - protein, 722 aa, Homo sapiens; identical to SEQ ID NO: 834144

SEQ ID NO: 834151 - protein, 316 aa, Homo sapiens
MGQVRGSDGAVGGQRLGASMRSPRALRRLLHCPCWRLGPSVSLAPGTLGLQGRVRGGGVAAASVPAPPAHSPHPVALPGSGESSCCCPTTCQARPLSSPPEPDPRSPQVAWEVAPSRMTPLAPWDPKYEAKAGPRPVWGANCSSGASFSGRTLCHPSFWPLYEAASGRGLRPVAPATGHWNGQQAPPDAGFPVVCCEDVFLSDPLLPRGQRVPLYLSKAPQQMMGSLKLLPPPPIMSARVLPRPSPSRGPSTAWLSGPELIALTGLLQMSQGEPRPSSSAVGPPDHTSDPPSPCGSPSSSQGADLSLPQTPDTHCP

SEQ ID NO: 834152 - protein, 316 aa, Homo sapiens; identical to SEQ ID NO: 834151

SEQ ID NO: 834153 - protein, 316 aa, Homo sapiens; identical to SEQ ID NO: 834151

SEQ ID NO: 834154 - protein, 316 aa, Homo sapiens; identical to SEQ ID NO: 834151

SEQ ID NO: 834155 - protein, 316 aa, Homo sapiens; identical to SEQ ID NO: 834151

SEQ ID NO: 834156 - protein, 829 aa, Homo sapiens
MAAAVAAPLAAGGEEAAATTSVPGSPGLPGRRSAERALEEAVATGTLNLSNRRLKHFPRGAARSYDLSDITQADLSRNRFPEVPEAACQLVSLEGLSLYHNCLRCLNPALGNLTALTYLNLSRNQLSLLPPYICQLPLRVLIVSNNKLGALPPDIGTLGSLRQLDVSSNELQSLPSELCGLSSLRDLNVRRNQLSTLPEELGDLPLVRLDFSCNRVSRIPVSFCRLRHLQVILLDSNPLQSPPAQVCLKGKLHIFKYLSTEAGQRGSALGDLAPSRPPSFSPCPAEDLFPGHRYDGGLDSGFHSVDSGSKRWSGNESTDEFSELSFRISELAREPRGPRERKEDGSADGDPVQIDFIDSHVPGEDEERGTVEEQRPPELSPGAGDRERAPSSRREEPAGEERRRPDTLQLWQERERRQQQQSGAWGAPRKDSLLKPGLRAVVGGAAAVSTQAMHNGSPKSSASQAGAAAGQGAPAPAPASQEPLPIAGPATAPAPRPLGSIQRPNSFLFRSSSQSGSGPSSPDSVLRPRRYPQVPDEKDLMTQLRQVLESRLQRPLPEDLAEALASGVILCQLANQLRPRSVPFIHVPSPAVPKLSALKARKNVESFLEACRKMGVPEADLCSPSDLLQGTARGLRTALEAVKRVGGKALPPLWPPSGLGGFVVFYVVLMLLLYVTYTHPRSPQVAWEVAPSRMTPLAPWDPKYEAKAGPRPVWVSWGQTCGTGWGAQGAVRWPEAPVLCPPHPRGPTVAQEPRSQAGRCVTPHSGRCMKQPRAGVSGPWPLPQGTGMDSRRPQMQGSRWCAVKMSSSRTLCCPGGSVFPCTCPRPPSR

SEQ ID NO: 834157 - protein, 210 aa, Homo sapiens; identical to SEQ ID NO: 834145

SEQ ID NO: 834158 - protein, 722 aa, Homo sapiens; identical to SEQ ID NO: 834144

SEQ ID NO: 834159 - protein, 855 aa, Homo sapiens
KARYEAGWLIRQREIPETLAWVNLTDLTYLNLSRNQLSLLPPYICQLPLRVLIVSNNKLGALPPDIGTLGSLRQLDVSSNELQSLPSELCGLSSLRDLNVRRNQLSTLPEELGDLPLVRLDFSCNRVSRIPVSFCRLRHLQVILLDSNPLQSPPAQVCLKGKLHIFKYLSTEAGQRGSALGDLAPSRPPSFSPWYSPRWGGRKPWDTECPFPAPGTPCFLAGGWGAVVQHQADQIRLAGPSPAEDLFPGHRYDGGLDSGFHSVDSGSKRWSGNEVRASCPWVIEGVSPGRAPLNWGPPNCRVPGRSWSCPLPSLCPASREGLAQQRPELESTQDPQVLSPHVQRGHLPSLPLPLQSTDEFSELSFRISELAREPRGPRERKEDGSADGDPVQIDFIDSHVPGEDEERGTVEEQRPPELSPGAGDRERAPSSRREEPAGEERRRPDTLQLWQERERRQQQQSGAWGAPRKDSLLKPGLRAVVGGAAAVSTQAMHNGSPKSSASQAGAAAGQGAPAPAPASQEPLPIAGPATAPAPRPLGSIQRPNSFLFRSSSQSGSGPSSPDSVLRPRRYPQVPDEKDLMTQLRQVLESRLQRPLPEDLAEALASGVILCQLANQLRPRSVPFIHVPSPAVPKLSALKARKNVESFLEACRKMGVPEVWGLLSKEWWHAGLSRACGMDGGLPFAADVCSQMKAQAAPALPSMPPALHAPCPDVTCPTHPLPCRPHLVLHVTCPAHALPCTPPALHSPCPARQHVGVVLAPAREGRGGRDCPAAAADVCPLSLSTCSPLPQADLCSPSDLLQGTARGLRTALEAVKRVGGKALPPLWPPSGLGGFVVFYVVLMLLLYVTYTRLLGS

SEQ ID NO: 834160 - protein, 276 aa, Homo sapiens
MTQLRQVLESRLQRPLPEDLAEALASGVILCQLANQLRPRSVPFIHVPSPAVPKLSALKARKNVESFLEACRKMGVPEVWGLLSKEWWHAGLSRACGMDGGLPFAADVCSQMKAQAAPALPSMPPALHAPCPDVTCPTHPLPCRPHLVLHVTCPAHALPCTPPALHSPCPARQHVGVVLAPAREGRGGRDCPAAAADVCPLSLSTCSPLPQADLCSPSDLLQGTARGLRTALEAVKRVGGKALPPLWPPSGLGGFVVFYVVLMLLLYVTYTRLLGS

SEQ ID NO: 834161 - protein, 781 aa, Homo sapiens
KARYEAGWLIRQREIPETLAWVNLTDLTYLNLSRNQLSLLPPYICQLPLRVLIVSNNKLGALPPDIGTLGSLRQLDVSSNELQSLPSELCGLSSLRDLNVRRNQLSTLPEELGDLPLVRLDFSCNRVSRIPVSFCRLRHLQVILLDSNPLQSPPAQVCLKGKLHIFKYLSTEAGQRGSALGDLAPSRPPSFSPWYSPRWGGRKPWDTECPFPAPGTPCFLAGGWGAVVQHQADQIRLAGPSPAEDLFPGHRYDGGLDSGFHSVDSGSKRWSGNEVRASCPWVIEGVSPGRAPLNWGPPNCRVPGRSWSCPLPSLCPASREGLAQQRPELESTQDPQVLSPHVQRGHLPSLPLPLQSTDEFSELSFRISELAREPRGPRERKEDGSADGDPVQIDFIDSHVPGEDEERGTVEEQRPPELSPGAGDRERAPSSRREEPAGEERRRPDTLQLWQERERRQQQQSGAWGAPRKDSLLKPGLRAVVGGAAAVSTQAMHNGSPKSSASQAGAAAGQGAPAPAPASQEPLPIAGPATAPAPRPLGSIQRPNSFLFRSSSQSGSGPSSPDSVLRPRRYPQVPDEKDLMTQLRQVLESRLQRPLPEDLAEALASGVILCQLANQLRPRSVPFIHVPSPAVPKLSALKARKNVESFLEACRKMGVPEADLCSPSDLLQGTARGLRTALEAVKRVGGKALPPLWPPSGLGGFVVFYVVLMLLLYVTYTPTSPHLSVLTVPSCPRRPCPCPLYPVRGGRSWSLPLPPVPSPSPPNSCYGGAKLSLFCREDLYL

SEQ ID NO: 834162 - protein, 316 aa, Homo sapiens; identical to SEQ ID NO: 834151

SEQ ID NO: 834163 - protein, 691 aa, Homo sapiens
KARYEAGWLIRQREIPETLAWVNLTDLTYLNLSRNQLSLLPPYICQLPLRVLIVSNNKLGALPPDIGTLGSLRQLDVSSNELQSLPSELCGLSSLRDLNVRRNQLSTLPEELGDLPLVRLDFSCNRVSRIPVSFCRLRHLQVILLDSNPLQSPPAQVCLKGKLHIFKYLSTEAGQRGSALGDLAPSRPPSFSPWYSPRWGGRKPWDTECPFPAPGTPCFLAGGWGAVVQHQADQIRLAGPSPAEDLFPGHRYDGGLDSGFHSVDSGSKRWSGNEVRASCPWVIEGVSPGRAPLNWGPPNCRVPGRSWSCPLPSLCPASREGLAQQRPELESTQDPQVLSPHVQRGHLPSLPLPLQSTDEFSELSFRISELAREPRGPRERKEDGSADGDPVQIDFIDSHVPGEDEERGTVEEQRPPELSPGAGDRERAPSSRREEPAGEERRRPDTLQLWQERERRQQQQSGAWGAPRKDSLLKPGLRAVVGGAAAVSTQAMHNGSPKSSASQAGAAAGQGAPAPAPASQEPLPIAGPATAPAPRPLGSIQRPNSFLFRSSSQSGSGPSSPDSVLRPRRYPQVPDEKDLMTQLRQVLESRLQRPLPEDLAEALASGVILCQLANQLRPRSVPFIHVPSPAVPKLSALKARKNVESFLEACRKMGVPEESLCQPHHILEEEGAPGRGLPYIAAVVHALLDRP

SEQ ID NO: 834164 - protein, 661 aa, Homo sapiens
KARYEAGWLIRQREIPETLAWVNLTDLTYLNLSRNQLSLLPPYICQLPLRVLIVSNNKLGALPPDIGTLGSLRQLDVSSNELQSLPSELCGLSSLRDLNVRRNQLSTLPEELGDLPLVRLDFSCNRVSRIPVSFCRLRHLQVILLDSNPLQSPPAQVCLKGKLHIFKYLSTEAGQRGSALGDLAPSRPPSFSPWYSPRWGGRKPWDTECPFPAPGTPCFLAGGWGAVVQHQADQIRLAGPSPAEDLFPGHRYDGGLDSGFHSVDSGSKRWSGNEVRASCPWVIEGVSPGRAPLNWGPPNCRVPGRSWSCPLPSLCPASREGLAQQRPELESTQDPQVLSPHVQRGHLPSLPLPLQSTDEFSELSFRISELAREPRGPRERKEDGSADGDPVQIDFIDSHVPGEDEERGTVEEQRPPELSPGAGDRERAPSSSCGRSGNGGSSSRAGRGGPRGRIGGTQGRPGLLLDTEPWKWGHRAPLSRSALGLADPTSPCSSLLKPGLRAVVGGAAAVSTQAMHNGSPKSSASQAGAAAGQGAPAPAPASQEPLPIAGPATAPAPRPLGSIQRPNSFLFRSSSQSGSGPSSPDSVLRPRRYPQVPDEKDLMTQLRQVLESRLQRPLPEDLAEALASGVILCQLANQLRPRSVPFIHVPSPAVVSWGWGR

SEQ ID NO: 834165 - protein, 148 aa, Homo sapiens
MAESDWDTVTVLRKKGPTAAQAKSKQAILAAQRRGEDVETSKKWAAGQNKQHSITKNTAKLDRETEELHHDRVTLEVGKVIQQGRQSKGLTQKDLATKINEKPQVIADYESGRAIPNNQVLGKIERAIGLKLRGKDIGKPIEKGPRAK

SEQ ID NO: 834166 - protein, 141 aa, Homo sapiens
MAESDWDTVTVLRKKGPTAAQAKSKQAILAAQRRGEDVETSKKWAAGQNKQHSITKNTAKLDRETEELHHDRVTLEVGKVIQQGRQSKGLTQKDLATKINEKPQVIADYESGRAIPNNQVLGKIERAIDVGTRSARVLRAQ

SEQ ID NO: 834167 - protein, 118 aa, Homo sapiens
DSTDPLFCPAPGQIQVAILAAQRRGEDVETSKKWAAGQNKQHSITKNTAKLDRETEELHHDRVTLEVGKVIQQGRQSKGLTQKDLATKINEKPQVIADYESGPGPKLGGNPEAFRKFP

SEQ ID NO: 834168 - protein, 350 aa, Homo sapiens
MYQIKRREGSTHQLEGESYYNRQKRQAERDEAHKKTNKGEARREENTRDKRREQNIQRQKRDTHKRRTRGRKKATSGSGRENTSNQRRENKTSDEREREDTRHKQSRRRREARKVREETHEHHDRREARDVKADRSGARERRESYGRQTAERSRADSSDNRDASETRTKRYSNKQPQEAGTTKSETDKNEEKVERKSTKQQDRETSRKETEEQNEEKQRERKNEKAEEERRGRKTRTDKRGQREEEIREGEEARRRRRDREGKRRERERESKETRGEAEKSKKTGEDGKENGREEETETTRGETRETGRTPTQQKENERREGRTTRDEEERQRKAKTTERERDKEENEKE

SEQ ID NO: 834169 - protein, 139 aa, Homo sapiens
MAESDWDTVTVLRKKGPTAAQAKSKQAILAAQRRGEDVETSKKWAAGQNKQHSITKNTAKLDRETEELHHDRVTLEVGKVIQQGRQSKGLTQKDLATKINEKPQVIADYESGRAIPNNQVLGKIERAIGECPSTLRRVR

SEQ ID NO: 834170 - protein, 194 aa, Homo sapiens
MAESDWDTVTVLRKKGPTAAQAKSKQAILAAQRRGEDVETSKKWAAGQNKQHSITKNTAKLDRETEELHHDRVTLEVGKVIQQGRQSKGLTQKDLATKINEKPQVIADYESGRAIPNNQVLGKIERAIGLRKPLRASGVRVPSPCQFPSACAVGDGSLSLSTAGPGPVSMGPEASSTEDPGSGSSGEGCSCSAV

SEQ ID NO: 834171 - protein, 139 aa, Homo sapiens; identical to SEQ ID NO: 834169

SEQ ID NO: 834172 - protein, 350 aa, Homo sapiens
MYQIKRREGSTHQLEGESYYNRQKRQAERDEAHKKTNKGEARREENTRDKRREQNIQRQKRDTHKRRTRGRKKATSGSGRENTSNQRRENKTSDEREREDTRHKQSRRRREARKVREETHEHHDRREARDVKADRSGARERRESYGRQTAERSRADSSDNRDASETENEAISNKQPQEAGTTKSQTDKNEEKVERKSTKQQDRETSRKETEEQNEEKQRERKNEKAERRKKRKKKRTDKRGQREEEIREGEEARRRRRDREGKRRERERESKETRGEAEKSKKTGEDGKENGREEETETTRGETRETGRTPTQQKENERREGRTTRDEEERQRKAKTTERERDKEENEKE

SEQ ID NO: 834173 - protein, 118 aa, Homo sapiens
MAESDWDTVTVLRKKGPTAAQAKSKQAILAAQRRGEDVETSKKWAAGQNKQHSITKNTAKLDRETEELHHDRVTLEVGKVIQQGRQSKGLTQKDLATKINEKPQVIADYKASKSVRSS

SEQ ID NO: 834174 - protein, 147 aa, Homo sapiens
MRADGPYPITRCLAKSSGPLVSVPPPFAGSAEQGGYPLPAGVGESGTRGKKMALGVPCSLNSGALLLQVVQTEGWWGLCRPQETPKSKWSPSPFPLPVPVSLCCWRWFSEPEHSGSGPCQHGAGSQFHRGPRLRFFRRGVFMLCCLR

SEQ ID NO: 834175 - protein, 148 aa, Homo sapiens; identical to SEQ ID NO: 834165

SEQ ID NO: 834176 - protein, 148 aa, Homo sapiens; identical to SEQ ID NO: 834165

SEQ ID NO: 834177 - protein, 134 aa, Homo sapiens
MAESDWDTVTVLRKKGPTAAQAKSKQAILAAQRRGEDVETSKKWAAGQNKQHSITKNTAKLDRETEELHHDRVTLEVGKVIQQGRQSKGLTQKDLATKINEKPRRSRASLGSQHTSTPGSHINGPLDFAKHLGR

SEQ ID NO: 834178 - protein, 95 aa, Homo sapiens
MAESDWDTVTVLRKKGPTAAQAKSKQAILAAQRRGEDVETSKKCGFLPDKQQSITRHAKLTGDRELTYRYLSGSDHSRRQGYERTARNISKVRYN

SEQ ID NO: 834179 - protein, 140 aa, Homo sapiens
LIRDRVSGLRAAQAKSKQAILAAQRRGEDVETSKKWAAGQNKQHSITKNTAKLDRETEELHHDRVTLEVGKVIQQGRQSKGLTQKDLATKINEKPQVIADYESGRAIPNNQVLGKIERAIGLKLRGKDIGKPIEKGPRAK

SEQ ID NO: 834180 - protein, 138 aa, Homo sapiens
DSTDPLFCPAPGQIQVAILAAQRRGEDVETSKKWAAGQNKQHSITKNTAKLDRETEELHHDRVTLEVGKVIQQGRQSKGLTQKDLATKINEKPQVIADYESGRAIPNNQVLGKIERAIGLKLRGKDIGKPIEKGPRAK

SEQ ID NO: 834181 - protein, 163 aa, Homo sapiens
MGAMAKPDCIITCDGKNLTIKTEEHFENNTVFLYPGRSRKQAILAAQRRGEDVETSKKWAAGQNKQHSITKNTAKLDRETEELHHDRVTLEVGKVIQQGRQSKGLTQKDLATKINEKPQVIADYESGRAIPNNQVLGKIERAIGLKLRGKDIGKPIEKGPRAK

SEQ ID NO: 834182 - protein, 111 aa, Homo sapiens
MAESDWDTVTVLRKKGPTAAQAKSKQAILAAQRRGEDVETSKKWAAGQNKQHSITKNTAKLDRETEELHHDRVTLEVGKVIQQGRQSKGLTQKDLATADNKFTQVIRSNES

SEQ ID NO: 834183 - protein, 1460 aa, Homo sapiens
MVKLDIHTLAHHLKQERLYVNSEKQLIQRLNADVLKTAEKLYRTAWIAKQQRINLDRLIITSAEASPAECCQHAKILEDTQFVDGYKQLGFQETAYGEFLSRLRENPRLIASSLVAGEKLNQENTQSVIYTVFTSLYGNCIMQEDESYLLQVLRYLIEFELKESDNPRRLLRRGTCAFSILFKLFSEGLFSAKLFLTATLHEPIMQLLVEDEDHLETDPNKLIERFSPSQQEKLFGEKGSDRFRQKVQEMVESNEAKLVALVNKFIGYLKQNTYCFPHSLRWIVSQMYKTLSCVDRLEVGEVRAMCTDLLLACFICPAVVNPEQYGIISDAPINEVARFNLMQVGRLLQQLAMTGSEEGDPRTKSSLGKFDKSCVAAFLDVVIGGRAVETPPLSSVNLLEGLSRTVVYITYSQLITLVNFMKSVMSGDQLREDRMALDNLLANLPPAKPGKSSSLEMTPYNTPQLSPATTPANKKNRLPIATRSRSRTNMLMDLHMDHEGSSQETIQEVQPEEVLVISLGTGPQLTPGMMSENEVLNMQLSDGGQGDVPVDENKLHGKPDKTLRFSLCSDNLEGISEGPSNRSNSVSSLDLEGESVSELGAGPSGSNGVEALQLLEHEQATTQDNLDDKLRKFEIRDMMGLTDDRDISETVSETWSTDVLGSDFDPNIDEDRLQEIAGAAAENMLGSLLCLPGSGSVLLDPCTGSTISETTSEAWSVEVLPSDSEAPDLKQEERLQELESCSGLGSTSDDTDVREVSSRPSTPGLSVVSGISATSEDIPNKIEDLRSECSSDFGGKDSVTSPDMDEITHGAHQLTSPPSQSESLLAMFDPLSSHEGASAVVRPKVHYARPSHPPPDPPILEGAVGGNEARLPNFGSHVLTPAEMEAFKQRHSYPERLVRSRSSDIVSSVRRPMSDPSWNRRPGNEERELPPAAAIGATSLVAAPHSSSSSPSKDSSRGETEERKDSDDEKSDRNRPWWRKRFVSAMPKAPIPFRKKEKQEKDKDDLGPDRFSTLTDDPSPRLSAQAQVAEDILDKYRNAIKRTSPSDGAMANYESTEVMGDGESAHDSPRDEALQNISADDLPDSASQAAHPQDSAFSYRDAKKKLRLALCSADSVAFPVLTHSTRNGLPDHTDPEDNEIVCFLKVQIAEAINLQDKNLMAQLQETMRCVCRFDNRTCRKLLASIAEDYRKRAPYIAYLTRCRQGLQTTQAHLERLLQRVLRDKEVANRYFTTVCVRLLLESKEKKIREFIQDFQKLTAADDKTAQVEDFLQFLYGAMAQDVIWQNASEEQLQDAQLAIERSVMNRIFKLAFYPNQDGDILRDQVLHEHIQRLSKVVTANHRALQIPEVYLREAPWPSAQSEIRTISAYKTPRDKVQCILRMCSTIMNLLSLANEDSVPGADDFVPVLVFVLIKANPPCLLSTVQYISSFYASCLSGEESYWWMQFTAAVEFIKTIDDRK

SEQ ID NO: 834184 - protein, 1460 aa, Homo sapiens; identical to SEQ ID NO: 834183

SEQ ID NO: 834185 - protein, 1433 aa, Homo sapiens
MVKLDIHTLAHHLKQERLYVNSEKQLIQRLNADVLKTAEKLYRTAWIAKQQRINLDRLIITSAEASPAECCQHAKILEDTQFVDGYKQLGFQETAYGEFLSRLRENPRLIASSLVAGEKLNQENTQSVIYTVFTSLYGNCIMQEDESYLLQVLRYLIEFELKESDNPRRLLRRGTCAFSILFKLFSEGLFSAKLFLTATLHEPIMQLLVEDEDHLETDPNKLIERFSPSQQEKLFGEKGSDRFRQKVQEMVESNEAKLVALVNKFIGYLKQNTYCFPHSLRWIVSQMYKTLSCVDRLEVGEVRAMCTDLLLACFICPAVVNPEQYGIISDAPINEVARFNLMQVGRLLQQLAMTGSEEGDPRTKSSLGKFDKSCVAAFLDVVIGGRAVETPPLSSVNLLEGLSRTVVYITYSQLITLVNFMKSVMSGDQLREDRMALDNLLANLPPAKPGKSSSLEMTPYNTPQLSPATTPANKKNRLPIATRSRSRTNMLMDLHMDHEGSSQETIQEVQPEEVLVISLGTGPQLTPGMMSENEVLNMQLSDGGQGDVPVDENKLHGKPDKTLRFSLCSDNLEGISEGPSNRSNSVSSLDLEGESVSELGAGPSGSNGVEALQLLEHEQATTQDNLDDKLRKFEIRDMMGLTDDRDISETVSETWSTDVLGSDFDPNIDEDRLQEIAGAAAENMLGSLLCLPGSGSVLLDPCTGSTISETTSEAWSVEVLPSDSEAPDLKQEERLQELESCSGLGSTSDDTDVREVSSRPSTPGLSVVSGISATSEDIPNKIEDLRSECSSDFGGKDSVTSPDMDEITHGAHQLTSPPSQSESLLAMFDPLSSHEGASAVVRPKVHYARPSHPPPDPPILEGAVGGNEARLPNFGSHVLTPAEMEAFKQRHSYPERLVRSRSSDIVSSVRRPMSDPSWNRRPGNEERELPPAAAIGATSLVAAPHSSSSSPSKDSSRGETEERKDSDDEKSDRNRPWWRKRFVSAMPKDDPSPRLSAQAQVAEDILDKYRNAIKRTSPSDGAMANYESTEVMGDGESAHDSPRDEALQNISADDLPDSASQAAHPQDSAFSYRDAKKKLRLALCSADSVAFPVLTHSTRNGLPDHTDPEDNEIVCFLKVQIAEAINLQDKNLMAQLQETMRCVCRFDNRTCRKLLASIAEDYRKRAPYIAYLTRCRQGLQTTQAHLERLLQRVLRDKEVANRYFTTVCVRLLLESKEKKIREFIQDFQKLTAADDKTAQVEDFLQFLYGAMAQDVIWQNASEEQLQDAQLAIERSVMNRIFKLAFYPNQDGDILRDQVLHEHIQRLSKVVTANHRALQIPEVYLREAPWPSAQSEIRTISAYKTPRDKVQCILRMCSTIMNLLSLANEDSVPGADDFVPVLVFVLIKANPPCLLSTVQYISSFYASCLSGEESYWWMQFTAAVEFIKTIDDRK

SEQ ID NO: 834186 - protein, 1487 aa, Homo sapiens
MVKLDIHTLAHHLKQERLYVNSEKQLIQRLNADVLKTAEKLYRTAWIAKQQRINLDRLIITSAEASPAECCQHAKILEDTQFVDGYKQLGFQETAYGEFLSRLRENPRLIASSLVAGEKLNQENTQSVIYTVFTSLYGNCIMQEDESYLLQVLRYLIEFELKESDNPRRLLRRGTCAFSILFKLFSEGLFSAKLFLTATLHEPIMQLLVEDEDHLETDPNKLIERFSPSQQEKLFGEKGSDRFRQKVQEMVESNEAKLVALVNKFIGYLKQNTYCFPHSLRWIVSQMYKTLSCVDRLEVGEVRAMCTDLLLACFICPAVVNPEQYGIISDAPINEVARFNLMQVGRLLQQLAMTGSEEGDPRTKSSLGKFDKSCVAAFLDVVIGGRAVETPPLSSVNLLEGLSRTVVYITYSQLITLVNFMKSVMSGDQLREDRMALDNLLANLPPAKPGKSSSLEMTPYNTPQLSPATTPANKKNRLPIATRSRSRTNMLMDLHMDHEGSSQETIQEVQPEEVLVISLGTGPQLTPGMMSENEVLNMQLSDGGQGDVPVDENKLHGKPDKTLRFSLCSDNLEGISEGPSNRSNSVSSLDLEGESVSELGAGPSGSNGVEALQLLEHEQATTQDNLDDKLRKFEIRDMMGLTDDRDISETVSETWSTDVLGSDFDPNIDEDRLQEIAGAAAENMLGSLLCLPGSGSVLLDPCTGSTISETTSEAWSVEVLPSDSEAPDLKQEERLQELESCSGLGSTSDDTDVREVSSRPSTPGLSVVSGISATSEDIPNKIEDLRSECSSDFGGKDSVTSPDMDEITHDFLYILQPKQHFQHIEAEADMRIQLSSSAHQLTSPPSQSESLLAMFDPLSSHEGASAVVRPKVHYARPSHPPPDPPILEGAVGGNEARLPNFGSHVLTPAEMEAFKQRHSYPERLVRSRSSDIVSSVRRPMSDPSWNRRPGNEERELPPAAAIGATSLVAAPHSSSSSPSKDSSRGETEERKDSDDEKSDRNRPWWRKRFVSAMPKAPIPFRKKEKQEKDKDDLGPDRFSTLTDDPSPRLSAQAQVAEDILDKYRNAIKRTSPSDGAMANYESTEVMGDGESAHDSPRDEALQNISADDLPDSASQAAHPQDSAFSYRDAKKKLRLALCSADSVAFPVLTHSTRNGLPDHTDPEDNEIVCFLKVQIAEAINLQDKNLMAQLQETMRCVCRFDNRTCRKLLASIAEDYRKRAPYIAYLTRCRQGLQTTQAHLERLLQRVLRDKEVANRYFTTVCVRLLLESKEKKIREFIQDFQKLTAADDKTAQVEDFLQFLYGAMAQDVIWQNASEEQLQDAQLAIERSVMNRIFKLAFYPNQDGDILRDQVLHEHIQRLSKVVTANHRALQIPEVYLREAPWPSAQSEIRTISAYKTPRDKVQCILRMCSTIMNLLSLANEDSVPGADDFVPVLVFVLIKANPPCLLSTVQYISSFYASCLSGEESYWWMQFTAAVEFIKTIDDRK

SEQ ID NO: 834187 - protein, 1487 aa, Homo sapiens; identical to SEQ ID NO: 834186

SEQ ID NO: 834188 - protein, 1433 aa, Homo sapiens; identical to SEQ ID NO: 834185

SEQ ID NO: 834189 - protein, 1487 aa, Homo sapiens; identical to SEQ ID NO: 834186

SEQ ID NO: 834190 - protein, 1286 aa, Homo sapiens
MVKLDIHTLAHHLKQERLYVNSEKQLIQRLNADVLKTAEKLYRTAWIAKQQRINLDRLIITSAEASPAECCQHAKILEDTQFVDGYKQLGFQETAYGEFLSRLRENPRLIASSLVAGEKLNQENTQSVIYTVFTSLYGNCIMQEDESYLLQVLRYLIEFELKESDNPRRLLRRGTCAFSILFKLFSEGLFSAKLFLTATLHEPIMQLLVEDEDHLETDPNKLIERFSPSQQEKLFGEKGSDRFRQKVQEMVESNEAKLVALVNKFIGYLKQNTYCFPHSLRWIVSQMYKTLSCVDRLEVGEVRAMCTDLLLACFICPAVVNPEQYGIISDAPINEVARFNLMQVGRLLQQLAMTGSEEGDPRTKSSLGKFDKSCVAAFLDVVIGGRAVETPPLSSVNLLEGLSRTVVYITYSQLITLVNFMKSVMSGDQLREDRMALDNLLANLPPAKPGKSSSLEMTPYNTPQLSPATTPANKKNRLPIATRSRSRTNMLMDLHMDHEGSSQETIQEVQPEEVLVISLGTGPQLTPGMMSENEVLNMQLSDGGQGDVPVDENKLHGKPDKTLRFSLCSDNLEGISEGPSNRSNSVSSLDLEGESVSELGAGPSGSNGVEALQLLEHEQATTQDNLDDKLRKFEIRDMMGLTDDRDISETVSETWSTDVLGSDFDPNIDEDRLQEIAGAAAENMLGSLLCLPGSGSVLLDPCTGSTISETTSEAWSVEVLPSDSEAPDLKQEERLQELESCSGLGSTSDDTDVREVSSRPSTPGLSVVSGISATSEDIPNKIEDLRSECSSDFGGKDSVTSPDMDEITHDFLYILQPKQHFQHIEAEADMRIQLSSSAHQLTSPPSQSESLLAMFDPLSSHEGASAVVRPKVHYARPSHPPPDPPILEGAVGGNEARLPNFGSHVLTPAEMEAFKQRHSYPERLVRSRSSDIVSSVRRPMSDPSWNRRPGNEERELPPAAAIGATSLVAAPHSSSSSPSKDSSRGETEERKDSDDEKSDRNRPWWRKRFVSAMPKAPIPFRKKEKQEKDKDDLGPDRFSTLTDDPSPRLSAQAQVAEDILDKYRNAIKRTSPSDGAMANYESTEVMGDGESAHDSPRDEALQNISADDLPDSASQAAHPQDSAFSYRDAKKKLRLALCSADSVAFPVLTHSTRNGLPDHTDPEDNEIVCFLKVQIAEAINLQDKNLMAQLQETMRCVCRFDNRTCRKLLASIAEDYRKRAPYIAYLTRCRQGLQTTQAHLERLLQRVLRDKEVANRYFTTVCVRLLLESKEKKIREFIQGNSIPLV

SEQ ID NO: 834191 - protein, 105 aa, Homo sapiens
MTPLGLALSPRLECSDTISLIFVFFVETGFRHVGQAGLELLASSDPPTSASQSAGIIGVSHRAQPQNYMYIYLNVSNILLSFSILGKISATVIAFFCFFFIKTCL

SEQ ID NO: 834192 - protein, 1487 aa, Homo sapiens; identical to SEQ ID NO: 834186

SEQ ID NO: 834193 - protein, 982 aa, Homo sapiens
MVKLDIHTLAHHLKQERLYVNSEKQLIQRLNADVLKTAEKLYRTAWIAKQQRINLDRLIITSAEASPAECCQHAKILEDTQFVDGYKQLGFQETAYGEFLSRLRENPRLIASSLVAGEKLNQENTQSVIYTVFTSLYGNCIMQEDESYLLQVLRYLIEFELKESDNPRRLLRRGTCAFSILFKLFSEGLFSAKLFLTATLHEPIMQLLVEDEDHLETDPNKLIERFSPSQQEKLFGEKGSDRFRQKVQEMVESNEAKLVALVNKFIGYLKQNTYCFPHSLRWIVSQMYKTLSCVDRLEVGEVRAMCTDLLLACFICPAVVNPEQYGIISDAPINEVARFNLMQVGRLLQQLAMTGSEEGDPRTKSSLGKFDKSCVAAFLDVVIGGRAVETPPLSSVNLLEGLSRTVVYITYSQLITLVNFMKSVMSGDQLREDRMALDNLLANLPPAKPGKSSSLEMTPYNTPQLSPATTPANKKNRLPIATRSRSRTNMLMDLHMDHEGSSQETIQEVQPEEVLVISLGTGPQLTPGMMSENEVLNMQLSDGGQGDVPVDENKLHGKPDKTLRFSLCSDNLEGISEGPSNRSNSVSSLDLEGESVSELGAGPSGSNGVEALQLLEHEQATTQDNLDDKLRKFEIRDMMGLTDDRDISETVSETWSTDVLGSDFDPNIDEDRLQEIAGAAAENMLGSLLCLPGSGSVLLDPCTGSTISETTSEAWSVEVLPSDSEAPDLKQEERLQELESCSGLGSTSDDTDVREVSSRPSTPGLSVVSGISATSEDIPNKIEDLRSECSSDFGGKDSVTSPDMDEITHGASAVVRPKVHYARPSHPPPDPPILEGAVGGNEARLPNFGSHVLTPAEMEAFKQRHSYPERLVRSRSSDIVSSVRRPMSDPSWNRRPGNEERELPPAAAIGATSLVAAPHSSSSSPSKDSSRGETEERKDSDDEKSDRNRPWWRKRFVSAMPKAWHHLSWQKHLFLKEESIQE

SEQ ID NO: 834194 - protein, 1487 aa, Homo sapiens; identical to SEQ ID NO: 834186

SEQ ID NO: 834195 - protein, 657 aa, Homo sapiens
MDEITHGAHQLTSPPSQSESLLAMFDPLSSHEGASAVVRPKVHYARPSHPPPDPPILEGAVGGNEARLPNFGSHVLTPAEMEAFKQRHSYPERLVRSRSSDIVSSVRRPMSDPSWNRRPGNEERELPPAAAIGATSLVAAPHSSSSSPSKDSSRGETEERKDSDDEKSDRNRPWWRKRFVSAMPKAPIPFRKKEKQEKDKDDLGPDRFSTLTDDPSPRLSAQAQVAEDILDKYRNAIKRTSPSDGAMANYESTEVMGDGESAHDSPRDEALQNISADDLPDSASQAAHPQDSAFSYRDAKKKLRLALCSADSVAFPVLTHSTRNGLPDHTDPEDNEIVCFLKVQIAEAINLQDKNLMAQLQETMRCVCRFDNRTCRKLLASIAEDYRKRAPYIAYLTRCRQGLQTTQAHLERLLQRVLRDKEVANRYFTTVCVRLLLESKEKKIREFIQDFQKLTAADDKTAQVEDFLQFLYGAMAQDVIWQNASEEQLQDAQLAIERSVMNRIFKLAFYPNQDGDILRDQVLHEHIQRLSKVVTANHRALQIPEVYLREAPWPSAQSEIRTISAYKTPRDKVQCILRMCSTIMNLLSLANEDSVPGADDFVPVLVFVLIKANPPCLLSTVQYISSFYASCLSGEESYWWMQFTAAVEFIKTIDDRK

SEQ ID NO: 834196 - protein, 493 aa, Homo sapiens
MVPLNIEICALFKSYLLICLWDYATGVILTSEVVQTQGANSLTLLSLADDPSPRLSAQAQVAEDILDKYRNAIKRTSPSDGAMANYESTEVMGDGESAHDSPRDEALQNISADDLPDSASQAAHPQDSAFSYRDAKKKLRLALCSADSVAFPVLTHSTRNGLPDHTDPEDNEIVCFLKVQIAEAINLQDKNLMAQLQETMRCVCRFDNRTCRKLLASIAEDYRKRAPYIAYLTRCRQGLQTTQAHLERLLQRVLRDKEVANRYFTTVCVRLLLESKEKKIREFIQDFQKLTAADDKTAQVEDFLQFLYGAMAQDVIWQNASEEQLQDAQLAIERSVMNRIFKLAFYPNQDGDILRDQVLHEHIQRLSKVVTANHRALQIPEVYLREAPWPSAQSEIRTISAYKTPRDKVQCILRMCSTIMNLLSLANEDSVPGADDFVPVLVFVLIKANPPCLLSTVQYISSFYASCLSGEESYWWMQFTAAVEFIKTIDDRK

SEQ ID NO: 834197 - protein, 183 aa, Homo sapiens
MAQDVIWQNASEEQLQDAQLAIERSVMNRIFKLAFYPNQDGDILRDQVLHEHIQRLSKVVTANHRALQIPEVYLREAPWPSAQSEIRTISAYKTPRDKVQCILRMCSTIMNLLSLANEDSVPGADDFVPVLVFVLIKANPPCLLSTVQYISSFYASCLSGEESYWWMQFTAAVEFIKTIDDRK

SEQ ID NO: 834198 - protein, 1316 aa, Homo sapiens
MVKLDIHTLAHHLKQERLYVNSEKQLIQRLNADVLKTAEKLYRTAWIAKQQRINLDRLIITSAEASPAECCQHAKILEDTQFVDGYKQLGFQETAYGEFLSRLRENPRLIASSLVAGEKLNQENTQSVIYTVFTSLYGNCIMQEDESYLLQVLRYLIEFELKESDNPRRLLRRGTCAFSILFKLFSEGLFSAKLFLTATLHEPIMQLLVEDEDHLETDPNKLIERFSPSQQEKLFGEKGSDRFRQKVQEMVESNEAKLVALVNKFIGYLKQNTYCFPHSLRWIVSQMYKTLSCVDRLEVGEVRAMCTDLLLACFICPAVVNPEQYGIISDAPINEVARFNLMQVGRLLQQLAMTGSEEGDPRTKSSLGKFDKSCVAAFLDVVIGGRAVETPPLSSVNLLEGLSRTVVYITYSQLITLVNFMKSVMSGDQLREDRMALDNLLANLPPAKPGKSSSLEMTPYNTPQLSPATTPANKKNRLPIATRSRSRTNMLMDLHMDHEGSSQETIQEVQPEEVLVISLGTGPQLTPGMMSENEVLNMQLSDGGQGDVPVDENKLHGKPDKTLRFSLCSDNLEGISEGPSNRSNSVSSLDLEGESVSELGAGPSGSNGVEALQLLEHEQATTQDNLDDKLRKFEIRDMMGLTDDRDISETVSETWSTDVLGSDFDPNIDEDRLQEIAGAAAENMLGSLLCLPGSGSVLLDPCTGSTISETTSEAWSVEVLPSDSEAPDLKQEERLQELESCSGLGSTSDDTDVREVSSRPSTPGLSVVSGISATSEDIPNKIEDLRSECSSDFGGKDSVTSPDMDEITHDFLYILQPKQHFQHIEAEADMRIQLSSSAHQLTSPPSQSESLLAMFDPLSSHEGASAVVRPKVHYARPSHPPPDPPILEGAVGGNEARLPNFGSHVLTPAEMEAFKQRHSYPERLVRSRSSDIVSSVRRPMSDPSWNRRPGNEERELPPAAAIGATSLVAAPHSSSSSPSKDSSRGETEERKDSDDEKSDRNRPWWRKRFVSAMPKAPIPFRKKEKQEKDKDDLGPDRFSTLTDDPSPRLSAQAQVAEDILDKYRNAIKRTSPSDGAMANYESTEVMGDGESAHDSPRDEALQNISADDLPDSASQAAHPQDSAFSYRDAKKKLRLALCSADSVAFPVLTHSTRNGLPDHTDPEDNEIVCFLKVQIAEAINLQDKNLMAQLQETMRCVCRFDNRTCRKLLASIAEDYRKRAPYIAYLTRCRQGLQTTQAHLERLLQRVLRDKEVANRYFTTVCVRLLLESKEKKIREFIQDFQKLTAADDKTAQSFFMVQWPRMSYGKTRVKNSFKI

SEQ ID NO: 834199 - protein, 442 aa, Homo sapiens
MLVHTYSSMDRHDGVPSHSSRLSQLGSVSQGPYSSAPPLSHTPSSDFQPPYFPPPYQPLPYHQSQDPYSHVNDPYSLNPLHQPQQHPWGQRQRQEVGSEAGSLLPQPRAALPQLSGLDPRRDYHSVRRPDVLLHSAHHGLDAGMGDSLSLHGLGHPGMEDVQSVEDANNSGMNLLDQSVIKKVPVPPKSVTSLMMNKDGFLGGMSVNTGEVFCSVPGRLSLLSSTSKYKVTVGEVQRRLSPPECLNASLLGGVLRRAKSKNGGRSLRERLEKIGLNLPAGRRKAANVTLLTSLVEGEAVHLARDFGYICETEFPAKAVSEYLNRQHTDPSDLHSRKNMLLATKQLCKEFTDLLAQDRTPIGNSRPSPILEPGIQSCLTHFSLITHGFGAPAICAALTALQNYLTEALKGMDKMFLNNTTTNRHTSGEGPGSKTGDKEEKHRK

SEQ ID NO: 834200 - protein, 501 aa, Homo sapiens
MWPSESTWGSKFQILASLVPGRAYKSRASPFVTCIFFLPLCTLCLSLPLSLFLCLLLWLSSPSSLRSQDRHDGVPSHSSRLSQLGSVSQGPYSSAPPLSHTPSSDFQPPYFPPPYQPLPYHQSQDPYSHVNDPYSLNPLHQPQQHPWGQRQRQEVGSEAGSLLPQPRAALPQLSGLDPRRDYHSVRRPDVLLHSAHHGLDAGMGDSLSLHGLGHPGMEDVQSVEDANNSGMNLLDQSVIKKVPVPPKSVTSLMMNKDGFLGGMSVNTGEVFCSVPGRLSLLSSTSKYKVTVGEVQRRLSPPECLNASLLGGVLRRAKSKNGGRSLRERLEKIGLNLPAGRRKAANVTLLTSLVEGEAVHLARDFGYICETEFPAKAVSEYLNRQHTDPSDLHSRKNMLLATKQLCKEFTDLLAQDRTPIGNSRPSPILEPGIQSCLTHFSLITHGFGAPAICAALTALQNYLTEALKGMDKMFLNNTTTNRHTSGEGPGSKTGDKEEKHRK

SEQ ID NO: 834201 - protein, 263 aa, Homo sapiens
MLWKLVENVKYEDIYEDRHDGVPSHSSRLSQLGSVSQGPYSSAPPLSHTPSSDFQPPYFPPPYQPLPYHQSQDPYSHVNDPYSLNPLHQPQQHPWGQRQRQEVGSEAGSLLPQPRAALPQLSGLDPRRDYHSVRRPDVLLHSAHHGLDAGMGDSLSLHGLGHPGMEDVQSVEDANNSGMNLLDQSVIKKVPVPPKSVTSLMMNKDGFLGGMSVNTGEVFCSVPGRLSLLSSTSKYKVTVGEVQRRLSPPECLNASLLGGVLRR

SEQ ID NO: 834202 - protein, 108 aa, Homo sapiens
LGVCPVASHRDTFYQPVIRIENLVTFMAIFSLFLVPVPPKSVTSLMMNKDGFLGGMSVNTGEVFCSVPGRLSLLSSTSKYKVTVGEVQRRLSPPECLNASLLGGVLRR

SEQ ID NO: 834203 - protein, 449 aa, Homo sapiens
MLWKLVENVKYEDIYEDRHDGVPSHSSRLSQLGSVSQGPYSSAPPLSHTPSSDFQPPYFPPPYQPLPYHQSQDPYSHVNDPYSLNPLHQPQQHPWGQRQRQEVGSEAGSLLPQPRAALPQLSGLDPRRDYHSVRRPDVLLHSAHHGLDAGMGDSLSLHGLGHPGMEDVQSVEDANNSGMNLLDQSVIKKVPVPPKSVTSLMMNKDGFLGGMSVNTGEVFCSVPGRLSLLSSTSKYKVTVGEVQRRLSPPECLNASLLGGVLRRAKSKNGGRSLRERLEKIGLNLPAGRRKAANVTLLTSLVEGEAVHLARDFGYICETEFPAKAVSEYLNRQHTDPSDLHSRKNMLLATKQLCKEFTDLLAQDRTPIGNSRPSPILEPGIQSCLTHFSLITHGFGAPAICAALTALQNYLTEALKGMDKMFLNNTTTNRHTSGEGPGSKTGDKEEKHRK

SEQ ID NO: 834204 - protein, 458 aa, Homo sapiens
MLWKLVENVKYEDIYEMLVHTYSSMDRHDGVPSHSSRLSQLGSVSQGPYSSAPPLSHTPSSDFQPPYFPPPYQPLPYHQSQDPYSHVNDPYSLNPLHQPQQHPWGQRQRQEVGSEAGSLLPQPRAALPQLSGLDPRRDYHSVRRPDVLLHSAHHGLDAGMGDSLSLHGLGHPGMEDVQSVEDANNSGMNLLDQSVIKKVPVPPKSVTSLMMNKDGFLGGMSVNTGEVFCSVPGRLSLLSSTSKYKVTVGEVQRRLSPPECLNASLLGGVLRRAKSKNGGRSLRERLEKIGLNLPAGRRKAANVTLLTSLVEGEAVHLARDFGYICETEFPAKAVSEYLNRQHTDPSDLHSRKNMLLATKQLCKEFTDLLAQDRTPIGNSRPSPILEPGIQSCLTHFSLITHGFGAPAICAALTALQNYLTEALKGMDKMFLNNTTTNRHTSGEGPGSKTGDKEEKHRK

SEQ ID NO: 834205 - protein, 294 aa, Homo sapiens
LGVCPVASHRDTFYQPVIRIENLVTFMAIFSLFLVPVPPKSVTSLMMNKDGFLGGMSVNTGEVFCSVPGRLSLLSSTSKYKVTVGEVQRRLSPPECLNASLLGGVLRRAKSKNGGRSLRERLEKIGLNLPAGRRKAANVTLLTSLVEGEAVHLARDFGYICETEFPAKAVSEYLNRQHTDPSDLHSRKNMLLATKQLCKEFTDLLAQDRTPIGNSRPSPILEPGIQSCLTHFSLITHGFGAPAICAALTALQNYLTEALKGMDKMFLNNTTTNRHTSGEGPGSKTGDKEEKHRK

SEQ ID NO: 834206 - protein, 395 aa, Homo sapiens
MNGPVDGLCDHSLSEGVFMFTSESVGEGHPDKICDQISDAVLDAHLKQDPNAKVACETVCKTGMVLLCGEITSMAMVDYQRVVRDTIKHIGYDDSAKGFDFKTCNVLVALEQQSPDIAQCVHLDRNEEDVGAGDQGLMFGYATDETEECMPLTIILAHKLNARMADLRRSGLLPWLRPDSKTQVTVQYMQDNGAVIPVRIHTIVISVQHNEDITLEEMRRALKEQVIRAVVPAKYLDEDTVYHLQPSGRFVIGGPQGDAGVTGRKIIVDTYGGWGAHGGGAFSGKDYTKVDRSAAYAARWVAKSLVKAGLCRRVLVQVSYAIGVAEPLSISIFTYGTSQKTERELLDVVHKNFDLRPGVIVRDLDLKKPIYQKTACYGHFGRSEFPWEVPRKLVF

SEQ ID NO: 834207 - protein, 395 aa, Homo sapiens; identical to SEQ ID NO: 834206

SEQ ID NO: 834208 - protein, 91 aa, Homo sapiens
TEASIPDAAPCWKVSYAIGVAEPLSISIFTYGTSQKTERELLDVVHKNFDLRPGVIVRDLDLKKPIYQKTACYGHFGRSEFPWEVPRKLVF

SEQ ID NO: 834209 - protein, 152 aa, Homo sapiens
MALLLILISLPLQGDAGVTGRKIIVDTYGGWGAHGGGAFSGKDYTKVDRSAAYAARWVAKSLVKAGLCRRVLVQVSYAIGVAEPLSISIFTYGTSQKTERELLDVVHKNFDLRPGVIVRDLDLKKPIYQKTACYGHFGRSEFPWEVPRKLVF

SEQ ID NO: 834210 - protein, 395 aa, Homo sapiens; identical to SEQ ID NO: 834206

SEQ ID NO: 834211 - protein, 164 aa, Homo sapiens
KALGSGCDPREPLAHLLHLLMKLWQGDAGVTGRKIIVDTYGGWGAHGGGAFSGKDYTKVDRSAAYAARWVAKSLVKAGLCRRVLVQVSYAIGVAEPLSISIFTYGTSQKTERELLDVVHKNFDLRPGVIVRDLDLKKPIYQKTACYGHFGRSEFPWEVPRKLVF

SEQ ID NO: 834212 - protein, 395 aa, Homo sapiens; identical to SEQ ID NO: 834206

SEQ ID NO: 834213 - protein, 395 aa, Homo sapiens; identical to SEQ ID NO: 834206

SEQ ID NO: 834214 - protein, 719 aa, Homo sapiens
MFGKKKKKIEISGPSNFEHRVHTGFDPQEQKFTGLPQQWHSLLADTANRPKPMVDPSCITPIQLAPMKTIVRGNKPCKETSINGLLEDFDNISVTRSNSLRKESPPTPDQGASSHGPGHAEENGFITFSQYSSESDTTADYTTEKYREKSLYGDDLDPYYRGSHAAKQNGHVMKMKHGEAYYSEVKPLKSDFARFSADYHSHLDSLSKPSEYSDLKWEYQRASSSSPLDYSFQFTPSRTAGTSGCSKESLAYSESEWGPSLDDYDRRPKSSYLNQTSPQPTMRQRSRSGSGLQEPMMPFGASAFKTHPQGHSYNSYTYPRLSEPTMCIPKVDYDRAQMVLSPPLSGSDTYPRGPAKLPQSQSKSGYSSSSHQYPSGYHKATLYHHPSLQSSSQYISTASYLSSLSLSSSTYPPPSWGSSSDQQPSRVSHEQFRAALQLVVSPGDPREYLANFIKIGEGSTGIVCIATEKHTGKQVAVKKMDLRKQQRRELLFNEVVIMRDYHHDNVVDMYSSYLVGDELWVVMEFLEGGALTDIVTHTRMNEEQIATVCLSVLRALSYLHNQGVIHRDIKSDSILLTSDGRIKLSDFGFCAQVSKEVPKRKSLVGTPYWMAPEVISRLPYGTEVDIWSLGIMVIEMIDGEPPYFNEPPLQAMRRIRDSLPPRVKDLHKVSSVLRGFLDLMLVREPSQRATAQELLGHPFLKLAGPPSCIVPLMRQYRHH

SEQ ID NO: 834215 - protein, 719 aa, Homo sapiens; identical to SEQ ID NO: 834214

SEQ ID NO: 834216 - protein, 719 aa, Homo sapiens; identical to SEQ ID NO: 834214

SEQ ID NO: 834217 - protein, 719 aa, Homo sapiens; identical to SEQ ID NO: 834214

SEQ ID NO: 834218 - protein, 206 aa, Homo sapiens
SPGAGLAAPDLESQPHRGSPPPEAEIAPGAATVAVTATAMPKAPKQQPPEPEWIGDGESTSPSDKVVKKGKKDKKIKKTFFEELAVEDKQAGEEEKVLKEKEQQQQQQQQQQKKKRDTRKGRRKKDVDDDGEEKELMERLKKLSVPTSDEEDEVPAPKPRGGKKTKGGNVFAALIQDQSEEEEEEEKHPPKPAKPEKNRINKAVSE

SEQ ID NO: 834219 - protein, 270 aa, Homo sapiens
  misc_feature (164)..(164): Xaa can be any naturally occurring amino acid
  misc_feature (174)..(174): Xaa can be any naturally occurring amino acid
  misc_feature (177)..(177): Xaa can be any naturally occurring amino acid
  misc_feature (181)..(181): Xaa can be any naturally occurring amino acid
  misc_feature (185)..(185): Xaa can be any naturally occurring amino acid
  misc_feature (191)..(191): Xaa can be any naturally occurring amino acid
  misc_feature (202)..(202): Xaa can be any naturally occurring amino acid
  misc_feature (216)..(217): Xaa can be any naturally occurring amino acid
  misc_feature (222)..(222): Xaa can be any naturally occurring amino acid
  misc_feature (226)..(227): Xaa can be any naturally occurring amino acid
  misc_feature (241)..(244): Xaa can be any naturally occurring amino acid
  misc_feature (248)..(248): Xaa can be any naturally occurring amino acid
  misc_feature (257)..(257): Xaa can be any naturally occurring amino acid
SPGAGLAAPDLESQPHRGSPPPEAEIAPGAATVAVTATAMPKAPKQQPPEPEWIGDGESTSPSDKVVKKGKKDKKIKKTFFEELAVEDKQAGEEEKVLKEKEQQQQQQQQQQKKKRDTRKGRRKKDVDDDGEEKELMERLKKLSVPTSDEEDEVPAPKPAEEEXRVVCFAPVQXRVXREEXTTLXAASGEXRHSVLRHTCSXTFSLCTFCLCHHVXXRIISXIIIXXSIWGSVHLCSCSAXXXXLSLXLSLLSRLAXAHLSLSQLSLVLC

SEQ ID NO: 834220 - protein, 883 aa, Homo sapiens
PGGGVGRASLESQPHRGSPPPEAEIAPGAATVAVTATAMPKAPKQQPPEPEWIGDGESTSPSDKVVKKGKKDKKIKKTFFEELAVEDKQAGEEEKVLKEKEQQQQQQQQQQKKKRDTRKGRRKKDVDDDGEEKELMERLKKLSVPTSDEEDEVPAPKPRGGKKTKGGNVFAALIQDQSEEEEEEEKHPPKPAKPEKNRINKAVSEEQQPALKGKKGKEEKSKGKAKPQNKFAALDNEEEDKEEEIIKEKEPPKQGKEKAKKAEQGSEEEGEGEEEEEEGGESKADDPYAHLSKKEKKKLKKQMEYERQVASLKAANAAENDFSVSQAEMSSRQAMLENASDIKLEKFSISAHGKELFVNADLYIVAGRRYGLVGPNGKGKTTLLKHIANRALSIPPNIDVLLCEQEVVADETPAVQAVLRADTKRLKLLEEERRLQGQLEQGDDTAAERLEKVYEELRATGAAAAEAKARRILAGLGFDPEMQNRPTQKFSGGWRMRVSLARALFMEPTLLMLDEPTNHLDLNAVIWLNNYLQGWRKTLLIVSHDQGFLDDVCTDIIHLDAQRLHYYRGNYMTFKKMYQQKQKELLKQYEKQEKKLKELKAGGKSTKQAEKQTKEALTRKQQKCRRKNQDEESQEAPELLKRPKEYTVRFTFPDPPPLSPPVLGLHGVTFGYQGQKPLFKNLDFGIDMDSRICIVGPNGVGKSTLLLLLTGKLTPTHGEMRKNHRLKIGFFNQQYAEQLRMEETPTEYLQRGFNLPYQDARKCLGRFGLESHAHTIQICKLSGGQKARVVFAELACREPDVLILDEPTNNLDIESIDALGEAINEYKGAVIVVSHDARLITETNCQLWVVEEQSVSQIDGDFEDYKREVLEALGEVMVSRPRE

SEQ ID NO: 834221 - protein, 883 aa, Homo sapiens; identical to SEQ ID NO: 834220

SEQ ID NO: 834222 - protein, 727 aa, Homo sapiens
CLRIIGFLSPNPSRKEKAKDQSEEEEEEEKHPPKPAKPEKNRINKAVSEEQQPALKGKKGKEEKSKGKAKPQNKFAALDNEEEDKEEEIIKEKEPPKQGKEKAKKAEQGSEEEGEGEEEEEEGGESKADDPYAHLSKKEKKKLKKQMEYERQVASLKAANAAENDFSVSQAEMSSRQAMLENASDIKLEKFSISAHGKELFVNADLYIVAGRRYGLVGPNGKGKTTLLKHIANRALSIPPNIDVLLCEQEVVADETPAVQAVLRADTKRLKLLEEERRLQGQLEQGDDTAAERLEKVYEELRATGAAAAEAKARRILAGLGFDPEMQNRPTQKFSGGWRMRVSLARALFMEPTLLMLDEPTNHLDLNAVIWLNNYLQGWRKTLLIVSHDQGFLDDVCTDIIHLDAQRLHYYRGNYMTFKKMYQQKQKELLKQYEKQEKKLKELKAGGKSTKQAEKQTKEALTRKQQKCRRKNQDEESQEAPELLKRPKEYTVRFTFPDPPPLSPPVLGLHGVTFGYQGQKPLFKNLDFGIDMDSRICIVGPNGVGKSTLLLLLTGKLTPTHGEMRKNHRLKIGFFNQQYAEQLRMEETPTEYLQRGFNLPYQDARKCLGRFGLESHAHTIQICKLSGGQKARVVFAELACREPDVLILDEPTNNLDIESIDALGEAINEYKGAVIVVSHDARLITETNCQLWVVEEQSVSQIDGDFEDYKREVLEALGEVMVSRPRE

SEQ ID NO: 834223 - protein, 581 aa, Homo sapiens [sequence omitted]

SEQ ID NO: 834224 - protein, 521 aa, Homo sapiens
ASSRVAKLLGLDLVHKGKTTLLKHIANRALSIPPNIDVLLCEQEVVADETPAVQAVLRADTKRLKLLEEERRLQGQLEQGDDTAAERLEKVYEELRATGAAAAEAKARRILAGLGFDPEMQNRPTQKFSGGWRMRVSLARALFMEPTLLMLDEPTNHLDLNAVIWLNNYLQGWRKTLLIVSHDQGFLDDVCTDIIHLDAQRLHYYRGNYMTFKKMYQQKQKELLKQYEKQEKKLKELKAGGKSTKQAEKQTKEALTRKQQKCRRKNQDEESQEAPELLKRPKEYTVRFTFPDPPPLSPPVLGLHGVTFGYQGQKPLFKNLDFGIDMDSRICIVGPNGVGKSTLLLLLTGKLTPTHGEMRKNHRLKIGFFNQQYAEQLRMEETPTEYLQRGFNLPYQDARKCLGRFGLESHAHTIQICKLSGGQKARVVFAELACREPDVLILDEPTNNLDIESIDALGEAINEYKGAVIVVSHDARLITETNCQLWVVEEQSVSQIDGDFEDYKREVLEALGEVMVSRPRE

SEQ ID NO: 834225 - protein, 791 aa, Homo sapiens
PGGGVGRASLESQPHRGSPPPEAEIAPGAATVAVTATAMPKAPKQQPPEPEWIGDGESTSPSDKVVKKGKKDKKIKKTFFEELAVEDKQAGEEEKVLKEKEQQQQQQQQQQKKKRDTRKGRRKKDVDDDGEEKELMERLKKLSVPTSDEEDEVPAPKPRGGKKTKGGNVFAALIQDQSEEEEEEEKHPPKPAKPEKNRINKAVSEEQQPALKGKKGKEEKSKGKAKPQNKFAALDNEEEDKEEEIIKEKEPPKQGKEKAKKAEQGSEEEGEGEEEEEEGGESKADDPYAHLSKKEKKKLKKQMEYERQVASLKAANAAENDFSVSQAEMSSRQAMLENASDIKLEKFSISAHGKELFVNADLYIVAGRRYGLVGPNGKGKTTLLKHIANRALSIPPNIDVLLCEQEVVADETPAVQAVLRADTKRLKLLEEERRLQGQLEQGDDTAAERLEKVYEELRATGAAAAEAKARRILAGLGFDPEMQNRPTQKFSGGWRMRVSLARALFMEPTLLMLDEPTNHLDLNAVIWLNNYLQGWRKTLLIVSHDQGFLDDVCTDIIHLDAQRLHYYRGNYMTFKKMYQQKQKELLKQYEKQEKKLKELKAGGKSTKQAEKQTKEALTRKQQKCRRKNQDEESQEAPELLKRPKEYTVRFTFPDPPPLSPPVLGLHGVTFGYQGQKPLFKNLDFGIDMDSRICIVGPNGVGKSTLLLLLTGKLTPTHGEMRKNHRLKIGFFNQQYAEQLRMEETPTEYLQRGFNLPYQDARKCLGRFGLESHAHTIQICKLSGGQKARVCS

SEQ ID NO: 834226 - protein, 140 aa, Homo sapiens
GNPCEYLQGYNRPSREPSLRLGRSALKNHAHTIQIGKLLGVQKGAIVVAELACGKPEVLIWDEPTNNLDIESIDALGEAINEYKGAVIVVSHDARLITETNCQLWVVEEQSVSQIDGDFEDYKREVLEALGEVMVSRPRE

SEQ ID NO: 834227 - protein, 695 aa, Homo sapiens
SPGAGLAAPDLESQPHRGSPPPEAEIAPGAATVAVTATAMPKAPKQQPPEPEWIGDGESTSPSDKVVKKGKKDKKIKKTFFEELAVEDKQAGEEEKVLKEKEQQQQQQQQQQKKKRDTRKGRRKKDVDDDGEEKELMERLKKLSVPTSDEEDEVPAPKPRGGKKTKGGNVFAALIQDQSEEEEEEEKHPPKPAKPEKNRINKAVSEEQQPALKGKKGKEEKSKGKAKPQNKFAALDNEEEDKEEEIIKEKEPPKQGKEKAKKAEQGSEEEGEGEEEEEEGGESKADDPYAHLSKKEKKKLKKQMEYERQVASLKAANAAENDFSVSQAEMSSRQAMLENASDIKLEKFSISAHGKELFVNADLYIVAGRRYGLVGPNGKGKTTLLKHIANRALSIPPNIDVLLCEQEVVADETPAVQAVLRADTKRLKLLEEERRLQGQLEQGDDTAAERLEKVYEELRATGAAAAEAKARRILAGLGFDPEMQNRPTQKFSGGWRMRVSLARALFMDAHHCVMLEWSAGANAAVGSAQRCSSGVNRRTSRVWREDLVVSTICPVHQRLSRSDVLQLNIHPPSDGPKLVVHSLIVGRTLTSVTLAQNRYVTQQQCMEEERAANSYDEAKQQSSCMDAEMARSGRVSYPTCNGGETNTTERGKAPDTLGKSRPGHSVLDGNHEPRGLNGNVRMGRAPPEGIHDRRS

SEQ ID NO: 834228 - protein, 308 aa, Homo sapiens
SPGAGLAAPDLESQPHRGSPPPEAEIAPGAATVAVTATAMPKAPKQQPPEPEWIGDGESTSPSDKVVKKGKKDKKIKKTFFEELAVEDKQAGEEEKVLKEKEQQQQQQQQQQKKKRDTRKGRRKKDVDDDGEEKELMERLKKLSVPTSDEEDEVPAPKPRGGKKTKGGNVFAALIQDQSEEEEEEEKHPPKPAKPEKNRINKAVSEEQQPALKGKKGKEEKSKGKAKPQNKFAALDNEEEDKEEEIIKEKEPPKQGLRAPGGLRGPGGLRAPGGLRAPGGLRAPGGLRAPGGLRAPGGLRAPGGLRAP

SEQ ID NO: 834229 - protein, 229 aa, Homo sapiens
SPGAGLAAPDLESQPHRGSPPPEAEIAPGAATVAVTATAMPKAPKQQPPEPEWIGDGESTSPSDKVVKKGKKDKKIKKTFFEELAVEDKQAGEEEKVLKEKEQQQQQQQQQQKKKRDTRKGRRKKDVDDDGEEKELMERLKKLSVPTSDEEDEVPAPKPRGGKKTKGGNVFAALIQDQSEEEEEEEKHPPKPAKPEKNRINKVTVVARSVTLTPFNTFWPWWSNFPLLN

SEQ ID NO: 834230 - protein, 845 aa, Homo sapiens
PGGGVGRASLESQPHRGSPPPEAEIAPGAATVAVTATAMPKAPKQQPPEPEWIGDGESTSPSDKVVKKGKKDKKIKKTFFEELAVEDKQAGEEEKVLKEKEQQQQQQQQQQKKKRDTRKGRRKKDVDDDGEEKELMERLKKLSVPTSDEEDEVPAPKPRGGKKTKGGNVFAALIQDQSEEEEEEEKHPPKPAKPEKNRINKAVSEEQQPALKGKKGKEEKSKGKAKPQNKFAALDNEEEDKEEEIIKEKEPPKQGKEKAKKAEQMEYERQVASLKAANAAENDFSVSQAEMSSRQAMLENASDIKLEKFSISAHGKELFVNADLYIVAGRRYGLVGPNGKGKTTLLKHIANRALSIPPNIDVLLCEQEVVADETPAVQAVLRADTKRLKLLEEERRLQGQLEQGDDTAAERLEKVYEELRATGAAAAEAKARRILAGLGFDPEMQNRPTQKFSGGWRMRVSLARALFMEPTLLMLDEPTNHLDLNAVIWLNNYLQGWRKTLLIVSHDQGFLDDVCTDIIHLDAQRLHYYRGNYMTFKKMYQQKQKELLKQYEKQEKKLKELKAGGKSTKQAEKQTKEALTRKQQKCRRKNQDEESQEAPELLKRPKEYTVRFTFPDPPPLSPPVLGLHGVTFGYQGQKPLFKNLDFGIDMDSRICIVGPNGVGKSTLLLLLTGKLTPTHGEMRKNHRLKIGFFNQQYAEQLRMEETPTEYLQRGFNLPYQDARKCLGRFGLESHAHTIQICKLSGGQKARVVFAELACREPDVLILDEPTNNLDIESIDALGEAINEYKGAVIVVSHDARLITETNCQLWVVEEQSVSQIDGDFEDYKREVLEALGEVMVSRPRE

SEQ ID NO: 834231 - protein, 127 aa, Homo sapiens
SPGAGLAAPDLESQPHRGSPPPEAEIAPGAATVAVTATAMPKAPKQQPPEPEWIGDGESTSPSDKVVKKGKKDKKIKKTFFEELAVEDKQAGEEEKVLKEKEQQQQQQQQQQKKKRDTRSSGGPSPY

SEQ ID NO: 834232 - protein, 883 aa, Homo sapiens; identical to SEQ ID NO: 834220

SEQ ID NO: 834233 - protein, 748 aa, Homo sapiens
MERLKKLSVPTSDEEDEVPAPKPRGGKKTKGGNVFAALIQDQSEEEEEEEKHPPKPAKPEKNRINKAVSEEQQPALKGKKGKEEKSKGKAKPQNKFAALDNEEEDKEEEIIKEKEPPKQGKEKAKKAEQGSEEEGEGEEEEEEGGESKADDPYAHLSKKEKKKLKKQMEYERQVASLKAANAAENDFSVSQAEMSSRQAMLENASDIKLEKFSISAHGKELFVNADLYIVAGRRYGLVGPNGKGKTTLLKHIANRALSIPPNIDVLLCEQEVVADETPAVQAVLRADTKRLKLLEEERRLQGQLEQGDDTAAERLEKVYEELRATGAAAAEAKARRILAGLGFDPEMQNRPTQKFSGGWRMRVSLARALFMEPTLLMLDEPTNHLDLNAVIWLNNYLQGWRKTLLIVSHDQGFLDDVCTDIIHLDAQRLHYYRGNYMTFKKMYQQKQKELLKQYEKQEKKLKELKAGGKSTKQAEKQTKEALTRKQQKCRRKNQDEESQEAPELLKRPKEYTVRFTFPDPPPLSPPVLGLHGVTFGYQGQKPLFKNLDFGIDMDSRICIVGPNGVGKSTLLLLLTGKLTPTHGEMRKNHRLKIGFFNQQYAEQLRMEETPTEYLQRGFNLPYQDARKCLGRFGLESHAHTIQICKLSGGQKARVVFAELACREPDVLILDEPTNNLDIESIDALGEAINEYKGAVIVVSHDARLITETNCQLWVVEEQSVSQIDGDFEDYKREVLEALGEVMVSRPRE

SEQ ID NO: 834234 - protein, 883 aa, Homo sapiens; identical to SEQ ID NO: 834220

SEQ ID NO: 834235 - protein, 883 aa, Homo sapiens; identical to SEQ ID NO: 834220

SEQ ID NO: 834236 - protein, 175 aa, Homo sapiens
VDSAADLTHGEIRKNHRLKIGFFNQQYAEQLRMEETPTEYLQRGFNLPYQDARKCLGRFGLESHAHTIQICKLSGGQKARVVFAELACREPDVLILDEPTNNLDIESIDALGEAINEYKGAVIVVSHDARLITETNCQLWVVEEQSVSQIDGDFEDYKREVLEALGEVMVSRPRE

SEQ ID NO: 834237 - protein, 405 aa, Homo sapiens
SPGAGLAAPDLESQPHRGSPPPEAEIAPGAATVAVTATAMPKAPKQQPPEPEWIGDGESTSPSDKVVKKGKKDKKIKKTFFEELAVEDKQAGEEEKVLKEKEQQQQQQQQQQKKKRDTRKGRRKKDVDDDGEEKELMERLKKLSVPTSDEEDEVPAPKPRGGKKTKGGNVFAALIQDQSEEEEEEEKHPPKPAKPEKNRINKAVSEEQQPALKGKKGKEEKSKGKAKPQNKFAALDNEEEDKEEEIIKEKEPPKQGKEKAKKAEQVQRKNGDLPEHKRPSAPVDFSKIDPSKPESILKMTKKGKTLMMFVTVSGSPTEKETEEITSLWQGSLFNANYDVQRFIVGSDRAIFMLRDGSYAWEIKDFWSVKTGVPDVTLEGQVYPPVKSERGTANENNYNIVQDKGQ

SEQ ID NO: 834238 - protein, 231 aa, Homo sapiens
SPGAGLAAPDLESQPHRGSPPPEAEIAPGAATVAVTATAMPKAPKQQPPEPEWIGDGESTSPSDKVVKKGKKDKKIKKTFFEELAVEDKQAGEEEKVLKEKEQQQQQQQQQQKKKRDTRKGRRKKDVDDDGEEKELMERLKKLSVPTSDEEDEVPAPKPRGGKKTKGGNVFAALIQDQSEEEEEEEKHPPKPAKPEKNRINKAVSEEQQPALKGKKGKKGHNVEVAVAPRS

SEQ ID NO: 834239 - protein, 304 aa, Homo sapiens
MGVFCLGPWGLGRKLRTPGKGPLQLLSRLCGDHLQAIPAKKAPAGQEEPGTPPSSPLSAEQLDRIQRNKAAALLRLAARNVPVGFGESWKKHLSGEFGKPYFIKLMGFVAEERKHYTVYPPPHQVFTWTQMCDIKDVKVVILGQDPYHGPNQAHGLCFSVQRPVPPPPSLENIYKELSTDIEDFVHPGHGDLSGWAKQGVLLLNAVLTVRAHQANSHKERGWEQFTDAVVSWLNQNSNGLVFLLWGSYAQKKGSAIDRKRHHVLQTAHPSPLSVYRGFFGCRHFSKTNELLQKSGKKPIDWKEL

SEQ ID NO: 834240 - protein, 344 aa, Homo sapiens
THIKARYEAGCVQASLAGSRVARVRCLLSSRMIGQKTLYSFFSPSPARKRHAPSPEPAVQGTGVAGVPEESGDAAAIPAKKAPAGQEEPGTPPSSPLSAEQLDRIQRNKAAALLRLAARNVPVGFGESWKKHLSGEFGKPYFIKLMGFVAEERKHYTVYPPPHQVFTWTQMCDIKDVKVVILGQDPYHGPNQAHGLCFSVQRPVPPPPSLENIYKELSTDIEDFVHPGHGDLSGWAKQGVLLLNAVLTVRAHQANSHKERGWEQFTDAVVSWLNQNSNGLVFLLWGSYAQKKGSAIDRKRHHVLQTAHPSPLSVYRGFFGCRHFSKTNELLQKSGKKPIDWKEL

SEQ ID NO: 834241 - protein, 344 aa, Homo sapiens; identical to SEQ ID NO: 834240

SEQ ID NO: 834242 - protein, 344 aa, Homo sapiens; identical to SEQ ID NO: 834240

SEQ ID NO: 834243 - protein, 328 aa, Homo sapiens
THIKARYEAGCVQASLAGSRVARVRCLLSSRMIGQKTLYSFFSPSPARKRHAPSPEPAVQGTGVAGVPEESGDAAAIPAKKAPAGQEEPGTPPSSPLSAEQLDRIQRNKAAALLRLAARNVPVGFGESWKKHLSGEFGKPYFIKLMGFVAEERKHYTVYPPPHQVFTWTQMCDIKDVKVVILGQDPYHGPNQAHGLCFSVQRPVPPPPSLENIYKELSTDIEDFVHPGHGDLSGWAKQGVLLLNAVLTVRAHQANSHKERGWEQFTDAVVSWLNQNSNGLVFLLWGSYAQKKGSAIDRKRHHVLQTAHPSPLSVYRGFFGCRHFQAQP

SEQ ID NO: 834244 - protein, 344 aa, Homo sapiens; identical to SEQ ID NO: 834240

SEQ ID NO: 834245 - protein, 76 aa, Homo sapiens
LCQACGVRRIARRVSSWLTFLIRVQAPSLIFLALSIYKAHPSPLSVYRGFFGCRHFSKTNELLQKSGKKPIDWKEL

SEQ ID NO: 834246 - protein, 266 aa, Homo sapiens
  misc_feature (255)..(256): Xaa can be any naturally occurring amino acid
MGVFCLGPWGLGRKLRTPGKGPLQLLSRLCGDHLQAIPAKKAPAGQEEPGTPPSSPLSAEQLDRIQRNKAAALLRLAARNVPVGFGESWKKHLSGEFGKPYFIKLMGFVAEERKHYTVYPPPHQVFTWTQMCDIKDVKVVILGQDPYHGPNQAHGLCFSVQRPVPPPPSLENIYKELSTDIEDFVHPGHGDLSGWAKQGVLLLNAVLTVRAHQANSHKERGWEQFTDAVVSWLNQNSNGLVFLLWGSYAQTPLQXXRVFDVTLSRP

SEQ ID NO: 834247 - protein, 252 aa, Homo sapiens
  misc_feature (6)..(6): Xaa can be any naturally occurring amino acid
GQYPPXYVARLGVRTASLAGSRVARVRCLLSSRMIGQKTLYSFFSPSPARKRHAPSPEPAVQGTGVAGVPEESGDAAAIPAKKAPAGQEEPGTPPSSPLSAEQLDRIQRNKAAALLRLAARNVPVGFGESWKKHLSGEFGKPYFIKLMGFVAEERKHYTVYPPPHQVFTWTQMCDIKDVKVVILGQDPYHGPNQAHGLCFSVQRPVPPPPSLENIYKELSTDIEDFVHPGHGDLSGWAKQGVSFSSCLTVVP

SEQ ID NO: 834248 - protein, 346 aa, Homo sapiens
  misc_feature (6)..(6): Xaa can be any naturally occurring amino acid
GQYPPXYVARLGVRTASLAGSRVARVRCLLSSRMIGQKTLYSFFSPSPARKRHAPSPEPAVQGTGVAGVPEESGDAAAIPAKKAPAGQEEPGTPPSSPLSAEQLDRIQRNKAAALLRLAARNVPVGFGESWKKHLSGEFGKPYFIKLMGFVAEERKHYTVYPPPHQVFTWTQMCDIKDVKVVILGQDPYHGPNQAHGLCFSVQRPVPPPPSLENIYKELSTDIEDFVHPGHGDLSGWAKQGVLLLNAVLTVRAHQANSHKERGWEQFTDAVVSWLNQNSNGLVFLLWGSYAQKKGSAIDRKRHHVLQTAHPSPLSVYRGFFGCRHFSKTNELLQKSGKKPIDWKEL

SEQ ID NO: 834249 - protein, 352 aa, Homo sapiens
SGGYAVGRVWRGRGTSVQGSQSPRRSSGSHRAPPSPSPRSSLEPNSQFPDRAQPWALTVRFCWDLFHKWASSALSRLCGDHLQAIPAKKAPAGQEEPGTPPSSPLSAEQLDRIQRNKAAALLRLAARNVPVGFGESWKKHLSGEFGKPYFIKLMGFVAEERKHYTVYPPPHQVFTWTQMCDIKDVKVVILGQDPYHGPNQAHGLCFSVQRPVPPPPSLENIYKELSTDIEDFVHPGHGDLSGWAKQGVLLLNAVLTVRAHQANSHKERGWEQFTDAVVSWLNQNSNGLVFLLWGSYAQKKGSAIDRKRHHVLQTAHPSPLSVYRGFFGCRHFSKTNELLQKSGKKPIDWKEL

SEQ ID NO: 834250 - protein, 164 aa, Homo sapiens
MGVFCLGPWGLGRKLRTPGKGPLQLLSRLCGDHLQAIPAKKAPAGQEEPGTPPSSPLSAEQLDRIQRNKAAALLRLAARNVPVGFGESWKKHLSGEFGKPYFIKLMGFVAEERKHYTVYPPPHQVFTWTQMCDIKDLTGSALVFKGLFRLRPVWRTFIKSCLQT

SEQ ID NO: 834251 - protein, 344 aa, Homo sapiens; identical to SEQ ID NO: 834240

SEQ ID NO: 834252 - protein, 344 aa, Homo sapiens; identical to SEQ ID NO: 834240

SEQ ID NO: 834253 - protein, 250 aa, Homo sapiens
THIKARYEAGCVQASLAGSRVARVRCLLSSRMIGQKTLYSFFSPSPARKRHAPSPEPAVQGTGVAGVPEESGDAAAIPAKKAPAGQEEPGTPPSSPLSAEQLDRIQRNKAAALLRLAARNVPVGFGESWKKHLSGEFGKPYFIKLMGFVAEERKHYTVYPPPHQVFTWTQMCDIKDVKVVILGQDPYHGPNQAHGLCFSVQRPVPPPPSLENIYKELSTDIEDFVHPGHGDLSGWAKQGVSFSSCLTVVP

SEQ ID NO: 834254 - protein, 783 aa, Homo sapiens
AAAMDEQAGPGVFFSNNHPGAGGAKGLGPLAEAAAAGDGAAAAGAARAQYSLPGILHFLQHEWARFEVERAQWEVERAELQAQIAFLQGERKGQENLKKDLVRRIKMLEYALKQERAKYHKLKYGTELNQGDMKPPSYDSDEGNETEVQPQQNSQLMWKQGRQLLRQYLQEVGYTDTILDVKSKRVRALLGFSSDVTDREDDKNQDSVVNGTEAEVKETAMIAKSELTDSASVLDNFKFLESAAADFSDEDEDDDVDGREKSVIDTSTIVRKKALPDSGEDRDTKEALKEFDFLVTSEEGDNESRSAGDGTDWEKEDQCLMPEAWNVDQGVITKLKEQYKKERKGKKGVKRPNRSKLQDMLANLRDVDELPSLQPSVGSPSRPSSSRLPEHEINRADEVEALTFPPSSGKSFIMGADEALESELGLGELAGLTVANEADSLTYDIANNKDALRKTWNPKFTLRSHFDGIRALAFHPIEPVLITASEDHTLKMWNLQKTAPAKKSTSLDVEPIYTFRAHKGPVLCVVMSSNGEQCYSGGTDGLIQGWNTTNPNIDPYDSYDPSVLRGPLLGHTDAVWGLAYSAAHQRLLSCSADGTLRLWNTTEVAPALSVFNDTKELGIPASVDLVSSDPSHMVASFSKGYTSIFNMETQQRILTLESNVDTTANSSCQINRVISHPTLSISITAHEDRHIKFYDNNTGKLIHSMVAHLEAVTSLAVDPNGLYLMSGSHDCSIRLWNLESKTCIQEFTAHRKKFEESIHDVAFHPSKCYIASAGADALAKVFV

SEQ ID NO: 834255 - protein, 783 aa, Homo sapiens; identical to SEQ ID NO: 834254

SEQ ID NO: 834256 - protein, 783 aa, Homo sapiens; identical to SEQ ID NO: 834254

SEQ ID NO: 834257 - protein, 783 aa, Homo sapiens; identical to SEQ ID NO: 834254

SEQ ID NO: 834258 - protein, 463 aa, Homo sapiens
MPEAWNVDQGVITKLKEQYKKERKGKKGVKRPNRSKLQDMLANLRDVDELPSLQPSVGSPSRPSSSRLPEHEINRADEVEALTFPPSSGKSFIMGADEALESELGLGELAGLTVANEADSLTYDIANNKDALRKTWNPKFTLRSHFDGIRALAFHPIEPVLITASEDHTLKMWNLQKTAPAKKSTSLDVEPIYTFRAHKGPVLCVVMSSNGEQCYSGGTDGLIQGWNTTNPNIDPYDSYDPSVLRGPLLGHTDAVWGLAYSAAHQRLLSCSADGTLRLWNTTEVAPALSVFNDTKELGIPASVDLVSSDPSHMVASFSKGYTSIFNMETQQRILTLESNVDTTANSSCQINRVISHPTLSISITAHEDRHIKFYDNNTGKLIHSMVAHLEAVTSLAVDPNGLYLMSGSHDCSIRLWNLESKTCIQEFTAHRKKFEESIHDVAFHPSKCYIASAGADALAKVFV

SEQ ID NO: 834259 - protein, 1134 aa, Homo sapiens
MSQPPPPPPPLPPPPPPPEAPQTPSSLASAAASGGLLKRRDRRILSGSCPDPKCQARLFFPASGSVSIECTECGQRHEQQQLLGVEEVTDPDVVLHNLLRNALLGVTGAPKKNTELVKVMGLSNYHCKLLSPILARYGMDKQTGRAKLLRDMNQGELFDCALLGDRAFLIEPEHVNTVGYGKDRSGSLLYLHDTLEDIKRANKSQECLIPVHVDGDGHCLVHAVSRALVGRELFWHALRENLKQHFQQHLARYQALFHDFIDAAEWEDIINECDPLFVPPEGVPLGLRNIHIFGLANVLHRPIILLDSLSGMRSSGDYSATFLPGLIPAEKCTGKDGHLNKPICIAWSSSGRNHYIPLVGIKGAALPKLPMNLLPKAWGVPQDLIKKYIKLEEDGGCVIGGDRSLQDKYLLRLVAAMEEVFMDKHGIHPSLVADVHQYFYRRTGVIGVQPEEVTAAAKKAVMDNRLHKCLLCGALSELHVPPEWLAPGGKLYNLAKSTHGQLRTDKNYSFPLNNLVCSYDSVKDVLVPDYGMSNLTACNWCHGTSVRKVRGDGSIVYLDGDRTNSRSTGGKCGCGFKHFWDGKEYDNLPEAFPITLEWGGRVVRETVYWFQYESDSSLNSNVYDVAMKLVTKHFPGEFGSEILVQKVVHTILHQTAKKNPDDYTPVNIDGAHAQRVGDVQGQESESQLPTKIILTGQKTKTLHKEELNMSKTERTIQQNITEQASVMQKRKTEKLKQEQKGQPRTVSPSTIRDGPSSAPATPTKAPYSPTTSKEKKIRITTNDGRQSMVTLKSSTTFFELQESIAREFNIPPYLQCIRYGFPPKELMPPQAGMEKEPVPLQHGDRITIEILKSKAEGGQSAAAHSAHTVKQEDIAVTGKLSSKELQEQAEKEMYSLCLLATLMGEDVWSYAKGLPHMFQQGGVFYSIMKKTMGMADGKHCTFPHLPGKTFVYNASEDRLELCVDAAGHFPIGPDVEDLVKEAVSQVRAEATTRSRESSPSHGLLKLGSGGVVKKKSEQLHNVTAFQGKGHSLGTASGNPHLDPRARETSVVRKHNTGTDFSNSSTKTEPSVFTASSSNSELIRIAPGVVTMRDGRQLDPDLVEAQRKKIAGNGFFYSGFNGQAPSGSKYRAVTI

SEQ ID NO: 834260 - protein, 219 aa, Homo sapiens
EAVGDSPPPRDGEFMRLGMADGKHCTFPHLPGKTFVYNASEDRLELCVDAAGHFPIGPDVEDLVKEAVSQVRAEATTRSRESSPSHGLLKLGSGGVVKKKSEQLHNVTAFQGKGHSLGTASGNPHLDPRARETSVVRKHNTGTDFSNSSTKTEPSVFTASSSNSELIRIAPGVVTMRDGRQLDPDLVEAQRKKIAGNGFFYSGFNGQAPSGSKYRAVTI

SEQ ID NO: 834261 - protein, 1134 aa, Homo sapiens; identical to SEQ ID NO: 834259

SEQ ID NO: 834262 - protein, 323 aa, Homo sapiens
RITDLRLRVTGLTEDHEYEFRVSAENAAGVGEPSPATVYYKACDPVFKPGPPTNAHIVDTTKNSITLAWGKPIYDGGSEILGYVVEICKADEEEWQIVTPQTGLRVTRFEISKLTEHQEYKIRVCALNKVGLGEATSVPGTVKPEDKLEAPELDLDSELRKGIVVRAGGSARIHIPFKGRPTPEITWSREEGEFTDKVQIEKGVNYTQLSIDNCDRNDAGKYILKLENSSGSKSAFVTVKVLDTPGPPQNLAVKEVRKDSAFLVWEPPIIDGGAKVKNYVIDKRESTRKAYANVSSKCSKTSFKVENLTEGAIYYFRVMAENE

SEQ ID NO: 834263 - protein, 157 aa, Homo sapiens
CEWALGVGRTGSSSTPCVYGVLEEAPGTSSLGESRSGRLTPPDPILPSATTGTPGSSRRPSGGDAEALAHPPADMGRRKSKRKPPPKKKMTGTLETQFTCPFCNHEKSCDVKMDRARNTGVISCTVCLEEFQTPITYLSEPVDVYSDWIDACEAANQ

SEQ ID NO: 834264 - protein, 101 aa, Homo sapiens
ARYEAGCDIGRGAHPPADMGRRKSKRKPPPKKKMTGTLETQFTCPFCNHEKSCDVKMDRARNTGVISCTVCLEEFQTPITYLSEPVDVYSDWIDACEAANQ

SEQ ID NO: 834265 - protein, 157 aa, Homo sapiens; identical to SEQ ID NO: 834263

SEQ ID NO: 834266 - protein, 102 aa, Homo sapiens
MRPHYVAQAGIQVLASSNPLTLASQSAGWDHRCEPPCLALSLFYRRGNCGTKSLNNLPRSRSSSTCRHGAQKVKTKAASQEEDDRHPRDPVHLPLLQPREIL

SEQ ID NO: 834267 - protein, 104 aa, Homo sapiens
MVRSRLTAVSASWVQAHPPADMGRRKSKRKPPPKKKMTGTLETQFTCPFCNHEKSCDVKMDRARNTGVISCTVCLEEFQTPITYLSEPVDVYSDWIDACEAANQ

SEQ ID NO: 834268 - protein, 104 aa, Homo sapiens; identical to SEQ ID NO: 834267

SEQ ID NO: 834269 - protein, 171 aa, Homo sapiens
AHHTVGNIGTARVNRTRQDPSKHPEPSHLSLLSPSPARGRTAALSLHTVFLYSEVPVPTSLPCSLSSGSRPSDNLSVTPPGMAHPPADMGRRKSKRKPPPKKKMTGTLETQFTCPFCNHEKSCDVKMDRARNTGVISCTVCLEEFQTPITYLSEPVDVYSDWIDACEAANQ

SEQ ID NO: 834270 - protein, 120 aa, Homo sapiens
MGRRKSKRKPPPKKKMTGTLETQFTCPFCNHEKSCDVKMDRARNTGVISCTVCLEEFQTPITCILGNLGFFQRVGRGLESGPCSSGPLCALVQGQSRPEEQVPPSDFCGVRRCRAGFQCQ

SEQ ID NO: 834271 - protein, 406 aa, Homo sapiens
MRLFRWLLKQPVPKQIERYSRFSPSPLSIKQFLDFGRDNACEKTSYMFLRKELPVRLANTMREVNLLPDNLLNRPSVGLVQSWYMQSFLELLEYENKSPEDPQVLDNFLQVLIKVRNRHNDVVPTMAQGVIEYKEKFGFDPFISTNIQYFLDRFYTNRISFRMLINQHTLLFGGDTNPVHPKHIGSIDPTCNVADVVKDAYETAKMLCEQYYLVAPELEVEEFNAKAPDKPIQVVYVPSHLFHMLFELFKNSMRATVELYEDRKEGYPAVKTLVTLGKEDLSIKISDLGGGVPLRKIDRLFNYMYSTAPRPSLEPTRAAPLAGFGYGLPISRLYARYFQGDLKLYSMEGVGTDAVIYLKALSSESFERLPVFNKSAWRHYKTTPEADDWSNPSSEPRDASKYKAKQ

SEQ ID NO: 834272 - protein, 406 aa, Homo sapiens; identical to SEQ ID NO: 834271

SEQ ID NO: 834273 - protein, 415 aa, Homo sapiens
MRLFRWLLKQPVPKQIERYSRFSPSPLSIKQFLDFGRDNACEKTSYMFLRKELPVRLANTMREVNLLPDNLLNRPSVGLVQSWYMQSFLELLEYENKSPEDPQVLDNFLQVLIKVRNRHNDVVPTMAQGVIEYKEKFGFDPFISTNIQYFLDRFYTNRISFRMLINQHTLLFGGDTNPVHPKHIGSIDPTCNVADVVKDAYETAKMLCEQYYLVAPELEVEEFNAKAPDKPIQVVYVPSHLFHMLFELFKNSMRATVELYEDRKEGYPAVKTLVTLGKEDLSIKISDLGGGVPLRKIDRLFNYMYSTAPRPSLEPTRAAPLAGFGYGLPISRLYARYFQGDLKLYSMEGVGTDAVIYLKALSSESFERLPVFNKSAWRHYKTTPEADDWSNPSSEPRDASKYKAKQDKIKTNRTF

SEQ ID NO: 834274 - protein, 426 aa, Homo sapiens
MRLFRWLLKQPVPKQIERYSRFSPSPLSIKQFLDFGRDNACEKTSYMFLRKELPVRLANTMREVNLLPDNLLNRPSVGLVQSWYMQSFLELLEYENKSPEDPQVLDNFLQVLIKVRNRHNDVVPTMAQGVIEYKEKFGFDPFISTNIQYFLDRFYTNRISFRMLINQHSKLEFVGPVLKALLFGGDTNPVHPKHIGSIDPTCNVADVVKDAYETAKMLCEQYYLVAPELEVEEFNAKAPDKPIQVVYVPSHLFHMLFELFKNSMRATVELYEDRKEGYPAVKTLVTLGKEDLSIKISDLGGGVPLRKIDRLFNYMYSTAPRPSLEPTRAAPLAGFGYGLPISRLYARYFQGDLKLYSMEGVGTDAVIYLKALSSESFERLPVFNKSAWRHYKTTPEADDWSNPSSEPRDASKYKAKQDKIKTNRTF

SEQ ID NO: 834275 - protein, 107 aa, Homo sapiens
MRLFRWLLKQPVPKQIERYSRFSPSPLSIKQFLDFGRDNACEKTSYMFLRKELPVRLANTMREVNLLPDNLLNRPSVGLVQSWYMQSFLELLEYENKSPEDPQVLDK

SEQ ID NO: 834276 - protein, 415 aa, Homo sapiens; identical to SEQ ID NO: 834273

SEQ ID NO: 834277 - protein, 223 aa, Homo sapiens
MPCDQAGMGYVAVGDHEEMASEEGSEAVRGGLRLGVVSWDGSGEPISDSKDGDKINDGRIDFDEFLKMMEGVQKEWTVASTKIACPQGGGVQRRRPATEESRSPATMTDQQAEARSYLSEEMIAEFKAAFDMFDADGGGDISVKELGTVMRMLGQTPTKEELDAIIEEVDEDGSGTIDFEEFLVMMVRQMKEDAKGKSEEELAEVLPHLRQECRRLHRPGGAG

SEQ ID NO: 834278 - protein, 223 aa, Homo sapiens; identical to SEQ ID NO: 834277

SEQ ID NO: 834279 - protein, 144 aa, Homo sapiens
LEQARSSLGGGVQRRRPATEESRSPATMTDQQAEARSYLSEEMIAEFKAAFDMFDADGGGDISVKELGTVMRMLGQTPTKEELDAIIEEVDEDGSGTIDFEEFLVMMVRQMKEDAKGKSEEELAEVLPHLRQECRRLHRPGGAG

SEQ ID NO: 834280 - protein, 102 aa, Homo sapiens
MIAEFKAAFDMFDADGGGDISVKELGTVMRMLGQTPTKEELDAIIEEVDEDGSGTIDFEEFLVMMVRQMKEDAKGKSEEELAEVLPHLRQECRRLHRPGGAG

SEQ ID NO: 834281 - protein, 130 aa, Homo sapiens
MPCDQAGMGYVAVGDHEEMASEEGSEAVRGGLRLGVVSWDGSGEPISDSKDGDKINDGRIDFDEFLKMMEGVQKEWTVASTKIACPQGGGVQRRRPATEESRSPATMTDQQAEARSYLSEEMIAEFKAAL

SEQ ID NO: 834282 - protein, 699 aa, Homo sapiens
GPPGRARARGLRRAPAAFLRRSLSLPAAFSSAAGPSSPQRSQEGRREPRTPRSSRGSRGSRPRRRLRLRRGRSAIHGEGRTAKGSAAWSARTFRSPPGVGRDPMRRAHEGREIPSLGGARRREVLQAGRSQRAAGRRRRRQELELGVGSGRPGGPPPGPGRRGTCAAALPPEWPRRRTGLPRRGPRRPLAMAKWLNKYFSLGNSKTKSPPQPPRPDYREQRRRGERPSQPPQAVPQASSAASASCGPATASCFSASSGSLPDDSGSTSDLIRAYRAQKERDFEDPYNGPGSSLRKLRAMCRLDYCGGSGEPGGVQRAFSASSASGAAGCCCASSGAGAAASSSSSSGSPHLYRSSSERRPATPAEVRYISPKHRLIKVESAAGGGAGDPLGGACAGGRTWSPTACGGKKLLNKCAASAAEESGAGKKDKVTIADDYSDPFDAKNDLKSKAGKGESAGYMEPYEAQRIMTEFQRQESVRSQHKGIQLYDTPYEPEGQSVDSDSESTVSPRLRESKLPQDDDRPADEYDQPWEWNRVTIPALAAQFNGNEKRQSSPSPSRDRRRQLRAPGGGFKPIKHGSPEFCGILGERVDPAVPLEKQIWYHGAISRGDAENLLRLCKECSYLVRNSQTSKHDYSLSLRSNQGFMHMKLAKTKEKYVLGQNSPPFDSVPEVIHYYTTRKLPIKGAEHLSLLYPVAVRTL

SEQ ID NO: 834283 - protein, 699 aa, Homo sapiens; identical to SEQ ID NO: 834282

SEQ ID NO: 834284 - protein, 530 aa, Homo sapiens
GPPGRARARGLRRAPAAFLRRSLSLPAAFSSAAGPSSPQRSQEGRREPRTPRSSRGSRGSRPRRRLRLRRGRSAIHGEGRTAKGSAAWSARTFRSPPGVGRDPMRRAHEGREIPSLGGARRREVLQAGRSQRAAGRRRRRQELELGVGSGRPGGPPPGPGRRGTCAAALPPEWPRRRTGLPRRGPRRPLAMAKWLNKYFSLGNSKTKSPPQPPRPDYREQRRRGERPSQPPQAVPQASSAASASCGPATASCFSASSGSLPDDSGSTSDLIRAYRAQKERDFEDPYNGPGSSLRKLRAMCRLDYCGGSGEPGGVQRAFSASSASGAAGCCCASSGAGAAASSSSSSGSPHLYRSSSERRPATPAEVRYISPKHRLIKVESAAGGGAGDPLGGACAGGRTWSPTACGGKKLLNKCAASAAEESGAGKKDKVTIADDYSDPFDAKNDLKSKAGKGESAGYMEPYEAQRIMTEFQRQESVRSQHKGIQLYDTPYEPEGQSVDSDSESTVSPRLRESNYPSKGLSTCPSSIPWL

SEQ ID NO: 834285 - protein, 699 aa, Homo sapiens; identical to SEQ ID NO: 834282

SEQ ID NO: 834286 - protein, 699 aa, Homo sapiens; identical to SEQ ID NO: 834282

SEQ ID NO: 834287 - protein, 531 aa, Homo sapiens
GPPGRARARGLRRAPAAFLRRSLSLPAAFSSAAGPSSPQRSQEGRREPRTPRSSRGSRGSRPRRRLRLRRGRSAIHGEGRTAKGSAAWSARTFRSPPGVGRDPMRRAHEGREIPSLGGARRREVLQAGRSQRAAGRRRRRQELELGVGSGRPGGPPPGPGRRGTCAAALPPEWPRRRTGLPRRGPRRPLAMAKWLNKYFSLGNSKTKSPPQPPRPDYREQRRRGERPSQPPQAVPQASSAASASCGPATASCFSASSGSLPDDSGSTSDLIRAYRAQKERDFEDPYNGPGSSLRKLRAMCRLDYCGGSGEPGGVQRAFSASSASGAAGCCCASSGAGAAASSSSSSGSPHLYRSSSERRPATPAEVRYISPKHRLIKVESAAGGGAGDPLGGACAGGRTWSPTACGGKKLLNKCAASAAEESGAGKKDKVTIADDYSDPFDAKNDLKSKAGKGESAGYMEPYEAQRIMTEFQRQESVRSQHKGIQLYDTPYEPEGQSVDSDSESTVKQPSVRQCPGSHPLLHHQKATHQRG

SEQ ID NO: 834288 - protein, 199 aa, Homo sapiens [sequence omitted]

SEQ ID NO: 834289 - protein, 117 aa, Homo sapiens
ALWREGPVREGEAWPADPAPSSGSSYSPALCSALCWLQEGSSLADHTDLRTKGTKHSRGNPSGPRRSAKPQRVNEIPTHHQVALLTRSTCLALKAQLSDQTPHSWWGDLTSSGSSGD

SEQ ID NO: 834290 - protein, 107 aa, Homo sapiens
ALWREGPVREGEAWPADPAPSSGSSYSPALCSALCWLQEGSSLADHTDLRTKGTKHSRGNPSGPRRSAKPQRVNEIPTGGAGRRQQAGWREQHEEQHLSPACVASMC

SEQ ID NO: 834291 - protein, 392 aa, Homo sapiens
MSLVACECLPSPGLEPEPCSRARSQAHVYLEQIRNRVALGVPDMTKRDYLVDAATQIRLALERDVSEDYEAAFNHYQNGVDVLLRGIHVDPNKERREAVKLKITKYLRRAEEIFNCHLQRPLSSGASPSAVQLVQDPATGGTFVVKSLPRCHMVSRERLTIIPHGVPYMTKLLRYFVSEDSIFLHLEHVQGHIRLTYFGQWSEVEPQCCGEAVDNLYSAPEVGGISELTEACDWWSFGSLLYELLTGMALSQSHPSGIQAHTQLQLPEWLSRPAASLLTELLQFEPTRRLGMGEGGVSKLKSHPFFSTIQWSKLVGKRAERVTEAAGLVWIASPPCLTPNPGLALYQRALGEEWRALSVLLGSHWGLRIMATTQEGPAPGKAGGGGSQGLPC

SEQ ID NO: 834292 - protein, 638 aa, Homo sapiens
MHLPIPGPSCRAAMSLVACECLPSPGLEPEPCSRARSQAHVYLEQIRNRVALGVPDMTKRDYLVDAATQIRLALERDVSEDYEAAFNHYQNGVDVLLRGIHVDPNKERREAVKLKITKYLRRAEEIFNCHLQRPLSSGASPSAGFSSLRLRPIRTLSSAVEQLRGCRVVGVIEKVQLVQDPATGGTFVVKSLPRCHMVSRERLTIIPHGVPYMTKLLRYFVSEDSIFLHLEHVQGGTLWSHLLSQAHSRHSGLSSGSTQERMKAQLNPHLNLLTPARLPSGHAPGQDRIALEPPRTSPNLLLAGEAPSTRPQREAEGEPTARTSTSGSSDLPKAPGGHLHLQARRAGQNSDAGPPRGLTWVPEGAGPVLGGCGRGMDQSCLSADGAGRGCGRATWSVREEQVKQWAAEMLVALEALHEQGVLCRDLHPGNLLLDQAGHIRLTYFGQWSEVEPQCCGEAVDNLYSAPEVGGISELTEACDWWSFGSLLYELLTGMALSQSHPSGIQAHTQLQLPEWLSRPAASLLTELLQFEPTRRLGMGEGGVSKLKSHPFFSTIQWSKLVGKRAERVTEAAGLVWIASPPCLTPNPGLALYQRALGEEWRALSVLLGSHWGLRIMATTQEGPAPGKAGGGGSQGLPC

SEQ ID NO: 834293 - protein, 199 aa, Homo sapiens [sequence omitted]

SEQ ID NO: 834294 - protein, 192 aa, Homo sapiens
PVREGEAWPADPAPSSGRYGVLSGPFSTLPGEGPPRPSLHPGTVHLAAGAPWVARAAFCVQAGPAALPGRTLPGGVDPEASPTRAPPRARPQSLKFPWAWPSRDGAASLCLLAASWPGFSSPPAEAVGLPPRPTAHPALSSFSPNDLGLEVPGPAHSQWDLGEQRRGSFVGLSLSPFPSRSHGCHPFGRLGH

SEQ ID NO: 834295 - protein, 592 aa, Homo sapiens
MSLVACECLPSPGLEPEPCSRARSQAHVYLEQIRNRVALGVPDMTKRDYLVDAATQIRLALERDVSEDYEAAFNHYQNGVDVLLRGIHVDPNKERREAVKLKITKYLRRAEEIFNCHLQRPLSSGASPSAVQLVQDPATGGTFVVKSLPRCHMVSRERLTIIPHGVPYMTKLLRYFVSEDSIFLHLEHVQGGTLWSHLLSQAHSRHSGLSSGSTQERMKAQLNPHLNLLTPARLPSGHAPGQDRIALEPPRTSPNLLLAGEAPSTRPQREAEGEPTARTSTSGSSDLPKAPGGHLHLQARRAGQNSDAGPPRGLTWVPEGAGPVLGGCGRGMDQSCLSADGAGRGCGRATWSVREEQVKQWAAEMLVALEALHEQGVLCRDLHPGNLLLDQAGHIRLTYFGQWSEVEPQCCGEAVDNLYSAPEVGGISELTEACDWWSFGSLLYELLTGMALSQSHPSGIQAHTQLQLPEWLSRPAASLLTELLQFEPTRRLGMGEGGVSKLKSHPFFSTIQWSKLVGDISGDSSQDTDPLAQWTQTRLSWLVLSVTQRVGLFHQKLFVQLGRPRSRDAICCAGRDEDSLSGPGCLPCHCLL

SEQ ID NO: 834296 - protein, 625 aa, Homo sapiens
MSLVACECLPSPGLEPEPCSRARSQAHVYLEQIRNRVALGVPDMTKRDYLVDAATQIRLALERDVSEDYEAAFNHYQNGVDVLLRGIHVDPNKERREAVKLKITKYLRRAEEIFNCHLQRPLSSGASPSAGFSSLRLRPIRTLSSAVEQLRGCRVVGVIEKVQLVQDPATGGTFVVKSLPRCHMVSRERLTIIPHGVPYMTKLLRYFVSEDSIFLHLEHVQGGTLWSHLLSQAHSRHSGLSSGSTQERMKAQLNPHLNLLTPARLPSGHAPGQDRIALEPPRTSPNLLLAGEAPSTRPQREAEGEPTARTSTSGSSDLPKAPGGHLHLQARRAGQNSDAGPPRGLTWVPEGAGPVLGGCGRGMDQSCLSADGAGRGCGRATWSVREEQVKQWAAEMLVALEALHEQGVLCRDLHPGNLLLDQAGHIRLTYFGQWSEVEPQCCGEAVDNLYSAPEVGGISELTEACDWWSFGSLLYELLTGMALSQSHPSGIQAHTQLQLPEWLSRPAASLLTELLQFEPTRRLGMGEGGVSKLKSHPFFSTIQWSKLVGKRAERVTEAAGLVWIASPPCLTPNPGLALYQRALGEEWRALSVLLGSHWGLRIMATTQEGPAPGKAGGGGSQGLPC

SEQ ID NO: 834297 - protein, 392 aa, Homo sapiens; identical to SEQ ID NO: 834291

SEQ ID NO: 834298 - protein, 219 aa, Homo sapiens
MSLVACECLPSPGLEPEPCSRARSQAHVYLEQIRNRVALGVPDMTKRDYLVDAATQIRLALERDVSEDYEAAFNHYQNGVDVLLRGIHVDPNKERREAVKLKITKYLRRAEEIFNCHLQRPLSSGASPSAGFSSLRLRPIRTLSSAVEQLRGCRVVGVIEKVQLVQDPATGGTFVVKAGATLPLPLCIPLGSFSGLLETPTQNLHLKPALPPTKAGCSA

SEQ ID NO: 834299 - protein, 541 aa, Homo sapiens
MVADPPRDSKGLAAAEPTANGGLALASIEDQGAAAGGYCGSRDQVRRCLRANLLVLLTVVAVVAGVALGLGVSGAGGALALGPERLSAFVFPGELLLRLLRMIILPLVVCSLIGGAASLDPGALGRLGAWALLFFLVTTLLASALGVGLALALQPGAASAAINASVGAAGSAENAPSKEVLDSFLDLARNIFPSNLVSAAFRSYSTTYEERNITGTRVKVPVGQEVEGMNILGLVVFAIVFGVALRKLGPEGELLIRFFNSFNEATMVLVSWIMWYAPVGIMFLVAGKIVEMEDVGLLFARLGKYILCCLLGHAIHGLLVLPLIYFLFTRKNPYRFLWGIVTPLATAFGTSSSSATLPLMMKCVEENNGVAKHISRFILPIGATVNMDGAALFQCVAAVFIAQLSQQSLDFVKIITILVTATASSVGAAGIPAGGVLTLAIILEAVNLPVDHISLILAVDWLVDRSCTVLNVEGDALGAGLLQNYVDRTESRSTEPELIQVKSELPLDPLPVPTEEGNPLLKHYRGPAGDATVASEKESVM

SEQ ID NO: 834300 - protein, 541 aa, Homo sapiens; identical to SEQ ID NO: 834299

SEQ ID NO: 834301 - protein, 541 aa, Homo sapiens; identical to SEQ ID NO: 834299

SEQ ID NO: 834302 - protein, 313 aa, Homo sapiens
MNILGLVVFAIVFGVALRKLGPEGELLIRFFNSFNEATMVLVSWIMWYAPVGIMFLVAGKIVEMEDVGLLFARLGKYILCCLLGHAIHGLLVLPLIYFLFTRKNPYRFLWGIVTPLATAFGTSSSSATLPLMMKCVEENNGVAKHISRFILPIGATVNMDGAALFQCVAAVFIAQLSQQSLDFVKIITILVTATASSVGAAGIPAGGVLTLAIILEAVNLPVDHISLILAVDWLVDRSCTVLNVEGDALGAGLLQNYVDRTESRSTEPELIQVKSELPLDPLPVPTEEGNPLLKHYRGPAGDATVASEKESVM

SEQ ID NO: 834303 - protein, 440 aa, Homo sapiens
MIILPLVVCSLIGGAASLDPGALGRLGAWALLFFLVTTLLASALGVGLALALQPGAASAAINASVGAAGSAENAPSKEVLDSFLDLARNIFPSNLVSAAFRSYSTTYEERNITGTRVKVPVGQEVEGMNILGLVVFAIVFGVALRKLGPEGELLIRFFNSFNEATMVLVSWIMWYAPVGIMFLVAGKIVEMEDVGLLFARLGKYILCCLLGHAIHGLLVLPLIYFLFTRKNPYRFLWGIVTPLATAFGTSSSSATLPLMMKCVEENNGVAKHISRFILPIGATVNMDGAALFQCVAAVFIAQLSQQSLDFVKIITILVTATASSVGAAGIPAGGVLTLAIILEAVNLPVDHISLILAVDWLVDRSCTVLNVEGDALGAGLLQNYVDRTESRSTEPELIQVKSELPLDPLPVPTEEGNPLLKHYRGPAGDATVASEKESVM

SEQ ID NO: 834304 - protein, 541 aa, Homo sapiens; identical to SEQ ID NO: 834299

SEQ ID NO: 834305 - protein, 541 aa, Homo sapiens; identical to SEQ ID NO: 834299

SEQ ID NO: 834306 - protein, 368 aa, Homo sapiens
RKTRQDIEGRLQPSGVNIFPSNLVSAAFRSYSTTYEERNITGTRVKVPVGQEVEGMNILGLVVFAIVFGVALRKLGPEGELLIRFFNSFNEATMVLVSWIMWYAPVGIMFLVAGKIVEMEDVGLLFARLGKYILCCLLGHAIHGLLVLPLIYFLFTRKNPYRFLWGIVTPLATAFGTSSSSATLPLMMKCVEENNGVAKHISRFILPIGATVNMDGAALFQCVAAVFIAQLSQQSLDFVKIITILVTATASSVGAAGIPAGGVLTLAIILEAVNLPVDHISLILAVDWLVDRSCTVLNVEGDALGAGLLQNYVDRTESRSTEPELIQVKSELPLDPLPVPTEEGNPLLKHYRGPAGDATVASEKESVM

SEQ ID NO: 834307 - protein, 365 aa, Homo sapiens
MVSNNPLCVCLCRNIFPSNLVSAAFRSYSTTYEERNITGTRVKVPVGQEVEGMNILGLVVFAIVFGVALRKLGPEGELLIRFFNSFNEATMVLVSWIMWYAPVGIMFLVAGKIVEMEDVGLLFARLGKYILCCLLGHAIHGLLVLPLIYFLFTRKNPYRFLWGIVTPLATAFGTSSSSATLPLMMKCVEENNGVAKHISRFILPIGATVNMDGAALFQCVAAVFIAQLSQQSLDFVKIITILVTATASSVGAAGIPAGGVLTLAIILEAVNLPVDHISLILAVDWLVDRSCTVLNVEGDALGAGLLQNYVDRTESRSTEPELIQVKSELPLDPLPVPTEEGNPLLKHYRGPAGDATVASEKESVM

SEQ ID NO: 834308 - protein, 367 aa, Homo sapiens
MVATALAGCNTFAARSDWMLHADSEFDRPYSTTYEERNITGTRVKVPVGQEVEGMNILGLVVFAIVFGVALRKLGPEGELLIRFFNSFNEATMVLVSWIMWYAPVGIMFLVAGKIVEMEDVGLLFARLGKYILCCLLGHAIHGLLVLPLIYFLFTRKNPYRFLWGIVTPLATAFGTSSSSATLPLMMKCVEENNGVAKHISRFILPIGATVNMDGAALFQCVAAVFIAQLSQQSLDFVKIITILVTATASSVGAAGIPAGGVLTLAIILEAVNLPVDHISLILAVDWLVDRSCTVLNVEGDALGAGLLQNYVDRTESRSTEPELIQVKSELPLDPLPVPTEEGNPLLKHYRGPAGDATVASEKESVM

SEQ ID NO: 834309 - protein, 283 aa, Homo sapiens
DSEDPSCRLGLVSWIMWYAPVGIMFLVAGKIVEMEDVGLLFARLGKYILCCLLGHAIHGLLVLPLIYFLFTRKNPYRFLWGIVTPLATAFGTSSSSATLPLMMKCVEENNGVAKHISRFILPIGATVNMDGAALFQCVAAVFIAQLSQQSLDFVKIITILVTATASSVGAAGIPAGGVLTLAIILEAVNLPVDHISLILAVDWLVDRSCTVLNVEGDALGAGLLQNYVDRTESRSTEPELIQVKSELPLDPLPVPTEEGNPLLKHYRGPAGDATVASEKESVM

SEQ ID NO: 834310 - protein, 373 aa, Homo sapiens
MVADPPRDSKGLAAAEPTANGGLALASIEDQGAAAGGYCGSRDQVRRCLRANLLVLLTVVAVVAGVALGLGVSGAGGALALGPERLSAFVFPGELLLRLLRMIILPLVVCSLIGGAASLDPGALGRLGAWALLFFLVTTLLASALGVGLALALQPGAASAAINASVGAAGSAENAPSKEVLDSFLDLARNIFPSNLVSAAFRSYSTTYEERNITGTRVKVPVGQEVEGMNILGLVVFAIVFGVALRKLGPEGELLIRFFNSFNEATMVLVSWIMWYAPVGIMFLVAGKIVEMEDVGLLFARLGKYILCCLHAGHNYSRDAERSRYGILLDELGLVSPLVGQYDIAAHCLWDLSHVCDTRPLMMTVRGGELRCR

SEQ ID NO: 834311 - protein, 225 aa, Homo sapiens
MVADPPRDSKGLAAAEPTANGGLALASIEDQGAAAGGYCGSRDQVRRCLRANLLVLLTVVAVVAGVALGLGVSGAGGALALGPERLSAFVFPGELLLRLLRMIILPLVVCSLIGGAASLDPGALGRLGAWALLFFLVTTLLASALGVGLALALQPGAASAAINASVGAAGSAENAPSKEVLDSFLDLARNIFPSNLVSAAFRSTPRDSGERLRTNTCCHSRGHFF

SEQ ID NO: 834312 - protein, 94 aa, Homo sapiens
MVADPPRDSKGLAAAEPTANGGLALASIEDQGAAAGGYCGSRDQVRRCLRANLLVLLTVVAVVAGVALGLGVSGPGAEWAERDACSRDCADRVE

SEQ ID NO: 834313 - protein, 278 aa, Homo sapiens
MVADPPRDSKGLAAAEPTANGGLALAFVFPGELLLRLLRMIILPLVVCSLIGGAASLDPGALGRLGAWALLFFLVTTLLASALGVGLALALQPGAASAAINASVGAAGSAENAPSKEVLDSFLDLARNIFPSNLVSAAFRSYSTTYEERNITGTRVKVPVGQEVEGMNILGLVVFAIVFGVALRKLGPEGELLIRFFNSFNEATMVLVSWIMWYAPVGIMVLGWQNGAMGRWVTPWPAWKEHPAAGGQQPGRKASNISLPKNHVGGIERWRLDLDRTA

SEQ ID NO: 834314 - protein, 199 aa, Homo sapiens
MVSNNPLCVCLCRNIFPSNLVSAAFRSYSTTYEERNITGTRVKVPVGQEVEGMNILGLVVFAIVFGVALRKLGPEGELLIRFFNSFNEATMVLVSWIMWYAPVGIMFLVAGKIVEMEDVGLLFARLGKYILCCLLGHAIHGLLVLPLIYFLFTRKNPYRFLWGIVTPLATAFGTSSSSQLRDDEGGGHMAGRPSRITAL

SEQ ID NO: 834315 - protein, 541 aa, Homo sapiens; identical to SEQ ID NO: 834299

SEQ ID NO: 834316 - protein, 541 aa, Homo sapiens; identical to SEQ ID NO: 834299

SEQ ID NO: 834317 - protein, 541 aa, Homo sapiens; identical to SEQ ID NO: 834299

SEQ ID NO: 834318 - protein, 541 aa, Homo sapiens; identical to SEQ ID NO: 834299

SEQ ID NO: 834319 - protein, 541 aa, Homo sapiens; identical to SEQ ID NO: 834299

SEQ ID NO: 834320 - protein, 313 aa, Homo sapiens; identical to SEQ ID NO: 834302

SEQ ID NO: 834321 - protein, 339 aa, Homo sapiens
MYSTTYEERNITGTRVKVPVGQEVEGMNILGLVVFAIVFGVALRKLGPEGELLIRFFNSFNEATMVLVSWIMWYAPVGIMFLVAGKIVEMEDVGLLFARLGKYILCCLLGHAIHGLLVLPLIYFLFTRKNPYRFLWGIVTPLATAFGTSSSSATLPLMMKCVEENNGVAKHISRFILPIGATVNMDGAALFQCVAAVFIAQLSQQSLDFVKIITILVTATASSVGAAGIPAGGVLTLAIILEAVNLPVDHISLILAVDWLVDRSCTVLNVEGDALGAGLLQNYVDRTESRSTEPELIQVKSELPLDPLPVPTEEGNPLLKHYRGPAGDATVASEKESVM

SEQ ID NO: 834322 - protein, 383 aa, Homo sapiens
MVADPPRDSKGLAAAEPTANGGLALASIEDQGAAAGGYCGSRDQVRRCLRANLLVLLTVVAVVAGVALGLGVSGAGGALALGPERLSAFVFPGELLLRLLRMIILPLVVCSLIGGAASLDPGALGRLGAWALLFFLVTTLLASALGVGLALALQPGAASAAINASVGAAGSAENAPSKEVLDSFLDLARNIFPSNLVSAAFRSYSTTYEERNITGTRVKVPVGQEVEGMNILGLVVFAIVFGVALRKLGPEGELLIRFFNSFNEATMVLVSWIMWYAPVGIMFLVAGKIVEMEDVGLLFARLGKYILCCLLGHAIHGLLVLPLIYFLFTRKNPYRFLWGIVTPLATAFGTSSSSGSCVMMNAVGRTGGASIAYRPCAGNEAAQ

SEQ ID NO: 834323 - protein, 257 aa, Homo sapiens
MVADPPRDSKGLAAAEPTANGGLALASIEDQGAAAGGYCGSRDQVRRCLRANLLVLLTVVAVVAGVALGLGVSGAGGALALGPERLSAFVFPGELLLRLLRMIILPLVVCSLIGGAASLDPGALGRLGAWALLFFLVTTLLASALGVGLALALQPGAASAAINASVGAAGSAENAPSKEVLDSFLDLARNIFPSNLVSAAFRSYSTTYEERNITGTRVKVPVGQEVEGMNILGLVVCGGMCVCTCVCVCVCVCVCVL

SEQ ID NO: 834324 - protein, 190 aa, Homo sapiens
MVADPPRDSKGLAAAEPTANGGLALASIEDQGAAAGGYCGSRDQVRRCLRANLLVLLTVVAVVAGVALGLGVSGAGGALALGPERLSAFVFPGELLLRLLRMIILPLVVCSLIGGAASLDPGALGRLGAWALLFFLVTTLLASALGVGLALALQPGAARASSSWTGQAKCPRGCHSSGLEKFLTVELLLL

SEQ ID NO: 834325 - protein, 1172 aa, Homo sapiens [sequence omitted]

SEQ ID NO: 834326 - protein, 1172 aa, Homo sapiens [sequence omitted]

SEQ ID NO: 834327 - protein, 1172 aa, Homo sapiens [sequence omitted]

SEQ ID NO: 834328 - protein, 342 aa, Homo sapiens [sequence omitted]

SEQ ID NO: 834329 - protein, 1083 aa, Homo sapiens
MRPFFLLCFALPGLLHAQQACSRGACYPPVGDLLVGRTRFLRASSTCGLTKPETYCTQYGEWQMKCCKCDSRQPHNYYSHRVENVASSSGPMRWWQSQNDVNPVSLQLDLDRRFQLQEVMMEFQGPMPAGMLIERSSDFGKTWRVYQYLAADCTSTFPRVRQGRPQSWQDVRCQSLPQRPNARLNGGKVQLNLMDLVSGIPATQSQKIQEVGEITNLRVNFTRLAPVPQRGYHPPSAYYAVSQLRLQGSCFCHGHADRCAPKPGASAGPSTAVQVHDVCVCQHNTAGPNCERCAPFYNNRPWRPAEGQDAHECQRCDCNGHSETCHFDPAVFAASQGAYGGVCDNCRDHTEGKNCERCQLHYFRNRRPGASIQETCISCECDPDGAVPGAPCDPVTGQCVCKEHVQGERCDLCKPGFTGLTYANPQGCHRCDCNILGSRRDMPCDEESGRCLCLPNVVGPKCDQCAPYHWKLASGQGCEPCACDPHNSLSPQCNQFTGQCPCREGFGGLMCSAAAIRQCPDRTYGDVATGCRACDCDFRGTEGPGCDKASGRCLCRPGLTGPRCDQCQRGYCNRYPVCVACHPCFQTYDADLREQALRFGRLRNATASLWSGPGLEDRGLASRILDAKSKIEQIRAVLSSPAVTEQEVAQVASAILSLRRTLQGLQLDLPLEEETLSLPRDLESLDRSFNGLLTMYQRKREQFEKISSADPSGAFRMLSTAYEQSAQAAQQVSDSSRLLDQLRDSRREAERLVRQAGGGGGTGSPKLVALRLEMSSLPDLTPTFNKLCGNSRQMACTPISCPGELCPQDNGTACGSRCRGVLPRAGGAFLMAGQVAEQLRGFNAQLQRTRQMIRAAEESASQIQSSAQRLETQVSASRSQMEEDVRRTRLLIQQVRDFLTDPDTDAATIQEVSEAVLALWLPTDSATVLQKMNEIQAIAARLPNVDLVLSQTKQDIARARRLQAEAEEARSRAHAVEGQVEDVVGNLRQGTVALQEAQDTMQGTSRSLRLIQDRVAEVQQVLRPAEKLVTSMTKQLGDFWTRMEELRHQARQQGAEAVQAQQLAEGASEQALSAQEGFERIRH

SEQ ID NO: 834330 - protein, 913 aa, Homo sapiens
MRPFFLLCFALPGLLHAQQACSRGACYPPVGDLLVGRTRFLRASSTCGLTKPETYCTQYGEWQMKCCKCDSRQPHNYYSHRVENVASSSGPMRWWQSQNDVNPVSLQLDLDRRFQLQEVMMEFQGPMPAGMLIERSSDFGKTWRVYQYLAADCTSTFPRVRQGRPQSWQDVRCQSLPQRPNARLNGGKVQLNLMDLVSGIPATQSQKIQEVGEITNLRVNFTRLAPVPQRGYHPPSAYYAVSQLRLQGSCFCHGHADRCAPKPGASAGPSTAVQVHDVCVCQHNTAGPNCERCAPFYNNRPWRPAEGQDAHECQRCDCNGHSETCHFDPAVFAASQGAYGGVCDNCRDHTEGKNCERCQLHYFRNRRPGASIQETCISCECDPDGAVPGAPCDPVTGQCVCKEHVQGERCDLCKPGFTGLTYANPQGCHRCDCNILGSRRDMPCDEESGRCLCLPNVVGPKCDQCAPYHWKLASGQGCEPCACDPHNSLSPQCNQFTGQCPCREGFGGLMCSAAAIRQCPDRTYGDVATGCRACDCDFRGTEGPGCDKASGRCLCRPGLTGPRCDQCQRGYCNRYPVCVACHPCFQTYDADLREQALRFGRLRNATASLWSGPGLEDRGLASRILDAKSKIEQIRAVLSSPAVTEQEVAQVASAILSLRRTLQGLQLDLPLEEETLSLPRDLESLDRSFNGLLTMYQRKREQFEKISSADPSGAFRMLSTAYEQSAQAAQQVSDSSRLLDQLRDSRREAERLVRQAGGGGGTGSPKLVALRLEMSSLPDLTPTFNKLCGNSRQMACTPISCPGELCPQDNGTACGSRCRGVLPRAGGAFLMAGQVAEQLRGFNAQLQRTRQMIRAAEESASQIQSSAQRLETQVSASRSQMEEDVRRTRLLIQQVRDFLTDPDTDSSLRGNAP

SEQ ID NO: 834331 - protein, 814 aa, Homo sapiens
MRPFFLLCFALPGLLHAQQACSRGACYPPVGDLLVGRTRFLRASSTCGLTKPETYCTQYGEWQMKCCKCDSRQPHNYYSHRVENVASSSGPMRWWQSQNDVNPVSLQLDLDRRFQLQEVMMEFQGPMPAGMLIERSSDFGKTWRVYQYLAADCTSTFPRVRQGRPQSWQDVRCQSLPQRPNARLNGGKVQLNLMDLVSGIPATQSQKIQEVGEITNLRVNFTRLAPVPQRGYHPPSAYYAVSQLRLQGSCFCHGHADRCAPKPGASAGPSTAVQVHDVCVCQHNTAGPNCERCAPFYNNRPWRPAEGQDAHECQRCDCNGHSETCHFDPAVFAASQGAYGGVCDNCRDHTEGKNCERCQLHYFRNRRPGASIQETCISCECDPDGAVPGAPCDPVTGQCVCKEHVQGERCDLCKPGFTGLTYANPQGCHRCDCNILGSRRDMPCDEESGRCLCLPNVVGPKCDQCAPYHWKLASGQGCEPCACDPHNSLSPQCNQFTGQCPCREGFGGLMCSAAAIRQCPDRTYGDVATGCRACDCDFRGTEGPGCDKASGRCLCRPGLTGPRCDQCQRGYCNRYPVCVACHPCFQTYDADLREQALRFGRLRNATASLWSGPGLEDRGLASRILDAKSKIEQIRAVLSSPAVTEQEVAQVASAILSLRRTLQGLQLDLPLEEETLSLPRDLESLDRSFNGLLTMYQRKREQFEKISSADPSGAFRMLSTAYEQSAQAAQQVSDSSRLLDQLRDSRREAERLVRQAGGGGGTGSPKLVALRLEMSSLPDLTPTFNKVTWGMESHFLEPTPQLVTHQLLPPAILL

SEQ ID NO: 834332 - protein, 196 aa, Homo sapiens [sequence omitted]

SEQ ID NO: 834333 - protein, 1172 aa, Homo sapiens [sequence omitted]

SEQ ID NO: 834334 - protein, 1199 aa, Homo sapiens
RGLHCCTQFALLCPRKGPFWGSPHWLKMRPFFLLCFALPGLLHAQQACSRGACYPPVGDLLVGRTRFLRASSTCGLTKPETYCTQYGEWQMKCCKCDSRQPHNYYSHRVENVASSSGPMRWWQSQNDVNPVSLQLDLDRRFQLQEVMMEFQGPMPAGMLIERSSDFGKTWRVYQYLAADCTSTFPRVRQGRPQSWQDVRCQSLPQRPNARLNGGKVQLNLMDLVSGIPATQSQKIQEVGEITNLRVNFTRLAPVPQRGYHPPSAYYAVSQLRLQGSCFCHGHADRCAPKPGASAGPSTAVQVHDVCVCQHNTAGPNCERCAPFYNNRPWRPAEGQDAHECQRCDCNGHSETCHFDPAVFAASQGAYGGVCDNCRDHTEGKNCERCQLHYFRNRRPGASIQETCISCECDPDGAVPGAPCDPVTGQCVCKEHVQGERCDLCKPGFTGLTYANPQGCHRCDCNILGSRRDMPCDEESGRCLCLPNVVGPKCDQCAPYHWKLASGQGCEPCACDPHNSLSPQCNQFTGQCPCREGFGGLMCSAAAIRQCPDRTYGDVATGCRACDCDFRGTEGPGCDKASGRCLCRPGLTGPRCDQCQRGYCNRYPVCVACHPCFQTYDADLREQALRFGRLRNATASLWSGPGLEDRGLASRILDAKSKIEQIRAVLSSPAVTEQEVAQVASAILSLRRTLQGLQLDLPLEEETLSLPRDLESLDRSFNGLLTMYQRKREQFEKISSADPSGAFRMLSTAYEQSAQAAQQVSDSSRLLDQLRDSRREAERLVRQAGGGGGTGSPKLVALRLEMSSLPDLTPTFNKLCGNSRQMACTPISCPGELCPQDNGTACGSRCRGVLPRAGGAFLMAGQVAEQLRGFNAQLQRTRQMIRAAEESASQIQSSAQRLETQVSASRSQMEEDVRRTRLLIQQVRDFLTDPDTDAATIQEVSEAVLALWLPTDSATVLQKMNEIQAIAARLPNVDLVLSQTKQDIARARRLQAEAEEARSRAHAVEGQVEDVVGNLRQGTVALQEAQDTMQGTSRSLRLIQDRVAEVQQVLRPAEKLVTSMTKQLGDFWTRMEELRHQARQQGAEAVQAQQLAEGASEQALSAQEGFERIKQKYAELKDRLGQSSMLGEQGARIQSVKTEAEELFGETMEMMDRMKDMELELLRGSQAIMLRSADLTGLEKRVEQIRDHINGRVLYYATCK

SEQ ID NO: 834335 - protein, 319 aa, Homo sapiens
KGGSSSLGHHGRGATVGAFHKCCSAEERPRISGEVSGLLQSNACCLPDPDTDAATIQEVSEAVLALWLPTDSATVLQKMNEIQAIAARLPNVDLVLSQTKQDIARARRLQAEAEEARSRAHAVEGQVEDVVGNLRQGTVALQEAQDTMQGTSRSLRLIQDRVAEVQQVLRPAEKLVTSMTKQLGDFWTRMEELRHQARQQGAEAVQAQQLAEGASEQALSAQEGFERIKQKYAELKDRLGQSSMLGEQGARIQSVKTEAEELFGETMEMMDRMKDMELELLRGSQAIMLRSADLTGLEKRVEQIRDHINGRVLYYATCK

SEQ ID NO: 834336 - protein, 882 aa, Homo sapiens
MRPFFLLCFALPGLLHAQQACSRGACYPPVGDLLVGRTRFLRASSTCGLTKPETYCTQYGEWQMKCCKCDSRQPHNYYSHRVENVASSSGPMRWWQSQNDVNPVSLQLDLDRRFQLQEVMMEFQGPMPAGMLIERSSDFGKTWRVYQYLAADCTSTFPRVRQGRPQSWQDVRCQSLPQRPNARLNGGKVQLNLMDLVSGIPATQSQKIQEVGEITNLRVNFTRLAPVPQRGYHPPSAYYAVSQLRLQGSCFCHGHADRCAPKPGASAGPSTAVQVHDVCVCQHNTAGPNCERCAPFYNNRPWRPAEGQDAHECQRCDCNGHSETCHFDPAVFAASQGAYGGVCDNCRDHTEGKNCERCQLHYFRNRRPGASIQETCISCECDPDGAVPGAPCDPVTGQCVCKEHVQGERCDLCKPGFTGLTYANPQGCHRCDCNILGSRRDMPCDEESGRCLCLPNVVGPKCDQCAPYHWKLASGQGCEPCACDPHNSLSPQCNQFTGQCPCREGFGGLMCSAAAIRQCPDRTYGDVATGCRACDCDFRGTEGPGCDKASGRCLCRPGLTGPRCDQCQRGYCNRYPVCVACHPCFQTYDADLREQALRFGRLRNATASLWSGPGLEDRGLASRILDAKSKIEQIRAVLSSPAVTEQEVAQVASAILSLRRTLQGLQLDLPLEEETLSLPRDLESLDRSFNGLLTMYQRKREQFEKISSADPSGAFRMLSTAYEQSAQAAQQVSDSSRLLDQLRDSRREAERLVRQAGGGGGTGSPKLVALRLEMSSLPDLTPTFNKLCGNSRQMACTPISCPGELCPQDNGTACGSRCRGVLPRAGGAFLMAGQVAEQLRGFNAQLQRTRQMIRAAEESASQIQSSAQRLETQVSASRSQME

SEQ ID NO: 834337 - protein, 273 aa, Homo sapiens
MRPFFLLCFALPGLLHAQQACSRGACYPPVGDLLVGRTRFLRASSTCGLTKPETYCTQYGEWQMKCCKCDSRQPHNYYSHRVENVASSSGPMRWWQSQNDVNPVSLQLDLDRRFQLQEVMMEFQGPMPAGMLIERSSDFGKTWRVYQYLAADCTSTFPRVRQGRPQSWQDVRCQSLPQRPNARLNGGKVQLNLMDLVSGIPATQSQKIQEVGEITNLRVNFTRLAPVPQRGYHPPSAYYALKLRALKSRKLGWAVSPAFSSPLGRNPGPSTKT

SEQ ID NO: 834338 - protein, 86 aa, Homo sapiens
APVPPLCTLPLSPQGPMPAGMLIERSSDFGKTWRVYQYLAADCTSTFPRVRQGRPQSWQDVRCQSLPQRPNARLNGGKVGRGNPEK

SEQ ID NO: 834339 - protein, 130 aa, Homo sapiens; identical to SEQ ID NO: 747898

SEQ ID NO: 834340 - protein, 136 aa, Homo sapiens
RPNIQAVLLPKKTESRHKAKGKRNASRAGLQFPVGRVHRLLRKGNYSERVGAGAPVYLAAVLEYLTAEILELAGNAARDNKKTRIIPRHLQLAIRNDEELNKLLGRVTIAQGGVLPNIQAVLLPKKTESHHKAKGK

SEQ ID NO: 834341 - protein, 130 aa, Homo sapiens; identical to SEQ ID NO: 747898

SEQ ID NO: 834342 - protein, 1458 aa, Homo sapiens
QVAGRWGWYSPRRLCCSRCRLLLARWHSAAFKVRAGARQELAMKSLKSRLRRQDVPGPASSGAAAASAHAADWNKYDDRLMKAAERGDVEKVTSILAKKGVNPGKLDVEGRSVFHVVTSKGNLECLNAILIHGVDITTSDTAGRNALHLAAKYGHALCLQKLLQYNCPTEHADLQGRTALHDAAMADCPSSIQLLCDHGASVNAKDVDGRTPLVLATQMSRPTICQLLIDRGADVNSRDKQNRTALMLGCEYGCRDAVEVLIKNGADISLLDALGHDSSYYARIGDNLDILTLLKTASENTNKGRELWKKGPSLQQRNLTHMQDEVNVKSHQREHQNIQDLEIENEDLKERLRKIQQEQRILLDKVNGLQLQLNEEVMVADDLESEREKLKSLLAAKEKQHEESLRTIEALKNRFKYFESDHLGSGSHFSNRKEDMLLKQGQMYMADSQCTSPGIPAHMQSRSMLRPLELSLPSQTSYSENEILKKELEAMRTFCESAKQDRLKLQNELAHKVAECKALALECERVKEDSDEQIKQLEDALKDVQKRMYESEGKVKQMQTHFLALKEHLTSEAASGNHRLTEELKDQLKDLKVKYEGASAEVGKLRNQIKQNEMIVEEFKRDEGKLIEENKRLQKELSMCEMEREKKGRKVTEMEGQAKELSAKLALSIPAEKFENMKSSLSNEVNEKAKKLVEMEREHEKSLSEIRQLKRELENVKAKLAQHVKPEEHEQVKSRLEQKSGELGKKITELTLKNQTLQKEIEKVYLDNKLLKEQAHNLTIEMKNHYVPLKVSEDMKKSHDAIIDDLNRKLLDVTQKYTEKKLEMEKLLLENDSLSKDVSRLETVFVPPEKHEKEIIALKSNIVELKKQLSELKKKCGEDQEKIHALTSENTNLKKMMSNQYVPVKTHEEVKMTLNDTLAKTNRELLDVKKKFEDINQEFVKIKDKNEILKRNLENTQNQIKAEYISLAEHEAKMSSLSQSMRKVQDSNAEILANYRKGQEEIVTLHAEIKAQKKELDTIQECIKVKYAPIVSFEECERKFKATEKELKDQLSEQTQKYSVSEEEVKKNKQENDKLKKEIFTLQKDLRDKTVLIEKSHEMERALSRKTDELNKQLKDLSQKYTEVKNVKEKLVEENAKQTSEILAVQNLLQKQHVPLEQVEALKKSLNGTIENLKEELKSMQRCYEKEQQTVTKLHQLLENQKNSSVPLAEHLQIKEAFEKEVGIIKASLREKEEESQNKMEEVSKLQSEVQNTKQALKKLETREVVDLSKYKATKSDLETQISSLNEKLANLNRKYEEVCEEVLHAKKKEISAKDEKELLHFSIEQEIKDQKERCDKSLTTITELQRRIQESAKQIEAKDNKITELLNDVERLKQALNGLSQLTYTSGNPTKRQSQLIDTLQHQVKSLEQQLADADRQHQEVIAIYRTHLLSAAQGHMDEDVQEALLQIIQMRQGLVC

SEQ ID NO: 834343 - protein, 1318 aa, Homo sapiens
MLFKDLFILLRSEGLSVSSLPYLLIFYFGGAQRSKYISVLSLQINVTSPSSSFFFFFKLSSFSELAMQCFIAQLLLCIYYKFFLKFCDFSENKSLIIFKICYYLVFLNKLYLIYLKHSLKGPFHFGVLNRNTATLCYVQLMLDKLKITNWVYCQLRKIYFSVFLHLLTVFSYVLPKRNLTHMQDEVNVKSHQREHQNIQDLEIENEDLKERLRKIQQEQRILLDKVNGLQLQLNEEVMVADDLESEREKLKSLLAAKEKQHEESLRTIEALKNRFKYFESDHLGSGSHFSNRKEDMLLKQGQMYMADSQCTSPGIPAHMQSRSMLRPLELSLPSQTSYSENEILKKELEAMRTFCESAKQDRLKLQNELAHKVAECKALALECERVKEDSDEQIKQLEDALKDVQKRMYESEGKVKQMQTHFLALKEHLTSEAASGNHRLTEELKDQLKDLKVKYEGASAEVGKLRNQIKQNEMIVEEFKRDEGKLIEENKRLQKELSMCEMEREKKGRKVTEMEGQAKELSAKLALSIPAEKFENMKSSLSNEVNEKAKKLVEMEREHEKSLSEIRQLKRELENVKAKLAQHVKPEEHEQVKSRLEQKSGELGKKITELTLKNQTLQKEIEKVYLDNKLLKEQAHNLTIEMKNHYVPLKVSEDMKKSHDAIIDDLNRKLLDVTQKYTEKKLEMEKLLLENDSLSKDVSRLETVFVPPEKHEKEIIALKSNIVELKKQLSELKKKCGEDQEKIHALTSENTNLKKMMSNQYVPVKTHEEVKMTLNDTLAKTNRELLDVKKKFEDINQEFVKIKDKNEILKRNLENTQNQIKAEYISLAEHEAKMSSLSQSMRKVQDSNAEILANYRKGQEEIVTLHAEIKAQKKELDTIQECIKVKYAPIVSFEECERKFKATEKELKDQLSEQTQKYSVSEEEVKKNKQENDKLKKEIFTLQKDLRDKTVLIEKSHEMERALSRKTDELNKQLKDLSQKYTEVKNVKEKLVEENAKQTSEILAVQNLLQKQHVPLEQVEALKKSLNGTIENLKEELKSMQRCYEKEQQTVTKLHQLLENQKNSSVPLAEHLQIKEAFEKEVGIIKASLREKEEESQNKMEEVSKLQSEVQNTKQALKKLETREVVDLSKYKATKSDLETQISSLNEKLANLNRKYEEVCEEVLHAKKKEISAKDEKELLHFSIEQEIKDQKERCDKSLTTITELQRRIQESAKQIEAKDNKITELLNDVERLKQALNGLSQLTYTSGNPTKRQSQLIDTLQHQVKSLEQQLADADRQHQEVIAIYRTHLLSAAQGHMDEDVQEALLQIIQMRQGLVC

SEQ ID NO: 834344 - protein, 1608 aa, Homo sapiens
MLFKDLFILLRSEGLSVSSLPYLLIFYFGGAQRSKYISVLSLQINVTSPSSSFFFFFKLSSFSELAMQCFIAQLLLCIYYKFFLKFCDFSENKSLIIFKICYYLVFLNKLYLIYLKHSLKGPFHFGVLNRNTATLCYVQLMLDKLKITNWVYCQLRKIYFSVFLHLLTVFSYVLPKRNLTHMQDEVNVKSHQREHQNIQDLEIENEDLKERLRKIQQEQRILLDKVNGLQLQLNEEVMVADDLESEREKLKSLLAAKEKQHEESLRTIEALKNRFKYFESDHLGSGSHFSNRKYKSMDYHYSSPSSSKEECLSYLFNYTGITVQDIPAAKLHQHMELGRRYDDYCNFYHILIITEALILLSYLYFKIVYCMNYQICLVDVVDIDICLVIFRVHFFYGKNINKFSNLEKSVLMQVGILKLHLRIIFRPYIIFFILQCETVSLENLFLFPSDYETILSYNSNIYAINLNHHFVLIDYKIYVLLSCEPSLRVLNISEVLVILLRESIEKNKKKKNQPSICCSEIVGTSVYRNNKGKMGILEEDTFVLYLLLLFYLNNKGNNIKLMFAYFSMDIEVKMSFICIYLGKEDMLLKQGQMYMADSQCTSPGIPAHMQSRSMLRPLELSLPSQTSYSENEILKKELEAMRTFCESAKQDRLKLQNELAHKVAECKALALECERVKEDSDEQIKQLEDALKDVQKRMYESEGKVKQMQTHFLALKEHLTSEAASGNHRLTEELKDQLKDLKVKYEGASAEVGKLRNQIKQNEMIVEEFKRDEGKLIEENKRLQKELSMCEMEREKKGRKVTEMEGQAKELSAKLALSIPAEKFENMKSSLSNEVNEKAKKLVEMEREHEKSLSEIRQLKRELENVKAKLAQHVKPEEHEQVKSRLEQKSGELGKKITELTLKNQTLQKEIEKVYLDNKLLKEQAHNLTIEMKNHYVPLKVSEDMKKSHDAIIDDLNRKLLDVTQKYTEKKLEMEKLLLENDSLSKDVSRLETVFVPPEKHEKEIIALKSNIVELKKQLSELKKKCGEDQEKIHALTSENTNLKKMMSNQYVPVKTHEEVKMTLNDTLAKTNRELLDVKKKFEDINQEFVKIKDKNEILKRNLENTQNQIKAEYISLAEHEAKMSSLSQSMRKVQDSNAEILANYRKGQEEIVTLHAEIKAQKKELDTIQECIKVKYAPIVSFEECERKFKATEKELKDQLSEQTQKYSVSEEEVKKNKQENDKLKKEIFTLQKDLRDKTVLIEKSHEMERALSRKTDELNKQLKDLSQKYTEVKNVKEKLVEENAKQTSEILAVQNLLQKQHVPLEQVEALKKSLNGTIENLKEELKSMQRCYEKEQQTVTKLHQLLENQKNSSVPLAEHLQIKEAFEKEVGIIKASLREKEEESQNKMEEVSKLQSEVQNTKQALKKLETREVVDLSKYKATKSDLETQISSLNEKLANLNRKYEEVCEEVLHAKKKEISAKDEKELLHFSIEQEIKDQKERCDKSLTTITELQRRIQESAKQIEAKDNKITELLNDVERLKQALNGLSQLTYTSGNPTKRQSQLIDTLQHQVKSLEQQLADADRQHQEVIAIYRTHLLSAAQGHMDEDVQEALLQIIQMRQGLVC

SEQ ID NO: 834345 - protein, 891 aa, Homo sapiens
MSNSGRREKTEKQEKQHGRSIGKRTRRYEGASAEVGKLRNQIKQNEMIVEEFKRDEGKLIEENKRLQKELSMCEMEREKKGRKVTEMEGQAKELSAKLALSIPAEKFENMKSSLSNEVNEKAKKLVEMEREHEKSLSEIRQLKRELENVKAKLAQHVKPEEHEQVKSRLEQKSGELGKKITELTLKNQTLQKEIEKVYLDNKLLKEQAHNLTIEMKNHYVPLKVSEDMKKSHDAIIDDLNRKLLDVTQKYTEKKLEMEKLLLENDSLSKDVSRLETVFVPPEKHEKEIIALKSNIVELKKQLSELKKKCGEDQEKIHALTSENTNLKKMMSNQYVPVKTHEEVKMTLNDTLAKTNRELLDVKKKFEDINQEFVKIKDKNEILKRNLENTQNQIKAEYISLAEHEAKMSSLSQSMRKVQDSNAEILANYRKGQEEIVTLHAEIKAQKKELDTIQECIKVKYAPIVSFEECERKFKATEKELKDQLSEQTQKYSVSEEEVKKNKQENDKLKKEIFTLQKDLRDKTVLIEKSHEMERALSRKTDELNKQLKDLSQKYTEVKNVKEKLVEENAKQTSEILAVQNLLQKQHVPLEQVEALKKSLNGTIENLKEELKSMQRCYEKEQQTVTKLHQLLENQKNSSVPLAEHLQIKEAFEKEVGIIKASLREKEEESQNKMEEVSKLQSEVQNTKQALKKLETREVVDLSKYKATKSDLETQISSLNEKLANLNRKYEEVCEEVLHAKKKEISAKDEKELLHFSIEQEIKDQKERCDKSLTTITELQRRIQESAKQIEAKDNKITELLNDVERLKQALNGLSQLTYTSGNPTKRQSQLIDTLQHQVKSLEQQLADADRQHQEVIAIYRTHLLSAAQGHMDEDVQEALLQIIQMRQGLVC

SEQ ID NO: 834346 - protein, 271 aa, Homo sapiens
MMNCWFSCTPKNRHAADWNKYDDRLMKAAERGDVEKVTSILAKKGVNPGKLDVEGRSVFHVVTSKGNLECLNAILIHGVDITTSDTAGRNALHLAAKYGHALCLQKLLQYNCPTEHADLQGRTALHDAAMADCPSSIQLLCDHGASVNAKDVDGRTPLVLATQMSRPTICQLLIDRGADVNSRDKQNRTALMLGCEYGCRDAVEVLIKNGADISLLDALGHDSSYYARIGDNLDILTLLKTASENTNKGRELWKKGPSLQQAFSFSLVRGT

SEQ ID NO: 834347 - protein, 325 aa, Homo sapiens
MMNCWFSCTPKNRHAADWNKYDDRLMKAAERGDVEKVTSILAKKGVNPGKLDVEGRSVFHVVTSKGNLECLNAILIHGVDITTSDTAGRNALHLAAKYGHALCLQKLLQYNCPTEHADLQGRTALHDAAMADCPSSIQLLCDHGASVNAKDVDGRTPLVLATQMSRPTICQLLIDRGADVNSRDKQNRTALMLGCEYGCRDAVEVLIKNGADISLLDALGHDSSYYARIGDNLDILTLLKTASENTNKGRELWKKGPSLQQRNLTHMQDEVNVKSHQREHQNIQDLEIENEDLKERLRKIQQEQRILLDKVNGLQLQLNEEFRGP

SEQ ID NO: 834348 - protein, 1252 aa, Homo sapiens
MQCFIAQLLLCIYYKFFLKFCDFSENKSLIIFKICYYLVFLNKLYLIYLKHSLKGPFHFGVLNRNTATLCYVQLMLDKLKITNWVYCQLRKIYFSVFLHLLTVFSYVLPKRNLTHMQDEVNVKSHQREHQNIQDLEIENEDLKERLRKIQQEQRILLDKVNGLQLQLNEEVMVADDLESEREKLKSLLAAKEKQHEESLRTIEALKNRFKYFESDHLGSGSHFSNRKEDMLLKQGQMYMADSQCTSPGIPAHMQSRSMLRPLELSLPSQTSYSENEILKKELEAMRTFCESAKQDRLKLQNELAHKVAECKALALECERVKEDSDEQIKQLEDALKDVQKRMYESEGKVKQMQTHFLALKEHLTSEAASGNHRLTEELKDQLKDLKVKYEGASAEVGKLRNQIKQNEMIVEEFKRDEGKLIEENKRLQKELSMCEMEREKKGRKVTEMEGQAKELSAKLALSIPAEKFENMKSSLSNEVNEKAKKLVEMEREHEKSLSEIRQLKRELENVKAKLAQHVKPEEHEQVKSRLEQKSGELGKKITELTLKNQTLQKEIEKVYLDNKLLKEQAHNLTIEMKNHYVPLKVSEDMKKSHDAIIDDLNRKLLDVTQKYTEKKLEMEKLLLENDSLSKDVSRLETVFVPPEKHEKEIIALKSNIVELKKQLSELKKKCGEDQEKIHALTSENTNLKKMMSNQYVPVKTHEEVKMTLNDTLAKTNRELLDVKKKFEDINQEFVKIKDKNEILKRNLENTQNQIKAEYISLAEHEAKMSSLSQSMRKVQDSNAEILANYRKGQEEIVTLHAEIKAQKKELDTIQECIKVKYAPIVSFEECERKFKATEKELKDQLSEQTQKYSVSEEEVKKNKQENDKLKKEIFTLQKDLRDKTVLIEKSHEMERALSRKTDELNKQLKDLSQKYTEVKNVKEKLVEENAKQTSEILAVQNLLQKQHVPLEQVEALKKSLNGTIENLKEELKSMQRCYEKEQQTVTKLHQLLENQKNSSVPLAEHLQIKEAFEKEVGIIKASLREKEEESQNKMEEVSKLQSEVQNTKQALKKLETREVVDLSKYKATKSDLETQISSLNEKLANLNRKYEEVCEEVLHAKKKEISAKDEKELLHFSIEQEIKDQKERCDKSLTTITELQRRIQESAKQIEAKDNKITELLNDVERLKQALNGLSQLTYTSGNPTKRQSQLIDTLQHQVKSLEQQLADADRQHQEVIAIYRTHLLSAAQGHMDEDVQEALLQIIQMRQGLVC

SEQ ID NO: 834349 - protein, 1385 aa, Homo sapiens
MMNCWFSCTPKNRHAADWNKYDDRLMKAAERGDVEKVTSILAKKGVNPGKLDVEGRSVFHVVTSKGNLECLNAILIHGVDITTSDTAGRNALHLAAKYGHALCLQKLLQYNCPTEHADLQGRTALHDAAMADCPSSIQLLCDHGASVNAKDVDGRTPLVLATQMSRPTICQLLIDRGADVNSRDKQNRTALMLGCEYGCRDAVEVLIKNGADISLLDALGHDSSYYARIGDNLDILTLLKTASENTNKGRELWKKGPSLQQRNLTHMQDEVNVKSHQREHQNIQDLEIENEDLKERLRKIQQEQRILLDKVNGLQLQLNEEVMVADDLESEREKLKSLLAAKEKQHEESLRTIEALKNRFKYFESDHLGSGSHFSNLYFPRYTSPYAKQIYVKTSGTIFTQSTSYSENEILKKELEAMRTFCESAKQDRLKLQNELAHKVAECKALALECERVKEDSDEQIKQLEDALKDVQKRMYESEGKVKQMQTHFLALKEHLTSEAASGNHRLTEELKDQLKDLKVKYEGASAEVGKLRNQIKQNEMIVEEFKRDEGKLIEENKRLQKELSMCEMEREKKGRKVTEMEGQAKELSAKLALSIPAEKFENMKSSLSNEVNEKAKKLVEMEREHEKSLSEIRQLKRELENVKAKLAQHVKPEEHEQVKSRLEQKSGELGKKITELTLKNQTLQKEIEKVYLDNKLLKEQAHNLTIEMKNHYVPLKVSEDMKKSHDAIIDDLNRKLLDVTQKYTEKKLEMEKLLLENDSLSKDVSRLETVFVPPEKHEKEIIALKSNIVELKKQLSELKKKCGEDQEKIHALTSENTNLKKMMSNQYVPVKTHEEVKMTLNDTLAKTNRELLDVKKKFEDINQEFVKIKDKNEILKRNLENTQNQIKAEYISLAEHEAKMSSLSQSMRKVQDSNAEILANYRKGQEEIVTLHAEIKAQKKELDTIQECIKVKYAPIVSFEECERKFKATEKELKDQLSEQTQKYSVSEEEVKKNKQENDKLKKEIFTLQKDLRDKTVLIEKSHEMERALSRKTDELNKQLKDLSQKYTEVKNVKEKLVEENAKQTSEILAVQNLLQKQHVPLEQVEALKKSLNGTIENLKEELKSMQRCYEKEQQTVTKLHQLLENQKNSSVPLAEHLQIKEAFEKEVGIIKASLREKEEESQNKMEEVSKLQSEVQNTKQALKKLETREVVDLSKYKATKSDLETQISSLNEKLANLNRKYEEVCEEVLHAKKKEISAKDEKELLHFSIEQEIKDQKERCDKSLTTITELQRRIQESAKQIEAKDNKITELLNDVERLKQALNGLSQLTYTSGNPTKRQSQLIDTLQHQVKSLEQQLADADRQHQEVIAIYRTHLLSAAQGHMDEDVQEALLQIIQMRQGLVC

SEQ ID NO: 834350 - protein, 1219 aa, Homo sapiens
MLFKDLFILLRSEGLSVSSLPYLLIFYFGGAQRSKYISVLSLQINVTSPSSSFFFFFKLSSFSELAMQCFIAQLLLCIYYKFFLKFCDFSENKSLIIFKICYYLVFLNKLYLIYLKHSLKGPFHFGVLNRNTATLCYVQLMLDKLKITNWVYCQLRKIYFSVFLHLLTVFSYVLPKRNLTHMQDEVNVKSHQREHQNIQDLEIENEDLKERLRKIQQEQRILLDKVNGLQLQLNEEVMVADDLESEREKLKSLLAAKEKQHEESLRTIEALKNRFKYFESDHLGSGSHFSNRKYKSMDYHYSSPSSSKEECLSYLFNYTGITVQDIPAAKLHQHMELGRRYDDYCNFYHILIITEALILLSYLYFKIVYCMNYQICLVDVVDIDICLVIFRVHFFYGKNINKFSNLEKSVLMQVGILKLHLRIIFRPYIIFFILQCETVSLENLFLFPSDYETILSYNSNIYAINLNHHFVLIDYKIYVLLSCEPSLRVLNISEVLVILLRESIEKNKKKKNQPSICCSEIVGTSVYRNNKGKMGILEEDTFVLYLLLLFYLNNKGNNIKLMFAYFSMDIEVKMSFICIYLGKEDMLLKQGQMYMADSQCTSPGIPAHMQSRSMLRPLELSLPSQTSYSENEILKKELEAMRTFCESAKQDRLKLQNELAHKVAECKALALECERVKEDSDEQIKQLEDALKDVQKRMYESEGKVKQMQTHFLALKEHLTSEAASGNHRLTEELKDQLKDLKVKYEGASAEVGKLRNQIKQNEMIVEEFKRDEGKLIEENKRLQKELSMCEMEREKKGRKVTEMEGQAKELSAKLALSIPAEKFENMKSSLSNEVNEKAKKLVEMEREHEKSLSEIRQLKRELENVKAKLAQHVKPEEHEQVKSRLEQKSGELGKKITELTLKNQTLQKEIEKVYLDNKLLKEQAHNLTIEMKNHYVPLKVSEDMKKSHDAIIDDLNRKLLDVTQKYTEKKLEMEKLLLENDSLSKDVSRLETVFVPPEKHEKEIIALKSNIVELKKQLSELKKKCGEDQEKIHALTSENTNLKKMMSNQYVPVKTHEEVKMTLNDTLAKTNRELLDVKKKFEDINQEFVKIKDKNEILKRNLENTQNQIKAEYISLAEHEAKMSSLSQSMRKVQDSNAEILANYRKGQEEIVTLHAEIKAQKKELDTIQECIKVKYAPIVSFEECERKFKATEKELKDQLSEQTQKYSVSEEEVKKNK

SEQ ID NO: 834351 - protein, 695 aa, Homo sapiens
QASPSWISGQSPRLLRRAAAASAPAPAPCPASREPGWTRGGSAGVPPPLPGAAATMFSCVKPYEDQNYSALRRDCRRRKVLFEDPLFPATDDSLYYKGTPGPAVRWKRPKGICEDPRLFVDGISSHDLHQGQVGNCWFVAACSSLASRESLWQKVIPDWKEQEWDPEKPNAYAGIFHFHFWRFGEWVDVVIDDRLPTVNNQLIYCHSNSRNEFWCALVEKAYAKLAGCYQALDGGNTADALVDFTGGVSEPIDLTEGDFANDETKRNQLFERMLKVHSRGGLISASIKAVTAADMEARLACGLVKGHAYAVTDVRKVRLGHGLLAFFKSEKLDMIRLRNPWGEREWNGPWSDTSEEWQKVSKSEREKMGVTVQDDGEFWMTFEDVCRYFTDIIKCRVINTSHLSIHKTWEEARLHGAWTLHEDPRQNRGGGCINHKDTFFQNPQYIFEVKKPEDEVLICIQQRPKRSTRREGKGENLAIGFDIYKVEENRQYRMHSLQHKAASSIYINSRSVFLRTDQPEGRYVIIPTTFEPGHTGEFLLRVFTDVPSNCRELRLDEPPHTCWSSLCGYPQLVTQVHVLGAAGLKDSPTGANSYVIIKCEGDKVRSAVQKGTSTPEYNVKGIFYRKKLSQPITVQVWNHRVLKDEFLGQVHLKADPDNLQALHTLHLRDRNSRQPSNLPGTVAVHILSSTSLMAV

SEQ ID NO: 834352 - protein, 654 aa, Homo sapiens
LTIGLERPPGQVATMFSCVKPYEDQNYSALRRDCRRRKVLFEDPLFPATDDSLYYKGTPGPAVRWKRPKGICEDPRLFVDGISSHDLHQGQVGNCWFVAACSSLASRESLWQKVIPDWKEQEWDPEKPNAYAGIFHFHFWRFGEWVDVVIDDRLPTVNNQLIYCHSNSRNEFWCALVEKAYAKLAGCYQALDGGNTADALVDFTGGVSEPIDLTEGDFANDETKRNQLFERMLKVHSRGGLISASIKAVTAADMEARLACGLVKGHAYAVTDVRKVRLGHGLLAFFKSEKLDMIRLRNPWGEREWNGPWSDTSEEWQKVSKSEREKMGVTVQDDGEFWMTFEDVCRYFTDIIKCRVINTSHLSIHKTWEEARLHGAWTLHEDPRQNRGGGCINHKDTFFQNPQYIFEVKKPEDEVLICIQQRPKRSTRREGKGENLAIGFDIYKVEENRQYRMHSLQHKAASSIYINSRSVFLRTDQPEGRYVIIPTTFEPGHTGEFLLRVFTDVPSNCRELRLDEPPHTCWSSLCGYPQLVTQVHVLGAAGLKDSPTGANSYVIIKCEGDKVRSAVQKGTSTPEYNVKGIFYRKKLSQPITVQVWNHRVLKDEFLGQVHLKADPDNLQALHTLHLRDRNSRQPSNLPGTVAVHILSSTSLMAV

SEQ ID NO: 834353 - protein, 695 aa, Homo sapiens; identical to SEQ ID NO: 834351

SEQ ID NO: 834354 - protein, 654 aa, Homo sapiens; identical to SEQ ID NO: 834352

SEQ ID NO: 834355 - protein, 695 aa, Homo sapiens; identical to SEQ ID NO: 834351

SEQ ID NO: 834356 - protein, 695 aa, Homo sapiens; identical to SEQ ID NO: 834351

SEQ ID NO: 834357 - protein, 654 aa, Homo sapiens; identical to SEQ ID NO: 834352

SEQ ID NO: 834358 - protein, 116 aa, Homo sapiens
HEGLDKDGWASWRSWHWGWALKDLGEDDTRNEEGTLSIEHIFLRPCCLPRSAKKMSLVYTRTATSPSSVLAPRVLGPTQPPRPHFPHQQYLVFSHLERTLGSCRVPAQAGIGKICR

SEQ ID NO: 834359 - protein, 515 aa, Homo sapiens
WRCLRRRSGPGCSRDDLPAGCAARLSGGSECHVPSATRRIRAGGALGAGAARSPARPHRSPAAMGSSQSVEIPGGGTEGYHVLRVQENSPGHRAGLEPFFDFIVSINGSRLNKDNDTLKDLLKANVEKPVKMLIYSSKTLELRETSVTPSNLWGGQGLLGVSIRFCSFDGANENVWHVLEVESNSPAALAGLRPHSDYIIGADTVMNESEDLFSLIETHEAKPLKLYVYNTDTDNCREVIITPNSAWGGEGSLGCGIGYGYLHRIPTRPFEEGKKISLPGQMAGTPITPLKDGFTEVQLSSVNPPSLSPPGTTGIEQSLTGLSISSTPPAVSSVLSTGVPTVPLLPPQVNQSLTSVPPMNPATTLPGLMPLPAGLPNLPNLNLNLPAPHIMPGVGLPELVNPGLPPLPSMPPRNLPGIAPLPLPSEFLPSFPLVPESSSAASSGELLSSLPPTSNAPSDPATTTAKADAASSLTVDVTPPTAKAPTTVEDRVGDSTPVSEKPVSAAVDANASESP

SEQ ID NO: 834360 - protein, 102 aa, Homo sapiens
VEFVVLLGEFVVLLRRFVVLLGEFVVLLGEFVVLLGEFVVLLGEFVVLLGEFVVLFDGANENVWHVLEVESNSPAALAGLRPHSDYIIGADTVMNESEHLFA

SEQ ID NO: 834361 - protein, 384 aa, Homo sapiens
MLIYSSKTLELRETSVTPSNLWGGQGLLGVSIRFCSFDGANENVWHVLEVESNSPAALAGLRPHSDYIIGADTVMNESEDLFSLIETHEAKPLKLYVYNTDTDNCREVIITPNSAWGGEGSLGCGIGYGYLHRIPTRPFEEGKKISLPGQMAGTPITPLKDGFTEVQLSSVNPPSLSPPGTTGIEQSLTGLSISSTPPAVSSVLSTGVPTVPLLPPQVNQSLTSVPPMNPATTLPGLMPLPAGLPNLPNLNLNLPAPHIMPGVGLPELVNPGLPPLPSMPPRNLPGIAPLPLPSEFLPSFPLVPESSSAASSGELLSSLPPTSNAPSDPATTTAKADAASSLTVDVTPPTAKAPTTVEDRVGDSTPVSEKPVSAAVDANASESP

SEQ ID NO: 834362 - protein, 498 aa, Homo sapiens
WRCLRRRSGPGCSRDDLPAGCAARLSGGSECHVPSATRRIRAGGALGAGAARSPARPHRSPAAMGSSQSVEIPGGGTEGYHVLRVQENSPGHRAGLEPFFDFIVSINGSRLNKDNDTLKDLLKANVEKPVKMLIYSSKTLELRETSVTPSNLWGGQGLLGVSIRFCSFDGANENVWHVLEVESNSPAALAGLRPHSDYIIGADTVMNESEDLFSLIETHEAKPLKLYVYNTDTDNCREVIITPNSAWGGEGSLGCGIGYGYLHRIPTRPFEEGKKISLPGQMAGTPITPLKDGFTEVQLSSVNPPSLSPPGTTGIEQSLTGLSISSTPPAVSSVLSTGVPTVPLLPPQVNQSLTSVPPMNPATTLPGLMPLPAGLPNLPNLNLNLPAPHIMPGVGLPELVNPALPLPSEFLPSFPLVPESSSAASSGELLSSLPPTSNAPSDPATTTAKADAASSLTVDVTPPTAKAPTTVEDRVGDSTPVSEKPVSAAVDANASESP

SEQ ID NO: 834363 - protein, 467 aa, Homo sapiens
WRCLRRRSGPGCSRDDLPAGCAARLSGGSECHVPSATRRIRAGGALGAGAARSPARPHRSPAAMGSSQSVEIPGGGTEGYHVLRVQENSPGHRAGLEPFFDFIVSINGSRLNKDNDTLKDLLKANVEKPVKMLIYSSKTLELRETSVTPSNLWGGQGLLGVSIRFCSFDGANENVWHVLEVESNSPAALAGLRPHSDYIIGADTVMNESEDLFSLIETHEAKPLKLYVYNTDTDNCREVIITPNSAWGGEGSLGCGIGYGYLHRIPTRPFEEGKKISLPGQMAGTPITPLKDGFTEVQLSSVNPPSLSPPGTTGIEQSLTGLSISSTPPAVSSVLSTGVPTVPLLPPQVNQSLTSVPPMNPATTLPGLMPLPAGLPNLPNLNLNLPAPHIMPGVGLPELVNPGLPPLPSMPPRNLPGIAPLPLPSEFLPSFPLVPESSSAASSGELLSSLPPTSNAPSVDANASESP

SEQ ID NO: 834364 - protein, 454 aa, Homo sapiens
WRCLRRRSGPGCSRDDLPAGCAARLSGGSECHVPSATRRIRAGGALGAGAARSPARPHRSPAAMGSSQSVEIPGGGTEGYHVLRVQENSPGHRAGLEPFFDFIVSINGSRLNKDNDTLKDLLKANVEKPVKMLIYSSKTLELRETSVTPSNLWGGQGLLGVSIRFCSFDGANENVWHVLEVESNSPAALAGLRPHSDYIIGADTVMNESEDLFSLIETHEAKPLKLYVYNTDTDNCREVIITPNSAWGGEGSLGCGIGYGYLHRIPTRPFEEGKKISLPGQMAGTPITPLKDGFTEVQLSSVNPPSLSPPGTTGIEQSLTGLSISSTPPAVSSVLSTGVPTVPLLPPQVNQSLTSVPPMNPATTLPGLMPLPAGLPNLPNLNLNLPAPHIMPGVGLPELVNPGMADLTLSSLTVDVTPPTAKAPTTVEDRVGDSTPVSEKPVSAAVDANASESP

SEQ ID NO: 834365 - protein, 384 aa, Homo sapiens; identical to SEQ ID NO: 834361

SEQ ID NO: 834366 - protein, 515 aa, Homo sapiens; identical to SEQ ID NO: 834359

SEQ ID NO: 834367 - protein, 443 aa, Homo sapiens
WRCLRRRSGPGCSRDDLPAGCAARLSGGSECHVPSATRRIRAGGALGAGAARSPARPHRSPAAMGSSQSVEIPGGGTEGYHVLRVQENSPGHRAGLEPFFDFIVSINGSRLNKDNDTLKDLLKANVEKPVKMLIYSSKTLELRETSVTPSNLWGGQGLLGVSIRFCSFDGANENVWHVLEVESNSPAALAGLRPHSDYIIGADTVMNESEDLFSLIETHEAKPLKLYVYNTDTDNCREVIITPNSAWGGEGSLGCGIGYGYLHRIRVPTVPLLPPQVNQSLTSVPPMNPATTLPGLMPLPAGLPNLPNLNLNLPAPHIMPGVGLPELVNPGLPPLPSMPPRNLPGIAPLPLPSEFLPSFPLVPESSSAASSGELLSSLPPTSNAPSDPATTTAKADAASSLTVDVTPPTAKAPTTVEDRVGDSTPVSEKPVSAAVDANASESP

SEQ ID NO: 834368 - protein, 276 aa, Homo sapiens
MFTPYSACRDADSLGCGIGYGYLHRIPTRPFEEGKKISLPGQMAGTPITPLKDGFTEVQLSSVNPPSLSPPGTTGIEQSLTGLSISSTPPAVSSVLSTGVPTVPLLPPQVNQSLTSVPPMNPATTLPGLMPLPAGLPNLPNLNLNLPAPHIMPGVGLPELVNPGLPPLPSMPPRNLPGIAPLPLPSEFLPSFPLVPESSSAASSGELLSSLPPTSNAPSDPATTTAKADAASSLTVDVTPPTAKAPTTVEDRVGDSTPVSEKPVSAAVDANASESP

SEQ ID NO: 834369 - protein, 243 aa, Homo sapiens
EVIQRIPSVMGGAPITPLKDGFTEVQLSSVNPPSLSPPGTTGIEQSLTGLSISSTPPAVSSVLSTGVPTVPLLPPQVNQSLTSVPPMNPATTLPGLMPLPAGLPNLPNLNLNLPAPHIMPGVGLPELVNPGLPPLPSMPPRNLPGIAPLPLPSEFLPSFPLVPESSSAASSGELLSSLPPTSNAPSDPATTTAKADAASSLTVDVTPPTAKAPTTVEDRVGDSTPVSEKPVSAAVDANASESP

SEQ ID NO: 834370 - protein, 157 aa, Homo sapiens
MNPATTLPGLMPLPAGLPNLPNLNLNLPAPHIMPGVGLPELVNPGLPPLPSMPPRNLPGIAPLPLPSEFLPSFPLVPESSSAASSGELLSSLPPTSNAPSDPATTTAKADAASSLTVDVTPPTAKAPTTVEDRVGDSTPVSEKPVSAAVDANASESP

SEQ ID NO: 834371 - protein, 402 aa, Homo sapiens
WRCLRRRSGPGCSRDDLPAGCAARLSGGSECHVPSATRRIRAGGALGAGAARSPARPHRSPAAMGSSQSVEIPGGGTEGYHVLRVQENSPGHRAGLEPFFDFIVSINGSRLNKDNDTLKDLLKANVEKPVKMLIYSSKTLELRETSVTPSNLWGGQGLLGVSIRFCSFDGANENVWHVLEVESNSPAALAGLRPHSDYIIGADTVMNESEDLFSLIETHEAKPLKLYVYNTDTDNCREVIITPNSAWGGEGSLGCGIGYGYLHRIPTRPFEEGKKISLPGQMAGTPITPLKDGFTEVQLSSVNPPSLSPPGTTGIEQSLTGLSISSTPPAVSSVLSTGVPTVPLLPPQVNQSLTSVPPMNPATTLPGLMPLPAGLPNLPNLNLNLPAPHIWPAHPSGPHIRT

SEQ ID NO: 834372 - protein, 542 aa, Homo sapiens
WRCLRRRSGPGCSRDDLPAGCAARLSGGSECHVPSATRRIRAGGALGAGAARSPARPHRSPAAMGSSQSVEIPGGGTEGYHVLRVQENSPGHRAGLDFAFSWVISFTWSPQHSHITQHHMHHSFTGICLHKPNVCTKPCTQHAIISSDQPTHPWRNLAEQHLKVHHPQLNPGGARAPRASHQAQLPATFRLFLAASHYSHCGGHNRAHTTALCAQWVALRTAAWRKPPHHMPLPAATAPHPAPNATHHNSTPEPHHRRRTAHHTHTQAATAPAPTPTTPTGPRRASPTWQPRTPPAQSPRAHHTHSRTHTHTHPHTPHANNPQHTPTTLAPPASLTPTPTHANPTPAPHTPPRPPPPHHDRHPPRRPPPPHNTSPSPPLGAARAANPTTTAPRTPNSGKHAPATTPKLGPNTTGNTNTTPAHTLPSTHRTPPTTIPTQDPPHTENKKTGDPQATTPQPPTPTTAQRRKPDTNECPPRTQHHDATRPPSPHHPPPPRKHTDAVKHHAHRNTRSYTAPHQNTTTTHTPPHPQAAPPPTNPDDTA

SEQ ID NO: 834373 - protein, 515 aa, Homo sapiens; identical to SEQ ID NO: 834359

SEQ ID NO: 834374 - protein, 435 aa, Homo sapiens
WRCLRRRSGPGCSRDDLPAGCAARLSGGSECHVPSATRRIRAGGALGAGAARSPARPHRSPAAMGSSQSVEIPGGGTEGYHVLRVQENSPGHRAGLEPFFDFIVSINGSRLNKDNDTLKDLLKANVEKPVKMLIYSSKTLELRETSVTPSNLWGGQGLLGVSIRFCSFDGANENVWHVLEVESNSPAALAGLRPHSDYIIGADTVMNESEDLFSLIETHEAKPLKLYVYNTDTDNCREVIITPNSAWGGEGSLGCGIGYGYLHRIPTRPFEEGKKISLPGQMAGTPITPLKDGFTEVQLSSVNPPSLSPPGTTGIEQSLTGLSISSTPPAVSSVLSTGVPTVPLLPPQVNQSLTSVPPMNPATTLPGLMPLPAGLPNLPNLNLNLPAPHIMPGVGLPELVNPGLPPLPSMPPRNLPGIAPLPLPSEFLPPHSLWM

SEQ ID NO: 834375 - protein, 422 aa, Homo sapiens
WRCLRRRSGPGCSRDDLPAGCAARLSGGSECHVPSATRRIRAGGALGAGAARSPARPHRSPAAMGSSQSVEIPGGGTEGYHVLRVQENSPGHRAGLEPFFDFIVSINGSRLNKDNDTLKDLLKANVEKPVKMLIYSSKTLELRETSVTPSNLWGGQGLLGVSIRFCSFDGANENVWHVLEVESNSPAALAGLRPHSDYIIGADTVMNESEDLFSLIETHEAKPLKLYVYNTDTDNCREVIITPNSAWGGEGSLGCGIGYGYLHRIPTRPFEEGKKISLPGQMAGTPITPLKDGFTEVQLSSVNPPSLSPPGTTGIEQSLTGLSISSTPPAVSSVLSTGVPTVPLLPPQVNQSLTSVPPMNPATTLPGLMPLPAGLPNLPNLNLNLPAPHIMPGVGLPELVNPGLPPLPSMPPRNLPGIAHHR

SEQ ID NO: 834376 - protein, 384 aa, Homo sapiens; identical to SEQ ID NO: 834361

SEQ ID NO: 834377 - protein, 171 aa, Homo sapiens
ASGPHRSQAHFCATMNPATTLPGLMPLPAGLPNLPNLNLNLPAPHIMPGVGLPELVNPGLPPLPSMPPRNLPGIAPLPLPSEFLPSFPLVPESSSAASSGELLSSLPPTSNAPSDPATTTAKADAASSLTVDVTPPTAKAPTTVEDRVGDSTPVSEKPVSAAVDANASESP

SEQ ID NO: 834378 - protein, 508 aa, Homo sapiens
WRCLRRRSGPGCSRDDLPAGCAARLSGGSECHVPSATRRIRAGGALGAGAARSPARPHRSPAAMGSSQSVEIPGGGTEGYHVLRVQENSPGHRAGLEPFFDFIVSINGSRLNKDNDTLKDLLKANVEKPVKMLIYSSKTLELRETSVTPSNLWGGQGLLGVSIRFCSFDGANENVWHVLEVESNSPAALAGLRPHSDYIIGADTVMNESEDLFSLIETHEAKPLKLYVYNTDTDNCREVIITPNSAWGGEGSLGCGIGYGYLHRIPTRPFEEGKKISLPGQMAGTPITPLKDGFTEVQLSSVNPPSLSPPGTTGIEQSLTGLSISSTPPAVSSVLSTGVPTVPLLPPQVNQSLTSVPPMNPATTLPGLMPLPAGLPNLPNLNLNLPAPHIMPGVGLPELVNPGLPPLPSMPPRNLPGIAPLPLPSEFLPSFPLVPESSSAASSGELLSSLPPTSNAPSDPATTTAKADAASSLTVDVTPPTAKAPAPLLRTQHHRTRQHLRHKLPGPY

SEQ ID NO: 834379 - protein, 72 aa, Homo sapiens
MDSDRVEARKSLLESFLKQLCAIPEIANSEEVQEFLALNTDARIAFVKKPFMVSRIDKVLPIWKLEITFLLK

SEQ ID NO: 834380 - protein, 992 aa, Homo sapiens
MKTETVPPFQETPAGSSCHLNNLLSSRKLMAVGVLLGWLLVIHLLVNVWLLCLLSALLVVLGGWLGSSLAGVASGRLHLERFIPLATCPPCPEAERQLEREINRTIQMIIRDFVLSWYRSVSQEPAFEEEMEAAMKGLVQELRRRMSVMDSHAVAQSVLTLCGCHLQSYIQAKEATAGKNGPVEPSHLWEAYCRATAPHPAVHSPSAEVTYTRGVVNLLLQGLVPKPHLETRTGRHVVVELITCNVILPLISRLSDPDWIHLVLVGIFSKARDPAPCPASAPEQPSVPTSLPLIAEVEQLPEGRASPVAAPVFLSYSEPEGSAGPSPEVEEGHEAVEGDLGGMCEERKVGNNSSHFLQPNLRGPLFLCEDSELESPLSELGKETIMLMTPGSFLSDRIQDALCALESSQALEPKDGEASEGAEAEEGPGTETETGLPVSTLNSCPEIHIDTADKEIEQGDVTASVTALLEGPEKTCPSRPSCLEKDLTNDVSSLDPTLPPVLLSSSPPGPLSSATFSFEPLSSPDGPVIIQNLRITGTITAREHSGTGFHPYTLYTVKYETALDGENSSGLQQLAYHTVNRRYREFLNLQTRLEEKPDLRKFIKNVKGPKKLFPDLPFGNMDSDRVEARKSLLESFLKQLCAIPEIANSEEVQEFLALNTDARIAFVKKPFMVSRIDKMVVSAIVDTLKTAFPRSEPQSPTEELSEAETESKPQTEGKKASKSRLRFSSSKISPALSVTEAQDKILYCLQEGSVESETLSMSAMESFIEKQTKLLEMQPTKAPEKDPEQPPKGRVDSCVSDAAVPAQDPSNSDPGTETELADTALDLLLLLLTEQWKWLCTENMQKFLRLIFGTLVQRWLEVQVANLTSPQRWVQYLRLLQESIWPGGVLPKFPRPVRTQEQKLAAEKQALQSLMGVLPDLVVEILGVNKCRLSWGLVLESLQQPLINRHLIYCLGDIILEFLDLSASVEESAATTSASDTPGNSKRMGVSS

SEQ ID NO: 834381 - protein, 907 aa, Homo sapiens
MKTETVPPFQETPAGSSCHLNNLLSSRKLMAVGVLLGWLLVIHLLVNVWLLCLLSALLVVLGGWLGSSLAGVASGRLHLERFIPLATCPPCPEAERQLEREINRTIQMIIRDFVLSWYRSVSQEPAFEEEMEAAMKGLVQELRRRMSVMDSHAVAQSVLTLCGCHLQSYIQAKEATAGKNGPVEPSHLWEAYCRATAPHPAVHSPSAEVTYTRGVVNLLLQGLVPKPHLETRTGRHVVVELITCNVILPLISRLSDPDWIHLVLVGIFSKARDPAPCPASAPEQPSVPTSLPLIAEVEQLPEGRASPVAAPVFLSYSEPEGSAGPSPEVEEGHEAVEGDLGGMCEERKVGNNSSHFLQPNLRGPLFLCEDSELESPLSELGKETIMLMTPGSFLSDRIQDALCALESSQALEPKDGEASEGAEAEEGPGTETETGLPVSTLNSCPEIHIDTADKEIEQGDVTASVTALLEGPEKTCPSRPSCLEKDLTNDVSSLDPTLPPVLLSSSPPGPLSSATFSFEPLSSPDGPVIIQNLRITGTITAREHSGTGFHPYTLYTVKYETALDGENSSGLQQLAYHTVNRRYREFLNLQTRLEEKPDLRKFIKNVKGPKKLFPDLPFGNMDSDRVEARKSLLESFLKQLCAIPEIANSEEVQEFLALNTDARIAFVKKPFMVSRIDKMVVSAIVDTLKTAFPRSEPQSPTEELSEAETESKPQTEGKKASKSRLRFSSSKISPALSVTEAQDKILYCLQEGSVESETLSMSAMESFIEKQTKLLEMQPTKAPEKDPEQPPKGRVDSCVSDAAVPAQDPSNSDPGTETELADTALDLLLLLLTEQWKWLCTENMQKFLRLIFGTLVQRSRSRNSWGEQMPAELGSSPGVTTTTPHQQAFDLLPWGHHPGILGSQCLC

SEQ ID NO: 834382 - protein, 417 aa, Homo sapiens
MPFQGSLLPGFASGVLKFSAGQQQSHSFRDVKGPKKLFPDLPFGNMDSDRVEARKSLLESFLKQLCAIPEIANSEEVQEFLALNTDARIAFVKKPFMVSRIDKMVVSAIVDTLKTAFPRSEPQSPTEELSEAETESKPQTEGKKASKSRLRFSSSKISPALSVTEAQDKILYCLQEGSVESETLSMSAMESFIEKQTKLLEMQPTKAPEKDPEQPPKGRVDSCVSDAAVPAQDPSNSDPGTETELADTALDLLLLLLTEQWKWLCTENMQKFLRLIFGTLVQRWLEVQVANLTSPQRWVQYLRLLQESIWPGGVLPKFPRPVRTQEQKLAAEKQALQSLMGVLPDLVVEILGVNKCRLSWGLVLESLQQPLINRHLIYCLGDIILEFLDLSASVEESAATTSASDTPGNSKRMGVSS

SEQ ID NO: 834383 - protein, 992 aa, Homo sapiens; identical to SEQ ID NO: 834380

SEQ ID NO: 834384 - protein, 820 aa, Homo sapiens
MKTETVPPFQETPAGSSCHLNNLLSSRKLMAVGVLLGWLLVIHLLVNVWLLCLLSALLVVLGGWLGSSLAGVASGRLHLERFIPLATCPPCPEAERQLEREINRTIQMIIRDFVLSWYRSVSQEPAFEEEMEAAMKGLVQELRRRMSVMDSHAVAQSVLTLCGCHLQSYIQAKEATAGKNGPVEPSHLWEAYCRATAPHPAVHSPSAEVTYTRGVVNLLLQGLVPKPHLETRTGRHVVVELITCNVILPLISRLSDPDWIHLVLVGIFSKARDPAPCPASAPEQPSVPTSLPLIAEVEQLPEGRASPVAAPVFLSYSEPEGSAGPSPEVEEGHEAVEGDLGGMCEERKVGNNSSHFLQPNLRGPLFLCEDSELESPLSELGKETIMLMTPGSFLSDRIQDALCALESSQALEPKDGEASEGAEAEEGPGTETETGLPVSTLNSCPEIHIDTADKEIEQGDVTASVTALLEGPEKTCPSRPSCLEKDLTNDVSSLDPTLPPVLLSSSPPGPLSSATFSFEPLSSPDGPVIIQNLRITGTITAREHSGTGFHPYTLYTVKYETALDGENSSGLQQLAYHTVNRRYREFLNLQTRLEEKPDLRKFIKNVKGPKKLFPDLPFGNMDSDRVEARKSLLESFLKQLCAIPEIANSEEVQEFLALNTDARIAFVKKPFMVSRIDKMVVSAIVDTLKTAFPRSEPQSPTEELSEAETESKPQTEGKKASKSRLRFSSSKISPALSVTEAQDKILYCLQEGSVESETLSMSAMESFIEKQTKLLEMQPTKAPEKDPEQPPKGRVDSCVSDAAVPAQDPSNSDPAEHAMC

SEQ ID NO: 834385 - protein, 858 aa, Homo sapiens
MKTETVPPFQETPAGSSCHLNNLLSSRKLMAVGVLLGWLLVIHLLVNVWLLCLLSALLVVLGGWLGSSLAGVASGRLHLERFIPLATCPPCPEAERQLEREINRTIQMIIRDFVLSWYRSVSQEPAFEEEMEAAMKGLVQELRRRMSVMDSHAVAQSVLTLCGCHLQSYIQAKEATAGKNGPVEPSHLWEAYCRATAPHPAVHSPSAEVTYTRGVVNLLLQGLVPKPHLETRTGRHVVVELITCNVILPLISRLSDPDWIHLVLVGIFSKARDPAPCPASAPEQPSVPTSLPLIAEVEQLPEGRASPVAAPVFLSYSEPEGSAGPSPEVEEGHEAVEGDLGGMCEERKVGNNSSHFLQPNLRGPLFLCEDSELESPLSELGKETIMLMTPGSFLSDRIQDALCALESSQALEPKDGEASEGAEAEEGPGTETETGLPVSTLNSCPEIHIDTADKEIEQGDVTASVTALLEGPEKTCPSRPSCLEKDLTNDVSSLDPTLPPVLLSSSPPGPLSSATFSFEPLSSPDGPVIIQNLRITGTITAREHSGTGFHPYTLYTVKYETALDGENSSGLQQLAYHTVNRRYREFLNLQTRLEEKPDLRKFIKNVKGPKKLFPDLPFGNMDSDRVEARKSLLESFLKQLCAIPEIANSEEVQEFLALNTDARIAFVKKPFMVSRIDKMVVSAIVDTLKTAFPRSEPQSPTEELSEAETESKPQTEGKKASKSRLRFSSSKISPALSVTEAQDKILYCLQEGSVESETLSMSAMESFIEKQTKLLEMQPTKAPEKDPEQPPKGRVDSCVSDAAVPAQDPSNSDPGTETELADTALDLLLLLLTEQWKWLCTENMQKFLRLIFGTLVQR

SEQ ID NO: 834386 - protein, 803 aa, Homo sapiens
MKTETVPPFQETPAGSSCHLNNLLSSRKLMAVGVLLGWLLVIHLLVNVWLLCLLSALLVVLGGWLGSSLAGVASGRLHLERFIPLATCPPCPEAERQLEREINRTIQMIIRDFVLSWYRSVSQEPAFEEEMEAAMKGLVQELRRRMSVMDSHAVAQSVLTLCGCHLQSYIQAKEATAGKNGPVEPSHLWEAYCRATAPHPAVHSPSAEVTYTRGVVNLLLQGLVPKPHLETRTGRHVVVELITCNVILPLISRLSDPDWIHLVLVGIFSKARDPAPCPASAPEQPSVPTSLPLIAEVEQLPEGRASPVAAPVFLSYSEPEGSAGPSPEVEEGHEAVEGDLGGMCEERKVGNNSSHFLQPNLRGPLFLCEDSELESPLSELGKETIMLMTPGSFLSDRIQDALCALESSQALEPKDGEASEGAEAEEGPGTETETGLPVSTLNSCPEIHIDTADKEIEQGDVTASVTALLEGPEKTCPSRPSCLEKDLTNDVSSLDPTLPPVLLSSSPPGPLSSATFSFEPLSSPDGPVIIQNLRITGTITAREHSGTGFHPYTLYTVKYETALDGENSSGLQQLAYHTVNRRYREFLNLQTRLEEKPDLRKFIKNVKGPKKLFPDLPFGNMDSDRVEARKSLLESFLKQLCAIPEIANSEEVQEFLALNTDARIAFVKKPFMVSRIDKMVVSAIVDTLKTAFPRSEPQSPTEELSEAETESKPQTEGKKASKSRLRFSSSKISPALSVTEAQDKILYCLQEGSVTKLLEMQPTKAPEKDPEQPPKGRVDSCVSDAAVPAQDPSNSDPAEHAMC

SEQ ID NO: 834387 - protein, 276 aa, Homo sapiens
MKTETVPPFQETPAGSSCHLNNLLSSRKLMAVGVLLGWLLVIHLLVNVWLLCLLSALLVVLGGWLGSSLAGVASGRLHLERFIPLATCPPCPEAERQLEREINRTIQMIIRDFVLSWYRSVSQEPAFEEEMEAAMKGLVQELRRRMSVMDSHAVAQSVLTLCGCHLQSYIQAKEATAGKNGPVEPSHLWEAYCRATAPHPAVHSPSAEVTYTRGVVNLLLQGLVPKPHLETRTGRHVVVELITCNVILPLISRLSDPDWIHLVLVAAACSSWPTTL

SEQ ID NO: 834388 - protein, 992 aa, Homo sapiens; identical to SEQ ID NO: 834380

SEQ ID NO: 834389 - protein, 111 aa, Homo sapiens
LFAIISGNLGSEVAYISNKEERVRMETCRAYFSNWLTTATLSCTRALAVPWQHSKPTCGKQGHHMYPYWKFHLYLGPYEKRESMCVCVCVSVSVLMFHGPAITDSQYLTFS

SEQ ID NO: 834390 - protein, 992 aa, Homo sapiens; identical to SEQ ID NO: 834380

SEQ ID NO: 834391 - protein, 372 aa, Homo sapiens
MDSDRVEARKSLLESFLKQLCAIPEIANSEEVQEFLALNTDARIAFVKKPFMVSRIDKMVVSAIVDTLKTAFPRSEPQSPTEELSEAETESKPQTEGKKASKSRLRFSSSKISPALSVTEAQDKILYCLQEGSVESETLSMSAMESFIEKQTKLLEMQPTKAPEKDPEQPPKGRVDSCVSDAAVPAQDPSNSDPGTETELADTALDLLLLLLTEQWKWLCTENMQKFLRLIFGTLVQRWLEVQVANLTSPQRWVQYLRLLQESIWPGGVLPKFPRPVRTQEQKLAAEKQALQSLMGVLPDLVVEILGVNKCRLSWGLVLESLQQPLINRHLIYCLGDIILEFLDLSASVEESAATTSASDTPGNSKRMGVSS

SEQ ID NO: 834392 - protein, 355 aa, Homo sapiens
MDSDRVEARKSLLESFLKQLCAIPEIANSEEVQEFLALNTDARIAFVKKPFMVSRIDKMVVSAIVDTLKTAFPRSEPQSPTEELSEAETESKPQTEGKKASKSRLRFSSSKISPALSVTEAQDKILYCLQEGSVTKLLEMQPTKAPEKDPEQPPKGRVDSCVSDAAVPAQDPSNSDPGTETELADTALDLLLLLLTEQWKWLCTENMQKFLRLIFGTLVQRWLEVQVANLTSPQRWVQYLRLLQESIWPGGVLPKFPRPVRTQEQKLAAEKQALQSLMGVLPDLVVEILGVNKCRLSWGLVLESLQQPLINRHLIYCLGDIILEFLDLSASVEESAATTSASDTPGNSKRMGVSS

SEQ ID NO: 834393 - protein, 992 aa, Homo sapiens; identical to SEQ ID NO: 834380

SEQ ID NO: 834394 - protein, 880 aa, Homo sapiens
MKTETVPPFQETPAGSSCHLNNLLSSRKLMAVGVLLGWLLVIHLLVNVWLLCLLSALLVVLGGWLGSSLAGVASGRLHLERFIPLATCPPCPEAERQLEREINRTIQMIIRDFVLSWYRSVSQEPAFEEEMEAAMKGLVQELRRRMSVMDSHAVAQSVLTLCGCHLQSYIQAKEATAGKNGPVEPSHLWEAYCRATAPHPAVHSPSAEVTYTRGVVNLLLQGLVPKPHLETRTGRHVVVELITCNVILPLISRLSDPDWIHLVLVGIFSKARDPAPCPASAPEQPSVPTSLPLIAEVEQLPEGRASPVAAPVFLSYSEPEGSAGPSPEVEEGHEAVEGDLGGMCEERKVGNNSSHFLQPNLRGPLFLCEDSELESPLSELGKETIMLMTPGSFLSDRIQDALCALESSQALEPKDGEASEGAEAEEGPGTETETGLPVSTLNSCPEIHIDTADKEIEQGDVTASVTALLEGPEKTCPSRPSCLEKDLTNDVSSLDPTLPPVLLSSSPPGPLSSATFSFEPLSSPDGPVIIQNLRITGTITAREHSGTGFHPYTLYTVKYETALDGENSSGLQQLAYHTVNRRYREFLNLQTRLEEKPDLRKFIKNVKGPKKLFPDLPFGNMDSDRVEARKSLLESFLKQLCAIPEIANSEEVQEFLALNTDARIAFVKKPFMVSRIDKMVVSAIVDTLKTAFPRSEPQSPTEELSEAETESKPQTEGKKASKSRLRFSSSKISPALSVTEAQDKILYCLQEGSVESETLSMSAMESFIEKQTKLLEMQPTKAPEKDPEQPPKGRVDSCVSDAAVPAQDPSNSDPGTETELADTALDLLLLLLTEQWKWLCTENMQKFLRLIFGTLVQRVLGFCRSASEANLEAQGKLSGP

SEQ ID NO: 834395 - protein, 692 aa, Homo sapiens
MKTETVPPFQETPAGSSCHLNNLLSSRKLMAVGVLLGWLLVIHLLVNVWLLCLLSALLVVLGGWLGSSLAGVASGRLHLERFIPLATCPPCPEAERQLEREINRTIQMIIRDFVLSWYRSVSQEPAFEEEMEAAMKGLVQELRRRMSVMDSHAVAQSVLTLCGCHLQSYIQAKEATAGKNGPVEPSHLWEAYCRATAPHPAVHSPSAEVTYTRGVVNLLLQGLVPKPHLETRTGRHVVVELITCNVILPLISRLSDPDWIHLVLVGIFSKARDPAPCPASAPEQPSVPTSLPLIAEVEQLPEGRASPVAAPVFLSYSEPEGSAGPSPEVEEGHEAVEGDLGGMCEERKVGNNSSHFLQPNLRGPLFLCEDSELESPLSELGKETIMLMTPGSFLSDRIQDALCALESSQALEPKDGEASEGAEAEEGPGTETETGLPVSTLNSCPEIHIDTADKEIEQGDVTASVTALLEGPEKTCPSRPSCLEKDLTNDVSSLDPTLPPVLLSSSPPGPLSSATFSFEPLSSPDGPVIIQNLRITGTITAREHSGTGFHPYTLYTVKYETALDGENSSGLQQLAYHTVNRRYREFLNLQTRLEEKPDLRKFIKNVKGPKKLFPDLPFGNMDSDRVEARKSLLESFLKQLCAIPEIANSEEVQEFLALNTDARIAFVKKPFMVSRIDKVLPIWKLEITFLLK

SEQ ID NO: 834396 - protein, 572 aa, Homo sapiens
MKTETVPPFQETPAGSSCHLNNLLSSRKLMAVGVLLGWLLVIHLLVNVWLLCLLSALLVVLGGWLGSSLAGVASGRLHLERFIPLATCPPCPEAERQLEREINRTIQMIIRDFVLSWYRSVSQEPAFEEEMEAAMKGLVQELRRRMSVMDSHAVAQSVLTLCGCHLQSYIQAKEATAGKNGPVEPSHLWEAYCRATAPHPAVHSPSAEVTYTRGVVNLLLQGLVPKPHLETRTGRHVVVELITCNVILPLISRLSDPDWIHLVLVGIFSKARDPAPCPASAPEQPSVPTSLPLIAEVEQLPEGRASPVAAPVFLSYSEPEGSAGPSPEVEEGHEAVEGDLGGMCEERKVGNNSSHFLQPNLRGPLFLCEDSELESPLSELGKETIMLMTPGSFLSDRIQDALCALESSQALEPKDGEASEGAEAEEGPGTETETGLPVSTLNSCPEIHIDTADKEIEQGDVTASVTALLEGPEKTCPSRPSCLEKDLTNDVSSLDPTLPPVLLSSSPPGPLSSATFSFEPLSSPDGPVIIQNLRITGTITAREHSGTGFHPYTLYTVKRDTPCRLSPGLLIC

SEQ ID NO: 834397 - protein, 287 aa, Homo sapiens
MELERIVSAALLAFVQTHLPEADLSGLDEVIFSYVLGVLEDLGPSGPSEENFDMEAFTEMMEAYVPGFAHIPRGTIGDMMQKLSGQLSDARNKENLQPQSSGVQGQVPISPEPLQRPEMLKEETRSSAAAAADTQDEATGAEEELLPGVDVLLEVFPTCSVEQAQWVLAKARGDLEEAVQMLVEGKEEGPAAWEGPNQDLPRRLRGPQKDELKSFILQKYMMVDSAEDQKIHRPMAPKEAPKKLIRYIDNQVVSTKGERFKDVRNPEAEEMKATYINLKPARKYRFH

SEQ ID NO: 834398 - protein, 315 aa, Homo sapiens
MELERIVSAALLAFVQTHLPEADLSGLDEVIFSYVLGVLEDLGPSGPSEENFDMEAFTEMMEAYVPGFAHIPRGTIGDMMQKLSGQLSDARNKENLQPQSSGVQGQVPISPEPLQRPEMLKEETRSSAAAAADTQDEVLVEEGTDEGPRGLERGEYCLLLTFVPLATGAEEELLPGVDVLLEVFPTCSVEQAQWVLAKARGDLEEAVQMLVEGKEEGPAAWEGPNQDLPRRLRGPQKDELKSFILQKYMMVDSAEDQKIHRPMAPKEAPKKLIRYIDNQVVSTKGERFKDVRNPEAEEMKATYINLKPARKYRFH

SEQ ID NO: 834399 - protein, 78 aa, Homo sapiens
RSFTQPVFDRYMMVDSAEDQKIHRPMAPKEAPKKLIRYIDNQVVSTKGERFKDVRNPEAEEMKATYINLKPARKYRFH

SEQ ID NO: 834400 - protein, 287 aa, Homo sapiens; identical to SEQ ID NO: 834397

SEQ ID NO: 834401 - protein, 287 aa, Homo sapiens; identical to SEQ ID NO: 834397

SEQ ID NO: 834402 - protein, 294 aa, Homo sapiens
MELERIVSAALLAFVQTHLPEADLSGLDEVIFSYVLGVLEDLGPSGPSEENFDMEAFTEMMEAYVPGFAHIPRGTIGDMMQKLSGQLSDARNKENLQPQSSGVQGQVPISPEPLQRPEMLKEETRSSAAAAADTQDEATGAEEELLPGVDVLLEVFPTCSVEQAQWVLAKARGDLEEAVQMLVEGKEEGPAAWEGPNQTRPPLLQDLPRRLRGPQKDELKSFILQKYMMVDSAEDQKIHRPMAPKEAPKKLIRYIDNQVVSTKGERFKDVRNPEAEEMKATYINLKPARKYRFH

SEQ ID NO: 834403 - protein, 257 aa, Homo sapiens
  misc_feature (131)..(131): Xaa can be any naturally occurring amino acid
  misc_feature (134)..(134): Xaa can be any naturally occurring amino acid
  misc_feature (137)..(137): Xaa can be any naturally occurring amino acid
  misc_feature (144)..(144): Xaa can be any naturally occurring amino acid
  misc_feature (149)..(149): Xaa can be any naturally occurring amino acid
  misc_feature (189)..(189): Xaa can be any naturally occurring amino acid
  misc_feature (194)..(194): Xaa can be any naturally occurring amino acid
  misc_feature (196)..(196): Xaa can be any naturally occurring amino acid
  misc_feature (207)..(207): Xaa can be any naturally occurring amino acid
  misc_feature (213)..(213): Xaa can be any naturally occurring amino acid
  misc_feature (215)..(215): Xaa can be any naturally occurring amino acid
  misc_feature (217)..(217): Xaa can be any naturally occurring amino acid
  misc_feature (225)..(225): Xaa can be any naturally occurring amino acid
  misc_feature (231)..(231): Xaa can be any naturally occurring amino acid
  misc_feature (248)..(248): Xaa can be any naturally occurring amino acid
MELERIVSAALLAFVQTHLPEADLSGLDEVIFSYVLGVLEDLGPSGPSEENFDMEAFTEMMEAYVPGFAHIPRGTIGDMMQKLSGQLSDARNKENLQPQSSGVQGQVPISPEPLQRPEMLKEETRCWGGDXGGXAAXGRGGAAXVVGGXAVVVAVVRSVLGGGGGVRWWSPVEGALAAGVALVVEGPAXGGGGXAXGPAAVGRGVRXGAPAAXPXFXVAQQLLVXRGAAAXLAGGLGGPAGGQPVLGXQAQAFFQGP

SEQ ID NO: 834404 - protein, 208 aa, Homo sapiens
CPWCDSVLRGCSLEQRSFISVRLLSYLSACRHPMEDSMDMDMSPLRPQNYLFGCELKADKDYHFKVDNDENEHQLSLRTVSLGAGAKDELHIVEAEAMNYEGSPIKVTLATLKMSVQPTVSLGGFEITPPVVLRLKCGSGPVHISGQHLVAVEEDAESEDEEEEDVKLLSISGKRSAPGGGSKVPQKKVKLAADEDDDDDDEEDDDER

SEQ ID NO: 834405 - protein, 208 aa, Homo sapiens; identical to SEQ ID NO: 834404

SEQ ID NO: 834406 - protein, 208 aa, Homo sapiens; identical to SEQ ID NO: 834404

SEQ ID NO: 834407 - protein, 208 aa, Homo sapiens; identical to SEQ ID NO: 834404

SEQ ID NO: 834408 - protein, 74 aa, Homo sapiens
CPWCDSVLRGCSLEQRSFISVRLLSYLSACRHPMEDSMDMDMSPLRPQNYLFGCELKADNFENVCTANGFPWGL

SEQ ID NO: 834409 - protein, 167 aa, Homo sapiens
CPWCDSVLRGCSLEQRSFISVRLLSYLSACRHPMEDSMDMDMSPLRPQNYLFGCELKADKDYHFKVDNDENEHQLSLRTVSLGAGAKDELHIVEAEAMNYEGSPIKVTLATLKMSVQPTVSLGGFEITPPVVLRLKCGSGPVHISGQHLVAVEEDAESEDEEDDDER

SEQ ID NO: 834410 - protein, 158 aa, Homo sapiens
CPWCDSVLRGCSLEQRSFISVRLLSYLSACRHPMEDSMDMDMSPLRPQNYLFGCELKADKDYHFKVDNDENEHQLSLRTVSLGAGAKDELHIVEAEAMNYEGSPIKVTLATLKMSVQPTVSLGGFEITPPVVLRLKCGSGPVHISGQHLVAVEEIASG

SEQ ID NO: 834411 - protein, 155 aa, Homo sapiens
CPWCDSVLRGCSLEQRSFISVRLLSYLSACRHPMEDSMDMDMSPLRPQNYLFGCELKADKDYHFKVDNDENEHQLSLRTVSLGAGAKDELHIVEAEAMNYEGSPIKVTLATLKMSVQPTVSLGGFEITPPVVLRLKCGSGPVHISGQHLVAVEEW

SEQ ID NO: 834412 - protein, 47 aa, Homo sapiens
CAHIPTTSNTTDMLMTTKYNQARPSAQAPCLYIRCFLDTSKQMSFKL

SEQ ID NO: 834413 - protein, 614 aa, Homo sapiens
MNTFQDQSGSSSNREPLLRCSDARRDLELAIGGVLRAEQQIKDNLREVKAQIHSCISRHLECLRSREVWLYEQVDLIYQLKEETLQQQAQQLYSLLGQFNCLTHQLECTQNKDLANQVSVCLERLGSLTLKPEDSTVLLFEADTITLRQTITTFGSLKTIQIPEHLMAHASSANIGPFLEKRGCISMPEQKSASGIVAVPFSEWLLGSKPASGYQAPYIPSTDPQDWLTQKQTLENSQTSSRACNFFNNVGGNLKGLENWLLKSEKSSYQKCNSHSTTSSFSIEMEKVGDQELPDQDEMDLSDWLVTPQESHKLRKPENGSRETSEKFKLLFQSYNVNDWLVKTDSCTNCQGNQPKGVEIENLGNLKCLNDHLEAKKPLSTPSMVTEDWLVQNHQDPCKVEEVCRANEPCTSFAECVCDENCEKEALYKWLLKKEGKDKNGMPVEPKPEPEKHKDSLNMWLCPRKEVIEQTKAPKAMTPSRIADSFQVIKNSPLSEWLIRPPYKEGSPKEVPGTEDRAGKQKFKSPMNTSWCSFNTADWVLPGKKMGNLSQLSSGEDKWLLRKKAQEVLLNSPLQEEHNFPPDHYGLPAVCDLFACMQLKVDKEKWLYRTPLQM

SEQ ID NO: 834414 - protein, 570 aa, Homo sapiens
MNTFQDQSGSSSNREPLLRCSDARRDLELAIGGVLRAEQQIKDNLREVKAQIHSCISRHLECLRSREVWLYEQVDLIYQLKEETLQQQAQQLYSLLGQFNCLTHQLECTQNKDLANQVSVCLERLGSLTLKPEDSTVLLFEADTITLRQTITTFGSLKTIQIPEHLMAHASSANIGPFLEKRGCISMPEQKSASGIVAVPFSEWLLGSKPASGYQAPYIPSTDPQDWLTQKQTLENSQTSSRACNFFNNVGGNLKGLENWLLKSEKSSYQKCNSHSTTSSFSIEMEKVGDQELPDQDEMDLSDWLVTPQESHKLRKPENGSRETSEKFKLLFQSYNVNDWLVKTDSCTNCQGNQPKGVEIENLGNLKCLNDHLEAKKPLSTPSMVTEDWLVQNHQDPCKVEEVCRANEPCTSFAECVCDENCEKEALYKWLLKKEGKDKNGMPVEPKPEPEKHKDSLNMWLCPRKEVIEQTKAPKAMTPSRIADSFQVIKNSPLSEWLIRPPYKEGSPKEVPGTEDRAGKQKEVLLNSPLQEEHNFPPDHYGLPAVCDLFACMQLKVDKEKWLYRTPLQM

SEQ ID NO: 834415 - protein, 614 aa, Homo sapiens; identical to SEQ ID NO: 834413

SEQ ID NO: 834416 - protein, 595 aa, Homo sapiens
MNTFQDQSGSSSNREPLLRCSDARRDLELAIGGVLRAEQQIKDNLREVKAQIHSCISRHLECLRSREVWLYEQVDLIYQLKEETLQQQAQQLYSLLGQFNCLTHQLECTQNKDLANQVSVCLERLGSLTLKPEDSTVLLFEADTITLRQTITTFGSLKTIQIPEHLMAHASSANIGPFLEKRGCISMPEQKSASGIVAVPFSEWLLGSKPASGYQAPYIPSTDPQDWLTQKQTLENSQTSSRACNFFNNVGGNLKGLENWLLKSEKSSYQKCNSHSTTSSFSIEMEKVGDQELPDQDEMDLSDWLVTPQESHKLRKPENGSRETSEKFKLLFQSYNVNDWLVKTDSCTNCQGNQPKGVEIENLGNLKCLNDHLEAKKPLSTPSMVTEDWLVQNHQDPCKVEEVCRANEPCTSFAECVCDENCEKEALYKWLLKKEGKDKNGMPVEPKPEPEKHKDSLNMWLCPRKEVIEQTKAPKAMTPSRIADSFQVIKNSPLSEWLIRPPYKEGSPKEVPGTEDRAGKQKPGKKMGNLSQLSSGEDKWLLRKKAQEVLLNSPLQEEHNFPPDHYGLPAVCDLFACMQLKVDKEKWLYRTPLQM

SEQ ID NO: 834417 - protein, 614 aa, Homo sapiens; identical to SEQ ID NO: 834413

SEQ ID NO: 834418 - protein, 614 aa, Homo sapiens; identical to SEQ ID NO: 834413

SEQ ID NO: 834419 - protein, 570 aa, Homo sapiens; identical to SEQ ID NO: 834414

SEQ ID NO: 834420 - protein, 614 aa, Homo sapiens; identical to SEQ ID NO: 834413

SEQ ID NO: 834421 - protein, 614 aa, Homo sapiens; identical to SEQ ID NO: 834413

SEQ ID NO: 834422 - protein, 477 aa, Homo sapiens
MFFEADTITLRQTITTFGSLKTIQIPEHLMAHASSANIGPFLEKRGCISMPEQKSASGIVAVPFSEWLLGSKPASGYQAPYIPSTDPQDWLTQKQTLENSQTSSRACNFFNNVGGNLKGLENWLLKSEKSSYQKCNSHSTTSSFSIEMEKVGDQELPDQDEMDLSDWLVTPQESHKLRKPENGSRETSEKFKLLFQSYNVNDWLVKTDSCTNCQGNQPKGVEIENLGNLKCLNDHLEAKKPLSTPSMVTEDWLVQNHQDPCKVEEVCRANEPCTSFAECVCDENCEKEALYKWLLKKEGKDKNGMPVEPKPEPEKHKDSLNMWLCPRKEVIEQTKAPKAMTPSRIADSFQVIKNSPLSEWLIRPPYKEGSPKEVPGTEDRAGKQKFKSPMNTSWCSFNTADWVLPGKKMGNLSQLSSGEDKWLLRKKAQEVLLNSPLQEEHNFPPDHYGLPAVCDLFACMQLKVDKEKWLYRTPLQM

SEQ ID NO: 834423 - protein, 529 aa, Homo sapiens
CTPAWAAELDSVSKQKKNPKPTFKKKTEERTCEVKKVSRLGSLTLKPEDSTVLLFEADTITLRQTITTFGSLKTIQIPEHLMAHASSANIGPFLEKRGCISMPEQKSASGIVAVPFSEWLLGSKPASGYQAPYIPSTDPQDWLTQKQTLENSQTSSRACNFFNNVGGNLKGLENWLLKSEKSSYQKCNSHSTTSSFSIEMEKVGDQELPDQDEMDLSDWLVTPQESHKLRKPENGSRETSEKFKLLFQSYNVNDWLVKTDSCTNCQGNQPKGVEIENLGNLKCLNDHLEAKKPLSTPSMVTEDWLVQNHQDPCKVEEVCRANEPCTSFAECVCDENCEKEALYKWLLKKEGKDKNGMPVEPKPEPEKHKDSLNMWLCPRKEVIEQTKAPKAMTPSRIADSFQVIKNSPLSEWLIRPPYKEGSPKEVPGTEDRAGKQKFKSPMNTSWCSFNTADWVLPGKKMGNLSQLSSGEDKWLLRKKAQEVLLNSPLQEEHNFPPDHYGLPAVCDLFACMQLKVDKEKWLYRTPLQM

SEQ ID NO: 834424 - protein, 614 aa, Homo sapiens; identical to SEQ ID NO: 834413

SEQ ID NO: 834425 - protein, 570 aa, Homo sapiens; identical to SEQ ID NO: 834414

SEQ ID NO: 834426 - protein, 614 aa, Homo sapiens; identical to SEQ ID NO: 834413

SEQ ID NO: 834427 - protein, 614 aa, Homo sapiens; identical to SEQ ID NO: 834413

SEQ ID NO: 834428 - protein, 504 aa, Homo sapiens
MNTFQDQSGSSSNREPLLRCSDARRDLELAIGGVLRAEQQIKDNLREVKAQIHSCISRHLECLRSREVWLYEQVDLIYQLKEETLQQQAQQLYSLLGQFNCLTHQLECTQNKDLANQVSVCLERLGSLTLKPEDSTVLLFEADTITLRQTITTFGSLKTIQIPEHLMAHASSANIGPFLEKRGCISMPEQKSASGIVAVPFSEWLLGSKPASGYQAPYIPSTDPQDWLTQKQTLENSQTSSRACNFFNNVGGNLKGLENWLLKSEKSSYQKCNSHSTTSSFSIEMEKVGDQELPDQDEMDLSDWLVTPQESHKLRKPENGSRETSEKFKLLFQSYNVNDWLVKTDSCTNCQGNQPKGVEIENLGNLKCLNDHLEAKKPLSTPSMVTEDWLVQNHQDPCKVEEVCRANEPCTSFAECVCDENCEKEALYKWLLKKEGKDKNGMPVEPKPEPEKHKDSLNMWLCPRKEVIEQTKVILSLQAQHTCTSKSDVLVNRPFSTLVPWGVH

SEQ ID NO: 834429 - protein, 578 aa, Homo sapiens
MNTFQDQSGSSSNREPLLRCSDARRDLELAIGGVLRAEQQIKDNLREVKAQIHSCISRHLECLRSREVWLYEQVDLIYQLKEETLQQQAQQLYSLLGQFNCLTHQLECTQNKDLANQVSVCLERLGSLTLKPEDSTVLLFEADTITLRQTITTFGSLKTIQIPEHLMAHASSANIGPFLEKRGCISMPEQKSASGIVAVPFSEWLLGSKPASGYQAPYIPSTDPQDWLTQKQTLENSQTSSRACNFFNNVGGNLKGLENWLLKSEKSSYQKCNSHSTTSSFSIEMEKVGDQELPDQDEMDLSDWLVTPQESHKLRKPENGSRETSEKFKLLFQSYNVNDWLVKTDSCTNCQGNQPKGVEIENLGNLKCLNDHLEAKKPLSTPSMVTEDWLVQNHQDPCKVEEVCRANEPCTSFAECVCDENCEKEALYKWLLKKEGKDKNGMPVEPKPEPEKHKDSLNMWLCPRKEVIEQTKAPKAMTPSRIADSFQVIKNSPLSEWLIRPPYKEGSPKEVPGTEDRAGKQKEVLLNSPLQEEHNFPPDHYGLPAVCDLFACMQLKVDKEKWLYRTPLQVGTCHQHEN

SEQ ID NO: 834430 - protein, 277 aa, Homo sapiens
MNTFQDQSGSSSNREPLLRCSDARRDLELAIGGVLRAEQQIKDNLREVKAQIHSCISRHLECLRSREVWLYEQVDLIYQLKEETLQQQAQQLYSLLGQFNCLTHQLECTQNKDLANQVSVCLERLGSLTLKPEDSTVLLFEADTITLRQTITTFGSLKTIQIPEHLMAHASSANIGPFLEKRGCISMPEQKSASGIVAVPFSEWLLGSKPASGYQAPYIPSTDPQDWLTQKQTLENSQRIQKWEFPRKNLVLGKTLGEGEFGKVVKATAFHLKGRAG

SEQ ID NO: 834431 - protein, 315 aa, Homo sapiens
MNTFQDQSGSSSNREPLLRCSDARRDLELAIGGVLRAEQQIKDNLREVKAQIHSCISRHLECLRSREVWLYEQVDLIYQLKEETLQQQAQQLYSLLGQFNCLTHQLECTQNKDLANQVSVCLERLGSLTLKPEDSTVLLFEADTITLRQTITTFGSLKTIQIPEHLMAHASSANIGPFLEKRGCISMPEQKSASGIVAVPFSEWLLGSKPASGYQAPYIPSTDPQDWLTQKQTLENSQTSSRACNFFNNVGGNLKGYLELQLCSFLRPNTLYFTSQNIIYINHYVNEYVKHSFALMNFVSASIKSITAIVVACYF

SEQ ID NO: 834432 - protein, 79 aa, Homo sapiens
NASKGFGHIWLDSVSCQGHEPAVWQCKHHEWGKHYCNHNEDAGVTCSDGSDLELRLRGGGSRCAGTVEVEIQISFRSII

SEQ ID NO: 834433 - protein, 596 aa, Homo sapiens
MNTFQDQSGSSSNREPLLRCSDARRDLELAIGGVLRAEQQIKDNLREVKAQIHSCISRHLECLRSREVWLYEQVDLIYQLKEETLQQQAQQLYSLLGQFNCLTHQLECTQNKDLANQVSVCLERLGSLTLKPEDSTVLLFEADTITLRQTITTFGSLKTIQIPEHLMAHASSANIGPFLEKRGCISMPEQKSASGIVAVPFSEWLLGSKPASGYQAPYIPSTDPQDWLTQKQTLENSQTSSRACNFFNNVGGNLKGLENWLLKSEKSSYQKCNSHSTTSSFSIEMEKVGDQELPDQDEMDLSDWLVTPQESHKLRKPENGSRETSEKFKLLFQSYNVNDWLVKTDSCTNCQGNQPKGVEIENLGNLKCLNDHLEAKKPLSTPSMVTEDWLVQNHQDPCKVEEVCRANEPCTSFAECVCDENCEKEALYKWLLKKEGKDKNGMPVEPKPEPEKHKDSLNMWLCPSADSFQVIKNSPLSEWLIRPPYKEGSPKEVPGTEDRAGKQKFKSPMNTSWCSFNTADWVLPGKKMGNLSQLSSGEDKWLLRKKAQEVLLNSPLQEEHNFPPDHYGLPAVCDLFACMQLKVDKEKWLYRTPLQM

SEQ ID NO: 834434 - protein, 614 aa, Homo sapiens; identical to SEQ ID NO: 834413

SEQ ID NO: 834435 - protein, 448 aa, Homo sapiens
MAHASSANIGPFLEKRGCISMPEQKSASGIVAVPFSEWLLGSKPASGYQAPYIPSTDPQDWLTQKQTLENSQTSSRACNFFNNVGGNLKGLENWLLKSEKSSYQKCNSHSTTSSFSIEMEKVGDQELPDQDEMDLSDWLVTPQESHKLRKPENGSRETSEKFKLLFQSYNVNDWLVKTDSCTNCQGNQPKGVEIENLGNLKCLNDHLEAKKPLSTPSMVTEDWLVQNHQDPCKVEEVCRANEPCTSFAECVCDENCEKEALYKWLLKKEGKDKNGMPVEPKPEPEKHKDSLNMWLCPRKEVIEQTKAPKAMTPSRIADSFQVIKNSPLSEWLIRPPYKEGSPKEVPGTEDRAGKQKFKSPMNTSWCSFNTADWVLPGKKMGNLSQLSSGEDKWLLRKKAQEVLLNSPLQEEHNFPPDHYGLPAVCDLFACMQLKVDKEKWLYRTPLQM

SEQ ID NO: 834436 - protein, 530 aa, Homo sapiens
MNRWTLFISLKRRHFNSRLSSSTRYWASSIVLLINWSVPKLGSLTLKPEDSTVLLFEADTITLRQTITTFGSLKTIQIPEHLMAHASSANIGPFLEKRGCISMPEQKSASGIVAVPFSEWLLGSKPASGYQAPYIPSTDPQDWLTQKQTLENSQTSSRACNFFNNVGGNLKGLENWLLKSEKSSYQKCNSHSTTSSFSIEMEKVGDQELPDQDEMDLSDWLVTPQESHKLRKPENGSRETSEKFKLLFQSYNVNDWLVKTDSCTNCQGNQPKGVEIENLGNLKCLNDHLEAKKPLSTPSMVTEDWLVQNHQDPCKVEEVCRANEPCTSFAECVCDENCEKEALYKWLLKKEGKDKNGMPVEPKPEPEKHKDSLNMWLCPRKEVIEQTKAPKAMTPSRIADSFQVIKNSPLSEWLIRPPYKEGSPKEVPGTEDRAGKQKFKSPMNTSWCSFNTADWVLPGKKMGNLSQLSSGEDKWLLRKKAQEVLLNSPLQEEHNFPPDHYGLPAVCDLFACMQLKVDKEKWLYRTPLQM

SEQ ID NO: 834437 - protein, 462 aa, Homo sapiens
MICPGSVAKPRIREWALLFFWVNFSTGIWTFLVLWINRKSASGIVAVPFSEWLLGSKPASGYQAPYIPSTDPQDWLTQKQTLENSQTSSRACNFFNNVGGNLKGLENWLLKSEKSSYQKCNSHSTTSSFSIEMEKVGDQELPDQDEMDLSDWLVTPQESHKLRKPENGSRETSEKFKLLFQSYNVNDWLVKTDSCTNCQGNQPKGVEIENLGNLKCLNDHLEAKKPLSTPSMVTEDWLVQNHQDPCKVEEVCRANEPCTSFAECVCDENCEKEALYKWLLKKEGKDKNGMPVEPKPEPEKHKDSLNMWLCPRKEVIEQTKAPKAMTPSRIADSFQVIKNSPLSEWLIRPPYKEGSPKEVPGTEDRAGKQKFKSPMNTSWCSFNTADWVLPGKKMGNLSQLSSGEDKWLLRKKAQEVLLNSPLQEEHNFPPDHYGLPAVCDLFACMQLKVDKEKWLYRTPLQM

SEQ ID NO: 834438 - protein, 286 aa, Homo sapiens
MNTFQDQSGSSSNREPLLRCSDARRDLELAIGGVLRAEQQIKDNLREVKAQIHSCISRHLECLRSREVWLYEQVDLIYQLKEETLQQQAQQLYSLLGQFNCLTHQLECTQNKDLANQVSVCLERLGSLTLKPEDSTVLLFEADTITLRQTITTFGSLKTIQIPEHLMAHASSANIGPFLEKRGCISMPEQKSASGIVAVPFSEWLLGSKPASGYQAPYIPSTDPQDWLTQKQTLENSQEVLLNSPLQEEHNFPPDHYGLPAVCDLFACMQLKVDKEKWLYRTPLQM

SEQ ID NO: 834439 - protein, 212 aa, Homo sapiens
LRLGSEAGWCLNDHLEAKKPLSTPSMVTEDWLVQNHQDPCKVEEVCRANEPCTSFAECVCDENCEKEALYKWLLKKEGKDKNGMPVEPKPEPEKHKDSLNMWLCPRKEVIEQTKAPKAMTPSRIADSFQVIKNSPLSEWLIRPPYKEGSPKEVPGTEDRAGKQKEVLLNSPLQEEHNFPPDHYGLPAVCDLFACMQLKVDKEKWLYRTPLQM

SEQ ID NO: 834440 - protein, 622 aa, Homo sapiens [sequence omitted]

SEQ ID NO: 834441 - protein, 289 aa, Homo sapiens
MNTFQDQSGSSSNREPLLRCSDARRDLELAIGGVLRAEQQIKDNLREVKAQIHSCISRHLECLRSREVWLYEQVDLIYQLKEETLQQQAQQLYSLLGQFNCLTHQLECTQNKDLANQVSVCLERLGSLTLKPEDSTVLLFEADTITLRQTITTFGSLKTIQIPEHLMAHASSANIGPFLEKRGCISMPEQKSASGIVAVPFSEWLLGSKPASGYQAPYIPSTDPQDWLTQKQTLENSQTSSRACNFFNNVGGNLKGLENWLLKSEKSSYQKCNSHSTTSSFSIEMEKLS

SEQ ID NO: 834442 - protein, 255 aa, Homo sapiens [sequence omitted]

SEQ ID NO: 834443 - protein, 919 aa, Homo sapiens
MTGYTMLRNGGAGNGGQTCMLRWSNRIRLTWLSFTLFVILVFFPLIAHYYLTTLDEADEAGKRIFGPRVGNELCEVKHVLDLCRIRESVSEELLQLEAKRQELNSEIAKLNLKIEACKKSIENAKQDLLQLKNVISQTEHSYKELMAQNQPKLSLPIRLLPEKDDAGLPPPKATRGCRLHNCFDYSRCPLTSGFPVYVYDSDQFVFGSYLDPLVKQAFQATARANVYVTENADIACLYVILVGEMQEPVVLRPAELEKQLYSLPHWRTDGHNHVIINLSRKSDTQNLLYNVSTGRAMVAQSTFYTVQYRPGFDLVVSPLVHAMSEPNFMEIPPQVPVKRKYLFTFQGEKIESLRSSLQEARSFEEEMEGDPPADYDDRIIATLKAVQDSKLDQVLVEFTCKNQPKPSLPTEWALCGEREDRLELLKLSTFALIITPGDPRLVISSGCATRLFEALEVGAVPVVLGEQVQLPYQDMLQWNEAALVVPKPRVTEVHFLLRSLSDSDLLAMRRQGRFLWETYFSTADSIFNTVLAMIRTRIQIPAAPIREEAAAEIPHRSGKAAGTDPNMADNGDLDLGPVETEPPYASPRYLRNFTLTVTDFYRSWNCAPGPFHLFPHTPFDPVLPSEAKFLGSGTGFRPIGGGAGGSGKEFQAALGGNVPREQFTVVMLTYEREEVLMNSLERLNGLPYLNKVVVVWNSPKLPSEDLLWPDIGVPIMVVRTEKNSLNNRFLPWNEIETEAILSIDDDAHLRHDEIMFGFRVWREARDRIVGFPGRYHAWDIPHQSWLYNSNYSCELSMVLTGAAFFHKYYAYLYSYVMPQAIRDMVDEYINCEDIAMNFLVSHITRKPPIKVTSRWTFRCPGCPQALSHDDSHFHERHKCINFFVKVYGYMPLLYTQFRVDSVLFKTRLPHDKTKCFKFI

SEQ ID NO: 834444 - protein, 919 aa, Homo sapiens; identical to SEQ ID NO: 834443

SEQ ID NO: 834445 - protein, 876 aa, Homo sapiens
MTGYTMLRNGGAGNGGQTCMLRWSNRIRLTWLSFTLFVILVFFPLIAHYYLTTLDEADEAGKRIFGPRVGNELCEVKHVLDLCRIRESVSEELLQLEAKRQELNSEIAKLNLKIEACKKSIENAKQDLLQLKNVISQTEHSYKELMAQNQPKLSLPIRLLPEKDDAGLPPPKATRGCRLHNCFDYSRCPLTSGFPVYVYDSDQFVFGSYLDPLVKQAFQATARANVYVTENADIACLYVILVGEMQEPVVLRPAELEKQLYSLPHWRTDGHNHVIINLSRKSDTQNLLYNVSTGRAMVAQSTFYTVQYRPGFDLVVSPLVHAMSEPNFMEIPPQVPVKRKYLFTFQGEKIESLRSSLQEARSFEEEMEGDPPADYDDRIIATLKAVQDSKLDQVLVEFTCKNQPKPSLPTEWALCGEREDRLELLKLSTFALIITPGDPRLVISSGCATRLFEALEVGAVPVVLGEQVQLPYQDMLQWNEAALVVPKPRVTEVHFLLRSLSDSDLLAMRRQGRFLWETYFSTADSIFNTVLAMIRTRIQIPAAPIREEAAAEIPHRSGKAAGTDPNMADNGDLDLGPVETEPPYASPRYLRNFTLTVTDFYRSWNCAPGPFHLFPHTPFDPVLPSEAKFLGSGTGFRPIGGGAGGSGKEFQAALGGNVPREQFTVVMLTYEREEVLMNSLERLNGLPYLNKVVVVWNSPKLPSEDLLWPDIGVPIMVVRTEKNSLNNRFLPWNEIETEAILSIDDDAHLRHDEIMFGFRVWREARDRIVGFPGRYHAWDIPHQSWLYNSNYSCELSMVLTGAAFFHKVTSRWTFRCPGCPQALSHDDSHFHERHKCINFFVKVYGYMPLLYTQFRVDSVLFKTRLPHDKTKCFKFI

SEQ ID NO: 834446 - protein, 919 aa, Homo sapiens; identical to SEQ ID NO: 834443

SEQ ID NO: 834447 - protein, 107 aa, Homo sapiens
MGKRRHRPRVSLAVCGPPLATLSWLAGCRSASFSGWPACCSGLGCLTITPSQGSAGHCERWLPGQCSSVWTVPQARAHQLGSCPEGWDLSGSCAGQSGELLVCGGKL

SEQ ID NO: 834448 - protein, 919 aa, Homo sapiens; identical to SEQ ID NO: 834443

SEQ ID NO: 834449 - protein, 919 aa, Homo sapiens; identical to SEQ ID NO: 834443

SEQ ID NO: 834450 - protein, 340 aa, Homo sapiens
MTGYTMLRNGGAGNGGQTCMLRWSNRIRLTWLSFTLFVILVFFPLIAHYYLTTLDEADEAGKRIFGPRVGNELCEVKHVLDLCRIRESVSEELLQLEAKRQELNSEIAKLNLKIEACKKSIENAKQDLLQLKNVISQTEHSYKELMAQNQPKLSLPIRLLPEKDDAGLPPPKATRGCRLHNCFDYSRCPLTSGFPVYVYDSDQFVFGSYLDPLVKQAFQATARANVYVTENADIACLYVILVGEMQEPVVLRPAELEKQLYSLPHWRTDGHNHVIINLSRKSDTQNLLYNVSTGRAMVAQSTFYTVQYRPGFDLVVSPLVHAMSEPNFMEIPPTCRASSA

SEQ ID NO: 834451 - protein, 132 aa, Homo sapiens
MISITEWQKIGVGITGFGIFFILFGTLLYFDSVLLAFGNLLFLTGLSLIIGLRKTFWFFFQRHKLKGTSFLLGGVVIVLLRWPLLGMFLETYGFFSLFKGFFPVAFGFLGNVCNIPFLGALFRRLQGTSSMV

SEQ ID NO: 834452 - protein, 334 aa, Homo sapiens
MVGREKELSIHFVPGSCRLVEEEVNIPNRRVLVTGATGLLGRAVHKEFQQNNWHAVGCGFRRARPKFEQVNLLDSNAVHHIIHDFQPHVIVHCAAERRPDVVENQPDAASQLNVDASGNLAKEAAAVGAFLIYISSDYVFDGTNPPYREEDIPAPLNLYGKTKLDGEKAVLENNLGAAVLRIPILYGEVEKLEESAVTVMFDKVQFSNKSANMDHWQQRFPTHVKDVATVCRQLAEKRMLDPSIKGTFHWSGNEQMTKYEMACAIADAFNLPSSHLRPITDSPVLGAQRPRNAQLDCSKLETLGIGQRTPFRIGIKESLWPFLIDKRWRQTVFH

SEQ ID NO: 834453 - protein, 334 aa, Homo sapiens; identical to SEQ ID NO: 834452

SEQ ID NO: 834454 - protein, 223 aa, Homo sapiens
MVGREKELSIHFVPGSCRLVEEEVNIPNRRVLVTGATGLLGRAVHKEFQQNNWHAVGCGFRRARPKFEQVNLLDSNAVHHIIHDFQPHVIVHCAAERRPDVVENQPDAASQLNVDASGNLAKEAAAVGAFLIYISSDYVFDGTNPPYREEDIPAPLNLYGKTKLDGEKAVLENNLGAAVLRIPILYGQLVTNIVHCRIGSHTGKIGHWFREFALRHVAALIRD

SEQ ID NO: 834455 - protein, 248 aa, Homo sapiens
MPEMPEDMEQEEVNIPNRRVLVTGATGLLGRAVHKEFQQNNWHAVGCGFRRARPKFEQVNLLDSNAVHHIIHDFQPHVIVHCAAERRPDVVENQPDAASQLNVDASGNLAKEAAAVGAFLIYISSDYVFDGTNPPYREEDIPAPLNLYGKTKLDGEKAVLENNLGAAVLRIPILYGEVEKLEESAVTVMFDKVQFSNKSANMDHWQQRFPTHVKDVATVCRQLAEKRMLVRRIPESCLSEGPLCLFHA

SEQ ID NO: 834456 - protein, 323 aa, Homo sapiens
MPEMPEDMEQEEVNIPNRRVLVTGATGLLGRAVHKEFQQNNWHAVGCGFRRARPKFEQVNLLDSNAVHHIIHDFQPHVIVHCAAERRPDVVENQPDAASQLNVDASGNLAKEAAAVGAFLIYISSDYVFDGTNPPYREEDIPAPLNLYGKTKLDGEKAVLENNLGAAVLRIPILYGEVEKLEESAVTVMFDKVQFSNKSANMDHWQQRFPTHVKDVATVCRQLAEKRMLDPSIKGTFHWSGNEQMTKYEMACAIADAFNLPSSHLRPITDSPVLGAQRPRNAQLDCSKLETLGIGQRTPFRIGIKESLWPFLIDKRWRQTVFH

SEQ ID NO: 834457 - protein, 135 aa, Homo sapiens
MFDKVQFSNKSANMDHWQQRFPTHVKDVATVCRQLAEKRMLDPSIKGTFHWSGNEQMTKYEMACAIADAFNLPSSHLRPITDSPVLGAQRPRNAQLDCSKLETLGIGQRTPFRIGIKESLWPFLIDKRWRQTVFH

SEQ ID NO: 834458 - protein, 259 aa, Homo sapiens
MVGREKELSIHFVPGSCRLVEEEVNIPNRRVLVTGATGLLGRAVHKEFQQNNWHAVGCGFRRARPKFEQVNLLDSNAVHHIIHDFQPHVIVHCAAERRPDVVENQPDAASQLNVDASGNLAKEAAAVGAFLIYISSDYVFDGTNPPYREEDIPAPLNLYGKTKLDGEKAVLENNLGAAVLRIPILYGEVEKLEESAVTVMFDKVQFSNKSANMDHWQQRFPTHVKDVATVCRQLAEKRMLVRRIPESCLSEGPLCLFHA

SEQ ID NO: 834459 - protein, 323 aa, Homo sapiens; identical to SEQ ID NO: 834456

SEQ ID NO: 834460 - protein, 139 aa, Homo sapiens
SFSPGLISVVALQLPALLFLVGPSILRVLVVPPIARRPRDVGFFFQAMCRAERWFSPLRAPLFLIGRRPVLSSLLLFAALPYGGPLLLTRGGGWVAIYWWSPPVFSPPPLFFFFFFFFFFFFFFFFFFLFLQVTYSFYA

SEQ ID NO: 834461 - protein, 334 aa, Homo sapiens; identical to SEQ ID NO: 834452

SEQ ID NO: 834462 - protein, 122 aa, Homo sapiens
GPRGSTHAYAHVKDVATVCRQLAEKRMLDPSIKGTFHWSGNEQMTKYEMACAIADAFNLPSSHLRPITDSPVLGAQRPRNAQLDCSKLETLGIGQRTPFRIGIKESLWPFLIDKRWRQTVFH

SEQ ID NO: 834463 - protein, 95 aa, Homo sapiens
MVERRKKNPQMSAWKSLESSGLMVQKLELNYEEIRYSLGLWCLECCSIDREPLLMGRVGTGDAGDITSGEAEEPLFTGTSFPLQWLDLCSGGAEG

SEQ ID NO: 834464 - protein, 155 aa, Homo sapiens
MGGNVFVLYLQIHSLYRRTGASFQKAQQEFAAGVFSNPAVRHRCCIMSRWSLICTKSFAVLGVVDTALSLGASVRECEPPCQVPAQGPAALHLGRVTGRRLCPEASPCPRLVWKLRPTSRSSLQAFHYAPSRSGALPTRASAGALDSSSINTVTA

SEQ ID NO: 834465 - protein, 72 aa, Homo sapiens
EKEGVLSCLDRIETLLPKEQIQNWALPSHQSLKDFCCGGSVVFQFFCSENGGERAALALSTPKLLSHLHSQN

SEQ ID NO: 834466 - protein, 128 aa, Homo sapiens
  misc_feature (52)..(52): Xaa can be any naturally occurring amino acid
ASRRRQVEAAAAGPGYRRFSAARSRPGLNSYPGPRPPPRAREDTGGHPPGVXERSRGLDSSLGFSCRQPYCCCCCSLSLAQGLGLQDECQYLLQPQLIVRRLLDVAVLVPGRPSEQTLSPHNRSALYK

SEQ ID NO: 834467 - protein, 650 aa, Homo sapiens
MEVVTAPSGGPFRVCRYLGLGVPADTLNEGGLFLTDYSTCSPRKLSPFRSFASTELFHFHVPEDTFLAVWNLIIFKEQGGTFGDHCPDQSVTVYFRSGAPPVINPLHTHFPGDTAVPGVFSLTLSWTLPNRTSGIFNVSSPLPGDWFLAAHLPQAHGHISVKGLQDECQYLLQPQLIVRRLLDVAVLVPGRPSEQTLSPHNRSALYKVFVPSFTYRVSAQLVCVGGRGVSACPLSLRLRPKAPPLHNSSSVACGGASGCQLELALPPWGHWVYVRVETSSRGPGRTIRFQLCVQLQECPQPGLLRALVPGAAMNMPQSLGNQPLPPEPPSLGTPAEGPGTTSPPEHCWPVRPTLRNELDTFSVHFYIFFGPSVALPPERPAVFAMRLLPVLDSGGVLSLELQLNASSVRQENVTVFGCLTHEVPLSLGDAAVTCSKESLAGFLLSVSATTRVARLRIPFPQTGTWFLALRSLCGVGPRFVRCRNATAEVRMRTFLSPCVDDCGPYGQCKLLRTHNYLYAACECKAGWRGWGCTDSADALTYGFQLLSTLLLCLSNLMFLPPVVLAIRSRYVLEAAVYTFTMFFSTVCGGVCILSLGACAWWWVTVCISTTFSEGLGMSVPSLCLLQTETAVLPKLSCIDNGHFCKTHWSK

SEQ ID NO: 834468 - protein, 995 aa, Homo sapiens
GVTPTSSRGRRRGAWLSPVQRSPESPRPELLPSLDSSLGFSCRQPYVLLLLFSVLGPGAGGLFLTDYSTCSPRKLSPFRSFASTELFHFHVPEDTFLAVWNLIIFKEQGGTFGDHCPDQSVTVYFRSGAPPVINPLHTHFPGDTAVPGVFSLTLSWTLPNRTSGIFNVSSPLPGDWFLAAHLPQAHGHISVKGLQDECQYLLQPQLIVRRLLDVAVLVPGRPSEQTLSPHNRSALYKVFVPSFTYRVSAQLVCVGGRGVSACPLSLRLRPKAPPLHNSSSVACGGASGCQLELALPPWGHWVYVRVETSSRGPGRTIRFQLCVQLQECPQPGLLRALVPGAAMNMPQSLGNQPLPPEPPSLGTPAEGPGTTSPPEHCWPVRPTLRNELDTFSVHFYIFFGPSVALPPERPAVFAMRLLPVLDSGGVLSLELQLNASSVRQENVTVFGCLTHEVPLSLGDAAVTCSKESLAGFLLSVSATTRVARLRIPFPQTGTWFLALRSLCGVGPRFVRCRNATAEVRMRTFLSPCVDDCGPYGQCKLLRTHNYLYAACECKAGWRGWGCTDSADALTYGFQLLSTLLLCLSNLMFLPPVVLAIRSRYVLEAAVYTFTMFFSTFYHACDQPGIVVFCIMDYDVLQFCDFLGSLMSVWVTVIAMARLQPVVKQVLYLLGAMLLSMALQLDRHGLWNLLGPSLFALGILATAWTVRSVRRRHCYPPTWRRWLFYLCPGSLIAGSAVLLYAFVETRDNYFYIHSIWHMLIAGSVGFLLPPRAKTDHGVPSGARARGCGYQLCINEQEELGLVGQEGPLSAASVPAERGFGLALRGYECFLEFFLGVWSPLRRRQAVFLEDMESFSRTQNSSRDLEPFPGHGELPEGLESPCIMESFLRTGAYAGTESLRTKESLLQVWSLSWDAEPSQDMDSFPGRQSPVRSTASFQRRWSLSWGNQISRFSQRLSNSGLRLPSQRQRLGCAVLWRRDCRMDGAGTGAVWVAGILV

SEQ ID NO: 834469 - protein, 628 aa, Homo sapiens
  misc_feature (171)..(171): Xaa can be any naturally occurring amino acid
DWPARGRGHEDTASSSYWVVMTQTCRDTPVGSRHWMGLRAEAGALAGMALEATCLALQGSLLEASMKRSFPWATHCLAPQRRTTQPALPRIFLVLALNVHSLRNPSVSGKWDVWCPYHHVSLILDSPDQWEGCKHWLGLAEVVFGISVVAEVPLAWQGPLSYHQKWILSQXCSPSQALPFIPFLPVQRSPESPRPELLPRSPAPAPGPRGHRRPPPGGGGAEPRPRLKSGFQLPPALLLLLLFSVLGPGAGGLFLTDYSTCSPRKLSPFRSFASTELFHFHVPEDTFLAVWNLIIFKEQGGTFGDHCPDQSVTVYFRSGAPPVINPLHTHFPGDTAVPGVFSLTLSWTLPNRTSGIFNVSSPLPGDWFLAAHLPQAHGHISVKSSVRQENVTVFGCLTHEVPLSLGDAAVTCSKESLAGFLLSVSATTRVARLRIPFPQTGTWFLALRSLCGVGPRFVRCRNATAEVRMRTFLSPCVDDCGPYGQCKLLRTHNYLYAACECKAGWRGWGCTDSADALTYGFQLLSTLLLCLSNLMFLPPVVLAIRSRYVLEAAVYTFTMFFSTVCGGVCILSLGACAWWWVTVCISTTFSEGLGMSVPSLCLLQTETAVLPKLSCIDNGHFCKTHWSK

SEQ ID NO: 834470 - protein, 473 aa, Homo sapiens
GVTPTSSRGRRRGAWLSPVQRSPESPRPELLPSLDSSLGFSCRQPYVLLLLFSVLGPGAGGLFLTDYSTCSPRKLSPFRSFASTELFHFHVPEDTFLAVWNLIIFKEQGGTFGDHCPDQSVTVYFRSGAPPVINPLHTHFPGDTAVPGVFSLTLSWTLPNRTSGIFNVSSPLPGDWFLAAHLPQAHGHISVKGLQDECQYLLQPQLIVRRLLDVAVLVPGRPSEQTLSPHNRSALYKVFVPSFTYRVSAQLVCVGGRGVSACPLSLRLRPKAPPLHNSSSVACGGASGCQLELALPPWGHWVYVRVETSSRGPGRTIRFQLCVQLQECPQPGLLRALVPGAAMNMPQSLGNQPLPPEPPSLGTPAEGPGTTSPPEHCWPVRPTLRNELDTFSVHFYIFFGPSVALPPERPAVFAMRLLPVLDSGGVLSLELQLNAVLFMESGEVALPGSLKGKVSGVLGCLPPPGSLSRLLPP

SEQ ID NO: 834471 - protein, 871 aa, Homo sapiens
  misc_feature (171)..(171): Xaa can be any naturally occurring amino acid
DWPARGRGHEDTASSSYWVVMTQTCRDTPVGSRHWMGLRAEAGALAGMALEATCLALQGSLLEASMKRSFPWATHCLAPQRRTTQPALPRIFLVLALNVHSLRNPSVSGKWDVWCPYHHVSLILDSPDQWEGCKHWLGLAEVVFGISVVAEVPLAWQGPLSYHQKWILSQXCSPSQALPFIPFLPVQRSPESPRPELLPRSPAPAPGPRGHRRPPPGGGGAEPRPRLKSGFQLPPALLLLLLFSVLGPGAGGLFLTDYSTCSPRKLSPFRSFASTELFHFHVPEDTFLAVWNLIIFKEQGGTFGDHCPDQSVTVYFRSGAPPVINPLHTHFPGDTAVPGVFSLTLSWTLPNRTSGIFNVSSPLPGDWFLAAHLPQAHGHISVKGLQDECQYLLQPQLIVRRLLDVAVLVPGRPSEQTLSPHNRSALYKVFVPSFTYRVSAQLVCVGGRGVSACPLSLRLRPKAPPLHNSSSVACGGASGCQLELALPPWGHWVYVRVETSSRGPGRTIRFQLCVQLQECPQPGLLRALVPGAAMNMPQSLGNQPLPPEPPSLGTPAEGPGTTSPPEHCWPVRPTLRNELDTFSVHFYIFFGPSVALPPERPAVFAMRLLPVLDSGGVLSLELQLNASSVRQENVTVFGCLTHEVPLSLGDAAVTCSKESLAGFLLSVSATTRVARLRIPFPQTGTWFLALRSLCGVGPRFVRCRNATAEVRMRTFLSPCVDDCGPYGQCKLLRTHNYLYAACECKAGWRGWGCTDSADALTYGFQLLSTLLLCLSNLMFLPPVVLAIRSRYVLEAAVYTFTMFFSTVCGGVCILSLGACAWWWVTVCISTTFSEGLGMSVPSLCLLQTETAVLPKLSCIDNGHFCKTHWSK

SEQ ID NO: 834472 - protein, 680 aa, Homo sapiens
GVTPTSSRGRRRGAWLSPVQRSPESPRPELLPSLDSSLGFSCRQPYVLLLLFSVLGPGAGGLFLTDYSTCSPRKLSPFRSFASTELFHFHVPEDTFLAVWNLIIFKEQGGTFGDHCPDQSVTVYFRSGAPPVINPLHTHFPGDTAVPGVFSLTLSWTLPNRTSGIFNVSSPLPGDWFLAAHLPQAHGHISVKGLQDECQYLLQPQLIVRRLLDVAVLVPGRPSEQTLSPHNRSALYKVFVPSFTYRVSAQLVCVGGRGVSACPLSLRLRPKAPPLHNSSSVACGGASGCQLELALPPWGHWVYVRVETSSRGPGRTIRFQLCVQLQECPQPGLLRALVPGAAMNMPQSLGNQPLPPEPPSLGTPAEGPGTTSPPEHCWPVRPTLRNELDTFSVHFYIFFGPSVALPPERPAVFAMRLLPVLDSGGVLSLELQLNASSVRQENVTVFGCLTHEVPLSLGDAAVTCSKESLAGFLLSVSATTRVARLRIPFPQTGTWFLALRSLCGVGPRFVRCRNATAEVRMRTFLSPCVDDCGPYGQCKLLRTHNYLYAACECKAGWRGWGCTDSADALTYGFQLLSTLLLCLSNLMFLPPVVLAIRSRYVLEAAVYTFTMFFSTVCGGVCILSLGACAWWWVTVCISTTFSEGLGMSVPSLCLLQTETAVLPKLSCIDNGHFCKTHWSK

SEQ ID NO: 834473 - protein, 887 aa, Homo sapiens
GVTPTSSRGRRRGAWLSPVQRSPESPRPELLPRLSGTPALCQGGQQHKGGWGGAWLKASRSPSGSEAMIWRRQLGSPRRTCWVQGLQDECQYLLQPQLIVRRLLDVAVLVPGRPSEQTLSPHNRSALYKVFVPSFTYRVSAQLVCVGGRGVSACPLSLRLRPKAPPLHNSSSVACGGASGCQLELALPPWGHWVYVRVETSSRGPGRTIRFQLCVQLQECPQPGLLRALVPGAAMNMPQSLGNQPLPPEPPSLGTPAEGPGTTSPPEHCWPVRPTLRNELDTFSVHFYIFFGPSVALPPERPAVFAMRLLPVLDSGGVLSLELQLNASSVRQENVTVFGCLTHEVPLSLGDAAVTCSKESLAGFLLSVSATTRVARLRIPFPQTGTWFLALRSLCGVGPRFVRCRNATAEVRMRTFLSPCVDDCGPYGQCKLLRTHNYLYAACECKAGWRGWGCTDSADALTYGFQLLSTLLLCLSNLMFLPPVVLAIRSRYVLEAAVYTFTMFFSTFYHACDQPGIVVFCIMDYDVLQFCDFLGSLMSVWVTVIAMARLQPVVKQVLYLLGAMLLSMALQLDRHGLWNLLGPSLFALGILATAWTVRSVRRRHCYPPTWRRWLFYLCPGSLIAGSAVLLYAFVETRDNYFYIHSIWHMLIAGSVGFLLPPRAKTDHGVPSGARARGCGYQLCINEQEELGLVGQEGPLSAASVPAERGFGLALRGYECFLEFFLGVWSPLRRRQAVFLEDMESFSRTQNSSRDLEPFPGHGELPEGLESPCIMESFLRTGAYAGTESLRTKESLLQVWSLSWDAEPSQDMDSFPGRQSPVRSTASFQRRWSLSWGNQISRFSQRLSNSGLRLPSQRQRLGCAVLWRRDCRMDGAGTGAVWVAGILV

SEQ ID NO: 834474 - protein, 345 aa, Homo sapiens
EKEGVLSCLDRIETLLPKEQIQNWALPSHQSLKDFCCGGSVVFQFFCSENGGERAALAWRAPGGMGCPWKVWVNRGGSLRVAVGGDGGCGGLTSITCPPQSSVRQENVTVFGCLTHEVPLSLGDAAVTCSKESLAGFLLSVSATTRVARLRIPFPQTGTWFLALRSLCGVGPRFVRCRNATAEVRMRTFLSPCVDDCGPYGQCKLLRTHNYLYAACECKAGWRGWGCTDSADALTYGFQLLSTLLLCLSNLMFLPPVVLAIRSRYVLEAAVYTFTMFFSTVCGGVCILSLGACAWWWVTVCISTTFSEGLGMSVPSLCLLQTETAVLPKLSCIDNGHFCKTHWSK

SEQ ID NO: 834475 - protein, 435 aa, Homo sapiens
MLLPWATSAPGLAWGPLVLGLFGLLAASQPQAVPPYASENQTCRDQEKEYYEPQHRICCSRCPPGTYVSAKCSRIRDTVCATCAENSYNEHWNYLTICQLCRPCDPVMGLEEIAPCTSKRKTQCRCQPGMFCAAWALECTHCELLSDCPPGTEAELKDEVGKGNNHCVPCKAGHFQNTSSPSARCQPHTRCENQGLVEAAPGTAQSDTTCKNPLEPLPPEMSGTMLMLAVLLPLAFFLLLATVFSCIWKSHPSLCRKLGSLLKRRPQGEGPNPVAGSWEPPKAHPYFPDLVQPLLPISGDVSPVSTGLPAAPVLEAGVPQQQSPLDLTREPQLEPGEQSQVAHGTNGIHVTGGSMTITGNIYIYNGPVLGGPPGPGDLPATPEPPYPIPEEGDPGPPGLSTPHQEDGKAWHLAETEHCGATPSNRGPRNQFITHD

SEQ ID NO: 834476 - protein, 116 aa, Homo sapiens
MWTQYHIPCSRCPPGTYVSAKCSRIRDTVCATCAENSYNEHWNYLTICQLCRPCDPVMGLEEIAPCTSKRKTQCRCQPGMFCAAWALECTHCELLSDCPPGTEAELKGQRSLRGWM

SEQ ID NO: 834477 - protein, 215 aa, Homo sapiens
MSGTMLMLAVLLPLAFFLLLATVFSCIWKSHPSLCRKLGSLLKRRPQGEGPNPVAGSWEPPKAHPYFPDLVQPLLPISGDVSPVSTGLPAAPVLEAGVPQQQSPLDLTREPQLEPGEQSQVAHGTNGIHVTGGSMTITGNIYIYNGPVLGGPPGPGDLPATPEPPYPIPEEGDPGPPGLSTPHQEDGKAWHLAETEHCGATPSNRGPRNQFITHD

SEQ ID NO: 834478 - protein, 435 aa, Homo sapiens; identical to SEQ ID NO: 834475

SEQ ID NO: 834479 - protein, 215 aa, Homo sapiens; identical to SEQ ID NO: 834477

SEQ ID NO: 834480 - protein, 261 aa, Homo sapiens
APDNYSSEEVYYNHALLNGSHVHGTVPHPLSPLTTTPLSTHVGPIMMSRTMLMLAVLLPLAFFLLLATVFSCIWKSHPSLCRKLGSLLKRRPQGEGPNPVAGSWEPPKAHPYFPDLVQPLLPISGDVSPVSTGLPAAPVLEAGVPQQQSPLDLTREPQLEPGEQSQVAHGTNGIHVTGGSMTITGNIYIYNGPVLGGPPGPGDLPATPEPPYPIPEEGDPGPPGLSTPHQEDGKAWHLAETEHCGATPSNRGPRNQFITHD

SEQ ID NO: 834481 - protein, 305 aa, Homo sapiens
MLLPWATSAPGLAWGPLVLGLFGLLAASQPQAVPPYASENQTCRDQEKEYYEPQHRICCSRCPPGTYVSAKCSRIRDTVCATCAENSYNEHWNYLTICQLCRPCDPVMGLEEIAPCTSKRKTQCRCQPGMFCAAWALECTHCELLSDCPPGTEAELKDEVGKGNNHCVPCKAGHFQNTSSPSARCQPHTRCENQGLVEAAPGTAQSDTTCKNPLEPLPPEMSGTMLMLAVLLPLAFFLLLATVFSCIWKSHPSLCRKLGSLLKRRPQVMAGAEKAARRGRGDEGTRWSRQEESMQADSTLIHSFN

SEQ ID NO: 834482 - protein, 190 aa, Homo sapiens
MLLPWATSAPGLAWGPLVLGLFGLLAASQPQAVPPYASENQTCRDQEKEYYEPQHRICCSRCPPGTYVSAKCSRIRDTVCATCAENSYNEHWNYLTICQLCRPCDPVMGLEEIAPCTSKRKTQCRCQPGMFCAAWALECTHCELLSDCPPGTEAELKDEVGKGNNHCVPCKAGHFQNTSSPSARCQPHTR

SEQ ID NO: 834483 - protein, 129 aa, Homo sapiens
SRRAPTPPPNMPIHDTVSPGCQEVLKSNLVPLLYNPREVSLILPLGAALCLEGKKLLPFLCLGCPGIWKALPSPPPLCPSWGCDHPPVCCPGRNHADAGRSAATGLLSAPCHRLLLHLEEPPFSLQETG

SEQ ID NO: 834484 - protein, 435 aa, Homo sapiens; identical to SEQ ID NO: 834475

SEQ ID NO: 834485 - protein, 412 aa, Homo sapiens
RATGRMMGGQRDRGKGQVTLQAAEVRVEPRLLRLYCSTHVLGTYVSAKCSRIRDTVCATCAENSYNEHWNYLTICQLCRPCDPVMGLEEIAPCTSKRKTQCRCQPGMFCAAWALECTHCELLSDCPPGTEAELKDEVGKGNNHCVPCKAGHFQNTSSPSARCQPHTRCENQGLVEAAPGTAQSDTTCKNPLEPLPPEMSGTMLMLAVLLPLAFFLLLATVFSCIWKSHPSLCRKLGSLLKRRPQGEGPNPVAGSWEPPKAHPYFPDLVQPLLPISGDVSPVSTGLPAAPVLEAGVPQQQSPLDLTREPQLEPGEQSQVAHGTNGIHVTGGSMTITGNIYIYNGPVLGGPPGPGDLPATPEPPYPIPEEGDPGPPGLSTPHQEDGKAWHLAETEHCGATPSNRGPRNQFITHD

SEQ ID NO: 834486 - protein, 435 aa, Homo sapiens; identical to SEQ ID NO: 834475

SEQ ID NO: 834487 - protein, 215 aa, Homo sapiens; identical to SEQ ID NO: 834477

SEQ ID NO: 834488 - protein, 450 aa, Homo sapiens
MLLPWATSAPGLAWGPLVLGLFGLLAASQPQAVPPYASENQTCRDQEKEYYEPQHRICCSRCPPGTYVSAKCSRIRDTVCATCAENSYNEHWNYLTICQLCRPCDPVMGLEEIAPCTSKRKTQCRCQPGMFCAAWALECTHCELLSDCPPGTEAELKDEVGKGNNHCVPCKAGHFQNTSSPSARCQPHTRCENQGLVEAAPGTAQSDTTCKNPLEPLPPEMSGTMLMLAVLLPLAFFLLLATVFSCIWKSHPSLCRKLGSLLKRRPQGEGPNPVAGSWEPPKAHPYFPDLVQPLLPISGDVSPVSTGLPAAPVLEAGVPQQQSPLDLTREPQLEPGEQSQVAHGTNGIHVTGGSMTITGNIYIYNGPVLGGPPGPGDLPATPEPPYPIPEEGDPGPPGLSTPHQEDGKAWHLAETEHCGATPSKGFVVLIPKLQRPFGVPHFTWTEVDPA

SEQ ID NO: 834489 - protein, 251 aa, Homo sapiens [sequence omitted]

SEQ ID NO: 834490 - protein, 105 aa, Homo sapiens
  misc_feature (66)..(66): Xaa can be any naturally occurring amino acid
  misc_feature (99)..(99): Xaa can be any naturally occurring amino acid
  misc_feature (104)..(104): Xaa can be any naturally occurring amino acid
MLLPWATSAPGLAWGPLVLGLFGLLAASQPQAVPPYASENQTCRDQEKEYYEPQHRICCSRCPPGXECSREGEDGKSSRLGPAPLCYLPDDAEETAFLXDASVXP

SEQ ID NO: 834491 - protein, 215 aa, Homo sapiens
MATAPYNYSYIFKYIIIGDMGVGKSCLLHQFTEKKFMADCPHTIGVEFGTRIIEVSGQKIKLQIWDTAGQERFRAVTRSYYRGAAGALMVYDITRRSTYNHLSSWLTDARNLTNPNTVIILIGNKADLEAQRDVTYEEAKQFAEENGLLFLEASAKTGENVEDAFLEAAKKIYQNIQDGSLDLNAAESGVQHKPSAPQGGRLTSEPQPQREGCGC

SEQ ID NO: 834492 - protein, 44 aa, Homo sapiens
MTIFQDDLYAGLPQLRKRLPQLDDDADTATHTSNPPRWLTTPIT

SEQ ID NO: 834493 - protein, 215 aa, Homo sapiens; identical to SEQ ID NO: 834491

SEQ ID NO: 834494 - protein, 239 aa, Homo sapiens
GASARGAGLSGGATSPEVRAEEGAWLAALASATLFRAPPAARASSPPSFVVRPIARVTGNPVQGAPPSWTSPRKILREHRSSHRCHCYCRYCCRRVCTSRPASVPAGASVDRPRPLSRCVRTPVPGPDAPLPPGKLPSHQQPPSATMATAPYNYSYIFKYIIIGDMGVGKSCLLHQFTEKKFMADCPHTIGVEFGTRIIEVSGQKIKRHREMLHMKKPNSLLKKMAYCSSKRVQKRERM

SEQ ID NO: 834495 - protein, 215 aa, Homo sapiens; identical to SEQ ID NO: 834491

SEQ ID NO: 834496 - protein, 148 aa, Homo sapiens
NCSCVYFFVEMEGSNMVTYRSYCTNWYFILFQCQYWLHPLVLAVFGDIMLERAPSIRGLTLADSVPSLHCCLPADFLNCSCAIDNVLTCFSLFVNVFALQAAFLPYCIEKEKRLGLLLHILSFYTFIFLEWSDSELDSQNHRSAVKGF

SEQ ID NO: 834497 - protein, 215 aa, Homo sapiens; identical to SEQ ID NO: 834491

SEQ ID NO: 834498 - protein, 215 aa, Homo sapiens; identical to SEQ ID NO: 834491

SEQ ID NO: 834499 - protein, 216 aa, Homo sapiens
  misc_feature (200)..(200): Xaa can be any naturally occurring amino acid
MATAPYNYSYIFKYIIIGDMGVGKSCLLHQFTEKKFMADCPHTIGVEFGTRIIEVSGQKIKLQIWDTAGQERFRAVTRSYYRGAAGALMVYDITRRSTYNHLSSWLTDARNLTNPNTVIILIGNKADLEAQRDVTYEEAKQFAEENGLLFLEARVQATRERQRKGGRLGGGGVGASDGGREMLLNVALVALVLLGAYRLXGALGAAGSGGRGGAGE

SEQ ID NO: 834500 - protein, 215 aa, Homo sapiens; identical to SEQ ID NO: 834491

SEQ ID NO: 834501 - protein, 196 aa, Homo sapiens
MGVGKSCLLHQFTEKKFMADCPHTIGVEFGTRIIEVSGQKIKLQIWDTAGQERFRAVTRSYYRGAAGALMVYDITRRSTYNHLSSWLTDARNLTNPNTVIILIGNKADLEAQRDVTYEEAKQFAEENGLLFLEASAKTGENVEDAFLEAAKKIYQNIQDGSLDLNAAESGVQHKPSAPQGGRLTSEPQPQREGCGC

SEQ ID NO: 834502 - protein, 215 aa, Homo sapiens; identical to SEQ ID NO: 834491

SEQ ID NO: 834503 - protein, 127 aa, Homo sapiens
MVYDITRRSTYNHLSSWLTDARNLTNPNTVIILIGNKADLEAQRDVTYEEAKQFAEENGLLFLEASAKTGENVEDAFLEAAKKIYQNIQDGSLDLNAAESGVQHKPSAPQGGRLTSEPQPQREGCGC

SEQ ID NO: 834504 - protein, 132 aa, Homo sapiens [sequence omitted]

SEQ ID NO: 834505 - protein, 215 aa, Homo sapiens; identical to SEQ ID NO: 834491

SEQ ID NO: 834506 - protein, 215 aa, Homo sapiens; identical to SEQ ID NO: 834491

SEQ ID NO: 834507 - protein, 1247 aa, Homo sapiens
MTRILTAFKVVRTLKTGFGFTNVTAHQKWKFSRPGIRLLSVKAQTAHIVLEDGTKMKGYSFGHPSSVAGEVVFNTGLGGYPEAITDPAYKGQILTMANPIIGNGGAPDTTALDELGLSKYLESNGIKVSGLLVLDYSKDYNHWLATKSLGQWLQEEKVPAIYGVDTRMLTKIIRDKGTMLGKIEFEGQPVDFVDPNKQNLIAEVSTKDVKVYGKGNPTKVVAVDCGIKNNVIRLLVKRGAEVHLVPWNHDFTKMEYDGILIAGGPGNPALAEPLIQNVRKILESDRKEPLFGISTGNLITGLAAGAKTYKMSMANRGQNQPVLNITNKQAFITAQNHGYALDNTLPAGWKPLFVNVNDQTNEGIMHESKPFFAVQFHPEVTPGPIDTEYLFDSFFSLIKKGKATTITSVLPKPALVASRVEVSKVLILGSGGLSIGQAGEFDYSGSQAVKAMKEENVKTVLMNPNIASVQTNEVGLKQADTVYFLPITPQFVTEVIKAEQPDGLILGMGGQTALNCGVELFKRGVLKEYGVKVLGTSVESIMATEDRQLFSDKLNEINEKIAPSFAVESIEDALKAADTIGYPVMIRSAYALGGLGSGICPNRETLMDLSTKAFAMTNQILVEKSVTGWKEIEYEVVRDADDNCVTVCNMENVDAMGVHTGDSVVVAPAQTLSNAEFQMLRRTSINVVRHLGIVGECNIQFALHPTSMEYCIIEVNARLSRSSALASKATGYPLAFIAAKIALGIPLPEIKNVVSGKTSACFEPSLDYMVTKIPRWDLDRFHGTSSRIGSSMKSVGEVMAIGRTFEESFQKALRMCHPSIEGFTPRLPMNKEWPSNLDLRKELSEPSSTRIYAIAKAIDDNMSLDEIEKLTYIDKWFLYKMRDILNMEKTLKGLNSESMTEETLKRAKEIGFSDKQISKCLGLTEAQTRELRLKKNIHPWVKQIDTLAAEYPSVTNYLYVTYNGQEHDVNFDDHGMMVLGCGPYHIGSSVEFDWCAVSSIRTLRQLGKKTVVVNCNPETVSTDFDECDKLYFEELSLERILDIYHQEACGGCIISVGGQIPNNLAVPLYKNGVKIMGTSPLQIDRAEDRSIFSAVLDELKVAQAPWKAVNTLNEALEFAKSVDYPCLLRPSYVLSGSAMNVVFSEDEMKKFLEEATRVSQEHPVVLTKFVEGAREVEMDAVGKDGRVISHAISEHVEDAGVHSGDATLMLPTQTISQGAIGEGCYPEDCKGFCHLWSIQRPISCQRK

SEQ ID NO: 834508 - protein, 1247 aa, Homo sapiens; identical to SEQ ID NO: 834507

SEQ ID NO: 834509 - protein, 1464 aa, Homo sapiens
MTRILTAFKVVRTLKTGFGFTNVTAHQKWKFSRPGIRLLSVKAQTAHIVLEDGTKMKGYSFGHPSSVAGEVVFNTGLGGYPEAITDPAYKGQILTMANPIIGNGGAPDTTALDELGLSKYLESNGIKVSGLLVLDYSKDYNHWLATKSLGQWLQEEKVPAIYGVDTRMLTKIIRDKGTMLGKIEFEGQPVDFVDPNKQNLIAEVSTKDVKVYGKGNPTKVVAVDCGIKNNVIRLLVKRGAEVHLVPWNHDFTKMEYDGILIAGGPGNPALAEPLIQNVRKILESDRKEPLFGISTGNLITGLAAGAKTYKMSMANRGQNQPVLNITNKQAFITAQNHGYALDNTLPAGWKPLFVNVNDQTNEGIMHESKPFFAVQFHPEVTPGPIDTEYLFDSFFSLIKKGKATTITSVLPKPALVASRVEVSKVLILGSGGLSIGQAGEFDYSGSQAVKAMKEENVKTVLMNPNIASVQTNEVGLKQADTVYFLPITPQFVTEVIKAEQPDGLILGMGGQTALNCGVELFKRGVLKEYGVKVLGTSVESIMATEDRQLFSDKLNEINEKIAPSFAVESIEDALKAADTIGYPVMIRSAYALGGLGSGICPNRETLMDLSTKAFAMTNQILVEKSVTGWKEIEYEVVRDADDNCVTVCNMENVDAMGVHTGDSVVVAPAQTLSNAEFQMLRRTSINVVRHLGIVGECNIQFALHPTSMEYCIIEVNARLSRSSALASKATGYPLAFIAAKIALGIPLPEIKNVVSGKTSACFEPSLDYMVTKIPRWDLDRFHGTSSRIGSSMKSVGEVMAIGRTFEESFQKALRMCHPSIEGFTPRLPMNKEWPSNLDLRKELSEPSSTRIYAIAKAIDDNMSLDEIEKLTYIDKWFLYKMRDILNMEKTLKGLNSESMTEETLKRAKEIGFSDKQISKCLGLTEAQTRELRLKTVTNYLYVTYNGQEHDVNFDDHGMMVLGCGPYHIGSSVEFDWCAVSSIRTLRQLGKKTVVVNCNPETVSTDFDECDKLYFEELSLERILDIYHQEACGGCIISVGGQIPNNLAVPLYKNGVKIMGTSPLQIDRAEDRSIFSAVLDELKVAQAPWKAVNTLNEALEFAKSVDYPCLLRPSYVLSGSAMNVVFSEDEMKKFLEEATRVSQEHPVVLTKFVEGAREVEMDAVGKDGRVISHAISEHVEDAGVHSGDATLMLPTQTISQGAIAFNVQFLVKGNDVLVIECNLRASRSFPFVSKTLGVDFIDVATKVMIGENVDEKHLPTLDHPIIPADYVAIKAPMFSWPRLRDADPILRCEMASTGEVACFGEGIHTAFLKAMLSTGFKIPQKGILIGIQQSFRPRFLGVAEQLHNEGFKLFATEATSDWLNANNVPATPVAWPSQEGQNPSLSSIRKLIRDGSIDLVINLPNNNTKFVHDNYVIRRTAVDSGIPLLTNFQVTKLFAEAVQKSRKVDSKSLFHYRQYSAGKAA

SEQ ID NO: 834510 - protein, 1247 aa, Homo sapiens; identical to SEQ ID NO: 834507

SEQ ID NO: 834511 - protein, 1227 aa, Homo sapiens
MTRILTAFKVVRTLKTGFGFTNVTAHQKWKFSRPGIRLLSVKAQTAHIVLEDGTKMKGYSFGHPSSVAGEVVFNTGLGGYPEAITDPAYKGQILTMANPIIGNGGAPDTTALDELGLSKYLESNGIKVSGLLVLDYSKDYNHWLATKSLGQWLQEEKVPAIYGVDTRMLTKIIRDKGTMLGKIEFEGQPVDFVDPNKQNLIAEVSTKDVKVYGKGNPTKVVAVDCGIKNNVIRLLVKRGAEVHLVPWNHDFTKMEYDGILIAGGPGNPALAEPLIQNVRKILESDRKEPLFGISTGNLITGLAAGAKTYKMSMANRGQNQPVLNITNKQAFITAQNHGYALDNTLPAGWKPLFVNVNDQTNEGIMHESKPFFAVQFHPEVTPGPIDTEYLFDSFFSLIKKGKATTITSVLPKPALVASRVEVSKVLILGSGGLSIGQAGEFDYSGSQAVKAMKEENVKTVLMNPNIASVQTNEVGLKQADTVYFLPITPQFVTEVIKAEQPDGLILGMGGQTALNCGVELFKRGVLKEYGVKVLGTSVESIMATEDRQLFSDKLNEINEKIAPSFAVESIEDALKAADTIGYPVMIRSAYALGGLGSGICPNRETLMDLSTKAFAMTNQILVEKSVTGWKEIEYEVVRDADDNCVTVCNMENVDAMGVHTGDSVVVAPAQTLSNAEFQMLRRTSINVVRHLGIVGECNIQFALHPTSMEYCIIEVNARLSRSSALASKATGYPLAFIAAKIALGIPLPEIKNVVSGKTSACFEPSLDYMVTKIPRWDLDRFHGTSSRIGSSMKSVGEVMAIGRTFEESFQKALRMCHPSIEGFTPRLPMNKEWPSNLDLRKELSEPSSTRIYAIAKAIDDNMSLDEIEKLTYIDKWFLYKMRDILNMEKTLKGLNSESMTEETLKRAKEIGFSDKQISKCLGLTEAQTRELRLKKNIHPWVKQIDTLAAEYPSVTNYLYVTYNGQEHDVNFDDHGMMVLGCGPYHIGSSVEFDWCAVSSIRTLRQLGKKTVVVNCNPETVSTDFDECDKLYFEELSLERILDIYHQEACGGCIISVGGQIPNNLAVPLYKNGVKIMGTSPLQIDRAEDRSIFSAVLDELKVAQAPWKAVNTLNEALEFAKSVDYPCLLRPSYVLSGSAMNVVFSEDEMKKFLEEATRVSQVVSNFFVISHAISEHVEDAGVHSGDATLMLPTQTISQGAIGEGCYPEDCKGFCHLWSIQRPISCQRK

SEQ ID NO: 834512 - protein, 1247 aa, Homo sapiens; identical to SEQ ID NO: 834507

SEQ ID NO: 834513 - protein, 355 aa, Homo sapiens
FFSPSFSSGSAMNVVFSEDEMKKFLEEATRVSQEHPVVLTKFVEGAREVEMDAVGKDGRVISHAISEHVEDAGVHSGDATLMLPTQTISQGAIAFNVQFLVKGNDVLVIECNLRASRSFPFVSKTLGVDFIDVATKVMIGENVDEKHLPTLDHPIIPADYVAIKAPMFSWPRLRDADPILRCEMASTGEVACFGEGIHTAFLKAMLSTGFKIPQKGILIGIQQSFRPRFLGVAEQLHNEGFKLFATEATSDWLNANNVPATPVAWPSQEGQNPSLSSIRKLIRDGSIDLVINLPNNNTKFVHDNYVIRRTAVDSGIPLLTNFQVTKLFAEAVQKSRKVDSKSLFHYRQYSAGKAA

SEQ ID NO: 834514 - protein, 1464 aa, Homo sapiens
MTRILTAFKVVRTLKTGFGFTNVTAHQKWKFSRPGIRLLSVKAQTAHIVLEDGTKMKGYSFGHPSSVAGEVVFNTGLGGYPEAITDPAYKGQILTMANPIIGNGGAPDTTALDELGLSKYLESNGIKVSGLLVLDYSKDYNHWLATKSLGQWLQEEKVPAIYGVDTRMLTKIIRDKGTMLGKIEFEGQPVDFVDPNKQNLIAEVSTKDVKVYGKGNPTKVVAVDCGIKNNVIRLLVKRGAEVHLVPWNHDFTKMEYDGILIAGGPGNPALAEPLIQNVRKILESDRKEPLFGISTGNLITGLAAGAKTYKMSMANRGQNQPVLNITNKQAFITAQNHGYALDNTLPAGWKPLFVNVNDQTNEGIMHESKPFFAVQFHPEVTPGPIDTEYLFDSFFSLIKKGKATTITSVLPKPALVASRVEVSKVLILGSGGLSIGQAGEFDYSGSQAVKAMKEENVKTVLMNPNIASVQTNEVGLKQADTVYFLPITPQFVTEVIKAEQPDGLILGMGGQTALNCGVELFKRGVLKEYGVKVLGTSVESIMATEDRQLFSDKLNEINEKIAPSFAVESIEDALKAADTIGYPVMIRSAYALGGLGSGICPNRETLMDLSTKAFAMTNQILVEKSVTGWKEIEYEVVRDADDNCVTVCNMENVDAMGVHTGDSVVVAPAQTLSNAEFQMLRRTSINVVRHLGIVGECNIQFALHPTSMEYCIIEVNARLSRSSALASKATGYPLAFIAAKIALGIPLPEIKNVVSGKTSACFEPSLDYMVTKIPRWDLDRFHGTSSRIGSSMKSVGEVMAIGRTFEESFQKALRMCHPSIEGFTPRLPMNKEWPSNLDLRKELSEPSSTRIYAIAKAIDDNMSLDEIEKLTYIDKWFLYKMRDILNMEKTLKGLNSESMTEETLKRAKEIGFSDKQISKCLGLTEAQTRELRLKKNIHPWVKQIDTLAAEYPSVTNYLYVTYNGQEHDVNFDDHGMMVLGCGPYHIGSSVEFDWCAVSSIRTLRQLGKKTVVVNCNPETVSTDFDECDKLYFEELSLERILDIYHQEACGGCIISVGGQIPNNLAVPLYKNGVKIMGTSPLQIDRAEDRSIFSAVLDELKVAQAPWKAVNTLNEALEFAKSVDYPCLLRPSYVLSGSAMNVVFSEDEMKKFLEEATRVSQEHPVVLTKFVEGAREVEMDAVGKDGRVISHAISEHVEDAGVHSGDATLMLPTQTISQGAIAFNVQFLVKGNDVLVIECNLRASRSFPFVSKTLGVDFIDVATKVMIGENVDEKHLPTLDHPIIPADYVAIKAPMFSWPRLRDADPILRCEMASTGEVACFGEGIHTAFLKAMLSTGFKIPQKGILIGIQQSFRPRFLGVAEQLHNEGFKLFATEATSDWLNANNVPATPVAWPSQEGQNPSLSSIRNKFVHDNYVIRRTAVDSGIPLLTNFQVTKLFAEAVQKSRKVDSKSLFHYRQYSAGKAA

SEQ ID NO: 834515 - protein, 1483 aa, Homo sapiens
MTRILTAFKVVRTLKTGFGFTNVTAHQKWKFSRPGIRLLSVKAQTAHIVLEDGTKMKGYSFGHPSSVAGEVVFNTGLGGYPEAITDPAYKGQILTMANPIIGNGGAPDTTALDELGLSKYLESNGIKVSGLLVLDYSKDYNHWLATKSLGQWLQEEKVPAIYGVDTRMLTKIIRDKGTMLGKIEFEGQPVDFVDPNKQNLIAEVSTKDVKVYGKGNPTKVVAVDCGIKNNVIRLLVKRGAEVHLVPWNHDFTKMEYDGILIAGGPGNPALAEPLIQNVRKILESDRKEPLFGISTGNLITGLAAGAKTYKMSMANRGQNQPVLNITNKQAFITAQNHGYALDNTLPAGWKPLFVNVNDQTNEGIMHESKPFFAVQFHPEVTPGPIDTEYLFDSFFSLIKKGKATTITSVLPKPALVASRVEVSKVLILGSGGLSIGQAGEFDYSGSQAVKAMKEENVKTVLMNPNIASVQTNEVGLKQADTVYFLPITPQFVTEVIKAEQPDGLILGMGGQTALNCGVELFKRGVLKEYGVKVLGTSVESIMATEDRQLFSDKLNEINEKIAPSFAVESIEDALKAADTIGYPVMIRSAYALGGLGSGICPNRETLMDLSTKAFAMTNQILVEKSVTGWKEIEYEVVRDADDNCVTVCNMENVDAMGVHTGDSVVVAPAQTLSNAEFQMLRRTSINVVRHLGIVGECNIQFALHPTSMEYCIIEVNARLSRSSALASKATGYPLAFIAAKIALGIPLPEIKNVVSGKTSACFEPSLDYMVTKIPRWDLDRFHGTSSRIGSSMKSVGEVMAIGRTFEESFQKALRMCHPSIEGFTPRLPMNKEWPSNLDLRKELSEPSSTRIYAIAKAIDDNMSLDEIEKLTYIDKWFLYKMRDILNMEKTLKGLNSESMTEETLKRAKEIGFSDKQISKCLGLTEAQTRELRLKKNIHPWVKQIDTLAAEYPSVTNYLYVTYNGQEHDVNFDDHGMMVLGCGPYHIGSSVEFDWCAVSSIRTLRQLGKKTVVVNCNPETVSTDFDECDKLYFEELSLERILDIYHQEACGGCIISVGGQIPNNLAVPLYKNGVKIMGTSPLQIDRAEDRSIFSAVLDELKVAQAPWKAVNTLNEALEFAKSVDYPCLLRPSYVLSGSAMNVVFSEDEMKKFLEEATRVSQEHPVVLTKFVEGAREVEMDAVGKDGRVISHAISEHVEDAGVHSGDATLMLPTQTISQGAIAFNVQFLVKGNDVLVIECNLRASRSFPFVSKTLGVDFIDVATKVMIGENVDEKHLPTLDHPIIPADYVAIKAPMFSWPRLRDADPILRCEMASTGEVACFGEGIHTAFLKAMLSTGFKIPQKGILIGIQQSFRPRFLGVAEQLHNEGFKLFATEATSDWLNANNVPATPVAWPSQEGQNPSLSSIRKLIRDGSIDLVINLPNNNTKFVHDNYVIRRTAVDSGIPLLTNFQVTKLFAEAVQKSRKVDSKSLFHYRQYSAEPHVI

SEQ ID NO: 834516 - protein, 1233 aa, Homo sapiens
MTRILTAFKVVRTLKTGFGFTNVTAHQKWKFSRPGIRLLSVKAQTAHIVLEDGTKMKGYSFGHPSSVAGEVVFNTGLGGYPEAITDPAYKGQILTMANPIIGNGGAPDTTALDELGLSKYLESNGIKVSGLLVLDYSKDYNHWLATKSLGQWLQEEKVPAIYGVDTRMLTKIIRDKGTMLGKIEFEGQPVDFVDPNKQNLIAEVSTKDVKVYGKGNPTKVVAVDCGIKNNVIRLLVKRGAEVHLVPWNHDFTKMEYDGILIAGGPGNPALAEPLIQNVRKILESDRKEPLFGISTGNLITGLAAGAKTYKMSMANRGQNQPVLNITNKQAFITAQNHGYALDNTLPAGWKPLFVNVNDQTNEGIMHESKPFFAVQFHPEVTPGPIDTEYLFDSFFSLIKKGKATTITSVLPKPALVASRVEVSKVLILGSGGLSIGQAGEFDYSGSQAVKAMKEENVKTVLMNPNIASVQTNEVGLKQADTVYFLPITPQFVTEVIKAEQPDGLILGMGGQTALNCGVELFKRGVLKEYGVKVLGTSVESIMATEDRQLFSDKLNEINEKIAPSFAVESIEDALKAADTIGYPVMIRSAYALGGLGSGICPNRETLMDLSTKAFAMTNQILVEKSVTGWKEIEYEVVRDADDNCVTVCNMENVDAMGVHTGDSVVVAPAQTLSNAEFQMLRRTSINVVRHLGIVGECNIQFALHPTSMEYCIIEVNARLSRSSALASKATGYPLAFIAAKIALGIPLPEIKNVVSGKTSACFEPSLDYMVTKIPRWDLDRFHGTSSRIGSSMKSVGEVMAIGRTFEESFQKALRMCHPSIEGFTPRLPMNKEWPSNLDLRKELSEPSSTRIYAIAKAIDDNMSLDEIEKLTYIDKWFLYKMRDILNMEKTLKGLNSESMTEETLKRAKEIGFSDKQISKCLGLTEAQTRELRLKKNIHPWVKQIDTLAAEYPSVTNYLYVTYNGQEHDVNFDDHGMMVLGCGPYHIGSSVEFDWCAVSSIRTLRQLGKKTVVVNCNPETVSTDFDECDKLYFEELSLERILDIYHQEACGGCIISVGGQIPNNLAVPLYKNGVKIMGTSPLQIDRAEDRSIFSAVLDELKVAQAPWKAVNTLNEALEFAKSVDYPCLLRPSYVLSGSAMNVVFSEDEMKKFLEEATRVSQEHPVVLTKFVEGAREVEMDAVGKDGRVISHAISEHVEDAGVHSGDATLMLPTQTISQGAIVTSILARNDAWDE

SEQ ID NO: 834517 - protein, 1482 aa, Homo sapiens
MTRILTAFKVVRTLKTGFGFTNVTAHQKWKFSRPGIRLLSVKAQTAHIVLEDGTKMKGYSFGHPSSVAGEVVFNTGLGGYPEAITDPAYKGQILTMANPIIGNGGAPDTTALDELGLSKYLESNGIKVSGLLVLDYSKDYNHWLATKSLGQWLQEEKVPAIYGVDTRMLTKIIRDKGTMLGKIEFEGQPVDFVDPNKQNLIAEVSTKDVKVYGKGNPTKVVAVDCGIKNNVIRLLVKRGAEVHLVPWNHDFTKMEYDGILIAGGPGNPALAEPLIQNVRKILESDRKEPLFGISTGNLITGLAAGAKTYKMSMANRGQNQPVLNITNKQAFITAQNHGYALDNTLPAGWKPLFVNVNDQTNEGIMHESKPFFAVQFHPEVTPGPIDTEYLFDSFFSLIKKGKATTITSVLPKPALVASRVEVSKVLILGSGGLSIGQAGEFDYSGSQAVKAMKEENVKTVLMNPNIASVQTNEVGLKQADTVYFLPITPQFVTEVIKAEQPDGLILGMGGQTALNCGVELFKRGVLKEYGVKVLGTSVESIMATEDRQLFSDKLNEINEKIAPSFAVESIEDALKAADTIGYPVMIRSAYALGGLGSGICPNRETLMDLSTKAFAMTNQILVEKSVTGWKEIEYEVVRDADDNCVTVCNMENVDAMGVHTGDSVVVAPAQTLSNAEFQMLRRTSINVVRHLGIVGECNIQFALHPTSMEYCIIEVNARLSRSSALASKATGYPLAFIAAKIALGIPLPEIKNVVSGKTSACFEPSLDYMVTKIPRWDLDRFHGTSSRIGSSMKSVGEVMAIGRTFEESFQKALRMCHPSIEGFTPRLPMNKEWPSNLDLRKELSEPSSTRIYAIAKAIDDNMSLDEIEKLTYIDKWFLYKMRDILNMEKTLKGLNSESMTEETLKRAKEIGFSDKQISKCLGLTEAQTRELRLKKNIHPWVKQIDTLAAEYPSVTNYLYVTYNGQEHDVNFDDHGMMVLGCGPYHIGSSVEFDWCAVSSIRTLRQLGKKTVVVNCNPETVSTDFDECDKLYFEELSLERILDIYHQEACGGCIISVGGQIPNNLAVPLYKNGVKIMGTSPLQIDRAEDRSIFSAVLDELKVAQAPWKAVNTLNEALEFAKSVDYPCLLRPSYVLSGSAMNVVFSEDEMKKFLEEATRVSQEHPVVLTKFVEGAREVEMDAVGKDGRVISHAISEHVEDAGVHSGDATLMLPTQTISQGAIAFNVQFLVKGNDVLVIECNLRASRSFPFVSKTLGVDFIDVATKVMIGENVDEKHLPTLDHPIIPADYVAIKAPMFSWPRLRDADPILRCEMASTGEVACFGEGIHTAFLKAMLSTGFKIPQKGILIGIQQSFRPRFLGVAEQLHNEGFKLFATEATSDWLNANNVPATPVAWPSQEGQNPSLSSIRKLIRDGSIDLVINLPNNNTKFVHDNYVIRRTAVDSGIPLLTNFQVTKLFAEAVQKSRKVDSKSLFHYRQYSAGKAA

SEQ ID NO: 834518 - protein, 1247 aa, Homo sapiens; identical to SEQ ID NO: 834507

SEQ ID NO: 834519 - protein, 300 aa, Homo sapiens
GYEEKLKTSKFKVLCLLESFQKVKDATRKIAKAFAISGPFNVQFLVKGNDVLVIECNLRASRSFPFVSKTLGVDFIDVATKVMIGENVDEKHLPTLDHPIIPADYVAIKAPMFSWPRLRDADPILRCEMASTGEVACFGEGIHTAFLKAMLSTGFKIPQKGILIGIQQSFRPRFLGVAEQLHNEGFKLFATEATSDWLNANNVPATPVAWPSQEGQNPSLSSIRKLIRDGSIDLVINLPNNNTKFVHDNYVIRRTAVDSGIPLLTNFQVTKLFAEAVQKSRKVDSKSLFHYRQYSAGKAA

SEQ ID NO: 834520 - protein, 1366 aa, Homo sapiens
MTRILTAFKVVRTLKTGFGFTNVTAHQKWKFSRPGIRLLSVKAQTAHIVLEDGTKMKGYSFGHPSSVAGEVVFNTGLGGYPEAITDPAYKGQILTMANPIIGNGGAPDTTALDELGLSKYLESNGIKVSGLLVLDYSKDYNHWLATKSLGQWLQEEKVPAIYGVDTRMLTKIIRDKGTMLGKIEFEGQPVDFVDPNKQNLIAEVSTKDVKVYGKGNPTKVVAVDCGIKNNVIRLLVKRGAEVHLVPWNHDFTKMEYDGILIAGGPGNPALAEPLIQNVRKILESDRKEPLFGISTGNLITGLAAGAKTYKMSMANRGQNQPVLNITNKQAFITAQNHGYALDNTLPAGWKPLFVNVNDQTNEGIMHESKPFFAVQFHPEVTPGPIDTEYLFDSFFSLIKKGKATTITSVLPKPALVASRVEVSKVLILGSGGLSIGQAGEFDYSGSQAVKAMKEENVKTVLMNPNIASVQTNEVGLKQADTVYFLPITPQFVTEVIKAEQPDGLILGMGGQTALNCGVELFKRGVLKEYGVKVLGTSVESIMATEDRQLFSDKLNEINEKIAPSFAVESIEDALKAADTIGYPVMIRSAYALGGLGSGICPNRETLMDLSTKAFAMTNQILVEKSVTGWKEIEYEVVRDADDNCVTVCNMENVDAMGVHTGDSVVVAPAQTLSNAEFQMLRRTSINVVRHLGIVGECNIQFALHPTSMEYCIIEVNARLSRSSALASKATGYPLAFIAAKIALGIPLPEIKNVVSGKTSACFEPSLDYMVTKIPRWDLDRFHGTSSRIGSSMKSVGEVMAIGRTFEESFQKALRMCHPSIEGFTPRLPMNKEWPSNLDLRKELSEPSSTRIYAIAKAIDDNMSLDEIEKLTYIDKWFLYKMRDILNMEKTLKGLNSESMTEETLKRAKEIGFSDKQISKCLGLTEAQTRELRLKKNIHPWVKQIDTLAAEYPSVTNYLYVTYNGQEHDVNFDDHGMMVLGCGPYHIGSSVEFDWCAVSSIRTLRQLGKKTVVVNCNPETVSTDFDECDKLYFEELSLERILDIYHQEACGGCIISVGGQIPNNLAVPLYKNGVKIMGTSPLQIDRAEDRSIFSAVLDELKVAQAPWKAVNTLNEALEFAKSVDYPCLLRPSYVLSGSAMNVVFSEDEMKKFLEEATRVSQEHPVVLTKFVEGAREVEMDAVGKDGRVISHAISEHVEDAGVHSGDATLMLPTQTISQGAIAFNVQFLVKGNDVLVIECNLRASRSFPFVSKTLGVDFIDVATKVMIGENVDEKHLPTLDHPIIPADYVAIKAPMFSWPRLRDADPILRCEMASTGEVACFGEGIHTAFLKAMLSTGFKIPQKGILIGIQQSFRPRILGGLNNTHEG

SEQ ID NO: 834521 - protein, 140 aa, Homo sapiens
MKRGTSLHSRRGKPEAPKGSPQINRKSGQEMTAVMQSGRPRSSSTTDAPTGSAMMEIACAAAAAAAACLPGEEGTAERIERLEVSSLAQTSSAVASSTDGSIHTDSVDGTPDPQRTKAAIAHLQQKILKLTEQIKIAQTA

SEQ ID NO: 834522 - protein, 130 aa, Homo sapiens
MLTLGEQLPLVTRFRRHSVHPPRLDLFFIWIFCFYVFLKNNFLGNLLDYNCSSSPMQRKGSYCWDFEEIERLEVSSLAQTSSAVASSTDGSIHTDSVDGTPDPQRTKAAIAHLQQKILKLTEQIKIAQTA

SEQ ID NO: 834523 - protein, 72 aa, Homo sapiens
GLLMASPRKCWNQNWSETLKGTAWRATPQGSQVSAHLTTLQQTLLCNLTSPFRPQPTTILFMPGTNCFSASA

SEQ ID NO: 834524 - protein, 121 aa, Homo sapiens
LKAKNSARRRSPDRDRHRDLEERNRRSSGHRDRERDSRDRESRREKEEARGKEKPEVTDRAGGNKTVEPPISQVGNVDTASELEKGVSEAAVLKPSEELPAEATSSVEPEKDSGSAAEAPR

SEQ ID NO: 834525 - protein, 767 aa, Homo sapiens
MDAVNAFNQELFSLMDMKPPISRAKMILITKAAIKAIKLYKHVVQIVEKFIKKCKPEYKVPGLYVIDSIVRQSRHQFGTDKDVFGPRFSKNITATFQYLYLCPSEDKSKIVRVLNLWQKNGVFKIEIIQPLLDMAAGTSNAAPVAENVTNNEGSPPPPVKVSSEPPTQATPNSVPAVPQLPSSDAFAAVAQLFQTTQGQQLQQILQTFQQPPKPQSPALDNAVMAQVQAITAQLKTTPTQPSEQKAAFPPPEQKTAFDKKLLDRFDYDDEPEAVEESKKEDTTAVTTTAPAAAVPPAPTATVPAAAAPAAASPPPPQAPFGFPGDGMQQPAYTQHQNMDQFQPRMMGIQQDPMHHQVPLPPNGQMPGFGLLPTPPFPPMAQPVIPPTPPVQQPFQASFQAQNEPLTQKPHQQEMEVEQPCIQEVKRHMSDNRKSRSRSASRSPKRRRSRSGSRSRRSRHRRSRSRSRDRRRHSPRSRSQERRDREKERERRQKGLPQVKPETASVCSTTLWVGQLDKRTTQQDVASLLEEFGPIESINMIPPRGCAYIVMVHRQDAYRALQKLSRGNYKVNQKSIKIAWALNKGIKADYKQYWDVELGVTYIPWDKVKPEELESFCEGGMLDSDTLNPDWKGIPKKPENEVAQNGGAETSHTEPVSPIPKPLPVPVPPIPVPAPITVPPPQVPPHQPGPPVVGALQPPAFTPPLGIPPPGFGPGVPPPPPPPPFLRPGFNPMHLPPGFLPPGPPPPITPPVSIPPPHTPPISIPNWG

SEQ ID NO: 834526 - protein, 344 aa, Homo sapiens
MYGSAVPPAAPTNLPTPPVTQPVSLLGTQGVAPGPVIGLQAPSTGLLGARPGLIPLQRPPGMPPPHLQRFPLMPPRPMPPHMMHRGPPPGPGGFAMPPPHGMKGPFPPHGPFVRPGGMPGLGGPGPGPGGPEDRDGRQQPPQQPQQQPQPQAPQQPQQQQQQQPPPSQQPPPTQQQPQQFRNDNRQQFNSGRDQERFGRRSFGNRVENDRERYGNRNDDRDNSNRDRREWGRRSPDRDRHRDLEERNRRSSGHRDRERDSRDRESRREKEEARGKEKPEVTDRAGGNKTVEPPISQVGNVDTASELEKGVSEAAVLKPSEELPAEATSSVEPEKDSGSAAEAPR

SEQ ID NO: 834527 - protein, 853 aa, Homo sapiens
MDAVNAFNQELFSLMDMKPPISRAKMILITKAAIKAIKLYKHVVQIVEKFIKKCKPEYKVPGLYVIDSIVRQSRHQFGTDKDVFGPRFSKNITATFQYLYLCPSEDKSKIVRVLNLWQKNGVFKIEIIQPLLDMAAGTSNAAPVAENVTNNEGSPPPPVKVSSEPPTQATPNSVPAVPQLPSSDAFAAVAQLFQTTQGQQLQQILQTFQQPPKPQSPALDNAVMAQVQAITAQLKTTPTQPSEQKAAFPPPEQKTAFDKKLLDRFDYDDEPEAVEESKKEDTTAVTTTAPAAAVPPAPTATVPAAAAPAAASPPPPQAPFGFPGDGMQQPAYTQHQNMDQFQPRMMGIQQDPMHHQVPLPPNGQMPGFGLLPTPPFPPMAQPVIPPTPPVQQPFQASFQAQNEPLTQKPHQQEMEVEQPCIQEVKRHMSDNRKSRSRSASRSPKRRRSRSGSRSRRSRHRRSRSRSRDRRRHSPRSRSQERRDREKERERRQKGLPQVKPETASVCSTTLWVGQLDKRTTQQDVASLLEEFGPIESINMIPPRGCAYIVMVHRQDAYRALQKLSRGNYKVNQKSIKIAWALNKGIKADYKQYWDVELGVTYIPWDKVKPEELESFCEGGMLDSDTLNPDWKGIPKKPENEVAQNGGAETSHTEPVSPIPKPLPVPVPPIPVPAPITVPPPQVPPHQPGPPVVGALQPPAFTPPLGIPPPGFGPGVPPPPPPPPFLRPGFNPMHLPPGFLPPGPPPPITPPVSIPPPHTPPISIPNSTIAGINEDTTKDLSIGNPIPTVVSGARGNAESGDSVKMYGSAVPPAAPTNLPTPPVTQPVSLLGKLFFFIISFPCPTPPPPPHPSPS

SEQ ID NO: 834528 - protein, 344 aa, Homo sapiens; identical to SEQ ID NO: 834526

SEQ ID NO: 834529 - protein, 789 aa, Homo sapiens
MDAVNAFNQELFSLMDMKPPISRAKMILITKAAIKAIKLYKHVVQIVEKFIKKCKPEYKVPGLYVIDSIVRQSRHQFGTDKDVFGPRFSKNITATFQYLYLCPSEDKSKIVRVLNLWQKNGVFKIEIIQPLLDMAAGTSNAAPVAENVTNNEGSPPPPVKVSSEPPTQATPNSVPAVPQLPSSDAFAAVAQLFQTTQGQQLQQILQTFQQPPKPQSPALDNAVMAQVQAITAQLKTTPTQPSEQKAAFPPPEQKTAFDKKLLDRFDYDDEPEAVEESKKEDTTAVTTTAPAAAVPPAPTATVPAAAAPAAASPPPPQAPFGFPGDGMQQPAYTQHQNMDQFQPRMMGIQQDPMHHQVPLPPNGQMPGFGLLPTPPFPPMAQPVIPPTPPVQQPFQASFQAQNEPLTQKPHQQEMEVEQPCIQEVKRHMSDNRKSRSRSASRSPKRRRSRSGSRSRRSRHRRSRSRSRDRRRHSPRSRSQERRDREKERERRQKGLPQVKPETASVCSTTLWVGQLDKRTTQQDVASLLEEFGPIESINMIPPRGCAYIVMVHRQDAYRALQKLSRGNYKVNQKSIKIAWALNKGIKADYKQYWDVELGVTYIPWDKVKPEELESFCEGGMLDSDTLNPDWKGIPKKPENEVAQNGGAETSHTEPVSPIPKPLPVPVPPIPVPAPITVPPPQVPPHQPGPPVVGALQPPAFTPPLGIPPPGFGPGVPPPPPPPPFLRPGFNPMHLPPGFLPPGPPPPITPPVSIPPPHTPPISIPNCKHVFFFVFAYPLGAGCRRISKKK

SEQ ID NO: 834530 - protein, 71 aa, Homo sapiens
MLSPTQQQPQQFRNDNRQQFNSGRDQERFGRRSFGNRVENDRERYGNRNDDRDNSNRDRREWGVLGDNITG

SEQ ID NO: 834531 - protein, 621 aa, Homo sapiens
MPFSFLGSPPPPVKVSSEPPTQATPNSVPAVPQLPSSDAFAAVAQLFQTTQGQQLQQILQTFQQPPKPQSPALDNAVMAQVQAITAQLKTTPTQPSEQKAAFPPPEQKTAFDKKLLDRFDYDDEPEAVEESKKEDTTAVTTTAPAAAVPPAPTATVPAAAAPAAASPPPPQAPFGFPGDGMQQPAYTQHQNMDQFQPRMMGIQQDPMHHQVPLPPNGQMPGFGLLPTPPFPPMAQPVIPPTPPVQQPFQASFQAQNEPLTQKPHQQEMEVEQPCIQEVKRHMSDNRKSRSRSASRSPKRRRSRSGSRSRRSRHRRSRSRSRDRRRHSPRSRSQERRDREKERERRQKGLPQVKPETASVCSTTLWVGQLDKRTTQQDVASLLEEFGPIESINMIPPRGCAYIVMVHRQDAYRALQKLSRGNYKVNQKSIKIAWALNKGIKADYKQYWDVELGVTYIPWDKVKPEELESFCEGGMLDSDTLNPDWKGIPKKPENEVAQNGGAETSHTEPVSPIPKPLPVPVPPIPVPAPITVPPPQVPPHQPGPPVVGALQPPAFTPPLGIPPPGFGPGVPPPPPPPPFLRPGFNPMHLPPGFLPPGPPPPITPPVSIPPPHTPPISIPNWG

SEQ ID NO: 834532 - protein, 1147 aa, Homo sapiens
MDAVNAFNQELFSLMDMKPPISRAKMILITKAAIKAIKLYKHVVQIVEKFIKKCKPEYKVPGLYVIDSIVRQSRHQFGTDKDVFGPRFSKNITATFQYLYLCPSEDKSKIVRVLNLWQKNGVFKIEIIQPLLDMAAGTSNAAPVAENVTNNEGSPPPPVKVSSEPPTQATPNSVPAVPQLPSSDAFAAVAQLFQTTQGQQLQQILQTFQQPPKPQSPALDNAVMAQVQAITAQLKTTPTQPSEQKAAFPPPEQKTAFDKKLLDRFDYDDEPEAVEESKKEDTTAVTTTAPAAAVPPAPTATVPAAAAPAAASPPPPQAPFGFPGDGMQQPAYTQHQNMDQFQPRMMGIQQDPMHHQVPLPPNGQMPGFGLLPTPPFPPMAQPVIPPTPPVQQPFQASFQAQNEPLTQKPHQQEMEVEQPCIQEVKRHMSDNRKSRSRSASRSPKRRRSRSGSRSRRSRHRRSRSRSRDRRRHSPRSRSQERRDREKERERRQKGLPQVKPETASVCSTTLWVGQLDKRTTQQDVASLLEEFGPIESINMIPPRGCAYIVMVHRQDAYRALQKLSRGNYKVNQKSIKIAWALNKGIKADYKQYWDVELGVTYIPWDKVKPEELESFCEGGMLDSDTLNPDWKGIPKKPENEVAQNGGAETSHTEPVSPIPKPLPVPVPPIPVPAPITVPPPQVPPHQPGPPVVGALQPPAFTPPLGIPPPGFGPGVPPPPPPPPFLRPGFNPMHLPPGFLPPGPPPPITPPVSIPPPHTPPISIPNSTIAGINEDTTKDLSIGNPIPTVVSGARGNAESGDSVKMYGSAVPPAAPTNLPTPPVTQPVSLLGTQGVAPGPVIGLQAPSTGLLGARPGLIPLQRPPGMPPPHLQRFPLMPPRPMPPHMMHRGPPPGPGGFAMPPPHGMKGPFPPHGPFVRPGGMPGLGGPGPGPGGPEDRDGRQQPPQQPQQQPQPQAPQQPQQQQQQQPPPSQQPPPTQQQPQQFRNDNRQQFNSGRDQERFGRRSFGNRVENDRERYGNRNDDRDNSNRDRREWGRRSPDRDRHRDLEERNRRSSGHRDRERDSRDRESRREKEEARGKEKPEVTDRAGGNKTVEPPISQVGNVDTASELEKGVSEAAVLKPSEELPAEATSSVEPEKDSGSAAEAPR

SEQ ID NO: 834533 - protein, 1057 aa, Homo sapiens
MDAVNAFNQELFSLMDMKPPISRAKMILITKAAIKAIKLYKHVVQIVEKFIKKCKPEYKVPGLYVIDSIVRQSRHQFGTDKDVFGPRFSKNITATFQYLYLCPSEDKSKIVRVLNLWQKNGVFKIEIIQPLLDMAAGTSNAAPVAENVTNNEGSPPPPVKVSSEPPTQATPNSVPAVPQLPSSDAFAAVAQLFQTTQGQQLQQILQTFQQPPKPQSPALDNAVMAQVQAITAQLKTTPTQPSEQKAAFPPPEQKTAFDKKLLDRFDYDDEPEAVEESKKEDTTAVTTTAPAAAVPPAPTATVPAAAAPAAASPPPPQAPFGFPGDGMQQPAYTQHQNMDQFQPRMMGIQQDPMHHQVPLPPNGQMPGFGLLPTPPFPPMAQPVIPPTPPVQQPFQASFQAQNEPLTQKPHQQEMEVEQPCIQEVKRHMSDNRKSRSRSASRSPKRRRSRSGSRSRRSRHRRSRSRSRDRRRHSPRSRSQERRDREKERERRQKGLPQVKPETASVCSTTLWVGQLDKRTTQQDVASLLEEFGPIESINMIPPRGCAYIVMVHRQDAYRALQKLSRGNYKVNQKSIKIAWALNKGIKADYKQYWDVELGVTYIPWDKVKPEELESFCEGGMLDSDTLNPDWKGIPKKPENEVAQNGGAETSHTEPVSPIPKPLPVPVPPIPVPAPITVPPPQVPPHQPGPPVVGALQPPAFTPPLGIPPPGFGPGVPPPPPPPPFLRPGFNPMHLPPGFLPPGPPPPITPPVSIPPPHTPPISIPNSTIAGINEDTTKDLSIGNPIPTVVSGARGNAESGDSVKMYGSAVPPAAPTNLPTPPVTQPVSLLGTQGVAPGPVIGLQAPSTGLLGARPGLIPLQRPPGMPPPHLQRFPLMPPRPMPPHMMHRGPPPGPGGFAMPPPHGMKGPFPPHGPFVRPGGMPGLGGPGPGPGGPEDRDGRQQPPQQPQQQPQPQAPQQPQQQQQQQPPPSQQPPPTQQQPQQFRNDNRQQFNSGRDQERFGRRSFGNRVENDRERYGNRNDDREIDALVGIETEREILEIESLVERRKKPEERKSLR

SEQ ID NO: 834534 - protein, 121 aa, Homo sapiens; identical to SEQ ID NO: 834524

SEQ ID NO: 834535 - protein, 313 aa, Homo sapiens [sequence omitted]

SEQ ID NO: 834536 - protein, 375 aa, Homo sapiens
ASGGSGLNKGNFIVPVGQSRMSVNYAAGLSPYADKGKCGLPEIFDPPEELERKVWELARLVWQSSNVVFHTGAGISTASGIPDFRGPHGVWTMEERGLAPKFDTTFESARPTQTHMALVQLERVGLLRFLVSQNVDGLHVRSGFPRDKLAELHGNMFVEECAKCKTQYVRDTVVGTMGLKATGRLCTVAKARGLRACRGELRDTILDWEDSLPDRDLALADEASRNADLSITLGTSLQIRPSGNLPLATKRRGGRLVIVNLQPTKHDRHADLRIHGYVDEVMTRLMKHLGLEIPAWDGPRVLERALPPLPRPPTPKLEPKEESPTRINGSIPAGPKQEPCAQHNGSEPASPKRERPTSPAPHRPPKRVKAKAVPS

SEQ ID NO: 834537 - protein, 108 aa, Homo sapiens
MLAGAGHQAQPTLPGSRNADLSITLGTSLQIRPSGNLPLATKRRGGRLVIVNLQPTKHVGVCAYPCPGPPCTLCPPRLTRPAPRQDRHADLRTHVSIVGLIAAAVLVE

SEQ ID NO: 834538 - protein, 369 aa, Homo sapiens
RAGGRQHAQLCGHPVGADRGERGCSSRKRGRQAQREIFDPPEELERKVWELARLVWQSSNVVFHTGAGISTASGIPDFRGPHGVWTMEERGLAPKFDTTFESARPTQTHMALVQLERVGLLRFLVSQNVDGLHVRSGFPRDKLAELHGNMFVEECAKCKTQYVRDTVVGTMGLKATGRLCTVAKARGLRACRGELRDTILDWEDSLPDRDLALADEASRNADLSITLGTSLQIRPSGNLPLATKRRGGRLVIVNLQPTKHDRHADLRIHGYVDEVMTRLMKHLGLEIPAWDGPRVLERALPPLPRPPTPKLEPKEESPTRINGSIPAGPKQEPCAQHNGSEPASPKRERPTSPAPHRPPKRVKAKAVPS

SEQ ID NO: 834539 - protein, 283 aa, Homo sapiens
MEERGLAPKFDTTFESARPTQTHMALVQLERVGLLRFLVSQNVDGLHVRSGFPRDKLAELHGNMFVEECAKCKTQYVRDTVVGTMGLKATGRLCTVAKARGLRACRGELRDTILDWEDSLPDRDLALADEASRNADLSITLGTSLQIRPSGNLPLATKRRGGRLVIVNLQPTKHDRHADLRIHGYVDEVMTRLMKHLGLEIPAWDGPRVLERALPPLPRPPTPKLEPKEESPTRINGSIPAGPKQEPCAQHNGSEPASPKRERPTSPAPHRPPKRVKAKAVPS

SEQ ID NO: 834540 - protein, 283 aa, Homo sapiens; identical to SEQ ID NO: 834539

SEQ ID NO: 834541 - protein, 283 aa, Homo sapiens; identical to SEQ ID NO: 834539

SEQ ID NO: 834542 - protein, 314 aa, Homo sapiens
ASGGSGLNKGNFIVPVGQSRMSVNYAAGLSPYADKGKCGLPEIFDPPEELERKVWELARLVWQSSNVVFHTGAGISTASGIPDFRDKLAELHGNMFVEECAKCKTQYVRDTVVGTMGLKATGRLCTVAKARGLRACRGELRDTILDWEDSLPDRDLALADEASRNADLSITLGTSLQIRPSGNLPLATKRRGGRLVIVNLQPTKHDRHADLRIHGYVDEVMTRLMKHLGLEIPAWDGPRVLERALPPLPRPPTPKLEPKEESPTRINGSIPAGPKQEPCAQHNGSEPASPKRERPTSPAPHRPPKRVKAKAVPS

SEQ ID NO: 834543 - protein, 485 aa, Homo sapiens
MEERGLAPKFDTTFESARPTQTHMALVQLERVGLLRFLVSQNVDGLHVRSGFPRDKLAELHGNMFVEECAKCKTQYVRDTVVGTMGLKATGRLCTVAKARGLRACRGATPTHALGSRGGCEAPEDSPQLPHCRGELRDTILDWEDSLPDRDLALADEASRSDPPPQGAHGGAGRDDSRNTASSSMGQWLRLTGSEGRLPGAGGPGQGLHTRTHTHSSPHGSGWVLHKETKASARCLLYPVLPSREVTEPGSHPRCPSSYHTVILPGMSKGPPRSMTPPTDRRGGQGGIPKADSGVGLALTAPVSTDGLGVNRPPGLARDVGRSRAQAQPTLPGPRNADLSITLGTSLQIRPSGNLPLATKRRGGRLVIVNLQPTKHDRHADLRIHGYVDEVMTRLMKHLGLEIPAWDGPRVLERALPPLPRPPTPKLEPKEESPTRINGSIPAGPKQEPCAQHNGSEPASPKRERPTSPAPHRPPKRVKAKAVPS

SEQ ID NO: 834544 - protein, 262 aa, Homo sapiens
RAGGRQHAQLCGHPVGADRGERGCSSRKRGRQAQREIFDPPEELERKVWELARLVWQSSNVVFHTGAGISTASGIPDFRGPHGVWTMEERGLAPKFDTTFESARPTQTHMALVQLERVGLLRFLVSQNVDGLHVRSGFPRDKLAELHGNMFVEECAKCKTQYVRDTVVGTMGLKATGRLCTVAKARGLRACRGELRDTILDWEDSLPDRDLALADEASRSGPAGTCRWLPSAGEAAWSSSTCSPPSTTAMLTSASMATLTRS

SEQ ID NO: 834545 - protein, 207 aa, Homo sapiens
ASGGSGLNKGNFIVPVGQSRMSVNYAAGLSPYADKGKCGLPEIFDPPEELERKVWELARLVWQSSNVVFHTGAGISTASGIPDFRDKLAELHGNMFVEECAKCKTQYVRDTVVGTMGLKATGRLCTVAKARGLRACRGELRDTILDWEDSLPDRDLALADEASRSGPAGTCRWLPSAGEAAWSSSTCSPPSTTAMLTSASMATLTRS

SEQ ID NO: 834546 - protein, 332 aa, Homo sapiens
ASGGSGLNKGNFIVPVGQSRMSVNYAAGLSPYADKGKCGLPEIFDPPEELERKVWELARLVWQSSNVVFHTGAGISTASGIPDFRGPHGVWTMEERGLAPKFDTTFESARPTQTHMALVQLERVGLLRFLVSQNVDGLHVRSGFPRDKLAELHGNMFVEECAKCKTQYVRDTVVGTMGLKATGRLCTVAKARGLRACRGELRDTILDWEDSLPDRDLALADEASRNADLSITLGTSLQIRPSGNLPLATKRRGGRLVIVNLQPTKHDRHADLRIHGYVDEVMTRLMKHLGLEIPAWDGPRVLERALPPLPRPPTPKGLWCGSGKKPHPRGDS

SEQ ID NO: 834547 - protein, 256 aa, Homo sapiens
MEERGLAPKFDTTFESARPTQTHMALVQLERVGLLRFLVSQNVDGLHVRSGFPRDKLAELHGNMFVEECAKCKTQYVRDTVVGTMGLKATGRLCTVAKARGLRACRNADLSITLGTSLQIRPSGNLPLATKRRGGRLVIVNLQPTKHDRHADLRIHGYVDEVMTRLMKHLGLEIPAWDGPRVLERALPPLPRPPTPKLEPKEESPTRINGSIPAGPKQEPCAQHNGSEPASPKRERPTSPAPHRPPKRVKAKAVPS

SEQ ID NO: 834548 - protein, 550 aa, Homo sapiens
ASGGSGLNKGNFIVPVGQSRMSVNYAAGLSPYADKGKCGLPEIFDPPEELERKVWELARLVWQSSNVVFHTGAGISTASGIPDFRGPHGVWTMEERGLAPKFDTTFESARPTQTHMALVQLERVGLLRFLVSQNVDGLHVRSGFPRDKLAELHGNMFVEECAKCKTQYVRDTVVGTMGLKATGRLCTVAKARGLRACRGELRDTILDWEDSLPDRDLALADEASRSDPPPQGAHGGAGRDDSRNTASSSMGQWLRLTGSEGRLPGAGGPGQGLHTRTHTHSSPHGSGWVLHKETKASARCLLYPVLPSREVTEPGSHPRCPSSYHTVILPGMSKGPPRSMTPPTDRRGGQGGIPKADSGVGLALTAPVSTDGLGVNRPPGLARDVGRSRAQAQPTLPGPRNADLSITLGTSLQIRPSGNLPLATKRRGGRLVIVNLQPTKHDRHADLRIHGYVDEVMTRLMKHLGLEIPAWDGPRVLERALPPLPRPPTPKLEPKEESPTRINGSIPAGPKQEPCAQHNGSEPASPKRERPTSPAPHRPPKRVKAKAVPS

SEQ ID NO: 834549 - protein, 402 aa, Homo sapiens
ASGGSGLNKGNFIVPVGQSRMSVNYAAGLSPYADKGKCGLPEIFDPPEELERKVWELARLVWQSSNVVFHTGAGISTASGIPDFRGPHGVWTMEERGLAPKFDTTFESARPTQTHMALVQLERVGLLRFLVSQNVDGLHVRSGFPRDKLAELHGNMFVEECAKCKTQYVRDTVVGTMGLKATGRLCTVAKARGLRACRGATPTHALGSRGGCEAPEDSPQLPHCRGELRDTILDWEDSLPDRDLALADEASRNADLSITLGTSLQIRPSGNLPLATKRRGGRLVIVNLQPTKHDRHADLRIHGYVDEVMTRLMKHLGLEIPAWDGPRVLERALPPLPRPPTPKLEPKEESPTRINGSIPAGPKQEPCAQHNGSEPASPKRERPTSPAPHRPPKRVKAKAVPS

SEQ ID NO: 834550 - protein, 268 aa, Homo sapiens
ASGGSGLNKGNFIVPVGQSRMSVNYAAGLSPYADKGKCGLPEIFDPPEELERKVWELARLVWQSSNVVFHTGAGISTASGIPDFRGPHGVWTMEERGLAPKFDTTFESARPTQTHMALVQLERVGLLRFLVSQNVDGLHVRSGFPRDKLAELHGNMFVEECAKCKTQYVRDTVVGTMGLKATGRLCTVAKARGLRACRGELRDTILDWEDSLPDRDLALADEASRSGPAGTCRWLPSAGEAAWSSSTCSPPSTTAMLTSASMATLTRS

SEQ ID NO: 834551 - protein, 126 aa, Homo sapiens
ASGGSGLNKGNFIVPVGQSRMSVNYAAGLSPYADKGKCGLPEIFDPPEELERKVWELARLVWQSSNVVFHTGAGISTASGIPDFRGPHGVWTMEERGLAPKFDTTTTNSATTTTYPHDHDEYRTTR

SEQ ID NO: 834552 - protein, 268 aa, Homo sapiens
MASRGRRPEHGGPPELFYDETEARKYVRNSRMIDIQTRMAGRALELLYLPENKPCYLLDIGCGTGLSGSYLSDEGHYWVGLDISPAMLDEAVDREIEGDLLLGDMGQGIPFKPGTFDGCISISAVQWLCNANKKSENPAKRLYCFFASLFSVLVRGSRAVLQLYPENSEQLELITTQATKAGFSGGMVVDYPNSAKAKKFYLCLFSGPSTFIPEGLSENQDEVEPRESVFTNERFPLRMSRRGMVRKSRAWVLGEEGAAQAPGQGSQT

SEQ ID NO: 834553 - protein, 220 aa, Homo sapiens
MASRGRRPEHGGPPELFYDETEARKYVRNSRMIDIQTRMAGRALELLYLPENKPCYLLDIGCGTGLSGSYLSDEGHYWVGLDISPAMLDEAVDREIEGDLLLGDMGQGIPFKPGTFDGCISISAVQWLCNANKKSENPAKRLYCFFASLFSVLVRGSRAVLQLYPENSEQVSPSATGCAGELGDSTGKLSWGSDKESYADWREKEETCTLVWPLMAHLMT

SEQ ID NO: 834554 - protein, 291 aa, Homo sapiens
MASRGRRPEHGGPPELFYDETEARKYVRNSRMIDIQTRMAGRALELLYLPENKPCYLLDIGCGTGLSGSYLSDEGHYWVGLDISPAMLDEAVDREIEGDLLLGDMGQGIPFKPGTFDGCISISAVQWLCNANKKSENPAKRLYCFFASLFSVLVRGSRAVLQLYPENSEQLELITTQATKAGFSGGMVVDYPNSAKAKKFYLCLFSGPSTFIPEGLSENQDEVEPRESVFTNERKGGAFERRGIRGNRLGVPINDCRGGQGERKVGQGGAKGGQAPGGVRLKPVNGRKGSR

SEQ ID NO: 834555 - protein, 218 aa, Homo sapiens
MLSLIKKAGPPELFYDETEARKYVRNSRMIDIQTRMAGRALELLYLPENKPCYLLDIGCGTGLSGSYLSDEGHYWVGLDISPAMLDEAVDREIEGDLLLGDMGQGIPFKPGTFDGCISISAVQWLCNANKKSENPAKRLYCFFASLFSVLVRGSRAVLQLYPENSEQLELITTQATKAGFSGGMVVDYPNSAKAKKFYLCLFSGPSTFIPEAEWNRVK

SEQ ID NO: 834556 - protein, 268 aa, Homo sapiens; identical to SEQ ID NO: 834552

SEQ ID NO: 834557 - protein, 285 aa, Homo sapiens
MASRGRRPEHGGPPELFYDETEARKYVRNSRMIDIQTRMAGRALELLYLPENKPCYLLDIGCGTGLSGSYLSDEGHYWVGLDISPAMLDEAVDREIEGDLLLGDMGQGIPFKPGTFDGCISISAVQWLCNANKKSENPAKRLYCFFASLFSVLVRGSRAVLQLYPENSEQLELITTQATKAGFSGGMVVDYPNSAKAKKFYLCLFSGPSTFIPEGLSENQDEVEPRESVFTNEREGGAFERRGIRGHQTRRFPLRMSRRGMVRKSRAWVLGEEGAAQAPGQGSQT

SEQ ID NO: 834558 - protein, 234 aa, Homo sapiens [sequence omitted]

SEQ ID NO: 834559 - protein, 248 aa, Homo sapiens
MASRGRRPEHGGPPELFYDETEARKYVRNSRMIDIQTRMAGRALELLYLPENKPCYLLDIGCGTGLSGSYLSDEGHYWVGLDISPAMLDEAVDREIEGDLLLGDMGQGIPFKPGTFDGCISISAVQWLCNANKKSENPAKRLYCFFASLFSVLVRGSRAVLQLYPENSEQLELITTQATKAGFSGGMVVDYPNSAKAKKFYLCLFSGPSTFIPEGLSENQDEVEPRESVFTNERKGGAFERRGIRGLG

SEQ ID NO: 834560 - protein, 265 aa, Homo sapiens
MLSLIKKAGPPELFYDETEARKYVRNSRMIDIQTRMAGRALELLYLPENKPCYLLDIGCGTGLSGSYLSDEGHYWVGLDISPAMLDEAVDREIEGDLLLGDMGQGIPFKPGTFDGCISISAVQWLCNANKKSENPAKRLYCFFASLFSVLVRGSRAVLQLYPENSEQLELITTQATKAGFSGGMVVDYPNSAKAKKFYLCLFSGPSTFIPEGLSENQDEVEPRESVFTNERFPLRMSRRGMVRKSRAWVLGEEGAAQAPGQGSQT

SEQ ID NO: 834561 - protein, 220 aa, Homo sapiens; identical to SEQ ID NO: 834553

SEQ ID NO: 834562 - protein, 237 aa, Homo sapiens
MIDIQTRMAGRALELLYLPENKPCYLLDIGCGTGLSGSYLSDEGHYWVGLDISPAMLDEAVDREIEGDLLLGDMGQGIPFKPGTFDGCISISAVQWLCNANKKSENPAKRLYCFFASLFSVLVRGSRAVLQLYPENSEQLELITTQATKAGFSGGMVVDYPNSAKAKKFYLCLFSGPSTFIPEGLSENQDEVEPRESVFTNERFPLRMSRRGMVRKSRAWVLGEEGAAQAPGQGSQT

SEQ ID NO: 834563 - protein, 237 aa, Homo sapiens; identical to SEQ ID NO: 834562

SEQ ID NO: 834564 - protein, 274 aa, Homo sapiens
LRQVPGLGVRGRRRSMADPQSCFSDETEARKYFRNSRMIDIQTRMAGRALELLYLPENKPCYLLDIGCGTGLSGSYLSDEGHYWVGLDISPAMLDEAVDREIEGDLLLGDMGQGIPFKPGTFDGCISISAVQWLCNANKKSENPAKRLYCFFASLFSVLVRGSRAVLQLYPENSEQLELITTQATKAGFSGGMVVDYPNSAKAKKFYLCLFSGPSTFIPEGLSENQDEVEPRESVFTNERFPLRMSRRGMVRKSRAWVLGEEGAAQAPGQGSQT

SEQ ID NO: 834565 - protein, 250 aa, Homo sapiens
MASRGRRPEHGGPPELFYDETEARKYVRNSRMIDIQTRMAGRALELLYLPENKPCYLLDIGCGTGLSGSYLSDEGHYWVGLDISPAMLDEAVDREIEGDLLLGDMGQGIPFKPGTFDGCISISAVQWLCNANKKSVRGSRAVLQLYPENSEQLELITTQATKAGFSGGMVVDYPNSAKAKKFYLCLFSGPSTFIPEGLSENQDEVEPRESVFTNERFPLRMSRRGMVRKSRAWVLGEEGAAQAPGQGSQT

SEQ ID NO: 834566 - protein, 240 aa, Homo sapiens
MASRGRRPEHGGPPELFYDETEARKYVRNSRMIDIQTRMAGRALELLYLPENKPCYLLDIGCGTGLSGSYLSDEGHYWVGLDISPAMLDEAVDREIEGDLLLGDMGQGIPFKPGTFDGCISISAVQWLCNANKKSENPAKRLYCFFASLFSVLVRGSRAVLQLYPENSEQVPIKDVEAGNGEEESGMGAGRRRSGTGARAGKSDLTPSTPAASASPASKSPRGSGKALASALFYIVQLTK

SEQ ID NO: 834567 - protein, 131 aa, Homo sapiens
MKGTIGWAWISALPCWVRGSRAVLQLYPENSEQLELITTQATKAGFSGGMVVDYPNSAKAKKFYLCLFSGPSTFIPEGLSENQDEVEPRESVFTNERFPLRMSRRGMVRKSRAWVLGEEGAAQAPGQGSQT

SEQ ID NO: 834568 - protein, 76 aa, Homo sapiens
FALSPFKFYLCLFSGPSTFIPEGLSENQDEVEPRESVFTNERFPLRMSRRGMVRKSRAWVLGEEGAAQAPGQGSQT

SEQ ID NO: 834569 - protein, 140 aa, Homo sapiens
MASRGRRPEHGGPPELFYDETEARKYVRNSRMIDIQTRMAGRALELLYLPENKPCYLLDIGCGTGLSGSYLSDEGHYWVGLDISPAMLAFLLCSGSVMLTRSLKTLPSACTAFLLLFFLFSSGDPELSCSCTLRTQSSWS

SEQ ID NO: 834570 - protein, 268 aa, Homo sapiens; identical to SEQ ID NO: 834552

SEQ ID NO: 834571 - protein, 284 aa, Homo sapiens
IKAGTRPGRARPASEHGGPPELFYDETEARKYVRNSRMIDIQTRMAGRALELLYLPENKPCYLLDIGCGTGLSGSYLSDEGHYWVGLDISPAMLDEAVDREIEGDLLLGDMGQGIPFKPGTFDGCISISAVQWLCNANKKSENPAKRLYCFFASLFSVLVRGSRAVLQLYPENSEQLELITTQATKAGFSGGMVVDYPNSAKAKKFYLCLFSGPSTFIPEGLSENQDEVEPRESVFTNERFPLRMSRRGMVRKSRAWVLGEEGAAQAPGQGSQTETSKRAEGKP

SEQ ID NO: 834572 - protein, 192 aa, Homo sapiens
MADPQSCSRMIDIQTRMAGRALELLYLPENKPCYLLDIGCGTGLSGSYLSDEGHYWVGLDISPAMLDEAVDREIEGDLLLGDMGQGIPFKPGTFDGCISISAVQWLCNANKKSENPAKRLYCFFASLFSVLVRGSRAVLQLYPENSEQLELITTQATKAGFSGGMVVDYPNSAKAKKSTSACFWAFAFIPEG

SEQ ID NO: 834573 - protein, 251 aa, Homo sapiens
MASRGRRPEHGGPPELFYDETEARKYVRNSRMIDIQTRMAGRALELLYLPENKPCYLLDIGCGTGLSGSYLSDEGHYWVGLDISPAMLDEAVDREIEGDLLLGDMGQGIPFKPGTFDGCISISAVQWLCNANKKSENPAKRLYCFFASLFSVLVRGSRAVLQLYPENSEQLELITTQATKAGFSGGMVVDYPNSAKAKKFYLCLFSGPSTFIPEGLSENQDEVEPRESVFTNEREGGAFERRGIRGHQTRR

SEQ ID NO: 834574 - protein, 251 aa, Homo sapiens; identical to SEQ ID NO: 834573

SEQ ID NO: 834575 - protein, 284 aa, Homo sapiens
MASRGRRPEHGGPPELFYDETEARKYVRNSRMIDIQTRMAGRALELLYLPENKPCYLLDIGCGTGLSGSYLSDEGHYWVGLDISPAMLDEAVDREIEGDLLLGDMGQGIPFKPGTFDGCISISAVQWLCNANKKSENPAKRLYCFFASLFSVLVRGSRAVLQLYPENSEQLELITTQATKAGFSGGMVVDYPNSAKAKKFYLCLFSGPSTFIPEVPIKDVEAGNGEEESGMGAGRRRSGTGARAGKSDLTPSTPAASASPASKSPRGSGKALASALFYIVQLTK

SEQ ID NO: 834576 - protein, 285 aa, Homo sapiens
RPTYRTLLQLTRIVPRPAGVHLHGAHDGGPPELFYDETEARKYVRNSRMIDIQTRMAGRALELLYLPENKPCYLLDIGCGTGLSGSYLSDEGHYWVGLDISPAMLDEAVDREIEGDLLLGDMGQGIPFKPGTFDGCISISAVQWLCNANKKSENPAKRLYCFFASLFSVLVRGSRAVLQLYPENSEQLELITTQATKAGFSGGMVVDYPNSAKAKKFYLCLFSGPSTFIPEGLSENQDEVEPRESVFTNERFPLRMSRRGMVRKSRAWVLGEEGAAQAPGQGSQT

SEQ ID NO: 834577 - protein, 291 aa, Homo sapiens
MADPQSCFMTRQKPGNTFASEGSLNTAGRPGVGKRQVAPVAGVARKGRRIWGSRMIDIQTRMAGRALELLYLPENKPCYLLDIGCGTGLSGSYLSDEGHYWVGLDISPAMLDEAVDREIEGDLLLGDMGQGIPFKPGTFDGCISISAVQWLCNANKKSENPAKRLYCFFASLFSVLVRGSRAVLQLYPENSEQLELITTQATKAGFSGGMVVDYPNSAKAKKFYLCLFSGPSTFIPEGLSENQDEVEPRESVFTNERFPLRMSRRGMVRKSRAWVLGEEGAAQAPGQGSQT

SEQ ID NO: 834578 - protein, 274 aa, Homo sapiens
MADPQSCFMTRQKPGNTFASEGSLNTAGRPGVGKRSRMIDIQTRMAGRALELLYLPENKPCYLLDIGCGTGLSGSYLSDEGHYWVGLDISPAMLDEAVDREIEGDLLLGDMGQGIPFKPGTFDGCISISAVQWLCNANKKSENPAKRLYCFFASLFSVLVRGSRAVLQLYPENSEQLELITTQATKAGFSGGMVVDYPNSAKAKKFYLCLFSGPSTFIPEGLSENQDEVEPRESVFTNERFPLRMSRRGMVRKSRAWVLGEEGAAQAPGQGSQT

SEQ ID NO: 834579 - protein, 321 aa, Homo sapiens
LRQVPGLGVRGRRRSMADPQSCFMTRQKPGNTFASEGSLNTAGRPGVGKRQVAPVAGVARKGRRIWGCGKGRTRVGADFCLCSRMIDIQTRMAGRALELLYLPENKPCYLLDIGCGTGLSGSYLSDEGHYWVGLDISPAMLDEAVDREIEGDLLLGDMGQGIPFKPGTFDGCISISAVQWLCNANKKSENPAKRLYCFFASLFSVLVRGSRAVLQLYPENSEQLELITTQATKAGFSGGMVVDYPNSAKAKKFYLCLFSGPSTFIPEGLSENQDEVEPRESVFTNERFPLRMSRRGMVRKSRAWVLGEEGAAQAPGQGSQT

SEQ ID NO: 834580 - protein, 140 aa, Homo sapiens
MASRGRRPEHGGPPELFYDETEARKYVRNSRMIDIQTRMAGRALELLYLPENKPCYLLDIGCGTGLSGSYLSDEGHYWVGLDISPAMLDEAVDREIEGDLLLGDMGQGIPFKPGTFDGCIRSGDPELSCSCTLRTQSSWS

SEQ ID NO: 834581 - protein, 298 aa, Homo sapiens
  misc_feature (91)..(91): Xaa can be any naturally occurring amino acid
  misc_feature (109)..(109): Xaa can be any naturally occurring amino acid
  misc_feature (113)..(113): Xaa can be any naturally occurring amino acid
  misc_feature (119)..(119): Xaa can be any naturally occurring amino acid
  misc_feature (121)..(121): Xaa can be any naturally occurring amino acid
  misc_feature (125)..(125): Xaa can be any naturally occurring amino acid
MADPQSCFSDETEARKYFRNSRMIDIQTRMAGRALELLYLPENKPCYLLDIGLCVTVAEWNVIWSEGMRHILGWSHAIIDASWRIRLGLGXTGENAEDMSQKAAARCHXLRRXSVVDRXVXVTHXLQSRVTTSYGCVCHRAILVLMLSGHLVIDKHRKVLNDLVPTSAVYVLFSELTLVSLVLVRGSRAVLQLYPENSEQLELITTQATKAGFSGGMVVDYPNSAKAKKFYLCLFSGPSTFIPEGLSENQDEVEPRESVFTNERFPLRMSRRGMVRKSRAWVLGEEGAAQAPGQGSQT

SEQ ID NO: 834582 - protein, 87 aa, Homo sapiens
NPHPNRVTLTVNRAKAKKFYLCLFSGPSTFIPEGLSENQDEVEPRESVFTNERFPLRMSRRGMVRKSRAWVLGEEGAAQAPGQGSQT

SEQ ID NO: 834583 - protein, 72 aa, Homo sapiens
LLCRSQKGVSVPSRGTGPRPCRKGQAWVPGLLEWGRWFENSPGDLSALWFLQGLSENQDEVEPRESVFTNER

SEQ ID NO: 834584 - protein, 336 aa, Homo sapiens
VSHQGRQRQLHSASTQIRWEPSPAMASLGQILFWSIISIIIILAGAIALIIGFGISEVSVWLSAMKGLVVEVPRLPLALIFASCTAGRHSITVTTVASAGNIGEDGILSCTFEPDIKLSDIVIQWLKEGVLGLVHEFKEGKDELSEQDEMFRGRTAVFADQVIVGNASLRLKNVQLTDAGTYKCYIITSKGKGNANLEYKTGAFSMPEVNVDYNASSETLRCEAPRWFPQPTVVWASQVDQGANFSEVSNTSFELNSENVTMKVVSVLYNVTINNTYSCMIENDIAKATGDIKVTESEIKRRSHLQLLNSKASLCVSSFFAISWALLPLSPYLMLK

SEQ ID NO: 834585 - protein, 306 aa, Homo sapiens
VSHQGRQRQLHSASTQIRWEPSPAMASLGQILFWSIISIIIILAGAIALIIGFGISGRHSITVTTVASAGNIGEDGILSCTFEPDIKLSDIVIQWLKEGVLGLVHEFKEGKDELSEQDEMFRGRTAVFADQVIVGNASLRLKNVQLTDAGTYKCYIITSKGKGNANLEYKTGAFSMPEVNVDYNASSETLRCEAPRWFPQPTVVWASQVDQGANFSEVSNTSFELNSENVTMKVVSVLYNVTINNTYSCMIENDIAKATGDIKVTESEIKRRSHLQLLNSKASLCVSSFFAISWALLPLSPYLMLK

SEQ ID NO: 834586 - protein, 336 aa, Homo sapiens; identical to SEQ ID NO: 834584

SEQ ID NO: 834587 - protein, 415 aa, Homo sapiens
MTGERPSTALPDRRWGPRILGFWGGCRVWVFAAIFLLLSLAASWSKAENDFGLVQPLVTMEQLLWVSGRQIGSVDTFRIPLITATPRGTLLAFAEARKMSSSDEGAKFIALRRSMDQGSTWSPTAFIVNDGDVPDGLNLGAVVSDVETGVVFLFYSLCAHKAGCQVASTMLVWSKDDGVSWSTPRNLSLDIGTEVFAPGPGSGIQKQREPRKGRLIVCGHGTLERDGVFCLLSDDHGASWRYGSGVSGIPYGQPKQENDFNPDECQPYELPDGSVVINARNQNNYHCHCRIVLRSYDACDTLRPRDVTFDPELVDPVVAAGAVVTSSGIVFFSNPAHPEFRVNLTLRWSFSNGTSWRKETVQLWPGPSGYSSLATLEGSMDGEEQAPQLYVLYEKGRNHYTESISVAKISVYGTL

SEQ ID NO: 834588 - protein, 311 aa, Homo sapiens
  misc_feature (270)..(270): Xaa can be any naturally occurring amino acid
  misc_feature (272)..(273): Xaa can be any naturally occurring amino acid
  misc_feature (275)..(275): Xaa can be any naturally occurring amino acid
  misc_feature (282)..(283): Xaa can be any naturally occurring amino acid
  misc_feature (288)..(289): Xaa can be any naturally occurring amino acid
  misc_feature (298)..(298): Xaa can be any naturally occurring amino acid
MTGERPSTALPDRRWGPRILGFWGGCRVWVFAAIFLLLSLAASWSKAENDFGLVQPLVTMEQLLWVSGRQIGSVDTFRIPLITATPRGTLLAFAEARKMSSSDEGAKFIALRRSMDQGSTWSPTAFIVNDGDVPDGLNLGAVVSDVETGVVFLFYSLCAHKAGCQVASTMLVWSKDDGVSWSTPRNLSLDIGTEVFAPGPGSGIQKQREPRKGRLIVCGHGTLERDGVFCLLSDDHGASWRYGSGVSGIPYGQPKQENDFNPDECQRQPXEXXKXSVVKIQXXRPLPXXCRLSPRYEXVKTKKQNMPSDLS

SEQ ID NO: 834589 - protein, 474 aa, Homo sapiens
MTGERPSTALPDRRWGPRILGFWGGCRVWVFAAIFLLLSLAASWSKAENDFGLVQPLVTMEQLLWVSGRQIGSVDTFRIPLITATPRGTLLAFAEARKMSSSDEGAKFIALRRSMDQGSTWSPTAFIVNDGDVPDGLNLGAVVSDVETGVVFLFYSLCAHKAGCQVASTMLVWSKDDGVSWSTPRNLSLDIGTEVFAPGPGSGIQKQREPRKGRLIVCGHGTLERDGVFCLLSDDHGASWRYGSGVSGIPYGQPKQENDFNPDECQGQEIHEMFPTHLTLPALQNIISRTDPGSDCSTQCHTPLLPSGTGHFPCSLPGGPVLSPQPYELPDGSVVINARNQNNYHCHCRIVLRSYDACDTLRPRDVTFDPELVDPVVAAGAVVTSSGIVFFSNPAHPEFRVNLTLRWSFSNGTSWRKETVQLWPGPSGYSSLATLEGSMDGEEQAPQLYVLYEKGRNHYTESISVAKISVYGTL

SEQ ID NO: 834590 - protein, 438 aa, Homo sapiens
ALCRRRLSVLFVTWAGVVYILCDWPVVHTSTALPDRRWGPRILGFWGGCRVWVFAAIFLLLSLAASWSKAENDFGLVQPLVTMEQLLWVSGRQIGSVDTFRIPLITATPRGTLLAFAEARKMSSSDEGAKFIALRRSMDQGSTWSPTAFIVNDGDVPDGLNLGAVVSDVETGVVFLFYSLCAHKAGCQVASTMLVWSKDDGVSWSTPRNLSLDIGTEVFAPGPGSGIQKQREPRKGRLIVCGHGTLERDGVFCLLSDDHGASWRYGSGVSGIPYGQPKQENDFNPDECQPYELPDGSVVINARNQNNYHCHCRIVLRSYDACDTLRPRDVTFDPELVDPVVAAGAVVTSSGIVFFSNPAHPEFRVNLTLRWSFSNGTSWRKETVQLWPGPSGYSSLATLEGSMDGEEQAPQLYVLYEKGRNHYTESISVAKISVYGTL

SEQ ID NO: 834591 - protein, 317 aa, Homo sapiens [sequence omitted]

SEQ ID NO: 834592 - protein, 415 aa, Homo sapiens; identical to SEQ ID NO: 834587

SEQ ID NO: 834593 - protein, 428 aa, Homo sapiens
MTGERPSTALPDRRWGPRILGFWGGCRVWVFAAIFLLLSLAASWSKAENDFGLVQPLVTMEQLLWVSGRQIGSVDTFRIPLITATPRGTLLAFAEARKMSSSDEGAKFIALRRSMDQGSTWSPTAFIVNDGDVPDGLNLGAVVSDVETGVVFLFYSLCAHKAGCQVASTMLVWSKDDGVSWSTPRNLSLDIGTEVFAPGPGSGIQKQREPRKGRLIVCGHGTLERDGVFCLLSDDHGASWRYGSGVSGIPYGQPKQENDFNPDECQPYELPDGSVVINARNQNNYHCHCRIVLRSYDACDTLRPRDVTFDPELVDPVVAAGAVVTSSGIVFFSNPAHPEFPWRAAWMERSRPPSSTSCMRKAGTTTQRASPWPKSVSMGHSELCHCHRGILPSGLCLQEHGSVEGLLETPERQFHLPLDSSLGYLVSE

SEQ ID NO: 834594 - protein, 308 aa, Homo sapiens
MTGERPSTALPDRRWGPRILGFWGGCRVWVFAAIFLLLSLAASWSKAENDFGLVQPLVTMEQLLWVSGRQIGSVDTFRIPLITATPRGTLLAFAEARKMSSSDEGAKFIALRRSMDQGSTWSPTAFIVNDGDVPDGLNLGAVVSDVETGVVFLFYSLCAHKAGCQVASTMLVWSKDDGVSWSTPRNLSLDIGTEVFAPGPGSGIQKQREPRKGRLIVCGHGTLERDGVFCLLSDDHGASWRYGSGVSGIPYGQPKQENDFNPDECQPYELPDGSVVINGKITFPLPGKSLPLGLKARRPLPQKSPALI

SEQ ID NO: 834595 - protein, 422 aa, Homo sapiens
MTGERPSTALPDRRWGPRILGFWGGCRVWVFAAIFLLLSLAASWSKAENDFGLVQPLVTMEQLLWVSGRQIGSVDTFRIPLITATPRGTLLAFAEARKMSSSDEGAKFIALRRSMDQGSTWSPTAFIVNDGDVPDGLNLGAVVSDVETGVVFLFYSLCAHKAGCQVASTMLVWSKDDGVSWSTPRNLSLDIGTEVFAPGPGSGIQKQREPRKGRLIVCGHGTLERDGVFCLLSDDHGASWRYGSGVSGIPYGQPKQENDFNPDECQGQEIHEMFPTHLTLPALQNIISRTDPGSDCSTQCHTPLLPSGTGHFPCSLPGGPVLSPQPYELPDGSVVINARNQNNYHCHCRIVLRSYDACDTLRPRDVTFDPELVDPVVAAGAVVTSSGIVFFSNPAHPEFRVNLTLRWSFSNGTSWRKETVQL

SEQ ID NO: 834596 - protein, 62 aa, Homo sapiens
SSGIVFFSNPAHPEFRECLMGGVSRESPVSRQGLGRDPLSLTLLLSPGVNLTLRWSFSNGTS

SEQ ID NO: 834597 - protein, 415 aa, Homo sapiens; identical to SEQ ID NO: 834587

SEQ ID NO: 834598 - protein, 415 aa, Homo sapiens; identical to SEQ ID NO: 834587

SEQ ID NO: 834599 - protein, 432 aa, Homo sapiens
MTGERPSTALPDRRWGPRILGFWGGCRVWVFAAIFLLLSLAASWSKAENDFGLVQPLVTMEQLLWVSGRQIGSVDTFRIPLITATPRGTLLAFAEARKMSSSDEGAKFIALRRSMDQGSTWSPTAFIVNDGDVPDGLNLGAVVSDVETGVVFLFYSLCAHKAGCQVASTMLVWSKDDGVSWSTPRNLSLDIGTEVFAPGPGSGIQKQREPRKGRLIVCGHGTLERDGVFCLLSDDHGASWRYGSGVSGIPYGQPKQENDFNPDECQPYELPDGSVVINARNQNNYHCHCRIVLRSYDACDTLRPRDVTFDPELVDPVVAAGAVVTSSGIVFFSNPAHPEFQADPEPCLMRRIHANWLSVYAPSNAEHALSLMAHGPQSVRTVISLCGKPVWRSSSSACEEEQAPQLYVLYEKGRNHYTESISVAKISVYGTL

SEQ ID NO: 834600 - protein, 321 aa, Homo sapiens
SLQDLHWIVDEGPSSSPCGGHGPGSTWSPTAFIVNDGDVPDGLNLGAVVSDVETGVVFLFYSLCAHKAGCQVASTMLVWSKDDGVSWSTPRNLSLDIGTEVFAPGPGSGIQKQREPRKGRLIVCGHGTLERDGVFCLLSDDHGASWRYGSGVSGIPYGQPKQENDFNPDECQPYELPDGSVVINARNQNNYHCHCRIVLRSYDACDTLRPRDVTFDPELVDPVVAAGAVVTSSGIVFFSNPAHPEFRVNLTLRWSFSNGTSWRKETVQLWPGPSGYSSLATLEGSMDGEEQAPQLYVLYEKGRNHYTESISVAKISVYGTL

SEQ ID NO: 834601 - protein, 363 aa, Homo sapiens
MTGERPSTALPDRRWGPRILGFWGGCRVWVFAAIFLLLSLAASWSKAENDFGLVQPLVTMEQLLWVSGRQIGSVDTFRIPLITATPRGTLLAFAEARKMSSSDEGAKFIALRRSMDQGSTWSPTAFIVNDGDVPDGLNLGAVVSDVETGVVFLFYSLCAHKAGCQVASTMLVWSKDDGVSWSTPRNLSLDIGTEVFAPGPGSGIQKQREPRKGRLIVCGHGTLERDGVFCLLSDDHGASWRYGSGVSGIPYGQPKQENDFNPDECQPYELPDGSVVINARNQNNYHCHCRIVLRSYDACDTLRPRDVTFDPELVDPVVAAGAVVTSSGIVFFSNPAHPEFRVNLTLRWSFSNGTSWRKETVQL

SEQ ID NO: 834602 - protein, 70 aa, Homo sapiens
EGGLATLSNMGRQYSQMRWPGPSGYSSLATLEGSMDGEEQAPQLYVLYEKGRNHYTESISVAKISVYGTL

SEQ ID NO: 834603 - protein, 294 aa, Homo sapiens
MTGERPSTALPDRRWGPRILGFWGGCRVWVFAAIFLLLSLAASWSKAENDFGLVQPLVTMEQLLWVSGRQIGSVDTFRIPLITATPRGTLLAFAEARKMSSSDEGAKFIALRRSMDQGSTWSPTAFIVNDGDVPDGLNLGAVVSDVETGVVFLFYSLCAHKAGCQVASTMLVWSKDDGVSWSTPRNLSLDIGTEVFAPGPGSGIQKQREPRKGRLIVCGHGTLERDGVFCLLSDDHGASWRYGSGVSGIPYGQPKQENDFNPDECQAEPPLWCCGKITDRAGESPQMAGYLVSE

SEQ ID NO: 834604 - protein, 751 aa, Homo sapiens
MAFRTICVLVGVFICSICVKGSSQPQARVYLTFDELRETKTSEYFSLSHHPLDYRILLMDEDQDRIYVGSKDHILSLNINNISQEALSVFWPASTIKVEECKMAGKDPTHGCGNFVRVIQTFNRTHLYVCGSGAFSPVCTYLNRGRRSEDQVFMIDSKCESGKGRCSFNPNVNTVSVMINEELFSGMYIDFMGTDAAIFRSLTKRNAVRTDQHNSKWLSEPMFVDAHVIPDGTDPNDAKVYFFFKEKLTDNNRSTKQIHSMIARICPNDTGGLRSLVNKWTTFLKARLVCSVTDEDGPETHFDELEDVFLLETDNPRTTLVYGIFTTSSSVFKGSAVCVYHLSDIQTVFNGPFAHKEGPNHQLISYQGRIPYPRPGTCPGGAFTPNMRTTKEFPDDVVTFIRNHPLMYNSIYPIHKRPLIVRIGTDYKYTKIAVDRVNAADGRYHVLFLGTDRGTVQKVVVLPTNNSVSGELILEELEVFKNHAPITTMKISSKKQQLYVSSNEGVSQVSLHRCHIYGTACADCCLARDPYCAWDGHSCSRFYPTGKRRSRRQDVRHGNPLTQCRGFNLKAYRNAAEIVQYGVKNNTTFLECAPKSPQASIKWLLQKDKDRRKEVKLNERIIATSQGLLIRSVQGSDQGLYHCIATENSFKQTIAKINFKVLDSEMVAVVTDKWSPWTWASSVRALPFHPKDIMGAFSHSEMQMINQYCKDTRQQHQQGDESQKMRGDYGKLKALINSRKSRNRRNQLPES

SEQ ID NO: 834605 - protein, 751 aa, Homo sapiens; identical to SEQ ID NO: 834604

SEQ ID NO: 834606 - protein, 751 aa, Homo sapiens; identical to SEQ ID NO: 834604

SEQ ID NO: 834607 - protein, 751 aa, Homo sapiens; identical to SEQ ID NO: 834604

SEQ ID NO: 834608 - protein, 152 aa, Homo sapiens
MAFRTICVLVGVFICSICVKGSSQPQARVYLTFDELRETKTSEYFSLSHHPLDYRILLMDEDQDRIYVGSKDHILSLNINNISQEALSVFWPASTIKVEECKMAGKDPTHGCGNFVRVIQTFNRTHLYVCGSGAFSPVCTYLNRGRRSEGNI

SEQ ID NO: 834609 - protein, 693 aa, Homo sapiens
MDEDQDRIYVGSKDHILSLNINNISQEALSVFWPASTIKVEECKMAGKDPTHGCGNFVRVIQTFNRTHLYVCGSGAFSPVCTYLNRGRRSEDQVFMIDSKCESGKGRCSFNPNVNTVSVMINEELFSGMYIDFMGTDAAIFRSLTKRNAVRTDQHNSKWLSEPMFVDAHVIPDGTDPNDAKVYFFFKEKLTDNNRSTKQIHSMIARICPNDTGGLRSLVNKWTTFLKARLVCSVTDEDGPETHFDELEDVFLLETDNPRTTLVYGIFTTSSSVFKGSAVCVYHLSDIQTVFNGPFAHKEGPNHQLISYQGRIPYPRPGTCPGGAFTPNMRTTKEFPDDVVTFIRNHPLMYNSIYPIHKRPLIVRIGTDYKYTKIAVDRVNAADGRYHVLFLGTDRGTVQKVVVLPTNNSVSGELILEELEVFKNHAPITTMKISSKKQQLYVSSNEGVSQVSLHRCHIYGTACADCCLARDPYCAWDGHSCSRFYPTGKRRSRRQDVRHGNPLTQCRGFNLKAYRNAAEIVQYGVKNNTTFLECAPKSPQASIKWLLQKDKDRRKEVKLNERIIATSQGLLIRSVQGSDQGLYHCIATENSFKQTIAKINFKVLDSEMVAVVTDKWSPWTWASSVRALPFHPKDIMGAFSHSEMQMINQYCKDTRQQHQQGDESQKMRGDYGKLKALINSRKSRNRRNQLPES

SEQ ID NO: 834610 - protein, 152 aa, Homo sapiens
KSVGRSLPIVSLYFSCPGGAFTPNMRTTKEFPDDVVTFIRNHPLMYNSIYPIHKRPLIVRIGTDYKYTKIAVDRVNAADGRYHVLFLGTDRGTVQKVVVLPTNNSVSGELILEELEVFKNHAPITTMKISSKKEEPKTRCETWKPTDSMQRI

SEQ ID NO: 834611 - protein, 751 aa, Homo sapiens; identical to SEQ ID NO: 834604

SEQ ID NO: 834612 - protein, 397 aa, Homo sapiens
MDSLATSINQFALELSKKLAESAQGKNIFFSSWSISTSLTIVYLGAKGTTAAQMAQVLQFNRDQGVKCDPESEKKRKMEFNLSNSEEIHSDFQTLISEILKPNDDYLLKTANAIYGEKTYAFHNKYLEDMKTYFGAEPQPVNFVEASDQIRKDINSWVERQTEGKIQNLLPDDSVDSTTRMILVNALYFKGIWEHQFLVQNTTEKPFRINETTSKPVQMMFMKKKLHIFHIEKPKAVGLQLYYKSRDLSLLILLPEDINGLEQLEKAITYEKLNEWTSADMMELYEVQLHLPKFKLEDSYDLKSTLSSMGMSDAFSQSKADFSGMSSARNLFLSNVFHKAFVEINEQGTEAAAGSGSEIDIRIRVPSIEFNANHPFLFFIRHNKTNTILFYGRLCSP

SEQ ID NO: 834613 - protein, 81 aa, Homo sapiens
MLRQIIGQAKKHPSLIPLFVFIGTGATGATLYLLRLALFNPDVCWDRNNPEPWNKLGPNDQYKFYSVNVDYSKLKKERPDF

SEQ ID NO: 834614 - protein, 81 aa, Homo sapiens; identical to SEQ ID NO: 834613

SEQ ID NO: 834615 - protein, 81 aa, Homo sapiens; identical to SEQ ID NO: 834613

SEQ ID NO: 834616 - protein, 132 aa, Homo sapiens
TWDVRTCLIANKVHRLRAWGIRWRDGSPGSESLEPSGRKTIAAATIMVAGHRRIVPYACESLHLVVISWEECSVHGRNYMYLLGSALFRIRDGFVWDRNNPEPWNKLGPNDQYKFYSVNVDYSKLKKERPDF

SEQ ID NO: 834617 - protein, 81 aa, Homo sapiens; identical to SEQ ID NO: 834613

SEQ ID NO: 834618 - protein, 81 aa, Homo sapiens; identical to SEQ ID NO: 834613

SEQ ID NO: 834619 - protein, 81 aa, Homo sapiens; identical to SEQ ID NO: 834613

SEQ ID NO: 834620 - protein, 81 aa, Homo sapiens; identical to SEQ ID NO: 834613

SEQ ID NO: 834621 - protein, 81 aa, Homo sapiens; identical to SEQ ID NO: 834613

SEQ ID NO: 834622 - protein, 68 aa, Homo sapiens
GESDMKIIRVLWWYYFSKLIEFMDTFFFILRKNNHQITVLHVYHHASMLNIWWFVINWVPMINTSSTQ

SEQ ID NO: 834623 - protein, 81 aa, Homo sapiens; identical to SEQ ID NO: 834613

SEQ ID NO: 834624 - protein, 81 aa, Homo sapiens; identical to SEQ ID NO: 834613

SEQ ID NO: 834625 - protein, 81 aa, Homo sapiens; identical to SEQ ID NO: 834613

SEQ ID NO: 834626 - protein, 81 aa, Homo sapiens; identical to SEQ ID NO: 834613

SEQ ID NO: 834627 - protein, 81 aa, Homo sapiens; identical to SEQ ID NO: 834613

SEQ ID NO: 834628 - protein, 81 aa, Homo sapiens; identical to SEQ ID NO: 834613

SEQ ID NO: 834629 - protein, 160 aa, Homo sapiens
FVFKVDSYYVAPVGVQWLFTGTIVAPYSLELLGSSDPPALASGVAGTTDIHRHAWPNFRNSFHLSSIPHTTFFLLLYTLLPKKILKRKKEKENMETSDKKYKFNLATISFLVVCCLTVLAILLITRKQRHEEKYLLFPSNKIVWTMPWEKHSGCYSSPKQ

SEQ ID NO: 834630 - protein, 1798 aa, Homo sapiens [sequence omitted]

SEQ ID NO: 834631 - protein, 850 aa, Homo sapiens
FIWDLELVTVPLLPRGLLGLLWGDGRGVLKIMFLKKSTLIFANLYPFRGAEVNQHMFSPTSAPALFLTKVPFSADCALATSPLAIFLNPRAHSSPGTPCSSRPLPWSCRTSNRKSLIVTSSTSPTLPRPHSPLHGHTGNSPLDSPRNFSPNAPAHFSFVPARRTDGRRWSLASLPSSGYGTNTPSSTVSSSCSSQEKLHQLPFQPTADELHFLTKHFSTESVPDEEGRQSPAMRPRSRSLSPGRSPVSFDSEIIMMNHVYKERFPKATAQMEERLAEFISSNTPDSVLPLADGALSFIHHQVIEMARDCLDKSRSGLITSQYFYELQENLEKLLQDAHERSESSEVAFVMQLVKKLMIIIARPARLLECLEFDPEEFYHLLEAAEGHAKEGQGIKCDIPRYIVSQLGLTRDPLEEMAQLSSCDSPDTPETDDSIEGHGASLPSKKTPSEEDFETIKLISNGAYGAVFLVRHKSTRQRFAMKKINKQNLILRNQIQQAFVERDILTFAENPFVVSMFCSFDTKRHLCMVMEYVEGGDCATLLKNIGALPVDMVRLYFAETVLALEYLHNYGIVHRDLKPDNLLITSMGHIKLTDFGLSKMGLMSLTTNLYEGHIEKDAREFLDKQVCGTPEYIAPEVILRQGYGKPVDWWAMGIILYEFLVGCVPFFGDTPEELFGQVISDEIVWPEGDEALPPDAQDLTSKLLHQNPLERLGTGSAYEVKQHPFFTGLDWTGLLRQKAEFIPQLESEDDTSYFDTRSERYHHMDSEDEEEVSEDGCLEIRQFSSCSPRFNKVYSSMERLSLLEERRTPPPTKRSLSEEKEDHSDGLAGLKGRDRSWVIGSPEIPEHHPSA

SEQ ID NO: 834632 - protein, 1993 aa, Homo sapiens
MKRSRCRDRPQPPPPDRREDGVQRAAELSQSLPPRRRAPPGRQRLEERTGPAGPEGKEQDVVTGVSPLLFRKLSNPDIFSSTGKVKLQRQLSQDDCKLWRGNLASSLSGKQLLPLSSSVHSSVGQVTWQSSGEASNLVRMRNQSLGQSAPSLTAGLKELSLPRRGSFCRTSNRKSLIVTSSTSPTLPRPHSPLHGHTGNSPLDSPRNFSPNAPAHFSFVPARRTDGRRWSLASLPSSGYGTNTPSSTVSSSCSSQEKLHQLPFQPTADELHFLTKHFSTESVPDEEGRQSPAMRPRSRSLSPGRSPVSFDSEIIMMNHVYKERFPKAHERSESSEVAFVMQLVKKLMIIIARPARLLECLEFDPEEFYHLLEAAEGHAKEGQGIKCDIPRYIVSQLGLTRDPLEEMAQLSSCDSPDTPETDDSIEGHGASLPSKKTPSEEDFETIKLISNGAYGAVFLVRHKSTRQRFAMKKINKQNLILRNQIQQAFVERDILTFAENPFVVSMFCSFDTKRHLCMVMEYVEGGDCATLLKNIGALPVDMVRLYFAETVLALEYLHNYGIVHRDLKPDNLLITSMGHIKLTDFGLSKMGLMSLTTNLYEGHIEKDAREFLDKQVCGTPEYIAPEVILRQGYGKPVDWWAMGIILYEFLVGCVPFFGDTPEELFGQVISGRYYAPGPVGKQSLNHKYDVCRQLVRPVSSCSELIMCVCDVCCFGDGCLCVSACTYMCTLCPLGLHMSLIDTWSLIYTWVFLSVYVHIPKCEGYVCVCFVEYKSRVSQSFAVPAVDQRSSYGLGTYENLRTGVPGKAFRGSRLGPFCLLSFHCSGTLFCISPLYPQFLLSLSPLMTSDEIVWPEGDEALPPDAQDLTSKLLHQNPLERLGTGRAGPANFSHYLEKGEGRLSHVPWRFRLRLRAAPLDPETLPCSVGRKGKMLELIPRYSFLKVWLLARFADLDSMLLILPPVPMSSLSTGSAYEVKQHPFFTGLDWTGLLRQKAEFIPQLESEDDTSYFDTRSERYHHMDSEDEEEVSEDGCLEIRQFSSCSPRFNKVYSSMERLSLLEERRTPPPTKRSLSEEKEDHSDGLAGLKGRDRSWVIGSPEILRKRLSVSESSHTESDSSPPMTVRRRCSGLLDAPRFPEGPEEASSTLRRQPQEGIWVLTPPSGEGVSGPVTEHSGEQRPKLDEEAVGRSSGSSPAMETRGRGTSQLAEGATAKAISDLAVRRARHRLLSGDSTEKRTARPVNKVIKSASATALSLLIPSEHHTCSPLASPMSPHSQSSNPSSRDSSPSRDFLPALGSMRPPIIIHRAGKKYGFTLRAIRVYMGDSDVYTVHHMVWHVEDGGPASEAGLRQGDLITHVNGEPVHGLVHTEVVELILKSGNKVAISTTPLENTSIKVGPARKGSYKAKMARRSKRSRGKDGQESRKRSSLFRKITKQASLLHTSRSLSSLNRSLSSGESGPGSPTHSHSLSPRSPTQGYRVTPDAVHSVGGNSSQSSSPSSSVPSSPAGSGHTRPSSLHGLAPKLQRQYRSPRRKSAGSIPLSPLAHTPSPPPPTASPQRSPSPLSGHVAQAFPTKLHLSPPLGRQLSRPKSAEPPRSPLLKRVQSAEKLAAALAASEKKLATSRKHSLDLPHSELKKELPPREVSPLEVVGARSVLSGKGALPGKGVLQPAPSRALGTLRQDRAERRESLQKQEAIREVDSSEDDTEEGPENSQGAQELSLAPHPEVSQSVAPKGAGESGEEDPFPSRDPRSLGPMVPSLLTGITLGPPRMESPSGPHRRLGSPQAIEEAASSSSAGPNLGQSGATDPIPPEGCWKAQHLHTQALTALSPSTSGLTPTSSCSPPSSTSGKLSMWSWKSLIEGPDRASPSRKATMAGGLANLQDLENTTPAQPKNLSPREQGKTQPPSAPRLAHPSYEDPSQGWLWESECAQAVKEDPALSITQVPDASGDRRQDVPCRGCPLTQKSEPSLRRGQEPGGHQKHRDLALVPDELLKQT

SEQ ID NO: 834633 - protein, 1069 aa, Homo sapiens
IHWWFHGRTHDEIVWPEGDEALPPDAQDLTSKLLHQNPLERLGTGSAYEVKQHPFFTGLDWTGLLRQKAEFIPQLESEDDTSYFDTRSERYHHMDSEDEEEVSEDGCLEIRQFSSCSPRFNKVYSSMERLSLLEERRTPPPTKRSLSEEKEDHSDGLAGLKGRDRSWVIGSPEILRKRLSVSESSHTESDSSPPMTVRRRCSGLLDAPRFPEGPEEASSTLRRQPQEGIWVLTPPSGEGVSGPVTEHSGEQRPKLDEEAVGRSSGSSPAMETRGRGTSQLAEGATAKAISDLAVRRARHRLLSGDSTEKRTARPVNKVIKSASATALSLLIPSEHHTCSPLASPMSPHSQSSNPSSRDSSPSRDFLPALGSMRPPIIIHRAGKKYGFTLRAIRVYMGDSDVYTVHHMVWHVEDGGPASEAGLRQGDLITHVNGEPVHGLVHTEVVELILKSGNKVAISTTPLENTSIKVGPARKGSYKAKMARRSKRSRGKDGQESRKRSSLFRKITKQASLLHTSRSLSSLNRSLSSGESGPGSPTHSHSLSPRSPTQGYRVTPDAVHSVGGNSSQSSSPSSSVPSSPAGSGHTRPSSLHGLAPKLQRQYRSPRRKSAGSIPLSPLAHTPSPPPPTASPQRSPSPLSGHVAQAFPTKLHLSPPLGRQLSRPKSAEPPRSPLLKRVQSAEKLAAALAASEKKLATSRKHSLDLPHSELKKELPPREVSPLEVVGARSVLSGKGALPGKGVLQPAPSRALGTLRQDRAERRESLQKQEAIREVDSSEDDTEEGPENSQGAQELSLAPHPEVSQSVAPKGAGESGEEDPFPSRDPRSLGPMVPSLLTGITLGPPRMESPSGPHRRLGSPQAIEEAASSSSAGPNLGQSGATDPIPPEGCWKAQHLHTQALTALSPSTSGLTPTSSCSPPSSTSGKLSMWSWKSLIEGPDRASPSRKATMAGGLANLQDLENTTPAQPKNLSPREQGKTQPPSAPRLAHPSYEDPSQGWLWESECAQAVKEDPALSITQVPDASGDRRQDVPCRGCPLTQKSEPSLRRGQEPGGHQKHRDLALVPDELLKQT

SEQ ID NO: 834634 - protein, 1154 aa, Homo sapiens
MKRSRCRDRPQPPPPDRREDGVQRAAELSQSLPPRRRAPPGRQRLEERTGPAGPEGKEQDVVTGVSPLLFRKLSNPDIFSSTGKVKLQRQLSQDDCKLWRGNLASSLSGKQLLPLSSSVHSSVGQVTWQSSGEASNLVRMRNQSLGQSAPSLTAGLKELSLPRRGSFCRTSNRKSLIVTSSTSPTLPRPHSPLHGHTGNSPLDSPRNFSPNAPAHFSFVPARRTDGRRWSLASLPSSGYGTNTPSSTVSSSCSSQEKLHQLPFQPTADELHFLTKHFSTESVPDEEGRQSPAMRPRSRSLSPGRSPVSFDSEIIMMNHVYKERFPKATAQMEERLAEFISSNTPDSVLPLADGALSFIHHQVIEMARDCLDKSRSGLITSQYFYELQENLEKLLQDAHERSESSEVAFVMQLVKKLMIIIARPARLLECLEFDPEEFYHLLEAAEGHAKEGQGIKCDIPRYIVSQLGLTRDPLEEMAQLSSCDSPDTPETDDSIEGHGASLPSKKTPSEEDFETIKLISNGAYGAVFLVRHKSTRQRFAMKKINKQNLILRNQIQQAFVERDILTFAENPFVVSMFCSFDTKRHLCMVMEYVEGGDCATLLKNIGALPVDMVRLYFAETVLALEYLHNYGIVHRDLKPDNLLITSMGHIKLTDFGLSKMGLMSLTTNLYEGHIEKDAREFLDKQVCGTPEYIAPEVILRQGYGKPVDWWAMGIILYEFLVGCVPFFGDTPEELFGQVISDEIVWPEGDEALPPDAQDLTSKLLHQNPLERLGTGSAYEVKQHPFFTGLDWTGLLRQKAEFIPQLESEDDTSYFDTRSERYHHMDSEDEEEVSEDGCLEIRQFSSCSPRFNKVYSSMERLSLLEERRTPPPTKRSLSEEKEDHSDGLAGLKGRDRSWVIGSPEILRKRLSVSESSHTESDSSPPMTVRRRCSGLLDAPRFPEGPEEASSTLRRQPQEGIWVLTPPSGEGVSGPVTEHSGEQRPKLDEEAVGRSSGSSPAMETRGRGTSQLAEGATAKAISDLAVRRARHRLLSGDSTEKRTARPVNKVIKSASATALSLLIPSEHHTCSPLASPMSPHSQSSNPSSRDSSPRSMASPCGPFASTWVTPMSTPCTIWCGTWRMEVRPVRQGFVKVTSSPMSMGNLCMAWCTRRWWS

SEQ ID NO: 834635 - protein, 843 aa, Homo sapiens
NGEPVHGLVHTEGVSGPVTEHSGEQRPKLDEEAVGRSSGSSPAMETRGRGTSQLAEGATAKAISDLAVRRARHRLLSGDSTEKRTARPVNKVIKSASATALSLLIPSEHHTCSPLASPMSPHSQSSNPSSRDSSPSRDFLPALGSMRPPIIIHRAGKKYGFTLRAIRVYMGDSDVYTVHHMVWHVEDGGPASEAGLRQGDLITHVNGEPVHGLVHTEVVELILKSGNKVAISTTPLENTSIKVGPARKGSYKAKMARRSKRSRGKDGQESRKRSSLFRKITKQASLLHTSRSLSSLNRSLSSGESGPGSPTHSHSLSPRSPTQGYRVTPDAVHSVGGNSSQSSSPSSSVPSSPAGSGHTRPSSLHGLAPKLQRQYRSPRRKSAGSIPLSPLAHTPSPPPPTASPQRSPSPLSGHVAQAFPTKLHLSPPLGRQLSRPKSAEPPRSPLLKRVQSAEKLAAALAASEKKLATSRKHSLDLPHSELKKELPPREVSPLEVVGARSVLSGKGALPGKGVLQPAPSRALGTLRQDRAERRESLQKQEAIREVDSSEDDTEEGPENSQGAQELSLAPHPEVSQSVAPKGAGESGEEDPFPSRDPRSLGPMVPSLLTGITLGPPRMESPSGPHRRLGSPQAIEEAASSSSAGPNLGQSGATDPIPPEGCWKAQHLHTQALTALSPSTSGLTPTSSCSPPSSTSGKLSMWSWKSLIEGPDRASPSRKATMAGGLANLQDLENTTPAQPKNLSPREQGKTQPPSAPRLAHPSYEDPSQGWLWESECAQAVKEDPALSITQVPDASGDRRQDVPCRGCPLTQKSEPSLRRGQEPGGHQKHRDLALVPDELLKQT

SEQ ID NO: 834636 - protein, 589 aa, Homo sapiens
MARRSKRSRGKDGQESRKRSSLFRKITKQASLLHTSRSLSSLNRSLSSGESGPGSPTHSHSLSPRSPTQGYRVTPDAVHSVGGNSSQSSSPSSSVPSSPAGSGHTRPSSLHGLAPKLQRQYRSPRRKSAGSIPLSPLAHTPSPPPPTASPQRSPSPLSGHVAQAFPTKLHLSPPLGRQLSRPKSAEPPRSPLLKRVQSAEKLAAALAASEKKLATSRKHSLDLPHSELKKELPPREVSPLEVVGARSVLSGKGALPGKGVLQPAPSRALGTLRQDRAERRESLQKQEAIREVDSSEDDTEEGPENSQGAQELSLAPHPEVSQSVAPKGAGESGEEDPFPSRDPRSLGPMVPSLLTGITLGPPRMESPSGPHRRLGSPQAIEEAASSSSAGPNLGQSGATDPIPPEGCWKAQHLHTQALTALSPSTSGLTPTSSCSPPSSTSGKLSMWSWKSLIEGPDRASPSRKATMAGGLANLQDLENTTPAQPKNLSPREQGKTQPPSAPRLAHPSYEDPSQGWLWESECAQAVKEDPALSITQVPDASGDRRQDVPCRGCPLTQKSEPSLRRGQEPGGHQKHRDLALVPDELLKQT

SEQ ID NO: 834637 - protein, 687 aa, Homo sapiens
MKRSRCRDRPQPPPPDRREDGVQRAAELSQSLPPRRRAPPGRQRLEERTGPAGPEGKEQDVVTGVSPLLFRKLSNPDIFSSTGKVKLQRQLSQDDCKLWRGNLASSLSGKQLLPLSSSVHSSVGQVTWQSSGEASNLVRMRNQSLGQSAPSLTAGLKELSLPRRGSFCRTSNRKSLIVTSSTSPTLPRPHSPLHGHTGNSPLDSPRNFSPNAPAHFSFVPARRTDGRRWSLASLPSSGYGTNTPSSTVSSSCSSQEKLHQLPFQPTADELHFLTKHFSTESVPDEEGRQSPAMRPRSRSLSPGRSPVSFDSEIIMMNHVYKERFPKAHERSESSEVAFVMQLVKKLMIIIARPARLLECLEFDPEEFYHLLEAAEGHAKEGQGIKCDIPRYIVSQLGLTRDPLEEMAQLSSCDSPDTPETDDSIEGHGASLPSKKTPSEEDFETIKLISNGAYGAVFLVRHKSTRQRFAMKKINKQNLILRNQIQQAFVERDILTFAENPFVVSMFCSFDTKRHLCMVMEYVEGGDCATLLKNIGALPVDMVRLYFAETVLALEYLHNYGIVHRDLKPDNLLITSMGHIKLTDFGLSKMGLMSLTTNLYEGHIEKDAREFLDKQVCGTPEYIAPEVILRQGYGKPVDWWAMGIILYEFLVGCVPFFGDTPEELFGQVISGRYYAPGPVGKQSLNPQI

SEQ ID NO: 834638 - protein, 104 aa, Homo sapiens
MGHLCHLKRHPLKRTSRPLSSSAMAPMGKGRGQGVARTEAGSAFDLFHVRVYAAQSSGQMPRGGPSHSQKPPGWAGVQIPLTSDHCSFPRQDSHASYYHASSIP

SEQ ID NO: 834639 - protein, 1798 aa, Homo sapiens [sequence omitted]

SEQ ID NO: 834640 - protein, 1888 aa, Homo sapiens
MKRSRCRDRPQPPPPDRREDGVQRAAELSQSLPPRRRAPPGRQRLEERTGPAGPEGKEQDVVTGVSPLLFRKLSNPDIFSSTGKVKLQRQLSQDDCKLWRGNLASSLSGKQLLPLSSSVHSSVGQVTWQSSGEASNLVRMRNQSLGQSAPSLTAGLKELSLPRRGSFCRTSNRKSLIVTSSTSPTLPRPHSPLHGHTGNSPLDSPRNFSPNAPAHFSFVPARRTDGRRWSLASLPSSGYGTNTPSSTVSSSCSSQEKLHQLPFQPTADELHFLTKHFSTESVPDEEGRQSPAMRPRSRSLSPGRSPVSFDSEIIMMNHVYKERFPKATAQMEERLAEFISSNTPDSVLPLADGALSFIHHQVIEMARDCLDKSRSGLITSQYFYELQENLEKLLQDAHERSESSEVAFVMQLVKKLMIIIARPARLLECLEFDPEEFYHLLEAAEGHAKEGQGIKCDIPRYIVSQLGLTRDPLEEMAQLSSCDSPDTPETDDSIEGHGASLPSKKTPSEEDFETIKLISNGAYGAVFLVRHKSTRQRFAMKKINKQNLILRNQIQQAFVERDILTFAENPFVVSMFCSFDTKRHLCMVMEYVEGGDCATLLKNIGALPVDMVRLYFAETVLALEYLHNYGIVHRDLKPDNLLITSMGHIKLTDFGLSKMGLMSLTTNLYEGHIEKDAREFLDKQVCGTPEYIAPEVILRQGYGKPVDWWAMGIILYEFLVGCVPFFGDTPEELFGQVISDEIVWPEGDEALPPDAQDLTSKLLHQNPLERLGTGSAYEVKQHPFFTGLDWTGLLRQKAEFIPQLESEDDTSYFDTRSERYHHMDSEDEEEVSEDGCLEIRQFSSCSPRFNKVYSSMERLSLLEERRTPPPTKRSLSEEKEDHSDGLAGLKGRDRSWVIGSPEILRKRLSVSESSHTESDSSPPMTVRRRCSGLLDAPRFPEGPEEASSTLRRQPQEGIWVLTPPSGEGVSGPVTEHSGEQRPKLDEEAVGRSSGSSPAMETRGRGTSQLAEGATAKAISDLAVRRARHRLLSGDSTEKRTARPVNKVIKSASATALSLLIPSEHHTCSPLASPMSPHSQSSNPSSRDSSPSRDFLPALGSMRPPIIIHRAGKKYGFTLRAIRVYMGDSDVYTVHHMVWHVEDGGPASEAGLRQGDLITHVNGEPVHGLVHTEVVELILKSGNKVAISTTPLENTSIKVGPARKGSYKAKMARRSKRSRGKDGQESRKRSSLFRKITKQASLLHTSRSLSSLNRSLSSGESGPGSPTHSHSLSPRSPTQGYRVTPDAVHSGTKGSLQISDNPWEIGKFLGPVLLLTDPTLSLSFSPPPERSCSLGEELIDGEGGAWFLGHNRAKPCLALESLLTANTALLLSVCLLSLYKVGGNSSQSSSPSSSVPSSPAGSGHTRPSSLHGLAPKLQRQYRSPRRKSAGSIPLSPLAHTPSPPPPTASPQRSPSPLSGHVAQAFPTKLHLSPPLGRQLSRPKSAEPPRSPLLKRVQSAEKLAAALAASEKKLATSRKHSLDLPHSELKKELPPREVSPLEVVGARSVLSGKGALPGKGVLQPAPSRALGTLRQDRAERRESLQKQEAIREVDSSEDDTEEGPENSQGAQELSLAPHPEVSQSVAPKGAGESGEEDPFPSRDPRSLGPMVPSLLTGITLGPPRMESPSGPHRRLGSPQAIEEAASSSSAGPNLGQSGATDPIPPEGCWKAQHLHTQALTALSPSTSGLTPTSSCSPPSSTSGKLSMWSWKSLIEGPDRASPSRKATMAGGLANLQDLENTTPAQPKNLSPREQGKTQPPSAPRLAHPSYEDPSQGWLWESECAQAVKEDPALSITQVPDASGDRRQDVPCRGCPLTQKSEPSLRRGQEPGGHQKHRDLALVPDELLKQT

SEQ ID NO: 834641 - protein, 1996 aa, Homo sapiens
MKRSRCRDRPQPPPPDRREDGVQRAAELSQSLPPRRRAPPGRQRLEERTGPAGPEGKEQDVVTGVSPLLFRKLSNPDIFSSTGKVKLQRQLSQDDCKLWRGNLASSLSGKQLLPLSSSVHSSVGQVTWQSSGEASNLVRMRNQSLGQSAPSLTAGLKELSLPRRGSFCRTSNRKSLIVTSSTSPTLPRPHSPLHGHTGNSPLDSPRNFSPNAPAHFSFVPARRTDGRRWSLASLPSSGYGTNTPSSTVSSSCSSQEKLHQLPFQPTADELHFLTKHFSTESVPDEEGRQSPAMRPRSRSLSPGRSPVSFDSEIIMMNHVYKERFPKATAQMEERLAEFISSNTPDSVLPLADGALSFIHHQVIEMARDCLDKSRSGLITSQYFYELQENLEKLLQDAHERSESSEVAFVMQLVKKLMIIIARPARLLECLEFDPEEFYHLLEAAEGHAKEGQGIKCDIPRYIVSQLGLTRDPLEEMAQLSSCDSPDTPETDDSIEGHGASLPSKKTPSEEDFETIKLISNGAYGAVFLVRHKSTRQRFAMKKINKQNLILRNQIQQAFVERDILTFAENPFVVSMFCSFDTKRHLCMVMEYVEGGDCATLLKNIGALPVDMVRLYFAETVLALEYLHNYGIVHRDLKPDNLLITSMGHIKLTDFGLSKMGLMSLTTNLYEGHIEKDAREFLDKQVCGTPEYIAPEVILRQGYGKPVDWWAMGIILYEFLVGCVPFFGDTPEELFGQVISDEIVWPEGDEALPPDAQDLTSKLLHQNPLERLGTGSAYEVKQHPFFTGLDWTGLLRQKAEFIPQLESEDDTSYFDTRSERYHHMDSEDEEEVSEDGCLEIRQFSSCSPRFNKVYSSMERLSLLEERRTPPPTKRSLSEEKEDHSDGLAGLKGRDRSWVIGSPEILRKRLSVSESSHTESDSSPPMTVRRRCSGLLDAPRFPEGPEEASSTLRRQPQEGIWVLTPPSGEGVSGPVTEHSGEQRPKLDEEAVGRSSGSSPAMETRGRGTSQLAEGATAKAISDLAVRRARHRLLSGDSTEKRTARPVNKVIKSASATALSLLIPSGEAPGELDKTHRKGLVISEALGGFCTWQVCVCVLSTDLTVVSEGVFGVWGCVYMCQKAGQHHVTSAGFGVESSHSNPGSITNRLLTLSKLLNFSKPKFLIQKCGYNRGQLIGCDISNIYDTAYIVPDTHINASCHFSSPPPSLGVWTRERASQVRGCGENGPEAQALSVTRVVLTSTDWTRGQAKALLTHYVLASPSPEHHTCSPLASPMSPHSQSSNPSSRDSSPSRDFLPALGSMRPPIIIHRAGKKYGFTLRAIRVYMGDSDVYTVHHMVWHVEDGGPASEAGLRQGDLITHVNGEPVHGLVHTEVVELILKSGNKVAISTTPLENTSIKVGPARKGSYKAKMARRSKRSRGKDGQESRKRSSLFRKITKQASLLHTSRSLSSLNRSLSSGESGPGSPTHSHSLSPRSPTQGYRVTPDAVHSVGGNSSQSSSPSSSVPSSPAGSGHTRPSSLHGLAPKLQRQYRSPRRKSAGSIPLSPLAHTPSPPPPTASPQRSPSPLSGHVAQAFPTKLHLSPPLGRQLSRPKSAEPPRSPLLKRVQSAEKLAAALAASEKKLATSRKHSLDLPHSELKKELPPREVSPLEVVGARSVLSGKGALPGKGVLQPAPSRALGTLRQDRAERRESLQKQEAIREVDSSEDDTEEGPENSQGAQELSLAPHPEVSQSVAPKGAGESGEEDPFPSRDPRSLGPMVPSLLTGITLGPPRMESPSGPHRRLGSPQAIEEAASSSSAGPNLGQSGATDPIPPEGCWKAQHLHTQALTALSPSTSGLTPTSSCSPPSSTSGKLSMWSWKSLIEGPDRASPSRKATMAGGLANLQDLENTTPAQPKNLSPREQGKTQPPSAPRLAHPSYEDPSQGWLWESECAQAVKEDPALSITQVPDASGDRRQDVPCRGCPLTQKSEPSLRRGQEPGGHQKHRDLALVPDELLKQT

SEQ ID NO: 834642 - protein, 1325 aa, Homo sapiens
MKRSRCRDRPQPPPPDRREDGVQRAAELSQSLPPRRRAPPGRQRLEERTGPAGPEGKEQDVVTGVSPLLFRKLSNPDIFSSTGKVKLQRQLSQDDCKLWRGNLASSLSGKQLLPLSSSVHSSVGQVTWQSSGEASNLVRMRNQSLGQSAPSLTAGLKELSLPRRGSFCRTSNRKSLIVTSSTSPTLPRPHSPLHGHTGNSPLDSPRNFSPNAPAHFSFVPARRTDGRRWSLASLPSSGYGTNTPSSTVSSSCSSQEKLHQLPFQPTADELHFLTKHFSTESVPDEEGRQSPAMRPRSRSLSPGRSPVSFDSEIIMMNHVYKERFPKATAQMEERLAEFISSNTPDSVLPLADGALSFIHHQVIEMARDCLDKSRSGLITSQYFYELQENLEKLLQDAHERSESSEVAFVMQLVKKLMIIIARPARLLECLEFDPEEFYHLLEAAEGHAKEGQGIKCDIPRYIVSQLGLTRDPLEEMAQLSSCDSPDTPETDDSIEGHGASLPSKKTPSEEDFETIKLISNGAYGAVFLVRHKSTRQRFAMKKINKQNLILRNQIQQAFVERDILTFAENPFVVSMFCSFDTKRHLCMVMEYVEGGDCATLLKNIGALPVDMVRLYFAETVLALEYLHNYGIVHRDLKPDNLLITSMGHIKLTDFGLSKMGLMSLTTNLYEGHIEKDAREFLDKQVCGTPEYIAPEVILRQGYGKPVDWWAMGIILYEFLVGCVPFFGDTPEELFGQVISDEIVWPEGDEALPPDAQDLTSKLLHQNPLERLGTGSAYEVKQHPFFTGLDWTGLLRQKAEFIPQLESEDDTSYFDTRSERYHHMDSEDEEEVSEDGCLEIRQFSSCSPRFNKVYSSMERLSLLEERRTPPPTKRSLSEEKEDHSDGLAGLKGRDRSWVIGSPEILRKRLSVSESSHTESDSSPPMTVRRRCSGLLDAPRFPEGPEEASSTLRRQPQEGIWVLTPPSGEGVSGPVTEHSGEQRPKLDEEAVGRSSGSSPAMETRGRGTSQLAEGATAKAISDLAVRRARHRLLSGDSTEKRTARPVNKVIKSASATALSLLIPSEHHTCSPLASPMSPHSQSSNPSSRDSSPSRDFLPALGSMRPPIIIHRAGKKYGFTLRAIRVYMGDSDVYTVHHMVWHVEDGGPASEAGLRQGDLITHVNGEPVHGLVHTEVVELILKSGNKVAISTTPLENTSIKVGPARKGSYKAKMARRSKRSRGKDGQESRKRSSLFRKITKQASLLHTSRSLSSLNRSLSSGESGPGSPTHSHSLSPRSPTQGYRVTPDAVHSGNSHGPRVRSHPVHHYSRGCSRLRNWQQHLPPLRRS

SEQ ID NO: 834643 - protein, 1798 aa, Homo sapiens [sequence omitted]

SEQ ID NO: 834644 - protein, 538 aa, Homo sapiens
MKRSRCRDRPQPPPPDRREDGVQRAAELSQSLPPRRRAPPGRQRLEERTGPAGPEGKEQDVVTGVSPLLFRKLSNPDIFSSTGKVKLQRQLSQDDCKLWRGNLASSLSGKQLLPLSSSVHSSVGQVTWQSSGEASNLVRMRNQSLGQSAPSLTAGLKELSLPRRGSFCRTSNRKSLIVTSSTSPTLPRPHSPLHGHTGNSPLDSPRNFSPNAPAHFSFVPARRTDGRRWSLASLPSSGYGTNTPSSTVSSSCSSQEKLHQLPFQPTADELHFLTKHFSTESVPDEEGRQSPAMRPRSRSLSPGRSPVSFDSEIIMMNHVYKERFPKAHERSESSEVAFVMQLVKKLMIIIARPARLLECLEFDPEEFYHLLEAAEGHAKEGQGIKCDIPRYIVSQLGLTRDPLEEMAQLSSCDSPDTPETDDSIEGHGASLPSKKTPSEEDFETIKLISNGAYGAVFLVRHKSTRQRFAMKKINKQNLILRNQIQQAFVERDILTFAENPFVVSMFCSFDTKRHLCMVMEYVEGTEAKVAWHGGQGTV

SEQ ID NO: 834645 - protein, 1527 aa, Homo sapiens
MPLANLSSFLPTFPGLQLHVQEASGNHLNPEPNQPAPSVDLDFLEDDILGSPATGGGGGGSGGADQPCDILQQSLQEANITEQTLEAEAELDLGPFQLPTLQPADGGAGPTGAGGAAAVAAGPQALFPGSTDLLGLQGPPTVLTHQALVPPQDVVNKALSVQPFLQPVGLGNVTLQPIPGLQGLPNGSPGGATAATLGLAPIQVVGQPVMALNTPTSQLLAKQVPVSGYLASAAGPSEPVTLASAGVSPQGAGLVIQKNLSAAVATTLNGNSVFGGAGAASAPTGTPSGQPLAVAPGLGSSPLVPAPNVILHRTPTPIQPKPAGVLPPKLYQLTPKPFAPAGATLTIQGEPGALPQQPKAPQNLTFMAAGKAGQNVVLSGFPAPALQANVFKQPPATTTGAAPPQPPGALSKPMSVHLLNQGSSIVIPAQHMLPGQNQFLLPGAPAVQLPQQLSALPANVGGQILAAAAPHTGGQLIANPILTNQNLAGPLSLGPVLAPHSGAHSAHILSAAPIQVGQPALFQMPVSLAAGSLPTQSQPAPAGPAATTVLQGVTLPPSAVAMLNTPDGLVQPATPAAATGEAAPVLTVQPAPQAPPAVSTPLPLGLQQPQAQQPPQAPTPQAAAPPQATTPQPSPGLASSPEKIVLGQPPSATPTAILTQDSLQMFLPQERSQQPLSAEGPHLSVPASVIVSAPPPAQDPAPATPVAKGAGLGPQAPDSQASPAPAPQIPAAAPLKGPGPSSSPSLPHQAPLGDSPHLPSPHPTRPPSRPPSRPQSVSRPPSEPPLHPCPPPQAPPTLPGIFVIQNQLGVPPPASNPAPTAPGPPQPPLRPQSQPPEGPLPPAPHLPPSSTSSAVASSSETSSRLPAPTPSDFQLQFPPSQGPHKSPTPPPTLHLVPEPAAPPPPPPRTFQMVTTPFPALPQPKALLERFHQVPSGIILQNKAGGAPAAPQTSTSLGPLTSPAASVLVSGQAPSGTPTAPSHAPAPAPMAATGLPPLLPAENKAFASNLPTLNVAKAASSGPGKPSGLQYESKLSGLKKPPTLQPSKEACFLEHLHKHQGSVLHPDYKTAFPSFEDALHRLLPYHVYQGALPSPSDYHKVDEEFETVSTQLLKRTQAMLNKYRLLLLEESRRVSPSAEMVMIDRMFIQEEKTTLALDKQLAKEKPDEYVSSSRSLGLPIAASSEGHRLPGHGPLSSSAPGASTQPPPHLPTKLVIRHGGAGGSPSVTWARASSSLSSSSSSSSAASSLDADEDGPMPSRNRPPIKTYEARSRIGLKLKIKQEAGLSKVVHNTALDPVHQPPPPPATLKVAEPPPRPPPPPPPTGQMNGTVDHPPPAAPERKPLGTAPHCPRLPLRKTYRENVGGPGAPEGTPAGRARGGSPAPLPAKVDEATSGLIRELAAVEDELYQRMLKGPPPEPAASAAQGTGDPDWEAPGLPPAKRRKSESPDVDQASFSSDSPQDDTLTEHLQSAIDSILNLQQAPGRTPAPSYPHAASAGTPASPPPLHRPEAYPPSSHNGGLGARTLTR

SEQ ID NO: 834646 - protein, 1560 aa, Homo sapiens [sequence omitted]

SEQ ID NO: 834647 - protein, 1560 aa, Homo sapiens [sequence omitted]

SEQ ID NO: 834648 - protein, 1609 aa, Homo sapiens
PHQRSHVAVNPGLSLVAIRILGSPRAVAINPEPWYTASCWCLFALTWLDGLVGAGGWDAALPALLTFDLWMGRVLLQLDSDDLLDNPGEAQSAFYEGPGLHVQEASGNHLNPEPNQPAPSVDLDFLEDDILGSPATGGGGGGSGGADQPCDILQQSLQEANITEQTLEAEAELDLGPFQLPTLQPADGGAGPTGAGGAAAVAAGPQALFPGSTDLLGLQGPPTVLTHQALVPPQDVVNKALSVQPFLQPVGLGNVTLQPIPGLQGLPNGSPGGATAATLGLAPIQVVGQPVMALNTPTSQLLAKQVPVSGYLASAAGPSEPVTLASAGVSPQGAGLVIQKNLSAAVATTLNGNSVFGGAGAASAPTGTPSGQPLAVAPGLGSSPLVPAPNVILHRTPTPIQPKPAGVLPPKLYQLTPKPFAPAGATLTIQGEPGALPQQPKAPQNLTFMAAGKAGQNVVLSGFPAPALQANVFKQPPATTTGAAPPQPPGALSKPMSVHLLNQGSSIVIPAQHMLPGQNQFLLPGAPAVQLPQQLSALPANVGGQILAAAAPHTGGQLIANPILTNQNLAGPLSLGPVLAPHSGAHSAHILSAAPIQVGQPALFQMPVSLAAGSLPTQSQPAPAGPAATTVLQGVTLPPSAVAMLNTPDGLVQPATPAAATGEAAPVLTVQPAPQAPPAVSTPLPLGLQQPQAQQPPQAPTPQAAAPPQATTPQPSPGLASSPEKIVLGQPPSATPTAILTQDSLQMFLPQERSQQPLSAEGPHLSVPASVIVSAPPPAQDPAPATPVAKGAGLGPQAPDSQASPAPAPQIPAAAPLKGPGPSSSPSLPHQAPLGDSPHLPSPHPTRPPSRPPSRPQSVSRPPSEPPLHPCPPPQAPPTLPGIFVIQNQLGVPPPASNPAPTAPGPPQPPLRPQSQPPEGPLPPAPHLPPSSTSSAVASSSETSSRLPAPTPSDFQLQFPPSQGPHKSPTPPPTLHLVPEPAAPPPPPPRTFQMVTTPFPALPQPKALLERFHQVPSGIILQNKAGGAPAAPQTSTSLGPLTSPAASVLVSGQAPSGTPTAPSHAPAPAPMAATGLPPLLPAENKAFASNLPTLNVAKAASSGPGKPSGLQYESKLSGLKKPPTLQPSKEACFLEHLHKHQGSVLHPDYKTAFPSFEDALHRLLPYHVYQGALPSPSDYHKVDEEFETVSTQLLKRTQAMLNKYRLLLLEESRRVSPSAEMVMIDRMFIQEEKTTLALDKQLAKEKPDEYVSSSRSLGLPIAASSEGHRLPGHGPLSSSAPGASTQPPPHLPTKLVIRHGGAGGSPSVTWARASSSLSSSSSSSSAASSLDADEDGPMPSRNRPPIKTYEARSRIGLKLKIKQEAGLSKVVHNTALDPVHQPPPPPATLKVAEPPPRPPPPPPPTGQMNGTVDHPPPAAPERKPLGTAPHCPRLPLRKTYRENVGGPGAPEGTPAGRARGGSPAPLPAKVDEATSGLIRELAAVEDELYQRMLKGPPPEPAASAAQGTGDPDWEAPGLPPAKRRKSESPDVDQASFSSDSPQDDTLTEHLQSAIDSILNLQQAPGRTPAPSYPHAASAGTPASPPPLHRPEAYPPSSHNGGLGARTLTR

SEQ ID NO: 834649 - protein, 454 aa, Homo sapiens
MGRTYIVEETVGQYLSNINLQGKAFVSGLLIGQCSSQKDYVILATRTPPKEEQSENLKHPKAKLDNLDEEWATEHACQVSRMLPGGLLVLGVFIITTLELANDFQNALRRLMFAVEKSINRKRLWNFTEEEVSERVTLHICASTKKIFCRTYDIHDPKSSARPADWKYQSGLSSSWLSLECTVHINIHIPLSATSVSYTLEKNTKNGLTRWAKEIENGVYLINGQVKDEDCDLLEGQKKSSRGNTQATSHSFDVRVLTQLLLNSDHRSTATVQICSGSVNLKGAVKCRAYIHSSKPKVKDAVQAVKRDILNTVADRCEMLFEDLLLNEIPEKKDSEKEFHVLPYRVFVPLPGSTVMLCDYKFDDESAEEIRDHFMEMLDHTIQIEDLEIAEETNTACMSSSMNSQASLDNTDDEQPKQPIKTTMLLKIQQNIGVIAAFTVAVLAAGISFHYFSD

SEQ ID NO: 834650 - protein, 454 aa, Homo sapiens; identical to SEQ ID NO: 834649

SEQ ID NO: 834651 - protein, 454 aa, Homo sapiens; identical to SEQ ID NO: 834649

SEQ ID NO: 834652 - protein, 373 aa, Homo sapiens
MLPGGLLVLGVFIITTLELANDFQNALRRLMFAVEKSINRKRLWNFTEEEVSERVTLHICASTKKIFCRTYDIHDPKSSARPADWKYQSGLSSSWLSLECTVHINIHIPLSATSVSYTLEKNTKNGLTRWAKEIENGVYLINGQVKDEDCDLLEGQKKSSRGNTQATSHSFDVRVLTQLLLNSDHRSTATVQICSGSVNLKGAVKCRAYIHSSKPKVKDAVQAVKRDILNTVADRCEMLFEDLLLNEIPEKKDSEKEFHVLPYRVFVPLPGSTVMLCDYKFDDESAEEIRDHFMEMLDHTIQIEDLEIAEETNTACMSSSMNSQASLDNTDDEQPKQPIKTTMLLKIQQNIGVIAAFTVAVLAAGISFHYFSD

SEQ ID NO: 834653 - protein, 454 aa, Homo sapiens; identical to SEQ ID NO: 834649

SEQ ID NO: 834654 - protein, 373 aa, Homo sapiens; identical to SEQ ID NO: 834652

SEQ ID NO: 834655 - protein, 134 aa, Homo sapiens
MKIVVIVQAKVASPSLMEIKINSRQFSLSSYIKTLILFSVIGKSYDYGIDMWSVGCTLYELYTGKILFPGKTNNHMLKLAMDLKGKMPNKMIRKGVFKDQHFDQNLNFMYIEVDKVTERVSVLNAACNSYFIVN

SEQ ID NO: 834656 - protein, 121 aa, Homo sapiens
HFPYPPPSGSRRHRRRGVRKFKMAAAETQSLREQPEMEDANSEKSINEENGEVSEDQSQNKHSRHKKKKHKHRSKHKKHKHSSEEDKDKKHKHKHKHKIKKKPRGSFGAPGPIVFPPGGSR

SEQ ID NO: 834657 - protein, 1029 aa, Homo sapiens
HFPYPPPSGSRRHRRRGVRKFKMAAAETQSLREQPEMEDANSEKSINEENGEVSEDQSQNKHSRHKKKKHKHRSKHKKHKHSSEEDKDKKHKHKHKHKKHKRKEVIDASDKEGMSPAKRTKLDDLALLEDLEKQRALIKAELDNELMEGKVQSGMGLILQGYESGSEEEGEIHEKARNGNRSSTRSSSTKGKLELVDNKITTKKRSKSRSKERTRHRSDKKKSKGGIEIVKEKTTRSKSKERKKSKSPSKRSKSQDQARKSKSPTLRRRSQEKIGKARSPTDDKVKIEDKSKSKDRKKSPIINESRSRDRGKKSRSPVDLRGKSKDRRSRSKERKSKRSETDKEKKPIKSPSKDASSGKENRSPSRRPGRSPKRRSLSPKPRDKSRRSRSPLLNDRRSKQSKSPSRTLSPGRRAKSRSLERKRREPERRRLSSPRTRPRDDILSRRERSKDASPINRWSPTRRRSRSPIRRRSRSPLRRSRSPRRRSRSPRRRDRGRRSRSRLRRRSRSRGGRRRRSRSKVKEDKFKGSLSEGMKVEQESSSDDNLEDFDVEEEDEEALIEQRRIQRQAIVQKYKYLAEDSNMSVPSEPSSPQSSTRTRSPSPDDILERVAADVKEYERENVDTFEASVKAKHNLMTVEQNNGSSQKKLLAPDMFTESDDMFAAYFDSARLRAAGIGKDFKENPNLRDNWTDAEGYYRVNIGEVLDKRYNVYGYTGQGVFSNVVRARDNARANQEVAVKIIRNNELMQKTGLKELEFLKKLNDADPDDKFHCLRLFRHFYHKQHLCLVFEPLSMNLREVLKKYGKDVGLHIKAVRSYSQQLFLALKLLKRCNILHADIKPDNILVNESKTILKLCDFGSASHVADNDITPYLVSRFYRAPEIIIGKSYDYGIDMWSVGCTLYELYTGKILFPGKTNNHMLKLAMDLKGKMPNKMIRKGVFKDQHFDQNLNFMYIEVDKVTEREKVTVMSTINPTKDLLADLIGCQRLPEDQRKKVHQLKDLLDQILMLDPAKRISINQALQHAFIQEKI

SEQ ID NO: 834658 - protein, 1029 aa, Homo sapiens; identical to SEQ ID NO: 834657

SEQ ID NO: 834659 - protein, 1029 aa, Homo sapiens; identical to SEQ ID NO: 834657

SEQ ID NO: 834660 - protein, 1029 aa, Homo sapiens; identical to SEQ ID NO: 834657

SEQ ID NO: 834661 - protein, 1029 aa, Homo sapiens; identical to SEQ ID NO: 834657

SEQ ID NO: 834662 - protein, 1029 aa, Homo sapiens; identical to SEQ ID NO: 834657

SEQ ID NO: 834663 - protein, 1029 aa, Homo sapiens; identical to SEQ ID NO: 834657

SEQ ID NO: 834664 - protein, 1029 aa, Homo sapiens; identical to SEQ ID NO: 834657

SEQ ID NO: 834665 - protein, 163 aa, Homo sapiens
LIPRGSRESTPRAPEIIIGKSYDYGIDMWSVGCTLYELYTGKILFPGKTNNHMLKLAMDLKGKMPNKMIRKGVFKDQHFDQNLNFMYIEVDKVTEREKVTVMSTINPTKDLLADLIGCQRLPEDQRKKVHQLKDLLDQILMLDPAKRISINQALQHAFIQEKI

SEQ ID NO: 834666 - protein, 724 aa, Homo sapiens
HFPYPPPSGSRRHRRRGVRKFKMAAAETQSLREQPEMEDANSEKSINEENGEVSEDQSQNKHSRHKKKKHKHRSKHKKHKHSSEEDKDKKHKHKHKHKKHKRKEVIDASDKEGMSPAKRTKLDDLALLEDLEKQRALIKAELDNELMEGKVQSGMGLILQGYESGSEEEGEIHEKARNGNRSSTRSSSTKGKLELVDNKITTKKRSKSRSKERTRHRSDKKKSKGGIEIVKEKTTRSKSKERKKSKSPSKRSKSQDQARKSKSPTLRRRSQEKIGKARSPTDDKVKIEDKSKSKDRKKSPIINESRSRDRGKKSRSPVDLRGKSKDRRSRSKERKSKRSETDKEKKPIKSPSKDASSGKENRSPSRRPGRSPKRRSLSPKPRDKSRRSRSPLLNDRRSKQSKSPSRTLSPGRRAKSRSLERKRREPERRRLSSPRTRPRDDILSRRERSKDASPINRWSPTRRRSRSPIRRRSRSPLRRSRSPRRRSRSPRRRDRGRRSRSRLRRRSRSRGGRRRRSRSKVKEDKFKGSLSEGMKVEQESSSDDNLEDFDVEEEDEEALIEQRRIQRQAIVQKYKYLAEDSNMSVPSEPSSPQSSTRTRSPSPDDILERVAADVKEYERENVDTFEASVKAKHNLMTVEQNNGSSQKKLLAPDMFTESDDMFAAYFDSARLRAAGIGKDFKENPNLRDNWTDAEGYYRVNIGEVLDKRYNVYGCSCWSREDDSR

SEQ ID NO: 834667 - protein, 539 aa, Homo sapiens
MAAAETQSLREQPEMEDANSEKSINEENGEVSEDQSQNKHSRHKKKKHKHRSKHKKHKHSSEEDKDKKHKHKHKHKKHKRKEVIDASDKEGMSPAKRTKLDDLALLEDLEKQRALIKAELDNELMEGKVQSGMGLILQGYESGSEEEGEIHEKARNGNRSSTRSSSTKGKLELVDNKITTKKRSKSRSKERTRHRSDKKKSKGGIEIVKEKTTRSKSKERKKSKSPSKRSKSQDQARKSKSPTLRRRSQEKIGKARSPTDDKVKIEDKSKSKDRKKSPIINESRSRDRGKKSRSPVDLRGKSKDRRSRSKERKSKRSETDKEKKPIKSPSKDASSGKENRSPSRRPGRSPKRRSLSPKPRDKSRRSRSPLLNDRRSKQSKSPSRTLSPGRRAKSRSLERKRREPERRRLSSPRTRPRDDILSRRERSKDASPINRWSPTRRRSRSPIRRRSRSPLRRSRSPRRRSRSPRRRDRGRRSRSRLRRRSRSRGGRRRRSRSKVKEDKFKGSLSEGMKVVPVSVRLDDNVQYHDVEEADERSDG

SEQ ID NO: 834668 - protein, 374 aa, Homo sapiens
  misc_feature (358)..(358): Xaa can be any naturally occurring amino acid
  misc_feature (364)..(364): Xaa can be any naturally occurring amino acid
  misc_feature (371)..(371): Xaa can be any naturally occurring amino acid
HFPYPPPSGSRRHRRRGVRKFKMAAAETQSLREQPEMEDANSEKSINEENGEVSEDQSQNKHSRHKKKKHKHRSKHKKHKHSSEEDKDKKHKHKHKHKKHKRKEVIDASDKEGMSPAKRTKLDDLALLEDLEKQRALIKAELDNELMEGKVQSGMGLILQGYESGSEEEGEIHEKARNGNRSSTRSSSTKGKLELVDNKITTKKRSKSRSKERTRHRSDKKKSKGGIEIVKEKTTRSKSKERKKSKSPSKRSKSQDQARKSKSPTLRRRSQEKIGKARSPTDDKVKIEDKSKSKDRKKSPIINESRSRDRGKKSRSPVDLRGKSKDRRSRSKERKSKRSETDKEKKPINSSKISLEEXAPQNCXAKKIAQXCIR

SEQ ID NO: 834669 - protein, 1029 aa, Homo sapiens; identical to SEQ ID NO: 834657

SEQ ID NO: 834670 - protein, 1029 aa, Homo sapiens; identical to SEQ ID NO: 834657

SEQ ID NO: 834671 - protein, 1029 aa, Homo sapiens; identical to SEQ ID NO: 834657

SEQ ID NO: 834672 - protein, 1029 aa, Homo sapiens; identical to SEQ ID NO: 834657

SEQ ID NO: 834673 - protein, 1015 aa, Homo sapiens
TRGSTHASDGRAGTQSLREQPEMEDANSEKSINEENGEVSEDQSQNKHSRHKKKKHKHRSKHKKHKHSSEEDKDKKHKHKHKHKKHKRKEVIDASDKEGMSPAKRTKLDDLALLEDLEKQRALIKAELDNELMEGKVQSGMGLILQGYESGSEEEGEIHEKARNGNRSSTRSSSTKGKLELVDNKITTKKRSKSRSKERTRHRSDKKKSKGGIEIVKEKTTRSKSKERKKSKSPSKRSKSQDQARKSKSPTLRRRSQEKIGKARSPTDDKVKIEDKSKSKDRKKSPIINESRSRDRGKKSRSPVDLRGKSKDRRSRSKERKSKRSETDKEKKPIKSPSKDASSGKENRSPSRRPGRSPKRRSLSPKPRDKSRRSRSPLLNDRRSKQSKSPSRTLSPGRRAKSRSLERKRREPERRRLSSPRTRPRDDILSRRERSKDASPINRWSPTRRRSRSPIRRRSRSPLRRSRSPRRRSRSPRRRDRGRRSRSRLRRRSRSRGGRRRRSRSKVKEDKFKGSLSEGMKVEQESSSDDNLEDFDVEEEDEEALIEQRRIQRQAIVQKYKYLAEDSNMSVPSEPSSPQSSTRTRSPSPDDILERVAADVKEYERENVDTFEASVKAKHNLMTVEQNNGSSQKKLLAPDMFTESDDMFAAYFDSARLRAAGIGKDFKENPNLRDNWTDAEGYYRVNIGEVLDKRYNVYGYTGQGVFSNVVRARDNARANQEVAVKIIRNNELMQKTGLKELEFLKKLNDADPDDKFHCLRLFRHFYHKQHLCLVFEPLSMNLREVLKKYGKDVGLHIKAVRSYSQQLFLALKLLKRCNILHADIKPDNILVNESKTILKLCDFGSASHVADNDITPYLVSRFYRAPEIIIGKSYDYGIDMWSVGCTLYELYTGKILFPGKTNNHMLKLAMDLKGKMPNKMIRKGVFKDQHFDQNLNFMYIEVDKVTEREKVTVMSTINPTKDLLADLIGCQRLPEDQRKKVHQLKDLLDQILMLDPAKRISINQALQHAFIQEKI

SEQ ID NO: 834674 - protein, 1029 aa, Homo sapiens; identical to SEQ ID NO: 834657

SEQ ID NO: 834675 - protein, 1029 aa, Homo sapiens; identical to SEQ ID NO: 834657

SEQ ID NO: 834676 - protein, 1029 aa, Homo sapiens; identical to SEQ ID NO: 834657

SEQ ID NO: 834677 - protein, 977 aa, Homo sapiens
HFPYPPPSGSRRHRRRGVRKFKMAAAETQSLREQPEMEDANSEKSINEENGEVSEDQSQNKHSRHKKKKHKHRSKHKKHKHSSEEDKDKKHKHKHKHKKHKRKEVIDASDKEGMSPAKRTKLDDLALLEDLEKQRALIKAELDNELMEGKVQSGMGLILQGYESGSEEEGEIHEKARNGNRSSTRSSSTKGKLELVDNKITTKKRSKSRSKERTRHRSDKKKSKGGIEIVKEKTTRSKSKERKKSKSPSKRSKSQDQARKSKSPTLRRRSQEKIGKARSPTDDKVKIEDKSKSKDRKKSPIINESRSRDRGKKSRSPVDLRGKSKDRRSRSKERKSKRSETDKEKKPIKSPSKDASSGKENRSPSRRPGRSPKRRSLSPKPRDKSRRSRSPLLNDRRSKQSKSPSRTLSPGRRAKSRSLERKRREPERRRLSSPRTRPRDDILSRRERSKDASPINRWSPTRRRSRSPIRRRSRSPLRRSRSPRRRSRSPRRRDRGRRSRSRLRRRSRSRGGRRRRSRSKVKEDKFKGSLSEGMKVEQESSSDDNLEDFDVEEEDEEALIEQRRIQRQAIVQKYKYLAEDSNMSVPSEPSSPQSSTRTRSPSPDDILERVAADVKEYERENVDTFEASVKAKHNLMTVEQNNGSSQKKLLAPDMFTESDDMFAAYFDSARLRAAGIGKDFKENPNLRDNWTDAEGYYRVNIGEVLDKRYNVYGYTGQGVFSNVVRARDNARANQEVAVKIIRNNELMQKTGLKELEFLKKLNDADPDDKFHCLRLFRHFYHKQHLCLVFEPLSMNLREVLKKYGKDVGLHIKAVRSYSQQLFLALKLLKRCNILHADIKPDNILVNESKTILKLCDFGSASHVADNDITPYLVSRFYRAPEIIIGKSYDYGIDMWSVGCTLYELYTGKILFPGKTNNHMLKLAMDLKGKMPNKMIRKGVFKDQHFDQNLNFMYIEVDKVTERVSVLNAACNSYFIVN

SEQ ID NO: 834678 - protein, 656 aa, Homo sapiens
HFPYPPPSGSRRHRRRGVRKFKMAAAETQSLREQPEMEDANSEKSINEENGEVSEDQSQNKHSRHKKKKHKHRSKHKKHKHSSEEDKDKKHKHKHKHKKHKRKEVIDASDKEGMSPAKRTKLDDLALLEDLEKQRALIKAELDNELMEGKVQSGMGLILQGYESGSEEEGEIHEKARNGNRSSTRSSSTKGKLELVDNKITTKKRSKSRSKERTRHRSDKKKSKGGIEIVKEKTTRSKSKERKKSKSPSKRSKSQDQARKSKSPTLRRRSQEKIGKARSPTDDKVKIEDKSKSKDRKKSPIINESRSRDRGKKSRSPVDLRGKSKDRRSRSKERKSKRSETDKEKKPIKSPSKDASSGKENRSPSRRPGRSPKRRSLSPKPRDKSRRSRSPLLNDRRSKQSKSPSRTLSPGRRAKSRSLERKRREPERRRLSSPRTRPRDDILSRRERSKDASPINRWSPTRRRSRSPIRRRSRSPLRRSRSPRRRSRSPRRRDRGRRSRSRLRRRSRSRGGRRRRSRSKVKEDKFKGSLSEGMKVEQESSSDDNLEDFDVEEEDEEALIEQRRIQRQAIVQKYKYLAEDSNMSVPSEPSSPQSSTRTRSPSPDDILERVAADVKEYERENVDTFEASVKAKHNLMTVEQNNGERVLSWRRFSLNC

SEQ ID NO: 834679 - protein, 193 aa, Homo sapiens
MGKQNSKLRPEVLQDLRENTEFTDHELQEWYKGFLKDCPTGHLTVDEFKKIYANFFPYGDASKFAEHVFRTFDTNGDGTIDFREFIIALSVTSRGKLEQKLKWAFSMYDLDGNGYISRSEMLEIVQAIYKMVSSVMKMPEDESTPEKRTDKIFRQMDTNNDGKLSLEEFIRGAKSDPSIVRLLQCDPSSASQF

SEQ ID NO: 834680 - protein, 193 aa, Homo sapiens; identical to SEQ ID NO: 834679

SEQ ID NO: 834681 - protein, 193 aa, Homo sapiens; identical to SEQ ID NO: 834679

SEQ ID NO: 834682 - protein, 193 aa, Homo sapiens; identical to SEQ ID NO: 834679

SEQ ID NO: 834683 - protein, 193 aa, Homo sapiens; identical to SEQ ID NO: 834679

SEQ ID NO: 834684 - protein, 193 aa, Homo sapiens; identical to SEQ ID NO: 834679

SEQ ID NO: 834685 - protein, 158 aa, Homo sapiens
GDLEDPISGQDEFKKIYANFFPYGDASKFAEHVFRTFDTNGDGTIDFREFIIALSVTSRGKLEQKLKWAFSMYDLDGNGYISRSEMLEIVQAIYKMVSSVMKMPEDESTPEKRTDKIFRQMDTNNDGKLSLEEFIRGAKSDPSIVRLLQCDPSSASQF

SEQ ID NO: 834686 - protein, 109 aa, Homo sapiens
MGKQNSKLRPEVLQDLRENTEFTDHELQEWYKGFLKDCPTGHLTVDEFKKIYANFFPYGDASKFAEHVFRTFDTNGDGTIDFREFIIALSVTSRGKLEQKPVGFGCRLA

SEQ ID NO: 834687 - protein, 193 aa, Homo sapiens; identical to SEQ ID NO: 834679

SEQ ID NO: 834688 - protein, 193 aa, Homo sapiens; identical to SEQ ID NO: 834679

SEQ ID NO: 834689 - protein, 193 aa, Homo sapiens; identical to SEQ ID NO: 834679

SEQ ID NO: 834690 - protein, 193 aa, Homo sapiens; identical to SEQ ID NO: 834679

SEQ ID NO: 834691 - protein, 193 aa, Homo sapiens; identical to SEQ ID NO: 834679

SEQ ID NO: 834692 - protein, 193 aa, Homo sapiens; identical to SEQ ID NO: 834679

SEQ ID NO: 834693 - protein, 143 aa, Homo sapiens
MGKQNSKLRPEVLQDLRENTEFTDHELQEWYKGFLKDCPTGHLTVDEFKKIYANFFPYGDASKFAEHVFRTFDTNGDGTIDFREFIIALSVTSRGKLEQKLKWAFSMYDLDGNGYISRSEMLEIVQASTNGVSVMRCRDESPG

SEQ ID NO: 834694 - protein, 527 aa, Homo sapiens
AAHCGSSSSYPAPRASPEKTRAESTMSGGPMGGRPGGRGAPAVQQNIPSTLLQDHENQRLFEMLGRKCLTLATAVVQLYLALPPGAEHWTKEHCGAVCFVKDNPQKSYFIRLYGLQAGRLLWEQELYSQLVYSTPTPFFHTFAGDDCQAGLNFADEDEAQAFRALVQEKIQKRNQRQSGDRRQLPPPPTPANEERRGGLPPLPLHPGGDQGGPPVGPLSLGLATVDIQNPDITSSRYRGLPAPGPSPADKKRSGKKKISKADIGAPSGFKHVSHVGWDPQNGFDVNNLDPDLRSLFSRAGISEAQLTDAETSKLIYDFIEDQGGLEAVRQEMRRQEPLPPPPPPSRGGNQLPRPPIVGGNKGRSGPLPPVPLGIAPPPPTPRGPPPPGRGGPPPPPPPATGRSGPLPPPPPGAGGPPMPPPPPPPPPPPSSGNGPAPPPLPPALVPAGGLAPGGGRGALLDQIRQGIQLNKTPGAPESSALQPPPQSSEGLVGALMHVMQKRSRAIHSSDEGEDQAGDEDEDDEWDD

SEQ ID NO: 834695 - protein, 544 aa, Homo sapiens
AAHCGSSSSYPAPRASPEKTRAESTMSGGPMGGRPGGRGAPAVQQNIPSTLLQDHENQRLFEMLGRKCLTLATAVVQLYLALPPGAEHWTKEHCGAVCFVKDNPQKSYFIRLYGLQAGRLLWEQELYSQLVYSTPTPFFHTFAGDDCQAGLNFADEDEAQAFRALVQEKIQKRNQRQSGDRRQLPPPPTPANEERRGGLPPLPLHPGGDQGGPPVGPLSLGLATVDIQNPDITSSRYRGLPAPGPSPADKKRSGKKKISKADIGAPSGFKHVSHVGWDPQNGFDVNNLDPDLRSLFSRAGISEAQLTDAETSKLIYDFIEDQGGLEAVRQEMRRQEPLPPPPPPSRGGNQLPRPPIVGGNKGRSGPLPPVPLGIAPPPPTPRGPPPPGRGGPPPPPPPATGRSGPLPPPPPGAGGPPMPPPPPPPPPPPSSGNGPAPPPLPPALVPAGGLAPGGGRGALLDQIRQGIQLNKTPGAPESSALQPPPQSSEGLVGALMHVMQKRSRAIHSSGELILPGPQTWLPGLALASKQSQQSPPIVTSAPSV

SEQ ID NO: 834696 - protein, 527 aa, Homo sapiens; identical to SEQ ID NO: 834694

SEQ ID NO: 834697 - protein, 504 aa, Homo sapiens
AAHCGSSSSYPAPRASPEKTRAESTMSGGPMGGRPGGRGAPAVQQNIPSTLLQDHENQRLFEMLGRKCLTLATAVVQLYLALPPGAEHWTKEHCGAVCFVKDNPQKSYFIRLYGLQAGRLLWEQELYSQLVYSTPTPFFRALVQEKIQKRNQRQSGDRRQLPPPPTPANEERRGGLPPLPLHPGGDQGGPPVGPLSLGLATVDIQNPDITSSRYRGLPAPGPSPADKKRSGKKKISKADIGAPSGFKHVSHVGWDPQNGFDVNNLDPDLRSLFSRAGISEAQLTDAETSKLIYDFIEDQGGLEAVRQEMRRQEPLPPPPPPSRGGNQLPRPPIVGGNKGRSGPLPPVPLGIAPPPPTPRGPPPPGRGGPPPPPPPATGRSGPLPPPPPGAGGPPMPPPPPPPPPPPSSGNGPAPPPLPPALVPAGGLAPGGGRGALLDQIRQGIQLNKTPGAPESSALQPPPQSSEGLVGALMHVMQKRSRAIHSSDEGEDQAGDEDEDDEWDD

SEQ ID NO: 834698 - protein, 226 aa, Homo sapiens
AAHCGSSSSYPAPRASPEKTRAESTMSGGPMGGRPGGRGAPAVQQNIPSTLLQDHENQRLFEMLGRKCLTLATAVVQLYLALPPGAEHWTKEHCGAVCFVKDNPQKSYFIRLYGLQAGRLLWEQELYSQLVYSTPTPFFHTFAGDDCQAGLNFADEDEAQAFRALVQEKIQKRNQRQSGDRRQLPPPPTPANEERRGGLPPLPLHPGGDQGGMSATWGGTPRMDLT

SEQ ID NO: 834699 - protein, 258 aa, Homo sapiens
AAHCGSSSSYPAPRASPEKTRAESTMSGGPMGGRPGGRGAPAVQQNIPSTLLQDHENQRLFEMLGRKCLTLATAVVQLYLALPPGAEHWTKEHCGAVCFVKDNPQKSYFIRLYGLQAGRLLWEQELYSQLVYSTPTPFFHTFAGDDCQAGLNFADEDEAQAFRALVQEKIQKRNQRQSGVATVDIQNPDITSSRYRGLPAPGPSPADKKRSGKKKISKADIGAPSGFKHVSHVGWDPQNGFDVSNFRVSWTPLNFHPP

SEQ ID NO: 834700 - protein, 527 aa, Homo sapiens; identical to SEQ ID NO: 834694

SEQ ID NO: 834701 - protein, 148 aa, Homo sapiens [sequence omitted]

SEQ ID NO: 834702 - protein, 1827 aa, Homo sapiens
MADERKDEAKAPHWTSAPLTEASAHSHPPEIKDQGGAGEGLVRSANGFPYREDEEGAFGEHGSQGTYSNTKENGINGELTSADRETAEEVSARIVQVVTAEAVAVLKGEQEKEAQHKDQTAALPLAAEETANLPPSPPPSPASEQTVTVEEDLLTASKMEFHDQQELTPSTAEPSDQKEKESEKQSKPGEDLKHAALVSQPETTKTYPDKKDMQGTEEEKAPLALFGHTLVASLEDMKQKTEPSLVVPGIDLPKEPPTPKEQKDWFIEMPTEAKKDEWGLVAPISPGPLTPMREKDVFDDIPKWEGKQFDSPMPSPFQGGSFTLPLDVMKNEIVTETSPFAPAFLQPDDKKSLQQTSGPATAKDSFKIEEPHEAKPDKMAEAPPSEAMTLPKDAHIPVVEEHVMGKVLEEEKEAINQETVQQRDTFTPSGQEPILTEKETELKLEEKTTISDKEAVPKESKPPKPADEEIGIIQTSTEHTFSEQKDQEPTTDMLKQDSFPVSLEQAVTDSAMTSKTLEKAMTEPSALIEKSSIQELFEMRVDDKDKIEGVGAATSAELDMPFYEDKSGMSKYFETSALKEEATKSIEPGSDYYELSDTRESVHESIDTMSPMHKNGDKEFQTGKESQPSPPAQEAGYSTLAQSYPSDLPEEPSSPQERMFTIDPKVYGEKRDLHSKNKDDLTLSRSLGLGGRSAIEQRSMSINLPMSCLDSIALGFNFGRGHDLSPLASDILTNTSGSMDEGDDYLPATTPALEKAPCFPVESKEEEQIEKVKATGEESTQAEISCESPFLAKDFYKNGTVMAPDLPEMLDLAGTRSRLASVSADAEVARRKSVPSETVVEDSRTGLPPVTDENHVIVKTDSQLEDLGYCVFNKYTVPLPSPVQDSENLSGESGTFYEGTDDKVRRDLATDLSLIEVKLAAAGRVKDEFSVDKEASAHISGDKSGLSKEFDQEKKANDRLDTVLEKSEEHADSKEHAKKTEEAGDEIETFGLGVTYEQALAKDLSIPTDASSEKAEKGLSSVPEIAEVEPSKKVEQGLDFAVQGQLDVKISDFGQMASGLNIDDRRATELKLEATQDMTPSSKAPQEADAFMGVESGHMKEGTKVSETEVKQKVAKPDLVHQEAVDKEESYESSGEHESLTMESLKADEGKKETSPESSLIQDEIAVKLSVEIPCPPAVSEADLATDERADVQMEFIQGPKEESKETPDISITPSDVAEPLHETIVSEPAEIQSEEEEIEAQGEYDKLLFRSDTLQITDLGVSGAREEFVETCPSEHKGVIESVVTIEDDFITVVQTTTDEGESGSHSVRFAALEQPEVERRPSPHDEEEFEVEEAAEAQAEPKDGSPEAPASPEREEVALSEYKTETYDDYKDETTIDDSIMDADSLWVDTQDDDRSIMTEQLETIPKEEKAEKEARRSSLEKHRKEKPFKTGRGRISTPERKVAKKEPSTVSRDEVRRKKAVYKKAELAKKTEVQAHSPSRKFILKPAIKYTRPTHLSCVKRKTTAAGGESALAPSVFKQAKDKVSDGVTKSPEKRSSLPRPSSILPPRRGVSGDRDENSFSLNSSISSSARRTTRSEPIRRAGKSGTSTPTTPGSTAITPGTPPSYSSRTPGTPGTPSYPRTPHTPGTPKSAILVPSEKKVAIIRTPPKSPATPKQLRLINQPLPDLKNVKSKIGSTDNIKYQPKGGQVQIVTKKIDLSHVTSKCGSLKNIRHRPGGGRVKIESVKLDFKEKAQAKVGSLDNAHHVPGGGNVKIDSQKLNFREHAKARVDHGAEIITQSPGRSSVASPRRLSNVSSSGSINLLESPQLATLAEDVTAALAKQGL

SEQ ID NO: 834703 - protein, 1827 aa, Homo sapiens; identical to SEQ ID NO: 834702

SEQ ID NO: 834704 - protein, 1827 aa, Homo sapiens; identical to SEQ ID NO: 834702

SEQ ID NO: 834705 - protein, 1858 aa, Homo sapiens
MADERKDEAKAPHWTSAPLTEASAHSHPPEIKDQGGAGEGLVRSANGFPYREDEEGAFGEHGSQGTYSNTKENGINGELTSADRETAEEVSARIVQVVTAEAVAVLKGEQEKEAQHKDQTAALPLAAEETANLPPSPPPSPASEQTVTVEEDLLTASKMEFHDQQELTPSTAEPSDQKEKESEKQSKPGEDLKHAALVSQPETTKTYPDKKDMQGTEEEKAPLALFGHTLVASLEDMKQKTEPSLVVPGIDLPKEPPTPKEQKDWFIEMPTEAKKDEWGLVAPISPGPLTPMREKDVFDDIPKWEGKQFDSPMPSPFQGGSFTLPLDVMKNEIVTETSPFAPAFLQPDDKKSLQQTSGPATAKDSFKIEEPHEAKPDKMAEAPPSEAMTLPKDAHIPVVEEHVMGKVLEEEKEAINQETVQQRDTFTPSGQEPILTEKETELKLEEKTTISDKEAVPKESKPPKPADEEIGIIQTSTEHTFSEQKDQEPTTDMLKQDSFPVSLEQAVTDSAMTSKTLEKAMTEPSALIEKSSIQELFEMRVDDKDKIEGVGAATSAELDMPFYEDKSGMSKYFETSALKEEATKSIEPGSDYYELSDTRESVHESIDTMSPMHKNGDKEFQTGKESQPSPPAQEAGYSTLAQSYPSDLPEEPSSPQERMFTIDPKVYGEKRDLHSKNKDDLTLSRSLGLGGRSAIEQRSMSINLPMSCLDSIALGFNFGRGHDLSPLASDILTNTSGSMDEGDDYLPATTPALEKAPCFPVESKEEEQIEKVKATGEESTQAEISCESPFLAKDFYKNGTVMAPDLPEMLDLAGTRSRLASVSADAEVARRKSVPSETVVEDSRTGLPPVTDENHVIVKTDSQLEDLGYCVFNKYTVPLPSPVQDSENLSGESGTFYEGTDDKVRRDLATDLSLIEVKLAAAGRVKDEFSVDKEASAHISGDKSGLSKEFDQEKKANDRLDTVLEKSEEHADSKEHAKKTEEAGDEIETFGLGVTYEQALAKDLSIPTDASSEKAEKGLSSVPEIAEVEPSKKVEQGLDFAVQGQLDVKISDFGQMASGLNIDDRRATELKLEATQDMTPSSKAPQEADAFMGVESGHMKEGTKVSETEVKQKVAKPDLVHQEAVDKEESYESSGEHESLTMESLKADEGKKETSPESSLIQDEIAVKLSVEIPCPPAVSEADLATDERADVQMEFIQGPKEESKETPDISITPSDVAEPLHETIVSEPAEIQSEEEEIEAQGEYDKLLFRSDTLQITDLGVSGAREEFVETCPSEHKGVIESVVTIEDDFITVVQTTTDEGESGSHSVRFAALEQPEVERRPSPHDEEEFEVEEAAEAQAEPKDGSPEAPASPEREEVALSEYKTETYDDYKDETTIDDSIMDADSLWVDTQDDDRSIMTEQLETIPKEEKAEKEARRSSLEKHRKEKPFKTGRGRISTPERKVAKKEPSTVSRDEVRRKKAVYKKAELAKKTEVQAHSPSRKFILKPAIKYTRPTHLSCVKRKTTAAGGESALAPSVFKQAKDKVSDGVTKSPEKRSSLPRPSSILPPRRGVSGDRDENSFSLNSSISSSARRTTRSEPIRRAGKSGTSTPTTPGSTAITPGTPPSYSSRTPGTPGTPSYPRTPHTPGTPKSAILVPSEKKVAIIRTPPKSPATPKQLRLINQPLPDLKNVKSKIGSTDNIKYQPKGGQVRILNKKIDFSKVQSRCGSKDNIKHSAGGGNVQIVTKKIDLSHVTSKCGSLKNIRHRPGGGRVKIESVKLDFKEKAQAKVGSLDNAHHVPGGGNVKIDSQKLNFREHAKARVDHGAEIITQSPGRSSVASPRRLSNVSSSGSINLLESPQLATLAEDVTAALAKQGL

SEQ ID NO: 834706 - protein, 1827 aa, Homo sapiens; identical to SEQ ID NO: 834702

SEQ ID NO: 834707 - protein, 1940 aa, Homo sapiens
MADERKDEAKAPHWTSAPLTEASAHSHPPEIKDQGGAGEGLVRSANGFPYREDEEGAFGEHGSQGTYSNTKENGINGELTSADRETAEEVSARIVQVVTAEAVAVLKGEQEKEAQHKDQTAALPLAAEETANLPPSPPPSPASEQTVTVEEEEETLESRMAEEEKPAALPEKECGAAKSSDQPKGLSKGQMESSAEAQIVPEESAPAGAPHEKSVKEVKEVSPEVKTPSSAGEDLLTASKMEFHDQQELTPSTAEPSDQKEKESEKQSKPGEDLKHAALVSQPETTKTYPDKKDMQGTEEEKAPLALFGHTLVASLEDMKQKTEPSLVVPGIDLPKEPPTPKEQKDWFIEMPTEAKKDEWGLVAPISPGPLTPMREKDVFDDIPKWEGKQFDSPMPSPFQGGSFTLPLDVMKNEIVTETSPFAPAFLQPDDKKSLQQTSGPATAKDSFKIEEPHEAKPDKMAEAPPSEAMTLPKDAHIPVVEEHVMGKVLEEEKEAINQETVQQRDTFTPSGQEPILTEKETELKLEEKTTISDKEAVPKESKPPKPADEEIGIIQTSTEHTFSEQKDQEPTTDMLKQDSFPVSLEQAVTDSAMTSKTLEKAMTEPSALIEKSSIQELFEMRVDDKDKIEGVGAATSAELDMPFYEDKSGMSKYFETSALKEEATKSIEPGSDYYELSDTRESVHESIDTMSPMHKNGDKEFQTGKESQPSPPAQEAGYSTLAQSYPSDLPEEPSSPQERMFTIDPKVYGEKRDLHSKNKDDLTLSRSLGLGGRSAIEQRSMSINLPMSCLDSIALGFNFGRGHDLSPLASDILTNTSGSMDEGDDYLPATTPALEKAPCFPVESKEEEQIEKVKATGEESTQAEISCESPFLAKDFYKNGTVMAPDLPEMLDLAGTRSRLASVSADAEVARRKSVPSETVVEDSRTGLPPVTDENHVIVKTDSQLEDLGYCVFNKYTVPLPSPVQDSENLSGESGTFYEGTDDKVRRDLATDLSLIEVKLAAAGRVKDEFSVDKEASAHISGDKSGLSKEFDQEKKANDRLDTVLEKSEEHADSKEHAKKTEEAGDEIETFGLGVTYEQALAKDLSIPTDASSEKAEKGLSSVPEIAEVEPSKKVEQGLDFAVQGQLDVKISDFGQMASGLNIDDRRATELKLEATQDMTPSSKAPQEADAFMGVESGHMKEGTKVSETEVKQKVAKPDLVHQEAVDKEESYESSGEHESLTMESLKADEGKKETSPESSLIQDEIAVKLSVEIPCPPAVSEADLATDERADVQMEFIQGPKEESKETPDISITPSDVAEPLHETIVSEPAEIQSEEEEIEAQGEYDKLLFRSDTLQITDLGVSGAREEFVETCPSEHKGVIESVVTIEDDFITVVQTTTDEGESGSHSVRFAALEQPEVERRPSPHDEEEFEVEEAAEAQAEPKDGSPEAPASPEREEVALSEYKTETYDDYKDETTIDDSIMDADSLWVDTQDDDRSIMTEQLETIPKEEKAEKEARRSSLEKHRKEKPFKTGRGRISTPERKVAKKEPSTVSRDEVRRKKAVYKKAELAKKTEVQAHSPSRKFILKPAIKYTRPTHLSCVKRKTTAAGGESALAPSVFKQAKDKVSDGVTKSPEKRSSLPRPSSILPPRRGVSGDRDENSFSLNSSISSSARRTTRSEPIRRAGKSGTSTPTTPGSTAITPGTPPSYSSRTPGTPGTPSYPRTPHTPGTPKSAILVPSEKKVAIIRTPPKSPATPKQLRLINQPLPDLKNVKSKIGSTDNIKYQPKGGQVRILNKKIDFSKVQSRCGSKDNIKHSAGGGNVQIVTKKIDLSHVTSKCGSLKNIRHRPGGGRVKIESVKLDFKEKAQAKVGSLDNAHHVPGGGNVKIDSQKLNFREHAKARVDHGAEIITQSPGRSSVASPRRLSNVSSSGSINLLESPQLATLAEDVTAALAKQGL

SEQ ID NO: 834708 - protein, 1700 aa, Homo sapiens
MEFHDQQELTPSTAEPSDQKEKESEKQSKPGEDLKHAALVSQPETTKTYPDKKDMQGTEEEKAPLALFGHTLVASLEDMKQKTEPSLVVPGIDLPKEPPTPKEQKDWFIEMPTEAKKDEWGLVAPISPGPLTPMREKDVFDDIPKWEGKQFDSPMPSPFQGGSFTLPLDVMKNEIVTETSPFAPAFLQPDDKKSLQQTSGPATAKDSFKIEEPHEAKPDKMAEAPPSEAMTLPKDAHIPVVEEHVMGKVLEEEKEAINQETVQQRDTFTPSGQEPILTEKETELKLEEKTTISDKEAVPKESKPPKPADEEIGIIQTSTEHTFSEQKDQEPTTDMLKQDSFPVSLEQAVTDSAMTSKTLEKAMTEPSALIEKSSIQELFEMRVDDKDKIEGVGAATSAELDMPFYEDKSGMSKYFETSALKEEATKSIEPGSDYYELSDTRESVHESIDTMSPMHKNGDKEFQTGKESQPSPPAQEAGYSTLAQSYPSDLPEEPSSPQERMFTIDPKVYGEKRDLHSKNKDDLTLSRSLGLGGRSAIEQRSMSINLPMSCLDSIALGFNFGRGHDLSPLASDILTNTSGSMDEGDDYLPATTPALEKAPCFPVESKEEEQIEKVKATGEESTQAEISCESPFLAKDFYKNGTVMAPDLPEMLDLAGTRSRLASVSADAEVARRKSVPSETVVEDSRTGLPPVTDENHVIVKTDSQLEDLGYCVFNKYTVPLPSPVQDSENLSGESGTFYEGTDDKVRRDLATDLSLIEVKLAAAGRVKDEFSVDKEASAHISGDKSGLSKEFDQEKKANDRLDTVLEKSEEHADSKEHAKKTEEAGDEIETFGLGVTYEQALAKDLSIPTDASSEKAEKGLSSVPEIAEVEPSKKVEQGLDFAVQGQLDVKISDFGQMASGLNIDDRRATELKLEATQDMTPSSKAPQEADAFMGVESGHMKEGTKVSETEVKQKVAKPDLVHQEAVDKEESYESSGEHESLTMESLKADEGKKETSPESSLIQDEIAVKLSVEIPCPPAVSEADLATDERADVQMEFIQGPKEESKETPDISITPSDVAEPLHETIVSEPAEIQSEEEEIEAQGEYDKLLFRSDTLQITDLGVSGAREEFVETCPSEHKGVIESVVTIEDDFITVVQTTTDEGESGSHSVRFAALEQPEVERRPSPHDEEEFEVEEAAEAQAEPKDGSPEAPASPEREEVALSEYKTETYDDYKDETTIDDSIMDADSLWVDTQDDDRSIMTEQLETIPKEEKAEKEARRSSLEKHRKEKPFKTGRGRISTPERKVAKKEPSTVSRDEVRRKKAVYKKAELAKKTEVQAHSPSRKFILKPAIKYTRPTHLSCVKRKTTAAGGESALAPSVFKQAKDKVSDGVTKSPEKRSSLPRPSSILPPRRGVSGDRDENSFSLNSSISSSARRTTRSEPIRRAGKSGTSTPTTPGSTAITPGTPPSYSSRTPGTPGTPSYPRTPHTPGTPKSAILVPSEKKVAIIRTPPKSPATPKQLRLINQPLPDLKNVKSKIGSTDNIKYQPKGGQVRILNKKIDFSKVQSRCGSKDNIKHSAGGGNVQIVTKKIDLSHVTSKCGSLKNIRHRPGGGRVKIESVKLDFKEKAQAKVGSLDNAHHVPGGGNVKIDSQKLNFREHAKARVDHGAEIITQSPGRSSVASPRRLSNVSSSGSINLLESPQLATLAEDVTAALAKQGL

SEQ ID NO: 834709 - protein, 471 aa, Homo sapiens
MADERKDEAKAPHWTSAPLTEASAHSHPPEIKDQGGAGEGLVRSANGFPYREDEEGAFGEHGSQGTYSNTKENGINGELTSADRETAEEVSARIVQVVTAEAVAVLKGEQEKEAQHKDQTAALPLAAEETANLPPSPPPSPASEQTVTVEEAAGGESALAPSVFKQAKDKVSDGVTKSPEKRSSLPRPSSILPPRRGVSGDRDENSFSLNSSISSSARRTTRSEPIRRAGKSGTSTPTTPGSTAITPGTPPSYSSRTPGTPGTPSYPRTPHTPGTPKSAILVPSEKKVAIIRTPPKSPATPKQLRLINQPLPDLKNVKSKIGSTDNIKYQPKGGQVQIVTKKIDLSHVTSKCGSLKNIRHRPGGGRVKIESVKLDFKEKAQAKVGSLDNAHHVPGGGNVKIDSQKLNFREHAKARVDHGAEIITQSPGRSSVASPRRLSNVSSSGSINLLESPQLATLAEDVTAALAKQGL

SEQ ID NO: 834710 - protein, 502 aa, Homo sapiens
MADERKDEAKAPHWTSAPLTEASAHSHPPEIKDQGGAGEGLVRSANGFPYREDEEGAFGEHGSQGTYSNTKENGINGELTSADRETAEEVSARIVQVVTAEAVAVLKGEQEKEAQHKDQTAALPLAAEETANLPPSPPPSPASEQTVTVEEAAGGESALAPSVFKQAKDKVSDGVTKSPEKRSSLPRPSSILPPRRGVSGDRDENSFSLNSSISSSARRTTRSEPIRRAGKSGTSTPTTPGSTAITPGTPPSYSSRTPGTPGTPSYPRTPHTPGTPKSAILVPSEKKVAIIRTPPKSPATPKQLRLINQPLPDLKNVKSKIGSTDNIKYQPKGGQVRILNKKIDFSKVQSRCGSKDNIKHSAGGGNVQIVTKKIDLSHVTSKCGSLKNIRHRPGGGRVKIESVKLDFKEKAQAKVGSLDNAHHVPGGGNVKIDSQKLNFREHAKARVDHGAEIITQSPGRSSVASPRRLSNVSSSGSINLLESPQLATLAEDVTAALAKQGL

SEQ ID NO: 834711 - protein, 111 aa, Homo sapiens
MRIPSLSTVLSLLQHGGPPGQSQFAEQGRVVPQHPLPLGLLPSLLAPHQVILHAHQALLEPLAIPGPLTHQEPPSLPSWCRVRRRSPSYVLLQNLLRLPSSFGLLTNHCQT

SEQ ID NO: 834712 - protein, 1799 aa, Homo sapiens
MADERKDEAKAPHWTSAPLTEASAHSHPPEIKDQGGAGEGLVRSANGFPYREDEEGAFGEHGSQGTYSNTKENGINGELTSADRETAEEVSARIVQVVTAEAVAVLKGEQEKEAQHKDQTAALPLAAEETANLPPSPPPSPASEQTVTVEEDLLTASKMEFHDQQELTPSTAEPSDQKEKESEKQSKPGEDLKHAALVSQPETTKTYPDKKDMQGTEEEKAPLALFGHTLVASLEDMKQKTEPSLVVPGIDLPKEPPTPKEQKDWFIEMPTEAKKDEWGLVAPISPGPLTPMREKDVFDDIPKWEGKQFDSPMPSPFQGGSFTLPLDVMKNEIVTETSPFAPAFLQPDDKKSLQQTSGPATAKDSFKIEEPHEAKPDKMAEAPPSEAMTLPKDAHIPVVEEHVMGKVLEEEKEAINQETVQQRDTFTPSGQEPILTEKETELKLEEKTTISDKEAVPKESKPPKPADEEIGIIQTSTEHTFSEQKDQEPTTDMLKQDSFPVSLEQAVTDSAMTSKTLEKAMTEPSALIEKSSIQELFEMRVDDKDKIEGVGAATSAELDMPFYEDKSGMSKYFETSALKEEATKSIEPGSDYYELSDTRESVHESIDTMSPMHKNGDKEFQTGKESQPSPPAQEAGYSTLAQSYPSDLPEEPSSPQERMFTIDPKVYGEKRDLHSKNKDDLTLSRSLGLGGRSAIEQRSMSINLPMSCLDSIALGFNFGRGHDLSPLASDILTNTSGSMDEGDDYLPATTPALEKAPCFPVESKEEEQIEKVKATGEESTQAEISCESPFLAKDFYKNGTVMAPDLPEMLDLAGTRSRLASVSADAEVARRKSVPSETVVEDSRTGLPPVTDENHVIVKTDSQLEDLGYCVFNKYTVPLPSPVQDSENLSGESGTFYEGTDDKVRRDLATDLSLIEVKLAAAGRVKDEFSVDKEASAHISGDKSGLSKEFDQEKKANDRLDTVLEKSEEHADSKEHAKKTEEAGDEIETFGLGVTYEQALAKDLSIPTDASSEKAEKGLSSVPEIAEVEPSKKVEQGLDFAVQGQLDVKISDFGQMASGLNIDDRRATELKLEATQDMTPSSKAPQEADAFMGVESGHMKEGTKVSETEVKQKVAKPDLVHQEAVDKEESYESSGEHESLTMESLKADEGKKETSPESSLIQDEIAVKLSVEIPCPPAVSEADLATDERADVQMEFIQGPKEESKETPDISITPSDVAEPLHETIVSEPAEIQSEEEEIEAQGEYDKLLFRSDTLQITDLGVSGAREEFVETCPSEHKGVIESVVTIEDDFITVVQTTTDEGESGSHSVRFAALEQPEVERRPSPHDEEEFEVEEAAEAQAEPKDGSPEAPASPEREEVALSEYKTETYDDYKDETTIDDSIMDADSLWVDTQDDDRSIMTEQLETIPKEEKAEKEARRSSLEKHRKEKPFKTGRGRISTPERKVAKKEPSTVSRDEVRRKKAVYKKAELAKKTEVQAHSPSRKFILKPAIKYTRPTHLSCVKRKTTAAGGESALAPSVFKQAKDKVSDGVTKSPEKRSSLPRPSSILPPRRGVSGDRDENSFSLNSSISSSARRTTRSEPIRRAGKSGTSTPTTPGSTAITPGTPPSYSSRTPGTPGTPSYPRTPHTPGTPKSAILVPSEKKVAIIRTPPKSPATPKQLRLINQPLPDLKNVKSKIGSTDNIKYQPKGGQVRILNKKIDFSKVQSRCGSKDNIKHSAGGGNVQIVTKKIDLSHVTSKCGSLKNIRHRPGGGRVKIESVKLDFKEKAQAKVGSLDNAHHVPGGGNVKIDSPKVAFKKAA

SEQ ID NO: 834713 - protein, 1695 aa, Homo sapiens
MADERKDEAKAPHWTSAPLTEASAHSHPPEIKDQGGAGEGLVRSANGFPYREDEEGAFGEHGSQGTYSNTKENGINGELTSADRETAEEVSARIVQVVTAEAVAVLKGEQEKEAQHKDQTAALPLAAEETANLPPSPPPSPASEQTVTVEEDLLTASKMEFHDQQELTPSTAEPSDQKEKESEKQSKPGEDLKHAALVSQPETTKTYPDKKDMQGTEEEKAPLALFGHTLVASLEDMKQKTEPSLVVPGIDLPKEPPTPKEQKDWFIEMPTEAKKDEWGLVAPISPGPLTPMREKDVFDDIPKWEGKQFDSPMPSPFQGGSFTLPLDVMKNEIVTETSPFAPAFLQPDDKKSLQQTSGPATAKDSFKIEEPHEAKPDKMAEAPPSEAMTLPKDAHIPVVEEHVMGKVLEEEKEAINQETVQQRDTFTPSGQEPILTEKETELKLEEKTTISDKEAVPKESKPPKPADEEIGIIQTSTEHTFSEQKDQEPTTDMLKQDSFPVSLEQAVTDSAMTSKTLEKAMTEPSALIEKSSIQELFEMRVDDKDKIEGVGAATSAELDMPFYEDKSGMSKYFETSALKEEATKSIEPGSDYYELSDTRESVHESIDTMSPMHKNGDKEFQTGKESQPSPPAQEAGYSTLAQSYPSDLPEEPSSPQERMFTIDPKVYGEKRDLHSKNKDDLTLSRSLGLGGRSAIEQRSMSINLPMSCLDSIALGFNFGRGHDLSPLASDILTNTSGSMDEGDDYLPATTPALEKAPCFPVESKEEEQIEKVKATGEESTQAEISCESPFLAKDFYKNGTVMAPDLPEMLDLAGTRSRLASVSADAEVARRKSVPSETVVEDSRTGLPPVTDENHVIVKTDSQLEDLGYCVFNKYTVPLPSPVQDSENLSGESGTFYEGTDDKVRRDLATDLSLIEVKLAAAGRVKDEFSVDKEASAHISGDKSGLSKEFDQEKKANDRLDTVLEKSEEHADSKEHAKKTEEAGDEIETFGLGVTYEQALAKDLSIPTDASSEKAEKGLSSVPEIAEVEPSKKVEQGLDFAVQGQLDVKISDFGQMASGLNIDDRRATELKLEATQDMTPSSKAPQEADAFMGVESGHMKEGTKVSETEVKQKVAKPDLVHQEAVDKEESYESSGEHESLTMESLKADEGKKETSPESSLIQDEIAVKLSVEIPCPPAVSEADLATDERADVQMEFIQGPKEESKETPDISITPSDVAEPLHETIVSEPAEIQSEEEEIEAQGEYDKLLFRSDTLQITDLGVSGAREEFVETCPSEHKGVIESVVTIEDDFITVVQTTTDEGESGSHSVRFAALEQPEVERRPSPHDEEEFEVEEAAEAQAEPKDGSPEAPASPEREEVALSEYKTETYDDYKDETTIDDSIMDADSLWVDTQDDDRSIMTEQLETIPKEEKAEKEARRSSLEKHRKEKPFKTGRGRISTPERKVAKKEPSTVSRDEVRRKKAVYKKAELAKKTEVQAHSPSRKFILKPAIKYTRPTHLSCVKRKTTAAGGESALAPSVFKQAKDKVSDGVTKSPEKRSSLPRPSSILPPRRGVSGDRDENSFSLNSSISSSARRTTRSEPIRRAGKSGTSTPTTPGSTAITPGTPPSYSSRTPGTPGTPSYPRTPHTPGTPKSAILVPSEKKVAIIRTPPKSPATPKQLRLINQPLPDLKNVKSKIGSTDNIKYQPKGGQVRIA

SEQ ID NO: 834714 - protein, 307 aa, Homo sapiens
MADERKDEAKAPHWTSAPLTEASAHSHPPEIKDQGGAGEGLVRSANGFPYREDEEGAFGEHGSQGTYSNTKENGINGELTSADRETAEEVSARIVQVVTAEAVAVLKGEQEKEAQHKDQTAALPLAAEETANLPPSPPPSPASEQTVTVEEEEETLESRMAEEEKPAALPEKECGAAKSSDQPKGLSKGQMESSAEAQIVPEESAPAGAPHEKSVKEVKEVSPEVKTPSSAGEGVSFSGFACVLLQMISPVAYQPDAFPTLFRYFIAGSYDNKSTVVGLMCRECGLRKCCVAAGFPVLQLIPGFPLP

SEQ ID NO: 834715 - protein, 191 aa, Homo sapiens
MADERKDEAKAPHWTSAPLTEASAHSHPPEIKDQGGAGEGLVRSANGFPYREDEEGAFGEHGSQGTYSNTKENGINGELTSADRETAEEVSARIVQVVTAEAVAVLKGEQEKEAQHKDQTAALPLAAEETANLPPSPPPSPASEQTVTVEEAAGGESALAPSVFKQAKDKVSNSTLSKIPALQGSTKSPRY

SEQ ID NO: 834716 - protein, 1827 aa, Homo sapiens; identical to SEQ ID NO: 834702

SEQ ID NO: 834717 - protein, 1827 aa, Homo sapiens; identical to SEQ ID NO: 834702

SEQ ID NO: 834718 - protein, 1827 aa, Homo sapiens; identical to SEQ ID NO: 834702

SEQ ID NO: 834719 - protein, 1827 aa, Homo sapiens; identical to SEQ ID NO: 834702

SEQ ID NO: 834720 - protein, 1827 aa, Homo sapiens; identical to SEQ ID NO: 834702

SEQ ID NO: 834721 - protein, 111 aa, Homo sapiens; identical to SEQ ID NO: 834711

SEQ ID NO: 834722 - protein, 1640 aa, Homo sapiens
MADERKDEAKAPHWTSAPLTEASAHSHPPEIKDQGGAGEGLVRSANGFPYREDEEGAFGEHGSQGTYSNTKENGINGELTSADRETAEEVSARIVQVVTAEAVAVLKGEQEKEAQHKDQTAALPLAAEETANLPPSPPPSPASEQTVTVEEDLLTASKMEFHDQQELTPSTAEPSDQKEKESEKQSKPGEDLKHAALVSQPETTKTYPDKKDMQGTEEEKAPLALFGHTLVASLEDMKQKTEPSLVVPGIDLPKEPPTPKEQKDWFIEMPTEAKKDEWGLVAPISPGPLTPMREKDVFDDIPKWEGKQFDSPMPSPFQGGSFTLPLDVMKNEIVTETSPFAPAFLQPDDKKSLQQTSGPATAKDSFKIEEPHEAKPDKMAEAPPSEAMTLPKDAHIPVVEEHVMGKVLEEEKEAINQETVQQRDTFTPSGQEPILTEKETELKLEEKTTISDKEAVPKESKPPKPADEEIGIIQTSTEHTFSEQKDQEPTTDMLKQDSFPVSLEQAVTDSAMTSKTLEKAMTEPSALIEKSSIQELFEMRVDDKDKIEGVGAATSAELDMPFYEDKSGMSKYFETSALKEEATKSIEPGSDYYELSDTRESVHESIDTMSPMHKNGDKEFQTGKESQPSPPAQEAGYSTLAQSYPSDLPEEPSSPQERMFTIDPKVYGEKRDLHSKNKDDLTLSRSLGLGGRSAIEQRSMSINLPMSCLDSIALGFNFGRGHDLSPLASDILTNTSGSMDEGDDYLPATTPALEKAPCFPVESKEEEQIEKVKATGEESTQAEISCESPFLAKDFYKNGTVMAPDLPEMLDLAGTRSRLASVSADAEVARRKSVPSETVVEDSRTGLPPVTDENHVIVKTDSQLEDLGYCVFNKYTVPLPSPVQDSENLSGESGTFYEGTDDKVRRDLATDLSLIEVKLAAAGRVKDEFSVDKEASAHISGDKSGLSKEFDQEKKANDRLDTVLEKSEEHADSKEHAKKTEEAGDEIETFGLGVTYEQALAKDLSIPTDASSEKAEKGLSSVPEIAEVEPSKKVEQGLDFAVQGQLDVKISDFGQMASGLNIDDRRATELKLEATQDMTPSSKAPQEADAFMGVESGHMKEGTKVSETEVKQKVAKPDLVHQEAVDKEESYESSGEHESLTMESLKADEGKKETSPESSLIQDEIAVKLSVEIPCPPAVSEADLATDERADVQMEFIQGPKEESKETPDISITPSDVAEPLHETIVSEPAEIQSEEEEIEAQGEYDKLLFRSDTLQITDLGVSGAREEFVETCPSEHKGVIESVVTIEDDFITVVQTTTDEGESGSHSVRFAALEQPEVERRPSPHDEEEFEVEEAAEAQAEPKDGSPEAPASPEREEVALSEYKTETYDDYKDETTIDDSIMDADSLWVDTQDDDRSIMTEQLETIPKEEKAEKEARRSSLEKHRKEKPFKTGRGRISTPERKVAKKEPSTVSRDEVRRKKAVYKKAELAKKTEVQAHSPSRKFILKPAIKYTRPTHLSCVKRKTTAAGGESALAPSVFKQAKDKVSDGVTKSPEKRSSLPRPSSILPPRRGVSGDRDENSFSLNSSISSSARRTTRSEPIRRAGKSGTSTPTTPGSTAITPGTPPSYSSHTHTHTHTPTVIQQAWNNQPIYNIPSVFY

SEQ ID NO: 834723 - protein, 1694 aa, Homo sapiens
MADERKDEAKAPHWTSAPLTEASAHSHPPEIKDQGGAGEGLVRSANGFPYREDEEGAFGEHGSQGTYSNTKENGINGELTSADRETAEEVSARIVQVVTAEAVAVLKGEQEKEAQHKDQTAALPLAAEETANLPPSPPPSPASEQTVTVEEDLLTASKMEFHDQQELTPSTAEPSDQKEKESEKQSKPGEDLKHAALVSQPETTKTYPDKKDMQGTEEEKAPLALFGHTLVASLEDMKQKTEPSLVVPGIDLPKEPPTPKEQKDWFIEMPTEAKKDEWGLVAPISPGPLTPMREKDVFDDIPKWEGKQFDSPMPSPFQGGSFTLPLDVMKNEIVTETSPFAPAFLQPDDKKSLQQTSGPATAKDSFKIEEPHEAKPDKMAEAPPSEAMTLPKDAHIPVVEEHVMGKVLEEEKEAINQETVQQRDTFTPSGQEPILTEKETELKLEEKTTISDKEAVPKESKPPKPADEEIGIIQTSTEHTFSEQKDQEPTTDMLKQDSFPVSLEQAVTDSAMTSKTLEKAMTEPSALIEKSSIQELFEMRVDDKDKIEGVGAATSAELDMPFYEDKSGMSKYFETSALKEEATKSIEPGSDYYELSDTRESVHESIDTMSPMHKNGDKEFQTGKESQPSPPAQEAGYSTLAQSYPSDLPEEPSSPQERMFTIDPKVYGEKRDLHSKNKDDLTLSRSLGLGGRSAIEQRSMSINLPMSCLDSIALGFNFGRGHDLSPLASDILTNTSGSMDEGDDYLPATTPALEKAPCFPVESKEEEQIEKVKATGEESTQAEISCESPFLAKDFYKNGTVMAPDLPEMLDLAGTRSRLASVSADAEVARRKSVPSETVVEDSRTGLPPVTDENHVIVKTDSQLEDLGYCVFNKYTVPLPSPVQDSENLSGESGTFYEGTDDKVRRDLATDLSLIEVKLAAAGRVKDEFSVDKEASAHISGDKSGLSKEFDQEKKANDRLDTVLEKSEEHADSKEHAKKTEEAGDEIETFGLGVTYEQALAKDLSIPTDASSEKAEKGLSSVPEIAEVEPSKKVEQGLDFAVQGQLDVKISDFGQMASGLNIDDRRATELKLEATQDMTPSSKAPQEADAFMGVESGHMKEGTKVSETEVKQKVAKPDLVHQEAVDKEESYESSGEHESLTMESLKADEGKKETSPESSLIQDEIAVKLSVEIPCPPAVSEADLATDERADVQMEFIQGPKEESKETPDISITPSDVAEPLHETIVSEPAEIQSEEEEIEAQGEYDKLLFRSDTLQITDLGVSGAREEFVETCPSEHKGVIESVVTIEDDFITVVQTTTDEGESGSHSVRFAALEQPEVERRPSPHDEEEFEVEEAAEAQAEPKDGSPEAPASPEREEVALSEYKTETYDDYKDETTIDDSIMDADSLWVDTQDDDRSIMTEQLETIPKEEKAEKEARRSSLEKHRKEKPFKTGRGRISTPERKVAKKEPSTVSRDEVRRKKAVYKKAELAKKTEVQAHSPSRKFILKPAIKYTRPTHLSCVKRKTTAAGGESALAPSVFKQAKDKVSDGVTKSPEKRSSLPRPSSILPPRRGVSGDRDENSFSLNSSISSSARRTTRSEPIRRAGKSGTSTPTTPGSTAITPGTPPSYSSRTPGTPGTPSYPRTPHTPGTPKSAILVPSEKKVAIIRTPPKSPATPKQLRLINQPLPDLKNVKSKIGSTDNIKYQPKGGQDFL

SEQ ID NO: 834724 - protein, 68 aa, Homo sapiens
EIADKLVECKDSSPSGLSVLQARLTELAEAAILNKRPGLLGGRRGPDSLAEQPPRLRGEGEVLYGWEG

SEQ ID NO: 834725 - protein, 727 aa, Homo sapiens
MLRIPVRKALVGLSKSPKGCVRTTATAASNLIEVFVDGQSVMVEPGTTVLQACEKVGMQIPRFCYHERLSVAGNCRMCLVEIEKAPKVVAACAMPVMKGWNILTNSEKSKKAREGVMEFLLANHPLDCPICDQGGECDLQDQSMMFGNDRSRFLEGKRAVEDKNIGPLVKTIMTRCIQCTRCIRFASEIAGVDDLGTTGRGNDMQVGTYIEKMFMSELSGNIIDICPVGALTSKPYAFTARPWETRKTESIDVMDAVGSNIVVSTRTGEVMRILPRMHEDINEEWISDKTRFAYDGLKRQRLTEPMVRNEKGLLTYTSWEDALSRVAGMLQSFQGKDVAAIAGGLVDAEALVALKDLLNRVDSDTLCTEEVFPTAGAGTDLRSNYLLNTTIAGVEEADVVLLVGTNPRFEAPLFNARIRKSWLHNDLKVALIGSPVDLTYTYDHLGDSPKILQDIASGSHPFSQVLKEAKKPMVVLGSSALQRNDGAAILAAVSSIAQKIRMTSGVTGDWKVMNILHRIASQVAALDLGYKPGVEAIRKNPPKVLFLLGADGGCITRQDLPKDCFIIYQGHHGDVGAPIADVILPGAAYTEKSATYVNTEGRAQQTKVAVTPPGLAREDWKIIRALSEIAGMTLPYDTLDQVRNRLEEVSPNLVRYDDIEGANYFQQANELSKLVNQQLLADPLVPPQLTIKDFYMTDSISRASQTMAKCVKAVTEGAQAVEEPSIC

SEQ ID NO: 834726 - protein, 758 aa, Homo sapiens
RDAWAERVGRPTRRQNRQFSRTASAAPGRSNMLRIPVRKALVGLSKSPKGCVRTTATAASNLIEVFVDGQSVMVEPGTTVLQACEKVGMQIPRFCYHERLSVAGNCRMCLVEIEKAPKVVAACAMPVMKGWNILTNSEKSKKAREGVMEFLLANHPLDCPICDQGGECDLQDQSMMFGNDRSRFLEGKRAVEDKNIGPLVKTIMTRCIQCTRCIRFASEIAGVDDLGTTGRGNDMQVGTYIEKMFMSELSGNIIDICPVGALTSKPYAFTARPWETRKTESIDVMDAVGSNIVVSTRTGEVMRILPRMHEDINEEWISDKTRFAYDGLKRQRLTEPMVRNEKGLLTYTSWEDALSRVAGMLQSFQGKDVAAIAGGLVDAEALVALKDLLNRVDSDTLCTEEVFPTAGAGTDLRSNYLLNTTIAGVEEADVVLLVGTNPRFEAPLFNARIRKSWLHNDLKVALIGSPVDLTYTYDHLGDSPKILQDIASGSHPFSQVLKEAKKPMVVLGSSALQRNDGAAILAAVSSIAQKIRMTSGVTGDWKVMNILHRIASQVAALDLGYKPGVEAIRKNPPKVLFLLGADGGCITRQDLPKDCFIIYQGHHGDVGAPIADVILPGAAYTEKSATYVNTEGRAQQTKVAVTPPGLAREDWKIIRALSEIAGMTLPYDTLDQVRNRLEEVSPNLVRYDDIEGANYFQQANELSKLVNQQLLADPLVPPQLTIKDFYMTDSISRASQTMAKCVKAVTEGAQAVEEPSIC

SEQ ID NO: 834727 - protein, 686 aa, Homo sapiens
MVEPGTTVLQACEKVGMQIPRFCYHERLSVAGNCRMCLVEIEKAPKVVAACAMPVMKGWNILTNSEKSKKAREGVMEFLLANHPLDCPICDQGGECDLQDQSMMFGNDRSRFLEGKRAVEDKNIGPLVKTIMTRCIQCTRCIRFASEIAGVDDLGTTGRGNDMQVGTYIEKMFMSELSGNIIDICPVGALTSKPYAFTARPWETRKTESIDVMDAVGSNIVVSTRTGEVMRILPRMHEDINEEWISDKTRFAYDGLKRQRLTEPMVRNEKGLLTYTSWEDALSRVAGMLQSFQGKDVAAIAGGLVDAEALVALKDLLNRVDSDTLCTEEVFPTAGAGTDLRSNYLLNTTIAGVEEADVVLLVGTNPRFEAPLFNARIRKSWLHNDLKVALIGSPVDLTYTYDHLGDSPKILQDIASGSHPFSQVLKEAKKPMVVLGSSALQRNDGAAILAAVSSIAQKIRMTSGVTGDWKVMNILHRIASQVAALDLGYKPGVEAIRKNPPKVLFLLGADGGCITRQDLPKDCFIIYQGHHGDVGAPIADVILPGAAYTEKSATYVNTEGRAQQTKVAVTPPGLAREDWKIIRALSEIAGMTLPYDTLDQVRNRLEEVSPNLVRYDDIEGANYFQQANELSKLVNQQLLADPLVPPQLTIKDFYMTDSISRASQTMAKCVKAVTEGAQAVEEPSIC

SEQ ID NO: 834728 - protein, 255 aa, Homo sapiens
MVVLGSSALQRNDGAAILAAVSSIAQKIRMTSGVTGDWKVMNILHRIASQVAALDLGYKPGVEAIRKNPPKVLFLLGADGGCITRQDLPKDCFIIYQGHHGDVGAPIADVILPGAAYTEKSATYVNTEGRAQQTKVAVTPPGLAREDWKIIRALSEIAGMTLPYDTLDQVRNRLEEVSPNLVRYDDIEGANYFQQANELSKLVNQQLLADPLVPPQLTIKDFYMTDSISRASQTMAKCVKAVTEGAQAVEEPSIC

SEQ ID NO: 834729 - protein, 424 aa, Homo sapiens
MLRIPVRKALVGLSKSPKGCVRTTATAASNLIEVFVDGQSVMVEPGTTVLQACEKVGMQIPRFCYHERLSVAGNCRMCLVEIEKAPKVVAACAMPVMKGWNILTNSEKSKKAREGVMEFLLANHPLDCPICDQGGECDLQDQSMMFGNDRSRFLEGKRAVEDKNIGPLVKTIMTRCIQCTRCIRFASEIAGVDDLGTTGRGNDMQVGTYIEKMFMSELSGNIIDICPVGALTSKPYAFTARPWETRKTESIDVMDAVGSNIVVSTRTGEVMRILPRMHEDINEEWISDKTRFAYDGLKRQRLTEPMVRNEKGLLTYTSWEDALSRVAGMLQSFQGKDVAAIAGGLVDAEALVALKDLLNRVDSDTLCTEEVFPTAGAGTDLRSNSSIKQWCLKTWVCTNQKNNICLFHTSKCSIKKIIGTSTRP

SEQ ID NO: 834730 - protein, 558 aa, Homo sapiens
MLRIPVRKALVGLSKSPKGCVRTTATAASNLIEVFVDGQSVMVEPGTTVLQACEKVGMQIPRFCYHERLSVAGNCRMCLVEIEKAPKVVAACAMPVMKGWNILTNSEKSKKAREGVMEFLLANHPLDCPICDQGGECDLQDQSMMFGNDRSRFLEGKRAVEDKNIGPLVKTIMTRCIQCTRCIRFASEIAGVDDLGTTGRGNDMQVGTYIEKMFMSELSGNIIDICPVGALTSKPYAFTARPWETRKTESIDVMDAVGSNIVVSTRTGEVMRILPRMHEDINEEWISDKTRFAYDGLKRQRLTEPMVRNEKGLLTYTSWEDALSRVAGMLQSFQGKDVAAIAGGLVDAEALVALKDLLNRVDSDTLCTEEVFPTAGAGTALLRFQAYRSSNTYNLHGCCAQRPDAWLRIWLGTTPYATQRHHLILHCLRIRQRAGLHYTAPYTRGPYQGRSSWTLTLSHYDTNLRHTSPEDILHSTSASRAKPIRIKPTSSTGTLTQHHTAGTKSQFMAHPRTTKRTGRQPTYLGTLDAHAIAQTRSRTDLRERNLARPDTVMNTTNT

SEQ ID NO: 834731 - protein, 77 aa, Homo sapiens
VTRGRSAWVDPRVGEQASAAPGRSNMLRIPVRKALVGLSKSPKGCGEYFLKFAFVDIRPYFCKFISLWHSLSKTLNP

SEQ ID NO: 834732 - protein, 727 aa, Homo sapiens; identical to SEQ ID NO: 834725

SEQ ID NO: 834733 - protein, 286 aa, Homo sapiens
MLRIPVRKALVGLSKSPKGCVRTTATAASNLIEVFVDGQSVMVEPGTTVLQACEKVGMQIPRFCYHERLSVAGNCRMCLVEIEKAPKVVAACAMPVMKGWNILTNSEKSKKAREGVMEFLLANHPLDCPICDQGGECDLQDQSMMFGNDRSRFLEGKRAVEDKNIGPLVKTIMTRCIQCTRCIRFASENAELMIGEPQPRTELHVGPLDEGPRLTAGNSDIAVGPNLSLLKGRLEQEPHPVIGGAALLGSHGSEEISRRVAPRLYTPSGNPPQRTPGLPEKQQVAK

SEQ ID NO: 834734 - protein, 727 aa, Homo sapiens; identical to SEQ ID NO: 834725

SEQ ID NO: 834735 - protein, 727 aa, Homo sapiens; identical to SEQ ID NO: 834725

SEQ ID NO: 834736 - protein, 593 aa, Homo sapiens
MLRIPVRKALVGLSKSPKGCVRTTATAASNLIEVFVDGQSVMVEPGTTVLQACEKVGMQIPRFCYHERLSVAGNCRMCLVEIEKAPKVVAACAMPVMKGWNILTNSEKSKKAREGVMEFLLANHPLDCPICDQGGECDLQDQSMMFGNDRSRFLEGKRAVEDKNIGPLVKTIMTRCIQCTRCIRFASEIAGVDDLGTTGRGNDMQVGTYIEKMFMSELSGNIIDICPVGALTSKPYAFTARPWETRKTESIDVMDAVGSNIVVSTRTGEVMRILPRMHEDINEEWISDKTRFAYDGLKRQRLTEPMVRNEKGLLTYTSWEDALSRVAGMLQSFQGKDVAAIAGGLVDAEALVALKDLLNRVDSDTLCTEEVFPTAGAGTDLRSNYLLNTTIAGVEEADVVLLVGTNPRFEAPLFNARIRKSWLHNDLKVALIGSPVDLTYTYDHLGDSPKILQDIASGSHPFSQVLKEAKKPMVVLGSSALQRNDGAAILAAVSSIAQKIRMTSGVTGDWKVMNILHRIASQVAALDLGYKPGVEAIRKNPPKVLFLLGADGGCITRQDLPKDCFIIYQDIMVMLRLPIDSISGILLESSLQV

SEQ ID NO: 834737 - protein, 1194 aa, Homo sapiens
MASQVLVYPPYVYQTQSSAFCSVKKLKVEPSSCVFQERNYPRTYVNGRNFGNSHPPTKGSAFQTKIPFNRPRGHNFSLQTSAVVLKNTAGATKVIAAQAQQAHVQAPQIGAWRNRLHFLEGPQRCGLKRKSEELDNHSSAMQIVDELSILPAMLQTNMGNPVTVVTATTGSKQNCTTGEGDYQLVQHEVLCSMKNTYEVLDFLGRGTFGQVVKCWKRGTNEIVAIKILKNHPSYARQGQIEVSILARLSTENADEYNFVRAYECFQHRNHTCLVFEMLEQNLYDFLKQNKFSPLPLKVIRPILQQVATALKKLKSLGLIHADLKPENIMLVDPVRQPYRVKVIDFGSASHVSKTVCSTYLQSRYYRAPEIILGLPFCEAIDMWSLGCVIAELFLGWPLYPGALEYDQIRYISQTQGLPGEQLLNVGTKSTRFFCKETDMSHSGWRLKTLEEHEAETGMKSKEARKYIFNSLDDVAHVNTVMDLEGSDLLAEKADRREFVSLLKKMLLIDADLRITPAETLNHPFVNMKHLLDFPHSNHVKSCFHIMDICKSHLNSCDTNNHNKTSLLRPVASSSTATLTANFTKIGTLRSQALTTSAHSVVHHGIPLQAGTAQFGCGDAFQQTLIICPPAIQGIPATHGKPTSYSIRVDNTVPLVTQAPAVQPLQIRPGVLSQTWSGRTQQMLVPAWQQVTPLAPATTTLTSESVAGSHRLGDWGKMISCSNHYNSVMPQPLLTNQITLSAPQPVSVGIAHVVWPQPATTKKNKQCQNRSNSLQNTNIPHSAFISPKIINGKDVEEVSCIETQDNQNSEGEARNCCETSIRQDSDSSVSDKQRQTIIIADSPSPAVSVITISSDTDEEETSQRHSLRECKGSLDCEACQSTLNIDRMCSLSSPDSTLSTSSSGQSSPSPCKRPNSMSDEEQESSCDTVDGSPTSDSSGHDSPFAESTFVEDTHENTELVSSADTETKPAVCSVVVPPVELENGLNADEHMANTDSICQPLIKGRSAPGRLNQPSAVGTRQQKLTSAFQQQHLNFSQVQHFGSGHQEWNGNFGHRRQQAYIPTSVTSNPFTLSHGSPNHTAVHAHLAGNTHLGGQPTLLPYPSSATLSSAAPVAHLLASPCTSRPMLQHPTYNISHPSGIVHQVPVGLNPRLLPSPTIHQTQYKPIFPPHSYIAASPAYTGFPLSPTKLSQYPYM

SEQ ID NO: 834738 - protein, 385 aa, Homo sapiens
MASQVLVYPPYVYQTQSSAFCSVKKLKVEPSSCVFQERNYPRTYVNGRNFGNSHPPTKGSAFQTKIPFNRPRGHNFSLQTSAVVLKNTAGATKVIAAQAQQAHVQAPQIGAWRNRLHFLEGPQRCGLKRKSEELDNHSSAMQIVDELSILPAMLQTNMGNPVTVVTATTGSKQNCTTGEGDYQLVQHEVLCSMKNTYEVLDFLGRGTFGQVVKCWKRGTNEIVAIKILKNHPSYARQGQIEVSILARLSTENADEYNFVRAYECFQHRNHTCLVFEMLEQNLYDFLKQNKFSPLPLKVIRPILQQVATALKKLKSLGLIHADLKPENIMLVDPVRQPYRVKVIDFGSASHVSKTVCSTYLQSRYYRYGLTSLGLPTICLSNSVKC

SEQ ID NO: 834739 - protein, 1215 aa, Homo sapiens
MASQVLVYPPYVYQTQSSAFCSVKKLKVEPSSCVFQERNYPRTYVNGRNFGNSHPPTKGSAFQTKIPFNRPRGHNFSLQTSAVVLKNTAGATKVIAAQAQQAHVQAPQIGAWRNRLHFLEGPQRCGLKRKSEELDNHSSAMQIVDELSILPAMLQTNMGNPVTVVTATTGSKQNCTTGEGDYQLVQHEVLCSMKNTYEVLDFLGRGTFGQVVKCWKRGTNEIVAIKILKNHPSYARQGQIEVSILARLSTENADEYNFVRAYECFQHRNHTCLVFEMLEQNLYDFLKQNKFSPLPLKVIRPILQQVATALKKLKSLGLIHADLKPENIMLVDPVRQPYRVKVIDFGSASHVSKTVCSTYLQSRYYRAPEIILGLPFCEAIDMWSLGCVIAELFLGWPLYPGALEYDQIRYISQTQGLPGEQLLNVGTKSTRFFCKETDMSHSGWRLKTLEEHEAETGMKSKEARKYIFNSLDDVAHVNTVMDLEGSDLLAEKADRREFVSLLKKMLLIDADLRITPAETLNHPFVNMKHLLDFPHSNHVKSCFHIMDICKSHLNSCDTNNHNKTSLLRPVASSSTATLTANFTKIGTLRSQALTTSAHSVVHHGIPLQAGTAQFGCGDAFQQTLIICPPAIQGIPATHGKPTSYSIRVDNTVPLVTQAPAVQPLQIRPGVLSQTWSGRTQQMLVPAWQQVTPLAPATTTLTSESVAGSHRLGDWGKMISCSNHYNSVMPQPLLTNQITLSAPQPVSVGIAHVVWPQPATTKKNKQCQNRGILVKLMEWEPGREEINAFSWSNSLQNTNIPHSAFISPKIINGKDVEEVSCIETQDNQNSEGEARNCCETSIRQDSDSSVSDKQRQTIIIADSPSPAVSVITISSDTDEEETSQRHSLRECKGSLDCEACQSTLNIDRMCSLSSPDSTLSTSSSGQSSPSPCKRPNSMSDEEQESSCDTVDGSPTSDSSGHDSPFAESTFVEDTHENTELVSSADTETKPAVCSVVVPPVELENGLNADEHMANTDSICQPLIKGRSAPGRLNQPSAVGTRQQKLTSAFQQQHLNFSQVQHFGSGHQEWNGNFGHRRQQAYIPTSVTSNPFTLSHGSPNHTAVHAHLAGNTHLGGQPTLLPYPSSATLSSAAPVAHLLASPCTSRPMLQHPTYNISHPSGIVHQVPVGLNPRLLPSPTIHQTQYKPIFPPHSYIAASPAYTGFPLSPTKLSQYPYM

SEQ ID NO: 834740 - protein, 1149 aa, Homo sapiens
MASQVLVYPPYVYQTQSSAFCSVKKLKVEPSSCVFQERNYPRTYVNGRNFGNSHPPTKGSAFQTKIPFNRPRGHNFSLQTSAVVLKNTAGATKVIAAQAQQAHVQAPQIGAWRNRLHFLEGPQRCGLKRKSEELDNHSSAMQIVDELSILPAMLQTNMGNPVTVVTATTGSKQNCTTGEGDYQLVQHEVLCSMKNTYEVLDFLGRGTFGQVVKCWKRGTNEIVAIKILKNHPSYARQGQIEVSILARLSTENADEYNFVRAYECFQHRNHTCLVFEMLEQNLYDFLKQNKFSPLPLKVIRPILQQVATALKKLKSLGLIHADLKPENIMLVDPVRQPYRVKVIDFGSASHVSKTVCSTYLQSRYYRAPEIILGLPFCEAIDMWSLGCVIAELFLGWPLYPGALEYDQIRYISQTQGLPGEQLLNVGTKSTRFFCKETDMSHSGWRLKTLEEHEAETGMKSKEARKYIFNSLDDVAHVNTVMDLEGSDLLAEKADRREFVSLLKKMLLIDADLRITPAETLNHPFVNMKHLLDFPHSNHVKSCFHIMDICKSHLNSCDTNNHNKTSLLRPVASSSTATLTANFTKIGTLRSQALTTSAHSVVHHGIPLQAGTAQFGCGDAFQQTLIICPPAIQGIPATHGKPTSYSIRVDNTVPLVTQAPAVQPLQIRPGVLSQTWSGRTQQMLVPAWQQVTPLAPATTTLTSESVAGSHRLGDWGKMISCSNHYNSVMPQPLLTNQITLSAPQPVSVGIAHVVWPQPATTKKNKQCQNRSNSLQNTNIPHSAFISPKIINGKDVEEVSCIETQDNQNSEGEARNCCETSIRQDSDSSVSDKQRQTIIIADSPSPAVSVITISSDTDEEETSQRHSLRECKGSLDCEACQSTLNIDRMCSLSSPDSTLSTSSSGQSSPSPCKRPNSMSDEEQESSCDTVDGSPTSDSSGHDSPFAESTFVEDTHENTELVSSADTETKPAVCSVVVPPVELENGLNADEHMANTDSICQPLIKGRSAPGRLNQPSAVGTRQQKLTSAFQQQHLNFSQVQHFGSGHQEWNGNFGHRRQQAYIPTSVTSNPFTLSHGSPNHTAVHAHLAGNTHLGGQPTLLPYPSSATLSSAAPVAHLLASPCTSRPMLQLLGRLRQKNCLNQGSTPISAIG

SEQ ID NO: 834741 - protein, 750 aa, Homo sapiens
  misc_feature (1)..(1): Xaa can be any naturally occurring amino acid
XLNLQLNGMYSKHLQRNEQILEFATEMDDVAHVNTVMDLEGSDLLAEKADRREFVSLLKKMLLIDADLRITPAETLNHPFVNMKHLLDFPHSNHVKSCFHIMDICKSHLNSCDTNNHNKTSLLRPVASSSTATLTANFTKIGTLRSQALTTSAHSVVHHGIPLQAGTAQFGCGDAFQQTLIICPPAIQGIPATHGKPTSYSIRVDNTVPLVTQAPAVQPLQIRPGVLSQTWSGRTQQMLVPAWQQVTPLAPATTTLTSESVAGSHRLGDWGKMISCSNHYNSVMPQPLLTNQITLSAPQPVSVGIAHVVWPQPATTKKNKQCQNRSNSLQNTNIPHSAFISPKIINGKDVEEVSCIETQDNQNSEGEARNCCETSIRQDSDSSVSDKQRQTIIIADSPSPAVSVITISSDTDEEETSQRHSLRECKGSLDCEACQSTLNIDRMCSLSSPDSTLSTSSSGQSSPSPCKRPNSMSDEEQESSCDTVDGSPTSDSSGHDSPFAESTFVEDTHENTELVSSADTETKPAVCSVVVPPVELENGLNADEHMANTDSICQPLIKGRSAPGRLNQPSAVGTRQQKLTSAFQQQHLNFSQVQHFGSGHQEWNGNFGHRRQQAYIPTSVTSNPFTLSHGSPNHTAVHAHLAGNTHLGGQPTLLPYPSSATLSSAAPVAHLLASPCTSRPMLQHPTYNISHPSGIVHQVPVGLNPRLLPSPTIHQTQYKPIFPPHSYIAASPAYTGFPLSPTKLSQYPYM

SEQ ID NO: 834742 - protein, 344 aa, Homo sapiens
MQLEIKVALNFIISYLYNKLPRRRADLFGEELERLLKKKYEGHWYPEKPLKGSGFRCVHIGEMVDPVVELAAKRSGLAVEDVRANVPEELSVWIDPFEVSYQIGEKGAVKVLYLDDSEGCGAPELDKEIKSSFNPDAQVFVPIGSQDSSLSNSPSPSFGQSPSPTFIPRSAQPITFTTASFAATKFGSTKMKKGGGAASGGGVASSGAGGQQPPQQPRMARSPTNSLLKHKSLSLSMHSLNFITANPAPQSQLSPNAKEFVYNGGGSPSLFFDAADGQGSGTPGPFGGSGAGTCNSSSFDMAQVFGGGANSLFLEKTPFVEGLSYNLNTMQYPSQQFQPVVLAN

SEQ ID NO: 834743 - protein, 344 aa, Homo sapiens; identical to SEQ ID NO: 834742

SEQ ID NO: 834744 - protein, 344 aa, Homo sapiens; identical to SEQ ID NO: 834742

SEQ ID NO: 834745 - protein, 341 aa, Homo sapiens
MQLEIKVALNFIISYLYNKLPRRRADLFGEELERLLKKKYEGHWYPEKPLKGSGFRCVHIGEMVDPVVELAAKRSGLAVEDVRANVPEELSVWIDPFEVSYQIGEKGAVKVLYLDDSEGCGAPELDKEIKSSFNPDAQVFVPIGSQDSSLSNSPSPSFGQSPSPTFIPRSAQPITFTTASFAATKFGSTKMKKGGGAASGGGVASSGAGGQQPPQQPRMARSPTNSLLKHKSLSLSMHSLNFITANPAPQSQLSPNAKEFVYNGGGSPSLFFDAADGQGSGTPGPFGGSGAGTCNSSSFDMAQVFGGGANSLFLEKTPFVEGGIEASLERSPGSRVMNFFL

SEQ ID NO: 834746 - protein, 344 aa, Homo sapiens; identical to SEQ ID NO: 834742

SEQ ID NO: 834747 - protein, 344 aa, Homo sapiens; identical to SEQ ID NO: 834742

SEQ ID NO: 834748 - protein, 344 aa, Homo sapiens; identical to SEQ ID NO: 834742

SEQ ID NO: 834749 - protein, 344 aa, Homo sapiens; identical to SEQ ID NO: 834742

SEQ ID NO: 834750 - protein, 158 aa, Homo sapiens
AGRCGLLAEASRGSGDAGPGGQDRLPATAHTVCRCATRTTLRSAIPASSPLVRPPALGPPAAEPDLLRAEKKLLRVIVHSPLLRPPTLNDEKDFGPLARRRPGRKGERPPPRAQATLEGEAAPRPVERPAAAETRSRLEPKAVHVPCADSLPRKGPCS

SEQ ID NO: 834751 - protein, 198 aa, Homo sapiens
MSFIFEWIYNGFSSVLQFLGLYKKSGKLVFLGLDNAGKTTLLHMLKDDRLGQHVPTLHPTSEELTIAGMTFTTFDLGGHEQARRVWKNYLPAINGIVFLVDCADHSRLVESKVELNALMTDETISNVPILILGNKIDRTDAISEEKLREIFGLYGQTTGKGNVTLKELNARPMEVFMCSVLKRQGYGEGFRWLSQYID

SEQ ID NO: 834752 - protein, 198 aa, Homo sapiens; identical to SEQ ID NO: 834751

SEQ ID NO: 834753 - protein, 198 aa, Homo sapiens; identical to SEQ ID NO: 834751

SEQ ID NO: 834754 - protein, 179 aa, Homo sapiens
MSFIFEWIYNGFSSVLQFLGLYKKSGKLVFLGLDNAGKTTLLHMLKDDRLGQHVPTLHPTSEELTIAGMTFTTFDLGGHEQDCADHSRLVESKVELNALMTDETISNVPILILGNKIDRTDAISEEKLREIFGLYGQTTGKGNVTLKELNARPMEVFMCSVLKRQGYGEGFRWLSQYID

SEQ ID NO: 834755 - protein, 198 aa, Homo sapiens; identical to SEQ ID NO: 834751

SEQ ID NO: 834756 - protein, 135 aa, Homo sapiens
MSFIFEWIYNGFSSVLQFLGLYKKSGKLVFLGLDNAGKTTLLHMLKDDRLGQHVPTLHPTSEELTIAGMTFTTFDLGGHEQARRVWKNYLPAINGIVFLVDCADHSRLVESKVELNRQRCAIETSKTMLFLTNQS

SEQ ID NO: 834757 - protein, 71 aa, Homo sapiens
  misc_feature (9)..(9): Xaa can be any naturally occurring amino acid
  misc_feature (14)..(14): Xaa can be any naturally occurring amino acid
  misc_feature (19)..(19): Xaa can be any naturally occurring amino acid
FFSPPAHGXPFVDXVRNAXHCVGNRDLGHYVPGRGVTYIRRVAGGPGCCWLVCSEGGSEPAAVLPEEPLRP

SEQ ID NO: 834758 - protein, 198 aa, Homo sapiens; identical to SEQ ID NO: 834751

SEQ ID NO: 834759 - protein, 198 aa, Homo sapiens; identical to SEQ ID NO: 834751

SEQ ID NO: 834760 - protein, 198 aa, Homo sapiens; identical to SEQ ID NO: 834751

SEQ ID NO: 834761 - protein, 121 aa, Homo sapiens
MSFIFEWIYNGFSSVLQFLGLYKKSGKLVFLGLDNAGKTTLLHMLKDDRLGQHVPTLHPTSEELTIAGMTFTTFDLGGHEQARRVWKNYLPAINGIVFLVDCADHSRLVESKVELNVCFVL

SEQ ID NO: 834762 - protein, 119 aa, Homo sapiens
LHPEDYDTLQEENDETASPADVFYDVSKENENSMVPQGAPVGSLSVKNKAHCLQDFLMDVEKDELDSGEKIHLNPVGSDKVNGQSLETGSERECTNILEGDESDSLTDYDIVGGKESFT

SEQ ID NO: 834763 - protein, 480 aa, Homo sapiens
MAARCSTRWLLVVVGTPRLPAISGRGARPPREGVVGAWLSRKLSVPAFASSLTSCGPRALLTLRPGVSLTGTKHYPFICTASFHTSAPLAKEDYYQILGVPRNASQKEIKKAYYQLAKKYHPDTNKDDPKAKEKFSQLAEAYEVLSDEVKRKQYDAYGSAGFDPGASGSQHSYWKGGPTVDPEELFRKIFGEFSSSSFGDFQTVFDQPQEYFMELTFNQAAKGVNKEFTVNIMDTCERCNGKGNEPGTKVQHCHYCGGSGMETINTGPFVMRSTCRRCGGRGSIIISPCVVCRGAGQAKQKKRVMIPVPAGVEDGQTVRMPVGKREIFITFRVQKSPVFRRDGADIHSDLFISIAQALLGGTARAQGLYETINVTIPPGTQTDQKIRMGGKGIPRINSYGYGDHYIHIKIRVPKRLTSRQQSLILSYAEDETDVEGTVNGVTLTSSGGSTMDSSAGSKARREAGEDEEGFLSKLKKMFTS

SEQ ID NO: 834764 - protein, 453 aa, Homo sapiens [sequence omitted]

SEQ ID NO: 834765 - protein, 480 aa, Homo sapiens; identical to SEQ ID NO: 834763

SEQ ID NO: 834766 - protein, 480 aa, Homo sapiens; identical to SEQ ID NO: 834763

SEQ ID NO: 834767 - protein, 478 aa, Homo sapiens
MAARCSTRWLLVVVGTPRLPAISGRGARPPREGVVGAWLSRKLSVPAFASSLTSCGPRALLTLRPGVSLTGGVLLLSPRLECNGAILAHCNLSLPGTKHYPFICTASFHTSAPLAKEDYYQILGVPRNASQKEIKKAYYQLAKKYHPDTNKDDPKAKEKFSQLAEAYEVLSDEVKRKQYDAYGSAGFDPGASGSQHSYWKGGPTVDPEELFRKIFGEFSSSSFGDFQTVFDQPQEYFMELTFNQAAKGVNKEFTVNIMDTCERCNGKGNEPGTKVQHCHYCGGSGMETINTGPFVMRSTCRRCGGRGSIIISPCVVCRGAGQAKQKKRVMIPVPAGVEDGQTVRMPVGKREIFITFRVQKSPVFRRDGADIHSDLFISIAQALLGGTARAQGLYETINVTIPPGTQTDQKIRMGGKGIPRINSYGYGDHYIHIKIRVPKRLTSRQQSLILSYAEDETDVEGTVNGVTLTSSGKRSTGN

SEQ ID NO: 834768 - protein, 398 aa, Homo sapiens
MAEPQAERPRLCVFPDLLRPPSAADIETWCQPHRAKEDYYQILGVPRNASQKEIKKAYYQLAKKYHPDTNKDDPKAKEKFSQLAEAYEVLSDEVKRKQYDAYGSAGFDPGASGSQHSYWKGGPTVDPEELFRKIFGEFSSSSFGDFQTVFDQPQEYFMELTFNQAAKGVNKEFTVNIMDTCERCNGKGNEPGTKVQHCHYCGGSGMETINTGPFVMRSTCRRCGGRGSIIISPCVVCRGAGQAKQKKRVMIPVPAGVEDGQTVRMPVGKREIFITFRVQKSPVFRRDGADIHSDLFISIAQALLGGTARAQGLYETINVTIPPGTQTDQKIRMGGKGIPRINSYGYGDHYIHIKIRVPKRLTSRQQSLILSYAEDETDVEGTVNGVTLTSSGKRSTGN

SEQ ID NO: 834769 - protein, 480 aa, Homo sapiens; identical to SEQ ID NO: 834763

SEQ ID NO: 834770 - protein, 145 aa, Homo sapiens
MAARCSTRWLLVVVGTPRLPAISGRGARPPREGVVGAWLSRKLSVPAFASSLTSCGPRALLTLRPGVSLTGTKHYPFICTASFHTSAPLAKEDYYQILGVPRNASQKEIKKAYYQLAKKYHPDTNKDDPKAKEKFSQLAEAYEVI

SEQ ID NO: 834771 - protein, 108 aa, Homo sapiens
MLGLLYSPPAVVGPACPWSQRASQAEPGLELRSPHVLPAWKLPSCVDSAGLCKPGGCSRGSACSPCHLGTHFGLLCSSQQVGFSPLSWHSCFPGINRRSPQGCVPLKC

SEQ ID NO: 834772 - protein, 453 aa, Homo sapiens [sequence omitted]

SEQ ID NO: 834773 - protein, 453 aa, Homo sapiens [sequence omitted]

SEQ ID NO: 834774 - protein, 453 aa, Homo sapiens [sequence omitted]

SEQ ID NO: 834775 - protein, 423 aa, Homo sapiens
TAKPYQFVCSFTDIAWWVMYSQFSFVENIPRVIFFVFSFLGTKHYPFICTASFHTSAPLAKEDYYQILGVPRNASQKEIKKAYYQLAKKYHPDTNKDDPKAKEKFSQLAEAYEVLSDEVKRKQYDAYGSAGFDPGASGSQHSYWKGGPTVDPEELFRKIFGEFSSSSFGDFQTVFDQPQEYFMELTFNQAAKGVNKEFTVNIMDTCERCNGKGNEPGTKVQHCHYCGGSGMETINTGPFVMRSTCRRCGGRGSIIISPCVVCRGAGQAKQKKRVMIPVPAGVEDGQTVRMPVGKREIFITFRVQKSPVFRRDGADIHSDLFISIAQALLGGTARAQGLYETINVTIPPGTQTDQKIRMGGKGIPRINSYGYGDHYIHIKIRVPKRLTSRQQSLILSYAEDETDVEGTVNGVTLTSSGKRSTGN

SEQ ID NO: 834776 - protein, 297 aa, Homo sapiens
MAARCSTRWLLVVVGTPRLPAISGRGARPPREGVVGAWLSRKLSVPAFASSLTSCGPRALLTLRPGVSLTGTKHYPFICTASFHTSAPLAKEDYYQILGVPRNASQKEIKKAYYQLAKKYHPDTNKDDPKAKEKFSQLAEAYEVLSDEVKRKQYDAYGSAGFDPGASGSQHSYWKGGPTVDPEELFRKIFGEFSSSSFGDFQTVFDQPQEYFMELTFNQAAKGVNKEFTVNIMDTCERCNGKGNEPGTKVQHCHYCGGSGMVRLCPRLHLPRLAPLTEKSWLWHCSQRTYAGNWGSW

SEQ ID NO: 834777 - protein, 106 aa, Homo sapiens
MAARCSTRWLLVVVGTPRLPAISGRGARPPREGVVGAWLSRKLSVPAFASSLTSCGPRALLTLRPGVSLTGGVLLCRPGWSAMARSWLTATSASQVQTILMPQPPK

SEQ ID NO: 834778 - protein, 705 aa, Homo sapiens
MVTMINDSDYVSVAPHSAALNVVHSEKDYVFAAVFNSTMVYSLPILVNIISNYYLYHLNVTETIQIWSTPFFQEITDIVFKIELYFQAALLGIIVTAMPPYFAMENAENHKIKAYTQLKLSGLLPSAYWIGQAVVDIPLFFIILILMLGSLLAFHYGLYFYTVKFLAVVFCLIGYVPSVILFTYIASFTFKKILNTKEFWSFIYSVAALACIAITEITFFMGYTIATILHYAFCIIIPIYPLLGCLISFIKISWKNVRKNVDTYNPWDRLSVAVISPYLQCVLWIFLLQYYEKKYGGRSIRKDPFFRNLSTKSKNRKLPEPPDNEDEDEDVKAERLKVKELMGCQCCEEKPSIMVSNLHKEYDDKKDFLLSRKVKKVATKYISFCVKKGEILGLLGPNGAGKSTIINILVGDIEPTSGQVFLGDYSSETSEDDDSLKCMGYCPQINPLWPDTTLQEHFEIYGAVKGMSASDMKEVISRITHALDLKEHLQKTVKKLPAGIKRKLCFALSMLGNPQITLLDEPSTGMDPKAKQHMWRAIRTAFKNRKRAAILTTHYMEEAEAVCDRVAIMVSGQLRCIGTVQHLKSKFGKGYFLEIKLKDWIENLEVDRLQREIQYIFPNASRQESFSSILAYKIPKEDVQSLSQSFFKLEEAKHAFAIEEYSFSQATLEQVFVELTKEQEEEDNSCGTLNSTLWWERTQEDRVVF

SEQ ID NO: 834779 - protein, 657 aa, Homo sapiens
MVTMINDSDYVSVAPHSAALNVVHSEKDYVFAAVFNSTMVYSLPILVNIISNYYLYHLNVTETIQIWSTPFFQEITDIVFKIELYFQAALLGIIVTAMPPYFAMENAENHKIKAYTQLKLSGLLPSAYWIGQAVVDIPLFFIILILMLGSLLAFHYGLYFYTVKFLAVVFCLIGYVPSVILFTYIASFTFKKILNTKEFWSFIYSVAALACIAITEITFFMGYTIATILHYAFCIIIPIYPLLGCLISFIKISWKNVRKNVDTYNPWDRLSVAVISPYLQCVLWIFLLQYYEKKYGGRSIRKDPFFRNLSTKSKNRKLPEPPDNEDEDEDVKAERLKVKELMGCQCCEEKPSIMVSNLHKEYDDKKDFLLSRKVKKVATKYISFCVKKGEILGLLGPNGAGKSTIINILVGDIEPTSGQVFLGDYSSETSEDDDSLKCMGYCPQINPLWPDTTLQEHFEIYGAVKGMSASDMKEVISRITHALDLKEHLQKTVKKLPAGIKRKLCFALSMLGNPQITLLDEPSTGMDPKAKQHMWRAIRTAFKNRKRAAILTTHYMEEAEAVCDRVAIMVSGQLRCIGTVQHLKSKFGKGYFLEIKLKDWIENLEVDRLQREIQYIFPNASRQESFSSILAYKIPKEDVQSLSQSFFKLEEGFCRTH

SEQ ID NO: 834780 - protein, 705 aa, Homo sapiens; identical to SEQ ID NO: 834778

SEQ ID NO: 834781 - protein, 434 aa, Homo sapiens
MVTMINDSDYVSVAPHSAALNVVHSEKDYVFAAVFNSTMVYSLPILVNIISNYYLYHLNVTETIQIWSTPFFQEITDIVFKIELYFQAALLGIIVTAMPPYFAMENAENHKIKAYTQLKLSGLLPSAYWIGQAVVDIPLFFIILILMLGSLLAFHYGLYFYTVKFLAVVFCLIGYVPSVILFTYIASFTFKKILNTKEFWSFIYSVAALACIAITEITFFMGYTIATILHYAFCIIIPIYPLLGCLISFIKISWKNVRKNVDTYNPWDRLSVAVISPYLQCVLWIFLLQYYEKKYGGRSIRKDPFFRNLSTKSKNRKLPEPPDNEDEDEDVKAERLKVKELMGCQCCEEKPSIMVSNLHKEYDDKKDFLLSRKVKKVATKYISFCVKKGEILGLLGPNGAGKSTIINILVGDIEPTSGQVFLGDYLMGTVYIVG

SEQ ID NO: 834782 - protein, 109 aa, Homo sapiens
LCRGPARIEALAGVPMYRNEFTAWYRRMSVVYGIGTWSVLGSLLYYSRTMAKSSDQKDGSASEVPSELSERPKGFYVETVVTYKEDFVPNTEKILNYWKSWTGGPGTEP

SEQ ID NO: 834783 - protein, 109 aa, Homo sapiens; identical to SEQ ID NO: 834782

SEQ ID NO: 834784 - protein, 109 aa, Homo sapiens; identical to SEQ ID NO: 834782

SEQ ID NO: 834785 - protein, 784 aa, Homo sapiens
MSDQKKEEEEEAAAAAAMATEGGKTSEPENNNKKPKTSGSQDSQPSPLALLAATCSKIGTPGENQATGQQQIIIDPSQGLVQLQNQPQQLELVTTQLAGNAWQLVASTPPASKENNVSQPASSSSSSSSSNNGSASPTKTKSGNSSTPGQFQVIQVQNPSGSVQYQVIPQLQTVEGQQIQINPTSSSSLQDLQGQIQLISAGNNQAILTAANRTASGNILAQNLANQTVPVQIRPGVSIPLQLQTLPGTQAQVVTTLPINIGGVTLALPVINNVAAGGGTGQVGQPAATADSGTSNGNQLVSTPTNTTTSASTMPESPSSSTTCTTTASTSLTSSDTLVSSADTGQYASTSASSSERTIEESQTPAATESEAQSSSQLHANGMQNQQDQSNSLQQVQIVGQPILQQIQIQQPQQQIIQAIPPQSFQLQSGQTIQTIQQQPLQNVQLQAVNPTQVLIRAPTLTPSGQISWQTVQVQNIQSLSNLQVQNAGLSQQLTITPVSSSGGTTLAQIAPVAVAGAPITLNTAQLASVPNLQTVSVANLGAAGVQVQGVPVTITSVAGQQQGQDGVKVQQATIAPVTVAVGGIANATIGAVSPDQLTQVHLQQGQQTSDQEVQPGKRLRRVACSCPNCREGEGRGSNEPGKKKQHICHIEGCGKVYGKTSHLRAHLRWHTGERPFICNWMFCGKRFTRSDELQRHRRTHTGEKRFECPECSKRFMRSDHLSKHVKTHQNKKGGGTALAIVTSGELDSSVTEVLGSPRIVTVAAISQDSNPATPNVSTNMEEF

SEQ ID NO: 834786 - protein, 183 aa, Homo sapiens
GSPPGATQVPRREAAQLGKQPAPVVSGPAARVLPASPPRRGGAPTPRSRGPAAGGRAAHRGSAAAAEDQLLEEAERQREEPRGEGEGGDRQEAANAAECLHTSLCLPWLVKEPSGSQRGGRAGWGEQRPRVRPREGRRRERRRRRFQHEEESWPGGQHEEEMTAGFCYGTWNKPSTPGSSPYS

SEQ ID NO: 834787 - protein, 749 aa, Homo sapiens [sequence omitted]

SEQ ID NO: 834788 - protein, 932 aa, Homo sapiens [sequence omitted]

SEQ ID NO: 834789 - protein, 527 aa, Homo sapiens
MAFFDSLVRREIEGWSSDSDSDLSESTILQLHAGVSERSGYTDSESSASLPRSPPPTVDESADNAFHLGPLRVTTTNTVASTPPTPTCEDAASRQQRLSALRRYQDKRLLALSNESDSEENVCEVELDTDLFPRPRSPSPEDESSSSSSSSSSEDEEELNERRASTWQRNAMRRRQKTTREDKPSAPIKPTNTYIGEDNYDYPQIKVDDLSSSPTSSPERSTSTLEIQPSRASPTSDIESVERKIYKAYKWLRYSYISYSNNKDGETSLVTGEADEGRAGTSHKDNPAPSSSKEACLNIAMAQRNQDLPPEGCSKDTFKEETPRTPSNGPGHEHSSHAWAEVPEGTSQDTGNSGSVEHPFETKKLNGKALSSRAEEPPSPPVPKASGSTLNSGSGNCPRTQSDDSEERSLETICANHNNGRLHPRPPHPHNNGQNLGELEVVAYSSPGHSDTDRDNSSLTGTLLHKDCCGSEMACETPNAGTREDPTDTPATDSSRAVHGHSGLKRQRIELEDTDSENSSSEKKLKT

SEQ ID NO: 834790 - protein, 472 aa, Homo sapiens
MRSVVGFLSQRGLHGDPLLTQDFQRRRLRGCRNLYKKDLLGHFGCVNAIEFSNNGGQWLVSGGDDRRVLLWHMEQAIHSRVKPIQLKGEHHSNIFCLAFNSGNTKVFSGGNDEQVILHDVESSETLDVFAHEDAVYGLSVSPVNDNIFASSSDDGRVLIWDIRESPHGEPFCLANYPSAFHSVMFNPVEPRLLATANSKEGVGLWDIRKPQSSLLRYGGNLSLQSAMSVRFNSNGTQLLALRRRLPPVLYDIHSRLPVFQFDNQGYFNSCTMKSCCFAGDRDQYILSGSDDFNLYMWRIPADPEAGGIGRVVNGAFMVLKGHRSIVNQVRFNPHTYMICSSGVEKIIKIWSPYKQPGCTGDLDGRIEDDSRCLYTHEEYISLVLNSGSGLSHDYANQSVQEDPRMMAFFDSLVRREIEGWSSDSDSDLSESTILQLHAGVSERSGYTDSESSASLPRSPLPSIQHSTTGLNV

SEQ ID NO: 834791 - protein, 326 aa, Homo sapiens
MKRRAGLGGSMRSVVGFLSQRGLHGDPLLTQDFQRRRLRGCRNLYKKDLLGHFGCVNAIEFSNNGGQWLVSGGDDRRVLLWHMEQAIHSRVKPIQLKGEHHSNIFCLAFNSGNTKVFSGGNDEQVILHDVESSETLDVFAHEDAVYGLSVSPVNDNIFASSSDDGRVLIWDIRESPHGEPFCLANYPSAFHSVMFNPVEPRLLATANSKEGVGLWDIRKPQSSLLRYGGNLSLQSAMSVRFNSNGTQLLALRRRLPPVLYDIHSRLPVFQFDNQGYFNSCTMKSCCFAGDRDQHHNWKWRAQAVSFQPFLSLTRNGDADVDLKLAV

SEQ ID NO: 834792 - protein, 932 aa, Homo sapiens [sequence omitted]

SEQ ID NO: 834793 - protein, 860 aa, Homo sapiens
MEQAIHSRVKPIQLKGEHHSNIFCLAFNSGNTKVFSGGNDEQVILHDVESSETLDVFAHEDAVYGLSVSPVNDNIFASSSDDGRVLIWDIRESPHGEPFCLANYPSAFHSVMFNPVEPRLLATANSKEGVGLWDIRKPQSSLLRYGGNLSLQSAMSVRFNSNGTQLLALRRRLPPVLYDIHSRLPVFQFDNQGYFNSCTMKSCCFAGDRDQYILSGSDDFNLYMWRIPADPEAGGIGRVVNGAFMVLKGHRSIVNQVRFNPHTYMICSSGVEKIIKIWSPYKQPGCTGDLDGRIEDDSRCLYTHEEYISLVLNSGSGLSHDYANQSVQEDPRMMAFFDSLVRREIEGWSSDSDSDLSESTILQLHAGVSERSGYTDSESSASLPRSPPPTVDESADNAFHLGPLRVTTTNTVASTPPTPTCEDAASRQQRLSALRRYQDKRLLALSNESDSEENVCEVELDTDLFPRPRSPSPEDESSSSSSSSSSEDEEELNERRASTWQRNAMRRRQKTTREDKPSAPIKPTNTYIGEDNYDYPQIKVDDLSSSPTSSPERSTSTLEIQPSRASPTSDIESVERKIYKAYKWLRYSYISYSNNKDGETSLVTGEADEGRAGTSHKDNPAPSSSKEACLNIAMAQRNQDLPPEGCSKDTFKEETPRTPSNGPGHEHSSHAWAEVPEGTSQDTGNSGSVEHPFETKKLNGKALSSRAEEPPSPPVPKASGSTLNSGSGNCPRTQSDDSEERSLETICANHNNGRLHPRPPHPHNNGQNLGELEVVAYSSPGHSDTDRDNSSLTGTLLHKDCCGSEMACETPNAGTREDPTDTPATDSSRAVHGHSGLKRQRIELEDTDSENSSSEKKLKT

SEQ ID NO: 834794 - protein, 890 aa, Homo sapiens
MRSVVGFLSQRGLHGDPLLTQDFQRRRLRGCRNLYKKDLLGHFGCVNAIEFSNNGGQWLVSGGDDRRVLLWHMEQAIHSRVKPIQLKGEHHSNIFCLAFNSGNTKVFSGGNDEQVILHDVESSETLDVFAHEDAVYGLSVSPVNDNIFASSSDDGRVLIWDIRESPHGEPFCLANYPSAFHSVMFNPVEPRLLATANSKEGVGLWDIRKPQSSLLRYGGNLSLQSAMSVRFNSNGTQLLALRRRLPPVLYDIHSRLPVFQFDNQGYFNSCTMKSCCFAGDRDQYILSGSDDFNLYMWRIPADPEADLEPITSSQDVLETSTVGLRTIPAASITHEEYISLVLNSGSGLSHDYANQSVQEDPRMMAFFDSLVRREIEGWSSDSDSDLSESTILQLHAGVSERSGYTDSESSASLPRSPPPTVDESADNAFHLGPLRVTTTNTVASTPPTPTCEDAASRQQRLSALRRYQDKRLLALSNESDSEENVCEVELDTDLFPRPRSPSPEDESSSSSSSSSSEDEEELNERRASTWQRNAMRRRQKTTREDKPSAPIKPTNTYIGEDNYDYPQIKVDDLSSSPTSSPERSTSTLEIQPSRASPTSDIESVERKIYKAYKWLRYSYISYSNNKDGETSLVTGEADEGRAGTSHKDNPAPSSSKEACLNIAMAQRNQDLPPEGCSKDTFKEETPRTPSNGPGHEHSSHAWAEVPEGTSQDTGNSGSVEHPFETKKLNGKALSSRAEEPPSPPVPKASGSTLNSGSGNCPRTQSDDSEERSLETICANHNNGRLHPRPPHPHNNGQNLGELEVVAYSSPGHSDTDRDNSSLTGTLLHKDCCGSEMACETPNAGTREDPTDTPATDSSRAVHGHSGLKRQRIELEDTDSENSSSEKKLKT

SEQ ID NO: 834795 - protein, 932 aa, Homo sapiens [sequence omitted]

SEQ ID NO: 834796 - protein, 357 aa, Homo sapiens
MRSVVGFLSQRGLHGDPLLTQDFQRRRLRGCRNLYKKDLLGHFGCVNAIEFSNNGGQWLVSGGDDRRVLLWHMEQAIHSRVKPIQLKGEHHSNIFCLAFNSGNTKVFSGGNDEQVILHDVESSETLDVFAHEDAVYGLSVSPVNDNIFASSSDDGRVLIWDIRESPHGEPFCLANYPSAFHSVMFNPVEPRLLATANSKEGVGLWDIRKPQSSLLRYGGNLSLQSAMSVRFNSNGTQLLALRRRLPPVLYDIHSRLPVFQFDNQGYFNSCTMKSCCFAGDRDQYILSGSDDFNLYMWRIPADPEAGGIGRVVNGAFMVLKGHRSIVNQVRFNPHTYMICSSGVEKIIKVRHLPLLSF

SEQ ID NO: 834797 - protein, 333 aa, Homo sapiens
MRSVVGFLSQRGLHGDPLLTQDFQRRRLRGCRNLYKKDLLGHFGCVNAIEFSNNGGQWLVSGGDDRRVLLWHMEQAIHSRVKPIQLKGEHHSNIFCLAFNSGNTKVFSGGNDEQVILHDVESSETLDVFAHEDAVYGLSVSPVNDNIFASSSDDGRVLIWDIRESPHGEPFCLANYPSAFHSVMFNPVEPRLLATANSKEGVGLWDIRKPQSSLLRYGGNLSLQSAMSVRFNSNGTQLLALRRRLPPVLYDIHSRLPVFQFDNQGYFNSCTMKSCCFAGDRDQYILSGSDDFNLYMWRIPADPEAGKYILHMNVLLLLALLTFGMLCPEGTDL

SEQ ID NO: 834798 - protein, 123 aa, Homo sapiens
  misc_feature (3)..(3): Xaa can be any naturally occurring amino acid
  misc_feature (6)..(6): Xaa can be any naturally occurring amino acid
  misc_feature (8)..(9): Xaa can be any naturally occurring amino acid
GGXPVXWXXTARDSITLLRRAHHLRLKILYFWNCSILLVTVGNLLLCLIYKLNFRYVCTGKNVVYSIVYMYRKKTYYLWFQVSTAGLRTYPPQVRGDCCTKNIGRPLDYIHSFLNRRKIPGTV

SEQ ID NO: 834799 - protein, 123 aa, Homo sapiens; identical to SEQ ID NO: 834798
  misc_feature (3)..(3): Xaa can be any naturally occurring amino acid
  misc_feature (6)..(6): Xaa can be any naturally occurring amino acid
  misc_feature (8)..(9): Xaa can be any naturally occurring amino acid

SEQ ID NO: 834800 - protein, 327 aa, Homo sapiens
HFRSAREEGSRGGREGAGKMVVTRSARAKASIQAASAESSGQKSFAANGIQAHPESSTGSDARTTAESQTTGKQSLIPRTPKARKRKSRTTGSLPKGTEPSTDGETSEAESNYSVSEHHDTILRVTRRRQILIACSPVSSVRKKPKVTPTKESYTEEIVSEAESHVSGISRIVLPTEKTTGARRSKAKSLTDPSQESHTEAISDAETSSSDISFSGIATRRTRSMQRKLKAQTEKKDSKIVPGNEKQIVGTPVNSEDSDTRQTSHLQARSLSEINKPNFYNNDFDDDFSHRSSEIFTGAKGKVNPKNTDGRNWRKATTHSMATTTED

SEQ ID NO: 834801 - protein, 789 aa, Homo sapiens
  misc_feature (665)..(665): Xaa can be any naturally occurring amino acid
HFRSAREEGSRGGREGAGKMVVTRSARAKASIQAASAESSGQKSFAANGIQAHPESSTGSDARTTAESQTTGKQSLIPRTPKARKRKSRTTGSLPKGTEPSTDGETSEAESNYSVSEHHDTILRVTRRRQILIACSPVSSVRKKPKVTPTKESYTEEIVSEAESHVSGISRIVLPTEKTTGARRSKAKSLTDPSQESHTEAISDAETSSSDISFSGIATRRTRSMQRKLKAQTEKKDSKIVPGNEKQIVGTPVNSEDSDTRQTSHLQARSLSEINKPNFYNNDFDDDFSHRSSENILTVHEQANVESLKETKQNCKDLDEDANGITDEGKEINEKSSQLKNLSELQDTSLQQLVSQRHSTPQNKNAVSVHSNLNSEAVMKSLTQTFATVEVGRWNNNKKSPIKASDLTKFGDCGGSDDEEESTVISVSEDMNSEGNVDFECDTKLYTSAPNTSQGKDNSVLLVLSSDESQQSENSENEEDTLCFVENSGQRESLSGDTGSLSCDNALFVIDTTPGMSADKNFYLEEEDKASEVAIEEEKEEEEDEKSEEDSSDHDENEDEFSDEEDFLNSTKAKLLKLTSSSIDPGLSIKQLGGLYINFNADKLQSNKRTLTQIKEKKKNELLQKAVITPDFEKNHCVPPYSESKYQLQKKRRRPKKGKKKKKGXTGKERQKTAGDGWFGMKAPEMTNELKNDLKALKMRASMDPKRFYKKNDRDGFPKYFQIGTIVDNPADFYHSRIPKKQRKRTIVEELLADSEFRRYNRRKYSEIMAEKAANAAGKKFRKKKKFRN

SEQ ID NO: 834802 - protein, 782 aa, Homo sapiens
HFRSAREEGSRGGREGAGKMVVTRSARAKASIQAASAESSGQKCVFSGLQSFAANGIQAHPESSTGSDARTTAESQTTGKQSLIPRTPKARKRKSRTTGSLPKGTEPSTDGETSEAESNYSVSEHHDTILRVTRRRQILIACSPVSSVRKKPKVTPTKESYTEEIVSEAESHVSGISRIVLPTEKTTGARRSKAKSLTDPSQESHTEAISDAETSSSDISFSGIATRRTRSMQRKLKAQTEKKDSKIVPGNEKQIVGTPVNSEDSDTRQTSHLQARSLSEINKPNFYNNDFDDDFSHRSSENILTVHEQANVESLKETKQNCKDLDEDANGITDEGKEINEKSSQLKNLSELQDTSLQQLVSQRHSTPQNKNAVSVHSNLNSEAVMKSLTQTFATVEVGRWNNNKKSPIKASDLTKFGDCGGSDDEEESTVISVSEDMNSEGNVDFECDTKLYTSAPNTSQGKDNSVLLVLSSDESQQSENSENEEDTLCFVENSGQRESLSGDTGSLSCDNALFVIDTTPGMSADKNFYLEEEDKASEVAIEEEKEEEEDEKSEEDSSDHDENEDEFSDEEDFLNSTKAKLLKLTSSSIDPGLSIKQLGGLYINFNADKLQSNKRTLTQIKEKKKNELLQKAVITPDFEKNHCVPPYSESKYQLQKKRRKERQKTAGDGWFGMKAPEMTNELKNDLKALKMRASMDPKRFYKKNDRDGFPKYFQIGTIVDNPADFYHSRIPKKQRKRTIVEELLADSEFRRYNRRKYSEIMAEKAANAAGKKFRKKKKFRN

SEQ ID NO: 834803 - protein, 109 aa, Homo sapiens [sequence omitted]

SEQ ID NO: 834804 - protein, 775 aa, Homo sapiens
HFRSAREEGSRGGREGAGKMVVTRSARAKASIQAASAESSGQKSFAANGIQAHPESSTGSDARTTAESQTTGKQSLIPRTPKARKRKSRTTGSLPKGTEPSTDGETSEAESNYSVSEHHDTILRVTRRRQILIACSPVSSVRKKPKVTPTKESYTEEIVSEAESHVSGISRIVLPTEKTTGARRSKAKSLTDPSQESHTEAISDAETSSSDISFSGIATRRTRSMQRKLKAQTEKKDSKIVPGNEKQIVGTPVNSEDSDTRQTSHLQARSLSEINKPNFYNNDFDDDFSHRSSENILTVHEQANVESLKETKQNCKDLDEDANGITDEGKEINEKSSQLKNLSELQDTSLQQLVSQRHSTPQNKNAVSVHSNLNSEAVMKSLTQTFATVEVGRWNNNKKSPIKASDLTKFGDCGGSDDEEESTVISVSEDMNSEGNVDFECDTKLYTSAPNTSQGKDNSVLLVLSSDESQQSENSENEEDTLCFVENSGQRESLSGDTGSLSCDNALFVIDTTPGMSADKNFYLEEEDKASEVAIEEEKEEEEDEKSEEDSSDHDENEDEFSDEEDFLNSTKAKLLKLTSSSIDPGLSIKQLGGLYINFNADKLQSNKRTLTQIKEKKKNELLQKAVITPDFEKNHCVPPYSESKYQLQKKRRKERQKTAGDGWFGMKAPEMTNELKNDLKALKMRASMDPKRFYKKNDRDGFPKYFQIGTIVDNPADFYHSRIPKKQRKRTIVEELLADSEFRRYNRRKYSEIMAEKAANAAGKKFRKKKKFRN

SEQ ID NO: 834805 - protein, 775 aa, Homo sapiens; identical to SEQ ID NO: 834804

SEQ ID NO: 834806 - protein, 551 aa, Homo sapiens
MQRKLKAQTEKKDSKIVPGNEKQIVGTPVNSEDSDTRQTSHLQARSLSEINKPNFYNNDFDDDFSHRSSENILTVHEQANVESLKETKQNCKDLDEDANGITDEGKEINEKSSQLKNLSELQDTSLQQLVSQRHSTPQNKNAVSVHSNLNSEAVMKSLTQTFATVEVGRWNNNKKSPIKASDLTKFGDCGGSDDEEESTVISVSEDMNSEGNVDFECDTKLYTSAPNTSQGKDNSVLLVLSSDESQQSENSENEEDTLCFVENSGQRESLSGDTGSLSCDNALFVIDTTPGMSADKNFYLEEEDKASEVAIEEEKEEEEDEKSEEDSSDHDENEDEFSDEEDFLNSTKAKLLKLTSSSIDPGLSIKQLGGLYINFNADKLQSNKRTLTQIKEKKKNELLQKAVITPDFEKNHCVPPYSESKYQLQKKRRKERQKTAGDGWFGMKAPEMTNELKNDLKALKMRASMDPKRFYKKNDRDGFPKYFQIGTIVDNPADFYHSRIPKKQRKRTIVEELLADSEFRRYNRRKYSEIMAEKAANAAGKKFRKKKKFRN

SEQ ID NO: 834807 - protein, 221 aa, Homo sapiens
GLGTRLGGGGRSAKMQLKPMEINPEMLNKVLSRLGVAGQWRFVDVLGLEEESLGSVPAPACALLLLFPLTAQHENFRKKQIEELKGQEVSPKVYFMKQTIGNSCGTIGLIHAVANNQDKLGFEDGSVLKQFLSETEKMSPEDRAKCFEKNEAIQAAHDAVAQEGQCRVDDKVNFHFILFNNVDGHLYELDGRMPFPVNHGASSEDTLLEGRCQGLQRIHRA

SEQ ID NO: 834808 - protein, 207 aa, Homo sapiens
MQLKPMEINPEMLNKVLSRLGVAGQWRFVDVLGLEEESLGSVPAPACALLLLFPLTAQHENFRKKQIEELKGQEVSPKVYFMKQTIGNSCGTIGLIHAVANNQDKLGFEDGSVLKQFLSETEKMSPEDRAKCFEKNEAIQAAHDAVAQEGQCRVDDKVNFHFILFNNVDGHLYELDGRMPFPVNHGASSEDTLLEGRCQGLQRIHRA

SEQ ID NO: 834809 - protein, 207 aa, Homo sapiens; identical to SEQ ID NO: 834808

SEQ ID NO: 834810 - protein, 207 aa, Homo sapiens; identical to SEQ ID NO: 834808

SEQ ID NO: 834811 - protein, 207 aa, Homo sapiens; identical to SEQ ID NO: 834808

SEQ ID NO: 834812 - protein, 207 aa, Homo sapiens; identical to SEQ ID NO: 834808

SEQ ID NO: 834813 - protein, 207 aa, Homo sapiens; identical to SEQ ID NO: 834808

SEQ ID NO: 834814 - protein, 207 aa, Homo sapiens; identical to SEQ ID NO: 834808

SEQ ID NO: 834815 - protein, 207 aa, Homo sapiens; identical to SEQ ID NO: 834808

SEQ ID NO: 834816 - protein, 207 aa, Homo sapiens; identical to SEQ ID NO: 834808

SEQ ID NO: 834817 - protein, 221 aa, Homo sapiens; identical to SEQ ID NO: 834807

SEQ ID NO: 834818 - protein, 205 aa, Homo sapiens
GEETYRLGRGLGAVLSRLGVAGQWRFVDVLGLEEESLGSVPAPACALLLLFPLTAQHENFRKKQIEELKGQEVSPKVYFMKQTIGNSCGTIGLIHAVANNQDKLGFEDGSVLKQFLSETEKMSPEDRAKCFEKNEAIQAAHDAVAQEGQCRVDDKVNFHFILFNNVDGHLYELDGRMPFPVNHGASSEDTLLEGRCQGLQRIHRA

SEQ ID NO: 834819 - protein, 201 aa, Homo sapiens
HASPTRRNKVLSRLGVAGQWRFVDVLGLEEESLGSVPAPACALLLLFPLTAQHENFRKKQIEELKGQEVSPKVYFMKQTIGNSCGTIGLIHAVANNQDKLGFEDGSVLKQFLSETEKMSPEDRAKCFEKNEAIQAAHDAVAQEGQCRVDDKVNFHFILFNNVDGHLYELDGRMPFPVNHGASSEDTLLEGRCQGLQRIHRA

SEQ ID NO: 834820 - protein, 191 aa, Homo sapiens
MQLKPMEINPEMLNKVLSRLGVAGQWRFVDVLGLEEESLGSVPAPACALLLLFPLTAQHENFRKKQIEELKGQEVSPKVYFMKQTIGNSCGTIGLIHAVANNQDKLGFEDGSVLKQFLSETEKMSPEDRAKCFEKNEVDDKVNFHFILFNNVDGHLYELDGRMPFPVNHGASSEDTLLEGRCQGLQRIHRA

SEQ ID NO: 834821 - protein, 110 aa, Homo sapiens
MKQTIGNSCGTIGLIHAVANNQDKLGFEDGSVLKQFLSETEKMSPEDRAKCFEKNEVDDKVNFHFILFNNVDGHLYELDGRMPFPVNHGASSEDTLLEGRCQGLQRIHRA

SEQ ID NO: 834822 - protein, 324 aa, Homo sapiens
NKQPTQARYEAGGESAEECVWPALYSCSLGGSASCFSSSSSSLGYFCRALREDAAQADGDQPRDAEQNAEQSEWRLAPSLAPSPASAEAGAPTGSGCWQGPSRPLRAPETAGLGRGLGAFPGPLHLAGDSTKPVTGRRRGLRPVASERQAELPRAWRGQHRLGCTGFAGATCGPRFVLCHCAGPGGGGRAGLGLLPGSGAGAEGARLLAPPPGRCPRPACPRAPGRLVSSPQVLSRLGVAGQWRFVDVLGLEEESLGSVPAPACALLLLFPLTAQHENFRKKQIEELKGQEVSPKVYFMKQTIGNSCGTIGLIHAPSVCLVSDI

SEQ ID NO: 834823 - protein, 174 aa, Homo sapiens
FSLCFFSVFLIHSSSSLGYFCRALREDAAQADGDQPRDAEQRRGAGSTDSAARASRAPRVGRALCCVIAPARVGVAGRDWGSSQARVRARRARASWPRPLAGARDPRVPVRLAALSPLRRCCPGWGSPASGASWTCWGWKRSLWARCQRLPARCCCCFPSRPSMRTSGKSRLKS

SEQ ID NO: 834824 - protein, 206 aa, Homo sapiens
KAVEAVGIGRGLNKVLSRLGVAGQWRFVDVLGLEEESLGSVPAPACALLLLFPLTAQHENFRKKQIEELKGQEVSPKVYFMKQTIGNSCGTIGLIHAVANNQDKLGFEDGSVLKQFLSETEKMSPEDRAKCFEKNEAIQAAHDAVAQEGQCRVDDKVNFHFILFNNVDGHLYELDGRMPFPVNHGASSEDTLLEGRCQGLQRIHRA

SEQ ID NO: 834825 - protein, 207 aa, Homo sapiens; identical to SEQ ID NO: 834808

SEQ ID NO: 834826 - protein, 207 aa, Homo sapiens; identical to SEQ ID NO: 834808

SEQ ID NO: 834827 - protein, 207 aa, Homo sapiens; identical to SEQ ID NO: 834808

SEQ ID NO: 834828 - protein, 207 aa, Homo sapiens; identical to SEQ ID NO: 834808

SEQ ID NO: 834829 - protein, 207 aa, Homo sapiens; identical to SEQ ID NO: 834808

SEQ ID NO: 834830 - protein, 126 aa, Homo sapiens
MKQTIGNSCGTIGLIHAVANNQDKLGFEDGSVLKQFLSETEKMSPEDRAKCFEKNEAIQAAHDAVAQEGQCRVDDKVNFHFILFNNVDGHLYELDGRMPFPVNHGASSEDTLLEGRCQGLQRIHRA

SEQ ID NO: 834831 - protein, 207 aa, Homo sapiens; identical to SEQ ID NO: 834808

SEQ ID NO: 834832 - protein, 383 aa, Homo sapiens
FSLCFFSVFLIHSSSSLGYFCRALREDAAQADGDQPRDAEQNAEQSEWRLAPSLAPSPASAEAGAPTGSGGLGRGLGAFPGPLHLAGDSTKPVTGRRRGLRPVASERQAELPRAWRGQHRLGCTGFAGATCGPRFVLCHCAGPGGGGRAGLGLLPGSGAGAEGARLLAPPPGRCPRPACPRAPGRLVSSPQVLSRLGVAGQWRFVDVLGLEEESLGSVPAPACALLLLFPLTAQHENFRKKQIEELKGQEVSPKVYFMKQTIGNSCGTIGLIHAVANNQDKLGFEDGSVLKQFLSETEKMSPEDRAKCFEKNEAIQAAHDAVAQEGQCRVDDKVNFHFILFNNVDGHLYELDGRMPFPVNHGASSEDTLLEGRCQGLQRIHRA

SEQ ID NO: 834833 - protein, 126 aa, Homo sapiens; identical to SEQ ID NO: 834830

SEQ ID NO: 834834 - protein, 234 aa, Homo sapiens
MQLKPMEINPEMLNKVLSRLGVAGQWRFVDVLGLEEESLGSVPAPACALLLLFPLTAQHENFRKKQIEELKGQEVSPKVYFMKQTIGNSCGTIGLIHAVANNQDKLGFEDGSVLKQFLSETEKMSPEDRAKCFEKNEAIQAAHDAVAQEGQCRVDDKVNFHFILFNNVDGHLYELDGRMPFPVNHGASSEDTLLEGHLWNASLLNDAAKVCREFTEREQGRSPASLPWLSARAA

SEQ ID NO: 834835 - protein, 182 aa, Homo sapiens
MQLKPMEINPEMLNKVLSRLGVAGQWRFVDVLGLEEESLGSVPAPACALLLLFPLTAQHENFRKKQIEELKGQEVSPKVYFMKQTIGNSCGTIGLIHAVANNQDKLGFEDGSVLKQFLSETEKMSPEDRAKCFEKNEAIQAAHDAVAQEGQCRDAAKVCREFTEREQGRSPASLPWLSARAA

SEQ ID NO: 834836 - protein, 80 aa, Homo sapiens
NQPAWNTNEALRRSSIIFCASGIAWRVDDKVNFHFILFNNVDGHLYELDGRMPFPVNHGASSEDTLLEGRCQGLQRIHRA

SEQ ID NO: 834837 - protein, 234 aa, Homo sapiens
MQLKPMEINPEMLNKVLSRLGVAGQWRFVDVLGLEEESLGSVPAPACALLLLFPLTAQHENFRKKQIEELKGQEVSPKVYFMKQTIGNSCGTIGLIHAVANNQDKLGFEDGSVLKQFLSETEKMSPEDRAKCFEKNEAIQAAHDAVAQEGQCRVDDKVNFHFILFNNVDGHLYELAFNMKIYTPPCSLKCFSTCETQAVLLFCRHAFPSATPRHLSTSRVHSCPLGHCGVSFRW

SEQ ID NO: 834838 - protein, 151 aa, Homo sapiens
MQLKPMEINPEMLNKVLSRLGVAGQWRFVDVLGLEEESLGSVPAPACALLLLFPLTAQHENFRKKQIEELKGQEVSPKVYFMKQTIGNSCGTIGLIHAVANNQDKLGFEDGSVLKQFLSETEKMSTGPLWCELQMVKHSPQCMSCIRYLTL

SEQ ID NO: 834839 - protein, 107 aa, Homo sapiens
MQLKPMEINPEMLNKVLSRLGVAGQWRFVDVLGLEEESLGSVPAPACALLLLFPLTAQHENFRKKQIEELKGQEVSPKVYFMKQTIGNSCGTIGLIHAPSVCLVSDI

SEQ ID NO: 834840 - protein, 400 aa, Homo sapiens
MSQVLGKPQPQDEDDAEEEEEEDELVGLADYGDGPDSSDADPDSGTEEGVLDFSDPFSTEVKPRILLMGLRRSGKSSIQKVVFHKMSPNETLFLESTNKICREDVSNSSFVNFQIWDFPGQIDFFDPTFDYEMIFRGTGALIFVIDSQDDYMEALARLHLTVTRAYKVNTDINFEVFIHKVDGLSDDHKIETQRDIHQRANDDLADAGLEKIHLSFYLTSIYDHSIFEAFSKVVQKLIPQLPTLENLLNIFISNSGIEKAFLFDVVSKIYIATDSTPVDMQTYELCCDMIDVVIDISCIYGLKEDGAGTPYDKESTAIIKLNNTTVLYLKEVTKFLALVCFVREESFERKGLIDYNFHCFRKAIHEVFEVRMKVVKSRKVQNRLQKKKRATPNGTPRVLL

SEQ ID NO: 834841 - protein, 400 aa, Homo sapiens; identical to SEQ ID NO: 834840

SEQ ID NO: 834842 - protein, 386 aa, Homo sapiens
MSWLKKGSRRRRDWQGRRQLRVSVSPRVAAGGAHPVLDFSDPFSTEVKPRILLMGLRRSGKSSIQKVVFHKMSPNETLFLESTNKICREDVSNSSFVNFQIWDFPGQIDFFDPTFDYEMIFRGTGALIFVIDSQDDYMEALARLHLTVTRAYKVNTDINFEVFIHKVDGLSDDHKIETQRDIHQRANDDLADAGLEKIHLSFYLTSIYDHSIFEAFSKVVQKLIPQLPTLENLLNIFISNSGIEKAFLFDVVSKIYIATDSTPVDMQTYELCCDMIDVVIDISCIYGLKEDGAGTPYDKESTAIIKLNNTTVLYLKEVTKFLALVCFVREESFERKGLIDYNFHCFRKAIHEVFEVRMKVVKSRKVQNRLQKKKRATPNGTPRVLL

SEQ ID NO: 834843 - protein, 268 aa, Homo sapiens [sequence omitted]

SEQ ID NO: 834844 - protein, 39 aa, Homo sapiens
MLAKLLWESPRGRRFPGIHANTVVRTPYLLSVSPPGHGS

SEQ ID NO: 834845 - protein, 249 aa, Homo sapiens
MEALARLHLTVTRAYKVNTDINFEVFIHKVDGLSDDHKIETQRDIHQRANDDLADAGLEKIHLSFYLTSIYDHSIFEAFSKVVQKLIPQLPTLENLLNIFISNSGIEKAFLFDVVSKIYIATDSTPVDMQTYELCCDMIDVVIDISCIYGLKEDGAGTPYDKESTAIIKLNNTTVLYLKEVTKFLALVCFVREESFERKGLIDYNFHCFRKAIHEVFEVRMKVVKSRKVQNRLQKKKRATPNGTPRVLL

SEQ ID NO: 834846 - protein, 400 aa, Homo sapiens; identical to SEQ ID NO: 834840

SEQ ID NO: 834847 - protein, 400 aa, Homo sapiens; identical to SEQ ID NO: 834840

SEQ ID NO: 834848 - protein, 149 aa, Homo sapiens
MSQVLGKPQPQDEDDAEEEEEEDELVGLADYGDGPDSSDADPDSGTEEGVLDFSDPFSTEVKPRILLMGLRRSGKSSIQKVVFHKMSPNETLFLESTNKICREDVSNSSFVNFQIWDFPGQIDFFDPTFDYEMIFRGTGALIFVIDSQG

SEQ ID NO: 834849 - protein, 96 aa, Homo sapiens
MADGKGDAAAVAGAGAEAPAVAGAGDGVETESMVRGHRPVSPAPGASGLRPCLWQLETELREQEVSEVSSLNYCRSFCQGADMDYDSYQHYFYDYD

SEQ ID NO: 834850 - protein, 1918 aa, Homo sapiens
RRGKMADGKGDAAAVAGAGAEAPAVAGAGDGVETESMVRGHRPVSPAPGASGLRPCLWQLETELREQEVSEVSSLNYCRSFCQTLLQYASNKNASEHIVYLLEVYRLAIQSFASARPYLTTECEDVLLVLGRLVLSCFELLLSVSESELPCEVWLPFLQSLQESHDALLEFGNNNLQILVHVTKEGVWKNPVLLKILSQQPVETEEVNKLIAQEGPSFLQMRIKHLLKSNCIPQATALSKLCAESKEISNVSSFQQAYITCLCSMLPNEDAIKEIAKVDCKEVLDIICNLESEGQDNTAFVLCTTYLTQQLQTASVYCSWELTLFWSKLQRRIDPSLDTFLERCRQFGVIAKTQQHLFCLIRVIQTEAQDAGLGVSILLCVRALQLRSSEDEEMKASVCKTIACLLPEDLEVRRACQLTEFLIEPSLDGFNMLEELYLQPDQKFDEENAPVPNSLRCELLLALKAHWPFDPEFWDWKTLKRHCHQLLGQEASDSDDDLSGYEMSINDTDVLESFLSDYDEGKEDKQYRRRDLTDQHKEKRDKKPIGSSERYQRWLQYKFFCLLCKRECIEARILHHSKMHMEDGIYTCPVCIKKFKRKEMFVPHVMEHVKMPPSRRDRSKKKLLLKGSQKGICPKSPSAIPEQNHSLNDQAKGESHEYVTFSKLEDCHLQDRDLYPCPGTDCSRVFKQFKYLSVHLKAEHQNNDENAKHYLDMKNRREKCTYCRRHFMSAFHLREHEQVHCGPQPYMCVSIDCYARFGSVNELLNHKQKHDDLRYKCELNGCNIVFSDLGQLYHHEAQHFRDASYTCNFLGCKKFYYSKIEYQNHLSMHNVENSNGDIKKSVKLEESATGEKQDCINQPHLLNQTDKSHLPEDLFCAESANSQIDTETAENLKENSDSNSSDQLSHSSSASMNEELIDTLDHSETMQDVLLSNEKVFGPSSLKEKCSSMAVCFDGTKFTCGFDGCGSTYKNARGMQKHLRKVHPYHFKPKKIKTKDLFPSLGNEHNQTTEKLDAEPKPCSDTNSDSPDEGLDHNIHIKCKREHQGYSSESSICASKRPCTEDTMLELLLRLKHLSLKNSITHGSFSGSLQGYPSSGAKSLQSVSSISDLNFQNQDENMPSQYLAQLAAKPFFCELQGCKYEFVTREALLMHYLKKHNYSKEKVLQLTMFQHRYSPFQCHICQRSFTRKTHLRIHYKNKHQIGSDRATHKLLDNEKCDHEGPCSVDRLKGDCSAELGGDPSSNSEKPHCHPKKDECSSETDLESSCEETESKTSDISSPIGSHREEQEGREGRGSRRTVAKGNLCYILNKYHKPFHCIHKTCNSSFTNLKGLIRHYRTVHQYNKEQLCLEKDKARTKRELVKCKKIFACKYKECNKRFLCSKALAKHCSDSHNLDHIEEPKVLSEAGSAARFSCNQPQCPAVFYTFNKLKHHLMEQHNIEGEIHSDYEIHCDLNGCGQIFTHRSNYSQHVYYRHKDYYDDLFRSQKVANERLLRSEKVCQTADTQGHEHQTTRRSFNAKSKKCGLIKEKKAPISFKTRAEALHMCVEHSEHTQYPCMVQGCLSVVKLESSIVRHYKRTHQMSSAYLEQQMENLVVCVKYGTKIKEEPPSEADPCIKKEENRSCESERTEHSHSPGDSSAPIQNTDCCHSSERDGGQKGCIESSSVFDADTLLYRGTLKCNHSSKTTSLEQCNIVQPPPPCKIENSIPNPNGTESGTYFTSFQLPLPRIKESETRQHSSGQENTVKNPTHVPKENFRKHSQPRSFDLKTYKPMGFESSFLKFIQESEEKEDDFDDWEPSEHLTLSNSSQSSNDLTGNVVANNMVNDSEPEVDIPHSSSDSTIHENLTAIPPLIVAETTTVPSLENLRVVLDKALTDCGELALKQLHYLRPVVVLERSKFSTPILDLFPTKKTDELCVGSS

SEQ ID NO: 834851 - protein, 1900 aa, Homo sapiens
RRGKMADGKGDAAAVAGAGAEAPAVAGAGDGVETESMVRGHRPVSPAPGASGLRPCLWQLETELREQEVSEVSSLNYCRSFCQTLLQYASNKNASEHIVYLLEVYRLAIQSFASARPYLTTECEDVLLVLGRLVLSCFELLLSVSESELPCEVWLPFLQSLQESHDALLEFGNNNLQILVHVTKEGVWKNPVLLKILSQQPVETEEVNKLIAQEGPSFLQMRIKHLLKSNCIPQATALSKLCAESKEISNVSSFQQAYITCLCSMLPNEDAIKEIAKVDCKEVLDIICNLESEGQDNTAFVLCTTYLTQQLQTASVYCSWELTLFWSKLQRRIDPSLDTFLERCRQFGVIAKTQQHLFCLIRVIQTEAQDAGLGVSILLCVRALQLRSSEDEEMKASVCKTIACLLPEDLEVRRACQLTEFLIEPSLDGFNMLEELYLQPDQKFDEENAPVPNSLRCELLLALKAHWPFDPEFWDWKTLKRHCHQLLGQEASDSDDDLSGYEMSINDTDVLESFLSDYDEGKEDKQYRRRDLTDQHKEKRDKKPIGSSERYQRWLQYKFFCLLCKRECIEARILHHSKMHMEDGIYTCPVCIKKFKRKEMFVPHVMEHVKMPPSRRDRSKKKLLLKGSQKGICPKSPSAIPEQNHSLNDQAKGESHEYVTFSKLEDCHLQDRDLYPCPGTDCSRVFKQFKYLSVHLKAEHQNNDENAKHYLDMKNRREKCTYCRRHFMSAFHLREHEQVHCGPQPYMCVSIDCYARFGSVNELLNHKQKHDDLRYKCELNGCNIVFSDLGQLYHHEAQHFRDASYTCNFLGCKKFYYSKIEYQNHLSMHNVENSNGDIKKSVKLEESATGEKQDCINQPHLLNQTDKSHLPEDLFCAESANSQIDTETAENLKENSDSNSSDQLSHSSSASMNEELIDTLDHSETMQDVLLSNEKVFGPSSLKEKCSSMAVCFDGTKFTCGFDGCGSTYKNARGMQKHLRKVHPYHFKPKKIKTKDLFPSLGNEHNQTTEKLDAEPKPCSDTNSDSPDEGLDHNIHIKCKREHQGYSSESSICASKRPCTEDTMLELLLRLKHLSLKNSITHGSFSGSLQGYPSSGAKSLQSVSSISDLNFQNQDENMPSQYLAQLAAKPFFCELQGCKYEFVTREALLMHYLKKHNYSKEKVLQLTMFQHRYSPFQCHICQRSFTRKTHLRIHYKNKHQIGSDRATHKLLDNEKCDHEGPCSVDRLKGDCSAELGGDPSSNSEKPHCHPKKDECSSETDLESSCEETESKTSDISSPIGSHREEQEGREGRGSRRTVAKGNLCYILNKYHKPFHCIHKTCNSSFTNLKGLIRHYRTVHQYNKEQLCLEKDKARTKRELVKCKKIFACKYKECNKRFLCSKALAKHCSDSHNLDHIEEPKVLSEAGSAARFSCNQPQCPAVFYTFNKLKHHLMEQHNIEGEIHSDYEIHCDLNGCGQIFTHRSNYSQHVYYRHKDYYDDLFRSQKVANERLLRSEKVCQTADTQGHEHQTTRRSFNAKSKKCGLIKEKKAPISFKTRAEALHMCVEHSEHTQYPCMVQGCLSVVKLESSIVRHYKRTHQMSSAYLEQQMENLVVCVKYGTKIKEEPPSEADPCIKKEENRSCESERTEHSHSPGDSSAPIQNTDCCHSSERDGGQKGCIESSSVFDADTLLYRGTLKCNHSSKTTSLEQCNIVQPPPPCKIENSIPNPNGTESGTYFTSFQLPLPRIKESETRQHSSGQENTVKNPTHVPKPMGFESSFLKFIQESEEKEDDFDDWEPSEHLTLSNSSQSSNDLTGNVVANNMVNDSEPEVDIPHSSSDSTIHENLTAIPPLIVAETTTVPSLENLRVVLDKALTDCGELALKQLHYLRPVVVLERSKFSTPILDLFPTKKTDELCVGSS

SEQ ID NO: 834852 - protein, 131 aa, Homo sapiens
MADGKGDAAAVAGAGAEAPAVAGAGDGVETESMVRGHRPVSPAPGASGLRPCLWQLETELREQEVSEVSSLNYCRSFCQTLLQYASNKNASEHIVYLLEVYRLAIQSFASARPYLTTECEDVLLVLGRLVL

SEQ ID NO: 834853 - protein, 1918 aa, Homo sapiens; identical to SEQ ID NO: 834850

SEQ ID NO: 834854 - protein, 1918 aa, Homo sapiens; identical to SEQ ID NO: 834850

SEQ ID NO: 834855 - protein, 827 aa, Homo sapiens
RRGKMADGKGDAAAVAGAGAEAPAVAGAGDGVETESMVRGHRPVSPAPGASGLRPCLWQLETELREQEVSEVSSLNYCRSFCQTLLQYASNKNASEHIVYLLEVYRLAIQSFASARPYLTTECEDVLLVLGRLVLSCFELLLSVSESELPCEVWLPFLQSLQESHDALLEFGNNNLQILVHVTKEGVWKNPVLLKILSQQPVETEEVNKLIAQEGPSFLQMRIKHLLKSNCIPQATALSKLCAESKEISNVSSFQQAYITCLCSMLPNEDAIKEIAKVDCKEVLDIICNLESEGQDNTAFVLCTTYLTQQLQTASVYCSWELTLFWSKLQRRIDPSLDTFLERCRQFGVIAKTQQHLFCLIRVIQTEAQDAGLGVSILLCVRALQLRSSEDEEMKASVCKTIACLLPEDLEVRRACQLTEFLIEPSLDGFNMLEELYLQPDQKFDEENAPVPNSLRCELLLALKAHWPFDPEFWDWKTLKRHCHQLLGQEASDSDDDLSGYEMSINDTDVLESFLSDYDEGKEDKQYRRRDLTDQHKEKRDKKPIGSSERYQRWLQYKFFCLLCKRECIEARILHHSKMHMEDGIYTCPVCIKKFKRKEMFVPHVMEHVKMPPSRRDRSKKKLLLKGSQKGICPKSPSAIPEQNHSLNDQAKGESHEYVTFSKLEDCHLQDRDLYPCPGTDCSRVFKQFKYLSVHLKAEHQNNDENAKHYLDMKNRREKCTYCRRHFMSAFHLREHEQVHCGPQPYMCVSIDCYARFGSVNELLNHKQKHDDLRYKCELNGCNIVFSDLGQLYHHGTWIHKGTWITMARGSQWHVDHNGTWITMARG

SEQ ID NO: 834856 - protein, 131 aa, Homo sapiens
MEEAGLCGLREKADMLCNSESHDILQHQDSNCSATSNKHLLEDEEGRDFITKNRSWVSPVHCTQESRRELPEQEVAPPSGQQALQCNRNKEKVLERQGLSLSPRLERGGTFMGHGSLKLPELVILSLQTLE

SEQ ID NO: 834857 - protein, 181 aa, Homo sapiens
MKQEEAQLKEQLFLYMDKFEEFQTTMAKTNELFTAFKQETEKLTKKIKKLEKEMVIWYTKWENNNTTLLQMAEEKTIRDKNYKVFQIKLERLEKLYKALQIERNELSEKLGILKGQVSVKVADVDLAVPVTHSCADLDSSNMLNTSSKRAPGVHLEADPKGMNEVKCYSKALSTGSPLGID

SEQ ID NO: 834858 - protein, 181 aa, Homo sapiens; identical to SEQ ID NO: 834857

SEQ ID NO: 834859 - protein, 131 aa, Homo sapiens
MEEAGLCGLREKADMLCNSESHDILQHQDSNCSATSNKHLLEDEEGRDFITKNRSWVSPVHCTQESRRELPEQEVAPPSGQQALQCNRNKEKVLGKEVLLLMQALNTLSTPEEKLAALCKKYADLGNSPLL

SEQ ID NO: 834860 - protein, 217 aa, Homo sapiens
AAAAVRPARAPAPAPPDPLAVAPSSVGRVVPRAPPPRAYENEVVTGPRMTPRHHCEAYSSAGEEEEEEEEEKFVNSTMEEAGLCGLREKADMLCNSESHDILQHQDSNCSATSNKHLLEDEEGRDFITKNRSWVSPVHCTQESRRELPEQEVAPPSGQQALQCNRNKEKVLGNNLCSVVGCCHILVFLFYIFCSMSDYELGLFGGKCCLVNLFLHLV

SEQ ID NO: 834861 - protein, 174 aa, Homo sapiens
FAAEVTSWRRGEVTPRRGSGGGAKTIGAKQGRTQLSSGFVNSTMEEAGLCGLREKADMLCNSESHDILQHQDSNCSATSNKHLLEDEEGRDFITKNRSWVSPVHCTQESRRELPEQEVAPPSGQQALQCNRNKEKVLGKEVLLLMQALNTLSTPEEKLAALCKKYADLGNSPLL

SEQ ID NO: 834862 - protein, 145 aa, Homo sapiens
MEEAGLCGLREKADMLCNSESHDILQHQDSNCSATSNKHLLEDEEGRDFITKNRSWVSPVHCTQESRRELPEQEVAPPSGQQALQCNRNKEKVLERQGLSLSPRLERGGKEVLLLMQALNTLSTPEEKLAALCKKYADLGNSPLL

SEQ ID NO: 834863 - protein, 174 aa, Homo sapiens
FAAEVTSWRRGEVTPRRGSGGGAKTIGAKQGRTQLSSGFVNSTMEEAGLCGLREKADMLCNSESHDILQHQDSNCSATSNKHLLEDEEGRDFITKNRSWVSPVHCTQESRRELPEQEVAPPSGQQALQCNRNKEKVLERQGLSLSPRLERGGTFMGHGSLKLPELVILSLQTLE

SEQ ID NO: 834864 - protein, 140 aa, Homo sapiens
MEEAGLCGLREKADMLCNSESHDILQHQDSNCSATSNKHLLEDEEGRDFITKNRSWVSPVHCTQESRRELPEQEVAPPSGQQALQCNRNKEKVLGNNLCSVVGCCHILVFLFYIFCSMSDYELGLFGGKCCLVNLFLHLV

SEQ ID NO: 834865 - protein, 131 aa, Homo sapiens; identical to SEQ ID NO: 834856

SEQ ID NO: 834866 - protein, 678 aa, Homo sapiens
MNASSEGESFAGSVQIPGGTTVLVELTPDIHICGICKQQFNNLDAFVAHKQSGCQLTGTSAAAPSTVQFVSEETVPATQTQTTTRTITSETQTITVSAPEFVFEHGYQTYLPTESNENQTATVISLPAKSRTKKPTTPPAQKRLNCCYPGCQFKTAYGMKDMERHLKIHTGDKPHKCEVCGKCFSRKDKLKTHMRCHTGVKPYKCKTCDYAAADSSSLNKHLRIHSDERPFKCQICPYASRNSSQLTVHLRSHTGDTPFQCWLCSAKFKISSDLKRHMLVHSGEKPFKCEFCDVRCTMKANLKSHIRIKHTFKCLHCAFQGRDRADLLEHSRLHQADHPEKCPECSYSCSSKAALRIHERIHCTDRPFKCNYCSFDTKQPSNLSKHMKKFHGDMVKTEALERKDTGRQSSRQVAKLDAKKSFHCDICDASFMREDSLRSHKRQHSEYSESKNSDVTVLQFQIDPSKQPATPLTVGHLQVPLQPSQVPQFSEGRVKIIVGHQVPQANTIVQAAAAAVNIVPPALVAQNPEELPGNSRLQILRQVSLIAPPQSSRCPSEAGAMTQPAVLLTTHEQTDGATLHQTLIPTASGGPQEGSGNQTFITSSGITCTDFEGLNALIQEGTAEVTVVSDGGQNIAVATTAPPVFSSSSQQELPKQTYSIIQGAAHPALLCPADSIPD

SEQ ID NO: 834867 - protein, 200 aa, Homo sapiens
MKDMERHLKIHTGDKPHKCEVCGKCFSRKDKLKTHMRCHTGVKPYKCKTCDYAAADSSSLNKHLRIHSDERPFKCQICPYASRNSSQLTVHLRSHTASELDDDVPKANCLSTESTDTPKAPVITLPSEAREQMATLGERTFNCCYPGCHFKTVHGMKDLDRHLRIHTAPFDQQPRGRCRAACCLEEVRGRGPPDHSPCGS

SEQ ID NO: 834868 - protein, 624 aa, Homo sapiens
MNASSEGESFAGSVQIPGGTTVLVELTPDIHICGICKQQFNNLDAFVAHKQSGCQLTGTSAAAPSTVQFVSEETVPATQTQTTTRTITSETQTITGCQFKTAYGMKDMERHLKIHTGDKPHKCEVCGKCFSRKDKLKTHMRCHTGVKPYKCKTCDYAAADSSSLNKHLRIHSDERPFKCQICPYASRNSSQLTVHLRSHTGDTPFQCWLCSAKFKISSDLKRHMLVHSGEKPFKCEFCDVRCTMKANLKSHIRIKHTFKCLHCAFQGRDRADLLEHSRLHQADHPEKCPECSYSCSSKAALRIHERIHCTDRPFKCNYCSFDTKQPSNLSKHMKKFHGDMVKTEALERKDTGRQSSRQVAKLDAKKSFHCDICDASFMREDSLRSHKRQHSEYSESKNSDVTVLQFQIDPSKQPATPLTVGHLQVPLQPSQVPQFSEGRVKIIVGHQVPQANTIVQAAAAAVNIVPPALVAQNPEELPGNSRLQILRQVSLIAPPQSSRCPSEAGAMTQPAVLLTTHEQTDGATLHQTLIPTASGGPQEGSGNQTFITSSGITCTDFEGLNALIQEGTAEVTVVSDGGQNIAVATTAPPVFSSSSQQELPKQTYSIIQGAAHPALLCPADSIPD

SEQ ID NO: 834869 - protein, 426 aa, Homo sapiens
MSRRKQAKPQHLNSEEPRPARRECAEVAPQVAGEPASELDDDVPKANCLSTESTDTPKAPVITLPSEAREQMATLGERTFNCCYPGCHFKTVHGMKDLDRHLRIHTGDKPHKCEFCDKCFSRKDNLTMHMRCHTSVKPHKCHLCDYAAVDSSSLKKHLRIHSDERPYKCQLCPYASRNSSQLTVHLRSHTGDTPFQCWLCSAKFKISSDLKRHMIVHSGEKPFKCEFCDVRCTMKANLKSHIRIKHTFKCLHCAFQGRDRADLLEHSRLHQADHPEKCPECSYSCSSAAALRVHSRVHCKDRPFKCDFCSFDTKRPSSLAKHVDKVHRDEAKTENRAPLGKEGLREGSSQHVAKIVTQRAFRCETCGASFVRDDSLRCHKKQHSDQSENKNSDLVTFPPESGASGQLSTLVSVGQLEAPLEPSQDL

SEQ ID NO: 834870 - protein, 734 aa, Homo sapiens
AHDRPTVQVGDLPVCLPGTRFTEGEKLSQGSGAIFPWCASETAAWMEDMSVPERVASIVRRSCEVSSLDEACDAFVASQGKSGVPADRHIAEQATQVRVQVCIGQETTCACADTEDVQTNTTNEPSQPSEKTLGRDHQVCEALREEVWFYFEASGYRESFELVAQRDKVTGKEPGQATVISLPAKSRTKKPTTPPAQKRLNCCYPGCQFKTAYGMKDMERHLKIHTGDKPHKCEVCGKCFSRKDKLKTHMRCHTGVKPYKCKTCDYAAADSSSLNKHLRIHSDERPFKCQICPYASRNSSQLTVHLRSHTGDTPFQCWLCSAKFKISSDLKRHMRVHSGEKPFKCEFCDVRCTMKANLKSHIRIKHTFKCLHCAFQGRDRADLLEHSRLHQADHPEKCPECSYSCSSKAALRIHERIHCTDRPFKCNYCSFDTKQPSNLSKHMKKFHGDMVKTEALERKDTGRQSSRQVAKLDAKKSFHCDICDASFMREDSLRSHKRQHSEYSESKNSDVTVLQFQIDPSKQPATPLTVGHLQVPLQPSQVPQFSEGRVKIIVGHQVPQANTIVQAAAAAVNIVPPALVAQNPEELPGNSRLQILRQVSLIAPPQSSRCPSEAGAMTQPAVLLTTHEQTDGATLHQTLIPTASGGPQEGSGNQTFITSSGITCTDFEGLNALIQEGTAEVTVVSDGGQNIAVATTAPPVFSSSSQQELPKQTYSIIQGAAHPALLCPADSIPD

SEQ ID NO: 834871 - protein, 515 aa, Homo sapiens
MNASSEGESFAGSVQIPGGTTVLVELTPDIHICGICKQQFNNLDAFVAHKQSGCQLTGTSAAAPSTVQFVSEETVPATQTQTTTRTITSETQTITVSAPEFVFEHGYQTYLPTESNENQTATVISLPAKSRTKKPTTPPAQKRLNCCYPGCQFKTAYGMKDMERHLKIHTGDKPHKCEVCGKCFSRKDKLKTHMRCHTGVKPYKCKTCDYAAADSSSLNKHLRIHSDERPFKCQICPYASRNSSQLTVHLRSHTGDTPFQCWLCSAKFKISSDLKRHMLVHSGEKPFKCEFCDVRCTMKANLKSHIRIKHTFKCLHCAFQGRDRADLLEHSRLHQADHPEKCPECSYSCSSKAALRIHERIHCTDRPFKCNYCSFDTKQPSNLSKHMKKFHGDMVKTEALERKDTGRQSSRQVAKLECSGAILAHCNVRLPGSSDSHASALRVAGTTGVRHHDWLIFVYLVETGFHHVELLTSSDLPTSASQSAGITGVSHHAWPWFALNVFKDGCESPWPHNKL

SEQ ID NO: 834872 - protein, 259 aa, Homo sapiens
MNASSEGESFAGSVQIPGGTTVLVELTPDIHICGICKQQFNNLDAFVAHKQSGCQLTGTSAAAPSTVQFVSEETVPATQTQTTTRTITSETQTITVSAPEFVFEHGYQTYLPTESNENQTATVISLPAKSRTKKPTTPPAQKRLNCCYPGCQFKTAYGMKDMERHLKIHTGDKPHKCEVCGKCFSRKDKLKTHMRCHTGVKPYKCKTCDYAAADSSSLNKHLRIHSDERPFKCQICPYASRNSSQLTVHLRSHTGPGPG

SEQ ID NO: 834873 - protein, 591 aa, Homo sapiens
MNASSEGESFAGSVQIPGGTTVLVELTPDIHICGICKQQFNNLDAFVAHKQSGCQLTGTSAAAPSTVQFVSEETVPATQTQTTTRTITSETQTITGCQFKTAYGMKDMERHLKIHTGDKPHKCEVCGKCFSRKDKLKTHMRCHTGVKPYKCKTCDYAAADSSSLNKHLRIHSDERPFKCQICPYASRNSSQLTVHLRSHTASELDDDVPKANCLSTESTDTPKAPVITLPSEAREQMATLGERTFNCCYPGCHFKTVHGMKDLDRHLRIHTGDKPHKCEFCDKCFSRKDNLTMHMRCHTSVKPHKCHLCDYAAVDSSSLKKHLRIHSDERPYKCQLCPYASRNSSQLTVHLRSHTGDTPFQCWLCSAKFKISSDLKRHMIVHSGEKPFKCEFCDVRCTMKANLKSHIRIKHTFKCLHCAFQGRDRADLLEHSRLHQADHPEKCPECSYSCSSAAALRVHSRVHCKDRPFKCDFCSFDTKRPSSLAKHVDKVHRDEAKTENRAPLGKEGLREGSSQHVAKIVTQRAFRCETCGASFVRDDSLRCHKKQHSDQSENKNSDLVTFPPESGASGQLSTLVSVGQLEAPLEPSQDL

SEQ ID NO: 834874 - protein, 244 aa, Homo sapiens [sequence omitted]

SEQ ID NO: 834875 - protein, 112 aa, Homo sapiens
FRKAVGNKPFPFLNLVSCCHLCVYVFEGDKPHKCEVCGKCFSRKDKLKTHMRCHTGVKPYKCKTCDYAAADSSSLNKHLRIHSDERPFKCQICPYASRNSSQLTVHLRSHTG

SEQ ID NO: 834876 - protein, 142 aa, Homo sapiens
MNASSEGESFAGSVQIPGGTTVLVELTPDIHICGICKQQFNNLDAFVAHKQSGCQLTGTSAAAPSTVQFVSEETVPATQTQTTTRTITSETQTITDGASLCCPGWSAMTRSWPTATSASRVQAILPQPPEWLGLQVPTTTPS

SEQ ID NO: 834877 - protein, 624 aa, Homo sapiens; identical to SEQ ID NO: 834868

SEQ ID NO: 834878 - protein, 678 aa, Homo sapiens
MTEGVRAFDGEPPTDVPGGTTVLVELTPDIHICGICKQQFNNLDAFVAHKQSGCQLTGTSAAAPSTVQFVSEETVPATQTQTTTRTITSETQTITVSAPEFVFEHGYQTYLPTESNENQTATVISLPAKSRTKKPTTPPAQKRLNCCYPGCQFKTAYGMKDMERHLKIHTGDKPHKCEVCGKCFSRKDKLKTHMRCHTGVKPYKCKTCDYAAADSSSLNKHLRIHSDERPFKCQICPYASRNSSQLTVHLRSHTGDTPFQCWLCSAKFKISSDLKRHMLVHSGEKPFKCEFCDVRCTMKANLKSHIRIKHTFKCLHCAFQGRDRADLLEHSRLHQADHPEKCPECSYSCSSKAALRIHERIHCTDRPFKCNYCSFDTKQPSNLSKHMKKFHGDMVKTEALERKDTGRQSSRQVAKLDAKKSFHCDICDASFMREDSLRSHKRQHSEYSESKNSDVTVLQFQIDPSKQPATPLTVGHLQVPLQPSQVPQFSEGRVKIIVGHQVPQANTIVQAAAAAVNIVPPALVAQNPEELPGNSRLQILRQVSLIAPPQSSRCPSEAGAMTQPAVLLTTHEQTDGATLHQTLIPTASGGPQEGSGNQTFITSSGITCTDFEGLNALIQEGTAEVTVVSDGGQNIAVATTAPPVFSSSSQQELPKQTYSIIQGAAHPALLCPADSIPD

SEQ ID NO: 834879 - protein, 645 aa, Homo sapiens
MNASSEGESFAGSVQIPGGTTVLVELTPDIHICGICKQQFNNLDAFVAHKQSGCQLTGTSAAAPSTVQFVSEETVPATQTQTTTRTITSETQTITVSAPEFVFEHGYQTYLPTESNENQTATVISLPAKSRTKKPTTPPAQKRLNCCYPGCQFKTAYGMKDMERHLKIHTGDKPHKCEVCGKCFSRKDKLKTHMRCHTGVKPYKCKTCDYAAADSSSLNKHLRIHSDERPFKCQICPYASRNSSQLTVHLRSHTASELDDDVPKANCLSTESTDTPKAPVITLPSEAREQMATLGERTFNCCYPGCHFKTVHGMKDLDRHLRIHTGDKPHKCEFCDKCFSRKDNLTMHMRCHTSVKPHKCHLCDYAAVDSSSLKKHLRIHSDERPYKCQLCPYASRNSSQLTVHLRSHTGDTPFQCWLCSAKFKISSDLKRHMIVHSGEKPFKCEFCDVRCTMKANLKSHIRIKHTFKCLHCAFQGRDRADLLEHSRLHQADHPEKCPECSYSCSSAAALRVHSRVHCKDRPFKCDFCSFDTKRPSSLAKHVDKVHRDEAKTENRAPLGKEGLREGSSQHVAKIVTQRAFRCETCGASFVRDDSLRCHKKQHSDQSENKNSDLVTFPPESGASGQLSTLVSVGQLEAPLEPSQDL

SEQ ID NO: 834880 - protein, 487 aa, Homo sapiens
MKDMERHLKIHTGDKPHKCEVCGKCFSRKDKLKTHMRCHTGVKPYKCKTCDYAAADSSSLNKHLRIHSDERPFKCQICPYASRNSSQLTVHLRSHTASELDDDVPKANCLSTESTDTPKAPVITLPSEAREQMATLGERTFNCCYPGCHFKTVHGMKDLDRHLRIHTGDKPHKCEFCDKCFSRKDNLTMHMRCHTSVKPHKCHLCDYAAVDSSSLKKHLRIHSDERPYKCQLCPYASRNSSQLTVHLRSHTGDTPFQCWLCSAKFKISSDLKRHMIVHSGEKPFKCEFCDVRCTMKANLKSHIRIKHTFKCLHCAFQGRDRADLLEHSRLHQADHPEKCPECSYSCSSAAALRVHSRVHCKDRPFKCDFCSFDTKRPSSLAKHVDKVHRDEAKTENRAPLGKEGLREGSSQHVAKIVTQRAFRCETCGASFVRDDSLRCHKKQHSDQSENKNSDLVTFPPESGASGQLSTLVSVGQLEAPLEPSQDL

SEQ ID NO: 834881 - protein, 426 aa, Homo sapiens
MNASSEGESFAGSVQIPGGTTVLVELTPDIHICGICKQQFNNLDAFVAHKQSGCQLTGTSAAAPSTVQFVSEETVPATQTQTTTRTITSETQTITVSAPEFVFEHGYQTYLPTESNENQTATVISLPAKSRTKKPTTPPAQKRLNCCYPGCQFKTAYGMKDMERHLKIHTGDKPHKCEVCGKCFSRKDKLKTHMRCHTGVKPYKCKTCDYAAADSSSLNKHLRIHSDERPFKCQICPYASRNSSQLTVHLRSHTASELDDDVPKANCLSTESTDTPKAPVITLPSEAREQMATLGERTFNCCYPGCHFKTVHGMKDLDRHLRIHTGDKPHKCEFCDKCFSRKDNLTMHMRCHTSVKPHKCHLCDYAAVDSSSLKKHLRIHSDERPYKCQLCPYASRNSSQLTVHLRSHTGESLTRKPQSLTFSLIS

SEQ ID NO: 834882 - protein, 226 aa, Homo sapiens
MSEYIRVTEDENDEPIEIPSEDDGTVLLSTVTAQFPGACGLRCRNPVSQCMRGVRLVEGILHAPDAGWRNPVYVVNYPKDNKRKMGETEASSAVKVKRPVRFNSVGSPMENNEQDLKEYCSTFGDVLMVRQSQDEPLRSRKVFVGRRTEDMTEDELWEFFSQYGDVMDVFVPKPFRAFAFVPFADDQIARSLCGEDSMKGISVHISNAEPKRNSNRQQEVEDLVVI

SEQ ID NO: 834883 - protein, 154 aa, Homo sapiens [sequence omitted]

SEQ ID NO: 834884 - protein, 135 aa, Homo sapiens
NSVCLLNDSYMIPLTQVITWIQHLIPKIEDGNDFGVAIQEKVLERVNAVKTKVEAFQTTISKYFSERGDAVAKASKETHVMDYRALVHERDEAAYGELRAMVLDLRAFYAELYHIISSNLEKIVNPKGEEKPSMY

SEQ ID NO: 834885 - protein, 282 aa, Homo sapiens
MAKPCGVRLSGEARKQVEVFRQNLFQEFRSSVSSFASLGPSDFQRPFQFHLSDISLSIFCDSPPLQCNPQAEEFLYRFLPQKIIYLNQLLQEDSLNVADLTSLRAPLDIPIPDPPPKDDEMETDKQEKKEVPKCGFLPGNEKVLSLLALVKPEVWTLKEKCILVITWIQHLIPKIEDGNDFGVAIQEKVLERVNAVKTKVEAFQTTISKYFSERGDAVAKASKETHVMDYRALVHERDEAAYGELRAMVLDLRAFYAELYHIISSNLEKIVNPKGEEKPSMY

SEQ ID NO: 834886 - protein, 162 aa, Homo sapiens
METDKQEKKEVPKCGFLPGNEKVLSLLALVKPEVWTLKEKCILVITWIQHLIPKIEDGNDFGVAIQEKVLERVNAVKTKVEAFQTTISKYFSERGDAVAKASKETHVMDYRALVHERDEAAYGELRAMVLDLRAFYAELYHIISSNLEKIVNPKGEEKPSMY

SEQ ID NO: 834887 - protein, 162 aa, Homo sapiens; identical to SEQ ID NO: 834886

SEQ ID NO: 834888 - protein, 162 aa, Homo sapiens; identical to SEQ ID NO: 834886

SEQ ID NO: 834889 - protein, 162 aa, Homo sapiens; identical to SEQ ID NO: 834886

SEQ ID NO: 834890 - protein, 162 aa, Homo sapiens; identical to SEQ ID NO: 834886

SEQ ID NO: 834891 - protein, 162 aa, Homo sapiens; identical to SEQ ID NO: 834886

SEQ ID NO: 834892 - protein, 162 aa, Homo sapiens; identical to SEQ ID NO: 834886

SEQ ID NO: 834893 - protein, 163 aa, Homo sapiens [sequence omitted]

SEQ ID NO: 834894 - protein, 163 aa, Homo sapiens [sequence omitted]

SEQ ID NO: 834895 - protein, 110 aa, Homo sapiens
METDKQEKKEVPKCGFLPGNEKVLSLLALVKPEVWTLKEKCILVITWIQHLIPKIEDGNDFGVAIQEKVLERVNAVKTKVEAFQTTISKYFSERGDAVAKASKETHVVSG

SEQ ID NO: 834896 - protein, 107 aa, Homo sapiens
MAKPCGVRLSGEARKQVEVFRQNLFQEFRSSVSSFASLGPSDFQRPFQFHLSDISLSIFCDSPPLQCNPQAEEFLYRFLPQKIIYLNQLLQLRAMVLDLRAFYVSVE

SEQ ID NO: 834897 - protein, 162 aa, Homo sapiens; identical to SEQ ID NO: 834886

SEQ ID NO: 834898 - protein, 162 aa, Homo sapiens; identical to SEQ ID NO: 834886

SEQ ID NO: 834899 - protein, 162 aa, Homo sapiens; identical to SEQ ID NO: 834886

SEQ ID NO: 834900 - protein, 162 aa, Homo sapiens; identical to SEQ ID NO: 834886

SEQ ID NO: 834901 - protein, 162 aa, Homo sapiens; identical to SEQ ID NO: 834886

SEQ ID NO: 834902 - protein, 162 aa, Homo sapiens; identical to SEQ ID NO: 834886

SEQ ID NO: 834903 - protein, 163 aa, Homo sapiens [sequence omitted]

SEQ ID NO: 834904 - protein, 140 aa, Homo sapiens
METDKQEKKEVPKCGFLPGNEKVLSLLALVKPEVWTLKEKCILVITWIQHLIPKIEDGNDFGVAIQEKVLERVNAVKTKVEAFQTTISKYFSERGDAVAKASKETHVMDYRALVHERDEAAYGELRAMVLDLRAFYVSVE

SEQ ID NO: 834905 - protein, 110 aa, Homo sapiens; identical to SEQ ID NO: 834895

SEQ ID NO: 834906 - protein, 346 aa, Homo sapiens
MEYQILKMSLCLFILLFLTPGILCICPLQCICTERHRHVDCSGRNLSTLPSGLQENIIHLNLSYNHFTDLHNQLTQYTNLRTLDISNNRLESLPAHLPRSLWNMSAANNNIKLLDKSDTAYQWNLKYLDVSKNMLEKVVLIKNTLRSLEVLNLSSNKLWTVPTNMPSKLHIVDLSNNSLTQILPGTLINLTNLTHLYLHNNKFTFIPDQSFDQLFQLQEITLYNNRWSCDHKQNITYLLKWMMETKAHVIGTPCSTQISSLKEHNMYPTPSGFTSSLFTVSGMQTVDTINSLSVVTQPKVTKIPKQYRTKETTFGATLSKDTTFTSTDKAFCALSRRYIHRDYQFT

SEQ ID NO: 834907 - protein, 321 aa, Homo sapiens
MSLCLFILLFLTPGILCICPLQCICTERHRHVDCSGRNLSTLPSGLQENIIHLNLSYNHFTDLHNQLTQYTNLRTLDISNNRLESLPAHLPRSLWNMSAANNNIKLLDKSDTAYQWNLKYLDVSKNMLEKVVLIKVPTNMPSKLHIVDLSNNSLTQILPGTLINLTNLTHLYLHNNKFTFIPDQSFDQLFQLQEITLYNNRWSCDHKQNITYLLKWMMETKAHVIGTPCSTQISSLKEHNMYPTPSGFTSSLFTVSGMQTVDTINSLSVVTQPKVTKIPKQYRTKETTFGATLSKDTTFTSTDKAFCALSRRYIHRDYQFT

SEQ ID NO: 834908 - protein, 346 aa, Homo sapiens; identical to SEQ ID NO: 834906

SEQ ID NO: 834909 - protein, 121 aa, Homo sapiens
VCSRGVPRGIRFVPYPEDTSTETINSHEAAAATLTIHLQDGMVTNTSLTSSTKSSPTPMTLSITSGMPNNFSEMPQQSTTLNLWREETTTNVKTPLPSVANAWKVNASFLLLLNVVVMLAV

SEQ ID NO: 834910 - protein, 440 aa, Homo sapiens
  misc_feature (21)..(21): Xaa can be any naturally occurring amino acid
MEYQILKMSLCLFILLFLTPXILCICPLQCICTERHRHVDCSGRNLSTLPSGLQENIIHLNLSYNHFTDLHNQLTQYTNLRTLDISNNRLESLPAHLPRSLWNMSAANNNIKLLDKSDTAYQWNLKYLDVSKNMLEKVVLIKNTLRSLEVLNLSSNKLWTVPTNMPSKLHIVDLSNNSLTQILPGTLINLTNLTHLYLHNNKFTFIPDQSFDQLFQLQEITLYNNRWSCDHKQNITYLLKWMMETKAHVIGTPCSTQISSLKEHNMYPTPSGFTSSLFTVSGMQTVDTINSLSVVTQPKVTKIPKQYRTKETTFGATLSKDTTFTSTDKAFVPYPEDTSTETINSHEAAAATLTIHLQDGMVTNTSLTSSTKSSPTPMTLSITSGMPNNFSEMPQQSTTLNLWREETTTNVKTPLPSVANAWKVNASFLLLLNVVVMLAV

SEQ ID NO: 834911 - protein, 443 aa, Homo sapiens
WPYMGSRVTDGTHSHKTLRGRRNPRLLGRRAAALAIERAGRERGVAPPLGRRAPSRPQPRGSPSRASPADTLAVDTLAVGTRGARGAGPLAGGGGGMKVTSLDGRQLRKMLRKEAAARCVVLDCRPYLAFAASNVRGSLNVNLNSVVLRRARGGAVSARYVLPDEAARARLLQEGGGGVAAVVVLDQGSRHWQKLREESAARVVLTSLLACLPAGPRVYFLKGGYETFYSEYPECCVDVKPISQEKIESERALISQCGKPVVNVSYRPAYDQGGPVEILPFLYLGSAYHASKCEFLANLHITALLNVSRRTSEACMTHLHYKWIPVEDSHTADISSHFQEAIDFIDCVREKGGKVLVHCEAGISRSPTICMAYLMKTKQFRLKEAFDYIKQRRSMVSPNFGFMGQLLQYESENPALHAQPPASLLPRGGSRLFTDRPFADTEP

SEQ ID NO: 834912 - protein, 416 aa, Homo sapiens
WPYMGSRVTDGTHSHKTLRGRRNPRLLGRRAAGWLSSERGGNAELRRRSGAGLRRGARGAGPLAGGGGGMKVTSLDGRQLRKMLRKEAAARCVVLDCRPYLAFAASNVRGSLNVNLNSVVLRRARGGAVSARYVLPDEAARARLLQEGGGGVAAVVVLDQGSRHWQKLREESAARVVLTSLLACLPAGPRVYFLKGGYETFYSEYPECCVDVKPISQEKIESERALISQCGKPVVNVSYRPAYDQGGPVEILPFLYLGSAYHASKCEFLANLHITALLNVSRRTSEACMTHLHYKWIPVEDSHTADISSHFQEAIDFIDCVREKGGKVLVHCEAGISRSPTICMAYLMKTKQFRLKEAFDYIKQRRSMVSPNFGFMGQLLQYESENPALHAQPPASLLPRGGSRLFTDRPFADTEP

SEQ ID NO: 834913 - protein, 499 aa, Homo sapiens
WPYMGSRVTDGTHSHKTLRGRRNPRLLGRRAAGLAIERAGRERGVAPPLGRRAPSRPQPRGSPSRASPADTLAVDTLAVGTRGARGAGPLAGGGGGMKVTSLDGRQLRKMLRKEAAARCVVLDCRPYLAFAASNVRGSLNVNLNSVVLRRARGGAVSARYVLPDEAARARLLQEGGGGVAAVVVLDQGSRHWQKLREESAARVVLTSLLACLPAGPRVYFLKGGYETFYSEYPECCVDVKPISQEKIESERALISQCGKPVVNVSYRPAYDQITETRGNQKILEGFMFLKLGGPVEILPFLYLGSAYHASKCEFLANLHITALLNVSRRTSEACMTHLHYKWIPVEDSHTADISSHFQEAIDFIDCVREKGGKVLVHCEAGISRSPTICMAYLMKTKQFRLKEAFDYIKQRRSMVSPNFGFMGQLLQYESEILPSTPNPQPPSCQGEAAGSSLIGHLQTLSPDMQGAYCTFPASVLAPVPTHSTVSELSRSPVATATSC

SEQ ID NO: 834914 - protein, 213 aa, Homo sapiens
WPYMGSRVTDGTHSHKTLRGRRNPRLLGRRAAALAIERAGRERGVAPPLGRRAPSRPQPRGSPSRASPADTLAVDTLAVGTRGARGAGPLAGGGGGMKVTSLDGRQLRKMLRKEAAARCVVLDCRPYLAFAASNVRGSLNVNLNSVVLRRARGGAVSARYVWTRAAATGRSCERRAPRVSSSPRYSLAYPPARGSTSSKVSARGPCHARPSGA

SEQ ID NO: 834915 - protein, 443 aa, Homo sapiens; identical to SEQ ID NO: 834911

SEQ ID NO: 834916 - protein, 443 aa, Homo sapiens; identical to SEQ ID NO: 834911

SEQ ID NO: 834917 - protein, 289 aa, Homo sapiens
WPYMGSRVTDGTHSHKTLRGRRNPRLLGRRAAALAIERAGRERGVAPPLGRRAPSRPQPRGSPSRASPADTLAVDTLAVGTRGARGAGPLAGGGGGMKVTSLDGRQLRKMLRKEAAARCVVLDCRPYLAFAASNVRGSLNVNLNSVVLRRARGGAVSARYVLPDEAARARLLQEGGGGVAAVVVLDQGSRHWQKLREESAARVVLTSLLACLPAGPRVYFLKGGYETFYSEYPECCVDVKPISQEKIESERALISQCGKPVVNVSYRPAYDQITETRGNQKILEGFMFL

SEQ ID NO: 834918 - protein, 74 aa, Homo sapiens
MPPARCAWRGLAGFLRAEELLNKTVKRKTHRLLRENSLYTCVRAPGLIAPCWMCQKEECKDSEARWAVPSPSPK

SEQ ID NO: 834919 - protein, 432 aa, Homo sapiens
SGTGACAAAGLPLVGPHVEPLLVLLTRAPRNLQLGPVWDWKPAMAASAAETRVFLEVRGQLQSALLILGEPKEGGMPMNISIMPSSLQMKTPEGCTEIQLPAEVRLVPSSCRGLQFVVGDGLHLRLQTQAKLGTKLISMFNQSSQTQECCTFYCQSCGEVIIKDRKLLRVLPLPSENWGALVGEWCCHPDPFANKSLHPQENDCFIGDSFFLVNLRTSLWQQRPELSPVEMCCVSSDNHCKLEPKANTKVICKRCKVMLGETVSSETTKFYMTEIIIQSSERSFPIIPRSWFVQSVIAQCLVQLSSARSTFRFTIQGQDDKVYILLWLLNSDSLVIESLRNSKYIKKFPLLENTFKADSSSAWSAVKVLYQPCIKSRNEKLVSLWESDISVHPLTLPSATCLELLLILSKSNANLPSSLRRVNSFQVAFLKM

SEQ ID NO: 834920 - protein, 357 aa, Homo sapiens
MPMNISIMPSSLQMKTPEGCTEIQLPAEVRLVPSSCRGLQFVVGDGLHLRLQTQAKLGTKLISMFNQSSQTQECCTFYCQSCGEVIIKDRKLLRVLPLPSENWGALVGEWCCHPDPFANKSLHPQENDCFIGDSFFLVNLRTSLWQQRPELSPVEMCCVSSDNHCKLEPKANTKVICKRCKVMLGETVSSETTKFYMTEIIIQSSERSFPIIPRSWFVQSVIAQCLVQLSSARSTFRFTIQGQDDKVYILLWLLNSDSLVIESLRNSKYIKKFPLLENTFKADSSSAWSAVKVLYQPCIKSRNEKLVSLWESDISVHPLTLPSATCLELLLILSKSNANLPSSLRRVNSFQVAFLKM

SEQ ID NO: 834921 - protein, 357 aa, Homo sapiens; identical to SEQ ID NO: 834920

SEQ ID NO: 834922 - protein, 357 aa, Homo sapiens; identical to SEQ ID NO: 834920

SEQ ID NO: 834923 - protein, 432 aa, Homo sapiens; identical to SEQ ID NO: 834919

SEQ ID NO: 834924 - protein, 208 aa, Homo sapiens
RWSHVLSPRLECSGTISAHCNICLLVSSNYPASPSRVAGTTETTKFYMTEIIIQSSERSFPIIPRSWFVQSVIAQCLVQLSSARSTFRFTIQGQDDKVYILLWLLNSDSLVIESLRNSKYIKKFPLLENTFKADSSSAWSAVKVLYQPCIKSRNEKLVSLWESDISVHPLTLPSATCLELLLILSKSNANLPSSLRRVNSFQVAFLKM

SEQ ID NO: 834925 - protein, 321 aa, Homo sapiens
MPSSLQMKTPEGCTEIQLPAEVRLVPSSCRGLQFVVGDGLHLRLQTQAKLGTKLISMFNQSSQTQECCTFYCQSCGEVIIKDRKLLRVLPLPSENWGALVGEWCCHPDPFANKSLHPQENDCFIGDSFFLVNLRTSLWQQRPELSPVEMCCVSSDNHCKLEPKANTKVICKRCKVMLGETVSSARSCCCKRWAPMALNSSVPVVLPETTKFYMTEIIIQSSERSFPIIPRSWFVQSVIAQCLVQLSSARSTFRFTIQGQDDKVYILLWLLNSDSLVIESLRNSKYIKKFPLLENTFKADSSSAWSAVKVLYQPCIKSRNEK

SEQ ID NO: 834926 - protein, 205 aa, Homo sapiens
MPMNISIMPSSLQMKTPEGCTEIQLPAEVRLVPSSCRGLQFVVGDGLHLRLQTQAKLGTKLISMFNQSSQTQECCTFYCQSCGEVIIKDRKLLRVLPLPSENWGALVGEWCCHPDPFANKSLHPQENDCFIGDSFFLVNLRTSLWQQRPELSPVEMCCVSSDNHCKLEPKANTKVICKRCKVMLGETVSSGKNFITRSQNDWLLA

SEQ ID NO: 834927 - protein, 106 aa, Homo sapiens
RLRLGSRDGIPRSRVLGRMRQPYLSSREVSSSRKRWRTFPVDCVAMCGDCVEKEYPNRGNTCLENGSFLLNFTGCAVCSKRDFMLITNKSLKEEDGEEIVTYDRFV

SEQ ID NO: 834928 - protein, 123 aa, Homo sapiens
RLRLGSRDGIPRSRVLGRMRQPYLSSREVSSSRKRWRTFPVDCVAMCGDCVEKEYPNRGNTCLENGSFLLNFTGCAVCSKRDFMLITNKSLKEEDGEEIVTYDRVYHAVSVMRQSRRYYQYSP

SEQ ID NO: 834929 - protein, 106 aa, Homo sapiens; identical to SEQ ID NO: 834927

SEQ ID NO: 834930 - protein, 123 aa, Homo sapiens; identical to SEQ ID NO: 834928

SEQ ID NO: 834931 - protein, 106 aa, Homo sapiens; identical to SEQ ID NO: 834927

SEQ ID NO: 834932 - protein, 106 aa, Homo sapiens; identical to SEQ ID NO: 834927

SEQ ID NO: 834933 - protein, 106 aa, Homo sapiens; identical to SEQ ID NO: 834927

SEQ ID NO: 834934 - protein, 123 aa, Homo sapiens; identical to SEQ ID NO: 834928

SEQ ID NO: 834935 - protein, 117 aa, Homo sapiens
MRLSRCWENGEEESQNRWINLVDELHLPSSQTEIWSPRLFRAGLCWSPSHRRKCVEEVEAAVVPDAGRSPLMLSTRGVQCIAGHLLRAISEAHPWKPQKPKRPKHPPTQQVTLLKMP

SEQ ID NO: 834936 - protein, 106 aa, Homo sapiens; identical to SEQ ID NO: 834927

SEQ ID NO: 834937 - protein, 106 aa, Homo sapiens; identical to SEQ ID NO: 834927

SEQ ID NO: 834938 - protein, 105 aa, Homo sapiens
RLRLGSRDGIPRSRVLGRMRQPYLSSREVSSSRKRWRTFPVDCVAMCGDCVEKEYPNRGNTCLENGSFLLNFTGCAVCSKRDFMLITNKSLKEEDGEEIVTYDRK

SEQ ID NO: 834939 - protein, 106 aa, Homo sapiens; identical to SEQ ID NO: 834927

SEQ ID NO: 834940 - protein, 106 aa, Homo sapiens; identical to SEQ ID NO: 834927

SEQ ID NO: 834941 - protein, 106 aa, Homo sapiens; identical to SEQ ID NO: 834927

SEQ ID NO: 834942 - protein, 218 aa, Homo sapiens
RASPHPARGGSICPAAFAHALHSGTVPARSGRTMARGAALALLLFGLLGVLVAAPDGGFDLSDALPDNENKKPTAIPKKPSAGDDFDLGDAVVDGENDDPRPPNPPKPMPNPNPNHPSSSGSFSDADLADGVSGGEGKGGSDGGGSHRKEGEEADAPGVIPGIVGAVVVAVAGAISSFIAYQKKKLCFKENAEQGEVDMESHRNANAEPAVQRTLLEK

SEQ ID NO: 834943 - protein, 210 aa, Homo sapiens
RASPHPARGGSICPAAFAHALHSGTVPARSGRTMARGAALALLLFGLLGVLVAAPDGGFDLSDALPDNENKKPTAIPKKPSAGDDFDLGDAVVDGENDDPRPPNPPKPMPNPNPNHPSSSGSFSDADLADGVSGGEGKGGSDGGGSHRKEGEEADAPGVIPGIVGAVVVAVAGAISSFIAYQKKKLCFKENGQLAGSLGPCIGIRREADG

SEQ ID NO: 834944 - protein, 218 aa, Homo sapiens; identical to SEQ ID NO: 834942

SEQ ID NO: 834945 - protein, 79 aa, Homo sapiens
LGTQLLAHRKEGEEADAPGVIPGIVGAVVVAVAGAISSFIAYQKKKLCFKENAEQGEVDMESHRNANAEPAVQRTLLEK

SEQ ID NO: 834946 - protein, 218 aa, Homo sapiens; identical to SEQ ID NO: 834942

SEQ ID NO: 834947 - protein, 218 aa, Homo sapiens; identical to SEQ ID NO: 834942

SEQ ID NO: 834948 - protein, 861 aa, Homo sapiens
NSHIPGIAAASGAGRPWGCALGREQPERRRHGREHIFAAELSWAEPEVVGLTALGTLGPQRCSGARCHRPLSRQLCASQRSMRTLEDSSGTVLHRLIQEQLRYGNLTETRTLLAIQQQALRGGAGTGGTGSPQASLEILAPEDSQVLQQATRQEPQGQEHQGGENHLAENTLYRLCPQPSKGEELPTYEEAKAHSQYYAAQQAGTRPHAGDRDPRGAPGGSRRQDEALRELRHGHVRSLSERLLQLSLERNGARAPSHMSSSHSFPQLARNQQGPPLRGPPAEGPESRGPPPQYPHVVLAHETTTAVTDPRYRARGSPHFQHAEVRILQAQVPPVFLQQQQQYQYLQQSQEHPPPPHPAALGHGPLSSLSPPAVEGPVSAQASSATSGSAHLAQMEAVLRENARLQRDNERLQRELESSAEKAGRIEKLESEIQRLSEAHESLTRASSKREALEKTMRNKMDSEMRRLQDFNRDLRERLESANRRLASKTQEAQAGSQDMVAKLLAQSYEQQQEQEKLEREMALLRGAIEDQRRRAELLEQALGNAQGRAARAEEELRKKQAYVEKVERLQQALGQLQAACEKREQLELRLRTRLEQELKALRAQQRQAGAPGGSSGSGGSPELSALRLSEQLREKEEQILALEADMTKWEQKYLEERAMRQFAMDAAATAAAQRDTTLIRHSPQPSPSSSFNEGLLTGGHRHQEMESRLKVLHAQILEKDAVIKVLQQRSRRDPGKAIQGSLRPAKSVPSVFAAAAAGTQGWQGLSSSERQTADAPARLTTADRAPTEEPVVTAPPAAHAKHGSRDGSTQTDGPPDSTSTCLPPEPDSLLGCSSSQRAASLDSVATSRVQDLSDMVEILI

SEQ ID NO: 834949 - protein, 861 aa, Homo sapiens; identical to SEQ ID NO: 834948

SEQ ID NO: 834950 - protein, 627 aa, Homo sapiens
NSHIPGIAAASGAGRPWGCALGREQPERRRHGREHIFAAELSWAEPEVVGLTALGTLGPQRCSGARCHRPLSRQLCASQRSMRTLEDSSGTVLHRLIQEQLRYGNLTETRTLLAIQQQALRGGAGTGGTGSPQASLEILAPEDSQVLQQATRQEPQGQEHQGGENHLAENTLYRLCPQPSKGEELPTYEEAKSPLESEIQRLSEAHESLTRASSKREALEKTMRNKMDSEMRRLQDFNRDLRERLESANRRLASKTQEAQAGSQDMVAKLLAQSYEQQQEQEKLEREMALLRGAIEDQRRRAELLEQALGNAQGRAARAEEELRKKQAYVEKVERLQQALGQLQAACEKREQLELRLRTRLEQELKALRAQQRQAGAPGGSSGSGGSPELSALRLSEQLREKEEQILALEADMTKWEQKYLEERAMRQFAMDAAATAAAQRDTTLIRHSPQPSPSSSFNEGLLTGGHRHQEMESRLKVLHAQILEKDAVIKVLQQRSRRDPGKAIQGSLRPAKSVPSVFAAAAAGTQGWQGLSSSERQTADAPARLTTADRAPTEEPVVTAPPAAHAKHGSRDGSTQTDGPPDSTSTCLPPEPDSLLGCSSSQRAASLDSVATSRVQDLSDMVEILI

SEQ ID NO: 834951 - protein, 861 aa, Homo sapiens; identical to SEQ ID NO: 834948

SEQ ID NO: 834952 - protein, 861 aa, Homo sapiens; identical to SEQ ID NO: 834948

SEQ ID NO: 834953 - protein, 846 aa, Homo sapiens
NSHIPGIAAASGAGRPWGCALGREQPERRRHGREHIFAAELSWAEPEVVGLTALGTLGPQRCSGARCHRPLSRQLCASQRSMRTLEDSSGTVLHRLIQEQLRYGNLTETRTLLAIQQQALRGGAGTGGTGSPQASLEILAPEDSQVLQQATRQEPQGQEHQGGENHLAENTLYRLCPQPSKGEELPTYEEAKAHSQYYAAQQAGTRPHAGDRDPRGAPGGSRRQDEALRELRHGHVRSLSERLLQLSLERNGARAPSHMSSSHSFPQLARNQQGPPLRGPPAEGPESRGPPPQYPHVVLAHETTTAVTDPRYRARGSPHFQHAEVRILQAQVPPVFLQQQQQYQYLQQSQEHPPPPHPAALGHGPLSSLSPPAVEGPVSAQASSATSGSAHLAQMEAVLRENARLQRDNERLQRELESSAEKAGRIEKLESEIQRLSEAHESLTRASSKREALEKTMRNKMDSEMRRLQDFNRDLRERLESANRRLASKTQEAQAGSQDMVAKLLAQSYEQQQEQEKLEREMALLRGAIEDQRRRAELLEQALGNAQGRAARAEEELRKKQAYVEKVERLQQALGQLQAACEKREQLELRLRTRLEQELKALRAQQRQAGAPGGSSGSGGSPELSALRLSEQLREKEEQILALEADMTKWEQKYLEERAMRQFAMDAAATAAAQRDTTLIRHSPQPSPSSSFNEGLLTGGHRHQEMESRLKVLHAQILEKDAVIKVLQQRSRRDPGKAIQGSLRPAKSVPSVFAAAAAGTQGWQGLSSSERQTADAPARLTTADRAPTEEPVVTAPPAAHAKHGSRDGSTQTDGPPDSTSTCLPPEPDSLLGCSSSQRAASLGKSS

SEQ ID NO: 834954 - protein, 234 aa, Homo sapiens [sequence omitted]

SEQ ID NO: 834955 - protein, 363 aa, Homo sapiens
GIICTVLCHLAAHQYQQLTQVSAGGSEAKPLIFTFVPTVRRLPTHTQLADTSKFLVKIPEESSDKSPETVNRSKSNDYLTLNAGSQQERDQAKLTCPSEVSGTILQEREFEANKLQGMQQSDLFKAEYVLIVDSEGEDEAASRKVEQGPPGGIGTAAIRPKSLAISSSLVSDVVRPKTQGTDLKTSSHPEMLHGMAPQQKHGQTPTTLPRAAGRETKYANLSSPTSTVSESQLTKPGVIRPVPVKSRILLKKEEEVYEPNPFSKYLEDNSDLFSEQDVTVPPKPVSLHPLYQTKLYPPAKSLLHPQTLSHADCLAPGPFSHLSFSLSDEQENSHTLLSHNACNKLSHPMVAIPEHEALDSKEQ

SEQ ID NO: 834956 - protein, 457 aa, Homo sapiens
GIICTVLCHLAAHQYQQLTQVSAGGSEAKPLIFTFVPTVRRLPTHTQLADTSKFLVKIPEESSDKSPETVNRSKSNDYLTLNAGSQQERDQAKLTCPSEVSGTILQEREFEANKLQGMQQSDLFKAEYVLIVDSEGEDEAASRKVEQGPPGGIGTAAIRPKSLAISSSLVSDVVRPKTQGTDLKTSSHPEMLHGMAPQQKHGQQYKTKSSYKAFAAIPTNTLLLEQKALDEPAKTESVSKDNTLEPPVELYFPAQLRQQTEELCATIDKVLQDSLSMHSSDSPSRSPKTLLGSDTVKTPTTLPRAAGRETKYANLSSPTSTVSESQLTKPGVIRPVPVKSRILLKKEEEVYEPNPFSKYLEDNSDLFSEQDVTVPPKPVSLHPLYQTKLYPPAKSLLHPQTLSHADCLAPGPFSHLSFSLSDEQENSHTLLSHNACNKLSHPMVAIPEHEALDSKEQ

SEQ ID NO: 834957 - protein, 287 aa, Homo sapiens
GIICTVLCHLAAHQYQQLTQVSAGGSEAKPLIFTFVPTVRRLPTHTQLADTSKFLVKIPEESSDKSPETVNRSKSNDYLTLNAGSQQERDQAKLTCPSEVSGTILQEREFEANKLQGMQQSDLFKAEYVLIVDSEGEDEAASRKVEQGPPGGIGTAAIRPKSLAISSSLVSDVVRPKTQGTDLKTSSHPEMLHGMAPQQKHGQQYKTKSSYKAFAAIPTNTLLLEQKALDEPAKTESVSKDNTLEPPVETPTTLPRAAGRETKYANLSSPTSTVSESQLTKPGVFPQ

SEQ ID NO: 834958 - protein, 144 aa, Homo sapiens
MQQSDLFKAEYVLIVDSEGEDEAASRKVEQGPPGGIGTAAIRPKSLAISSSLVSDVVRPKTQGTDLKTSSHPEMLHGMAPQQKHGQQYKTKSSYKAFAAIPTNTLLLEQKTPTTLPRAAGRETKYANLSSPTSTVSESQLVCIF

SEQ ID NO: 834959 - protein, 457 aa, Homo sapiens; identical to SEQ ID NO: 834956

SEQ ID NO: 834960 - protein, 457 aa, Homo sapiens; identical to SEQ ID NO: 834956

SEQ ID NO: 834961 - protein, 388 aa, Homo sapiens
GIICTVLCHLAAHQYQQLTQVSAGGSEAKPLIFTFVPTVRRLPTHTQLADTSKFLVKIPEESSDKSPETVNRSKSNDYLTLNAGSQQERDQAKLTCPSEVSGTILQEREFEANKLQGMQQSDLFKAEYVLIVDSEGEDEAASRKVEQGPPGGIGTAAIRPKSLAISSSLVSDVVRPKTQGTDLKTSSHPEMLHGMAPQQKHGQLTSSPTTSEQLACKPPAFSFVSPTNPNTPPDPVNLEGASVLEEFHTRRLDVGGAVVEESATYFQTTAHSTPFSASKGTSSTLLFPHSTQLSGSNLPSSTAADPKPGLTSEVLKKTTLTSHVLSHGESPRTSSSPPSSSASLKSNSASYIPVRIVTHSLSPSPKPFTSSFHGSSSTICSQMSSSGN

SEQ ID NO: 834962 - protein, 184 aa, Homo sapiens
MREYKLVVLGSGGVGKSALTVQFVQGIFVEKYDPTIEDSYRKQVEVDCQQCMLEILDTAGTEQFTAMRDLYMKNGQGFALVYSITAQSTFNDLQDLREQILRVKDTEDVPMILVGNKCDLEDERVVGKEQGQNLARQWCNCAFLESSAKSKINVNEIFYDLVRQINRKTPVEKKKPKKKSCLLL

SEQ ID NO: 834963 - protein, 184 aa, Homo sapiens; identical to SEQ ID NO: 834962

SEQ ID NO: 834964 - protein, 265 aa, Homo sapiens
MREYKLVVLGSGGVGKSALTVQFVQGIFVEKYDPTIEDSYRKQVEVDCQQCMLEILDTAGTEQFTAMRDLYMKNGQGFALVYSITAQSTFNDLQDLREQILRVKDTEDVPMILVGNKCDLEDERVVGKEQGQNLARQWCNCAFLESSAKSKINVNEIFYDLVRQINRKTPVEGSGGGTGGGGTPSKTSNTIRVFLPNKQRTVVNVRNGMSLHDCLMKALKVRGLQPESCAVFRLLHEHKGKKARLDWNTEAASLIGEELHVDFLG

SEQ ID NO: 834965 - protein, 99 aa, Homo sapiens
MREYKLVVLGSGGVGKSALTVQFVQGIFVEKYDPTIEDSYRKQVEVDCQQCMLEILDTAGTEQFTAAREAEAGEWVEPGRRTFQWAEIVPLHSRVRLCL

SEQ ID NO: 834966 - protein, 184 aa, Homo sapiens; identical to SEQ ID NO: 834962

SEQ ID NO: 834967 - protein, 184 aa, Homo sapiens; identical to SEQ ID NO: 834962

SEQ ID NO: 834968 - protein, 133 aa, Homo sapiens
MLEILDTAGTEQFTAMRDLYMKNGQGFALVYSITAQSTFNDLQDLREQILRVKDTEDVPMILVGNKCDLEDERVVGKEQGQNLARQWCNCAFLESSAKSKINVNEIFYDLVRQINRKTPVEKKKPKKKSCLLL

SEQ ID NO: 834969 - protein, 184 aa, Homo sapiens; identical to SEQ ID NO: 834962

SEQ ID NO: 834970 - protein, 310 aa, Homo sapiens
RTTQRAAAASPSSCGPRGAEYGALMAMEGYWRFLALLGSALLVGFLSVIFALVWVLHYREGLGWDGSALEFNWHPVLMVTGFVFIQGIAIIVYRLPWTWKCSKLLMKSIHAGLNAVAAILAIISVVAVFENHNVNNIANMYSLHSWVGLIAVICYLLQLLSGFSVFLLPWAPLSLRAFLMPIHVYSGIVIFGTVIATALMGLTEKLIFSLRDPAYSTFPPEGVFVNTLGLLILVFGALIFWIVTRPQWKRPKEPNSTILHPNGGTEQGARGSMPAYSGNNMDKSDSELNSEVAARKRNLALDEAGQRSTM

SEQ ID NO: 834971 - protein, 310 aa, Homo sapiens; identical to SEQ ID NO: 834970

SEQ ID NO: 834972 - protein, 310 aa, Homo sapiens; identical to SEQ ID NO: 834970

SEQ ID NO: 834973 - protein, 310 aa, Homo sapiens; identical to SEQ ID NO: 834970

SEQ ID NO: 834974 - protein, 181 aa, Homo sapiens
RTTQRAAAASPSSCGPRGAEYGALMAMEGYWRFLALLGSALLVGFLSVIFALVWVLHYREGLGWDGSALEFNWHPVLMVTGFVFIQGIASFRFFSLSASMGSAFSPSISHAHTCLFWNCHLWNSDCNSTYGIDRETDFFPERSCIQYIPARRCFRKYAWPSDPGVRGPHFLDSHQTAMETS

SEQ ID NO: 834975 - protein, 310 aa, Homo sapiens; identical to SEQ ID NO: 834970

SEQ ID NO: 834976 - protein, 103 aa, Homo sapiens
MKSLILLAILAALAVVTLCYESHESMESYELNPFINRRNANTFISPQQRWRAKVQERIRERSKPVHELNREACDDYRLCERYAMVYGYNAAYNRYFRKRRGTK

SEQ ID NO: 834977 - protein, 103 aa, Homo sapiens; identical to SEQ ID NO: 834976

SEQ ID NO: 834978 - protein, 128 aa, Homo sapiens
MKSLILLAILAALAVVTLCYGEWQKEENFGFDIVSVLSLNWHRAQESHESMESYELNPFINRRNANTFISPQQRWRAKVQERIRERSKPVHELNREACDDYRLCERYAMVYGYNAAYNRYFRKRRGTK

SEQ ID NO: 834979 - protein, 66 aa, Homo sapiens
SEDPQSCSHQQRWRAKVQERIRERSKPVHELNREACDDYRLCERYAMVYGYNAAYNRYFRKRRGTK

SEQ ID NO: 834980 - protein, 136 aa, Homo sapiens
  misc_feature (1)..(2): Xaa can be any naturally occurring amino acid
  misc_feature (6)..(6): Xaa can be any naturally occurring amino acid
XXPLWXTLTLWIPISCCPTAATQDPETDLQDETMKSLILLAILAALAVVTLCYESHESMESYELNPFINRRNANTFISPQQRWRAKVQERIRERSKPVHELNREACDDYRLCERYAMVYGYNAAYNRYFRKRRGTK

SEQ ID NO: 834981 - protein, 103 aa, Homo sapiens; identical to SEQ ID NO: 834976

SEQ ID NO: 834982 - protein, 103 aa, Homo sapiens; identical to SEQ ID NO: 834976

SEQ ID NO: 834983 - protein, 66 aa, Homo sapiens; identical to SEQ ID NO: 834979

SEQ ID NO: 834984 - protein, 103 aa, Homo sapiens; identical to SEQ ID NO: 834976

SEQ ID NO: 834985 - protein, 136 aa, Homo sapiens; identical to SEQ ID NO: 834980
  misc_feature (1)..(2): Xaa can be any naturally occurring amino acid
  misc_feature (6)..(6): Xaa can be any naturally occurring amino acid

SEQ ID NO: 834986 - protein, 76 aa, Homo sapiens
MKSLILLAILAALAVVTLCYESHESMESYELNPFINRRNANTFISPQQRWRAKVQERIRDALACPRAGILYITCGN

SEQ ID NO: 834987 - protein, 135 aa, Homo sapiens
LYTRKLPDRNSKHIAVTYRHLNLQTPGRRIHYVSHHRHCFSAVVKTAAVSVMNSPESMESYELNPFINRRNANTFISPQQRWRAKVQERIRERSKPVHELNREACDDYRLCERYAMVYGYNAAYNRYFRKRRGTK

SEQ ID NO: 834988 - protein, 103 aa, Homo sapiens; identical to SEQ ID NO: 834976

SEQ ID NO: 834989 - protein, 635 aa, Homo sapiens
KKGWQRALAIVCDFKLFLYDIAEGKASQPSVVISQVIDMRDEEFSVSSVLASDVIHASRKDIPCIFRVTASQLSASNNKCSILMLADTENEKNKWVGVLSELHKILKKNKFRDRSVYVPKEAYDSTLPLIKTTQAAAIIDHERIALGNEEGLFVVHVTKDEIIRVGDNKKIHQIELIPNDQLVAVISGRNRHVRLFPMSALDGRETDFYKLSETKGCQTVTSGKVRHGALTCLCVAMKRQVLCYELFQSKTRHRKFKEIQVPYNVQWMAIFSEQLCVGFQSGFLRYPLNGEGNPYSMLHSNDHTLSFIAHQPMDAICAVEISSKEYLLCFNSIGIYTDCQGRRSRQQELMWPANPSSCCYNAPYLSVYSENAVDIFDVNSMEWIQTLPLKKVRPLNNEGSLNLLGLETIRLIYFKNKMAEGDELVVPETSDNSRKQMVRNINNKRRYSFRVPEEERMQQRREMLRDPEMRNKLISNPTNFNHIAHMGPGDGIQILKDLPMNPRPQESRTVFSGSVSIPSITKSRPEPGRSMSASSGLSARSSAQNGSALKREFSGGSYSAKRQPMPSPSEGSLSSGGMDQGSDAPARDFDGEDSDSPRHSTASNSSNLSSPPSPVSPRKTKSLSLESTDRGSWDP

SEQ ID NO: 834990 - protein, 697 aa, Homo sapiens
KKGWQRALAIVCDFKLFLYDIAEGKASQPSVVISQVIDMRDEEFSVSSVLASDVIHASRKDIPCIFRVTASQLSASNNKCSILMLADTENEKNKWVGVLSELHKILKKNKFRDRSVYVPKEAYDSTLPLIKTTQAAAIIDHERIALGNEEGLFVVHVTKDEIIRVGDNKKIHQIELIPNDQLVAVISGRNRHVRLFPMSALDGRETDFYKLSETKGCQTVTSGKVRHGALTCLCVAMKRQVLCYELFQSKTRHRKFKEIQVPYNVQWMAIFSEQLCVGFQSGFLRYPLNGEGNPYSMLHSNDHTLSFIAHQPMDAICAVEISSKEYLLCFNSIGIYTDCQGRRSRQQELMWPANPSSCCYNAPYLSVYSENAVDIFDVNSMEWIQTLPLKKVRPLNNEGSLNLLGLETIRLIYFKNKMAEGDELVVPETSDNSRKQMVRNINNKRRYSFRVPEEERMQQRREMLRDPEMRNKLISNPTNFNHIAHMGPGDGIQILKDLPMPGFPYPSPHHHSGLISSPINFEHIYHMTVNSAEKFLSPDSINPEYSPSLRSVPGTPSFMTLRNPRPQESRTVFSGSVSIPSITKSRPEPGRSMSASSGLSARSSAQNGSALKREFSGGSYSAKRQPMPSPSEGSLSSGGMDQGSDAPARDFDGEDSDSPRHSTASNSSNLSSPPSPVSPRKTKSLSLESTDRGSWDP

SEQ ID NO: 834991 - protein, 578 aa, Homo sapiens
KKGWQRALAIVCDFKLFLYDIAEGKASQPSVVISQVIDMRDEEFSVSSVLASDVIHASRKDIPCIFRVTASQLSASNNKCSILMLADTENEKNKWVGVLSELHKILKKNKFRDRSVYVPKEAYDSTLPLIKTTQAAAIIDHERIALGNEEGLFVVHVTKDEIIRVGDNKKIHQIELIPNDQLVAVISGRNRHVRLFPMSALDGRETDFYKLSETKGCQTVTSGKVRHGALTCLCVAMKRQVLCYELFQSKTRHRKFKEIQVPYNVQWMAIFSEQLCVGFQSGFLRYPLNGEGNPYSMLHSNDHTLSFIAHQPMDAICAVEISSKEYLLCFNSIGIYTDCQGRRSRQQELMWPANPSSCCYNAPYLSVYSENAVDIFDVNSMEWIQTLPLKKVRPLNNEGSLNLLGLETIRLIYFKNKMAEGDELVVPETSDNSRKQMVRNINNKRRYSFRVPEEERMQQRREMLRDPEMRNKLISNPTNFNHIAHMGPGDGIQILKDLPMPGFPYPSPHHHSGLISSPINFEHIYHMTVNSAEKFLSPDSINPEYSPSLRSVPEPSASGKSDSIQWLSQYSIYHQIPP

SEQ ID NO: 834992 - protein, 564 aa, Homo sapiens
KKGWQRALAIVCDFKLFLYDIAEGKASQPSVVISQVIDMRDEEFSVSSVLASDVIHASRKDIPCIFRVTASQLSASNNKCSILMLADTENEKNKWVGVLSELHKILKKNKFRDRSVYVPKEAYDSTLPLIKTTQAAAIIDHERIALGNEEGLFVVHVTKDEIIRVGDNKKIHQIELIPNDQLVAVISGRNRHVRLFPMSALDGRETDFYKLSETKGCQTVTSGKVRHGALTCLCVAMKRQVLCYELFQSKTRHRKFKEIQVPYNVQWMAIFSEQLCVGFQSGFLRYPLNGEGNPYSMLHSNDHTLSFIAHQPMDAICAVEISSKEYLLCFNSIGIYTDCQGRRSRQQELMWPANPSSCCYNAPYLSVYSENAVDIFDVNSMEWIQTLPLKKVRPLNNEGSLNLLGLETIRLIYFKNKMAEGDELVVPETSDNSRKQMVRNINNKRRYSFRVPEEERMQQRREMLRDPEMRNKLISNPTNFNHIAHMGPGDGIQILKDLPMNPRPQESRTVFSGSVSIPSITKSRPEPGRSMSASSGLSASKCRGYRKVPLRQGDPQLPPLLSRG

SEQ ID NO: 834993 - protein, 635 aa, Homo sapiens; identical to SEQ ID NO: 834989

SEQ ID NO: 834994 - protein, 635 aa, Homo sapiens; identical to SEQ ID NO: 834989

SEQ ID NO: 834995 - protein, 245 aa, Homo sapiens
MFVLSWRLIDKKHFNSLKNIIIVCIFILTEGDELVVPETSDNSRKQMVRNINNKRRYSFRVPEEERMQQRREMLRDPEMRNKLISNPTNFNHIAHMGPGDGIQILKDLPMNPRPQESRTVFSGSVSIPSITKSRPEPGRSMSASSGLSARSSAQNGSALKREFSGGSYSAKRQPMPSPSEGSLSSGGMDQGSDAPARDFDGEDSDSPRHSTASNSSNLSSPPSPVSPRKTKSLSLESTDRGSWDP

SEQ ID NO: 834996 - protein, 145 aa, Homo sapiens
MTSQTLDNQEWTQLTSWIKGNLTCDSRTREWLCCCWRIISGKRCSSSGPKSWERRIRSTPRLNRCLETKAGTEPLRSMHPWGAQGGRGLGKLIPQTLWGLPRHRPKGLFFSSIFAKCLSLNEEHIWTTVQCCVLPGSVTLPLFLK

SEQ ID NO: 834997 - protein, 557 aa, Homo sapiens
MQSPWSPANDDQSRPSLSNGHTCVGCVLVVSVIEQLAQVHNSTVQASMERLCSYLPEKLFLKTTCYLVIDKFGSDIIKLLSADMNADVVCHTLEFCKQNTGQPLCHLYPLPKETWKFTLQKARQIVKKSPILKYSRSGSDICSLPVLAKICQKIKLAMEQSVPFKDVDSDKYSVFPTLRGYHWRGRDCNDSDESVYPGRRPNNWDVHQDSNCNGIWGVDPKDGVPYEKKFCEGSQPRGIILLGDSAGAHFHISPEWITASQMSLNSFINLPTALTNELDWPQLSGATGFLDSTVGIKEKSIYLRLWKRNHCNHRDYQNISRNGASSRNLKKFIESLSRNKVLDYPAIVIYAMIGNDVCSGKSDPVPAMTTPEKLYSNVMQTLKHLNSHLPNGSHVILYGLPDGTFLWDNLHNRYHPLGQLNKDMTYAQLYSFLNCLQVSPCHGWMSSNKTLRTLTSERAEQLSNTLKKIAASEKFTNFNLFYMDFAFHEIIQEWQKRGGQPWQLIEPVDGFHPNEVALLLLADHFWKKVQLQWPQILGKENPFNPQIKQVFGDQGGH

SEQ ID NO: 834998 - protein, 237 aa, Homo sapiens
MQSPWKILTVAPLFLLLSLQSSASPANDDQSRPSLSNGHTCVGCVLVVSVIEQLAQVHNSTVQASMERLCSYLPEKLFLKTTCYLVIDKFGSDIIKLLSADMNADVVCHTLEFCKQNTGQPLCHLYPLPKETWKFTLQKARQIVKKSPILKYSRSGSDICSLPVLAKICQKIKLAMEQSVPFKDVDSDKYSVFPTLRGYHWRGRDCNDSDESVYPGRRPNNWDVHQDSNCNGIWVSN

SEQ ID NO: 834999 - protein, 103 aa, Homo sapiens
SGKPRGSRGLCTLTSLSQGARKLCHCATWVFFILQSLPQQNRTPQTPSSSLCVALSGSNKSKLWVCECLCVLLFTSHLLKSVYVRGWGVCVKESEEEKEREIN

SEQ ID NO: 835000 - protein, 143 aa, Homo sapiens
MKSYRSGRREADSPGSSSSPWMDSTPTRWLCCCWRIISGKRCSSSGPKSWERRIRSTPRLNRCLETKAGTEPLRSMHPWGAQGGRGLGKLIPQTLWGLPRHRPKGLFFSSIFAKCLSLNEEHIWTTVQCCVLPGSVTLPLFLK

SEQ ID NO: 835001 - protein, 575 aa, Homo sapiens
MQSPWKILTVAPLFLLLSLQSSASPANDDQSRPSLSNGHTCVGCVLVVSVIEQLAQVHNSTVQASMERLCSYLPEKLFLKTTCYLVIDKFGSDIIKLLSADMNADVVCHTLEFCKQNTGQPLCHLYPLPKETWKFTLQKARQIVKKSPILKYSRSGSDICSLPVLAKICQKIKLAMEQSVPFKDVDSDKYSVFPTLRGYHWRGRDCNDSDESVYPGRRPNNWDVHQDSNCNGIWGVDPKDGVPYEKKFCEGSQPRGIILLGDSAGAHFHISPEWITASQMSLNSFINLPTALTNELDWPQLSGATGFLDSTVGIKEKSIYLRLWKRNHCNHRDYQNISRNGASSRNLKKFIESLSRNKVLDYPAIVIYAMIGNDVCSGKSDPVPAMTTPEKLYSNVMQTLKHLNSHLPNGSHVILYGLPDGTFLWDNLHNRYHPLGQLNKDMTYAQLYSFLNCLQVSPCHGWMSSNKTLRTLTSERAEQLSNTLKKIAASEKFTNFNLFYMDFAFHEIIQEWQKRGGQPWQLIEPVDGFHPNEVALLLLADHFWKKVQLQWPQILGKENPFNPQIKQVFGDQGGH

SEQ ID NO: 835002 - protein, 575 aa, Homo sapiens; identical to SEQ ID NO: 835001

SEQ ID NO: 835003 - protein, 545 aa, Homo sapiens [sequence omitted]

SEQ ID NO: 835004 - protein, 437 aa, Homo sapiens
MQSPWKILTVAPLFLLLSLQSSASPANDDQSRPSLSNGHTCVGCVLVVSVIEQLAQVHNSTVQASMERLCSYLPEKLFLKTTCYLVIDKFGSDIIKLLSADMNADVVCHTLEFCKQNTGQPLCHLYPLPKETWKFTLQKARQIVKKSPILKYSRSGSDICSLPVLAKICQKIKLAMEQSVPFKDVDSDKYSVFPTLRGYHWRGRDCNDSDESVYPGRRPNNWDVHQDSNCNGIWGVDPKDGVPYEKKFCEGSQPRGIILLGDSAGAHFHISPEWITASQMSLNSFINLPTALTNELDWPQLSGATGFLDSTVGIKEKSIYLRLWKRNHCNHRDYQNISRNGASSRNLKKFIERKSDPVPAMTTPEKLYSNVMQTLKHLNSHLPNGSHVILYGLPDGTFLWDNLHNRYHPLGQLNKDMTYAQLYSFLNCLQVSTHWLA

SEQ ID NO: 835005 - protein, 482 aa, Homo sapiens
SPGGGLGRSQGFWADPAPAPPLPARGPPSRPGLAPGSQMTTEGGPPPAPLRRACSPVPGALQAALMSPPPAAAAAAAAAPETTSSSSSSSSASCASSSSSSNSASAPSAACKSAGGGGAGAGSGGAKKASSGLRRPEKPPYSYIALIVMAIQSSPSKRLTLSEIYQFLQARFPFFRGAYQGWKNSVRHNLSLNECFIKLPKGLGRPGKGHYWTIDPASEFMFEEGSFRRRPRGFRRKCQALKPMYHRVVSGLGFGASLLPQGFDFQAPPSAPLGCHSQGGYGGLDMMPAGYDAGAGAPSHAHPHHHHHHHVPHMSPNPGSTYMASCPVPAGPGGVGAAGGGGGGDYGPDSSSSPVPSSPAMASAIECHSPYTSPAAHWSSPGASPYLKQPPALTPSSNPAASAGLHSSMSSYSLEQSYLHQNAREDLSVGLPRYQHHSTPVCDRKDFVLNFNGISSFHPSASGSYYHHHHQSVCQDIKPCVM

SEQ ID NO: 835006 - protein, 697 aa, Homo sapiens
MAETSPEPSGQLVVHSDAHSDTVLASFEDQRKKGFLCDITLIVENVHFRAHKALLAASSEYFSMMFAEEGEIGQSIYMLEGMVADTFGILLEFIYTGYLHASEKSTEQILATAQFLKVYDLVKAYTDFQNNHSSPKPTTLNTAGAPVVVISNKKNDPPKRKRGRPKKVNTLQEEKSELAAEEEIQLRVNNSVQNRQNFVVKGDSGVLNEQIAAKEKEESEPTCEPSREEEMPVEKDENYDPKTEDGQASQSRYSKRRIWRSVKLKDYKLVGDQEDHGSAKRICGRRKRPGGPEARCKDCGKVFKYNHFLAIHQRSHTGERPFKCNECGKGFAQKHSLQVHTRMHTGERPYTCTVCSKALTTKHSLLEHMSLHSGQKSFTCDQCGKYFSQNRQLKSHYRVHTGHSLPECKDCHRKFMDVSQLKKHLRTHTGEKPFTCEICGKSFTAKSSLQTHIRIHRGEKPYSCGICGKSFSDSSAKRRHCILHTGKKPFSCPECNLQFARLDNLKAHLKIHSKEKHASDASSISGSSNTEEVRNILQLQPYQLSTSGEQEIQLLVTDSVHNINFMPGPSQGISIVTAESSQNMTADQAANLTLLTQQPEQLQNLILSAQQEQTEHIQSLNMIESQMGPSQTEPVHVITLSKETLEHLHAHQEQTEELHLATSTSDPAQHLQLTQEPGPPPPTHHVPQPTPLGQEQS

SEQ ID NO: 835007 - protein, 333 aa, Homo sapiens
MAETSPEPSGQLVVHSDAHSDTVLASFEDQRKKGFLCDITLIVENVHFRAHKALLAASSEYFSMMFAEEGEIGQSIYMLEGMVADTFGILLEFIYTGYLHASEKSTEQILATAQFLKVYDLVKAYTDFQNNHSSPKPTTLNTAGAPVVVISNKKNDPPKRKRGRPKKVNTLQEEKSELAAEEEIQLRVNNSVQNRQNFVVKGDSGVLNEQIAAKEKEESEPTCEPSREEEMPVEKDENYDPKTEDGQASQSRYSKRRIWRSVKLKDYKLVGDQEDHGSAKRICGRRKRPGGPEARCKDCGKVFKYNHFLAIHQRSHTGNDVFKADCSVLQNWE

SEQ ID NO: 835008 - protein, 697 aa, Homo sapiens; identical to SEQ ID NO: 835006

SEQ ID NO: 835009 - protein, 446 aa, Homo sapiens
MLVLLTAGFRFICSASKILLLMSLVFIVGLLDVCLLRKILYCFFNLGETEKCVDSYLYHASGALLPGERPFKCNECGKGFAQKHSLQVHTRMHTGERPYTCTVCSKALTTKHSLLEHMSLHSGQKSFTCDQCGKYFSQNRQLKSHYRVHTGHSLPECKDCHRKFMDVSQLKKHLRTHTGEKPFTCEICGKSFTAKSSLQTHIRIHRGEKPYSCGICGKSFSDSSAKRRHCILHTGKKPFSCPECNLQFARLDNLKAHLKIHSKEKHASDASSISGSSNTEEVRNILQLQPYQLSTSGEQEIQLLVTDSVHNINFMPGPSQGISIVTAESSQNMTADQAANLTLLTQQPEQLQNLILSAQQEQTEHIQSLNMIESQMGPSQTEPVHVITLSKETLEHLHAHQEQTEELHLATSTSDPAQHLQLTQEPGPPPPTHHVPQPTPLGQEQS

SEQ ID NO: 835010 - protein, 157 aa, Homo sapiens
HFGLSGPSGDAGSGRAREEWLWPLHTGGSEVRRRRWSRPGTGQRQEHRRARVPPPPRVMAAAAALRAPAQSSVTFEDVAVNFSLEEWSLLNEAQGCLYHDVMLETLTLISSLKGCTRQQFCNRSTLNKEDRVIYNLRRSPSCRFPLPGTGPHILYVS

SEQ ID NO: 835011 - protein, 358 aa, Homo sapiens
MYLTSISLLLGCWHGGEDEAAPSKQSTCIHIYKDQGGHSGERPYECGEYRKLFKNKSCLTEPRRDHKHRNVRTGERPYECSKYGKLFHQKPTLHIHERFHTGQKTYECSECGKSFHQSSSLLQRQTLHTRERPYECIECGKAFAEKSSLINHRKVHSGAKRYECNECGKSFAYTSSLIKHRRIHTGERPYECSECGRSFAENSSLIKHLRVHTGERPYECVECGKSFRRSSSLLQHQRVHTRERPYECSECGKSFSLRSNLIHHQRVHTGERHECGQCGKSFSRKSSLIIHLRVHTGERPYECSDCGKSFAENSSLIKHLRVHTGERPYECIDCGKSFRHSSSFRRHQRVHTGMRPYK

SEQ ID NO: 835012 - protein, 117 aa, Homo sapiens
HFGLSGPSGDAGSGRAREEWLWPLHTGGSEVRRRRWSRPGTGQRQEHRRARVPPPPRVMAAAAALRAPAQSSVTFEDVAVNFSLEEWSLLNEAQRCLYRDVMLETLTLISSLEQCDL

SEQ ID NO: 835013 - protein, 123 aa, Homo sapiens
HFGLSGPSGDAGSGRAREEWLWPLHTGGSEVRRRRWSRPGTGQRQEHRRARVPPPPRVMAAAAALRAPAQSSVTFEDVAVNFSLEEWSLLNEAQRCLYRDVMLETLTLISSLGKVLIFTCDLS

SEQ ID NO: 835014 - protein, 460 aa, Homo sapiens
HFGLSGPSGDAGSGRAREEWLWPLHTGGSEVRRRRWSRPGTGQRQEHRRARVPPPPRVMAAAAALRAPAQSSVTFEDVAVNFSLEEWSLLNEAQRCLYRDVMLETLTLISSLGCWHGGEDEAAPSKQSTCIHIYKDQGGHSGERPYECGEYRKLFKNKSCLTEPRRDHKHRNVRTGERPYECSKYGKLFHQKPTLHIHERFHTGQKTYECSECGKSFHQSSSLLQRQTLHTRERPYECIECGKAFAEKSSLINHRKVHSGAKRYECNECGKSFAYTSSLIKHRRIHTGERPYECSECGRSFAENSSLIKHLRVHTGERPYECVECGKSFRRSSSLLQHQRVHTRERPYECSECGKSFSLRSNLIHHQRVHTGERHECGQCGKSFSRKSSLIIHLRVHTGERPYECSDCGKSFAENSSLIKHLRVHTGERPYECIDCGKSFRHSSSFRRHQRVHTGMRPYK

SEQ ID NO: 835015 - protein, 460 aa, Homo sapiens; identical to SEQ ID NO: 835014

SEQ ID NO: 835016 - protein, 112 aa, Homo sapiens
HFGLSGPSGDAGSGRAREEWLWPLHTGGSEVRRRRWSRPGTGQRQEHRRARVPPPPRVMAAAAALRAPAQSSVTFEDVAVNFSLEEWSLLNEAQGCLYHDVMLETLTLISSL

SEQ ID NO: 835017 - protein, 579 aa, Homo sapiens
GEKNLLELVELADQALRSFSYHQHFPLIKEIISICSKIWKSAQASPLLQGESQKVLLHMLSHPLPRVKAETYHCCLEITKECLGVHNVTKPVSSLCNGIHFLLHPKVLYEISVFGIQEPESEVNTAAKAILLYLLQGRLMMTALTWNKFIESLCPVIPILQGYADTEDPLGNCILLLSKASSDTEEMLPCTTRLKSMLRLLLVKKPSVRSLALKLLAFHLTSEEGADTKRPLIDARVLSRVTDLFIGKKPIELRLDDRRELVIKLETVEKVYEIFTSDDVDLVLRKSAAEQLAVIMQDIKMHAVVKKLCLIDKIIEYLNECVSQDGKVVECLVQPCLTLLRKVLCGDPVMRVSLSQQSSLLTVLFRVSLIFHEDCSVVTEVGALFCLLLFDEVSRMDMWSVNPSNKPSLPSVFSLPVSVFRRYHLPVHVIGHHAVSPYSIVLPLSADCLALKPVSDMLRIAWNLSWYHGSDNLLKQMNSETKTQEILDALKLSTEDILTLKITHMASGLQDCLHSIVQAATHREVRAAVTRMSFYLLNDRLSLKGCPGPCGVTLKSLAWHTALNSFYRCFLLALKMRNC

SEQ ID NO: 835018 - protein, 498 aa, Homo sapiens
GEKNLLELVELADQALRSFSYHQHFPLIKEIISICSKIWKSAQASPLLQGESQKVLLHMLSHPLPRVKAETYHCCLEITKECLGVHNVTKPVSSLCNGIHFLLHPKVLYEISVFGIQEPESEVNTAAKAILLYLLQGRLMMTALTWNKFIESLCPVIPILQGYADTEDPLGNCILLLSKASSDTEEMLPCTTRLKSMLRLLLVKKPSVRSLALKLLAFHLTSEEGADTKRPLIDARVLSRVTDLFIGKKPIELRLDDRRELVIKLETVEKVYEIFTSDDVDLVLRKSAAEQLAVIMQDIKMHAVVKKLCLIDKIIEYLNECVSQDGKVVECLVQPCLTLLRKVLCGDPVMRVSLSQQSSLLTVLFRVSLIFHEDCSVVTEVGALFCLLLFDEVSRMDMWSVNPSNKPSLPSVFSLPVSVFRRFLQVLPACTEDEKLLIDIIHFLNKLIKEQRKNSSLELLNWILELLLRHSANPLLDLLVLTESQAREETDDIRTAVR

SEQ ID NO: 835019 - protein, 640 aa, Homo sapiens
GEKNLLELVELADQALRSFSYHQHFPLIKEIISICSKIWKSAQASPLLQGESQKVLLHMLSHPLPRVKAETYHCCLEITKECLGVHNVTKPVSSLCNGIHFLLHPKVLYEISVFGIQEPESEVNTAAKAILLYLLQGRLMMTALTWNKFIESLCPVIPILQGYADTEDPLGNCILLLSKASSDTEEMLPCTTRLKSMLRLLLVKKPSVRSLALKLLAFHLTSEEGADTKRPLIDARVLSRVTDLFIGKKPIELRLDDRRELVIKLETVEKVYEIFTSDDVDLVLRKSAAEQLAVIMQDIKMHAVVKKLCLIDKIIEYLNECVSQDGKVVECLVQPCLTLLRKVLCGDPVMRVSLSQQSSLLTVLFRVSLIFHEDCSVVTEVGALFCLLLFDEVSRMDMWSVNPSNKPSLPSVFSLPVSVFRRYHLPVHVIGHHAVSPYSIVLPLSADCLALKPVSDMLRIAWNLSWYHGSDNLLKQMNSETKTQEILDALKLSTEDILTLKITHMASGLQDCLHSIVQAATHREVRAAVTRMSFYLLNDRLSLKGCPGPCGVTLKSLAWHTALQFLQVLPACTEDEKLLIDIIHFLNKLIKEQRKNSSLELLNWILELLLRHSANPLLDLLVLTESQAREETDDIRTAVR

SEQ ID NO: 835020 - protein, 411 aa, Homo sapiens
GEKNLLELVELADQALRSFSYHQHFPLIKEIISICSKIWKSAQASPLLQGESQKVLLHMLSHPLPRVKAETYHCCLEITKECLGVHNVTKPVSSLCNGIHFLLHPKVLYEISVFGIQEPESEVNTAAKAILLYLLQGRLMMTALTWNKFIESLCPVIPILQGYADTEDPLGNCILLLSKASSDTEEMLPCTTRLKSMLRLLLVKKPSVRSLALKLLAFHLTSEEGADTKRPLIDARVLSRVTDLFIGKKPIELRLDDRRELVIKLETVEKVYEIFTSDDVDLVLRKSAAEQLAVIMQDIKMHAVVKKLCLIDKIIEYLNECVSQDGKVVECLVQPCLTLLRKVLCGDPVMRVSLSQQSSLLTVLFRVSLIFHEDCSVVTEVGALFCLLLFDALIDLCIVEGDSPYRPSFLL

SEQ ID NO: 835021 - protein, 601 aa, Homo sapiens
GEKNLLELVELADQALRSFSYHQHFPLIKEIISICSKIWKSAQASPLLQGESQKVLLHMLSHPLPRVKAETYHCCLEITKECLGVHNVTKPVSSLCNGIHFLLHPKVLYEISVFGIQEPESEVNTAAKAILLYLLQGRLMMTALTWNKFIESLCPVIPILQGYADTEDPLGNCILLLSKASSDTEEMLPCTTRLKSMLRLLLVKKPSVRSLALKLLAFHLTSEEGADTKRPLIDARVLSRVTDLFIGKKPIELRLDDRRELVIKLETVEKVYEIFTSDDVDLVLRKSAAEQLAVIMQDIKMHAVVKKLCLIDKIIEYLNECVSQDGKVVECLVQPCLTLLRKVLCGDPVMRVSLSQQSSLLTVLFRVSLIFHEDCSVVTEVGALFCLLLFDEVSRMDMWSVNPSNKPSLPSVFSLPVSVFRRYHLPVHVIGHHAVSPYSIVLPLSADCLALKPVSDMLRIAWNLSWYHGSDNLLKQMNSETKTQEILDALKLSTEDILTLKITHMASGLQDCLHSIVQAATHREVRAAVTRMSFYLLNDRLSLKGCPGPCGVTLKSLAWHTALNSKHGKEQAVPATAKTCQLVKTIDARKKLYQLTSKITS

SEQ ID NO: 835022 - protein, 407 aa, Homo sapiens
GGGGGDGDGDGSGDGSSSGSSSVDAAGAGAMNPLEGAGCAARGAGEEEEDAAVKFSAMNLRGLFQDFNPSKFLIYACLLLFSVLLALRLDGIIQWSYWAVFAPIWLWKLMVIVGASVGTGVWARNPQYRAEGETCVEFKAMLIAVGIHLLLLMFEVLVCDRIERGSHFWLLVFMPLFFVSPVSVAACVWGFRHDRSLELEILCSVNILQFIFIALRLDKIIHWPWLVVCVPLWILMSFLCLVVLYYIVWSVLFLRSMDVIAEQRRTHITMALSWMTIVVPLLTFEILLVHKLDGHNAFSCIPIFVPLWLSLITLMATTFGQKGGNHWWFGIRKDFCQFLLEIFPFLREYGNISYDLHHEDNEETEETPVPEPPKIAPMFRKKARVVITQSPGKYVLPPPKLNIEMPD

SEQ ID NO: 835023 - protein, 172 aa, Homo sapiens
MSFLCLVVLYYIVWSVLFLRSMDVIAEQRRTHITMALSWMTIVVPLLTFEILLVHKLDGHNAFSCIPIFVPLWLSLITLMATTFGQKGGNHWWFGIRKDFCQFLLEIFPFLREYGNISYDLHHEDNEETEETPVPEPPKIAPMFRKKARVVITQSPGKYVLPPPKLNIEMPD

SEQ ID NO: 835024 - protein, 230 aa, Homo sapiens
GGGGGDGDGDGSGDGSSSGSSSVDAAGAGAMNPLEGAGCAARGAGEEEEDAAVKFSAMNLRGLFQDFNPSKFLIYACLLLFSVLLALRLDGIIQWSYWAVFAPIWLWKLMVIVGASVGTGVWARNPQYRAEGETCVEFKAMLIAVGIHLLLLMFEVLVCDRIERGSHFWLLVFMPLFFVSPVSVAACVWGFRHDRSLELEILCSVNILQFIFIALRLDKIIHWPWLVCNF

SEQ ID NO: 835025 - protein, 407 aa, Homo sapiens; identical to SEQ ID NO: 835022

SEQ ID NO: 835026 - protein, 727 aa, Homo sapiens
MGNGESQLSSVPAQKLGWFIQEYLKPYEECQTLIDEMVNTICDVLQEPEQFPLVQGVAIGGSYGRKTVLRGNSDGTLVLFFSDLKQFQDQKRSQRDILDKTGDKLKFCLFTKWLKNNFEIQKSLDGFTIQVFTKNQRISFEVLAAFNALSLNDNPSPWIYRELKRSLDKTNASPGEFAVCFTELQQKFFDNRPGKLKDLILLIKHWHQQCQKKIKDLPSLSPYALELLTVYAWEQGCRKDNFDIAEGVRTVLELIKCQEKLCIYWMVNYNFEDETIRNILLHQLQSARPVILDPVDPTNNVSGDKICWQWLKKEAQTWLTSPNLDNELPAPSWNVLPAPLFTTPGHLLDKFIKEFLQPNKCFLEQIDSAVNIIRTFLKENCFRQSTAKIQIVRGGSTAKGTALKTGSDADLVVFHNSLKSYTSQKNERHKIVKEIHEQLKAFWREKEEELEVSFEPPKWKAPRVLSFSLKSKVLNESVSFDVLPAFNALGQLSSGSTPSPEVYAGLIDLYKSSDLPGGEFSTCFTVLQRNFIRSRPTKLKDLIRLVKHWYKECERKLKPKGSLPPKYALELLTIYAWEQGSGVPDFDTAEGFRTVLELVTQYQQLCIFWKVNYNFEDETVRKFLLSQLQKTRPVILDPAEPTGDVGGGDRWCWHLLAKEAKEWLSSPCFKDGTGNPIPPWKVPTMQTPGSCGARIHPIVNEMFSSRSHRILNNNSKRNFWRSSGNRF

SEQ ID NO: 835027 - protein, 687 aa, Homo sapiens
MGNGESQLSSVPAQKLGWFIQEYLKPYEECQTLIDEMVNTICDVLQEPEQFPLVQGVAIGGSYGRKTVLRGNSDGTLVLFFSDLKQFQDQKRSQRDILDKTGDKLKFCLFTKWLKNNFEIQKSLDGFTIQVFTKNQRISFEVLAAFNALSLNDNPSPWIYRELKRSLDKTNASPGEFAVCFTELQQKFFDNRPGKLKDLILLIKHWHQQCQKKIKDLPSLSPYALELLTVYAWEQGCRKDNFDIAEGVRTVLELIKCQEKLCIYWMVNYNFEDETIRNILLHQLQSARPVILDPVDPTNNVSGDKICWQWLKKEAQTWLTSPNLDNELPAPSWNVLPAPLFTTPGHLLDKFIKEFLQPNKCFLEQIDSAVNIIRTFLKENCFRQSTAKIQIVRGGSTAKGTALKTGSDADLVVFHNSLKSYTSQKNERHKIVKEIHEQLKAFWREKEEELEVSFEPPKWKAPRVLSFSLKSKVLNESVSFDVLPAFNALGQLSSGSTPSPEVYAGLIDLYKSSDLPGGEFSTCFTVLQRNFIRSRPTKLKDLIRLVKHWYKECERKLKPKGSLPPKYALELLTIYAWEQGSGVPDFDTAEGFRTVLELVTQYQQLCIFWKVNYNFEDETVRKFLLSQLQKTRPVILDPAEPTGDVGGGDRWCWHLLAKEAKEWLSSPCFKDGTGNPIPPWKVPVKVI

SEQ ID NO: 835028 - protein, 687 aa, Homo sapiens; identical to SEQ ID NO: 835027

SEQ ID NO: 835029 - protein, 172 aa, Homo sapiens [sequence omitted]

SEQ ID NO: 835030 - protein, 172 aa, Homo sapiens [sequence omitted]

SEQ ID NO: 835031 - protein, 687 aa, Homo sapiens; identical to SEQ ID NO: 835027

SEQ ID NO: 835032 - protein, 560 aa, Homo sapiens
MGNGESQLSSVPAQKLGWFIQEYLKPYEECQTLIDEMVNTICDVLQEPEQFPLVQGVAIGGSYGRKTVLRGNSDGTLVLFFSDLKQFQDQKRSQRDILDKTGDKLKFCLFTKWLKNNFEIQKSLDGFTIQVFTKNQRISFEVLAAFNALSLNDNPSPWIYRELKRSLDKTNASPGEFAVCFTELQQKFFDNRPGKLKDLILLIKHWHQQCQKKIKDLPSLSPYALELLTVYAWEQGCRKDNFDIAEGVRTVLELIKCQEKLCIYWMVNYNFEDETIRNILLHQLQSARPVILDPVDPTNNVSGDKICWQWLKKEAQTWLTSPNLDNELPAPSWNVLPAPLFTTPGHLLDKFIKEFLQPNKCFLEQIDSAVNIIRTFLKENCFRQSTAKIQIVRGGSTAKGTALKTGSDADLVVFHNSLKSYTSQKNERHKIVKEIHEQLKAFWREKEEELEVSFEPPKWKAPRVLSFSLKSKVLNESVSFDVLPAFNALGQLSSGSTPSPEVYAGLIDLYKSSDLPGGEFSTCFTVLQRNFIRSRPTKLKHWNFQPHPTPNLQGGDGAGN

SEQ ID NO: 835033 - protein, 105 aa, Homo sapiens
MCQIPCWVLELPKGEKYSHRTKNFRKVHIKVLCKLKHDTNVNGLHIYEMNEWMNEILSASYIPAILGTVNTRLILLCNKRKVYPLYYSDVRNDILLNFKQSRLYW

SEQ ID NO: 835034 - protein, 685 aa, Homo sapiens
ASSLRGLTATERLKMIPFLPMFSLLLLLIVNPINANNHYDKILAHSRIRGRDQGPNVCALQQILGTKKKYFSTCKNWYKKSICGQKTTVLYECCPGYMRMEGMKGCPAVLPIDHVYGTLGIVGATTTQRYSDASKLREEIEGKGSFTYFAPSNEAWDNLDSDIRRGLESNVNVELLNALHSHMINKRMLTKDLKNGMIIPSMYNNLGLFINHYPNGVVTVNCARIIHGNQIATNGVVHVIDRVLTQIGTSIQDFIEAEDDLSSFRAAAITSDILEALGRDGHFTLFAPTNEAFEKLPRGVLERIMGDKVASEALMKYHILNTLQCSESIMGGAVFETLEGNTIEIGCDGDSITVNGIKMVNKKDIVTNNGVIHLIDQVLIPDSAKQVIELAGKQQTTFTDLVAQLGLASALRPDGEYTLLAPVNNAFSDDTLSMDQRLLKLILQNHILKVKVGLNELYNGQILETIGGKQLRVFVYRTAVCIENSCMEKGSKQGRNGAIHIFREIIKPAEKSLHEKLKQDKRFSTFLSLLEAADLKELLTQPGDWTLFVPTNDAFKGMTSEEKEILIRDKNALQNIILYHLTPGVFIGKGFEPGVTNILKTTQGSKIFLKEVNDTLLVNELKSKESDIMTTNGVIHVVDKLLYPADTPVGNDQLLEILNKLIKYIQIKFVRGSTFKEIPVTVYSN

SEQ ID NO: 835035 - protein, 731 aa, Homo sapiens
ASSLRGLTATERLKMIPFLPMFSLLLLLIVNPINANNHYDKILAHSRIRGRDQGPNVCALQQILGTKKKYFSTCKNWYKKSICGQKTTVLYECCPGYMRMEGMKGCPAVLPIDHVYGTLGIVGATTTQRYSDASKLREEIEGKGSFTYFAPSNEAWDNLDSDIRRGLESNVNVELLNALHSHMINKRMLTKDLKNGMIIPSMYNNLGLFINHYPNGVVTVNCARIIHGNQIATNGVVHVIDRVLTQIGTSIQDFIEAEDDLSSFRAAAITSDILEALGRDGHFTLFAPTNEAFEKLPRGVLERIMGDKVASEALMKYHILNTLQCSESIMGGAVFETLEGNTIEIGCDGDSITVNGIKMVNKKDIVTNNGVIHLIDQVLIPDSAKQVIELAGKQQTTFTDLVAQLGLASALRPDGEYTLLAPVNNAFSDDTLSMDQRLLKLILQNHILKVKVGLNELYNGQILETIGGKQLRVFVYRTAVCIENSCMEKGSKQGRNGAIHIFREIIKPAEKSLHEKLKQDKRFSTFLSLLEAADLKELLTQPGDWTLFVPTNDAFKGMTSEEKEILIRDKNALQNIILYHLTPGVFIGKGFEPGVTNILKTTQGSKIFLKEVNDTLLVNELKSKESDIMTTNGVIHVVDKLLYPADTPVGNDQLLEILNKLIKYIQIKFVRGSTFKEIPVTVYRPTLTKVKIEGEPEFRLIKEGETITEVIHGEPIIKKYTKIIDGVPVGN

SEQ ID NO: 835036 - protein, 687 aa, Homo sapiens
ASSLRGLTATERLKMIPFLPMFSLLLLLIVNPINANNHYDKILAHSRIRGRDQGPNVCALQQILGTKKKYFSTCKNWYKKSICGQKTTVLYECCPGYMRMEGMKGCPAVLPIDHVYGTLGIVGATTTQRYSDASKLREEIEGKGSFTYFAPSNEAWDNLDSDIRRGLESNVNVELLNALHSHMINKRMLTKDLKNGMIIPSMYNNLGLFINHYPNGVVTVNCARIIHGNQIATNGVVHVIDRVLTQIGTSIQDFIEAEDDLSSFRAAAITSDILEALGRDGHFTLFAPTNEAFEKLPRGVLERIMGDKVASEALMKYHILNTLQCSESIMGGAVFETLEGNTIEIGCDGDSITVNGIKMVNKKDIVTNNGVIHLIDQVLIPDSAKQVIELAGKQQTTFTDLVAQLGLASALRPDGEYTLLAPVNNAFSDDTLSMDQRLLKLILQNHILKVKVGLNELYNGQILETIGGKQLRVFVYRTAVCIENSCMEKGSKQGRNGAIHIFREIIKPAEKSLHEKLKQDKRFSTFLSLLEAADLKELLTQPGDWTLFVPTNDAFKGMTSEEKEILIRDKNALQNIILYHLTPGVFIGKGFEPGVTNILKTTQGSKIFLKEVNDTLLVNELKSKESDIMTTNGVIHVVDKLLYPADTPVGNDQLLEILNKLIKYIQIKFVRGSTFKEIPVTVYRANY

SEQ ID NO: 835037 - protein, 174 aa, Homo sapiens
MTSEEKEILIRDKNALQNIILYHLTPGVFIGKGFEPGVTNILKTTQGSKIFLKEVNDTLLVNELKSKESDIMTTNGVIHVVDKLLYPADTPVGNDQLLEILNKLIKYIQIKFVRGSTFKEIPVTVYRPTLTKVKIEGEPEFRLIKEGETITEVIHGEPIIKKYTKIIDGVPVGN

SEQ ID NO: 835038 - protein, 174 aa, Homo sapiens; identical to SEQ ID NO: 835037

SEQ ID NO: 835039 - protein, 106 aa, Homo sapiens
GYPSFIYSKTFIESGSGGSCLQSQHLGITATERLKMIPFLPMFSLLLLLIVNPINANNHYDKILAHSRIRGRDQGPNVCALQQILGTKKKYFSTLVMHVTSWHPGI

SEQ ID NO: 835040 - protein, 700 aa, Homo sapiens
ASSLRGLTATERLKMIPFLPMFSLLLLLIVNPINANNHYDKILAHSRIRGRDQGPNVCALQQILGTKKKYFSTCKNWYKKSICGQKTTVLYECCPGYMRMEGMKGCPAVLPIDHVYGTLGIVGATTTQRYSDASKLREEIEGKGSFTYFAPSNEAWDNLDSDIRRGLESNVNVELLNALHSHMINKRMLTKDLKNGMIIPSMYNNLGLFINHYPNGVVTVNCARIIHGNQIATNGVVHVIDRVLTQIGTSIQDFIEAEDDLSSFRAAAITSDILEALGRDGHFTLFAPTNEAFEKLPRGVLERIMGDKVASEALMKYHILNTLQCSESIMGGAVFETLEGNTIEIGCDGDSITVNGIKMVNKKDIVTNNGVIHLIDQVLIPDSAKQVIELAGKQQTTFTDLVAQLGLASALRPDGEYTLLAPVNNAFSDDTLSMDQRLLKLILQNHILKVKVGLNELYNGQILETIGGKQLRVFVYRTAVCIENSCMEKGSKQGRNGAIHIFREIIKPAEKSLHEKLKQDKRFSTFLSLLEAADLKELLTQPGDWTLFVPTNDAFKGMTSEEKEILIRDKNALQNIILYHLTPGVFIGKGFEPGVTNILKTTQGSKIFLKEVNDTLLVNELKSKESDIMTTNGVIHVVDKLLYPADTPVGNDQLLEILNKLIKYIQIKFVRGSTFKEIPVTVYSQLLKNTPKSLMECLWK

SEQ ID NO: 835041 - protein, 763 aa, Homo sapiens
ASSLRGLTATERLKMIPFLPMFSLLLLLIVNPINANNHYDKILAHSRIRGRDQGPNVCALQQILGTKKKYFSTCKNWYKKSICGQKTTVLYECCPGYMRMEGMKGCPAVLPIDHVYGTLGIVGATTTQRYSDASKLREEIEGKGSFTYFAPSNEAWDNLDSDIRRGLESNVNVELLNALHSHMINKRMLTKDLKNGMIIPSMYNNLGLFINHYPNGVVTVNCARIIHGNQIATNGVVHVIDRVLTQIGTSIQDFIEAEDDLSSFRAAAITSDILEALGRDGHFTLFAPTNEAFEKLPRGVLERIMGDKVASEALMKYHILNTLQCSESIMGGAVFETLEGNTIEIGCDGDSITVNGIKMVNKKDIVTNNGVIHLIDQVLIPDSAKQVIELAGKQQTTFTDLVAQLGLASALRPDGEYTLLAPVNNAFSDDTLSMDQRLLKLILQNHILKVKVGLNELYNGQILETIGGKQLRVFVYRTAVCIENSCMEKGSKQGRNGAIHIFREIIKPAEKSLHEKLKQDKRFSTFLSLLEAADLKELLTQPGDWTLFVPTNDAFKGMTSEEKEILIRDKNALQNIILYHLTPGVFIGKGFEPGVTNILKTTQGSKIFLKEVNDTLLVNELKSKESDIMTTNGVIHVVDKLLYPADTPVGNDQLLEILNKLIKYIQIKFVRGSTFKEIPVTVYSPEIKYTRISTGGGETEETLKKLLQEEVTKVTKFIEGGDGHLFEDEEIKRLLQGDTPVRKLQANKKVQGSRRRLREGRSQ

SEQ ID NO: 835042 - protein, 238 aa, Homo sapiens
CSDDPMRERFHSRQQTNTPSMKVENNDKRFSTFLSLLEAADLKELLTQPGDWTLFVPTNDAFKGMTSEEKEILIRDKNALQNIILYHLTPGVFIGKGFEPGVTNILKTTQGSKIFLKEVNDTLLVNELKSKESDIMTTNGVIHVVDKLLYPADTPVGNDQLLEILNKLIKYIQIKFVRGSTFKEIPVTVYRPTLTKVKIEGEPEFRLIKEGETITEVIHGEPIIKKYTKIIDGVPVGN

SEQ ID NO: 835043 - protein, 55 aa, Homo sapiens
MLARSFLTVLTEGFFAVAQQLFEPVCTLRVLPMSHGIEMLRSSFLQPLRQSKAPC

SEQ ID NO: 835044 - protein, 163 aa, Homo sapiens
MDNFCLFPCKQDCHFLNPVWSPGWSKESHGSQICWALRRKNFPSGSHIGDRRVHADLLPSKKDRRSWVEQDHWSFEDEKVAGVHWGYEETRTLLAILSQTEFYEALRNCHRNSQVYGAVAERLREYGFSGPWNSVGPSSKVSRRAIGKSRAATHLRPAPSLKR

SEQ ID NO: 835045 - protein, 319 aa, Homo sapiens
MKIELSMQPWNPGYSSEGATAQETYTCPKMIEMEQAEAQLAELDLLASMFPGENELIVNDQLAVAELKDCIEKKTMEGRSSKVYFTINMNLDVSDEKMAMFSLACILPFKYPAVLPEITVRSVLLSRSQQTQLNTDLTAFLQKHCHGDVCILNATEWVREHASGYVSRDTSSSPTTGSTVQSVDLIFTRLWIYSHHIYNKCKRKNILEWAKELSLSGFSMPGKPGVVCVEGPQSACEEFWSRLRKLNWKRILIRHREDIPFDGTNDETERQRKFSIFEEKVFSVNGARGNHMDFGQLYQFLNTKGCGDVFQMFFGVEGQ

SEQ ID NO: 835046 - protein, 301 aa, Homo sapiens
MKIELSMQPWNPGYSSEGATAQETYTCPKMIEMEQAEAQLAELDLLASMFPGENELIVNDQLAVAELKDCIEKKTMEGRSSKVYFTINMNLDVSDEKMAMFSLACILPFKYPAVLPEITVRSVLLSRSQQTQLNTDLTAFLQKHCHGDVCILNATEWVREHASGYVSRDTSSSPTTGSTVQSVDLIFTRLWIYSHHIYNKCKRKNILEWAKELSLSGFSMPGKPGVVCVEGPQSACEEFWSRLRKLNWKRILIRHREDIPFDGTNDETERQRKFSIFEDYQFLNTKGCGDVFQMFFGVEGQ

SEQ ID NO: 835047 - protein, 104 aa, Homo sapiens [sequence omitted]

SEQ ID NO: 835048 - protein, 103 aa, Homo sapiens
MKIELSMQPWNPGYSSEGATAQETYTCPKMIEMEQAEAQLAELDLLASMFPGENELIVNDQLAVAELKDCIEKKTMEGRSSKVYFTINMNLDVSDEKMISIIE

SEQ ID NO: 835049 - protein, 35 aa, Homo sapiens
MRPSVGSVLGVASRLLQPCSSRGPRPGGNQGARAA

SEQ ID NO: 835050 - protein, 319 aa, Homo sapiens; identical to SEQ ID NO: 835045

SEQ ID NO: 835051 - protein, 290 aa, Homo sapiens
MIEMEQAEAQLAELDLLASMFPGENELIVNDQLAVAELKDCIEKKTMEGRSSKVYFTINMNLDVSDEKMAMFSLACILPFKYPAVLPEITVRSVLLSRSQQTQLNTDLTAFLQKHCHGDVCILNATEWVREHASGYVSRDTSSSPTTGSTVQSVDLIFTRLWIYSHHIYNKCKRKNILEWAKELSLSGFSMPGKPGVVCVEGPQSACEEFWSRLRKLNWKRILIRHREDIPFDGTNDETERQRKFSIFEEKVFSVNGARGNHMDFGQLYQFLNTKGCGDVFQMFFGVEGQ

SEQ ID NO: 835052 - protein, 227 aa, Homo sapiens
MKIELSMQPWNPGYSSEGATAQETYTCPKMIEMEQAEAQLAELDLLASMFPGENELIVNDQLAVAELKDCIEKKTMEGRSSKVYFTINMNLDVSDEKMAMFSLACILPFKYPAVLPEITVRSVLLSRSQQTQLNTDLTAFLQKHCHGDVCILNATEWVREHASGYVSRDTSSSPTTGSTVQSVDLIFTRLWIYSHHIYNKCCLENLVLFVWKAHKVPVKNSGQDSEN

SEQ ID NO: 835053 - protein, 117 aa, Homo sapiens
MKIELSMQPWNPGYSSEGATAQETYTCPKMIEMEQAEAQLAELDLLASMFPGENELIVNDQLAVAELKDCIEKKTMEGRSSKVYFTINMNLDVSDEKMTQKIKLEENFNSPSRRHSF

SEQ ID NO: 835054 - protein, 72 aa, Homo sapiens
MMEEISIMVAYDAHVFSQLHDEDFLTSLVAISKPRSMVPTKKLKKYEKEYQTMRESQLQQEDPMDRYKFVYL

SEQ ID NO: 835055 - protein, 256 aa, Homo sapiens
MRESQLQQEDPMDRYKRENRRLQEASMRLEQENDDLAHELVTSKIALRNDLDQAEDKADVLNKELLLTKQRLVETEEEKRKQEEETAQLKEVFRKQLEKAEYEIKKTTAIIAEYKQICSQLSTRLEKQQAASKEELEVVKGKMMACKHCSDIFSKEGALKLAATGREDQGIETDDEKDSLKKQLREMELELAQTKLQLVEAKCKIQELEHQRGALMNEIQAAKNSWFSKTLNSIKTATGTQPLQPAPVTQPPKEST

SEQ ID NO: 835056 - protein, 256 aa, Homo sapiens; identical to SEQ ID NO: 835055

SEQ ID NO: 835057 - protein, 256 aa, Homo sapiens; identical to SEQ ID NO: 835055

SEQ ID NO: 835058 - protein, 256 aa, Homo sapiens; identical to SEQ ID NO: 835055

SEQ ID NO: 835059 - protein, 1158 aa, Homo sapiens
EGPGRARFRPAATASSPPSRPAPSLASSCQAALLPSPLSSLRPPRAPAVAERTGPARLQSARWRVERGRLKELLSRQRPRRREEVVVGREVCRTEMEVRASLQKVSGSSDSVATMNSEEFVLVPQYADDNSTKHEEKPQLKIVSNGDEQLEKAMEEILRDSEKRPSSLLVDCQSSSEISDHSFGDIPASQTNKPSLQLILDPSNTEISTPRPSSPGGLPEEDSVLFNKLTYLGCMKVSSPRNEVEALRAMATMKSSSQYPFPVTLYVPNVPEGSVRIIDQSSNVEIASFPIYKVLFCARGHDGTTESNCFAFTESSHGSEEFQIHVFSCEIKEAVSRILYSFCTAFKRSSRQVSDVKDSVIPTPDSDVFTFSVSLEVKEDDGKGNFRLLVIPIPFEYFSPVPKDRDKFYFKLKQGIEKKVVITVQQLSNKELAIERCFGMLLSPGRNVKNSDMHLLDMESMGKSYDGRAYVITGMWNPNAPVFLALNEETPKDKQVYMTVAVDMVVTEVVEPVRFLLETVVRVYPANERFWYFSRKTFTETFFMRLKQSEGKGHTNAGDAIYEVVSLQRESDKEEPVTPTSGGGPMSPQDDEAEEESDNELSSGTGDVSKDCPEKILYSWGELLGKWHSNLGARPKGLSTLVKSGVPEALRAEVWQLLAGCHDNQAMLDRYRILITKDSAQESVITRDIHRTFPAHDYFKDTGGDGQESLYKICKAYSVYDEDIGYCQGQSFLAAVLLLHMPEEQAFCVLVKIMYDYGLRDLYRNNFEDLHCKFYQLERLMQEQLPDLHSHFSDLNLEAHMYASQWFLTLFTAKFPLCMVFHIIDLLLCEGLNIIFHVALALLKTSKEDLLQADFEGALKFFRVQLPKRYRAEENARRLMEQACNIKVPTKKLKKYEKEYQTMRESQLQQEDPMDRYKRENRRLQEASMRLEQENDDLAHELVTSKIALRNDLDQAEDKADVLNKELLLTKQRLVETEEEKRKQEEETAQLKEVFRKQLEKAEYEIKKTTAIIAEYKQICSQLSTRLEKQQAASKEELEVVKGKMMACKHCSDIFSKEGALKLAATGREDQGIETDDEKDSLKKQLREMELELAQTKLQLVEAKCKIQELEHQRGALMNEIQAAKNSWFSKTLNSIKTATGTQPLQPAPVTQPPKEST

SEQ ID NO: 835060 - protein, 922 aa, Homo sapiens
EGPGRARFRPAATASSPPSRPAPSLASSCQAALLPSPLSSLRPPRAPAVAERTGPARLQSARWRVERGRLKELLSRQRPRRREEVVVGREVCRTEMEVRASLQKVSGSSDSVATMNSEEFVLVPQYADDNSTKHEEKPQLKIVSNGDEQLEKAMEEILRDSEKRPSSLLVDCQSSSEISDHSFGDIPASQTNKPSLQLILDPSNTEISTPRPSSPGGLPEEDSVLFNKLTYLGCMKVSSPRNEVEALRAMATMKSSSQYPFPVTLYVPNVPEGSVRIIDQSSNVEIASFPIYKVLFCARGHDGTTESNCFAFTESSHGSEEFQIHVFSCEIKEAVSRILYSFCTAFKRSSRQVSDVKDSVIPTPDSDVFTFSVSLEVKEDDGKGNFRLLVIPIPFEYFSPVPKDRDKFYFKLKQGIEKKVVITVQQLSNKELAIERCFGMLLSPGRNVKNSDMHLLDMESMGKSYDGRAYVITGMWNPNAPVFLALNEETPKDKQVYMTVAVDMVVTEVVEPVRFLLETVVRVYPANERFWYFSRKTFTETFFMRLKQSEGKGHTNAGDAIYEVVSLQRESDKEEPVTPTSGGGPMSPQDDEAEEESDNELSSGTGDVSKDCPEKILYSWGELLGKWHSNLGARPKGLSTLVKSGVPEALRAEVWQLLAGCHDNQAMLDRYRILITKDSAQESVITRDIHRTFPAHDYFKDTGGDGQESLYKICKAYSVYDEDIGYCQGQSFLAAVLLLHMPEEQAFCVLVKIMYDYGLRDLYRNNFEDLHCKFYQLERLMQEQLPDLHSHFSDLNLEAHMYASQWFLTLFTAKFPLCMVFHIIDLLLCEGLNIIFHVALALLKTSKEDLLQADFEGALKFFRVQLPKRYRAEENARRLMEQACNIKVPTKKLKKYEKEYQTMRESQLQQEDPMDRYKFVYL

SEQ ID NO: 835061 - protein, 922 aa, Homo sapiens; identical to SEQ ID NO: 835060

SEQ ID NO: 835062 - protein, 885 aa, Homo sapiens
EGPGRARFRPAATASSPPSRPAPSLASSCQAALLPSPLSSLRPPRAPAVAERTGPARLQSARWRVERGRLKELLSRQRPRRREEVVVGREVCRTEMEVRASLQKVSGSSDSVATMNSEEFVLVPQYADDNSTKHEEKPQLKIVSNGDEQLEKAMEEILRDSEKRPSSLLVDCQSSSEISDHSFGDIPASQTNKPSLQLILDPSNTEISTPRPSSPGGLPEEDSVLFNKLTYLGCMKVSSPRNEVEALRAMATMKSSSQYPFPVTLYVPNVPEGSVRIIDQSSNVEIASFPIYKVLFCARGHDGTTESNCFAFTESSHGSEEFQIHVFSCEIKEAVSRILYSFCTAFKRSSRQVSDVKDSVIPTPDSDVFTFSVSLEVKEDDGKGNFRLLVIPIPFEYFSPVPKDRDKFYFKLKQGIEKKVVITVQQLSNKELAIERCFGMLLSPGRNVKNSDMHLLDMESMGKSYDGRAYVITGMWNPNAPVFLALNEETPKDKQVYMTVAVDMVVTEVVEPVRFLLETVVRVYPANERFWYFSRKTFTETFFMRLKQSEGKGHTNAGDAIYEVVSLQRESDKEEPVTPTSGGGPMSPQDDEAEEESDNELSSGTGDVSKDCPEKILYSWGELLGKWHSNLGARPKGLSTLVKSGVPEALRAEVWQLLAGCHDNQAMLDRYRILITKDSAQESVITRDIHRTFPAHDYFKDTGGDGQESLYKICKAYSVYDEDIGYCQGQSFLAAVLLLHMPEEQAFCVLVKIMYDYGLRDLYRNNFEDLHCKFYQLERLMQEQLPDLHSHFSDLNLEAHMYASQWFLTLFTAKFPLCMVFHIIDLLLCEGLNIIFHVALALLKTSKEDLLQADFEGALKFFRVQLPKRYRAEVDAAANLVVVVD

SEQ ID NO: 835063 - protein, 711 aa, Homo sapiens
EGPGRARFRPAATASSPPSRPAPSLASSCQAALLPSPLSSLRPPRAPAVAERTGPARLQSARWRVERGRLKELLSRQRPRRREEVVVGREVCRTEMEVRASLQKVSGSSDSVATMNSEEFVLVPQYADDNSTKHEEKPQLKIVSNGDEQLEKAMEEILRDSEKRPSSLLVDCQSSSEISDHSFGDIPASQTNKPSLQLILDPSNTEISTPRPSSPGGLPEEDSVLFNKLTYLGCMKVSSPRNEVEALRAMATMKSSSQYPFPVTLYVPNVPEGSVRIIDQSSNVEIASFPIYKVLFCARGHDGTTESNCFAFTESSHGSEEFQIHVFSCEIKEAVSRILYSFCTAFKRSSRQVSDVKDSVIPTPDSDVFTFSVSLEVKEDDGKGNFRLLVIPIPFEYFSPVPKDRDKFYFKLKQGIEKKVVITVQQLSNKELAIERCFGMLLSPGRNVKNSDMHLLDMESMGKSYDGRAYVITGMWNPNAPVFLALNEETPKDKQVYMTVAVDMVVTEVVEPVRFLLETVVRVYPANERFWYFSRKTFTETFFMRLKQSEGKGHTNAGDAIYEVVSLQRESDKEEPVTPTSGGGPMSPQDDEAEEESDNELSSGTGDVSKDCPEKILYSWGELLGKWHSNLGARPKGLSTLVKSGVPEALRAEVWQLLAGCHDNQAMLDRYRILITKDSAQESVITRDIHRTFPAHDYFKDTGGAATVSLE

SEQ ID NO: 835064 - protein, 1158 aa, Homo sapiens; identical to SEQ ID NO: 835059

SEQ ID NO: 835065 - protein, 922 aa, Homo sapiens; identical to SEQ ID NO: 835060

SEQ ID NO: 835066 - protein, 844 aa, Homo sapiens
EGPGRARFRPAATASSPPSRPAPSLASSCQAALLPSPLSSLRPPRAPAVAERTGPARLQSARWRVERGRLKELLSRQRPRRREEVVVGREVCRTEMEVRASLQKVSGSSDSVATMNSEEFVLVPQYADDNSTKHEEKPQLKIVSNGDEQLEKAMEEILRDSEKRPSSLLVDCQSSSEISDHSFGDIPASQTNKPSLQLILDPSNTEISTPRPSSPGGLPEEDSVLFNKLTYLGCMKVSSPRNEVEALRAMATMKSSSQYPFPVTLYVPNVPEGSVRIIDQSSNVEIASFPIYKVLFCARGHDGTTESNCFAFTESSHGSEEFQIHVFSCEIKEAVSRILYSFCTAFKRSSRQVSDVKDSVIPTPDSDVFTFSVSLEVKEDDGKGNFRLLVIPIPFEYFSPVPKDRDKFYFKLKQGIEKKVVITVQQLSNKELAIERCFGMLLSPGRNVKNSDMHLLDMESMGKSYDGRAYVITGMWNPNAPVFLALNEETPKDKQVYMTVAVDMVVTEVVEPVRFLLETVVRVYPANERFWYFSRKTFTETFFMRLKQSEGKGHTNAGDAIYEVVSLQRESDKEEPVTPTSGGGPMSPQDDEAEEESDNELSSGTGDVSKDCPEKILYSWGELLGKWHSNLGARPKGLSTLVKSGVPEALRAEVWQLLAGCHDNQAMLDRYRILITKDSAQESVITRDIHRTFPAHDYFKDTGGDGQESLYKICKAYSVYDEDIGYCQGQSFLAAVLLLHMPEEQAFCVLVKIMYDYGLRDLYRNNFEDLHCKFYQLERLMQEQLPDLHSHFSDLNLEAHMYASQWFLTLFTAKFPLCMVFHIIDLLLCESGISALQFTGMVTF

SEQ ID NO: 835067 - protein, 700 aa, Homo sapiens
EGPGRARFRPAATASSPPSRPAPSLASSCQAALLPSPLSSLRPPRAPAVAERTGPARLQSARWRVERGRLKELLSRQRPRRREEVVVGREVCRTEMEVRASLQKVSGSSDSVATMNSEEFVLVPQYADDNSTKHEEKPQLKIVSNGDEQLEKAMEEILRDSEKRPSSLLVDCQSSSEISDHSFGDIPASQTNKPSLQLILDPSNTEISTPRPSSPGGLPEEDSVLFNKLTYLGCMKVSSPRNEVEALRAMATMKSSSQYPFPVTLYVPNVPEGSVRIIDQSSNVEIASFPIYKVLFCARGHDGTTESNCFAFTESSHGSEEFQIHVFSCEIKEAVSRILYSFCTAFKRSSRQVSDVKDSVIPTPDSDVFTFSVSLEVKEDDGKGNFSPVPKDRDKFYFKLKQGIEKKVVITVQQLSNKELAIERCFGMLLSPGRNVKNSDMHLLDMESMGKSYDGRAYVITGMWNPNAPVFLALNEETPKDKQVYMTVAVDMVVTEVVEPVRFLLETVVRVYPANERFWYFSRKTFTETFFMRLKQSEGKGHTNAGDAIYEVVSLQRESDKEEPVTPTSGGGPMSPQDDEAEEESDNELSSGTGDVSKDCPEKILYSWGELLGKWHSNLGARPKGLSTLVKSGVPEALRAEVWQLLAGCHDNQAMLDRYRILITKVCWSLLEVHSRPCLPGYHQWKLQNSKYCRMANVAA

SEQ ID NO: 835068 - protein, 71 aa, Homo sapiens
MACKHCSDIFSKEGALKLAATGREDQGIETDDEKDSLKKQLREMELELAQTKLQLVEAKCKIQVGDLIKEQ

SEQ ID NO: 835069 - protein, 256 aa, Homo sapiens; identical to SEQ ID NO: 835055

SEQ ID NO: 835070 - protein, 256 aa, Homo sapiens; identical to SEQ ID NO: 835055

SEQ ID NO: 835071 - protein, 256 aa, Homo sapiens; identical to SEQ ID NO: 835055

SEQ ID NO: 835072 - protein, 256 aa, Homo sapiens; identical to SEQ ID NO: 835055

SEQ ID NO: 835073 - protein, 370 aa, Homo sapiens
MEEGVPCPAPAAKLTPPVKKSQDMHDERSKLVNEYACRVLELLGMGHRLFVPRLLATSKEDLLQADFEGALKFFRVQLPKRYRAEENARRLMEQACNIKVPTKKLKKYEKEYQTMRESQLQQEDPMDRYKRENRRLQEASMRLEQENDDLAHELVTSKIALRNDLDQAEDKADVLNKELLLTKQRLVETEEEKRKQEEETAQLKEVFRKQLEKAEYEIKKTTAIIAEYKQICSQLSTRLEKQQAASKEELEVVKGKMMACKHCSDIFSKEGALKLAATGREDQGIETDDEKDSLKKQLREMELELAQTKLQLVEAKCKIQELEHQRGALMNEIQAAKNSWFSKTLNSIKTATGTQPLQPAPVTQPPKEST

SEQ ID NO: 835074 - protein, 281 aa, Homo sapiens
PNNQSINSKVSGGSTHGTWGSLQETCESEVSGTQKVSFSGQPQNITTEMTGPNNTTNFMTSSLPNSGSVQNNELPSSNTGAWRVSTMNHPQMQAPSGMNGTSLSHLSNGESKSGGSYGTTWGAYGSNYSGDKCSGPNGQANGDTVNATLMQPGVNGPMGTNFQVNTNKGGGVWESGAANSQSTSWGSGNGANSGGSRRGWGTPAQNTGTNLPSVEWNKLPSNQHSNDSANGNGKTFTNGWKSTEEEDQGSATSQTNEQSSVWAKTGGTVESDGSLGLVLAA

SEQ ID NO: 835075 - protein, 360 aa, Homo sapiens
TNFKFPFPEFRPGEPWKGYPNIDPETDPYVTPGSVINNLSINTVREVDHLRDRNSGSSSSLNTTLPSTSAWSSIRASNYNVPLSSTAQSTSARNSDSKLTWSPGSVTNTSLAHELWKVPLPPKNITAPSRPPPGLTGQKPPLSTWDNSPLRIGGGWGNSDARYTPGSSWGESSSGRITNWLVLKNLTPQIDGSTLRTLCMQHGPLITFHLNLPHGNALVRYSSKEEVVKAQKSLHMCVLGNTTILAEFASEEEISRFFAQSQSLTPSPGWQSLGSSQSRLGSLDCSHSFSSRTDLNHWNGAGLSGTNCGDLHGTSLWGTPHYSTSLWGPPSSSDPRGISSPSPINAFLSVDHLGGGGESM

SEQ ID NO: 835076 - protein, 1016 aa, Homo sapiens
VLEDTSYRGRWSVSASDNWGETSRNNHWGEANKKSSSGGSDSDRSVSGWNELGKTSSFTWGNNINPNNSSGWDESSKPTPSQGWGDPPKSNQSLGWGDSSKPVSSPDWNKQQDIVGSWGIPPATGKPPGTGWLGGPIPAPAKEEEPTGWEEPSPESIRRKMEIDDGTSAWGDPSKYNYKNVNMWNKNVPNGNSRSDQQAQVHQLLTPASAISNKEASSGSGPKSMQDGWCGDDMPLPGNRPTGWEEEEDVEIGMWNSNSSQELNSSLNWPPYTKKMSSKGLSGKKRRRERGMMKGGNKQEEAWINPFVKQFSNISFSRDSPEENVQSNKMDLSGGMLQDKRMEIDKHSLNIGDYNRTVGKGPGSRPQISKESSMERNPYFDKNGNPSMFGVGNTAAQPRGMQQPPAQPLSSSQPNLRAQVPPPLLSPQVPVSLLKYAPNNGGLNPLFGPQQVAMLNQLSQLNQLSQISQLQRLLAQQQRAQSQRSVPSGNRPQQDQQGRPLSVQQQMMQQSRQLDPNLLVKQQTPPSQQQPLHQPAMKSFLDNVMPHTTPELQKGPSPINAFSNFPIGLNSNLNVNMDMNSIKEPQSRLRKWTTVDSISVNTSLDQNSSKHGAISSGFRLEESPFVPYDFMNSSTSPASPPGSIGDGWPRAKSPNGSSSVNWPPEFRPGEPWKGYPNIDPETDPYVTPGSVINNLSINTVREVDHLRDRNSGSSSSLNTTLPSTSAWSSIRASNYNVPLSSTAQSTSARNSDSKLTWSPGSVTNTSLAHELWKVPLPPKNITAPSRPPPGLTGQKPPLSTWDNSPLRIGGGWGNSDARYTPGSSWGESSSGRITNWLVLKNLTPQIDGSTLRTLCMQHGPLITFHLNLPHGNALVRYSSKEEVVKAQKSLHMCVLGNTTILAEFASEEEISRFFAQSQSLTPSPGWQSLGSSQSRLGSLDCSHSFSSRTDLNHWNGAGLSGTNCGDLHGTSLWGTPHYSTSLWGPPSSSDPRGISSPSPINAFLSVDHLGGGGESM

SEQ ID NO: 835077 - protein, 442 aa, Homo sapiens
QTKGAKRNVNQENIARATDQLDSISVNTSLDQNSSKHGAISSGFRLEESPFVPYDFMNSSTSPASPPGSIGDGWPRAKSPNGSSSVNWPPEFRPGEPWKGYPNIDPETDPYVTPGSVINNLSINTVREVDHLRDRNSGSSSSLNTTLPSTSAWSSIRASNYNVPLSSTAQSTSARNSDSKLTWSPGSVTNTSLAHELWKVPLPPKNITAPSRPPPGLTGQKPPLSTWDNSPLRIGGGWGNSDARYTPGSSWGESSSGRITNWLVLKNLTPQIDGSTLRTLCMQHGPLITFHLNLPHGNALVRYSSKEEVVKAQKSLHMCVLGNTTILAEFASEEEISRFFAQSQSLTPSPGWQSLGSSQSRLGSLDCSHSFSSRTDLNHWNGAGLSGTNCGDLHGTSLWGTPHYSTSLWGPPSSSDPRGISSPSPINAFLSVDHLGGGGESM

SEQ ID NO: 835078 - protein, 109 aa, Homo sapiens
ILSRSLTYHCDPKVPVSLLKYAPNNGGLNPLFGPQQVAMLNQLSQLNQLSQISQLQVSRVIVFLSTHLWSIYCMPNTRLCAGHSALNKTGVVIVLMELTVYRGRQIVNI

SEQ ID NO: 835079 - protein, 791 aa, Homo sapiens
MWNMLIVAMCLALLGCLQAQELQGHVSIILLGATGDLAKKYLWQGLFQLYLDEAGRGHSFSFHGAALTAPKQGQELMAKALESLSCPKDMAPSHCAEHKDQFLQLSQYRQLKTAEDYQALNKDIEAQLQHAGLREAGRIFYFSVPPFAYEDIARNINSSCRPGPGAWLRVVLEKPFGHDHFSAQQLATELGTFFQEEEMYRVDHYLGKQAVAQILPFRDQNRKALDGLWNRHHVERVEIIMKETVDAEGRTSFYEEYGVIRDVLQNHLTEVLTLVAMELPHNVSSAEAVLRHKLQVFQALRGLQRGSAVVGQYQSYSEQVRRELQKPDSFHSLTPTFAAVLVHIDNLRWEGVPFILMSGKALDERVGYARILFKNQACCVQSEKHWAAAQSQCLPRQLVFHIGHGDLGSPAVLVSRNLFRPSLPSSWKEMEGPPGLRLFGSPLSDYYAYSPVRERDAHSVLLSHIFHGRKNFFITTENLLASWNFWTPLLESLAHKAPRLYPGGAENGRLLDFEFSSGRLFFSQQQPEQLVPGPGPAPMPSDFQVLRAKYRESPLVSAWSEELISKLANDIEATAVRAVRRFGQFHLALSGGSSPVALFQQLATAHYGFPWAHTHLWLVDERCVPLSDPESNFQGLQAHLLQHVRIPYYNIHPMPVHLQQRLCAEEDQGAQIYAREISALVANSSFDLVLLGMGADGHTASLFPQSPTGLDGEQLVVLTTSPSQPHRRMSLSLPLINRAKKVAVLVMGRMKREITTLVSRVGHEPKKWPISGVLPHSGQLVWYMDYDAFLG

SEQ ID NO: 835080 - protein, 791 aa, Homo sapiens
MWNMLIVAMCLALLGCLQAQELQGHVSIILLGATGDLAKKYLWQGLFQLYLDEAGRGHSFSFHGAALTAPKQGQELMAKALESLSCPKDMAPSHCAEHKDQFLQLSQYRQLKTAEDYQALNKDIEAQLQHAGLREAGRIFYFSVPPFAYEDIARNINSSCRPGPGAWLRVVLEKPFGHDHFSAQQLATELGTFFQEEEMYRVDHYLGKQAVAQILPFRDQNRKALDGLWNRHHVERVEIIMKETVDAEGRTSFYEEYGVIRDVLQNHLTEVLTLVAMELPHNVSSAEAVLRHKLQVFQALRGLQRGSAVVGQYQSYSEQVRRELQKPDSFHSLTPTFAGVLVHIDNLRWEGVPFILMSGKALDERVGYARILFKNQACCVQSEKHWAAAQSQCLPRQLVFHIGHGDLGSPAVLVSRNLFRPSLPSSWKEMEGPPGLRLFGSPLSDYYAYSPVRERDAHSVLLSHIFHGRKNFFITTENLLASWNFWTPLLESLAHKAPRLYPGGAENGRLLDFEFSSGRLFFSQQQPEQLVPGPGPAPMPSDFQVLRAKYRESPLVSAWSEELISKLANDIEATAVRAVRRFGQFHLALSGGSSPVALFQQLATAHYGFPWAHTHLWLVDERCVPLSDPESNFQGLQAHLLQHVRIPYYNIHPMPVHLQQRLCAEEDQGAQIYAREISALVANSSFDLVLLGMGADGHTASLFPQSPTGLDGEQLVVLTTSPSQPHRRMSLSLPLINRAKKVAVLVMGRMKREITTLVSRVGHEPKKWPISGVLPHSGQLVWYMDYDAFLG

SEQ ID NO: 835081 - protein, 791 aa, Homo sapiens; identical to SEQ ID NO: 835079

SEQ ID NO: 835082 - protein, 131 aa, Homo sapiens
MQGSGSQFRACLLCLCFSCPCSPGGPRWNSRQGGRRFPKTCRAISQNLVFKYKTFCPVRYMQPHRSSLCLHFTSYVFILSTWGSLRTYSTDLKKKNCLAASQCQSEHGTGKARGDEGEVATVTGRQMRLCK

SEQ ID NO: 835083 - protein, 791 aa, Homo sapiens; identical to SEQ ID NO: 835079

SEQ ID NO: 835084 - protein, 791 aa, Homo sapiens; identical to SEQ ID NO: 835079

SEQ ID NO: 835085 - protein, 791 aa, Homo sapiens; identical to SEQ ID NO: 835079

SEQ ID NO: 835086 - protein, 791 aa, Homo sapiens; identical to SEQ ID NO: 835079

SEQ ID NO: 835087 - protein, 791 aa, Homo sapiens; identical to SEQ ID NO: 835079

SEQ ID NO: 835088 - protein, 791 aa, Homo sapiens; identical to SEQ ID NO: 835079

SEQ ID NO: 835089 - protein, 131 aa, Homo sapiens; identical to SEQ ID NO: 835082

SEQ ID NO: 835090 - protein, 791 aa, Homo sapiens; identical to SEQ ID NO: 835080

SEQ ID NO: 835091 - protein, 123 aa, Homo sapiens
RDRSGNSRVRLLLLNSRPRRQDVEIVPVLGNYFPLPGYGKEDVIVNNIHHPVFNVLQQCSNLFFSFVPTAFVYIENLKISPSLLEVKMFPNLLNMPLFTICFFRLFLMHYRIKYDFVYFYYSM

SEQ ID NO: 835092 - protein, 273 aa, Homo sapiens
MGRSRSRSSSRSKHTKSSKHNKKRSRSRSRSRDKERVRKRSKSRESKRNRRRESRSRSRSTNTAVSRRERDRERASSPPDRIDIFGRTVSKRSSLDEKQKREEEEKKAEFERQRKIRQQEIEEKLIEEETARRVEELVAKRVEEELEKRKDEIEREVLRRVEEAKRIMEKQLLEELERQRQAELAAQKAREVTLGRLESRDSPWQNFQCWVLPPAQFRKRWNTDYLIPFSSKLNIAAKVNFLAYSEVLTDNLKVGSFYKTYSRILFDLMELAI

SEQ ID NO: 835093 - protein, 273 aa, Homo sapiens; identical to SEQ ID NO: 835092

SEQ ID NO: 835094 - protein, 273 aa, Homo sapiens; identical to SEQ ID NO: 835092

SEQ ID NO: 835095 - protein, 106 aa, Homo sapiens [sequence omitted]

SEQ ID NO: 835096 - protein, 273 aa, Homo sapiens; identical to SEQ ID NO: 835092

SEQ ID NO: 835097 - protein, 273 aa, Homo sapiens; identical to SEQ ID NO: 835092

SEQ ID NO: 835098 - protein, 142 aa, Homo sapiens
MKLNEKFSEGWRKPNASWKSSCSKNSSDRDKLSLPHKKLERGSWRVWQPRSTLCRTLDKTEEERAKREELERILEENNRKIAEAQAKLAEEQLRIVEEQRKIHEERMKLEQERQRQQKEEQKIILGKGKSRPKLSFSLKTQD

SEQ ID NO: 835099 - protein, 255 aa, Homo sapiens
MGRSRSRSSSRSKHTKSSKHNKKRSRSRSRSRDKERVRKRSKSRESKRNRRRESRSRSRSTNTAVSRRERDRERASSPPDRIDIFGRTVSKRSSLDEKQKREEEEKKAEFERQRKIRQQEIEEKLIEEETARRVEELVAKRVEEELEKRKDEIEREVLRRVEEAKRIMEKQLLEELERQRQAELAAQKARERKLARMAAEEHTLQDTGQDKEERAKREEVKDKEWVMSQANVSRAKAVRALKNNSNDMVNAIRVR

SEQ ID NO: 835100 - protein, 273 aa, Homo sapiens
MGRSRSRSSSRSKHTKSSKHNKKRSRSRSRSRDKERVRKRSKSRESKRNRRRESRSRSRSTNTAVSRRERDRERASSPPDRIDIFGRTVSKRSSLDEKQKREEEEKKAEFERQRKIRQQEIEEKLIEEETARRVEELVAKRVEEELEKRKDEIEREVLRRVEEAKRIMEKQLLEELERQRQAELAAQKAREEEERAKREELERILEENNRKIAEAQAKLAEEQLRIVEEQRKIHEERMKLEQERQRQQKEEQKIILGKGKSRPKLSFSLKTQD

SEQ ID NO: 835101 - protein, 273 aa, Homo sapiens; identical to SEQ ID NO: 835092

SEQ ID NO: 835102 - protein, 338 aa, Homo sapiens
GHCGKGGRCSRSCHLRGAWRYGFLVGGGLRGSCRRRDASPRPKAEARGTGRVRGLRRAVRASPGRMGRSRSRSSSRSKHTKSSKHNKKRSRSRSRSRDKERVRKRSKSRESKRNRRRESRSRSRSTNTAVSRRERDRERASSPPDRIDIFGRTVSKRSSLDEKQKREEEEKKAEFERQRKIRQQEIEEKLIEEETARRVEELVAKRVEEELEKRKDEIEREVLRRVEEAKRIMEKQLLEELERQRQAELAAQKAREVTLGRLESRDSPWQNFQCWVLPPAQFRKRWNTDYLIPFSSKLNIAAKVNFLAYSEVLTDNLKVGSFYKTYSRILFDLMELAI

SEQ ID NO: 835103 - protein, 273 aa, Homo sapiens; identical to SEQ ID NO: 835092

SEQ ID NO: 835104 - protein, 273 aa, Homo sapiens; identical to SEQ ID NO: 835092

SEQ ID NO: 835105 - protein, 273 aa, Homo sapiens; identical to SEQ ID NO: 835092

SEQ ID NO: 835106 - protein, 555 aa, Homo sapiens
MPTTVDDVLEHGGEFHFFQKQMFFLLALLSATFAPIYVGIVFLGFTPDHRCRSPGVAELSLRCGWSPAEELNYTVPGPGPAGEASPRQCRRYEVDWNQSTFDCVDPLASLDTNRSRLPLGPCRDGWVYETPGSSIVTEFNLVCANSWMLDLFQSSVNVGFFIGSMSIGYIADRFGRKLCLLTTVLINAAAGVLMAISPTYTWMLIFRLIQGLVSKAGWLIGYILITEFVGRRYRRTVGIFYQVAYTVGLLVLAGVAYALPHWRWLQFTVALPNFFFLLYYWCIPESPRWLISQNKNAEAMRIIKHIAKKNGKSLPASLQRLRLEEETGKKLNPSFLDLVRTPQIRKHTMILMYNWFTSSVLYQGLIMHMGLAGDNIYLDFFYSALVEFPAAFMIILTIDRIGRRYPWAASNMVAGAACLASVFIPGDLQWLKIIISCLGRMGITMAYEIVCLVNAELYPTFIRNLGVHICSSMCDIGGIITPFLVYRLTNIWLELPLMVFGVLGLVAGGLVLLLPETKGKALPETIEEAENMQRPRKNKEKMIYLQVQKLDIPLN

SEQ ID NO: 835107 - protein, 574 aa, Homo sapiens
MPTTVDDVLEHGGEFHFFQKQMFLSIFVTLASSCYAFAASIFTGGRSVLSLEHSIPETQPACTGITRGDVQILRSATVCESHVDVTGTYRELGPSTRVDRCTHSLIQCRRYEVDWNQSTFDCVDPLASLDTNRSRLPLGPCRDGWVYETPGSSIVTEFNLVCANSWMLDLFQSSVNVGFFIGSMSIGYIADRFGRKLCLLTTVLINAAAGVLMAISPTYTWMLIFRLIQGLVSKAGWLIGYILITEFVGRRYRRTVGIFYQVAYTVGLLVLAGVAYALPHWRWLQFTVALPNFFFLLYYWCIPESPRWLISQNKNAEAMRIIKHIAKKNGKSLPASLQRLRLEEETGKKLNPSFLDLVRTPQIRKHTMILMYNWFTSSVLYQGLIMHMGLAGDNIYLDFFYSALVEFPAAFMIILTIDRIGRRYPWAASNMVAGAACLASVFIPGDLQWLKIIISCLGRMGITMAYEIVCLVNAELYPTFIRNLGVHICSSMCDIGGIITPFLVYRLTNIWLELPLMVFGVLGLVAGGLVLLLPETKGKALPETIEEAENMQRPRKNKEKMIYLQVQKLDIPLN

SEQ ID NO: 835108 - protein, 555 aa, Homo sapiens
MPTTVDDVLEHGGEFHFFQKQMFFLLALLSATFAPIYVGIVFLGFTPDHRCRSPGVAELSLRCGWSPAEELNYTVPGPGPAGEASPRQCRRYEVDWNQSTFDCVDPLASLDTNRSRLPLGPCRDGWVYETPGSSIVTEFNLVCANSWMLDLFQSSVNVGFFIGSMSIGYIADRFGRKLCLLTTVLINAAAGVLMAISPTYTWMLIFRLIQGLVSKAGWLIGYILITEFVGRRYRRTVGIFYQVAYTVGLLVLAGVAYALPHWRWLQFTVALPNFFFLLYYWCIPESPRWLISQNKNAEAMRIIKHIAKKNGKSLPASLQRLRLEEETGKKLNPSFLDLVRTPQIRKHTMILMYNWFTSSVLYQGLIMHMGLAGDNIYLDFFYSALVEFPAAFMIILTIDRIGRRYPWAASNMVAGAACLASVFIPGDLQWLKIIISCLGRMGITMAYEIVCLVNAELYPTFIRNLGVHICSSMCDIGGIITPFLVYRLTNIWLELPLMVFGVLGLVAGGLVLLLPETKGKALPETIEEAENMQRLLIHSPVFSIHQMLMFLPLQT

SEQ ID NO: 835109 - protein, 143 aa, Homo sapiens
MPTTVDDVLEHGGEFHFFQKQMFFLLALLSATFAPIYVGIVFLGFTPDHRCRSPGVAELSLRCGWSPAEELNYTVPGPGPAGEASPRQCRRYEVDWNQSTFDCVDPLASLDTNRSRLPLGPCRDGWVYETPGSSIVTEMPTHT

SEQ ID NO: 835110 - protein, 555 aa, Homo sapiens; identical to SEQ ID NO: 835106

SEQ ID NO: 835111 - protein, 555 aa, Homo sapiens; identical to SEQ ID NO: 835106

SEQ ID NO: 835112 - protein, 206 aa, Homo sapiens
MRRTGAPAQADSRGRGRARGGCPGGEATLSQPPPRGGTRGQEPQMKETIMNQEKLAKLQAQVRIGGKGTARRKKKVVHRTATADDKKLQFSLKKLGVNNISGIEEVNMFTNQGTVIHFNNPKVQASLAANTFTITGHAETKQLTEMLPSILNQLGADSLTSLRRLAEALPKQSVDGKAPLATGEDDDDEVPDLVENFDEASKNEAN

SEQ ID NO: 835113 - protein, 206 aa, Homo sapiens; identical to SEQ ID NO: 835112

SEQ ID NO: 835114 - protein, 121 aa, Homo sapiens
ISPVVRPAQALNVKSIMPRSGSPMQILERMEIDDQGMHHTDKTSARGKPNVSRWMVPEVAVLDGSVTGMRIKQEQATSETAAVSTFTRPLQGSYGVNTDLCVLEEVNMFTNQGTVIHFKQP

SEQ ID NO: 835115 - protein, 47 aa, Homo sapiens
MLPSILNQLGADSLTLLLCGECGLVSALEQAFSMDLNRPLSKCFIGI

SEQ ID NO: 835116 - protein, 461 aa, Homo sapiens
EAAYKRAPRARLAAKDIWAVCATRVGGAVGGTAKKPRSPEPRVTLLSQSKSGFWFGAERPGGLAFPRKAPPCPWPREQTKSTAGPITLGALRPAMVMEVGTLDAGGLRALLGERAAQCLLLDCRSFFAFNAGHIAGSVNVRFSTIVRRRAKGAMGLEHIVPNAELRGRLLAGAYHAVVLLDERSAALDGAKRDGTLALAAGALCREARAAQVFFLKGGYEAFSASCPELCSKQSTPMGLSLPLSTSVPDSAESGCSSCSTPLYDQGGPVEILPFLYLGSAYHASRKDMLDALGITALINVSANCPNHFEGHYQYKSIPVEDNHKADISSWFNEAIDFIDSIKNAGGRVFVHCQAGISRSATICLAYLMRTNRVKLDEAFEFVKQRRSIISPNFSFMGQLLQFESQVLAPHCSAEAGSPAMAVLDRGTSTTTVFNFPVSIPVHSTNSALSYLQSPITTSPSC

SEQ ID NO: 835117 - protein, 284 aa, Homo sapiens
EAAYKRAPRARLAAKDIWAVCATRVGGAVGGTAKKPRSPEPRVTLLSQSKSGFWFGAERPGGLAFPRKAPPCPWPREQTKSTAGPITLGALRPAMVMEVGTLDAGGLRALLGERAAQCLLLDCRSFFAFNAGHIAGSVNVRFSTIVRRRAKGAMGLEHIVPNAELRGRLLAGAYHAVVLLDERSAALDGAKRDGTLALAAGALCREARAAQVFFLKGGYEAFSASCPELCSKQSTPMGLSLPLSTSVPDSAESGCSSCSTPLYDQVSRCPCHREEVRTGKGMEE

SEQ ID NO: 835118 - protein, 461 aa, Homo sapiens; identical to SEQ ID NO: 835116

SEQ ID NO: 835119 - protein, 284 aa, Homo sapiens; identical to SEQ ID NO: 835117

SEQ ID NO: 835120 - protein, 433 aa, Homo sapiens
EAAYKRAPRARLAAKDIWAVCATRVGGAVGGTAKKPRSPEPRVTLLSQSKSGFWFGAERPGGLAFPRKAPPCPWPREQTKSTAGPITLGALRPAMVMEVGTLDAGGLRALLGERAAQCLLLDCRSFFAFNAGHIAGSVNVRFSTIVRRRAKGAMGLEHIVPNAELRGRLLAGAYHAVVLLDERSAALDGAKRDGTLALAAGALCREARAAQVFFLKGGYEAFSASCPELCSKQSTPMGLSLPLSTSVPDSAESGCSSCSTPLYDQGGPVEILPFLYLGSAYHASRKDMLDALGITALINVSANCPNHFEGHYQYKSIPVEDNHKADISSWFNEAIDFIDSIKNAGGRVFVHCQAGISRSATICLAYLMRTNRVKLDEAFDPHCSAEAGSPAMAVLDRGTSTTTVFNFPVSIPVHSTNSALSYLQSPITTSPSC

SEQ ID NO: 835121 - protein, 487 aa, Homo sapiens
EAAYKRAPRARLAAKDIWAVCATRVGGAVGGTAKKPRSPEPRVTLLSQSKSGFWFGAERPGGLAFPRKAPPCPWPREQTKSTAGPITLGALRPAMVMEVGTLDAGGLRALLGERAAQCLLLDCRSFFAFNAGHIAGSVNVRFSTIVRRRAKGAMGLEHIVPNAELRGRLLAGAYHAVVLLDERSAALDGAKRDGTLALAAGALCREARAAQVFFLKGGYEAFSASCPELCSKQSTPMGLSLPLSTSVPDSAESGCSSCSTPLYDQGGPVEILPFLYLGSAYHASRKDMLDALGITALINVSANCPNHFEGHYQYKSIPVEDNHKADISSWFNEAIDFIDSIKNAGGRVFVHCQAGISRSATICLAYLMRTNRVKLDEAFEFVKQRRSIISPNFSFMGQLLQFESQVLAPHCSAEAGSPAMAVLDRGLRALLGERAAQCLLLDCRSFFAFNAGHIAGSVNVRFSTIVRRRAKGAMGLEHIVPNAELRG

SEQ ID NO: 835122 - protein, 108 aa, Homo sapiens
NQEVETGALLKTKVWKMDRVKLDEAFEFVKQRRSIISPNFSFMGQLLQFESQVLAPHCSAEAGSPAMAVLDRGTSTTTVFNFPVSIPVHSTNSALSYLQSPITTSPSC

SEQ ID NO: 835123 - protein, 461 aa, Homo sapiens; identical to SEQ ID NO: 835116

SEQ ID NO: 835124 - protein, 461 aa, Homo sapiens; identical to SEQ ID NO: 835116

SEQ ID NO: 835125 - protein, 461 aa, Homo sapiens; identical to SEQ ID NO: 835116

SEQ ID NO: 835126 - protein, 554 aa, Homo sapiens
EAAYKRAPRARLAAKDIWAVCATRVGGAVGGTAKKPRSPEPRVTLLSQSKSGFWFGAERPGGLAFPRKAPPCPWPREQTKSTAGPITLGALRPAMVMEVGTLDAGGLRALLGERAAQCLLLDCRSFFAFNAGHIAGSVNVRFSTIVRRRAKGAMGLEHIVPNAELRGRLLAGAYHAVVLLDERSAALDGAKRDGTLALAAGALCREARAAQVFFLKGTPSGKLGAGRTPLRFCPVPLALGSRGIAPPAARGRWSTFISGTCHWLCLALETKTCLGLSDVNFQPLVGGGVVRRCRVPVSLMGKKNVFVFPGGYEAFSASCPELCSKQSTPMGLSLPLSTSVPDSAESGCSSCSTPLYDQGGPVEILPFLYLGSAYHASRKDMLDALGITALINVSANCPNHFEGHYQYKSIPVEDNHKADISSWFNEAIDFIDSIKNAGGRVFVHCQAGISRSATICLAYLMRTNRVKLDEAFEFVKQRRSIISPNFSFMGQLLQFESQVLAPHCSAEAGSPAMAVLDRGTSTTTVFNFPVSIPVHSTNSALSYLQSPITTSPSC

SEQ ID NO: 835127 - protein, 388 aa, Homo sapiens
EAAYKRAPRARLAAKDIWAVCATRVGGAVGGTAKKPRSPEPRVTLLSQSKSGFWFGAERPGGLAFPRKAPPCPWPREQTKSTAGPITLGALRPAMVMEVGTLDAGGLRALLGERAAQCLLLDCRSFFAFNAGHIAGSVNVRFSTIVRRRAKGAMGLEHIVPNAELRGRLLAGAYHAVVLLDERSAALDGAKRDGTLALAAGALCREARAAQVFFLKGGYEAFSASCPELCSKQSTPMGLSLPLSTSVPDSAESGCSSCSTPLYDQGGPVEILPFLYLGSAYHASRKDMLDALGITALINVSANCPNHFEGHYQYKSIPVEDNHKADISSWFNEAIDFIGKWNGCLGLFCLSLLILATKPNLCGKSLKFSEPSSTHSVSVWCGQHSCKI

SEQ ID NO: 835128 - protein, 397 aa, Homo sapiens
EAAYKRAPRARLAAKDIWAVCATRVGGAVGGTAKKPRSPEPRVTLLSQSKSGFWFGAERPGGLAFPRKAPPCPWPREQTKSTAGPITLGALRPAMVMEVGTLDAGGLRALLGERAAQCLLLDCRSFFAFNAGHIAGSVNVRFSTIVRRRAKGAMGLEHIVPNAELRGRLLAGAYHAVVLLDERSAALDGAKRDGTLALAAGALCREARAAQVFFLKGGYEAFSASCPELCSKQINVSANCPNHFEGHYQYKSIPVEDNHKADISSWFNEAIDFIDSIKNAGGRVFVHCQAGISRSATICLAYLMRTNRVKLDEAFEFVKQRRSIISPNFSFMGQLLQFESQVLAPHCSAEAGSPAMAVLDRGTSTTTVFNFPVSIPVHSTNSALSYLQSPITTSPSC

SEQ ID NO: 835129 - protein, 443 aa, Homo sapiens
EAAYKRAPRARLAAKDIWAVCATRVGGAVGGTAKKPRSPEPRVTLLSQSKSGFWFGAERPGGLAFPRITLGALRPAMVMEVGTLDAGGLRALLGERAAQCLLLDCRSFFAFNAGHIAGSVNVRFSTIVRRRAKGAMGLEHIVPNAELRGRLLAGAYHAVVLLDERSAALDGAKRDGTLALAAGALCREARAAQVFFLKGGYEAFSASCPELCSKQSTPMGLSLPLSTSVPDSAESGCSSCSTPLYDQGGPVEILPFLYLGSAYHASRKDMLDALGITALINVSANCPNHFEGHYQYKSIPVEDNHKADISSWFNEAIDFIDSIKNAGGRVFVHCQAGISRSATICLAYLMRTNRVKLDEAFEFVKQRRSIISPNFSFMGQLLQFESQVLAPHCSAEAGSPAMAVLDRGTSTTTVFNFPVSIPVHSTNSALSYLQSPITTSPSC

SEQ ID NO: 835130 - protein, 204 aa, Homo sapiens
MLDISGFQGGPVEILPFLYLGSAYHASRKDMLDALGITALINVSANCPNHFEGHYQYKSIPVEDNHKADISSWFNEAIDFIDSIKNAGGRVFVHCQAGISRSATICLAYLMRTNRVKLDEAFEFVKQRRSIISPNFSFMGQLLQFESQVLAPHCSAEAGSPAMAVLDRGTSTTTVFNFPVSIPVHSTNSALSYLQSPITTSPSC

SEQ ID NO: 835131 - protein, 295 aa, Homo sapiens
METPAWPRVPRPETAVARTLLLGWVFAQVAGASGTTNTVAAYNLTWKSTNFKTILEWEPKPVNQVYTVQISTKSGDWKSKCFYTTDTECDLTDEIVKDVKQTYLARVFSYPAGNVESTGSAGEPLYENSPEFTPYLETNLGQPTIQSFEQVGTKVNVTVEDERTLVRRNNTFLSLRDVFGKDLIYTLYYWKSSSSGKKTAKTNTNEFLIDVDKGENYCFSVQAVIPSRTVNRKSTDSPVECMGQEKGEFREIFYIIGAVVFVVIILVIILAISLHKCRKAGVGQSWKENSPLNVS

SEQ ID NO: 835132 - protein, 295 aa, Homo sapiens
MALGSSRSSYNKALPMNNFKENVKILAGVLGLQGTTNTVAAYNLTWKSTNFKTILEWEPKPVNQVYTVQISTKSGDWKSKCFYTTDTECDLTDEIVKDVKQTYLARVFSYPAGNVESTGSAGEPLYENSPEFTPYLETNLGQPTIQSFEQVGTKVNVTVEDERTLVRRNNTFLSLRDVFGKDLIYTLYYWKSSSSGKKTAKTNTNEFLIDVDKGENYCFSVQAVIPSRTVNRKSTDSPVECMGQEKGEFREIFYIIGAVVFVVIILVIILAISLHKCRKAGVGQSWKENSPLNVS

SEQ ID NO: 835133 - protein, 201 aa, Homo sapiens
METPAWPRVPRPETAVARTLLLGWVFAQVAGASGTTNTVAAYNLTWKSTNFKTILEWEPKPVNQVYTVQISTKSGDWKSKCFYTTDTECDLTDEIVKDVKQTYLARVFSYPAGNVESTGSAGEPLYENSPEFTPYLETNLGQPTIQSFEQVGTKVNVTVEDERTLVRRNNTFLSLRDVFGKDLIYTLYYWKSSSSGKVSIF

SEQ ID NO: 835134 - protein, 108 aa, Homo sapiens
METPAWPRVPRPETAVARTLLLGWVFAQVAGASGLGRGNPKGLDCCLDWSRYNVVHAPYFYEVFVDGVETGTCCVLAKQTFIRNNPDANTADGVTGHTSPWVSVEVSV

SEQ ID NO: 835135 - protein, 127 aa, Homo sapiens
PKTASSPHPLALPLAGPGRLQPNLPSPTGATEPARSRRQLVDMETPAWPRVPRPETAVARTLLLGWVFAQVAGASGEWHQPLEARGAPHAGGRRQSWLAAGSPWFPGAPMLSPAPTGLGCAHPARLE

SEQ ID NO: 835136 - protein, 295 aa, Homo sapiens; identical to SEQ ID NO: 835131

SEQ ID NO: 835137 - protein, 238 aa, Homo sapiens
METPAWPRVPRPETAVARTLLLGWVFAQVAGASGTTNTVAAYNLTWKSTNFKTILEWEPKPVNQVYTVQISTKSGDWKSKCFYTTDTECDLTDEIVKDVKQTYLARVFSYPAGNVESTGSAGEPLYENSPEFTPYLETNLGQPTIQSFEQVGTKVNVTVEDERTLVRRNNTFLSLRDVFGKDLIYTLYYWKSSSSGKKYSTSLELWYLWSSSLSSSWLYLYTSVERQEWGRAGRRTPH

SEQ ID NO: 835138 - protein, 295 aa, Homo sapiens; identical to SEQ ID NO: 835131

SEQ ID NO: 835139 - protein, 143 aa, Homo sapiens
METPAWPRVPRPETAVARTLLLGWVFAQVAGASGTTNTVAAYNLTWKSTNFKTILEWEPKPVNQVYTVQISTKSGDWKSKCFYTTDTECDLTDEIVKDVKQTYLARVFSYPAGNVESTGSAGEPLYENSPEFTPYLESKWLGL

SEQ ID NO: 835140 - protein, 1426 aa, Homo sapiens
MHSSNPKVRSSPSGNTQSSPKSKQEVMVRPPTVMSPSGNPQLDSKFSNQGKQGGSASQSQPSPCDSKSGGHTPKALPGPGGSMGLKNGAGNGAKGKGKRERSISADSFDQRDPGTPNDDSDIKECNSADHIKSQDSQHTPHSMTPSNATAPRSSTPSHGQTTATEPTPAQKTPAKVVYVFSTEMANKAAEAVLKGQVETIVSFHIQNISNNKTERSTAPLNTQISALRNDPKPLPQQPPAPANQDQNSSQNTRLQPTPPIPAPAPKPAAPPRPLDRESPGVENKLIPSVGSPASSTPLPPDGTGPNSTPNNRAVTPVSQGSNSSSADPKAPPPPPVSSGEPPTLGENPDGLSQEQLEHRERSLQTLRDIQRMLFPDEKEFTGAQSGGPQQNPGVLDGPQKKPEGPIQAMMAQSQSLGKGPGPRTDVGAPFGPQGHRDVPFSPDEMVPPSMNSQSGTIGPDHLDHMTPEQIAWLKLQQEFYEEKRRKQEQVVVQQCSLQDMMVHQHGPRGVVRGPPPPYQMTPSEGWAPGGTEPFSDGINMPHSLPPRGMAPHPNMPGSQMRLPGFAGMINSEMEGPNVPNPASRPGLSGVSWPDDVPKIPDGRNFPPGQGIFSGPGRGERFPNPQGLSEEMFQQQLAEKQLGLPPGMAMEGIRPSMEMNRMIPGSQRHMEPGNNPIFPRIPVEGPLSPSRGDFPKGIPPQMGPGRELEFGMVPSGMKGDVNLNVNMGSNSQMIPQKMREAGAGPEEMLKLRPGGSDMLPAQQKMVPLPFGEHPQQEYGMGPRPFLPMSQGPGSNSGLRNLREPIGPDQRTNSRLSHMPPLPLNPSSNPTSLNTAPPVQRGLGRKPLDISVAGSQVHSPGINPLKSPTMHQVQSPMLGSPSGNLKSPQTPSQLAGMLAGPAAAASIKSPPVLGSAAASPVHLKSPSLPAPSPGWTSSPKPPLQSPGIPPNHKAPLTMASPAMLGNVESGGPPPPTASQPASVNIPGSLPSSTPYTMPPEPTLSQNPLSIMMSRMSKFAMPSSTPLYHDAIKTVASSDDDSPPARSPNLPSMNNMPGMGINTQNPRISGPNPVVPMPTLSPMGMTQPLSHSNQMPSPNAVGPNIPPHGVPMGPGLMSHNPIMGHGSQEPPMVPQGRMGFPQGFPPVQSPPQQVPFPHNGPSGGQGSFPGGMGFPGEGPLGRPSNLPQSSADAALCKPGGPGGPDSFTVLGNSMPSVFTDPDLQEVIRPGATGIPEFDLSRIIPSEKPSQTLQYFPRGEVPGRKQPQGPGPGFSHMQGMMGEQAPRMGLALPGMGGPGPVGTPDIPLGTAPSMPGHNPMRPPAFLQQGMMGPHHRMMSPAQSTMPGQPTLMSNPAAAVGMIPGKDRGPAGLYTHPGPVGSPGMMMSMQGMMGPQQNIMIPPQMRPRGMAADVGMGGFSQGPGNPGNMMF

SEQ ID NO: 835141 - protein, 1426 aa, Homo sapiens; identical to SEQ ID NO: 835140

SEQ ID NO: 835142 - protein, 1352 aa, Homo sapiens
MHSSNPKVRSSPSGNTQSSPKSKQEVMVRPPTVMSPSGNPQLDSKFSNQECNSADHIKSQDSQHTPHSMTPSNATAPRSSTPSHGQTTATEPTPAQKTPAKVVYVFSTEMANKAAEAVLKGQVETIVSFHIQNISNNKTERSTAPLNTQISALRNDPKPLPQQPPAPANQDQNSSQNTRLQPTPPIPAPAPKPAAPPRPLDRESPGVENKLIPSVGSPASSTPLPPDGTGPNSTPNNRAVTPVSQGSNSSSADPKAPPPPPVSSGEPPTLGENPDGLSQEQLEHRERSLQTLRDIQRMLFPDEKEFTGAQSGGPQQNPGVLDGPQKKPEGPIQAMMAQSQSLGKGPGPRTDVGAPFGPQGHRDVPFSPDEMVPPSMNSQSGTIGPDHLDHMTPEQIAWLKLQQEFYEEKRRKQEQVVVQQCSLQDMMVHQHGPRGVVRGPPPPYQMTPSEGWAPGGTEPFSDGINMPHSLPPRGMAPHPNMPGSQMRLPGFAGMINSEMEGPNVPNPASRPGLSGVSWPDDVPKIPDGRNFPPGQGIFSGPGRGERFPNPQGLSEEMFQQQLAEKQLGLPPGMAMEGIRPSMEMNRMIPGSQRHMEPGNNPIFPRIPVEGPLSPSRGDFPKGIPPQMGPGRELEFGMVPSGMKGDVNLNVNMGSNSQMIPQKMREAGAGPEEMLKLRPGGSDMLPAQQKMVPLPFGEHPQQEYGMGPRPFLPMSQGPGSNSGLRNLREPIGPDQRTNSRLSHMPPLPLNPSSNPTSLNTAPPVQRGLGRKPLDISVAGSQVHSPGINPLKSPTMHQVQSPMLGSPSGNLKSPQTPSQLAGMLAGPAAAASIKSPPVLGSAAASPVHLKSPSLPAPSPGWTSSPKPPLQSPGIPPNHKAPLTMASPAMLGNVESGGPPPPTASQPASVNIPGSLPSSTPYTMPPEPTLSQNPLSIMMSRMSKFAMPSSTPLYHDAIKTVASSDDDSPPARSPNLPSMNNMPGMGINTQNPRISGPNPVVPMPTLSPMGMTQPLSHSNQMPSPNAVGPNIPPHGVPMGPGLMSHNPIMGHGSQEPPMVPQGRMGFPQGFPPVQSPPQQVPFPHNGPSGGQGSFPGGMGFPGEGPLGRPSNLPQSSADAALCKPGGPGGPDSFTVLGNSMPSVFTDPDLQEVIRPGATGIPEFDLSRIIPSEKPSQTLQYFPRGEVPGRKQPQGPGPGFSHMQGMMGEQAPRMGLALPGMGGPGPVGTPDIPLGTAPSMPGHNPMRPPAFLQQGMMGPHHRMMSPAQSTMPGQPTLMSNPAAAVGMIPGKDRGPAGLYTHPGPVGSPGMMMSMQGMMGPQQNIMIPPQMRPRGMAADVGMGGFSQGPGNPGNMMF

SEQ ID NO: 835143 - protein, 1426 aa, Homo sapiens; identical to SEQ ID NO: 835140

SEQ ID NO: 835144 - protein, 1064 aa, Homo sapiens
MHSSNPKVRSSPSGNTQSSPKSKQEVMVRPPTVMSPSGNPQLDSKFSNQGKQGGSASQSQPSPCDSKSGGHTPKALPGPGGSMGLKNGAGNGAKGKGKRERSISADSFDQRDPGTPNDDSDIKECNSADHIKSQDSQHTPHSMTPSNATAPRSSTPSHGQTTATEPTPAQKTPAKVVYVFSTEMANKAAEAVLKGQVETIVSFHIQNISNNKTERSTAPLNTQISALRNDPKPLPQQPPAPANQDQNSSQNTRLQPTPPIPAPAPKPAAPPRPLDRESPGVENKLIPSVGSPASSTPLPPDGTGPNSTPNNRAVTPVSQGSNSSSADPKAPPPPPVSSGEPPTLGENPDGLSQEQLEHRERSLQTLRDIQRMLFPDEKEFTGAQSGGPQQNPGVLDGPQKKPEGPIQAMMAQSQSLGKGPGPRTDVGAPFGPQGHRDVPFSPDEMVPPSMNSQSGTIGPDHLDHMTPEQIAWLKLQQEFYEEKRRKQEQVVVQQCSLQDMMVHQHGPRGVVRGPPPPYQMTPSEGWAPGGTEPFSDGINMPHSLPPRGMAPHPNMPGSQMRLPGFAGMINSEMEGPNVPNPASRPGLSGVSWPDDVPKIPDGRNFPPGQGIFSGPGRGERFPNPQGLSEEMFQQQLAEKQLGLPPGMAMEGIRPSMEMNRMIPGSQRHMEPGNNPIFPRIPVEGPLSPSRGDFPKGIPPQMGPGRELEFGMVPSGMKGDVNLNVNMGSNSQMIPQKMREAGAGPEEMLKLRPGGSDMLPAQQKMVPLPFGEHPQQEYGMGPRPFLPMSQGPGSNSGLRNLREPIGPDQRTNSRLSHMPPLPLNPSSNPTSLNTAPPVQRGLGRKPLDISVAGSQVHSPGINPLKSPTMHQVQSPMLGSPSGNLKSPQTPSQLAGMLAGPAAAASIKSPPVLGSAAASPVHLKSPSLPAPSPGWTSSPKPPLQSPGIPPNHKAPLTMASPAMLGNVESGGPPPPTASQPASVNIPGSLPSSTPYTMPPEPTLSQNPLSIMMSRMSKFAMPSSTPLYHDAIKTVASSDDDSPPARSPNLPSMNNMPGKKSERQVVE

SEQ ID NO: 835145 - protein, 1453 aa, Homo sapiens
AEVNHGVVILVLRVSLTPNRNCLSLICADQLYLVSDLPLLFVSFSSPKSKQEVMVRPPTVMSPSGNPQLDSKFSNQGKQGGSASQSQPSPCDSKSGGHTPKALPGPGGSMGLKNGAGNGAKGKGKRERSISADSFDQRDPGTPNDDSDIKECNSADHIKSQDSQHTPHSMTPSNATAPRSSTPSHGQTTATEPTPAQKTPAKVVYVFSTEMANKAAEAVLKGQVETIVSFHIQNISNNKTERSTAPLNTQISALRNDPKPLPQQPPAPANQDQNSSQNTRLQPTPPIPAPAPKPAAPPRPLDRESPGVENKLIPSVGSPASSTPLPPDGTGPNSTPNNRAVTPVSQGSNSSSADPKAPPPPPVSSGEPPTLGENPDGLSQEQLEHRERSLQTLRDIQRMLFPDEKEFTGAQSGGPQQNPGVLDGPQKKPEGPIQAMMAQSQSLGKGPGPRTDVGAPFGPQGHRDVPFSPDEMVPPSMNSQSGTIGPDHLDHMTPEQIAWLKLQQEFYEEKRRKQEQVVVQQCSLQDMMVHQHGPRGVVRGPPPPYQMTPSEGWAPGGTEPFSDGINMPHSLPPRGMAPHPNMPGSQMRLPGFAGMINSEMEGPNVPNPASRPGLSGVSWPDDVPKIPDGRNFPPGQGIFSGPGRGERFPNPQGLSEEMFQQQLAEKQLGLPPGMAMEGIRPSMEMNRMIPGSQRHMEPGNNPIFPRIPVEGPLSPSRGDFPKGIPPQMGPGRELEFGMVPSGMKGDVNLNVNMGSNSQMIPQKMREAGAGPEEMLKLRPGGSDMLPAQQKMVPLPFGEHPQQEYGMGPRPFLPMSQGPGSNSGLRNLREPIGPDQRTNSRLSHMPPLPLNPSSNPTSLNTAPPVQRGLGRKPLDISVAGSQVHSPGINPLKSPTMHQVQSPMLGSPSGNLKSPQTPSQLAGMLAGPAAAASIKSPPVLGSAAASPVHLKSPSLPAPSPGWTSSPKPPLQSPGIPPNHKAPLTMASPAMLGNVESGGPPPPTASQPASVNIPGSLPSSTPYTMPPEPTLSQNPLSIMMSRMSKFAMPSSTPLYHDAIKTVASSDDDSPPARSPNLPSMNNMPGMGINTQNPRISGPNPVVPMPTLSPMGMTQPLSHSNQMPSPNAVGPNIPPHGVPMGPGLMSHNPIMGHGSQEPPMVPQGRMGFPQGFPPVQSPPQQVPFPHNGPSGGQGSFPGGMGFPGEGPLGRPSNLPQSSADAALCKPGGPGGPDSFTVLGNSMPSVFTDPDLQEVIRPGATGIPEFDLSRIIPSEKPSQTLQYFPRGEVPGRKQPQGPGPGFSHMQGMMGEQAPRMGLALPGMGGPGPVGTPDIPLGTAPSMPGHNPMRPPAFLQQGMMGPHHRMMSPAQSTMPGQPTLMSNPAAAVGMIPGKDRGPAGLYTHPGPVGSPGMMMSMQGMMGPQQNIMIPPQMRPRGMAADVGMGGFSQGPGNPGNMMF

SEQ ID NO: 835146 - protein, 1426 aa, Homo sapiens; identical to SEQ ID NO: 835140

SEQ ID NO: 835147 - protein, 70 aa, Homo sapiens
SNPRSIMRSAGPPQGTLRSTPKFPELKFKYVEEEQPEEFFIPYVWSLVYNSAVGLYWNPQDIQLFTMDSD

SEQ ID NO: 835148 - protein, 669 aa, Homo sapiens
MGSNSSRIGDLPKNEYLKKLSGTESISENDPFWNQLLSFSFPAPTSSSELKLLEEATISVCRSLVENNPRTGNLGALIKVFLSRTKELKLSAECQNHIFIWQTHNALFIICCLLKVFICQMSEEELQLHFTYEEKSPGNYSSDSEDLLEELLCCLMQLITDIPLLDITYEISVEAISTMVVFLSCQLFHKEVLRQSISHKYLMRGPCLPYTSKLVKTLLYNFIRQEKPPPPGAHVFPQQSDGGGLLYGLASGVATGLWTVFTLGGVGSKAAASPELSSPLANQSLLLLLVLANLTDASDAPNPYRQAIMSFKNTQDSSPFPSSIPHAFQINFNSLYTALCEQQTSDQATLLLYTLLHQNSNIRTYMLARTDMENLVLPILEILYHVEERNSHHVYMALIILLILTEDDGFNRSIHEVILKNITWYSERVLTEISLGSLLILVVIRTIQYNMTRTRDKYLHTNCLAALANMSAQFRSLHQYAAQRIISLFSLLSKKHNKVLEQATQSLRGSLSSNDVPLPDYAQDLNVIEEVIRMMLEIINSCLTNSLHHNPNLVYALLYKRDLFEQFRTHPSFQDIMQNIDLVISFFSSRLLQAGAELSVERVLEIIKQGVVALPKDRLKKFPELKFKYVEEEQPEEFFIPYVWSLVYNSAVGLYWNPQDIQLFTMDSD

SEQ ID NO: 835149 - protein, 669 aa, Homo sapiens; identical to SEQ ID NO: 835148

SEQ ID NO: 835150 - protein, 656 aa, Homo sapiens
MGSNSSRIGDLPKNEYLKKLSGTESISENDPFWNQLLSFSFPAPTSSSELKLLEEATISVCRSLVENNPRTGNLGALIKVFLSRTKELKLSAECQNHIFIWQTHNALFIICCLLKVFICQMSEEELQLHFTYEEKSPGNYSSDSEDLLEELLCCLMQLITDIPLLDITYEISVEAISTMVVFLSCQLFHKEVLRQSISHKYLMRGPCLPYTSKLVKTLLYNFIRQEKPPPPGAHVFPQQSDGGGLLYGLASGVATGLWTVFTLGGVGSKAAASPELSSPLANQSLLLLLVLANLTDASDAPNPYRQAIMSFKNTQDSSPFPSSIPHAFQINFNSLYTALCEQQTSDQATLLLYTLLHQNSNIRTYMLARTDMENLVLPILEILYHVEERNSHHVYMALIILLILTEDDGFNRSIHEVILKNITWYSERVLTEISLGSLLILVVIRTIQYNMTRTRDKYLHTNCLAALANMSAQFRSLHQYAAQRIISLFSLLSKKHNKVLEQATQSLRGSLSSNDVPLPDYAQDLNVIEEVIRMMLEIINSCLTNSLHHNPNLVYALLYKRDLFEQFRTHPSFQDIMQNIDLVISFFSSRLLQAGAELSVERVLEIIKQGVVALPKDRLKPLADRQVDRVLACQAFVYAASGFSQFHGLSVRNFQN

SEQ ID NO: 835151 - protein, 549 aa, Homo sapiens
MSEEELQLHFTYEEKSPGNYSSDSEDLLEELLCCLMQLITDIPLLDITYEISVEAISTMVVFLSCQLFHKEVLRQSISHKYLMRGPCLPYTSKLVKTLLYNFIRQEKPPPPGAHVFPQQSDGGGLLYGLASGVATGLWTVFTLGGVGSKAAASPELSSPLANQSLLLLLVLANLTDASDAPNPYRQAIMSFKNTQDSSPFPSSIPHAFQINFNSLYTALCEQQTSDQATLLLYTLLHQNSNIRTYMLARTDMENLVLPILEILYHVEERNSHHVYMALIILLILTEDDGFNRSIHEVILKNITWYSERVLTEISLGSLLILVVIRTIQYNMTRTRDKYLHTNCLAALANMSAQFRSLHQYAAQRIISLFSLLSKKHNKVLEQATQSLRGSLSSNDVPLPDYAQDLNVIEEVIRMMLEIINSCLTNSLHHNPNLVYALLYKRDLFEQFRTHPSFQDIMQNIDLVISFFSSRLLQAGAELSVERVLEIIKQGVVALPKDRLKKFPELKFKYVEEEQPEEFFIPYVWSLVYNSAVGLYWNPQDIQLFTMDSD

SEQ ID NO: 835152 - protein, 669 aa, Homo sapiens; identical to SEQ ID NO: 835148

SEQ ID NO: 835153 - protein, 608 aa, Homo sapiens
MGSNSSRIGDLPKNEYLKKLSGTESISENDPFWNQLLSFSFPAPTSSSELKLLEEATISVCRSLVENNPRTGNLGALIKVFLSRTKELKLSAECQNHIFIWQTHNALFIICCLLKVFICQMSEEELQLHFTYEEKSPGNYSSDSEDLLEELLCCLMQLITDIPLLDITYEISVEAISTMVVFLSCQLFHKEVLRQSISHKYLMRGPCLPYTSKLVKTLLYNFIRQEKPPPPGAHVFPQQSDGGGLLYGLASGVATGLWTVFTLGGVGSKAAASPELSSPLANQSLLLLLVLANLTDASDAPNPYRQAIMSFKNTQDSSPFPSSIPHAFQINFNSLYTALCEQQTSDQATLLLYTLLHQNSNIRTYMLARTDMENLVLPILEILYHVEERNSHHVYMALIILLILTEDDGFNRSIHEVILKNITWYSERVLTEISLGSLLILVVIRTIQYNMTRTRDKYLHTNCLAALANMSAQFRSLHQYAAQRIISLFSLLSKKHNKVLEQATQSLRGSLSSNDVPLPDYVISFFSSRLLQAGAELSVERVLEIIKQGVVALPKDRLKKFPELKFKYVEEEQPEEFFIPYVWSLVYNSAVGLYWNPQDIQLFTMDSD

SEQ ID NO: 835154 - protein, 67 aa, Homo sapiens
NDYYTRLQRNFDRHGNIDKFPELKFKYVEEEQPEEFFIPYVWSLVYNSAVGLYWNPQDIQLFTMDSD

SEQ ID NO: 835155 - protein, 67 aa, Homo sapiens
  misc_feature (16)..(16): Xaa can be any naturally occurring amino acid
RVSVLVLFLFSDGTLXEPKFPELKFKYVEEEQPEEFFIPYVWSLVYNSAVGLYWNPQDIQLFTMDSD

SEQ ID NO: 835156 - protein, 669 aa, Homo sapiens; identical to SEQ ID NO: 835148

SEQ ID NO: 835157 - protein, 602 aa, Homo sapiens
MGSNSSRIGDLPKNEYLKKLSGTESISENDPFWNQLLSFSFPAPTSSSELKLLEEATISVCRSLVENNPRTGNLGALIKVFLSRTKELKLSAECQNHIFIWQTHNALFIICCLLKVFICQMSEEELQLHFTYEEKSPGNYSSDSEDLLEELLCCLMQLITDIPLLDITYEISVEAISTMVVFLSCQLFHKEVLRQSISHKYLMRGPCLPYTSKLVKTLLYNFIRQEKPPPPGAHVFPQQSDGGGLLYGLASGVATGLWTVFTLGGVGSKAAASPELSSPLANQSLLLLLVLANLTDASDAPNPYRQAIMSFKNTQDSSPFPSSIPHAFQINFNSLYTALCEQQTSDQATLLLYTLLHQNSNIRTYMLARTDMENLVLPILEILYHVEERNSHHVYMALIILLILTEDDGFNRSIHEVILKNITWYSERVLTEISLGSLLILVVIRTIQYNMTRTRDKYLHTNCLAALANMSAQFRSLHQYAAQRIISLFSLLSKKHNKVLEQATQSLRGSLSSNDVPLPDYAQDLNVIEEVIRMMLEIINSCLTNSLHHNPNLVYALLYKRDLFEQFRTHPSFQDIMQNIDLVSVNEDIYYDSFLSIKAENV

SEQ ID NO: 835158 - protein, 669 aa, Homo sapiens; identical to SEQ ID NO: 835148

SEQ ID NO: 835159 - protein, 669 aa, Homo sapiens; identical to SEQ ID NO: 835148

SEQ ID NO: 835160 - protein, 73 aa, Homo sapiens
FLLYFYIITGPTENVAVHVQEYSSKFPELKFKYVEEEQPEEFFIPYVWSLVYNSAVGLYWNPQDIQLFTMDSD

SEQ ID NO: 835161 - protein, 1005 aa, Homo sapiens
GSSALSPPRVRGESWNLCTGLGKRLSSSAKMSGIGNKRAAGEPGTSMPPEKKAAVEDSGTTVETIKLGGVSSTEELDIRTLQTKNRKLAEMLDQRQAIEDELREHIEKLERRQATDDASLLIVNRYWSQFDENIRIILKRYDLEQGLGDLLTERKALVVPEPEPDSDSNQERKDDRERGEGQEPAFSFLATLASSSSEEMESQLQERVESSRRAVSQIVTVYDKLQEKVELLSRKLNSGDNLIVEEAVQELNSFLAQENMRLQELTDLLQEKHRTMSQEFSKLQSKVETAESRVSVLESMIDDLQWDIDKIRKREQRLNRHLAEVLERVNSKGYKVYGAGSSLYGGTITINARKFEEMNAELEENKELAQNRLCELEKLRQDFEEVTTQNEKLKVELRSAVEQVVKETPEYRCMQSQFSVLYNESLQLKAHLDEARTLLHGTRGTHQHQVELIERDEVSLHKKLRTEVIQLEDTLAQVRKEYEMLRIEFEQTLAANEQAGPINREMRHLISSLQNHNHQLKGEVLRYKRKLREAQSDLNKTRLRSGSALLQSQSSTEDPKDEPAELKPDSEDLSSQSSASKASQEDANEIKSKRDEEERERERREKEREREREREKEKEREREKQKLKESEKERDSAKDKEKGKHDDGRKKEAEIIKQLKIELKKAQESQKEMKLLLDMYRSAPKEQRDKVQLMAAEKKSKAELEDLRQRLKDLEDKEKKENKKMADEDALRKIRAVEEQIEYLQKKLAMAKQEEEALLSEMDVTGQAFEDMQEQNIRLMQQLREKDDANFKLMSERIKSNQIHKLLKEEKEELADQVLTLKTQVDAQLQVVRKLEEKEHLLQSNIGTGEKELGLRTQALEMNKRKAMEAAQLADDLKAQLELAQKKLHDFQDEIVENSVTKEKDMFNFKRAQEDISRLRRKLETTKKPDNVPKCDEILMEEIKDYKARLTCPCCNMRKKDAVLTKCFHVFCFECVKTRYDTRQRKCPKCNAAFGANDFHRIYIG

SEQ ID NO: 835162 - protein, 447 aa, Homo sapiens
SISESQQNTSAITISTSGHPTNSSNNTFANEIKSKRDEEERERERREKEREREREREKEKEREREKQKLKESEKERDSAKDKEKGKHDDGRKKEAEIIKQLKIELKKAQESQKEMKLLLDMYRSAPKEQRDKVQLMAAEKKSKAELEDLRQRLKDLEDKEKKENKKMADEDALRKIRAVEEQIEYLQKKLAMAKQEEEALLSEMDVTGQAFEDMQEQNIRLMQQLREKDDANFKLMSERIKSNQIHKLLKEEKEELADQVLTLKTQVDAQLQVVRKLEEKEHLLQSNIGTGEKELGLRTQALEMNKRKAMEAAQLADDLKAQLELAQKKLHDFQDEIVENSVTKEKDMFNFKRAQEDISRLRRKLETTKKPDNVPKCDEILMEEIKDYKARLTCPCCNMRKKDAVLTKCFHVFCFECVKTRYDTRQRKCPKCNAAFGANDFHRIYIG

SEQ ID NO: 835163 - protein, 868 aa, Homo sapiens
GSSALSPPRVRGESWNLCTGLGKRLSSSAKMSGIGNKRAAGEPGTSMPPEKKAAVEDSGTTVETIKLGGVSSTEELDIRTLQTKNRKLAEMLDQRQAIEDELREHIEKLERRQATDDASLLIVNRYWSQFDENIRIILKRYDLEQGLGDLLTERKALVVPEPEPDSDSNQERKDDRERGEGQEPAFSFLATLASSSSEEMESQLQERVESSRRAVSQIVTVYDKLQEKVELLSRKLNSGDNLIVEEAVQELNSFLAQENMRLQELTDLLQEKHRTMSQEFSKLQSKVETAESRVSVLESMIDDLQWDIDKIRKREQRLNRHLAEVLERVNSKGYKVYGAGSSLYGGTITINARKFEEMNAELEENKELAQNRLCELEKLRQDFEEVTTQNEKLKVELRSAVEQVVKETPEYRCMQSQFSVLYNESLQLKAHLDEARTLLHGTRGTHQHQVELIERDEVSLHKKLRTEVIQLEDTLAQVRKEYEMLRIEFEQTLAANEQAGPINREMRHLISSLQNHNHQLKGEVLRYKRKLREAQSDLNKTRLRSGSALLQSQSSTEDPKDEPAELKPDSEDLSSQSSASKASQEDANEIKSKRDEEERERERREKEREREREREKEKEREREKQKLKESEKERDSAKDKEKGKHDDGRKKEAEIIKQLKIELKKAQESQKEMKLLLDMYRSAPKEQRDKVQLMAAEKKSKAELEDLRQRLKDLEDKEKKENKKMADEDALRKIRAVEEQIEYLQKKLAMAKQEEEALLSEMDVTGQAFEDMQEQNIRLMQQLREKDDANFKLMSERIKSNQIHKLLKEEKEELAALGSGVIGARCISNGGVNRGSTWNQIFKVLPAGHAFDGGSDGLVAFVHVIRRH

SEQ ID NO: 835164 - protein, 915 aa, Homo sapiens [sequence omitted]

SEQ ID NO: 835165 - protein, 430 aa, Homo sapiens [sequence omitted]

SEQ ID NO: 835166 - protein, 289 aa, Homo sapiens
MSYITNHGSEEQIKHFIPQMTAGKCIGAIAMTEPGAGSDLQGIKTNAKKDGSDWILNGSKVFISNGSLSDVVIVVAVTNHEAPSPAHGISLFLVENGMKGFIKGRKLHKMGLKAQDTAELFFEDIRLPASALLGEENKGFYYIMKELPQERLLIADVAISASEFMFEETRNYVKQRKAFGKTVAHLQTVQHKLAELKTHICVTRAFVDNCLQLHEAKRLDSATACMAKYWASELQNSVAYDCVQLHGGWGYMWEYPIAKAYVDARVQPIYGGTNEIMKELIAREIVFDK

SEQ ID NO: 835167 - protein, 430 aa, Homo sapiens [sequence omitted]

SEQ ID NO: 835168 - protein, 124 aa, Homo sapiens
MAARLLRGSLRVLGGHRAPRQLPAARCSHSGGEERLETPSAKKLTDIGIRRIFSPEHDIFRKSVRKFFQEEVIPHHSEWEKAGEVSREVWEKAGKQGLLGVNIAEHLGGIGGDLYSAAIVWEEQ

SEQ ID NO: 835169 - protein, 408 aa, Homo sapiens
MAARLLRGSLRVLGGHRAPRQLPAARCSHSGGEERLETPSAKKLTDIGIRRIFSPEHDIFRKSVRKFFQEEVIPHHSEWEKAGEVSREVWEKAGKQGLLGVNIAEHLGGIGGDLYSAAIVWEEQAYSNCSGPGFSIHSGIVMSYITNHGSEEQIKHFIPQMTAGKCIGAIAMTEPGAGSDLQGIKTNAKKDGSDWILNGSKVFISNGSLSDVVIVVAVTNHEAPSPAHGISLFLVENGMKGFIKGRKLHKMGLKAQDTAELFFEDIRLPASALLGEENKGFYYIMKELPQERLLIADVAISASEFMFEETRNYVKQRKAFGKTVAHLQTVQHKLAELKTHICVTRAFVDNCLQLHEAKRLDSATACMAKYWASELQNSVAYDCVQLHGGWGYMWEYPIAKNPDEYGEE

SEQ ID NO: 835170 - protein, 96 aa, Homo sapiens
RFGRRWSPPGPGCRSAGCDLCPSSSCEPGVPHGLDSPRGSELGTRTQCPGCGADQNCPGQTGLEMTWRGFHQTRKLALDISTNLTKYRGLMKTESK

SEQ ID NO: 835171 - protein, 306 aa, Homo sapiens [sequence omitted]

SEQ ID NO: 835172 - protein, 190 aa, Homo sapiens
MLPFSCYSVKIAPGAVVCVESEIRGDVTIGPRTVIHPKARIIAEAGPIVIGEGNLIEEQALIINAYPDNITPDTEDPEPKPMIIGTNNVFEVGCYSQAMKMGDNNVIESKAYVGRNVILTSGCIIGACCNLNTFEVIPENTVIYGADCLRRVQTERPQPQTLQLDFLMKILPNYHHLKKTMKGSSTPVKN

SEQ ID NO: 835173 - protein, 306 aa, Homo sapiens [sequence omitted]

SEQ ID NO: 835174 - protein, 162 aa, Homo sapiens
MLPRLVSQSGTPGLKRSSCLGLSASQSAGLCPVNGCSKLGSTHLYAGLKSAGGPAPLPKVQSCAPRRDAHKSRKLPGPRPTPAPPLPQPCQALQSHVELSLYPGGGVDLRSNWGRTMAEKTQKSVKIAPGAVVCVESEIRGDVTIVTQIISLLTLKIQNQNL

SEQ ID NO: 835175 - protein, 287 aa, Homo sapiens
MLPRLVSQSGTPGLKRSSCLGLSASQSAGLCPVNGCSKLGSTHLYAGLKSAGGPAPLPKVQSCAPRRDAHKSRKLPGPRPTPAPPLPQPCQALQSHVELSLYPGGGVDLRSNWGRTMAEKTQKSVKIAPGAVVCVESEIRGDVTIGPRTVIHPKARIIAEAGPIVIGEGNLIEEQALIINAYPDNITPDTEDPEPKPMIIGTNNVFEVGCYSQAMKMGDNNVIESKAYVGRNVILTSGCIIGACCNLNTFLDENLAKLPPPKEDYERKLNSSKELRTVYNMKITFCL

SEQ ID NO: 835176 - protein, 243 aa, Homo sapiens
MLPRLVSQSGTPGLKRSSCLGLSASQSAGLCPVNGCSKLGSTHLYAGLKSAGGPAPLPKVQSCAPRRDAHKSRKLPGPRPTPAPPLPQPCQALQSHVELSLYPGGGVDLRSNWGRTMAEKTQKSVKIAPGAVVCVESEIRGDVTIGPRTVIHPKARIIAEAGPIVIGEGNLIEEQALIINAYPDNITPDTEDPEPKPMIIGTNNVFEVGCYSLAMPLRRNNVIESKASVGYPEGAFMKMLQAR

SEQ ID NO: 835177 - protein, 306 aa, Homo sapiens [sequence omitted]

SEQ ID NO: 835178 - protein, 306 aa, Homo sapiens [sequence omitted]

SEQ ID NO: 835179 - protein, 192 aa, Homo sapiens
GIPGMETQKSVKIAPGAVVCVESEIRGDVTIGPRTVIHPKARIIAEAGPIVIGEGNLIEEQALIINAYPDNITPDTEDPEPKPMIIGTNNVFEVGCYSQAMKMGDNNVIESKAYVGRNVILTSGCIIGACCNLNTFEVIPENTVIYGADCLRRVQTERPQPQTLQLDFLMKILPNYHHLKKTMKGSSTPVKN

SEQ ID NO: 835180 - protein, 192 aa, Homo sapiens; identical to SEQ ID NO: 835179

SEQ ID NO: 835181 - protein, 106 aa, Homo sapiens
MAGNVFEVGCYSQAMKMGDNNVIESKAYVGRNVILTSGCIIGACCNLNTFEVIPENTVIYGADCLRRVQTERPQPQTLQLDFLMKILPNYHHLKKTMKGSSTPVKN

SEQ ID NO: 835182 - protein, 164 aa, Homo sapiens [sequence omitted]

SEQ ID NO: 835183 - protein, 148 aa, Homo sapiens
MLPRLVSQSGTPGLKRSSCLGLSASQSAGLCPVNGCSKLGSTHLYAGLKSAGGPAPLPKVQSCAPRRDAHKSRKLPGPRPTPAPPLPQPCQALQSHVELSLYPGGGVDLRSNWGRTMAEKTQKSVKIAPGAVVCVESEIRGDVTIGKK

SEQ ID NO: 835184 - protein, 112 aa, Homo sapiens
MESDAGTFLPTGLQFTGSEKARAIMEEVMSLLQPLNITQVLSHGEGTDINFWIQAGVPGASLLDDLYKYFFFHHSHGDTMTVMDPKQMNVAAAVWAVVSYVVADMEEMLPRS

SEQ ID NO: 835185 - protein, 88 aa, Homo sapiens
DLSDIEGLQQAHNLLHDGHGEGTDINFWIQAGVPGASLLDDLYKYFFFHHSHGDTMTVMDPKQMNVAAAVWAVVSYVVADMEEMLPRS

SEQ ID NO: 835186 - protein, 103 aa, Homo sapiens
MKTPKVIVTKTKIDKWDLIKEFLHSKRNYQQSKIDNLQNGRKYFANYVSDKGVISRIYKELKQFNKLKTNNPIKKWAKDMNRHFSNEDRQAANKHMKKCSTSL

SEQ ID NO: 835187 - protein, 472 aa, Homo sapiens
MKFLIFAFFGGVHLLSLCSGKAICKNGISKRTFEEIKEEIASCGDVAKAIINLAVYGKAQNRSYERLALLVDTVGPRLSGSKNLEKAIQIMYQNLQQDGLEKVHLEPVRIPHWERGEESAVMLEPRIHKIAILGLGSSIGTPPEGITAEVLVVTSFDELQRRASEARGKIVVYNQPYINYSRTVQYRTQGAVEAAKVGALASLIRSVASFSIYSPHTGIQEYQDGVPKIPTACITVEDAEMMSRMASHGIKIVIQLKMGAKTYPDTDSFNTVAEITGSKYPEQVVLVSGHLDSWDVGQGAMDDGGGAFISWEALSLIKDLGLRPKRTLRLVLWTAEEQGGVGAFQYYQLHKVNISNYSLVMESDAGTFLPTGLQFTGSEKARAIMEEVMSLLQPLNITQVLSHGEGTDINFWIQAGVPGASLLDDLYKYFFFHHSHGDTMTVMDPKQMNVAAAVWAVVSYVVADMEEMLPRS

SEQ ID NO: 835188 - protein, 472 aa, Homo sapiens; identical to SEQ ID NO: 835187

SEQ ID NO: 835189 - protein, 472 aa, Homo sapiens; identical to SEQ ID NO: 835187

SEQ ID NO: 835190 - protein, 472 aa, Homo sapiens; identical to SEQ ID NO: 835187

SEQ ID NO: 835191 - protein, 129 aa, Homo sapiens [sequence omitted]

SEQ ID NO: 835192 - protein, 127 aa, Homo sapiens
MGSCRRVNISNYSLVMESDAGTFLPTGLQFTGSEKARAIMEEVMSLLQPLNITQVLSHGEGTDINFWIQAGVPGASLLDDLYKYFFFHHSHGDTMTVMDPKQMNVAAAVWAVVSYVVADMEEMLPRS

SEQ ID NO: 835193 - protein, 293 aa, Homo sapiens
MKFLIFAFFGGVHLLSLCSGKAICKNGISKRTFEEIKEEIASCGDVAKAIINLAVYGKAQNRSYERLALLVDTVGPRLSGSKNLEKAIQIMYQNLQQDGLEKVHLEPVRIPHWERGEESAVMLEPRIHKIAILGLGSSIGTPPEGITAEVLVVTSFDELQRRASEARGKIVVYNQPYINYSRTVQYRTQGAVEAAKVGALASLIRSVASFSIYSPHTGIQEYQDGVPKIPTACITVEDAEMMSRMASHGIKIVIQLKMGAKTYPDTDSFNTVAEITGSKYPEQVVGVTMGASS

SEQ ID NO: 835194 - protein, 208 aa, Homo sapiens
MKFLIFAFFGGVHLLSLCSGKAICKNGISKRTFEEIKEEIASCGDVAKAIINLAVYGKAQNRSYERLALLVDTVGPRLSGSKNLEKAIQIMYQNLQQDGLEKVHLEPVRIPHWERGEESVFGLLFLMLLQTWKKCCLGPRNSKKETFSCFWPGILGLQLWKTPLHITISSNSSSKHNSISCFLLLSFLILSKFSDSRKRNHSPLPPTT

SEQ ID NO: 835195 - protein, 141 aa, Homo sapiens
MSSAAPSQVNISNYSLVMESDAGTFLPTGLQFTGKDFMMKTPKVIVTKTKIDKWDLIKEFLHSKRNYQQSKIDNLQNGRKYFANYVSDKGVISRIYKELKQFNKLKTNNPIKKWAKDMNRHFSNEDRQAANKHMKKCSTSL

SEQ ID NO: 835196 - protein, 472 aa, Homo sapiens; identical to SEQ ID NO: 835187

SEQ ID NO: 835197 - protein, 472 aa, Homo sapiens; identical to SEQ ID NO: 835187

SEQ ID NO: 835198 - protein, 472 aa, Homo sapiens; identical to SEQ ID NO: 835187

SEQ ID NO: 835199 - protein, 382 aa, Homo sapiens [sequence omitted]

SEQ ID NO: 835200 - protein, 162 aa, Homo sapiens
RKGKRNGHVSGLRPKRTLRLVLWTAEEQGGVGAFQYYQLHKVNISNYSLVMESDAGTFLPTGLQFTGSEKARAIMEEVMSLLQPLNITQVLSHGEGTDINFWIQAGVPGASLLDDLYKYFFFHHSHGDTMTVMDPKQMNVAAAVWAVVSYVVADMEEMLPRS

SEQ ID NO: 835201 - protein, 422 aa, Homo sapiens
MKFLIFAFFGGVHLLSLCSGKAICKNGISKRTFEEIKEEIASCGDVAKAIINLAVYGKAQNRSYERLALLVDTVGPRLSGSKNLEKAIQIMYQNLQQDGLEKVHLEPVRIPHWERGEESAVMLEPRIHKIAILGLGSSIGTPPEGITAEVLVVTSFDELQRRASEARGKIVVYNQPYINYSRTVQYRTQGAVEAAKVGALASLIRSVASFSIYSPHTGIQEYQDGVPKIPTACITVEDAEMMSRMASHGIKIVIQLKMGAKTYPDTDSFNTVAEITGSKYPEQVVLVSGHLDSWDVGQGAMDDGGGAFISWEALSLIKDLGLRPKRTLRLVLWTAEEQGGVGAFQYYQLHKVNISNYSLVMESDAGTFLPTGLQFTGSEKARAIMEEVMSLLQPLNITQVLSHGEGTDINFWIQAGVPGTSA

SEQ ID NO: 835202 - protein, 127 aa, Homo sapiens; identical to SEQ ID NO: 835192

SEQ ID NO: 835203 - protein, 78 aa, Homo sapiens
GSWTQRHIHTEGRQCEDKEKTVMKAKTVVMNLQAKECRRLPANHQHLGERHEIDSPSQRSEGSKSPDTLNSAFYPSEL

SEQ ID NO: 835204 - protein, 376 aa, Homo sapiens
MDVLAEANGTFALNLLKTLGKDNSKNVFFSPMSMSCALAMVYMGAKGNTAAQMAQILSFNKSGGGGDIHQGFQSLLTEVNKTGTQYLLRMANRLFGEKSCDFLSSFRDSCQKFYQAEMEELDFISAVEKSRKHINTWVAEKTEGKIAELLSPGSVDPLTRLVLVNAVYFRGNWDEQFDKENTEERLFKVSKNEEKPVQMMFKQSTFKKTYIGEIFTQILVLPYVGKELNMIIMLPDETTDLRTVEKELTYEKFVEWTRLDMMDEEEVEVSLPRFKLEESYDMESVLRNLGMTDAFELGKADFSGMSQTDLSLSKVVHKSFVEVNEEGTEAAAATAAIMMMRCARFVPRFCADHPFLFFIQHSKTNGILFCGRFSSP

SEQ ID NO: 835205 - protein, 376 aa, Homo sapiens; identical to SEQ ID NO: 835204

SEQ ID NO: 835206 - protein, 376 aa, Homo sapiens; identical to SEQ ID NO: 835204

SEQ ID NO: 835207 - protein, 376 aa, Homo sapiens; identical to SEQ ID NO: 835204

SEQ ID NO: 835208 - protein, 392 aa, Homo sapiens
  misc_feature (1)..(1): Xaa can be any naturally occurring amino acid
XVSASTLFLTTDRSAIMDVLAEANGTFALNLLKTLGKDNSKNVFFSPMSMSCALAMVYMGAKGNTAAQMAQILSFNKSGGGGDIHQGFQSLLTEVNKTGTQYLLRMANRLFGEKSCDFLSSFRDSCQKFYQAEMEELDFISAVEKSRKHINTWVAEKTEGKIAELLSPGSVDPLTRLVLVNAVYFRGNWDEQFDKENTEERLFKVSKNEEKPVQMMFKQSTFKKTYIGEIFTQILVLPYVGKELNMIIMLPDETTDLRTVEKELTYEKFVEWTRLDMMDEEEVEVSLPRFKLEESYDMESVLRNLGMTDAFELGKADFSGMSQTDLSLSKVVHKSFVEVNEEGTEAAAATAAIMMMRCARFVPRFCADHPFLFFIQHSKTNGILFCGRFSSP

SEQ ID NO: 835209 - protein, 394 aa, Homo sapiens
SRHSAIVALGSLETWSAIMDVLAEANGTFALNLLKTLGKDNSKNVFFSPMSMSCALAMVYMGAKGNTAAQMAQILSFNKSGGGGDIHQGFQSLLTEVNKTGTQYLLRMANRLFGEKSCDFLSSFRDSCQKFYQAEMEELDFISAVEKSRKHINTWVAEKTEGKIAELLSPGSVDPLTRLVLVNAVYFRGNWDEQFDKENTEERLFKVSKNEEKPVQMMFKQSTFKKTYIGEIFTQILVLPYVGKELNMIIMLPDETTDLRTVEKELTYEKFVEWTRLDMMDEEEVEVSLPRFKLEESYDMESVLRNLGMTDAFELGKADFSGMSQTDLSLSKVVHKSFVEVNEEGTEAAAATAAIMMMRCARFVPRFCADHPFLFFIQHSKTNGILFCGRFSSP

SEQ ID NO: 835210 - protein, 380 aa, Homo sapiens
MSAIMDVLAEANGTFALNLLKTLGKDNSKNVFFSPMSMSCALAMVYMGAKGNTAAQMAQILSFNKSGGGGDIHQGFQSLLTEVNKTGTQYLLRMANRLFGEKSCDFLSSFRDSCQKFYQAEMEELDFISAVEKSRKHINTWVAEKTEGKIAELLSPGSVDPLTRLVLVNAVYFRGNWDEQFDKENTEERLFKVSKNEEKPVQMMFKQSTFKKTYIGEIFTQILVLPYVGKELNMIIMLPDETTDLRTVEKELTYEKFVEWTRLDMMDEEEVEVSLPRFKLEESYDMESVLRNLGMTDAFELGKADFSGMSQTDLSLSKVVHKSFVEVNEEGTEAAAATAAIMMMRCARFVPRFCADHPFLFFIQHSKTNGILFCGRFSSP

SEQ ID NO: 835211 - protein, 376 aa, Homo sapiens; identical to SEQ ID NO: 835204

SEQ ID NO: 835212 - protein, 376 aa, Homo sapiens; identical to SEQ ID NO: 835204

SEQ ID NO: 835213 - protein, 360 aa, Homo sapiens
ESHSVARLECSGTISAHCNLRLPGSSDSLSSASRVAGLQILSFNKSGGGGDIHQGFQSLLTEVNKTGTQYLLRMANRLFGEKSCDFLSSFRDSCQKFYQAEMEELDFISAVEKSRKHINTWVAEKTEGKIAELLSPGSVDPLTRLVLVNAVYFRGNWDEQFDKENTEERLFKVSKNEEKPVQMMFKQSTFKKTYIGEIFTQILVLPYVGKELNMIIMLPDETTDLRTVEKELTYEKFVEWTRLDMMDEEEVEVSLPRFKLEESYDMESVLRNLGMTDAFELGKADFSGMSQTDLSLSKVVHKSFVEVNEEGTEAAAATAAIMMMRCARFVPRFCADHPFLFFIQHSKTNGILFCGRFSSP

SEQ ID NO: 835214 - protein, 259 aa, Homo sapiens
MEELDFISAVEKSRKHINTWVAEKTEGKIAELLSPGSVDPLTRLVLVNAVYFRGNWDEQFDKENTEERLFKVSKNEEKPVQMMFKQSTFKKTYIGEIFTQILVLPYVGKELNMIIMLPDETTDLRTVEKELTYEKFVEWTRLDMMDEEEVEVSLPRFKLEESYDMESVLRNLGMTDAFELGKADFSGMSQTDLSLSKVVHKSFVEVNEEGTEAAAATAAIMMMRCARFVPRFCADHPFLFFIQHSKTNGILFCGRFSSP

SEQ ID NO: 835215 - protein, 362 aa, Homo sapiens
MDVLAEANGTFALNLLKTLGKDNSKNVFFSPMSMSCALAMVYMGAKGNTAAQMAQILSFNKSGGGGDIHQGFQSLLTEVNKTGTQYLLRMANRLFGEKSCDFLSSFRDSCQKFYQAEMEELDFISAVEKSRKHINTWVAEKTEGKIAELLSPGSVDPLTRLVLVNAVYFRGNWDEQFDKENTEERLFKVSKNEEKPVQMMFKQSTFKKTYIGEIFTQILVLPYVGKELNMIIMLPDETTDLRTVEKELTYEKFVEWTRLDMMDEEEVEVSLPRFKLEESYDMESVLRNLGMTDAFELGKADFSGMSQTDLSLSKVVHKSFVEVNEEGTEAAAATAAIMMMRCARFVPRFCADHPFLFLLSVP

SEQ ID NO: 835216 - protein, 177 aa, Homo sapiens
MFKQSTFKKTYIGEIFTQILVLPYVGKELNMIIMLPDETTDLRTVEKELTYEKFVEWTRLDMMDEEEVEVSLPRFKLEESYDMESVLRNLGMTDAFELGKADFSGMSQTDLSLSKVVHKSFVEVNEEGTEAAAATAAIMMMRCARFVPRFCADHPFLFFIQHSKTNGILFCGRFSSP

SEQ ID NO: 835217 - protein, 283 aa, Homo sapiens
MDVLAEANGTFALNLLKTLGKDNSKNVFFSPMSMSCALAMVYMGAKGNTAAQMAQILSFNKSGGGGDIHQGFQSLLTEVNKTGTQYLLRMANRLFGEKSCDFLSSFRDSCQKFYQAEMEELDFISAVEKSRKHINTWVAEKTEGKIAELLSPGSVDPLTRLVLVNAVYFRGNWDEQFDKENTEERLFKVSKNEEKPVQMMFKQSTFKKTYIGEIFTQILVLPYVGKELNMIIMLPDETTDLRTVEKELTYEKFVEWTRLDMMDEEEVEVSLQARRLQPPQLPS

SEQ ID NO: 835218 - protein, 115 aa, Homo sapiens [sequence omitted]

SEQ ID NO: 835219 - protein, 144 aa, Homo sapiens
MRHEETTDLRTVEKELTYEKFVEWTRLDMMDEEEVEVSLPRFKLEESYDMESVLRNLGMTDAFELGKADFSGMSQTDLSLSKVVHKSFVEVNEEGTEAAAATAAIMMMRCARFVPRFCADHPFLFFIQHSKTNGILFCGRFSSP

SEQ ID NO: 835220 - protein, 259 aa, Homo sapiens
MDVLAEANGTFALNLLKTLGKDNSKNVFFSPMSMSCALAMVYMGAKGNTAAQMAQILSFNKSGGGGDIHQGFQSLLTEVNKTGTQYLLRMANRLFGEKSCDFLSSFRDSCQKFYQAEMEELDFISAVEKSRKHINTWVAEKTEGKIAELLSPGSVDPLTRLVLVNAVYFRGNWDEQFDKENTEERLFKVSKDLSLSKVVHKSFVEVNEEGTEAAAATAAIMMMRCARFVPRFCADHPFLFFIQHSKTNGILFCGRFSSP

SEQ ID NO: 835221 - protein, 199 aa, Homo sapiens
MDVLAEANGTFALNLLKTLGKDNSKNVFFSPMSMSCALAMVYMGAKGNTAAQMAQILSFNKSGGGGDIHQGFQSLLTEVNKTGTQYLLRMANRLFGEKSCDFLSSFRDSCQKFYQAEMEELDFISAVEKSRKHINTWVAEKTEGKIAELLSPGSVDPLTRLVLVNAVYFRGNWDEQFDKENTEERLFKVSKASKGPCQE

SEQ ID NO: 835222 - protein, 194 aa, Homo sapiens
MGAAQSLPGHRSAIMDVLAEANGTFALNLLKTLGKDNSKNVFFSPMSMSCALAMVYMGAKGNTAAQMAQILSFNKSGGGGDIHQGFQSLLTEVNKTGTQYLLRMANRLFGEKSCDFLSSFRDSCQKFYQAEMEELDFISAVEKSRKHINTWVAEKTEGENVLLFYFCNNLLIHFIVSSFTRLSIVNRNDFFFSE

SEQ ID NO: 835223 - protein, 123 aa, Homo sapiens
MGAAQSLPGHRSAIMDVLAEANGTFALNLLKTLGKDNSKNVFFSPMSMSCALAMVYMGAKGNTAAQMAQILSFNKSGGGGDIHQGFQSLLTEVNKTGTQYLLRMANRLFGEKSCDFLSVSHTC

SEQ ID NO: 835224 - protein, 376 aa, Homo sapiens; identical to SEQ ID NO: 835204

SEQ ID NO: 835225 - protein, 376 aa, Homo sapiens; identical to SEQ ID NO: 835204

SEQ ID NO: 835226 - protein, 143 aa, Homo sapiens
SRPHIRSRRTVEKELTYEKFVEWTRLDMMDEEEVEVSLPRFKLEESYDMESVLRNLGMTDAFELGKADFSGMSQTDLSLSKVVHKSFVEVNEEGTEAAAATAAIMMMRCARFVPRFCADHPFLFFIQHSKTNGILFCGRFSSP

SEQ ID NO: 835227 - protein, 390 aa, Homo sapiens
MGAAQSLPGHRSAIMDVLAEANGTFALNLLKTLGKDNSKNVFFSPMSMSCALAMVYMGAKGNTAAQMAQILSFNKSGGGGDIHQGFQSLLTEVNKTGTQYLLRMANRLFGEKSCDFLSSFRDSCQKFYQAEMEELDFISAVEKSRKHINTWVAEKTEGKIAELLSPGSVDPLTRLVLVNAVYFRGNWDEQFDKENTEERLFKVSKNEEKPVQMMFKQSTFKKTYIGEIFTQILVLPYVGKELNMIIMLPDETTDLRTVEKELTYEKFVEWTRLDMMDEEEVEVSLPRFKLEESYDMESVLRNLGMTDAFELGKADFSGMSQTDLSLSKVVHKSFVEVNEEGTEAAAATAAIMMMRCARFVPRFCADHPFLFFIQHSKTNGILFCGRFSSP

SEQ ID NO: 835228 - protein, 376 aa, Homo sapiens; identical to SEQ ID NO: 835204

SEQ ID NO: 835229 - protein, 380 aa, Homo sapiens; identical to SEQ ID NO: 835210

SEQ ID NO: 835230 - protein, 376 aa, Homo sapiens; identical to SEQ ID NO: 835204

SEQ ID NO: 835231 - protein, 287 aa, Homo sapiens
MANRLFGEKSCDFLSSFRDSCQKFYQAEMEELDFISAVEKSRKHINTWVAEKTEGKIAELLSPGSVDPLTRLVLVNAVYFRGNWDEQFDKENTEERLFKVSKNEEKPVQMMFKQSTFKKTYIGEIFTQILVLPYVGKELNMIIMLPDETTDLRTVEKELTYEKFVEWTRLDMMDEEEVEVSLPRFKLEESYDMESVLRNLGMTDAFELGKADFSGMSQTDLSLSKVVHKSFVEVNEEGTEAAAATAAIMMMRCARFVPRFCADHPFLFFIQHSKTNGILFCGRFSSP

SEQ ID NO: 835232 - protein, 332 aa, Homo sapiens
MSCPCKQNFLHILSFNKSGGGGDIHQGFQSLLTEVNKTGTQYLLRMANRLFGEKSCDFLSSFRDSCQKFYQAEMEELDFISAVEKSRKHINTWVAEKTEGKIAELLSPGSVDPLTRLVLVNAVYFRGNWDEQFDKENTEERLFKVSKNEEKPVQMMFKQSTFKKTYIGEIFTQILVLPYVGKELNMIIMLPDETTDLRTVEKELTYEKFVEWTRLDMMDEEEVEVSLPRFKLEESYDMESVLRNLGMTDAFELGKADFSGMSQTDLSLSKVVHKSFVEVNEEGTEAAAATAAIMMMRCARFVPRFCADHPFLFFIQHSKTNGILFCGRFSSP

SEQ ID NO: 835233 - protein, 177 aa, Homo sapiens; identical to SEQ ID NO: 835216

SEQ ID NO: 835234 - protein, 256 aa, Homo sapiens
MDVLAEANGTFALNLLKTLGKDNSKNVFFSPMSMSCALAMVYMGAKGNTAAQMAQFLSNKWRWWRLFKVSKNEEKPVQMMFKQSTFKKTYIGEIFTQILVLPYVGKELNMIIMLPDETTDLRTVEKELTYEKFVEWTRLDMMDEEEVEVSLPRFKLEESYDMESVLRNLGMTDAFELGKADFSGMSQTDLSLSKVVHKSFVEVNEEGTEAAAATAAIMMMRCARFVPRFCADHPFLFFIQHSKTNGILFCGRFSSP

SEQ ID NO: 835235 - protein, 283 aa, Homo sapiens; identical to SEQ ID NO: 835217

SEQ ID NO: 835236 - protein, 238 aa, Homo sapiens
MDVLAEANGTFALNLLKTLGKDNSKNVFFSPMSMSCALAMVYMGAKGNTAAQMAQILSFNKSGGGGDIHQGFQSLLTEVNKTGTQYLLRMANRLFGEKSCDFLSSFRDSCQKFYQAEMEELDFISAVEKSRKHINTWVAEKTEGKIAELLSPGSVDPLTRLVLVNAVYFRGNWDEQFDKENTEERLFKVSKNEEKPVQMMFKQSTFKKTTCLCPRSCTSLLWRSMRKARRLQPPQLPS

SEQ ID NO: 835237 - protein, 204 aa, Homo sapiens
MDVLAEANGTFALNLLKTLGKDNSKNVFFSPMSMSCALAMVYMGAKGNTAAQMAQILSFNKSGGGGDIHQGFQSLLTEVNKTGTQYLLRMANRLFGEKSCDFLSSFRDSCQKFYQAEMEELDFISAVEKSRKHINTWVAEKTEGKIAELLSPGSVDPLTRLVLVNAVYFRGNWDEQFDKENTEERLFKVSKTNGILFCGRFSSP

SEQ ID NO: 835238 - protein, 204 aa, Homo sapiens; identical to SEQ ID NO: 835237

SEQ ID NO: 835239 - protein, 300 aa, Homo sapiens [sequence omitted]

SEQ ID NO: 835240 - protein, 300 aa, Homo sapiens [sequence omitted]

SEQ ID NO: 835241 - protein, 300 aa, Homo sapiens [sequence omitted]

SEQ ID NO: 835242 - protein, 300 aa, Homo sapiens [sequence omitted]

SEQ ID NO: 835243 - protein, 300 aa, Homo sapiens [sequence omitted]

SEQ ID NO: 835244 - protein, 246 aa, Homo sapiens
MLHNASLLIDDIEDNSKLRRGFPVAHSIYGIPSVINSANYVYFLGLEKVLTLDHPDAVKLFTRQLLELHQGQGLDIYWRDNYTCPTEEEYKAMVLQKTGGLFGLAVGLMQLFSDYKEDLKPLLNTLGLFFQIRDDYANLHSKEYSENKSFCEDLTEGKFSFPTIHAIWSRPESTQVQNILRQRTENIDIKKYCVHYLEDVGSFEYTRNTLKELEAKAYKQIDARGGNPELVALVKHLSKMFKEENE

SEQ ID NO: 835245 - protein, 155 aa, Homo sapiens
ATRRQPPNHHTPTRGSLRPRHPRKPNHLHSSAASRPHCRDPTEFPVYDNDAISVREETHNKPGVRRRAGRSPLGPRRPAERIRAPTRRVRARGRPGATEGPGGPVGRGQDRPATEPLPTSRSGLRPDKWERDQHLAPPRGQREGRGPRRRNGPHP

SEQ ID NO: 835246 - protein, 300 aa, Homo sapiens [sequence omitted]

SEQ ID NO: 835247 - protein, 300 aa, Homo sapiens [sequence omitted]

SEQ ID NO: 835248 - protein, 300 aa, Homo sapiens [sequence omitted]

SEQ ID NO: 835249 - protein, 1901 aa, Homo sapiens
MATFRNNHMKTKASVRKSFSEDVFQSVKSLLQSQKELCSVTAEDCLQQDEHANLTEVTFLGFNEETDAAHIQDLAAVSLELPDILNSLHFCSLNENEIICMKNINKPLDISSDPLNQSHPSGMLCVMRVSPTSPRLRIDFIFSLLSKYATGIRYTLDTFLHQKHQLETTDEDDDDTNQSVSSIEDDFVTAFEHLEEEETSKPYNDGMNITVLRSQCDAASQTVTGHHLETHDLKILISSGQQKSLAKPSTSSVNVLGHKELPSVKTSVTTSISEPWTQRSFYRSSNASDKDSDLQKTFFSSSPAYSSESECSSPSPVIFLDEEGYQKSLKAKLELPKIPVMKDDIEDSDSEVSEFFDSFDQFDELEQTLETCLFNKDPVIGKSSQRKGHKHGKSCMNPQKFKFDRPALPANVRKPTPRKPESPYGNLCDAPDSPRPVKASREDSGLFSPIRSSAFSPLGGCTPAECFCQTDIGGDRIHENHDSVYYTYEDYAKSISCEVLGSVLRTHHTNTLSNINSIKHGENKTVTFKHGNLDQKNKSKNKSLMIKDSIQKFAADLVEKSFGSAFKDLQKGVSSCTNALYHLAIKLTSSVLQMAFDELRRQRAFSLKERAISGLANFLVSEALSNALKDLQYVKKQIFTNTVARFAADLAEELVFEGIMEVCQFSYPQTPASPQCGSFDFEDKVVKLYAKDLSESVIQEAFIELSQVDVTFTTKAAVSVSTDNIKYVSAESVVPSTQAVTFSPSFHNQAIMVTKPVQEYKKEYTVQQALFCTSGIVTSIPVPLAGSALLPYHISSTACQAKAHLSSDDSNSNGDSAQVHIATKNREEKAACLRNICLPSEHNPGNQNDFKPTNDDIEMQSSSKLPNDPAIISNFSAAVVHTIVNETLESMTSLEVTKMVDERTDYLTKSLKEKTPPFSHCDQAVLQCSEASSNKDMFADRLSKSIIKHSIDKSKSVIPNIDKNAVYKESLPVSGEESQLTPEKSPKFPDSQNQLTHCSLSAAKDCVPECKVSMVHGSSLETLPSCPAVTGQKSDLKESAKDQPLKKHNLNSTSLEALSFGQENPFPHSHTFSSTALTCVDGLHVEDKQKVRDRNVIPDTPPSTPLVPSRASSEWDIKKLTKKLKGELAKEFAPATPPSTPHNSSVGSLSENEQNTIEKEEFMLKLMRSLSEEVESSESGELPEVDVKSEHSGKKVQFAEALATHILSLATEMAASHLDNKIIQEPKVKNPCLNVQSQRSVSPTFLNPSDENLKTLCNFAGDLAAEVITEAEKIAKVRNCMLFKQKKNSCYADGDEDYKVEEKLDIEAVVHPREVDPFILSLPPSSCMSGLMYKYPSCESVTDEYAGHLIQILKQEGGNSELIMDQYANRLAYRSVKSGLQEAAKTTKVQCNSRMFPVPSSQVKTNKELLMFSNKEHHQEADKKRQSKRNEGYFCKNQTCERTLDPYRNEVSQLYSFSTSLVHSITKDAKEELTASLVGLPKSLTDSCLFEKSGYEEDNECHVTPELPKSLQPSSQNHRFYHSTGSLNGYGCGDNVVQAVEQYAKKVVDDTLELTLGSTVFRVSETTKSADRVTYAEKLSPLTGQACRYCDLKELHNCTGNSSQHFFRQGSLASSKPASNPKFSSRYQKSRIFHLSVPQIHVNLDKKAVLAEKIVAEAIEKAERELSSTSLAADSGIGQEGASFAESLATETMTAAVTNVGHAVSSSKEIEDFQSTESVSSQQMNLSIGDDSTGSWSNLSFEDEHQDESSSFHHLSESNGNSSSWSSLGLEGDLYEDNLSFPTSDSDGPDDKDEEHEDEVEGLGQDGKTLLITNIDMEPCTVDPQLRIILQWLIASEAEVAELYFHDSANKEFMLLSKQLQEKGWKVGDLLQAVLQYYEVMEKASSEERCKSLFDWLLENA

SEQ ID NO: 835250 - protein, 1873 aa, Homo sapiens
MATFRNNHMKTKASVRKSFSEDVFQSVKSLLQSQKELCSVTAEDCLQQDEHANLTEVTFLGFNEETDAAHIQDLAAVSLELPDILNSLHFCSLNENEIICMKNINKPLDISSDPLNQSHPSGMLCVMRVSPTSPRLRIDFIFSLLSKYATGIRYTLDTFLHQKHQLETTDEDDDDTNQSVSSIEDDFVTAFEHLEEEETSKPYNDGMNITVLRSQCDAASQTVTGHHLETHDLKILISSGQQKSLAKPSTSSVNVLGHKELPSVKTSVTTSISEPWTQRSFYRSSNASDKDSDLQKTFFSSSPAYSSESECSSPSPVIFLDEEGYQKSLKAKLELPKIPVMKDDIEDSDSEVSEFFDSFDQFDELEQTLETCLFNKDPVIGKSSQRKGHKHGKSCMNPQKFKFDRPALPANVRKPTPRKPESPYGNLCDAPDSPRPVKASREDSGLFSPIRSSAFSPLGGCTPAECFCQTDIGGDRIHENHDSVYYTYEDYAKSISCEVLGSVLRTHHTNTLSNINSIKHGENKTVTFKHGNLDQKNKSKNKSLMIKDSIQKFAADLVEKSFGSAFKDLQKGVSSCTNALYHLAIKLTSSVLQMAFDELRRQRAFSLKERAISGLANFLVSEALSNALKDLQYVKKQIFTNTVARFAADLAEELVFEGIMEVCQFSYPQTPASPQCGSFDFEDKVVKLYAKDLSESVIQEAFIELSQVDVTFTTKAAVSVSTDNIKYVSAESVVPSTQAVTFSPSFHNQAIMVTKPVQEYKKEYTVQQALFCTSGIVTSIPVPLAGSALLPYHISSTACQAKAHLSSDDSNSNGDSAQVHIATKNREEKAACLRNICLPSEHNPGNQNDFKPTNDDIEMQSSSKLPNDPAIISNFSAAVVHTIVNETLESMTSLEVTKMVDERTDYLTKSLKEKTPPFSHCDQAVLQCSEASSNKDMFADRLSKSIIKHSIDKSKSVIPNIDKNAVYKESLPVSGEESQLTPEKSPKFPDSQNQLTHCSLSAAKDCVPECKVSMVHGSSLETLPSCPAVTGQKSDLKESAKDQPLKKHNLNSTSLEALSFGQENPFPHSHTFSSTALTCVDGLHVEDKQKVRDRNVIPDTPPSTPLVPSRASSEWDIKKLTKKLKGELAKEFAPATPPSTPHNSSVGSLSENEQNTIEKEEFMLKLMRSLSEEVESSESGELPEVDVKSEHSGKKVQFAEALATHILSLATEMAASHLDNKIIQEPKVKNPCLNVQSQRSVSPTFLNPSDENLKTLCNFAGDLAAEVITEAEKIAKVRNCMLFKQKKNSCYADGDEDYKVEEKLDIEAVVHPREVDPFILSLPPSSCMSGLMYKYPSCESVTDEYAGHLIQILKQEGGNSELIMDQYANRLAYRSVKSGLQEAAKTTKVQCNSRMFPVPSSQVKTNKELLMFSNKEHHQEADKKRQSKRNEGYFCKNQTCERTLDPYRNEVSQLYSFSTSLVHSITKDAKEELTASLVGLPKSLTDSCLFEKSGYEEDNECHVTPELPKSLQPSSQNHRFYHSTGSLNGYGCGDNVVQAVEQYAKKVVDDTLELTLGSTVFRVSETTKSADRVTYAEKLSPLTGQACRYCDLKELHNCTGNSSQHFFRQGSLASSKPASNPKFSSRYQKSRIFHLSVPQIHVNLDKKAVLAEKIVAEAIEKAERELSSTSLAADSGIGQEGASFAESLATETMTAAVTNVGHAVSSSKEIEDFQSTESVSSQQMNLSIGDDSTGSWSNLSFEDEHQDESSSFHHLSESDGPDDKDEEHEDEVEGLGQDGKTLLITNIDMEPCTVDPQLRIILQWLIASEAEVAELYFHDSANKEFMLLSKQLQEKGWKVGDLLQAVLQYYEVMEKASSEERCKSLFDWLLENA

SEQ ID NO: 835251 - protein, 1448 aa, Homo sapiens
MATFRNNHMKTKASVRKSFSEDVFQSVKSLLQSQKELCSVTAEDCLQQDEHANLTEVTFLGFNEETDAAHIQDLAAVSLELPDILNSLHFCSLNENEIICMKNINKPLDISSDPLNQSHPSGMLCVMRVSPTSPRLRIDFIFSLLSKYATGIRYTLDTFLHQKHQLETTDEDDDDTNQSVSSIEDDFVTAFEHLEEEETSKPYNDGMNITVLRSQCDAASQTVTGHHLETHDLKILISSGQQKSLAKPSTSSVNVLGHKELPSVKTSVTTSISEPWTQRSFYRSSNASDKDSDLQKTFFSSSPAYSSESECSSPSPVIFLDEEGYQKSLKAKLELPKIPVMKDDIEDSDSEVSEFFDSFDQFDELEQTLETCLFNKDPVIGKSSQRKGHKHGKSCMNPQKFKFDRPALPANVRKPTPRKPESPYGNLCDAPDSPRPVKASREDSGLFSPIRSSAFSPLGGCTPAECFCQTDIGGDRIHENHDSVYYTYEDYAKSISCEVLGSVLRTHHTNTLSNINSIKHGENKTVTFKHGNLDQKNKSKNKSLMIKDSIQKFAADLVEKSFGSAFKDLQKGVSSCTNALYHLAIKLTSSVLQMAFDELRRQRAFSLKERAISGLANFLVSEALSNALKDLQYVKKQIFTNTVARFAADLAEELVFEGIMEVCQFSYPQTPASPQCGSFDFEDKVVKLYAKDLSESVIQEAFIELSQVDVTFTTKAAVSVSTDNIKYVSAESVVPSTQAVTFSPSFHNQAIMVTKPVQEYKKEYTVQQALFCTSGIVTSIPVPLAGSALLPYHISSTACQAKAHLSSDDSNSNGDSAQVHIATKNREEKAACLRNICLPSEHNPGNQNDFKPTNDDIEMQSSSKLPNDPAIISNFSAAVVHTIVNETLESMTSLEVTKMVDERTDYLTKSLKEKTPPFSHCDQAVLQCSEASSNKDMFADRLSKSIIKHSIDKSKSVIPNIDKNAVYKESLPVSGEESQLTPEKSPKFPDSQNQLTHCSLSAAKDCVPECKVSMVHGSSLETLPSCPAVTGQKSDLKESAKDQPLKKHNLNSTSLEALSFGQENPFPHSHTFSSTALTCVDGLHVEDKQKVRDRNVIPDTPPSTPLVPSRASSEWDIKKLTKKLKGELAKEFAPATPPSTPHNSSVGSLSENEQNTIEKEEFMLKLMRSLSEEVESSESGELPEVDVKSEHSGKKVQFAEALATHILSLATEMAASHLDNKIIQEPKVKNPCLNVQSQRSVSPTFLNPSDENLKTLCNFAGDLAAEVITEAEKIAKVRNCMLFKQKKNSCYADGDEDYKVEEKLDIEAVVHPREVDPFILSLPPSSCMSGLMYKYPSCESVTDEYAGHLIQILKQEGGNSELIMDQYANRLAYRSVKSGLQEAAKTTKVQCNSRMFPVPSSQVKTNKELLMFSNKEHHQEADKKRQSKRNEGYFCKNQTCERTLWTIS

SEQ ID NO: 835252 - protein, 538 aa, Homo sapiens
MATFRNNHMKTKASVRKSFSEDVFQSVKSLLQSQKELCSVTAEDCLQQDEHANLTEVTFLGFNEETDAAHIQDLAAVSLELPDILNSLHFCSLNENEIICMKNINKPLDISSDPLNQSHPSGMLCVMRVSPTSPRLRIDFIFSLLSKYATGIRYTLDTFLHQKHQLETTDEDDDDTNQSVSSIEDDFVTAFEHLEEEETSKPYNDGMNITVLRSQCDAASQTVTGHHLETHDLKILISSGQQKSLAKPSTSSVNVLGHKELPSVKTSVTTSISEPWTQRSFYRSSNASDKDSDLQKTFFSSSPAYSSESECSSPSPVIFLDEEGYQKSLKAKLELPKIPVMKDDIEDSDSEVSEFFDSFDQFDELEQTLETCLFNKDPVIGKSSQRKGHKHGKSCMNPQKFKFDRPALPANVRKPTPRKPESPYGNLCDAPDSPRPVKASREDSGLFSPIRSSAFSPLGGCTPAECFCQTDIGGDRIHENHDSVYYTYEDYAKSISCEVLGSVLRTHHTNTLSRFPCLKVTVLFYHVNTVILIGIGPA

SEQ ID NO: 835253 - protein, 1854 aa, Homo sapiens
MEVYLFFTQVTFLGFNEETDAAHIQDLAAVSLELPDILNSLHFCSLNENEIICMKNINKPLDISSDPLNQSHPSGMLCVMRVSPTSPRLRIDFIFSLLSKYATGIRYTLDTFLHQKHQLETTDEDDDDTNQSVSSIEDDFVTAFEHLEEEETSKPYNDGMNITVLRSQCDAASQTVTGHHLETHDLKILISSGQQKSLAKPSTSSVNVLGHKELPSVKTSVTTSISEPWTQRSFYRSSNASDKDSDLQKTFFSSSPAYSSESECSSPSPVIFLDEEGYQKSLKAKLELPKIPVMKDDIEDSDSEVSEFFDSFDQFDELEQTLETCLFNKDPVIGKSSQRKGHKHGKSCMNPQKFKFDRPALPANVRKPTPRKPESPYGNLCDAPDSPRPVKASREDSGLFSPIRSSAFSPLGGCTPAECFCQTDIGGDRIHENHDSVYYTYEDYAKSISCEVLGSVLRTHHTNTLSNINSIKHGENKTVTFKHGNLDQKNKSKNKSLMIKDSIQKFAADLVEKSFGSAFKDLQKGVSSCTNALYHLAIKLTSSVLQMAFDELRRQRAFSLKERAISGLANFLVSEALSNALKDLQYVKKQIFTNTVARFAADLAEELVFEGIMEVCQFSYPQTPASPQCGSFDFEDKVVKLYAKDLSESVIQEAFIELSQVDVTFTTKAAVSVSTDNIKYVSAESVVPSTQAVTFSPSFHNQAIMVTKPVQEYKKEYTVQQALFCTSGIVTSIPVPLAGSALLPYHISSTACQAKAHLSSDDSNSNGDSAQVHIATKNREEKAACLRNICLPSEHNPGNQNDFKPTNDDIEMQSSSKLPNDPAIISNFSAAVVHTIVNETLESMTSLEVTKMVDERTDYLTKSLKEKTPPFSHCDQAVLQCSEASSNKDMFADRLSKSIIKHSIDKSKSVIPNIDKNAVYKESLPVSGEESQLTPEKSPKFPDSQNQLTHCSLSAAKDCVPECKVSMVHGSSLETLPSCPAVTGQKSDLKESAKDQPLKKHNLNSTSLEALSFGQENPFPHSHTFSSTALTCVDGLHVEDKQKVRDRNVIPDTPPSTPLVPSRASSEWDIKKLTKKLKGELAKEFAPATPPSTPHNSSVGSLSENEQNTIEKEEFMLKLMRSLSEEVESSESGELPEVDVKSEHSGKKVQFAEALATHILSLATEMAASHLDNKIIQEPKVKNPCLNVQSQRSVSPTFLNPSDENLKTLCNFAGDLAAEVITEAEKIAKVRNCMLFKQKKNSCYADGDEDYKVEEKLDIEAVVHPREVDPFILSLPPSSCMSGLMYKYPSCESVTDEYAGHLIQILKQEGGNSELIMDQYANRLAYRSVKSGLQEAAKTTKVQCNSRMFPVPSSQVKTNKELLMFSNKEHHQEADKKRQSKRNEGYFCKNQTCERTLDPYRNEVSQLYSFSTSLVHSITKDAKEELTASLVGLPKSLTDSCLFEKSGYEEDNECHVTPELPKSLQPSSQNHRFYHSTGSLNGYGCGDNVVQAVEQYAKKVVDDTLELTLGSTVFRVSETTKSADRVTYAEKLSPLTGQACRYCDLKELHNCTGNSSQHFFRQGSLASSKPASNPKFSSRYQKSRIFHLSVPQIHVNLDKKAVLAEKIVAEAIEKAERELSSTSLAADSGIGQEGASFAESLATETMTAAVTNVGHAVSSSKEIEDFQSTESVSSQQMNLSIGDDSTGSWSNLSFEDEHQDESSSFHHLSESNGNSSSWSSLGLEGDLYEDNLSFPTSDSDGPDDKDEEHEDEVEGLGQDGKTLLITNIDMEPCTVDPQLRIILQWLIASEAEVAELYFHDSANKEFMLLSKQLQEKGWKVGDLLQAVLQYYEVMEKASSEERCKSLFDWLLENA

SEQ ID NO: 835254 - protein, 1873 aa, Homo sapiens; identical to SEQ ID NO: 835250

SEQ ID NO: 835255 - protein, 1448 aa, Homo sapiens; identical to SEQ ID NO: 835251

SEQ ID NO: 835256 - protein, 111 aa, Homo sapiens
KTCELLEGNPSLPGSPSTAFRQISTKAPCTETSLSYFKRQHYFTDKCSELSSLTCPQPNLYGLTILLRETVYACAGTHVEGKTGRPTLPQALASLQTVPFTLSLTGKYCLV

SEQ ID NO: 835257 - protein, 81 aa, Homo sapiens
LRKNLRGLLGEWVPQAYFDLRAFSSTEIKCRILVWDTERKTELQCLKGLSPTPATSALPPSPLLRRCGARSNPPGVLRALI

SEQ ID NO: 835258 - protein, 428 aa, Homo sapiens
MSYYLSSENHLDPGPIYMRENGQLHMVNLALDGVRSSLQKPRPFRLFPKGFSVELCMNREDDTARKEKTDHFIFTYTREGNLRYSAKSLFSLVLGFISDNVDHIDSLIGFPEQIAEKLFSAAEARQKFTEPGAGLRALQKFTEAYGSLVLCSLCLRNRYLVISEKLEEIKSFRELTCLDLSCCKLGDEHELLEHLTNEALSSVTQLHLKDNCLSDAGVRKMTAPVRVMKRGLENLTLLDLSCNPEITDAGIGYLFSFRKLNCLDISGTGLKDIKTVKHKLQTHIGLVHSKVPLKEFDHSNCKTEGWADQIVLQWERVTAEAVKPRETSEPRAAAQRFYGKRSRAEAPLKCPLADTHMNSSEKLQFYKEKAPDCHGPVLKHEAISSQESKKSKKRPFEESETEQNNSSQPSKQKYVCLAVEDWDLLNSY

SEQ ID NO: 835259 - protein, 428 aa, Homo sapiens; identical to SEQ ID NO: 835258

SEQ ID NO: 835260 - protein, 427 aa, Homo sapiens
MSYYLSSENHLDPGPIYMRENGQLHMVNLALDGVRSSLQKPRPFRLFPKGFSVELCMNREDDTARKEKTDHFIFTYTREGNLRYSAKSLFSLVLGFISDNVDHIDSLIGFPEQIAEKLFSAAEARQKFTEPGAGLRALQKFTEAYGSLVLCSLCLRNRYLVISEKLEEIKSFRELTCLDLSCCKLGDEHELLEHLTNEALSSVTQLHLKDNCLSDAGVRKMTAPVRVMKRGLENLTLLDLSCNPEITDAGIGYLFSFRKLNCLDISGTGLKDIKTVKHKLQTHIGLVHSKVPLKEFDHSNCKTEGWADQIVLQWERVTAEAVKPRETSEPRAAAQRFYGKRSRAEAPLKCPLADTHMNSSEKLQFYKEKAPDCHGPVLKHEAISSQESKKSKKRPFEESETEQNNSSQPSKQKYVCLAVEDWDFSSV

SEQ ID NO: 835261 - protein, 428 aa, Homo sapiens; identical to SEQ ID NO: 835258

SEQ ID NO: 835262 - protein, 491 aa, Homo sapiens
PRSHGAWLPPAPSLLPPSLCPTLPSFVPGVLSPSPSAGPREEGAVTEELPLAAPGRGTVATKAMSYYLSSENHLDPGPIYMRENGQLHMVNLALDGVRSSLQKPRPFRLFPKGFSVELCMNREDDTARKEKTDHFIFTYTREGNLRYSAKSLFSLVLGFISDNVDHIDSLIGFPEQIAEKLFSAAEARQKFTEPGAGLRALQKFTEAYGSLVLCSLCLRNRYLVISEKLEEIKSFRELTCLDLSCCKLGDEHELLEHLTNEALSSVTQLHLKDNCLSDAGVRKMTAPVRVMKRGLENLTLLDLSCNPEITDAGIGYLFSFRKLNCLDISGTGLKDIKTVKHKLQTHIGLVHSKVPLKEFDHSNCKTEGWADQIVLQWERVTAEAVKPRETSEPRAAAQRFYGKRSRAEAPLKCPLADTHMNSSEKLQFYKEKAPDCHGPVLKHEAISSQESKKSKKRPFEESETEQNNSSQPSKQKYVCLAVEDWDLLNSY

SEQ ID NO: 835263 - protein, 273 aa, Homo sapiens
MSYYLSSENHLDPGPIYMRENGQLHMVNLALDGVRSSLQKPRPFRLFPKGFSVELCMNREDDTARKEKTDHFIFTYTREGNLRYSAKSLFSLVLGFISDNVDHIDSLIGFPEQIAEKLFSAAEARQKFTEPGAGLRALQKFTEAYGSLVLCSLCLRNRYLVISEKLEEIKSFRELTCLDLSCCKLGDEHELLEHLTNEALSSVTQLHLKDNCLSDAGVRKMTAPVRVMKRGLENLTLLDLSCNPEITDAGIGYLFSFRKLNCLDISGTGLKCL

SEQ ID NO: 835264 - protein, 113 aa, Homo sapiens
MPWTCSVSDPTSCDSQAQKMPGVRASRQPGRGRQCLLLLHQVQGIWLKACIFPGHKLPEPLKWEARQFQTNLFSTHHSTFKVCLLLLPVHPPSLQFFHSLTDVGRSLPLSRRR

SEQ ID NO: 835265 - protein, 60 aa, Homo sapiens
MCKDTLHFGLRIRGRPCAVVKHALCWHSRHRANDTHNCGHTAALRTEGGDPGDTGLSGVV

SEQ ID NO: 835266 - protein, 142 aa, Homo sapiens
MPWTCSVSDPTSCDSQAQKMPGVRASRQPGRGRQCLLLLHQVQGIWLKACIFPGHKLPEPLKWEARQFQTNLFSTHHSTFKVCLLLLPVHPPSLQFFHSLTSERVPGGSMVNKLTCMLQKKSKYKQTIHKKKRGAKKIPGGQ

SEQ ID NO: 835267 - protein, 34 aa, Homo sapiens
MCPSLSCPLLVGVGNRVDEVSCRIMNGQIIAGIQ

SEQ ID NO: 835268 - protein, 85 aa, Homo sapiens
MASDLDFSPPEVPEPTFLENLLRYGLFLGAIFQLICVLAIIVPIPKSHEAEAEPSEPRSAEVTRKPKAAVPSVNKRPKKETKKKR

SEQ ID NO: 835269 - protein, 130 aa, Homo sapiens
MEAIKKKMQMLKLDKENALDRAEQAEAEQKQAEERSKQLEDELAAMQKKLKGTEDELDKYSEALKDAQEKLELAEKKAADAEAEVASLNRRIQLVEEELDRAQERLATALQKLEEAEKAADESERGMNGY

SEQ ID NO: 835270 - protein, 360 aa, Homo sapiens
MAGITMSLHFMTLGGSSLSPTEGKGSGLQGHIIENPQYFSDACVHHIKRRDIVLKWELGEGAFGKVFLAECHNLLPEQDKMLVAVKALKEASESARQDFQREAELLTMLQHQHIVRFFGVCTEGRPLLMVFEYMRHGDLNRFLRSHGPDAKLLAGGEDVAPGPLGLGQLLAVASQVAAGMVYLAGLHFVHRDLATRNCLVGQGLVVKIGDFGMSRDIYSTDYYRVGGRTMLPIRWMPPESILYRKFTTESDVWSFGVVLWEIFTYGKQPWYQLSNTEAIDCITQGRELERPRACPPEVYAIMRGCWQREPSNATASRMCTPGCKPWPRHLLSTWMSWARGPAQGLGVVSRNTGACPQHPP

SEQ ID NO: 835271 - protein, 134 aa, Homo sapiens
TPTHIPKQHKLHDEAVRYMDEGTPSGGGRNRSASSSWVGTMAGITTIEAVKRKIQVLQQQADDAEERAERLQREVEGERRAREQAEAEVASLNRRIQLVEEELDRAQERLATALQKLEEAEKAADESERGMNGY

SEQ ID NO: 835272 - protein, 248 aa, Homo sapiens
MAGITTIEAVKRKIQVLQQQADDAEERAERLQREVEGERRAREQAEAEVASLNRRIQLVEEELDRAQERLATALQKLEEAEKAADESERGMKVIENRALKDEEKMELQEIQLKEAKHIAEEADRKYEEVARKLVIIEGDLERTEERAELAESRCREMDEQIRLMDQNLKCLSAAEEKYSQKEDKYEEEIKILTDKLKEAETRAEFAERSVAKLEKTIDDLEDKLKCTKEEHLCTQRMLDQTLLDLNEM

SEQ ID NO: 835273 - protein, 248 aa, Homo sapiens; identical to SEQ ID NO: 835272

SEQ ID NO: 835274 - protein, 248 aa, Homo sapiens; identical to SEQ ID NO: 835272

SEQ ID NO: 835275 - protein, 296 aa, Homo sapiens
MVIYCLRCLVGRDIPLNQGCLAPVRVVIPRGSILDPSPEAAVVGGNVLTSQRVVDVILGAFGACAASQVRGRGGRSSGADWVGRLEEEREGEVGTPCPSPAQRPGALTQGCMNNVTLGNAHMGYYETVAGGAGAGPSWHGRSGVHSHMTNTRITDPEILESRYPVILRRFELRRGSGGRGRFRGGDGVTRELLFREEALLSVLTERRAFRPYGLHGGEPGARGLNLLIRKNGRTVNLGGKTSVTVYPGDVFCLHTPGGGGYGDPEDPAPPPGSPPQALAFPEHGSVYEYRRAQKAV

SEQ ID NO: 835276 - protein, 248 aa, Homo sapiens; identical to SEQ ID NO: 835272

SEQ ID NO: 835277 - protein, 248 aa, Homo sapiens; identical to SEQ ID NO: 835272

SEQ ID NO: 835278 - protein, 424 aa, Homo sapiens
MTWKTLTAHLETLVEKKDETPFGVSVAVGLAVFACLFLSTLLLVLNKCGRRNKFGINRPAVLAPEDGLAMSLHFMTLGGSSLSPTEGKGSGLQGHIIENPQYFSDACVHHIKRRDIVLKWELGEGAFGKVFLAECHNLLPEQDKMLVAVKALKEASESARQDFQREAELLTMLQHQHIVRFFGVCTEGRPLLMVFEYMRHGDLNRFLRSHGPDAKLLAGGEDVAPGPLGLGQLLAVASQVAAGMVYLAGLHFVHRDLATRNCLVGQGLVVKIGDFGMSRDIYSTDYYRVGGRTMLPIRWMPPESILYRKFTTESDVWSFGVVLWEIFTYGKQPWYQLSNTEAIDCITQGRELERPRACPPEVYAIMRGCWQREPSNATASRMCTPGCKPWPRHLLSTWMSWARGPAQGLGVVSRNTGACPQHPP

SEQ ID NO: 835279 - protein, 247 aa, Homo sapiens
MAGITTIEAVKRKIQVLQQQADDAEERAERLQREVEGERRAREQAEAEVASLNRRIQLVEEELDRAQERLATALQKLEEAEKAADESERGMKVIENRALKDEEKMELQEIQLKEAKHIAEEADRKYEEVARKLVIIEGDLERTEERAELAESRCREMDEQIRLMDQNLKCLSAAEEKYSQKEDKYEEEIKILTDKLKEAETRAEFAERSVAKLEKTIDDLEERLYSQLERNRLLSNELKLTLHDLCD

SEQ ID NO: 835280 - protein, 247 aa, Homo sapiens; identical to SEQ ID NO: 835279

SEQ ID NO: 835281 - protein, 198 aa, Homo sapiens
MTWKMVDPKYTGYIVEYKEEGKEEWEKGNDNEVRGTKLVVTGLKEGAFYKFRVRAVNIVALENLEEVTDVIEMKDRLCHLTFSEIASVQNIESVCPCLEEVIPNHVLMCLESLLQTVPLDHGMKDLNSKEDTIETQALVIPGIQEIGRGSIRGQSLLAKNVSRGKNEDHFVSRLDVHAHGNLSVYTNTVLDGMFPKMS

SEQ ID NO: 835282 - protein, 105 aa, Homo sapiens
MQRSELSASSEKLREKGGPGNRYGDGEAHEGGAGAGVSGKRNKVPFAVEHGPLKAGGLGDEVGISEDGWGSAPVGHQADEGETVLGRAGLTFEEIEPYGVWGVAF

SEQ ID NO: 835283 - protein, 296 aa, Homo sapiens
MVIYCLRCLVGRDIPLNQGCLAPVRVVIPRGSILDPSPEAAVVGGNVLTSQRVVDVILGAFGACAASQVRGRGGLQLGGGLGGQAGVGAGGRGGDALPQPSAATRCPHQGCMNNVTLGNAHMGYYETVAGGAGAGPSWHGRSGVHSHMTNTRITDPEILESRYPVILRRFELRRGSGGRGRFRGGDGVTRELLFREEALLSVLTERRAFRPYGLHGGEPGARGLNLLIRKNGRTVNLGGKTSVTVYPGDVFCLHTPGGGGYGDPEDPAPPPGSPPQALAFPEHGSVYEYRRAQKAV

SEQ ID NO: 835284 - protein, 121 aa, Homo sapiens
MVIRRSRGFTPSGGGRNRSASSSWVGTMAGITTIEAVKRKIQVLQQQADDAEERAERLQREVEGERRAREQAEAEVASLNRRIQLVEEELDRAQERLATALQKLEEAEKAADESERGMNGY

SEQ ID NO: 835285 - protein, 107 aa, Homo sapiens
MQRSELSASSEKLREKGGPGNRYGDGEAHEGGAGAGVSGKRNKVPFAVEHGPLKAGGLGDEVGISEDVAEAEVASLNRRIQLVEEELDRLEEAEKAADESERGMNGY

SEQ ID NO: 835286 - protein, 66 aa, Homo sapiens
LHPVATRPRLATSPRLATSPRLAEEILSRKKITYEEEIKILTDKLKEAETRAEFAERSVAKLGKDN

SEQ ID NO: 835287 - protein, 360 aa, Homo sapiens; identical to SEQ ID NO: 835270

SEQ ID NO: 835288 - protein, 248 aa, Homo sapiens; identical to SEQ ID NO: 835272

SEQ ID NO: 835289 - protein, 248 aa, Homo sapiens; identical to SEQ ID NO: 835272

SEQ ID NO: 835290 - protein, 248 aa, Homo sapiens; identical to SEQ ID NO: 835272

SEQ ID NO: 835291 - protein, 248 aa, Homo sapiens; identical to SEQ ID NO: 835272

SEQ ID NO: 835292 - protein, 248 aa, Homo sapiens; identical to SEQ ID NO: 835272

SEQ ID NO: 835293 - protein, 179 aa, Homo sapiens
GRVGRPTRPSEENDQTFSEKPASSTEENCLEFQESFKHIDSEFEENTNLKNTLKNLNVCESQSLDSGSCSALQNEFVSEKLPKQRLNAEKAKLVKQVQEKEDLLRRLKLVKMYRSKNDLSQLQLLIKKWRSCSQLLLYELQSAVSEENKKLSLTQLIDHYGLDDKLLHYNRSEEEFIDV

SEQ ID NO: 835294 - protein, 249 aa, Homo sapiens
LSLGMAEGEKNQDFTFKMESPSDSAVVLPSTPQASANPSSPYTNSSRKQPMSATLRERLRKTRFSFNSSYNVVKRLKVESEENDQTFSEKPASSTEENCLEFQESFKHIDSEFEENTNLKNTLKNLNVCESQSLDSGSCSALQNEFVSEKLPKQRLNAEKAKLVKQVQEKEDLLRRLKLVKMYRSKNDLSQLQLLIKKWRSCSQLLLYELQSAVSEENKKLSLTQLIDHYGLDDKLLHYNRSEEEFIDV

SEQ ID NO: 835295 - protein, 273 aa, Homo sapiens
SGASRVRQSGQLRIFSAYRTAPPLPQDRFTAAEKNQDFTFKMESPSDSAVVLPSTPQASANPSSPYTNSSRKQPMSATLRERLRKTRFSFNSSYNVVKRLKVESEENDQTFSEKPASSTEENCLEFQESFKHIDSEFEENTNLKNTLKNLNVCESQSLDSGSCSALQNEFVSEKLPKQRLNAEKAKLVKQVQEKEDLLRRLKLVKMYRSKNDLSQLQLLIKKWRSCSQLLLYELQSAVSEENKKLSLTQLIDHYGLDDKLLHYNRSEEEFIDV

SEQ ID NO: 835296 - protein, 119 aa, Homo sapiens
AAPRASGNLANCASFPPTARPRPCHRIDLRPQRKTKISLSRWKVRQTQLWFYLALLRPPASASRVAEITGARHHARLIFAFLVETGFHHVGQAGLELLTSGDPPPRPPKTIRAQRKVSQ

SEQ ID NO: 835297 - protein, 705 aa, Homo sapiens
MTKFGFLRLSYEKQDTLLKLLILSMAAVLSFSTRLFAVLRFESVIHEFDPYFNYRTTRFLAEEGFYKFHNWFDDRAWYPLGRIIGGTIYPGLMITSAAIYHVLHFFHITIDIRNVCVFLAPLFSSFTTIVTYHLTKELKDAGAGLLAAAMIAVVPGYISRSVAGSYDNEGIAIFCMLLTYYMWIKAVKTGSICWAAKCALAYFYMVSSWGGYVFLINLIPLHVLVLMLTGRFSHRIYVAYCTVYCLGTILSMQISFVGFQPVLSSEHMAAFGVFGLCQIHAFVDYLRSKLNPQQFEVLFRSVISLVGFVLLTVGALLMLTGKISPWTGRFYSLLDPSYAKNNIPIIASVSEHQPTTWSSYYFDLQLLVFMFPVGLYYCFSNLSDARIFIIMYGVTSMYFSAVMVRLMLVLAPVMCILSGIGVSQVLSTYMKNLDISRPDKKSKKQQDSTYPIKNEVASGMILVMAFFLITYTFHSTWVTSEAYSSPSIVLSARGGDGSRIIFDDFREAYYWLRHNTPEDAKVMSWWDYGYQITAMANRTILVDNNTWNNTHISRVGQAMASTEEKAYEIMRELDVSYVLVIFGGLTGYSSDDINKFLWMVRIGGSTDTGKHIKENDYYTPTGEFRVDREGSPVLLNCLMYKMCYYRFGQVYTEAKRPPGFDRVRNAEIGNKDFELDVLEEAYTTEHWLVRIYKVKDLDNRGLSRT

SEQ ID NO: 835298 - protein, 195 aa, Homo sapiens
  misc_feature (137)..(137): Xaa can be any naturally occurring amino acid
  misc_feature (168)..(168): Xaa can be any naturally occurring amino acid
  misc_feature (186)..(186): Xaa can be any naturally occurring amino acid
  misc_feature (192)..(192): Xaa can be any naturally occurring amino acid
MTKFGFLRLSYEKQDTLLKLLILSMAAVLSFSTRLFAVLRFESVIHEFDPYFNYRTTRFLTEVKPSVRFNLRTSKDPEHEGCYLSVGHSQPLEDCSFNMTAKTFFIIHGWTMSGIFENWLHKLVSALHTREKDANVXVVDWLPLAHQLYTDAVNNTRVVGHSIARMLXLGCKEKGRFFSPGNVHFXSGKSPXEAQ

SEQ ID NO: 835299 - protein, 705 aa, Homo sapiens; identical to SEQ ID NO: 835297

SEQ ID NO: 835300 - protein, 524 aa, Homo sapiens
MWIKAVKTGSICWAAKCALAYFYMVSSWGGYVFLINLIPLHVLVLMLTGRFSHRIYVAYCTVYCLGTILSMQISFVGFQPVLSSEHMAAFGVFGLCQIHAFVDYLRSKLNPQQFEVLFRSVISLVGFVLLTVGALLMLTGKISPWTGRFYSLLDPSYAKNNIPIIASVSEHQPTTWSSYYFDLQLLVFMFPVGLYYCFSNLSDARIFIIMYGVTSMYFSAVMVRLMLVLAPVMCILSGIGVSQVLSTYMKNLDISRPDKKSKKQQDSTYPIKNEVASGMILVMAFFLITYTFHSTWVTSEAYSSPSIVLSARGGDGSRIIFDDFREAYYWLRHNTPEDAKVMSWWDYGYQITAMANRTILVDNNTWNNTHISRVGQAMASTEEKAYEIMRELDVSYVLVIFGGLTGYSSDDINKFLWMVRIGGSTDTGKHIKENDYYTPTGEFRVDREGSPVLLNCLMYKMCYYRFGQVYTEAKRPPGFDRVRNAEIGNKDFELDVLEEAYTTEHWLVRIYKVKDLDNRGLSRT

SEQ ID NO: 835301 - protein, 365 aa, Homo sapiens [sequence omitted]

SEQ ID NO: 835302 - protein, 334 aa, Homo sapiens [sequence omitted]

SEQ ID NO: 835303 - protein, 740 aa, Homo sapiens
AVWETRGRVAGDATACRAQLRRAADRRVLPPIHVKMTKFGFLRLSYEKQDTLLKLLILSMAAVLSFSTRLFAVLRFESVIHEFDPYFNYRTTRFLAEEGFYKFHNWFDDRAWYPLGRIIGGTIYPGLMITSAAIYHVLHFFHITIDIRNVCVFLAPLFSSFTTIVTYHLTKELKDAGAGLLAAAMIAVVPGYISRSVAGSYDNEGIAIFCMLLTYYMWIKAVKTGSICWAAKCALAYFYMVSSWGGYVFLINLIPLHVLVLMLTGRFSHRIYVAYCTVYCLGTILSMQISFVGFQPVLSSEHMAAFGVFGLCQIHAFVDYLRSKLNPQQFEVLFRSVISLVGFVLLTVGALLMLTGKISPWTGRFYSLLDPSYAKNNIPIIASVSEHQPTTWSSYYFDLQLLVFMFPVGLYYCFSNLSDARIFIIMYGVTSMYFSAVMVRLMLVLAPVMCILSGIGVSQVLSTYMKNLDISRPDKKSKKQQDSTYPIKNEVASGMILVMAFFLITYTFHSTWVTSEAYSSPSIVLSARGGDGSRIIFDDFREAYYWLRHNTPEDAKVMSWWDYGYQITAMANRTILVDNNTWNNTHISRVGQAMASTEEKAYEIMRELDVSYVLVIFGGLTGYSSDDINKFLWMVRIGGSTDTGKHIKENDYYTPTGEFRVDREGSPVLLNCLMYKMCYYRFGQVYTEAKRPPGFDRVRNAEIGNKDFELDVLEEAYTTEHWLVRIYKVKDLDNRGLSRT

SEQ ID NO: 835304 - protein, 705 aa, Homo sapiens; identical to SEQ ID NO: 835297

SEQ ID NO: 835305 - protein, 705 aa, Homo sapiens; identical to SEQ ID NO: 835297

SEQ ID NO: 835306 - protein, 205 aa, Homo sapiens
MTKFGFLRLSYEKQDTLLKLLILSMAAVLSFSTRLFAVLRFESVIHEFDPYFNYRTTRFLAEEGFYKFHNWFDDRAWYPLGRIIGGTIYPGLMITSAAIYHVLHFFHITIDIRNVCVFLAPLFSSFTTIVTYHLTKELKDAGAGLLAAAMIAVVPGYISRSVAGSYDNEGIAIFCMLLTYYMWIKAVKTGSICWAALALDLSPST

SEQ ID NO: 835307 - protein, 66 aa, Homo sapiens
ITHTVLKMQCQLFRTETSKAVSELNYDYICIKAGTGRPQGTPTIGLVLLVRWAIIYETELQSQPIT

SEQ ID NO: 835308 - protein, 66 aa, Homo sapiens; identical to SEQ ID NO: 835307

SEQ ID NO: 835309 - protein, 66 aa, Homo sapiens; identical to SEQ ID NO: 835307

SEQ ID NO: 835310 - protein, 110 aa, Homo sapiens
HINLLIWNHFASKGQRKITASLSEGKRTGDLGKTQLHLEQGLFPAWQSQLCRRYGTRAVPETKGQARQQTPEVIFIFLFIFSRIMQTESDKHKVAEATRYASILFYIFLF

SEQ ID NO: 835311 - protein, 60 aa, Homo sapiens
MALPQGLLTFRDVAIEFSQEEWKCLDPAQRTLYRDVMLENYRNLVSLELSGECPLAAPAS

SEQ ID NO: 835312 - protein, 120 aa, Homo sapiens
IAWSDGATAAHGVSLLLLRLECNGVISAHCNLRLPGSSDSPASASRVAEITEYCPGCECSLMILGHCNLCFLGSSDSCASASHVAEITGLTSKDSWYVRKKPGRGRGEQRSQGWLFLRVY

SEQ ID NO: 835313 - protein, 120 aa, Homo sapiens; identical to SEQ ID NO: 835312

SEQ ID NO: 835314 - protein, 135 aa, Homo sapiens
MKSSLGSGSGTALGGAVLPPSAWLGSAGSRASVTLLLSPQLTPGGKAAQAGVAVGDWVLSIDGENAGSLTHIEAQNKIRACGERLSLGLSRAQPVQSKPQKVQSLRPRRGPSAVHLCTQRLPQQDGPALWGAPAR

SEQ ID NO: 835315 - protein, 330 aa, Homo sapiens
MAPDKQQPLRPLVPDASKQRLMENTEDWRPRPGTGQSRSFRILAHLTGTEFMQDPDEEHLKKSSQVPRTEAPAPASSTPQEPWPGPTAPSPTSRPPWAVDPAFAERYAPDKTSTVLTRHSQPATPTPLQSRTSIVQAAAGGVPGGGSNNGKTPVCHQCHKVIRGRYLVALGHAYHPEEFVCSQCGKVLEEGGFFEEKGAIFCPPCYDVRYAPSCAKCKKKITGEIMHALKMTWHVHCFTCAACKTPIRNRAFYMEEGVPYCERDYEKMFGTKCHGCDFKIDAGDRFLEALGFSWHDTCFVCAICQINLEGKTFYSKKDRPLCKSHAFSHV

SEQ ID NO: 835316 - protein, 330 aa, Homo sapiens; identical to SEQ ID NO: 835315

SEQ ID NO: 835317 - protein, 165 aa, Homo sapiens
MREEQRRTREPRESTGRTRQRSPRPLRRRRRTPGGARHGQRHRERRRPARTAESRSARDSEQTSDENTPTGRRGGEERAHEQRPAQTKHRHKQEHKRRRRTEAMERAGLRPTEEAAHTRRTRTHTPRDEAEHTSPEQQTTTASKRQQTRTGEHTTATRAETHATD

SEQ ID NO: 835318 - protein, 165 aa, Homo sapiens; identical to SEQ ID NO: 835317

SEQ ID NO: 835319 - protein, 182 aa, Homo sapiens
FFLSRAENVYSMPKAAQTWQTAVPQGKEGGRPIPTRLPGARRRAAPWPGQAGAGIMDSFKVVLEGPAPWGFRLQGGKDFNVPLSISRLTPGGKAAQAGVAVGDWVLSIDGENAGSLTHIEAQNKIRACGERLSLGLSRAQPVQSKPQKVQSLRPRRGPSAVHLCTQRLPQQDGPALWGAPAR

SEQ ID NO: 835320 - protein, 182 aa, Homo sapiens; identical to SEQ ID NO: 835319

SEQ ID NO: 835321 - protein, 330 aa, Homo sapiens; identical to SEQ ID NO: 835315

SEQ ID NO: 835322 - protein, 309 aa, Homo sapiens
MENTEDWRPRPGTGQSRSFRILAHLTGTEFMQDPDEEHLKKSSQVPRTEAPAPASSTPQEPWPGPTAPSPTSRPPWAVDPAFAERYAPDKTSTVLTRHSQPATPTPLQSRTSIVQAAAGGVPGGGSNNGKTPVCHQCHKVIRGRYLVALGHAYHPEEFVCSQCGKVLEEGGFFEEKGAIFCPPCYDVRYAPSCAKCKKKITGEIMHALKMTWHVHCFTCAACKTPIRNRAFYMEEGVPYCERDYEKMFGTKCHGCDFKIDAGDRFLEALGFSWHDTCFVCAICQINLEGKTFYSKKDRPLCKSHAFSHV

SEQ ID NO: 835323 - protein, 309 aa, Homo sapiens; identical to SEQ ID NO: 835322

SEQ ID NO: 835324 - protein, 182 aa, Homo sapiens; identical to SEQ ID NO: 835319

SEQ ID NO: 835325 - protein, 182 aa, Homo sapiens; identical to SEQ ID NO: 835319

SEQ ID NO: 835326 - protein, 165 aa, Homo sapiens; identical to SEQ ID NO: 835317

SEQ ID NO: 835327 - protein, 244 aa, Homo sapiens
FFLSRAENVYSMPKAAQTWQTAVPQGKEGGRPIPTRLPGARRRAAPWPGQAGAGIMDSFKVVLEGPAPWGFRLQGGKDFNVPLSISRLTPGGKAAQAGVAVGDWVLSIDGENAGSLTHIEAQNKIRACGERLSLGLSRAQPVQSKPQKVQTPDKQQPLRPLVPDASKQRLMENTEDWRPRPGTGQSRSFRILAHLTGTEFMQDPDEEHLKKSREKYVLELQSPRYTRLRDWHHQRSAHVLNVQS

SEQ ID NO: 835328 - protein, 146 aa, Homo sapiens
FFLSRAENVYSMPKAAQTWQTAVPQGKEGGRPIPTRLPGARRRAAPWPGQAGAGIMDSFKVVLEGPAPWGFRLQGGKDFNVPLSISRLTPGGKAAQAGVAVGDWVLSIDGENAGSLTHIEAQNKIRPAAEWVQTPVTHSRSDRWSQ

SEQ ID NO: 835329 - protein, 330 aa, Homo sapiens; identical to SEQ ID NO: 835315

SEQ ID NO: 835330 - protein, 479 aa, Homo sapiens
FFLSRAENVYSMPKAAQTWQTAVPQGKEGGRPIPTRLPGARRRAAPWPGQAGAGIMDSFKVVLEGPAPWGFRLQGGKDFNVPLSISRLTPGGKAAQAGVAVGDWVLSIDGENAGSLTHIEAQNKIRACGERLSLGLSRAQPVQSKPQKVQTPDKQQPLRPLVPDASKQRLMENTEDWRPRPGTGQSRSFRILAHLTGTEFMQDPDEEHLKKSSQVPRTEAPAPASSTPQEPWPGPTAPSPTSRPPWAVDPAFAERYAPDKTSTVLTRHSQPATPTPLQSRTSIVQAAAGGVPGGGSNNGKTPVCHQCHKVIRGRYLVALGHAYHPEEFVCSQCGKVLEEGGFFEEKGAIFCPPCYDVRYAPSCAKCKKKITGEIMHALKMTWHVHCFTCAACKTPIRNRAFYMEEGVPYCERDYEKMFGTKCHGCDFKIDAGDRFLEALGFSWHDTCFVCAICQINLEGKTFYSKKDRPLCKSHAFSHV

SEQ ID NO: 835331 - protein, 330 aa, Homo sapiens; identical to SEQ ID NO: 835315

SEQ ID NO: 835332 - protein, 330 aa, Homo sapiens; identical to SEQ ID NO: 835315

SEQ ID NO: 835333 - protein, 542 aa, Homo sapiens
FFLSRAENVYSMPKAAQTWQTAVPQGKEGGRPIPTRLPGARRRAAPWPGQAGAGIMDSFKVVLEGPAPWGFRLQGGKDFNVPLSISRLTPGGKAAQAGVAVGDWVLSIDGENAGSLTHIEAQNKIRACGERLSLGLSRAQPVQSKPQKVQSAPLPPRPPPYPALPALPGCVSAQPPPPPRTLRGTPLHPASPSTRRPGPLGRPRPLTAPRSRMAPDKQQPLRPLVPDASKQRLMENTEDWRPRPGTGQSRSFRILAHLTGTEFMQDPDEEHLKKSSQVPRTEAPAPASSTPQEPWPGPTAPSPTSRPPWAVDPAFAERYAPDKTSTVLTRHSQPATPTPLQSRTSIVQAAAGGVPGGGSNNGKTPVCHQCHKVIRGRYLVALGHAYHPEEFVCSQCGKVLEEGGFFEEKGAIFCPPCYDVRYAPSCAKCKKKITGEIMHALKMTWHVHCFTCAACKTPIRNRAFYMEEGVPYCERDYEKMFGTKCHGCDFKIDAGDRFLEALGFSWHDTCFVCAICQINLEGKTFYSKKDRPLCKSHAFSHV

SEQ ID NO: 835334 - protein, 182 aa, Homo sapiens; identical to SEQ ID NO: 835319

SEQ ID NO: 835335 - protein, 182 aa, Homo sapiens; identical to SEQ ID NO: 835319

SEQ ID NO: 835336 - protein, 165 aa, Homo sapiens; identical to SEQ ID NO: 835317

SEQ ID NO: 835337 - protein, 165 aa, Homo sapiens; identical to SEQ ID NO: 835317

SEQ ID NO: 835338 - protein, 59 aa, Homo sapiens
TEDWRPRPGTGQSRSFRILAHLTGTEFSKCQPRAGGTFLAPSPGVIPDPVSFLVNACLC

SEQ ID NO: 835339 - protein, 116 aa, Homo sapiens
RLPSRLPGAKRDGDGGSRPSPRGRAGMRTPTRPVQALRLPEAEGESGPAWAAAPEEAEVARQEEGKELLVVGRAAAARGEPAATNEELFHLLQDFQLQQAGSHGELLLKRDPFGGI

SEQ ID NO: 835340 - protein, 147 aa, Homo sapiens
RLPSRLPGAKRDGDGGSRPSPRGRAGMRTPTRPVQALRLPEAEGESGPAWAAAPEEAEVARQEEGKELLVVGRAAAARGEPAATNEELFHLLQDFQLQQAVSILEALLCQSISHLSVTATVFSWRTVIEERSIWWDIIKKNESKENL

SEQ ID NO: 835341 - protein, 116 aa, Homo sapiens; identical to SEQ ID NO: 835339

SEQ ID NO: 835342 - protein, 116 aa, Homo sapiens; identical to SEQ ID NO: 835339

SEQ ID NO: 835343 - protein, 156 aa, Homo sapiens
RLPSRLPGAKRDGDGGSRPSPRGRAGMRTPTRPVQALRLPEAEGESGPAWAAAPEEAEVARQEEGKELLVVGRAAAARGEPAATNEELFHLLQDFQLQQADAVPLPGTPSPYLPGKHLFTPLDNSVITSWRDTFPDFPRRFPSPCSAGTPLILLPL

SEQ ID NO: 835344 - protein, 116 aa, Homo sapiens; identical to SEQ ID NO: 835339

SEQ ID NO: 835345 - protein, 107 aa, Homo sapiens
MCFQIDRKRNPNIPKPRRILRSAWGSNPYFRGSYSYTQVGSSGADVEKLAKPLPYTESSKTAPMQVLFSGEATHRKYYSTTHGALLSGQREAARLIEMYRDLFQQGT

SEQ ID NO: 835346 - protein, 132 aa, Homo sapiens
KVDSQGFRWALVMEKCDDEAVAEICTEMLRQFTGNPNIPKPRRILRSAWGSNPYFRGSYSYTQVGSSGADVEKLAKPLPYTESSKTAPMQVLFSGEATHRKYYSTTHGALLSGQREAARLIEMYRDLFQQGT

SEQ ID NO: 835347 - protein, 126 aa, Homo sapiens
GSSSLRLQGLLASRLPAGRARGGARRVPAQRRSGGPGRSGVGRGREAERGPTQAAAAGSGPYGPGGGWRRKPGGWRRRRDGGGRDRSAARRRLTSPAQQGKVRCARSPAPGPGSQPPPGAGRGCGR

SEQ ID NO: 835348 - protein, 555 aa, Homo sapiens
MQSCESSGDSADDPLSRGLRRRGQPRVVVIGAGLAGLAAAKALLEQGFTDVTVLEASSHIGGRVQSVKLGHATFELGATWIHGSHGNPIYHLAEANGLLEETTDGERSVGRISLYSKNGVACYLTNHGRRIPKDVVEEFSDLYNEVYNLTQEFFRHDKPVNAESQNSVGVFTREEVRNRIRNDPDDPEATKRLKLAMIQQYLKVESCESSSHSMDEVSLSAFGEWTEIPGAHHIIPSGFMRVVELLAEGIPAHVIQLGKPVRCIHWDQASARPRGPEIEPRGEGDHNHDTGEGGQGGEEPRGGRWDEDEQWSVVVECEDCELIPADHVIVTVSLGVLKRQYTSFFRPGLPTEKVAAIHRLGIGTTDKIFLEFEEPFWGPECNSLQFVWEDEAESHTLTYPPELWYRKICGFDVLYPPERYGHVLSGWICGEEALVMEKCDDEAVAEICTEMLRQFTGNPNIPKPRRILRSAWGSNPYFRGSYSYTQVGSSGADVEKLAKPLPYTESSKTAPMQVLFSGEATHRKYYSTTHGALLSGQREAARLIEMYRDLFQQGT

SEQ ID NO: 835349 - protein, 585 aa, Homo sapiens
MQSCESSGDSADDPLSRGLRRRGQPRVVVIGAGLAGLAAAKALLEQGFTDVTVLEASSHIGGRVQSVKLGHATFELGATWIHGSHGNPIYHLAEANGLLEETTDGERSVGRISLYSKNGVACYLTNHGRRIPKDVVEEFSDLYNEVYNLTQEFFRHDKPVNAESQNSVGVFTREEVRNRIRNDPDDPEATKRLKLAMIQQYLKVESCESSSHSMDEVSLSAFGEWTEIPGAHHIIPSGFMRVVELLAEGIPAHVIQLGKPVRCIHWDQASARPRGPEIEPRGEGDHNHDTGEGGQGGEEPRGGRWDEDEQWSVVVECEDCELIPADHVIVTVSLGVLKRQYTSFFRPGLPTEKVAAIHRLGIGTTDKIFLEFEEPFWGPECNSLQFVWEDEAESHTLTYPPELWYRKICGFDVLYPPERYGHVLSGWICGEEALVMEKCDDEAVAEICTEMLRQFTGNPNIPKPRRILRSAWGSNPYFRGSYSYTQVGSSGADVEKLAKPLPYTESSKTAHGSSTKQQPGHLFSSKCPEQPLDANRGAVKPMQVLFSGEATHRKYYSTTHGALLSGQREAARLIEMYRDLFQQGT

SEQ ID NO: 835350 - protein, 555 aa, Homo sapiens; identical to SEQ ID NO: 835348

SEQ ID NO: 835351 - protein, 536 aa, Homo sapiens
MQSCESSGDSADDPLSRGLRRRGQPRVVVIGAGLAGLAAAKALLEQGFTDVTVLEASSHIGGRVQSVKLGHATFELGATWIHGSHGNPIYHLAEANGLLEETTDGERSVGRISLYSKNGVACYLTNHGRRIPKDVVEEFSDLYNEVYNLTQEFFRHDKPVNAESQNSVGVFTREEVRNRIRNDPDDPEATKRLKLAMIQQYLKVESCESSSHSMDEVSLSAFGEWTEIPGAHHIIPSGFMRVVELLAEGIPAHVIQLGKPVRCIHWDQASARPRGPEIEPRGEGDHNHDTGEGGQGGEEPRGGRWDEDEQWSVVVECEDCELIPADHVIVTVSLGVLKRQYTSFFRPGLPTEKVAAIHRLGIGTTDKIFLEFEEPFWGPECNSLQFVWEDEAESHTLTYPPELWYRKICGFDVLYPPERYGHVLSGWICGEEALVMEKCDDEAVAEICTEMLRQFTGNPNIPKPRRILRSAWGSNPYFRGSYSYTQVGSSGADVEKLAKPLPYTESSKTAHRGWWNSTCGGWPHRKTALAWALSLS

SEQ ID NO: 835352 - protein, 313 aa, Homo sapiens
MQSCESSGDSADDPLSRGLRRRGQPRVVVIGAGLAGLAAAKALLEQGFTDVTVLEASSHIGGRVQSVKLGHATFELGATWIHGSHGNPIYHLAEANGLLEETTDGERSVGRISLYSKNGVACYLTNHGRRIPKDVVEEFSDLYNEVYNLTQEFFRHDKPVNAESQNSVGVFTREEVRNRIRNDPDDPEATKRLKLAMIQQYLKVESCESSSHSMDEVSLSAFGEWTEIPGAHHIIPSGFMRVVELLAEGIPAHVIQLGKPVRCIHWDQASARPRGPEIEPRGEGDHNHGALLSGQREAARLIEMYRDLFQQGT

SEQ ID NO: 835353 - protein, 121 aa, Homo sapiens
MCFQIDRKSKVERFAGGQQEALRNPNIPKPRRILRSAWGSNPYFRGSYSYTQVGSSGADVEKLAKPLPYTESSKTAPMQVLFSGEATHRKYYSTTHGALLSGQREAARLIEMYRDLFQQGT

SEQ ID NO: 835354 - protein, 555 aa, Homo sapiens; identical to SEQ ID NO: 835348

SEQ ID NO: 835355 - protein, 555 aa, Homo sapiens; identical to SEQ ID NO: 835348

SEQ ID NO: 835356 - protein, 502 aa, Homo sapiens
MQSCESSGDSADDPLSRGLRRRGQPRVVVIGAGLAGLAAAKALLEQGFTDVTVLEASSHIGGRVQSVKLGHATFELGATWIHGSHGNPIYHLAEANGLLEETTDGERSVGRISLYSKNGVACYLTNHGRRIPKDVVEEFSDLYNEVYNLTQEFFRHDKPVNAESQNSVGVFTREEVRNRIRNDPDDPEATKRLKLAMIQQYLKVESCESSSHSMDEVSLSAFGEWTEIPGAHHIIPSGFMRVVELLAEGIPAHVIQLGKPVRCIHWDQASARPRGPEIEPRGVLKRQYTSFFRPGLPTEKVAAIHRLGIGTTDKIFLEFEEPFWGPECNSLQFVWEDEAESHTLTYPPELWYRKICGFDVLYPPERYGHVLSGWICGEEALVMEKCDDEAVAEICTEMLRQFTGNPNIPKPRRILRSAWGSNPYFRGSYSYTQVGSSGADVEKLAKPLPYTESSKTAPMQVLFSGEATHRKYYSTTHGALLSGQREAARLIEMYRDLFQQGT

SEQ ID NO: 835357 - protein, 555 aa, Homo sapiens; identical to SEQ ID NO: 835348

SEQ ID NO: 835358 - protein, 531 aa, Homo sapiens
MQSCESSGDSADDPLSRGLRRRGQPRVVVIGAGLAGLAAAKALLEQGFTDVTVLEASSHIGGRVQSVKLGHATFELGATWIHGSHGNPIYHLAEANGLLEETTDGERSVGRISLYSKNGVACYLTNHGRRIPKDVVEEFSDLYNEVYNLTQEFFRHDKPVNAESQNSVGVFTREEVRNRIRNDPDDPEATKRLKLAMIQQYLKVESCESSSHSMDEVSLSAFGEWTEIPGAHHIIPSGFMRVVELLAEGIPAHVIQLGKPVRCIHWDQASARPRGPEIEPRGEGDHNHDTGEGGQGGEEPRGGRWDEDEQWSVVVECEDCELIPADHVIVTVSLGVLKRQYTSFFRPGLPTEKVAAIHRLGIGTTDKIFLEFEEPFWGPECNSLQFVWEDEAESHTLTYPPELWYRKICGFDVLYPPERYGHVLSGWICGEEALVMEKCDDEAVAEICTEMLRQFTGNPNIPKPRRILRSAWGSNPYFRGSYSYTQPMQVLFSGEATHRKYYSTTHGALLSGQREAARLIEMYRDLFQQGT

SEQ ID NO: 835359 - protein, 476 aa, Homo sapiens
MQSCESSGDSADDPLSRGLRRRGQPRVVVIGAGLAGLAAAKALLEQGFTDVTVLEASSHIGGRVQSVKLGHATFELGATWIHGSHGNPIYHLAEANGLLEETTDGERSVGRISLYSKNGVACYLTNHGRRIPKDVVEEFSDLYNEVYNLTQEFFRHDKPVNAESQNSVGVFTREEVRNRIRNDPDDPEATKRLKLAMIQQYLKVESCESSSHSMDEVSLSAFGEWTEIPGAHHIIPSGFMRVVELLAEGIPAHVIQLGKPVRCIHWDQASARPRGPEIEPRGEGDHNHDTGEGGQGGEEPRGGRWDEDEQWSVVVECEDCELIPADHVIVTVSLGVLKRQYTSFFRPGLPTEKVAAIHRLGIGTTDKIFLEFEEPFWGPECNSLQFVWEDEAESHTLTYPPELWYRKICGFDVLYPPERYGHVLSGWICGEEALVMEKCDDEAVAEICTEMLRQFTEVRHVPHDPLPPPCFFLTCP

SEQ ID NO: 835360 - protein, 132 aa, Homo sapiens; identical to SEQ ID NO: 835346

SEQ ID NO: 835361 - protein, 79 aa, Homo sapiens
WELPEYLTLGTAGVAPMALLSADGLHSFPSEAFLEGVLSSKALWSRLRTKGNQLNRAFHVTTKNDLAQTSRQASVEPGK

SEQ ID NO: 835362 - protein, 241 aa, Homo sapiens
PPHTTTTHHIAGETRLMAEGTLDYLHSEKNVVYRDLKLENLMLDKDGHIKITDFGLCKEGIKDGATMKTFCGTPEYLAPEVLEDNDYGRAVDWWGLGVVMYEMMCGRLPFYNQDHEKLFELILMEEIRFPRTLGPEAKSLLSGLLKKDPKQRLGGGSEDAKEIMQHRFFAGIVWQHVYEKKLSPPFKPQVTSETDTRYFDEEFTAQMITITPPDQDDSMECVDSERRPHFPQFSYSASGTA

SEQ ID NO: 835363 - protein, 167 aa, Homo sapiens
HLPPVQVLEDNDYGRAVDWWGLGVVMYEMMCGRLPFYNQDHEKLFELILMEEIRFPRTLGPEAKSLLSGLLKKDPKQRLGGGSEDAKEIMQHRFFAGIVWQHVYEKKRCGCSPHIHAHACSPHIHTHACTWHARQISHTLTLTSLLQSWYKEGLAAPTSAPGAQRLW

SEQ ID NO: 835364 - protein, 117 aa, Homo sapiens
ARGAAEHRALGTGHRAAAAREARPRAAPPPAAASSPAPPSAGPRGCGAAGAGGRGPARPALAPGRGGPRLWPGQLGSGSASLRGARERRGSLGHHERRGYCEGGLAAQTRGWFMLNV

SEQ ID NO: 835365 - protein, 480 aa, Homo sapiens [sequence omitted]

SEQ ID NO: 835366 - protein, 480 aa, Homo sapiens [sequence omitted]

SEQ ID NO: 835367 - protein, 471 aa, Homo sapiens
CSRGSSREYIKTWRPRYFLLKNDGTFIGYKERPQDVDQREAPLNNFSVAQCQLMKTERPRPNTFIIRCLQWTTVIERTFHVETPEEREEWTTAIQTVADGLKKQEEEEMDFRSGSPSDNSGAEEMEVSLAKPKHRVTMNEFEYLKLLGKGTFGKVILVKEKATGRYYAMKILKKEVIVAKDEVAHTLTENRVLQNSRHPFLTALKYSFQTHDRLCFVMEYANGGELFFHLSRERVFSEDRARFYGAEIVSALDYLHSEKNVVYRDLKLENLMLDKDGHIKITDFGLCKEGIKDGATMKTFCGTPEYLAPEVLEDNDYGRAVDWWGLGVVMYEMMCGRLPFYNQDHEKLFELILMEEIRFPRTLGPEAKSLLSGLLKKDPKQRLGGGSEDAKEIMQHRFFAGIVWQHVYEKKLSPPFKPQVTSETDTRYFDEEFTAQMITITPPDQDDSMECVDSERRPHFPQFSYSASGTA

SEQ ID NO: 835368 - protein, 451 aa, Homo sapiens
ASTGRGLIGRGRPQDVDQREAPLNNFSVAQCQLMKTERPRPNTFIIRCLQWTTVIERTFHVETPEEREEWTTAIQTVADGLKKQEEEEMDFRSGSPSDNSGAEEMEVSLAKPKHRVTMNEFEYLKLLGKGTFGKVILVKEKATGRYYAMKILKKEVIVAKDEVAHTLTENRVLQNSRHPFLTALKYSFQTHDRLCFVMEYANGGELFFHLSRERVFSEDRARFYGAEIVSALDYLHSEKNVVYRDLKLENLMLDKDGHIKITDFGLCKEGIKDGATMKTFCGTPEYLAPEVLEDNDYGRAVDWWGLGVVMYEMMCGRLPFYNQDHEKLFELILMEEIRFPRTLGPEAKSLLSGLLKKDPKQRLGGGSEDAKEIMQHRFFAGIVWQHVYEKKLSPPFKPQVTSETDTRYFDEEFTAQMITITPPDQDDSMECVDSERRPHFPQFSYSASGTA

SEQ ID NO: 835369 - protein, 480 aa, Homo sapiens [sequence omitted]

SEQ ID NO: 835370 - protein, 480 aa, Homo sapiens [sequence omitted]

SEQ ID NO: 835371 - protein, 505 aa, Homo sapiens
MSDVAIVKEGWLHKRGEYIKTWRPRYFLLKNDGTFIGYKERPQDVDQREAPLNNFSVAQCQLMKTERPRPNTFIIRCLQWTTVIERTFHVETPEEREEWTTAIQTVADGLKKQEEEEMDFRSGSPSDNSGAEEMEVSLAKPKHRVTMNEFEYLKLLGKGTFGKVILVKEKATGRYYAMKILKKEVIVAKDEVAHTLTENRVLQNSRHPFLTALKYSFQTHDRLCFVMEYANGGELFFHLSRERVFSEDRARFYGAEIVSALDYLHSEKNVVYRDLKVRWRAGRGAGPWGPGGTDLRPPFPKLENLMLDKDGHIKITDFGLCKEGIKDGATMKTFCGTPEYLAPEVLEDNDYGRAVDWWGLGVVMYEMMCGRLPFYNQDHEKLFELILMEEIRFPRTLGPEAKSLLSGLLKKDPKQRLGGGSEDAKEIMQHRFFAGIVWQHVYEKKLSPPFKPQVTSETDTRYFDEEFTAQMITITPPDQDDSMECVDSERRPHFPQFSYSASGTA

SEQ ID NO: 835372 - protein, 422 aa, Homo sapiens
MSDVAIVKEGWLHKRGEYIKTWRPRYFLLKNDGTFIGYKERPQDVDQREAPLNNFSVAQCQLMKTERPRPNTFIIRCLQWTTVIERTFHVETPEEREEWTTAIQTVADGLKKQEEEEMDFRSGSPSDNSGAEEMEVSLAKPKHRVTMNEFEYLKLLGKGTFGKVILVKEKATGRYYAMKILKKEVIVAKDEVAHTLTENRVLQNSRHPFLTALKYSFQTHDRLCFVMEYANGGELFFHLSRERVFSEDRARFYGAEIVSALDYLHSEKNVVYRDLKLENLMLDKDGHIKITDFGLCKEGIKDGATMKTFCGTPEYLAPEVLEDNDYGRAVDWWGLGVVMYEMMCGRLPFYNQDHEKLFELILMEEIRFPRTLGPEAKSLLSGLLKKDPKQRLGGGSEDAKEIMQHRFFAGIVWQHVYEKKGP

SEQ ID NO: 835373 - protein, 293 aa, Homo sapiens
DFPGPRALWWLVPSLCNAETRSEKPQPCRPWGQRPEPRLCLRLRLPQLFFHLSRERVFSEDRARFYGAEIVSALDYLHSEKNVVYRDLKLENLMLDKDGHIKITDFGLCKEGIKDGATMKTFCGTPEYLAPEVLEDNDYGRAVDWWGLGVVMYEMMCGRLPFYNQDHEKLFELILMEEIRFPRTLGPEAKSLLSGLLKKDPKQRLGGGSEDAKEIMQHRFFAGIVWQHVYEKKLSPPFKPQVTSETDTRYFDEEFTAQMITITPPDQDDSMECVDSERRPHFPQFSYSASGTA

SEQ ID NO: 835374 - protein, 480 aa, Homo sapiens [sequence omitted]

SEQ ID NO: 835375 - protein, 228 aa, Homo sapiens
MAHGSHSLFSPVRDRQPLKLAITTSCSPPPGRGSRVIRTSRQLCKEGIKDGATMKTFCGTPEYLAPEVLEDNDYGRAVDWWGLGVVMYEMMCGRLPFYNQDHEKLFELILMEEIRFPRTLGPEAKSLLSGLLKKDPKQRLGGGSEDAKEIMQHRFFAGIVWQHVYEKKLSPPFKPQVTSETDTRYFDEEFTAQMITITPPDQDDSMECVDSERRPHFPQFSYSASGTA

SEQ ID NO: 835376 - protein, 109 aa, Homo sapiens
MSDVAIVKEGWLHKRGEYIKTWRPRYFLLKNDGTFIGYKERPQDVDQREAPLNNFSVAQCQLMKTERPRPNTFIIRCLQWTTVIERTFHVETPEEREEWTTAIQSHVGD

SEQ ID NO: 835377 - protein, 466 aa, Homo sapiens
MSDVAIVKEGWLHKRGEYIKTWRPRYFLLKNDGTFIGYKERPQDVDQREAPLNNFSVAQCQLMKTERPRPNTFIIRCLQWTTVIERTFHVETPEEREEWTTAIQTVADGLKKQEEEEMDFRSGSPSDNSGAEEMEVSLAKPKHRVTMNEFEYLKLLGKGTFGKVILVKEKATGRYYAMKILKKEVIVAKDEVAHTLTENRVLQNSRHPFLTALKYSFQTHDRLCFVMEYANGGELFFHLSRERVFSEDRARFYGAEIVSALDYLHSEKNVVYRDLKLENLMLDKDGHIKITDFGLCKEGIKDGATMKTFCGTPEYLAPEVLEDNDYGRAVDWWGLGVVMYEMMCGRLPFYNQDHEKLFELILMEEIRFPRTLGPEAKSLLSGLLKKDPKQRLGGGSEDAKEIMQHRFFAGIVWQHVYEKKSPGYGWGGGGCGAGSGCGGGGMWLLWSRWCRMLHDWLLRGLYTTQL

SEQ ID NO: 835378 - protein, 423 aa, Homo sapiens
MSDVAIVKEGWLHKRGEYIKTWRPRYFLLKNDGTFIGYKERPQDVDQREAPLNNFSVAQCQLMKTERPRPNTFIIRCLQWTTVIERTFHVETPEEREEWTTAIQTVADGLKKQEEEEMDFRSGSPSDNSGAEEMEVSLAKPKHRVTMNEFEYLKLLGKGTFGKVILVKEKATGRYYAMKILKKEVIVAKDEVAHTLTENRVLQNSRHPFLTALKYSFQTHDRLCFVMEYANGGELFFHLSRERVFSEDRARFYGAEIVSALDYLHSEKNVVYRDLKLENLMLDKDGHIKITDFGLCKEGIKDGATMKTFCGTPEYLAPEVLEDNDYGRAVDWWGLGVVMYEMMCGRLPFYNQDHEKLFELILMEEIRFPRTLGPEAKSLLSGLLKKDPKQRLGGGSEDAKEIMQHRFFAGIVWQHVYEKKYRR

SEQ ID NO: 835379 - protein, 139 aa, Homo sapiens [sequence omitted]

SEQ ID NO: 835380 - protein, 331 aa, Homo sapiens
MSDVAIVKEGWLHKRGEYIKTWRPRYFLLKNDGTFIGYKERPQDVDQREAPLNNFSVAQCQLMKTERPRPNTFIIRCLQWTTVIERTFHVETPEEREEWTTAIQTVADGLKKQEEEEMDFRSGSPSDNSGAEEMEVSLAKPKHRVTMNEFEYLKLLGKGTFGKVILVKEKATGRYYAMKILKKEVIVAKDEVAHTLTENRVLQNSRHPFLTALKYSFQTHDRLCFVMEYANGGELFFHLSRERVFSEDRARFYGAEIVSALDYLHSEKNVVYRDLKLENLMLDKDGHIKITDFGSGRGHENFGATESGPRFGTRSSGGRGRGGKKIGPFNK

SEQ ID NO: 835381 - protein, 297 aa, Homo sapiens
MSDVAIVKEGWLHKRGEYIKTWRPRYFLLKNDGTFIGYKERPQDVDQREAPLNNFSVAQCQLMKTERPRPNTFIIRCLQWTTVIERTFHVETPEEREEWTTAIQTVADGLKKQEEEEMDFRSGSPSDNSGAEEMEVSLAKPKHRVTMNEFEYLKLLGKGTFGKVILVKEKATGRYYAMKILKKEVIVAKDEVAHTLTENRVLQNSRHPFLTALKYSFQTHDRLCFVMEYANGGELFFHLSRERVFSEDRARFYGAEIVSALDYLHSEKNVVYRDLKLENLMLDKDDHTTTKNSGRGR

SEQ ID NO: 835382 - protein, 213 aa, Homo sapiens
MSDVAIVKEGWLHKRGEYIKTWRPRYFLLKNDGTFIGYKERPQDVDQREAPLNNFSVAQCQLMKTERPRPNTFIIRCLQWTTVIERTFHVETPEEREEWTNTSKVTVVRVTAWYLDEEFIGHDGYYQFEQPTLELNKWTAIGRVWGQERRQATYYPLLVLRYSGRTASDRSLKWPDCVETLVWAVNRITRLVKEGNCGGIGVRRQLRVAPIGG

SEQ ID NO: 835383 - protein, 480 aa, Homo sapiens [sequence omitted]

SEQ ID NO: 835384 - protein, 200 aa, Homo sapiens
MHAEARCEKDDWSSLCKEGIKDGATMKTFCGTPEYLAPEVLEDNDYGRAVDWWGLGVVMYEMMCGRLPFYNQDHEKLFELILMEEIRFPRTLGPEAKSLLSGLLKKDPKQRLGGGSEDAKEIMQHRFFAGIVWQHVYEKKLSPPFKPQVTSETDTRYFDEEFTAQMITITPPDQDDSMECVDSERRPHFPQFSYSASGTA

SEQ ID NO: 835385 - protein, 480 aa, Homo sapiens [sequence omitted]

SEQ ID NO: 835386 - protein, 480 aa, Homo sapiens [sequence omitted]

SEQ ID NO: 835387 - protein, 600 aa, Homo sapiens
APVAIAGARAAAGACWGLAGLGLPPPGRLCRLAQTSSQPPVHGTPSPASSWPSPFSDTARGGSSERGAVVGRVCLPVDPGPFLSLALRNSSRTAPAPWDSGIPGTSVLAHPVPAWLPGEGLTGRVCVALTTRTSVGEYIKTWRPRYFLLKNDGTFIGYKERPQDVDQREAPLNNFSVAQCQLMKTERPRPNTFIIRCLQWTTVIERTFHVETPEEREEWTTAIQTVADGLKKQEEEEMDFRSGSPSDNSGAEEMEVSLAKPKHRVTMNEFEYLKLLGKGTFGKVILVKEKATGRYYAMKILKKEVIVAKDEVAHTLTENRVLQNSRHPFLTALKYSFQTHDRLCFVMEYANGGELFFHLSRERVFSEDRARFYGAEIVSALDYLHSEKNVVYRDLKLENLMLDKDGHIKITDFGLCKEGIKDGATMKTFCGTPEYLAPEVLEDNDYGRAVDWWGLGVVMYEMMCGRLPFYNQDHEKLFELILMEEIRFPRTLGPEAKSLLSGLLKKDPKQRLGGGSEDAKEIMQHRFFAGIVWQHVYEKKLSPPFKPQVTSETDTRYFDEEFTAQMITITPPDQDDSMECVDSERRPHFPQFSYSASGTA

SEQ ID NO: 835388 - protein, 480 aa, Homo sapiens [sequence omitted]

SEQ ID NO: 835389 - protein, 414 aa, Homo sapiens
TRGSRTRGIRCLQWTTVIERTFHVETPEEREEWTTAIQTVADGLKKQEEEEMDFRSGSPSDNSGAEEMEVSLAKPKHRVTMNEFEYLKLLGKGTFGKVILVKEKATGRYYAMKILKKEVIVAKDEVAHTLTENRVLQNSRHPFLTALKYSFQTHDRLCFVMEYANGGELFFHLSRERVFSEDRARFYGAEIVSALDYLHSEKNVVYRDLKLENLMLDKDGHIKITDFGLCKEGIKDGATMKTFCGTPEYLAPEVLEDNDYGRAVDWWGLGVVMYEMMCGRLPFYNQDHEKLFELILMEEIRFPRTLGPEAKSLLSGLLKKDPKQRLGGGSEDAKEIMQHRFFAGIVWQHVYEKKLSPPFKPQVTSETDTRYFDEEFTAQMITITPPDQDDSMECVDSERRPHFPQFSYSASGTA

SEQ ID NO: 835390 - protein, 480 aa, Homo sapiens [sequence omitted]

SEQ ID NO: 835391 - protein, 292 aa, Homo sapiens
MSPGFGYRRPRRSIENRLLQISRALKYSFQTHDRLCFVMEYANGGELFFHLSRERVFSEDRARFYGAEIVSALDYLHSEKNVVYRDLKLENLMLDKDGHIKITDFGLCKEGIKDGATMKTFCGTPEYLAPEVLEDNDYGRAVDWWGLGVVMYEMMCGRLPFYNQDHEKLFELILMEEIRFPRTLGPEAKSLLSGLLKKDPKQRLGGGSEDAKEIMQHRFFAGIVWQHVYEKKLSPPFKPQVTSETDTRYFDEEFTAQMITITPPDQDDSMECVDSERRPHFPQFSYSASGTA

SEQ ID NO: 835392 - protein, 484 aa, Homo sapiens
MSDVAIVKEGWLHKRGEYIKTWRPRYFLLKNDGTFIGYKERPQDVDQREAPLNNFSVAQCQLMKTERPRPNTFIIRCLQWTTVIERTFHVETPEEREEWTTAIQTVADGLKKQEEEEMDFRSGSPSDNSGAEEMEVSLAKPKHRVTMNEFEYLKLLGKGTFGKVILVKEKATGRYYAMKILKKEVIVAKDEVAHTLTENRVLQNSRHPFLTALKYSFQTHDRLCFVMEYANGGELFFHLSRERVFSEDRARFYGAEIVSALDYLHSEKNVVYRDLKLENLMLDKDGHIKITDFGLCKEGIKDGATMKTFCGTPEYLAPEVLEDNDYGRAVDWWGLGVVMYEMMCGRLPFYNQDHEKLFELILMEEIRFPRTLGPEAKSLLSGLLKKDPKQRLGGGSEDAKEIMQHRFFAGIVWQHVYEKKLSPPFKPQVTSETDTRYFDEEFTAQMITITPPDQVLLLGQRHGLRRRWTALDDSLEGWRGGLVP

SEQ ID NO: 835393 - protein, 243 aa, Homo sapiens
MMYEAIPVLFRHRLRSALIIVVALDYLHSEKNVVYRDLKLENLMLDKDGHIKITDFGLCKEGIKDGATMKTFCGTPEYLAPEVLEDNDYGRAVDWWGLGVVMYEMMCGRLPFYNQDHEKLFELILMEEIRFPRTLGPEAKSLLSGLLKKDPKQRLGGGSEDAKEIMQHRFFAGIVWQHVYEKKLSPPFKPQVTSETDTRYFDEEFTAQMITITPPDQDDSMECVDSERRPHFPQFSYSASGTA

SEQ ID NO: 835394 - protein, 480 aa, Homo sapiens [sequence omitted]

SEQ ID NO: 835395 - protein, 480 aa, Homo sapiens [sequence omitted]

SEQ ID NO: 835396 - protein, 467 aa, Homo sapiens
MSDVAIVKEGWLHKRGEYIKTWRPRYFLLKNDGTFIGYKERPQDVDQREAPLNNFSVAQCQLMKTERPRPNTFIIRCLQWTTVIERTFHVETPEEREEWTTAIQTVADGLKKQEEEEMDFRSGSPSDNSGAEEMEVSLAKPKHRVTMNEFEYLKLLGKGTFGKVILVKEKATGRYYAMKILKKEVIVAKDEVAHTLTENRVLQNSRHPFLTALKYSFQTHDRLCFVMEYANGGELFFHLSRERVFSEDRARFYGAEIVSALDYLHSEKNVVYRDLKLENLMLDKDGHIKITDFGLCKEGIKDGATMKTFCGTPEYLAPEVLEDNDYGRAVDWWGLGVVMYEMMCGRLPFYNQDHEKLFELILMEEIRFPRTLGPEAKSLLSGLLKKDPKQRLGGGSEDAKEIMQHRFFAGIVWQHVYEKKLSPPFKPQVTSETDTRYFDEEFTAQMITITPPDQVLGDCPTGSLPLR

SEQ ID NO: 835397 - protein, 422 aa, Homo sapiens; identical to SEQ ID NO: 835372

SEQ ID NO: 835398 - protein, 147 aa, Homo sapiens [sequence omitted]

SEQ ID NO: 835399 - protein, 285 aa, Homo sapiens
MSDVAIVKEGWLHKRGEYIKTWRPRYFLLKNDGTFIGYKERPQDVDQREAPLNNFSVAQCQLMKTERPRPNTFIIRCLQWTTVIERTFHVETPEEREEWTTAIQTVADGLKKQEEEEMDFRSGSPSDNSGAEEMEVSLAKPKHRVAMWHWGAGQVLPMCPLTLSASRPGLSVTSYLSSLWGPGPQFNLVAPDATSLWYAGQHPLLGVAGTQQPPSTKAVSLRTSSEAGPLGWDQGWGMGQGLPSGTEEQGLNLLLCIMLFKCILGVFNLCDRKALPLPLLCHSSW

SEQ ID NO: 835400 - protein, 335 aa, Homo sapiens
MSDVAIVKEGWLHKRGEYIKTWRPRYFLLKNDGTFIGYKERPQDVDQREAPLNNFSVAQCQLMKTERPRPNTFIIRCLQWTTVIERTFHVETPEEREEWTTAIQTVADGLKKQEEEEMDFRSGSPSDNSGAEEMEVSLAKPKHRVTMNEFEYLKLLGKGTFGKVILVKEKATGRYYAMKILKKEVIVAKDEVAHTLTENRVLQNSRHPFLTALKYSFQTHDRLCFVMEYANGGELFFHLSRERVFSEDRARFYGAEIVSALDYLHSEKNVVYRDLKRRTHAGQAAFNPTRLAGGRTGPEIGTNRPVRNRHTGRVQNGPKQKDREPNDLKPDHWHP

SEQ ID NO: 835401 - protein, 118 aa, Homo sapiens
MVFISRVHLREATLSSRAQMERRFCAVGSTLPRSGVGKKTILRVLIYFIQFVLRVWPQPSEQSDSRREMLRTSAAMRNVALGGRAGPAHVSPHSVSQPPWAVCHQLSVISLGPWASVQ

SEQ ID NO: 835402 - protein, 1191 aa, Homo sapiens
MPAPEQASLVEEGQPQTRQEAASTGPGMEPETTATTILASVKEQELQFQRLTRELEVERQIVASQLERCRLGAESPSIASTSSTEKSFPWRSTDVPNTGVSKPRVSDAVQPNNYLIRTEPEQGTLYSPEQTSLHESEGSLGNSRSSTQMNSYSDSGYQEAGSFHNSQNVSKADNRQQHSFIGSTNNHVVRNSRAEGQTLVQPSVANRAMRRVSSVPSRAQSPSYVISTGVSPSRGSLRTSLGSGFGSPSVTDPRPLNPSAYSSTTLPAARAASPYSQRPASPTAIRRIGSVTSRQTSNPNGPTPQYQTTARVGSPLTLTDAQTRVASPSQGQVGSSSPKRSGMTAVPQHLGPSLQRTVHDMEQFGQQQYDIYERMVPPRPDSLTGLRSSYASQHSQLGQDLRSAVSPDLHITPIYEGRTYYSPVYRSPNHGTVELQGSQTALYRTGSGIGNLQRTSSQRSTLTYQRNNYALNTTATYAEPYRPIQYRVQECNYNRLQHAVPADDGTTRSPSIDSIQKDPREFAWRDPELPEVIHMLQHQFPSVQANAAAYLQHLCFGDNKVKMEVCRLGGIKHLVDLLDHRVLEVQKNACGALRNLVFGKSTDENKIAMKNVGGIPALLRLLRKSIDAEVRELVTGVLWNLSSCDAVKMTIIRDALSTLTNTVIVPHSGWNNSSFDDDHKIKFQTSLVLRNTTGCLRNLSSAGEEARKQMRSCEGLVDSLLYVIHTCVNTSDYDSKTVENCVCTLRNLSYRLELEVPQARLLGLNELDDLLGKESPSKDSEPSCWGKKKKKKKRTPQEDQWDGVGPIPGLSKSPKGVEMLWHPSVVKPYLTLLAESSNPATLEGSAGSLQNLSAGNWKFAAYIRAAVRKEKGLPILVELLRMDNDRVVSSVATALRNMALDVRNKELIGKYAMRDLVNRLPGGNGPSVLSDETMAAICCALHEVTSKNMENAKALADSGGIEKLVNITKGRGDRSSLKVVKAAAQVLNTLWQYRDLRSIYKKDGWNQNHFITPVSTLERDRFKSHPSLSTTNQQMSPIIQSVGSTSSSPALLGIRDPRSEYDRTQPPMQYYNSQGDATHKGLYPGSSKPSPIYISSYSSPAREQNRRLQHQQLYYSQDDSNRKNFDAYRLYLQSPHSYEDPYFDDRVHFPASTDYSTQYGLKSTTNYVDFYSTKRPSYRAEQYPGSPDSWV

SEQ ID NO: 835403 - protein, 1148 aa, Homo sapiens
MPAPEQASLVEEGQPQTRQEAASTGPGMEPETTATTILASVKEQELQFQRLTRELEVERQIVASQLERCRLGAESPSIASTSSTEKSFPWRSTDVPNTGVSKPRVSDAVQPNNYLIRTEPEQGTLYSPEQTSLHESEGSLGNSRSSTQMNSYSDSGYQEAGSFHNSQNVSKADNRQQHSFIGSTNNHVVRNSRAEGQTLVQPSVANRAMRRVSSVPSRAQSPSYVISTGVSPSRGSLRTSLGSGFGSPSVTDPRPLNPSAYSSTTLPAARAASPYSQRPASPTAIRRIGSVTSRQTSNPNGPTPQYQTTARVGSPLTLTDAQTRVASPSQGQVGSSSPKRSGMTAVPQHLGPSLQRTVHDMEQFGQQQYDIYERMVPPRPDSLTGLRSSYASQHSQLGQDLRSAVSPDLHITPIYEGRTYYSPVYRSPNHGTVELQGSQTALYRTGSGIGNLQRTSSQRSTLTYQRNNYALNTTATYAEPYRPIQYRVQECNYNRLQHAVPADDGTTRSPSIDSIQKDPREFAWRDPELPEVIHMLQHQFPSVQANAAAYLQHLCFGDNKVKMEVCRLGGIKHLVDLLDHRVLEVQKNACGALRNLVFGKSTDENKIAMKNVGGIPALLRLLRKSIDAEVRELVTGVLWNLSSCDAVKMTIIRDALSTLTNTVIVPHSGWNNSSFDDDHKIKFQTSLVLRNTTGCLRNLSSAGEEARKQMRSCEGLVDSLLYVIHTCVNTSDYDSKTVENCVCTLRNLSYRLELEVPQARLLGLNELDDLLGKESPSKDSEPSCWGKKKKKKKRTPQEDQWDGVGPIPGLSKSPKGVEMLWHPSVVKPYLTLLAESSNPATLEGSAGSLQNLSAGNWKFAAYIRAAVRKEKGLPILVELLRMDNDRVVSSVATALRNMALDVRNKELIGKYAMRDLVNRLPGGNGPSVLSDETMAAICCALHEVTSKNMENAKALADSGGIEKLVNITKGRGDRSSLKVVKAAAQVLNTLWQYRDLRSIYKKDGWNQNHFITPVSTLERDRFKSHPSLSTTNQQMSPIIQSGSSKPSPIYISSYSSPAREQNRRLQHQQLYYSQDDSNRKNFDAYRLYLQSPHSYEDPYFDDRVHFPASTDYSTQYGLKSTTNYVDFYSTKRPSYRAEQYPGSPDSWV

SEQ ID NO: 835404 - protein, 1035 aa, Homo sapiens
MPAPEQASLVEEGQPQTRQEAASTGPGMEPETTATTILASVKEQELQFQRLTRELEVERQIVASQLERCRLGAESPSIASTSSTEKSFPWRSTDVPNTGVSKPRVSDAVQPNNYLIRTEPEQGTLYSPEQTSLHESEGSLGNSRSSTQMNSYSDSGYQEAGSFHNSQNVSKADNRQQHSFIGSTNNHVVRNSRAEGQTLVQPSVANRAMRRVSSVPSRAQSPSYVISTGVSPSRGSLRTSLGSGFGSPSVTDPRPLNPSAYSSTTLPAARAASPYSQRPASPTAIRRIGSVTSRQTSNPNGPTPQYQTTARVGSPLTLTDAQTRVASPSQGQVGSSSPKRSGMTAVPQHLGPSLQRTVHDMEQFGQQQYDIYERMVPPRPDSLTGLRSSYASQHSQLGQDLRSAVSPDLHITPIYEGRTYYSPVYRSPNHGTVELQGSQTALYRTGSGIGNLQRTSSQRSTLTYQRNNYALNTTATYAEPYRPIQYRVQECNYNRLQHAVPADDGTTRSPSIDSIQKDPREFAWRDPELPEVIHMLQHQFPSVQANAAAYLQHLCFGDNKVKMEVCRLGGIKHLVDLLDHRVLEVQKNACGALRNLVFGKSTDENKIAMKNVGGIPALLRLLRKSIDAEVRELVTGVLWNLSSCDAVKMTIIRDALSTLTNTVIVPHSGWNNSSFDDDHKIKFQTSLVLRNTTGCLRNLSSAGEEARKQMRSCEGLVDSLLYVIHTCVNTSDYDSKTVENCVCTLRNLSYRLELEVPQARLLGLNELDDLLGKESPSKDSEPSCWGKKKKKKKRTPQEDQWDGVGPIPGLSKSPKGVEMLWHPSVVKPYLTLLAESSNPATLEGSAGSLQNLSAGNWKFAAYIRAAVRKEKGLPILVELLRMDNDRVVSSVATALRNMALDVRNKELIGKYAMRDLVNRLPGGNGPSVLSDETMAAICCALHEVTSKNMENAKALADSGGIEKLVNITKGRGDRSSLKVVKAAAQVLNTLWQYRDLRSIYKKETDSNHILPCLPPTNRCHPSFSQSAAPLPHQHC

SEQ ID NO: 835405 - protein, 1047 aa, Homo sapiens
MPAPEQASLVEEGQPQTRQEAASTGPGMEPETTATTILASVKEQELQFQRLTRELEVERQIVASQLERCRLGAESPSIASTSSTEKSFPWRSTDVPNTGVSKPRVSDAVQPNNYLIRTEPEQGTLYSPEQTSLHESEGSLGNSRSSTQMNSYSDSGYQEAGSFHNSQNVSKADNRQQHSFIGSTNNHVVRNSRAEGQTLVQPSVANRAMRRVSSVPSRAQSPSYVISTGVSPSRGSLRTSLGSGFGSPSVTDPRPLNPSAYSSTTLPAARAASPYSQRPASPTAIRRIGSVTSRQTSNPNGPTPQYQTTARVGSPLTLTDAQTRVASPSQGQVGSSSPKRSGMTAVPQHLGPSLQRTVHDMEQFGQQQYDIYERMVPPRPDSLTGLRSSYASQHSQLGQDLRSAVSPDLHITPIYEGRTYYSPVYRSPNHGTVELQGSQTALYRTGSGIGNLQRTSSQRSTLTYQRNNYALNTTATYAEPYRPIQYRVQECNYNRLQHAVPADDGTTRSPSIDSIQKDPREFAWRDPELPEVIHMLQHQFPSVQANAAAYLQHLCFGDNKVKMEVCRLGGIKHLVDLLDHRVLEVQKNACGALRNLVFGKSTDENKIAMKNVGGIPALLRLLRKSIDAEVRELVTGVLWNLSSCDAVKMTIIRDALSTLTNTVIVPHSGWNNSSFDDDHKIKFQTSLVLRNTTGCLRNLSSAGEEARKQMRSCEGLVDSLLYVIHTCVNTSDYDSKTVENCVCTLRNLSYRLELEVPQARLLGLNELDDLLGKESPSKDSEPSCWGKKKKKKKRTPQEDQWDGVGPIPGLSKSPKGVEMLWHPSVVKPYLTLLAESSNPATLEGSAGSLQNLSAGNWKFAAYIRAAVRKEKGLPILVELLRMDNDRVVSSVATALRNMALDVRNKELIGKYAMRDLVNRLPGGNGPSVLSDETMAAICCALHEVTSKNMENAKALADSGGIEKLVNITKGRGDRSSLKVVKAAAQVLNTLWQYRDLRSIYKKDGWNQNHFITPVSTLERDRFKSHPSLSTTNQQMSPIIQSASTAVL

SEQ ID NO: 835406 - protein, 765 aa, Homo sapiens
KHTYTDTHTLTHTGRHTHRHRNTHAHTGRHTDTETHTLTHTGRHTDTETHTLTHTGRHTDTETHTLTHTEETSSQRSTLTYQRNNYALNTTATYAEPYRPIQYRVQECNYNRLQHAVPADDGTTRSPSIDSIQKDPREFAWRDPELPEVIHMLQHQFPSVQANAAAYLQHLCFGDNKVKMEVCRLGGIKHLVDLLDHRVLEVQKNACGALRNLVFGKSTDENKIAMKNVGGIPALLRLLRKSIDAEVRELVTGVLWNLSSCDAVKMTIIRDALSTLTNTVIVPHSGWNNSSFDDDHKIKFQTSLVLRNTTGCLRNLSSAGEEARKQMRSCEGLVDSLLYVIHTCVNTSDYDSKTVENCVCTLRNLSYRLELEVPQARLLGLNELDDLLGKESPSKDSEPSCWGKKKKKKKRTPQEDQWDGVGPIPGLSKSPKGVEMLWHPSVVKPYLTLLAESSNPATLEGSAGSLQNLSAGNWKFAAYIRAAVRKEKGLPILVELLRMDNDRVVSSVATALRNMALDVRNKELIGKYAMRDLVNRLPGGNGPSVLSDETMAAICCALHEVTSKNMENAKALADSGGIEKLVNITKGRGDRSSLKVVKAAAQVLNTLWQYRDLRSIYKKDGWNQNHFITPVSTLERDRFKSHPSLSTTNQQMSPIIQSGSSKPSPIYISSYSSPAREQNRRLQHQQLYYSQDDSNRKNFDAYRLYLQSPHSYEDPYFDDRVHFPASTDYSTQYGLKSTTNYVDFYSTKRPSYRAEQYPGSPDSWV

SEQ ID NO: 835407 - protein, 540 aa, Homo sapiens
MKNVGGIPALLRLLRKSIDAEVRELVTGVLWNLSSCDAVKMTIIRDALSTLTNTVIVPHSGWNNSSFDDDHKIKFQTSLVLRNTTGCLRNLSSAGEEARKQMRSCEGLVDSLLYVIHTCVNTSDYDSKTVENCVCTLRNLSYRLELEVPQARLLGLNELDDLLGKESPSKDSEPSCWGKKKKKKKRTPQEDQWDGVGPIPGLSKSPKGVEMLWHPSVVKPYLTLLAESSNPATLEGSAGSLQNLSAGNWKFAAYIRAAVRKEKGLPILVELLRMDNDRVVSSVATALRNMALDVRNKELIGKYAMRDLVNRLPGGNGPSVLSDETMAAICCALHEVTSKNMENAKALADSGGIEKLVNITKGRGDRSSLKVVKAAAQVLNTLWQYRDLRSIYKKDGWNQNHFITPVSTLERDRFKSHPSLSTTNQQMSPIIQSGSSKPSPIYISSYSSPAREQNRRLQHQQLYYSQDDSNRKNFDAYRLYLQSPHSYEDPYFDDRVHFPASTDYSTQYGLKSTTNYVDFYSTKRPSYRAEQYPGSPDSWV

SEQ ID NO: 835408 - protein, 1110 aa, Homo sapiens
MPAPEQASLVEEGQPQTRQEAASTGPGMEPETTATTILASVKEQELQFQRLTRELEVERQIVASQLERCRLGAESPSIASTSSTEKSFPWRSTDVPNTGVSKPRVSDAVQPNNYLIRTEPEQGTLYSPEQTSLHESEGSLGNSRSSTQMNSYSDSGYQEAGSFHNSQNVSKADNRQQHSFIGSTNNHVVRNSRAEGQTLVQPSVANRAMRRVSSVPSRAQSPSYVISTGVSPSRGSLRTSLGSGFGSPSVTDPRPLNPSAYSSTTLPAARAASPYSQRPASPTAIRRIGSVTSRQTSNPNGPTPQYQTTARVGSPLTLTDAQTRVASPSQGQVGSSSPKRSGMTAVPQHLGPSLQRTVHDMEQFGQQQYDIYERMVPPRPDSLTGLRSSYASQHSQLGQDLRSAVSPDLHITPIYEGRTYYSPVYRSPNHGTVELQGSQTALYRTGSGIGNLQRTSSQRSTLTYQRNNYALNTTATYAEPYRPIQYRVQECNYNRLQHAVPADDGTTRSPSIDSIQKDPREFAWRDPELPEVIHMLQHQFPSVQANAAAYLQHLCFGDNKVKMEVCRLGGIKHLVDLLDHRVLEVQKNACGALRNLVFGKSTDENKIAMKNVGGIPALLRLLRKSIDAEVRELVTGVLWNLSSCDAVKMTIIRDALSTLTNTVIVPHSGWNNSSFDDDHKIKFQTSLVLRNTTGCLRNLSSAGEEARKQMRSCEGLVDSLLYVIHTCVNTSDYDSKTVENCVCTLRNLSYRLELEVPQARLLGLNELDDLLGKESPSKDSEPSCWGKKKKKKKRTPQEDQWDGVGPIPGLSKSPKGVEMLWHPSVVKPYLTLLAESSNPATLEGSAGSLQNLSAGNWKFAAYIRAAVRKEKGLPILVELLRMDNDRVVSSVATALRNMALDVRNKELIGKYAMRDLVNRLPGGNGPSVLSDETMAAICCALHEVTSKNMENAKALADSGGIEKLVNITKGRGDRSSLKVVKAAAQVLNTLWQYRDLRSIYKKDGWNQNHFITPVSTLERDRFKSHPSLSTTNQQMSPIIQSVGSTSSSPALLGIRDPRSEYDRTQPPMQYYNSQGDATHKGLYPGKTPVGCVIQSLEKPHFQALGQWPGK

SEQ ID NO: 835409 - protein, 1126 aa, Homo sapiens
MPAPEQASLVEEGQPQTRQEAASTGPGMEPETTATTILASVKEQELQFQRLTRELEVERQIVASQLERCRLGAESPSIASTSSTEKSFPWRSTDVPNTGVSKPRVSDAVQPNNYLIRTEPEQGTLYSPEQTSLHESEGSLGNSRSSTQMNSYSDSGYQEAGSFHNSQNVSKADNRQQHSFIGSTNNHVVRNSRAEGQTLVQPSVANRAMRRVSSVPSRAQSPSYVISTGVSPSRGSLRTSLGSGFGSPSVTDPRPLNPSAYSSTTLPAARAASPYSQRPASPTAIRRIGSVTSRQTSNPNGPTPQYQTTARVGSPLTLTDAQTRVASPSQGQVGSSSPKRSGMTAVPQHLGPSLQRTVHDMEQFGQQQYDIYERMVPPRPDSLTGLRSSYASQHSQLGQDLRSAVSPDLHITPIYEGRTYYSPVYRSPNHGTVELQGSQTALYRTGSGIGNLQRTSSQRSTLTYQRNNYALNTTATYAEPYRPIQYRVQECNYNRLQHAVPADDGTTRSPSIDSIQKDPREFAWRDPELPEVIHMLQHQFPSVQANAAAYLQHLCFGDNKVKMEVCRLGGIKHLVDLLDHRVLEVQKNACGALRNLVFGKSTDENKIAMKNVGGIPALLRLLRKSIDAEVRELVTGVLWNLSSCDAVKMTIIRDALSTLTNTVIVPHSGWNNSSFDDDHKIKFQTSLVLRNTTGCLRNLSSAGEEARKQMRSCEGLVDSLLYVIHTCVNTSDYDSKTVENCVCTLRNLSYRLELEVPQARLLGLNELDDLLGKESPSKDSEPSCWGKKKKKKKRTPQEDQWDGVGPIPGLSKSPKGVEMLWHPSVVKPYLTLLAESSNPATLEGSAGSLQNLSAGNWKFAAYIRAAVRKEKGLPILVELLRMDNDRVVSSVATALRNMALDVRNKELIGKYAMRDLVNRLPGGNGPSVLSDETMAAICCALHEVTSKNMENAKALADSGGIEKLVNITKGRGDRSSLKVVKAAAQVLNTLWQYRDLRSIYKKDGWNQNHFITPVSTLERDRFKSHPSLSTTNQQMSPIIQSVGSTSSSPALLGIRDPRSEYDRTQPPMQYYNSQGDATHKGLYPAQKIADATFQHQALGKRKCTYQLKCMVASDLQQPALSYRSPL

SEQ ID NO: 835410 - protein, 330 aa, Homo sapiens [sequence omitted]

SEQ ID NO: 835411 - protein, 450 aa, Homo sapiens
MPAPEQASLVEEGQPQTRQEAASTGPGMEPETTATTILASVKEQELQFQRLTRELEVERQIVASQLERCRLGAESPSIASTSSTEKSFPWRSTDVPNTGVSKPRVSDAVQPNNYLIRTEPEQGTLYSPEQTSLHESEGSLGNSRSSTQMNSYSDSGYQEAGSFHNSQNVSKADNRQQHSFIGSTNNHVVRNSRAEGQTLVQPSVANRAMRRVSSVPSRAQSPSYVISTGVSPSRGSLRTSLGSGFGSPSVTDPRPLNPSAYSSTTLPAARAASPYSQRPASPTAIRRIGSVTSRQTSNPNGPTPQYQTTARVGSPLTLTDAQTRVASPSQGQVGSSSPKRSGMTAVPQHLGPSLQRTVHDMEQFGQQQYDIYERMVPPRPDSLTGLRSSYASQHSQLGQDLRSAVSPDLHITPIYEEYGTRCSQQGAHRQIRHARPGQPAPRRQWPQCLV

SEQ ID NO: 835412 - protein, 527 aa, Homo sapiens
MPAPEQASLVEEGQPQTRQEAASTGPGMEPETTATTILASVKEQELQFQRLTRELEVERQIVASQLERCRLGAESPSIASTSSTEKSFPWRSTDVPNTGVSKPRVSDAVQPNNYLIRTEPEQGTLYSPEQTSLHESEGSLGNSRSSTQMNSYSDSGYQEAGSFHNSQNVSKADNRQQHSFIGSTNNHVVRNSRAEGQTLVQPSVANRAMRRVSSVPSRAQSPSYVISTGVSPSRGSLRTSLGSGFGSPSVTDPRPLNPSAYSSTTLPAARAASPYSQRPASPTAIRRIGSVTSRQTSNPNGPTPQYQTTARVGSPLTLTDAQTRVASPSQGQVGSSSPKRSGMTAVPQHLGPSLQRTVHDMEQFGQQQYDIYERMVPPRPDSLTGLRSSYASQHSQLGQDLRSAVSPDLHITPIYEGRTYYSPVYRSPNHGTVELQGSQTALYRTGSGIGNLQRTSSQRSTLTYQRNNYALNTTATYAEPYRPIQYRVQECNYNRLQHAVPADDGTTRSPSIDSIQKDPRRVPVRSL

SEQ ID NO: 835413 - protein, 1191 aa, Homo sapiens; identical to SEQ ID NO: 835402

SEQ ID NO: 835414 - protein, 1125 aa, Homo sapiens
WPDRPGPCETQHHYSSIVKEQELQFQRLTRELEVERQIVASQLERCRLGAESPSIASTSSTEKSFPWRSTDVPNTGVSKPRVSDAVQPNNYLIRTEPEQGTLYSPEQTSLHESEGSLGNSRSSTQMNSYSDSGYQEAGSFHNSQNVSKADNRQQHSFIGSTNNHVVRNSRAEGQTLVQPSVANRAMRRVSSVPSRAQSPSYVISTGVSPSRGSLRTSLGSGFGSPSVTDPRPLNPSAYSSTTLPAARAASPYSQRPASPTAIRRIGSVTSRQTSNPNGPTPQYQTTARVGSPLTLTDAQTRVASPSQGQVGSSSPKRSGMTAVPQHLGPSLQRTVHDMEQFGQQQYDIYERMVPPRPDSLTGLRSSYASQHSQLGQDLRSAVSPDLHITPIYEGRTYYSPVYRSPNHGTVELQGSQTALYRTGSGIGNLQRTSSQRSTLTYQRNNYALNTTATYAEPYRPIQYRVQECNYNRLQHAVPADDGTTRSPSIDSIQKDPREFAWRDPELPEVIHMLQHQFPSVQANAAAYLQHLCFGDNKVKMEVCRLGGIKHLVDLLDHRVLEVQKNACGALRNLVFGKSTDENKIAMKNVGGIPALLRLLRKSIDAEVRELVTGVLWNLSSCDAVKMTIIRDALSTLTNTVIVPHSGWNNSSFDDDHKIKFQTSLVLRNTTGCLRNLSSAGEEARKQMRSCEGLVDSLLYVIHTCVNTSDYDSKTVENCVCTLRNLSYRLELEVPQARLLGLNELDDLLGKESPSKDSEPSCWGKKKKKKKRTPQEDQWDGVGPIPGLSKSPKGVEMLWHPSVVKPYLTLLAESSNPATLEGSAGSLQNLSAGNWKFAAYIRAAVRKEKGLPILVELLRMDNDRVVSSVATALRNMALDVRNKELIGKYAMRDLVNRLPGGNGPSVLSDETMAAICCALHEVTSKNMENAKALADSGGIEKLVNITKGRGDRSSLKVVKAAAQVLNTLWQYRDLRSIYKKDGWNQNHFITPVSTLERDRFKSHPSLSTTNQQMSPIIQSGSSKPSPIYISSYSSPAREQNRRLQHQQLYYSQDDSNRKNFDAYRLYLQSPHSYEDPYFDDRVHFPASTDYSTQYGLKSTTNYVDFYSTKRPSYRAEQYPGSPDSWV

SEQ ID NO: 835415 - protein, 540 aa, Homo sapiens; identical to SEQ ID NO: 835407

SEQ ID NO: 835416 - protein, 1184 aa, Homo sapiens
MPAPEQASLVEEGQPQTRQEAASTGPGMEPETTATTILASVKEQELQFQRLTRELEVERQIVASQLERCRLGAESPSIASTSSTEKSFPWRSTDVPNTGVSKPRVSDAVQPNNYLIRTEPEQGTLYSPEQTSLHESEGSLGNSRSSTQMNSYSDSGYQEAGSFHNSQNVSKADNRQQHSFIGSTNNHVVRNSRAEGQTLVQPSVANRAMRRVSSVPSRAQSPSYVISTGVSPSRGSLRTSLGSGFGSPSVTDPRPLNPSAYSSTTLPAARAASPYSQRPASPTAIRRIGSVTSRQTSNPNGPTPQYQTTARVGSPLTLTDAQTRVASPSQGQVGSSSPKRSGMTAVPQHLGPSLQRTVHDMEQFGQQQYDIYERMVPPRPDSLTGLRSSYASQHSQLGQDLRSAVSPDLHITPIYEGRTYYSPVYRSPNHGTVELQGSQTALYRTGSGIGNLQRTSSQRSTLTYQRNNYALNTTATYAEPYRPIQYRVQECNYNRLQHAVPADDGTTRSPSIDSIQKDPREFAWRDPELPEVIHMLQHQFPSVQANAAAYLQHLCFGDNKVKMEVCRLGGIKHLVDLLDHRVLEVQKNACGALRNLVFGKSTDENKIAMKNVGGIPALLRLLRKSIDAEVRELVTGVLWNLSSCDAVKMTIIRDALSTLTNTVIVPHSGWNNSSFDDDHKIKFQTSLVLRNTTGCLRNLSSAGEEARKQMRSCEGLVDSLLYVIHTCVNTSDYDSKEATLQIKGQVSKVTGARTWQLKKIILRTVRTEWLGVTVENCVCTLRNLSYRLELEVPQARLLGLNELDDLLGKESPSKDSEPSCWGKKKKKKKRTPQEDQWDGVGPIPGLSKSPKGVEMLWHPSVVKPYLTLLAESSNPATLEGSAGSLQNLSAGNWKFAAYIRAAVRKEKGLPILVELLRMDNDRVVSSVATALRNMALDVRNKELIGKYAMRDLVNRLPGGNGPSVLSDETMAAICCALHEVTSKNMENAKALADSGGIEKLVNITKGRGDRSSLKVVKAAAQVLNTLWQYRDLRSIYKKDGWNQNHFITPVSTLERDRFKSHPSLSTTNQQMSPIIQSGSSKPSPIYISSYSSPAREQNRRLQHQQLYYSQDDSNRKNFDAYRLYLQSPHSYEDPYFDDRVHFPASTDYSTQYGLKSTTNYVDFYSTKRPSYRAEQYPGSPDSWV

SEQ ID NO: 835417 - protein, 267 aa, Homo sapiens [sequence omitted]

SEQ ID NO: 835418 - protein, 236 aa, Homo sapiens [sequence omitted]

SEQ ID NO: 835419 - protein, 290 aa, Homo sapiens
MPAPEQASLVEEGQPQTRQEAASTGPGMEPETTATTILASVKEQELQFQRLTRELEVERQIVASQLERCRLGAESPSIASTSSTEKSFPWRSTDVPNTGVSKPRVSDAVQPNNYLIRTEPEQGTLYSPEQTSLHESEGSLGNSRSSTQMNSYSDSGYQEAGSFHNSQNVSKADNRQQHSFIGSTNNHVVRNSRAEGQTLVQVSQTHQDLCKEIPSGRAQWLMPVIPAFWEAEAGGSPEVRSSRPACLTWRNPVSTKNTKISRAWWRAPVISATREAEAGESLEPRRQSLQ

SEQ ID NO: 835420 - protein, 111 aa, Homo sapiens
MLQAEKTEVAEALTKAEAGRMELELSVTKLRAEEASLQDSLSKLSALNESLAQDKLDLNCLVTQLEEEKATLQGRQRQAEQEATVAPAEQEWLEELWLEQEVARQGLEGSL

SEQ ID NO: 835421 - protein, 111 aa, Homo sapiens; identical to SEQ ID NO: 835420

SEQ ID NO: 835422 - protein, 111 aa, Homo sapiens; identical to SEQ ID NO: 835420

SEQ ID NO: 835423 - protein, 111 aa, Homo sapiens; identical to SEQ ID NO: 835420

SEQ ID NO: 835424 - protein, 111 aa, Homo sapiens; identical to SEQ ID NO: 835420

SEQ ID NO: 835425 - protein, 159 aa, Homo sapiens
MAFKWLHKQQAFCGDFFFHLTPYPLLVSPPLSPRVHLSGSLLVSPHLLPTFLPFLISWGLTLQAEAGRMELELSVTKLRAEEASLQDSLSKLSALNESLAQDKLDLNCLVTQLEEEKATLQGRQRQAEQEATVAPAEQEWLEELWLEQEVARQGLEGSL

SEQ ID NO: 835426 - protein, 50 aa, Homo sapiens
MASKGAGVSFSRKSCRLTSDAEKSRVTAIVQEKLLNDYLTPATYEVRALS

SEQ ID NO: 835427 - protein, 150 aa, Homo sapiens
MAFKWLHKQQAFCGDFFFHLTPYPLLVSPPLSPRVHLSGSLLVSPHLLPTFLPFLISWGLTLQAEAGRMELELSVTKLRAEEASLQDSLSKLSALNESLAQDKLDLNCLVTQVHCAPAGPPTLPTRPPHSVRHPGPGPAPVLAPASLSVS

SEQ ID NO: 835428 - protein, 111 aa, Homo sapiens; identical to SEQ ID NO: 835420

SEQ ID NO: 835429 - protein, 111 aa, Homo sapiens; identical to SEQ ID NO: 835420

SEQ ID NO: 835430 - protein, 111 aa, Homo sapiens; identical to SEQ ID NO: 835420

SEQ ID NO: 835431 - protein, 111 aa, Homo sapiens; identical to SEQ ID NO: 835420

SEQ ID NO: 835432 - protein, 202 aa, Homo sapiens
MLQAEKTEVAEALTKLEEEKATLQGRQRQAEQEATVAPAEQEWLEELWLEQEVARQGLEGSLLVAEQAQEALEQQLPTLHHELSWLQEQLAQEAAWRELEAERAQLQSQLQREQEELLARRKAEKEQLSEEIAALQQEHDEGLLLAESEKQQALSLKESEKMALSEKLMGTRHSLATISLEMERQKPDAQSRQEQDRVGLPS

SEQ ID NO: 835433 - protein, 452 aa, Homo sapiens
RGSRGRCRRRRRALCSRRAPARQGPGPARLPGMVSKALLRLVSAVNRRRMKLLLGIALLAYVASVWGNFVNMRSIQENGELKIESKIEEMVEPLREKIRDLEKSFTQKYPPVKFLSEKDRKRILITGGAGFVGSHLTDKLMMDGHEVTVVDNFFTGRKRNVEHWIGHENFELINHDVVEPLYIEVDQIYHLASPASPPNYMYNPIKTLKTNTIGTLNMLGLAKRVGARLLLASTSEVYGDPEVHPQSEDYWGHVNPIGPRACYDEGKRVAETMCYAYMKQEGVEVRVARIFNTFGPRMHMNDGRVVSNFILQALQGEPLTVYGSGSQTRAFQYVSDLVNGLVALMNSNVSSPVNLGNPEEHTILEFAQLIKNLVGSGSEIQFLSEAQDDPQKRKPDIKKAKLMLGWEPVVPLEEGLNKAIHYFRKELEYQANNQYIPKPKPARIKKGRTRHS

SEQ ID NO: 835434 - protein, 252 aa, Homo sapiens
MYNPIKTLKTNTIGTLNMLGLAKRVGARLLLASTSEVYGDPEVHPQSEDYWGHVNPIGPRACYDEGKRVAETMCYAYMKQEGVEVRVARIFNTFGPRMHMNDGRVVSNFILQALQGEPLTVYGSGSQTRAFQYVSDLVNGLVALMNSNVSSPVNLGNPEEHTILEFAQLIKNLVGSGSEIQFLSEAQDDPQKRKPDIKKAKLMLGWEPVVPLEEGLNKAIHYFRKELEYQANNQYIPKPKPARIKKGRTRHS

SEQ ID NO: 835435 - protein, 355 aa, Homo sapiens
RGSRGRCRRRRRALCSRRAPARQGPGPARLPGMVSKALLRLVSAVNRRRMKLLLGIALLAYVASVWGNFVNMRSIQENGELKIESKIEEMVEPLREKIRDLEKSFTQKYPPVKFLSEKDRKRILITGGAGFVGSHLTDKLMMDGHEVTVVDNFFTGRKRNVEHWIGHENFELINHDVVEPLYIEVDQIYHLASPASPPNYMYNPIKTLKTNTIGTLNMLGLAKRVGARLLLASTSEVYGDPEVHPQSEDYWGHVNPIGPRACYDEGKRVAETMCYAYMKQEGVEVRVARIFNTFGPRMHMNDGRVVSNFILQALQGEPLTRSSEWPRGSHEQQRQQPGQPGEPRRTHNPRICSVN

SEQ ID NO: 835436 - protein, 452 aa, Homo sapiens; identical to SEQ ID NO: 835433

SEQ ID NO: 835437 - protein, 173 aa, Homo sapiens
VGGNSGLLRQNNLPPTELLLGACTQSAWPQQLQEHSLDFHAEQSLGSSGASQRTAFPPPAPYSHHIWGLPLMWMVRLCLPMLCDSLLPFFSLNISGSGSEIQFLSEAQDDPQKRKPDIKKAKLMLGWEPVVPLEEGLNKAIHYFRKELEYQANNQYIPKPKPARIKKGRTRHS

SEQ ID NO: 835438 - protein, 373 aa, Homo sapiens
RGSRGRCRRRRRALCSRRAPARQGPGPARLPGMVSKALLRLVSAVNRRRMKLLLGIALLAYVASVWGNFVNMRSIQENGELKIESKIEEMVEPLREKIRDLEKSFTQKYPPVKFLSEKDRKRILITGGAGFVGSHLTDKLMMDGHEVTVVDNFFTGRKRNVEHWIGHENFELINHDVVEPLYIEVDQIYHLASPASPPNYMYNPIKTLKTNTIGTLNMLGLAKRVGARLLLASTSEVYGDPEVHPQSEDYWGHVNPIGPRACYDEGKRVAETMCYAYMKQEGVEVRVARIFNTFGPRMHMNDGRVVSNFILQALQGEPLTVYGSGSQTRAFQYVSDLVNGLVALMNSNVSSPVNLVSAPLPPLCRTAQTFVHL

SEQ ID NO: 835439 - protein, 452 aa, Homo sapiens; identical to SEQ ID NO: 835433

SEQ ID NO: 835440 - protein, 372 aa, Homo sapiens
AAGTLRIPVWFLLDTREKSEIRQSFTQKYPPVKFLSEKDRKRILITGGAGFVGSHLTDKLMMDGHEVTVVDNFFTGRKRNVEHWIGHENFELINHDVVEPLYIEVDQIYHLASPASPPNYMYNPIKTLKTNTIGTLNMLGLAKRVGARLLLASTSEVYGDPEVHPQSEDYWGHVNPIGPRACYDEGKRVAETMCYAYMKQEGVEVRVARIFNTFGPRMHMNDGRVVSNFILQALQGEPLTVYGSGSQTRAFQYVSDLVNGLVALMNSNVSSPVNLGNPEEHTILEFAQLIKNLVGSGSEIQFLSEAQDDPQKRKPDIKKAKLMLGWEPVVPLEEGLNKAIHYFRKELEYQANNQYIPKPKPARIKKGRTRHS

SEQ ID NO: 835441 - protein, 548 aa, Homo sapiens
MAAPPARADADPSPTSPPTARDTPGRQAEKSETACEDRSNAESLDRLLPPVGTGRSPRKRTTSQCKSEPPLLRTSKRTIYTAGRPPWYNEHGTQSKEAFAIGLGGGSASGKTTVARMIIEALDVPWVVLLSMDSFYKVLTEQQQEQAAHNNFNFDHPDAFDFDLIISTLKKLKQGKSVKVPIYDFTTHSRKKDWKTLYGANVIIFEGIMAFADKTLLELLDMKIFVDTDSDIRLVRRLRRDISERGRDIEGVIKQYNKFVKPSFDQYIQPTMRLADIVVPRGSGNTVAIDLIVQHVHSQLEERELSVRAALASAHQCHPLPRTLSVLKSTPQVRGMHTIIRDKETSRDEFIFYSKRLMRLLIEHALSFLPFQDCVVQTPQGQDYAGKCYAGKQITGVSILRAGETMEPALRAVCKDVRIGTILIQTNQLTGEPELHYLRLPKDISDDHVILMDCTVSTGAAAMMAVRVLLDHDVPEDKIFLLSLLMAEMGVHSVAYAFPRVRIITTAVDKRVNDLFRIIPGIGNFGDRYFGTDAVPDGSDEEEVAYTG

SEQ ID NO: 835442 - protein, 394 aa, Homo sapiens
MAAPPARADADPSPTSPPTARDTPGRQAEKSETACEDRSNAESLDRLLPPVGTGRSPRKRTTSQCKSEPPLLRTSKRTIYTAGRPPWYNEHGTQSKEAFAIGLGGGSASGKTTVARMIIEALDVPWVVLLSMDSFYKVLTEQQQEQAAHNNFNFDHPDAFDFDLIISTLKKLKQGKSVKVPIYDFTTHSRKKDWKTLYGANVIIFEGIMAFADKTLLELLDMKIFVDTDSDIRLVRRLRRDISERGRDIEGVIKQYNKFVKPSFDQYIQPTMRLADIVVPRGSGNTVAIDLIVQHVHSQLEERELSVRAALASAHQCHPLPRTLSVLKSTPQGQGDQSRRVHLLLQETDAAAHRARALLPALSGLRRTDPAGAGLCGQVLCGEADHRCVHSARR

SEQ ID NO: 835443 - protein, 525 aa, Homo sapiens
MPCTDSDCGSELLPISNAESLDRLLPPVGTGRSPRKRTTSQCKSEPPLLRTSKRTIYTAGRPPWYNEHGTQSKEAFAIGLGGGSASGKTTVARMIIEALDVPWVVLLSMDSFYKVLTEQQQEQAAHNNFNFDHPDAFDFDLIISTLKKLKQGKSVKVPIYDFTTHSRKKDWKTLYGANVIIFEGIMAFADKTLLELLDMKIFVDTDSDIRLVRRLRRDISERGRDIEGVIKQYNKFVKPSFDQYIQPTMRLADIVVPRGSGNTVAIDLIVQHVHSQLEERELSVRAALASAHQCHPLPRTLSVLKSTPQVRGMHTIIRDKETSRDEFIFYSKRLMRLLIEHALSFLPFQDCVVQTPQGQDYAGKCYAGKQITGVSILRAGETMEPALRAVCKDVRIGTILIQTNQLTGEPELHYLRLPKDISDDHVILMDCTVSTGAAAMMAVRVLLDHDVPEDKIFLLSLLMAEMGVHSVAYAFPRVRIITTAVDKRVNDLFRIIPGIGNFGDRYFGTDAVPDGSDEEEVAYTG

SEQ ID NO: 835444 - protein, 568 aa, Homo sapiens
MSHHAQPRQSSYVPPMSLPASAMPVEGVGGDALWAGHASGYLGGGQLWATSEYIPLCSSNAESLDRLLPPVGTGRSPRKRTTSQCKSEPPLLRTSKRTIYTAGRPPWYNEHGTQSKEAFAIGLGGGSASGKTTVARMIIEALDVPWVVLLSMDSFYKVLTEQQQEQAAHNNFNFDHPDAFDFDLIISTLKKLKQGKSVKVPIYDFTTHSRKKDWKTLYGANVIIFEGIMAFADKTLLELLDMKIFVDTDSDIRLVRRLRRDISERGRDIEGVIKQYNKFVKPSFDQYIQPTMRLADIVVPRGSGNTVAIDLIVQHVHSQLEERELSVRAALASAHQCHPLPRTLSVLKSTPQVRGMHTIIRDKETSRDEFIFYSKRLMRLLIEHALSFLPFQDCVVQTPQGQDYAGKCYAGKQITGVSILRAGETMEPALRAVCKDVRIGTILIQTNQLTGEPELHYLRLPKDISDDHVILMDCTVSTGAAAMMAVRVLLDHDVPEDKIFLLSLLMAEMGVHSVAYAFPRVRIITTAVDKRVNDLFRIIPGIGNFGDRYFGTDAVPDGSDEEEVAYTG

SEQ ID NO: 835445 - protein, 525 aa, Homo sapiens; identical to SEQ ID NO: 835443

SEQ ID NO: 835446 - protein, 340 aa, Homo sapiens
MAFADKTLLELLDMKIFVDTDSDIRLVRRLRRDISERGRDIEGVIKQYNKFVKPSFDQYIQPTMRLADIVVPRGSGNTVAIDLIVQHVHSQLEERELSVRAALASAHQCHPLPRTLSVLKSTPQVRGMHTIIRDKETSRDEFIFYSKRLMRLLIEHALSFLPFQDCVVQTPQGQDYAGKCYAGKQITGVSILRAGETMEPALRAVCKDVRIGTILIQTNQLTGEPELHYLRLPKDISDDHVILMDCTVSTGAAAMMAVRVLLDHDVPEDKIFLLSLLMAEMGVHSVAYAFPRVRIITTAVDKRVNDLFRIIPGIGNFGDRYFGTDAVPDGSDEEEVAYTG

SEQ ID NO: 835447 - protein, 656 aa, Homo sapiens
MSSPPAYPGIRISGCRALGAEGSSNAESLDRLLPPVGTGRSPRKRTTSQCKSEPPLLRTSKRTIYTAGRPPWYNEHGTQSKEAFAIGGAAGGWDLLPDACLRLPSSACGAGEGSRATAGSGSGMGTSGTYLCRQPACSSQRVSTPAGRLGRRQCLWEDHCGQNDHRGPGCALGGLAVHGLLLQGGPPPSSPEDPFVLSLTLDPLQKKVPGLSPSVAAPGRPRAPVRWHWVRALLCPQLLHSLPHQVLTEQQQEQAAHNNFNFDHPDAFDFDLIISTLKKLKQGKSVKVPIYDFTTHSRKKDWKTLYGANVIIFEGIMAFADKTLLELLDMKIFVDTDSDIRLVRRLRRDISERGRDIEGVIKQYNKFVKPSFDQYIQPTMRLADIVVPRGSGNTVAIDLIVQHVHSQLEERELSVRAALASAHQCHPLPRTLSVLKSTPQVRGMHTIIRDKETSRDEFIFYSKRLMRLLIEHALSFLPFQDCVVQTPQGQDYAGKCYAGKQITGVSILRAGETMEPALRAVCKDVRIGTILIQTNQLTGEPELHYLRLPKDISDDHVILMDCTVSTGAAAMMAVRVLLDHDVPEDKIFLLSLLMAEMGVHSVAYAFPRVRIITTAVDKRVNDLFRIIPGIGNFGDRYFGTDAVPDGSDEEEVAYTG

SEQ ID NO: 835448 - protein, 213 aa, Homo sapiens [sequence omitted]

SEQ ID NO: 835449 - protein, 191 aa, Homo sapiens [sequence omitted]

SEQ ID NO: 835450 - protein, 511 aa, Homo sapiens
MAAPPARADADPSPTSPPTARDTPGRQAEKSETACEDRSNAESLDRLLPPVGTGRSPRKRTTSQCKSEPPLLRTSKRTIYTAGRPPWYNEHGTQSKEAFAIGLGGGSASGKTTVARMIIEALDVPWVVLLSMDSFYKVLTEQQQEQAAHNNFNFDHPDAFDFDLIISTLKKLKQGKSVKVPIYDFTTHSRKKDWKTLYGANVIIFEGIMAFADKTLLELLDMKIFVDTDSDIRLVRRLRRDISERGRDIEGVIKQYNKFVKPSFDQYIQPTMRLADIVVPRGSGNTVAIDLIVQHVHSQLEERELSVRAALASAHQCHPLPRTLSVLKSTPQVRGMHTIIRDKETSRDEFIFYSKRLMRLLIEHALSFLPFQDCVVQTPQGQDYAGKCYAGKQITGVSILRAGETMEPALRAVCKDVRIGTILIQTNQLTGEPEVPGGSRGDEPGGRGQRELTARGRREPHLQPDPCCPQLHYLRLPKDISDDHVILMDCTVSTGAAAMMAVRVLLVSEPW

SEQ ID NO: 835451 - protein, 143 aa, Homo sapiens
MDCTVSTGAAAMMAVRVLLVSEPWVGGAGSGRGGIYLPNTLGEDHDVPEDKIFLLSLLMAEMGVHSVAYAFPRVRIITTAVDKRVNDLFRIIPGIGEAARALQPHMRAGWVALGGPTTLDPPPPFSRELWRPLLWDRRGPRWQ

SEQ ID NO: 835452 - protein, 548 aa, Homo sapiens; identical to SEQ ID NO: 835441

SEQ ID NO: 835453 - protein, 548 aa, Homo sapiens; identical to SEQ ID NO: 835441

SEQ ID NO: 835454 - protein, 533 aa, Homo sapiens
MSSPPAYPGIRISGCRALGAEGSSNAESLDRLLPPVGTGRSPRKRTTSQCKSEPPLLRTSKRTIYTAGRPPWYNEHGTQSKEAFAIGLGGGSASGKTTVARMIIEALDVPWVVLLSMDSFYKVLTEQQQEQAAHNNFNFDHPDAFDFDLIISTLKKLKQGKSVKVPIYDFTTHSRKKDWKTLYGANVIIFEGIMAFADKTLLELLDMKIFVDTDSDIRLVRRLRRDISERGRDIEGVIKQYNKFVKPSFDQYIQPTMRLADIVVPRGSGNTVAIDLIVQHVHSQLEERELSVRAALASAHQCHPLPRTLSVLKSTPQVRGMHTIIRDKETSRDEFIFYSKRLMRLLIEHALSFLPFQDCVVQTPQGQDYAGKCYAGKQITGVSILRAGETMEPALRAVCKDVRIGTILIQTNQLTGEPELHYLRLPKDISDDHVILMDCTVSTGAAAMMAVRVLLDHDVPEDKIFLLSLLMAEMGVHSVAYAFPRVRIITTAVDKRVNDLFRIIPGIGNFGDRYFGTDAVPDGSDEEEVAYTG

SEQ ID NO: 835455 - protein, 550 aa, Homo sapiens
MAEAGRLIGVGGDALWAGHASGYLGGGQLWATSEYIPLCSSNAESLDRLLPPVGTGRSPRKRTTSQCKSEPPLLRTSKRTIYTAGRPPWYNEHGTQSKEAFAIGLGGGSASGKTTVARMIIEALDVPWVVLLSMDSFYKVLTEQQQEQAAHNNFNFDHPDAFDFDLIISTLKKLKQGKSVKVPIYDFTTHSRKKDWKTLYGANVIIFEGIMAFADKTLLELLDMKIFVDTDSDIRLVRRLRRDISERGRDIEGVIKQYNKFVKPSFDQYIQPTMRLADIVVPRGSGNTVAIDLIVQHVHSQLEERELSVRAALASAHQCHPLPRTLSVLKSTPQVRGMHTIIRDKETSRDEFIFYSKRLMRLLIEHALSFLPFQDCVVQTPQGQDYAGKCYAGKQITGVSILRAGETMEPALRAVCKDVRIGTILIQTNQLTGEPELHYLRLPKDISDDHVILMDCTVSTGAAAMMAVRVLLDHDVPEDKIFLLSLLMAEMGVHSVAYAFPRVRIITTAVDKRVNDLFRIIPGIGNFGDRYFGTDAVPDGSDEEEVAYTG

SEQ ID NO: 835456 - protein, 340 aa, Homo sapiens; identical to SEQ ID NO: 835446

SEQ ID NO: 835457 - protein, 595 aa, Homo sapiens
MSSPPAYPGIRISGCRALGAEGSSNAESLDRLLPPVGTGRSPRKRTTSQCKSEPPLLRTSKRTIYTAGRPPWYNEHGTQSKEAFAIGGEQRGGGTCCRTPASGSPPVPVEQEKEAGQPQAAAAGWAPLGPICAGSLPVPHRGSPLPPAGLGGGSASGKTTVARMIIEALDVPWVVLLSMDSFYKVLTEQQQEQAAHNNFNFDHPDAFDFDLIISTLKKLKQGKSVKVPIYDFTTHSRKKDWKTLYGANVIIFEGIMAFADKTLLELLDMKIFVDTDSDIRLVRRLRRDISERGRDIEGVIKQYNKFVKPSFDQYIQPTMRLADIVVPRGSGNTVAIDLIVQHVHSQLEERELSVRAALASAHQCHPLPRTLSVLKSTPQVRGMHTIIRDKETSRDEFIFYSKRLMRLLIEHALSFLPFQDCVVQTPQGQDYAGKCYAGKQITGVSILRAGETMEPALRAVCKDVRIGTILIQTNQLTGEPELHYLRLPKDISDDHVILMDCTVSTGAAAMMAVRVLLDHDVPEDKIFLLSLLMAEMGVHSVAYAFPRVRIITTAVDKRVNDLFRIIPGIGNFGDRYFGTDAVPDGSDEEEVAYTG

SEQ ID NO: 835458 - protein, 340 aa, Homo sapiens; identical to SEQ ID NO: 835446

SEQ ID NO: 835459 - protein, 555 aa, Homo sapiens
MAAPPARADADPSPTSPPTARDTPGRQAEKSETACEDRSNAESLDRLLPPVGTGRSPRKRTTSQCKSEPPLLRTSKRTIYTAGRPPWYNEHGTQSKEAFAIGLGGGSASGKTTVARMIIEALDVPWVVLLSMDSFYKVLTEQQQEQAAHNNFNFDHPDAFDFDLIISTLKKLKQGKSVKVPIYDFTTHSRKKDWKTLYGANVIIFEGIMAFADKTLLELLDMKIFVDTDSDIRLVRRLRRDISERGRDIEGVIKQYNKFVKPSFDQYIQPTMRLADIVVPRGSGNTVAIDLIVQHVHSQLEERELSVRAALASAHQCHPLPRTLSVLKSTPQVRGMHTIIRDKETSRDEFIFYSKRLMRLLIEHALSFLPFQDCVVQTPQGQDYAGKCYAGKQITGVSILRAGETMEPALRAVCKDVRIGTILIQTNQLTGEPEPDPCCPQLHYLRLPKDISDDHVILMDCTVSTGAAAMMAVRVLLDHDVPEDKIFLLSLLMAEMGVHSVAYAFPRVRIITTAVDKRVNDLFRIIPGIGNFGDRYFGTDAVPDGSDEEEVAYTG

SEQ ID NO: 835460 - protein, 584 aa, Homo sapiens
MAAPPARADADPSPTSPPTARDTPGRQAEKSETACEDRSNAESLDRLLPPVGTGRSPRKRTTSQCKSEPPLLRTSKRTIYTAGRPPWYNEHGTQSKEAFAIGLGGGSASGKTTVARMIIEALDVPWVVLLSMDSFYKVLTEQQQEQAAHNNFNFDHPDAFDFDLIISTLKKLKQGKSVKVPIYDFTTHSRKKDWKTLYGANVIIFEGIMAFADKTLLELLDMKIFVDTDSDIRLVRRLRRDISERGRDIEGVIKQYNKFVKPSFDQYIQPTMRLADIVVPRGSGNTVAIDLIVQHVHSQLEERELSVRAALASAHQCHPLPRTLSVLKSTPQVRGMHTIIRDKETSRDEFIFYSKRLMRLLIEHALSFLPFQDCVVQTPQGQDYAGKCYAGKQITGVSILRAGETMEPALRAVCKDVRIGTILIQTNQLTGEPEVPGGSRGDEPGGRGQRELTARGRREPHLQPDPCCPQLHYLRLPKDISDDHVILMDCTVSTGAAAMMAVRVLLDHDVPEDKIFLLSLLMAEMGVHSVAYAFPRVRIITTAVDKRVNDLFRIIPGIGNFGDRYFGTDAVPDGSDEEEVAYTG

SEQ ID NO: 835461 - protein, 262 aa, Homo sapiens
CVRVGCCACCTIQLEERELSVRAALASAHQCHPLPRTLSVLKSTPQVRGMHTIIRDKETSRDEFIFYSKRLMRLLIEHALSFLPFQDCVVQTPQGQDYAGKCYAGKQITGVSILRAGETMEPALRAVCKDVRIGTILIQTNQLTGEPELHYLRLPKDISDDHVILMDCTVSTGAAAMMAVRVLLDHDVPEDKIFLLSLLMAEMGVHSVAYAFPRVRIITTAVDKRVNDLFRIIPGIGNFGDRYFGTDAVPDGSDEEEVAYTG

SEQ ID NO: 835462 - protein, 1072 aa, Homo sapiens
MAKATSGAAGLRLLLLLLLPLLGKVALGLYFSRDAYWEKLYVDQAAGTPLLYVHALRDAPEEVPSFRLGQHLYGTYRTRLHENNWICIQEDTGLLYLNRSLDHSSWEKLSVRNRGFPLLTVYLKVFLSPTSLREGECQWPGCARVYFSFFNTSFPACSSLKPRELCFPETRPSFRIRENRPPGTFHQFRLLPVQFLCPNISVAYRLLEGEGLPFRCAPDSLEVSTRWALDREQREKYELVAVCTVHAGAREEVVMVPFPVTVYDEDDSAPTFPAGVDTASAVVEFKRKEDTVVATLRVFDADVVPASGELVRRYTSTLLPGDTWAQQTFRVEHWPNETSVQANGSFVRATVHDYRLVLNRNLSISENRTMQLAVLVNDSDFQGPGAGVLLLHFNVSVLPVSLHLPSTYSLSVSRRARRFAQIGKVCVENCQAFSGINVQYKLHSSGANCSTLGVVTSAEDTSGILFVNDTKALRRPKCAELHYMVVATDQQTSRQAQAQLLVTVEGSYVAEEAGCPLSCAVSKRRLECEECGGLGSPTGRCEWRQGDGKGITRNFSTCSPSTKTCPDGHCDVVETQDINICPQDCLRGSIVGGHEPGEPRGIKAGYGTCNCFPEEEKCFCEPEDIQDPLCDELCRTVIAAAVLFSFIVSVLLSAFCIHCYHKFAHKPPISSAEMTFRRPAQAFPVSYSSSGARRPSLDSMENQVSVDAFKILEDPKWEFPRKNLVLGKTLGEGEFGKVVKATAFHLKGRAGYTTVAVKMLKENASPSELRDLLSEFNVLKQVNHPHVIKLYGACSQDGPLLLIVEYAKYGSLRGFLRESRKVGPGYLGSGGSRNSSSLDHPDERALTMGDLISFAWQISQGMQYLAEMKLVHRDLAARNILVAEGRKMKISDFGLSRDVYEEDSYVKRSQGRIPVKWMAIESLFDHIYTTQSDVWSFGVLLWEIVTLGGNPYPGIPPERLFNLLKTGHRMERPDNCSEEMYRLMLQCWKQEPDKRPVFADISKDLEKMMVKRRDYLDLAASTPSDSLIYDDGLSEEETPLVDCNNAPLPRALPSTWIENKLYGRISHAFTRF

SEQ ID NO: 835463 - protein, 1114 aa, Homo sapiens
MAKATSGAAGLRLLLLLLLPLLGKVALGLYFSRDAYWEKLYVDQAAGTPLLYVHALRDAPEEVPSFRLGQHLYGTYRTRLHENNWICIQEDTGLLYLNRSLDHSSWEKLSVRNRGFPLLTVYLKVFLSPTSLREGECQWPGCARVYFSFFNTSFPACSSLKPRELCFPETRPSFRIRENRPPGTFHQFRLLPVQFLCPNISVAYRLLEGEGLPFRCAPDSLEVSTRWALDREQREKYELVAVCTVHAGAREEVVMVPFPVTVYDEDDSAPTFPAGVDTASAVVEFKRKEDTVVATLRVFDADVVPASGELVRRYTSTLLPGDTWAQQTFRVEHWPNETSVQANGSFVRATVHDYRLVLNRNLSISENRTMQLAVLVNDSDFQGPGAGVLLLHFNVSVLPVSLHLPSTYSLSVSRRARRFAQIGKVCVENCQAFSGINVQYKLHSSGANCSTLGVVTSAEDTSGILFVNDTKALRRPKCAELHYMVVATDQQTSRQAQAQLLVTVEGSYVAEEAGCPLSCAVSKRRLECEECGGLGSPTGRCEWRQGDGKGITRNFSTCSPSTKTCPDGHCDVVETQDINICPQDCLRGSIVGGHEPGEPRGIKAGYGTCNCFPEEEKCFCEPEDIQDPLCDELCRTVIAAAVLFSFIVSVLLSAFCIHCYHKFAHKPPISSAEMTFRRPAQAFPVSYSSSGARRPSLDSMENQVSVDAFKILEDPKWEFPRKNLVLGKTLGEGEFGKVVKATAFHLKGRAGYTTVAVKMLKENASPSELRDLLSEFNVLKQVNHPHVIKLYGACSQDGPLLLIVEYAKYGSLRGFLRESRKVGPGYLGSGGSRNSSSLDHPDERALTMGDLISFAWQISQGMQYLAEMKLVHRDLAARNILVAEGRKMKISDFGLSRDVYEEDSYVKRSQGRIPVKWMAIESLFDHIYTTQSDVWSFGVLLWEIVTLGGNPYPGIPPERLFNLLKTGHRMERPDNCSEEMYRLMLQCWKQEPDKRPVFADISKDLEKMMVKRRDYLDLAASTPSDSLIYDDGLSEEETPLVDCNNAPLPRALPSTWIENKLYGMSDPNWPGESPVPLTRADGTNTGFPRYPNDSVYANWMLSPSAAKLMDTFDS

SEQ ID NO: 835464 - protein, 545 aa, Homo sapiens
ALVPGAQLGAPLCSPGAHSFAARPSSPPPPCCSSSFPQPAAAMADSASESDTDGAGGNSSSSAAMQSSCSSTSGGGGGGGGGGGGGKSGGIVISPFRLEELTNRLASLQQENKVLKIELETYKLKCKALQEENRDLRKASVTIEDPKWEFPRKNLVLGKTLGEGEFGKVVKATAFHLKGRAGYTTVAVKMLKENASPSELRDLLSEFNVLKQVNHPHVIKLYGACSQDGPLLLIVEYAKYGSLRGFLRESRKVGPGYLGSGGSRNSSSLDHPDERALTMGDLISFAWQISQGMQYLAEMKLVHRDLAARNILVAEGRKMKISDFGLSRDVYEEDSYVKRSQGRIPVKWMAIESLFDHIYTTQSDVWSFGVLLWEIVTLGGNPYPGIPPERLFNLLKTGHRMERPDNCSEEMYRLMLQCWKQEPDKRPVFADISKDLEKMMVKRRDYLDLAASTPSDSLIYDDGLSEEETPLVDCNNAPLPRALPSTWIENKLYGMSDPNWPGESPVPLTRADGTNTGFPRYPNDSVYANWMLSPSAAKLMDTFDS

SEQ ID NO: 835465 - protein, 165 aa, Homo sapiens
MAKATSGAAGLRLLLLLLLPLLGKDVAEEAGCPLSCAVSKRRLECEECGGLGSPTGRCEWRQGDGKGITRNFSTCSPSTKTCPDGHCDVVETQDINICPQDCLRGQHCLARSTDALGRSPPRGTLHRLWAYFGNSLAISWLFPLWNGKATATHGLALFQGREGPP

SEQ ID NO: 835466 - protein, 516 aa, Homo sapiens
ALVPGAQLGAPLCSPGAHSFAARPSSPPPPCCSSSFPQPAAAMADSASESDTDGAGGNSSSSAAMQSSCSSTSGGGGGGGGGGGGGKSGGIVISPFRLEELTNRLASLQQENKVLKIELETYKLKCKALQEENRDLRKASVTIQARAEQEEEFISNTLFKKIQALQKEKETLAVNYEKEEEFLTNELSRKLMQLQHEKAELEQHLEQEQEFQVNKLMKKIKKLENDTISKQLTLEQLRREKIDLENTLEQEQEALVNRLWKRMDKLEAEKRILQEKLDQPVSAPPSPRDISMEIDSPENMMRHIRFLKNEVERLKKQLRAAQLQHSEKMAQYLEEERHMREENLRLQRKLQREMERREALCRQLSESESSLEMDDERYFNEMSAQGLRPRTVSSPIPYTPSPSSSRPISPGLSYASHTVGFTPPTSLTRAGMSYYNSPGLHVQHMGTSHGITRPSPRRSNSPDKFKRPTPPPSPNTQTPVQPPPPPPPPPMQPTVPSAATSQPTPSQHSAHPSSQP

SEQ ID NO: 835467 - protein, 1072 aa, Homo sapiens; identical to SEQ ID NO: 835462

SEQ ID NO: 835468 - protein, 1091 aa, Homo sapiens
RSSCSHAAVCGTCRRDAGPGGSWAPPYCTSIPYGSTVKEVPSFRLGQHLYGTYRTRLHENNWICIQEDTGLLYLNRSLDHSSWEKLSVRNRGFPLLTVYLKVFLSPTSLREGECQWPGCARVYFSFFNTSFPACSSLKPRELCFPETRPSFRIRENRPPGTFHQFRLLPVQFLCPNISVAYRLLEGEGLPFRCAPDSLEVSTRWALDREQREKYELVAVCTVHAGAREEVVMVPFPVTVYDEDDSAPTFPAGVDTASAVVEFKRKEDTVVATLRVFDADVVPASGELVRRYTSTLLPGDTWAQQTFRVEHWPNETSVQANGSFVRATVHDYRLVLNRNLSISENRTMQLAVLVNDSDFQGPGAGVLLLHFNVSVLPVSLHLPSTYSLSVSRRARRFAQIGKVCVENCQAFSGINVQYKLHSSGANCSTLGVVTSAEDTSGILFVNDTKALRRPKCAELHYMVVATDQQTSRQAQAQLLVTVEGSYVAEEAGCPLSCAVSKRRLECEECGGLGSPTGRCEWRQGDGKGITRNFSTCSPSTKTCPDGHCDVVETQDINICPQDCLRGSIVGGHEPGEPRGIKAGYGTCNCFPEEEKCFCEPEDIQDPLCDELCRTVIAAAVLFSFIVSVLLSAFCIHCYHKFAHKPPISSAEMTFRRPAQAFPVSYSSSGARRPSLDSMENQVSVDAFKILEDPKWEFPRKNLVLGKTLGEGEFGKVVKATAFHLKGRAGYTTVAVKMLKENASPSELRDLLSEFNVLKQVNHPHVIKLYGACSQDGPLLLIVEYAKYGSLRGFLRESRKVGPGYLGSGGSRNSSSLDHPDERALTMGDLISFAWQISQGMQYLAEMKLVHRDLAARNILVAEGRKMKISDFGLSRDVYEEDSYVKRSQGRIPVKWMAIESLFDHIYTTQSDVWSFGVLLWEIVTLGGNPYPGIPPERLFNLLKTGHRMERPDNCSEEMYRLMLQCWKQEPDKRPVFADISKDLEKMMVKRRDYLDLAASTPSDSLIYDDGLSEEETPLVDCNNAPLPRALPSTWIENKLYGMSDPNWPGESPVPLTRADGTNTGFPRYPNDSVYANWMLSPSAAKLMDTFDS

SEQ ID NO: 835469 - protein, 458 aa, Homo sapiens
MAKATSGAAGLRLLLLLLLPLLGKVALGLYFSRDAYWEKLYVDQAAGTPLLYVHALRDAPEEVPSFRLGQHLYGTYRTRLHENNWICIQEDTGLLYLNRSLDHSSWEKLSVRNRGFPLLTVYLKVFLSPTSLREGECQWPGCARVYFSFFNTSFPACSSLKPRELCFPETRPSFRIRENRPPGTFHQFRLLPVQFLCPNISVAYRLLEGEGLPFRCAPDSLEVSTRWALDREQREKYELVAVCTVHAGAREEVVMVPFPVTVYDEDDSAPTFPAGVDTASAVVEFKRKEDTVVATLRVFDADVVPASGELVRRYTSTLLPGDTWAQQTFRVEHWPNETSVQANGSFVRATVHDYRLVLNRNLSISENRTMQLAVLVNDSDFQGPGAGVLLLHFNVSVLPVSLHLPSTYSLSVSRRARRFAQIGKVCVENCLADLTGDAVSGRDEARSSGLGSQKHPGS

SEQ ID NO: 835470 - protein, 898 aa, Homo sapiens
MSWFVDLAGKAEDLLNRVDQGAATALSRKDNASNIYSKNTDYTELHQQNTDLIYQTGPKSTYISSAADNIRNQKATILAGTANVKVGSRTPVEASHPVENASVPRPSSHFVRRKKSEPDDELLFDFLNSSQKEPTGRVEIRKEKGKTPVFQSSQTSSVSSVNPSVTTIKTIEENSFGSQTHEAASNSDSSHEGQEESSKENVSSNAACPDHTPTPNDDGKSHELSNLRLENQLLRNEVQSLNQEMASLLQRSKETQEELNKARARVEKWNADHSKSDRMTRGLRAQVDDLTEAVAAKDSQLAVLKVRLQEADQLLSTRTEALEALQSEKSRIMQDQSEGNSLQNQALQTLQERLHEADATLKREQESYKQMQSEFAARLNKVEMERQNLAEAITLAERKYSDEKKRVDELQQQVKLYKLNLESSKQELIDYKQKATRILQSKEKLINSLKEGSGFEGLDSSTASSMELEELRHEKEMQREEIQKLMGQIHQLQIRIEDPKWEFPRKNLVLGKTLGEGEFGKVVKATAFHLKGRAGYTTVAVKMLKENASPSELRDLLSEFNVLKQVNHPHVIKLYGACSQDGPLLLIVEYAKYGSLRGFLRESRKVGPGYLGSGGSRNSSSLDHPDERALTMGDLISFAWQISQGMQYLAEMKLVHRDLAARNILVAEGRKMKISDFGLSRDVYEEDSYVKRSQGRIPVKWMAIESLFDHIYTTQSDVWSFGVLLWEIVTLGGNPYPGIPPERLFNLLKTGHRMERPDNCSEEMYRLMLQCWKQEPDKRPVFADISKDLEKMMVKRRDYLDLAASTPSDSLIYDDGLSEEETPLVDCNNAPLPRALPSTWIENKLYGMSDPNWPGESPVPLTRADGTNTGFPRYPNDSVYANWMLSPSAAKLMDTFDS

SEQ ID NO: 835471 - protein, 435 aa, Homo sapiens
MEELIVELRLFLELLDHEYLTSTVREKKAVITNILLRIQSSKGFDVKDHAQKQETANSLPAPPQMPLPEIPQPWLEDPKWEFPRKNLVLGKTLGEGEFGKVVKATAFHLKGRAGYTTVAVKMLKENASPSELRDLLSEFNVLKQVNHPHVIKLYGACSQDGPLLLIVEYAKYGSLRGFLRESRKVGPGYLGSGGSRNSSSLDHPDERALTMGDLISFAWQISQGMQYLAEMKLVHRDLAARNILVAEGRKMKISDFGLSRDVYEEDSYVKRSQGRIPVKWMAIESLFDHIYTTQSDVWSFGVLLWEIVTLGGNPYPGIPPERLFNLLKTGHRMERPDNCSEEMYRLMLQCWKQEPDKRPVFADISKDLEKMMVKRRDYLDLAASTPSDSLIYDDGLSEEETPLVDCNNAPLPRALPSTWIENKLYGRISHAFTRF

SEQ ID NO: 835472 - protein, 542 aa, Homo sapiens
ALVPGAQLGAPLCSPGAHSFAARPSSPPPPCCSSSFPQPAAAMADSASESDTDGAGGNSSSSAAMQSSCSSTSGGGGGGGGGGGGGKSGGIVISPFRLEELTNRLASLQQENKVLKIELETYKLKCKALQEENRDLRKASVTIILENRPSVLFLPVPWRLPRNRPSLDSMENQVSVDAFKILEDPKWEFPRKNLVLGKTLGEGEFGKVVKATAFHLKGRAGYTTVAVKMLKENASPSELRDLLSEFNVLKQVNHPHVIKLYGACSQDGPLLLIVEYAKYGSLRGFLRESRKVGPGYLGSGGSRNSSSLDHPDERALTMGDLISFAWQISQGMQYLAEMKLVHRDLAARNILVAEGRKMKISDFGLSRDVYEEDSYVKRSQGRIPVKWMAIESLFDHIYTTQSDVWSFGVLLWEIVTLGGNPYPGIPPERLFNLLKTGHRMERPDNCSEEMYRLMLQCWKQEPDKRPVFADISKDLEKMMVKRRDYLDLAASTPSDSLIYDDGLSEEETPLVDCNNAPLPRALPSTWIENKLYGRISHAFTRF

SEQ ID NO: 835473 - protein, 121 aa, Homo sapiens
KLNLEALGCLDLQLPGTGAAGNMWPEWNGAGQGWGRWVGMKALRGGGQGARGGCCLQAQLGAVPGLRLCGNLYPQAITGRSSCLAKVFPCAPLDRESLCGKLPGVQWHQRPVQAAFLWCQL

SEQ ID NO: 835474 - protein, 1114 aa, Homo sapiens; identical to SEQ ID NO: 835463

SEQ ID NO: 835475 - protein, 1106 aa, Homo sapiens
MAKATSGAAGLRLLLLLLLPLLGKVALGLYFSRDAYWEKLYVDQAAGTPLLYVHALRDAPEEVPSFRLGQHLYGTYRTRLHENNWICIQEDTGLLYLNRSLDHSSWEKLSVRNRGFPLLTVYLKVFLSPTSLREGECQWPGCARVYFSFFNTSFPACSSLKPRELCFPETRPSFRIRENRPPGTFHQFRLLPVQFLCPNISVAYRLLEGEGLPFRCAPDSLEVSTRWALDREQREKYELVAVCTVHAGAREEVVMVPFPVTVYDEDDSAPTFPAGVDTASAVVEFKRKEDTVVATLRVFDADVVPASGELVRRYTSTLLPGDTWAQQTFRVEHWPNETSVQANGSFVRATVHDYRLVLNRNLSISENRTMQLAVLVNDSDFQGPGAGVLLLHFNVSVLPVSLHLPSTYSLSVSRRARRFAQIGKVCVENCQAFSGINVQYKLHSSGANCSTLGVVTSAEDTSGILFVNDTKALRRPKCAELHYMVVATDQQTSRQAQAQLLVTVEGSYVAEEAGCPLSCAVSKRRLECEECGGLGSPTGRCEWRQGDGKGITRNFSTCSPSTKTCPDGHCDVVETQDINICPQDCLRGSIVGGHEPGEPRGIKAGYGTCNCFPEEEKCFCEPEDIQDPLCDELCRTVIAAAVLFSFIVSVLLSAFCIHCYHKFAHKPPISSAEMTFRRPAQAFPVSYSSSGARRPSLDSMENQVSVDAFKILEDPKWEFPRKNLVLGKTLGEGEFGKVVKATAFHLKGRAGYTTVAVKMLKENASPSELRDLLSEFNVLKQVNHPHVIKLYGACSQDGPLLLIVEYAKYGSLRGFLRESRKVGPGYLGSGGSRNSSSLDHPDERALTMGDLISFAWQISQGMQYLAEMKLVHRDLAARNILVAEGRKMKISDFGLSRDVYEEDSYVKRSQGRIPVKWMAIESLFDHIYTTQSDVWSFGVLLWEIVTLGGNPYPGIPPERLFNLLKTGHRMERPDNCSEEMYRLMLQCWKQEPDKRPVFADISKDLEKMMVKRRDYLDLAASTPSDSLIYDDGLSEEETPLVDCNNAPLPRALPSTWIENKLYDAQHSSSLVGAAFGKSQQLFWLCCQHCNFAEKSRITKTLPALQT

SEQ ID NO: 835476 - protein, 99 aa, Homo sapiens
RFVHRIVSHGSSGSGTWGSPGLEAGCITAQRTTALEDPGPILIQADGSKIAHLAPIRFLKNEVERLKKQLRAAQLQHSEKMAQYLEEERLMGVLLPSAT

SEQ ID NO: 835477 - protein, 516 aa, Homo sapiens; identical to SEQ ID NO: 835466

SEQ ID NO: 835478 - protein, 1072 aa, Homo sapiens; identical to SEQ ID NO: 835462

SEQ ID NO: 835479 - protein, 805 aa, Homo sapiens
QAGAMASGSVAECLQQETTCPVCLQYFAEPMMLDCGHNICCACLARCWGTAETNVSCPQCRETFPQRHMRPNRHLANVTQLVKQLRTERPSGPGGEMGVCEKHREPLKLYCEEDQMPICVVCDRSREHRGHSVLPLEEAVEGFKEQIQNQLDHLKRVKDLKKRRRAQGEQARAELLSLTQMEREKIVWEFEQLYHSLKEHEYRLLARLEELDLAIYNSINGAITQFSCNISHLSSLIAQLEEKQQQPTRELLQDIGDTLSRAERIRIPEPWITPPDLQEKIHIFAPKCLFLTESLKQFTEKMQSDMEKIQELREAQLYSGGSIVGGHEPGEPRGIKAGYGTCNCFPEEEKCFCEPEDIQDPLCDELCRTVIAAAVLFSFIVSVLLSAFCIHCYHKFAHKPPISSAEMTFRRPAQAFPVSYSSSGARRPSLDSMENQVSVDAFKILEDPKWEFPRKNLVLGKTLGEGEFGKVVKATAFHLKGRAGYTTVAVKMLKENASPSELRDLLSEFNVLKQVNHPHVIKLYGACSQDGPLLLIVEYAKYGSLRGFLRESRKVGPGYLGSGGSRNSSSLDHPDERALTMGDLISFAWQISQGMQYLAEMKLVHRDLAARNILVAEGRKMKISDFGLSRDVYEEDSYVKRSQGRIPVKWMAIESLFDHIYTTQSDVWSFGVLLWEIVTLGGNPYPGIPPERLFNLLKTGHRMERPDNCSEEMYRLMLQCWKQEPDKRPVFADISKDLEKMMVKRRDYLDLAASTPSDSLIYDDGLSEEETPLVDCNNAPLPRALPSTWIENKLYGRISHAFTRF

SEQ ID NO: 835480 - protein, 599 aa, Homo sapiens
QRTMESGSTAASEEARSLRECELYVQKHNIQALLKDSIVQLCTARPERPMAFLREYFERLEKEEAKQIQNLQKAGTRTDSREDEISPPPPNPVVKGRRRRGAISAEVYTEEDAASYVRKVIPKDYKTMAALAKAIEKNVLFSHLDDNERSDIFDAMFSVSFIAGETVIQQGDEGDNFYVIDQGETDVYVNNEWATSVGEGGSFGELALIYGTPRAATVKAKTNVKLWGIDRDSYRRILMEDPKWEFPRKNLVLGKTLGEGEFGKVVKATAFHLKGRAGYTTVAVKMLKENASPSELRDLLSEFNVLKQVNHPHVIKLYGACSQDGPLLLIVEYAKYGSLRGFLRESRKVGPGYLGSGGSRNSSSLDHPDERALTMGDLISFAWQISQGMQYLAEMKLVHRDLAARNILVAEGRKMKISDFGLSRDVYEEDSYVKRSQGRIPVKWMAIESLFDHIYTTQSDVWSFGVLLWEIVTLGGNPYPGIPPERLFNLLKTGHRMERPDNCSEEMYRLMLQCWKQEPDKRPVFADISKDLEKMMVKRRDYLDLAASTPSDSLIYDDGLSEEETPLVDCNNAPLPRALPSTWIENKLYGRISHAFTRF

SEQ ID NO: 835481 - protein, 963 aa, Homo sapiens
MAKATSGAAGLRLLLLLLLPLLGKVALGLYFSRDAYWEKLYVDQAAGTPLLYVHALRDAPEEVPSFRLGQHLYGTYRTRLHENNWICIQEDTGLLYLNRSLDHSSWEKLSVRNRGFPLLTVYLKVFLSPTSLREGECQWPGCARVYFSFFNTSFPACSSLKPRELCFPETRPSFRIRENRPPGTFHQFRLLPVQFLCPNISVAYRLLEGEGLPFRCAPDSLEVSTRWALDREQREKYELVAVCTVHAGAREEVVMVPFPVTVYDEDDSAPTFPAGVDTASAVVEFKRKEDTVVATLRVFDADVVPASGELVRRYTSTLLPGDTWAQQTFRVEHWPNETSVQANGSFVRATVHDYRLVLNRNLSISENRTMQLAVLVNDSDFQGPGAGVLLLHFNVSVLPVSLHLPSTYSLSVSRRARRFAQIGKVCVENCQAFSGINVQYKLHSSGANCSTLGVVTSAEDTSGILFVNDTKALRRPKCAELHYMVVATDQQTSRQAQAQLLVTVEGSYVAEEAGCPLSCAVSKRRLECEECGGLGSPTGRCEWRQGDGKGITRNFSTCSPSTKTCPDGHCDVVETQDINICPQDCLRGSIVGGHEPGEPRGIKAGYGTCNCFPEEEKCFCEPEDIQDPLCDELCRTVIAAAVLFSFIVSVLLSAFCIHCYHKFAHKPPISSAEMTFRRPAQAFPVSYSSSGARRPSLDSMENQVSVDAFKILEDPKWEFPRKNLVLGKTLGEGEFGKVVKATAFHLKGRAGYTTVAVKMLKENASPSELRDLLSEFNVLKQVNHPHVIKLYGACSQDGPLLLIVEYAKYGSLRGFLRESRKVGPGYLGSGGSRNSSSLDHPDERALTMGDLISFAWQISQGMQYLAEMKLVHRDLAARNILVAEGRKMKISDFGLSRDVYEEDSYVKRSQVRIRFTGGIDSFDHFIHSKCCWSLALRGNPALGNPSGFPGGPLDAGGAPLRFP

SEQ ID NO: 835482 - protein, 127 aa, Homo sapiens
RLQWGGASLRGWDSSLGTALLIKAWLLQESRLQSRKFSPPATSSPTPCKVPSTPASSWEGSMKRVGSPTRAPGIRGPLSKRLALECSRRADACATPSSAWGLTTHLTRGPTWGKPEGPPSPQPQDQA

SEQ ID NO: 835483 - protein, 190 aa, Homo sapiens
VYIYICKCLQYISKIETILCLPGERVVAFAAVEGVFFSGSFAAIFWLKKRGLMPGLTFSNELISRDEGLHCDFACLMFQYLVNKPSEERVREIIVDAVKIEQEFLTEALPVGLIGMNCILMKQYIEFVADRLLVELGFSKVFQAENPFDFMENISLEGKTNFFEKRVSEYQRFAVMAETTDNVFTLDADF

SEQ ID NO: 835484 - protein, 351 aa, Homo sapiens
MGDPERPEAAGLDQDERSSSDTNESEIKSNEEPLLRKSSRRFVIFPIQYPDIWKMYKQAQASFWTAEEVDLSKDLPHWNKLKADEKYFISHILAFFAASDGIVNENLVERFSQEVQVPEARCFYGFQILIENVHSEMYSLLIDTYIRDPKKREFLFNAIETMPYVKKKADWALRWIADRKSTFGERVVAFAAVEGVFFSGSFAAIFWLKKRGLMPGLTFSNELISRDEGLHCDFACLMFQYLVNKPSEERVREIIVDAVKIEQEFLTEALPVGLIGMNCILMKQYIEFVADRLLVELGFSKVFQAENPFDFMENISLEGKTNFFEKRVSEYQRFAVMAETTDNVFTLDADF

SEQ ID NO: 835485 - protein, 351 aa, Homo sapiens; identical to SEQ ID NO: 835484

SEQ ID NO: 835486 - protein, 351 aa, Homo sapiens; identical to SEQ ID NO: 835484

SEQ ID NO: 835487 - protein, 351 aa, Homo sapiens; identical to SEQ ID NO: 835484

SEQ ID NO: 835488 - protein, 393 aa, Homo sapiens
RLVRGWVNRPRELKKDPKGVILKNSASVGIIQRDESPMEKGLSGLRGRDFELSDVFYFSKKGLEAIVEDEVTQRFSSEELVSWNLLTRTNVNFQYISLRLTMVWVLGVIVRYCVLLPLRVTLAFIGISLLVIGTTLVGQLPDSSLKNWLSELVHLTCCRICVRALSGTIHYHNKQYRPQKGGICVANHTSPIDVLILTTDGCYAMVGQVHGGLMGIIQRAMVKACPHVWFERSEMKDRHLVTKRLKEHIADKKKLPILIFPEGTCINNTSVMMFKKGSFEIGGTIHPVAIKYNPQFGDAFWNSSKYNMVSYLLRMMTSWAIVCDVWYMPPMTREEGEDAVQFANRVKSAIAIQGGLTELPWDGGLKRAKVKDIFKEEQQKNYSKMIVGNGSLS

SEQ ID NO: 835489 - protein, 82 aa, Homo sapiens
SYGQGCPHVWFERSEMKDDTWLLRGNQVSIPHVWFERSEMKDRHLVTKRKAVKLLSIHWSSIKADQSWPCYQRGPSSTESQN

SEQ ID NO: 835490 - protein, 244 aa, Homo sapiens
RLVRGWVNRPRELKKDPKGVILKNSASVGIIQRDESPMEKGLSGLRGRDFELSDVFYFSKKGLEAIVEDEVTQRFSSEELVSWNLLTRTNVNFQYISLRLTMVWVLGVIVRYCVLLPLRVTLAFIGISLLVIGTTLVGQLPDSSLKNWLSELVHLTCCRICVRALSGTIHYHNKQYRPQKGGICVANHTSPIDVLILTTDGCYAMVGQVHGGLMGIIQRAMVKACPHVWFERSEMKDRHLVTKR

SEQ ID NO: 835491 - protein, 76 aa, Homo sapiens
DTGRRAGRRVRREPRPPQQRVCACPGAGFRGFPPLWVHSWTSGVLVWSTPFESRREKLLCVLSVLKEGVRWPSYPS

SEQ ID NO: 835492 - protein, 76 aa, Homo sapiens; identical to SEQ ID NO: 835491

SEQ ID NO: 835493 - protein, 76 aa, Homo sapiens; identical to SEQ ID NO: 835491

SEQ ID NO: 835494 - protein, 75 aa, Homo sapiens
MVKHMRILHVNGFNGDENASKVQDIKNNLKEAIETIVAAMSNLLPPVELANPENQFREDYLLSVMNVPDYDFPPE

SEQ ID NO: 835495 - protein, 42 aa, Homo sapiens
RRRRESSSQEEEVIDGFAIASFSTLEALEKDMALKPHERKEK

SEQ ID NO: 835496 - protein, 456 aa, Homo sapiens
PPSPAGAAGEPGVAGCVGLPRRVSPRALPADSLGTQAQGLEPRDESAQGRCEPGGLPANLSLKPQKRALRPGLPCLRPSMRLSVRRVLLAAGCALVLVLAVQLGQQVLECRAVLAGLRSPRGAMRPEQEELVMVGTNHVEYRYGKAMPLIFVGGVPRSGTTLMRAMLDAHPEVRCGEETRIIPRVLAMRQAWSKSGREKLRLDEAGVTDEVLDAAMQAFILEVIAKHGEPARVLCNKDPFTLKSSVYLSRLFPNSKFLLMVRDGRASVHSMITRKVTIAGFDLSSYRDCLTKWNKAIEVMYAQCMEVGKEKCLPVYYEQLVLHPRRSLKLILDFLGIAWSDAVLHHEDLIGKPGGVSLSKIERSTDQVIKPVNLEALSKWTGHIPGDVVRDMAQIAPMLAQLGYDPYANPPNYGNPDPFVINNTQRVLKGDYKTPANLKGYFQVNQNSTSSHLGSS

SEQ ID NO: 835497 - protein, 500 aa, Homo sapiens
PPSPAGAAGEPGVAGCVGLPRRVSPRALPADSLGTQAQGLEPRDESAQGRCEPGGLPANLSLKPQKRALRPGLPCLRPSMRLSVRRVLLAAGCALVLVLAVQLGQQVLECRAVLAGLRSPRGAMRPEQEELVMVGTNHVEYRYGKAMPLIFVGGVPRSGTTLMRAMLDAHPEVRCGEETRIIPRVLAMRQAWSKSGREKLRLDEAGVTDEVLDAAMQAFILEVIAKHGEPARVLCNKDPFTLKSSVYLSRLFPNSKFLLMVRDGRASVHSMITRKVTIAGFDLSSYRDCLTKWNKAIEVMYAQCMEVGKEKCLPVYYEQLVLHPRRSLKLILDFLGIAWSDAVLHHEDLIGKPGGVSLSKIERSTDQVIKPVNLEALSKWTGHIPGDVVRDMAQIAPMLAQLGYDPYANPPNYGNPDPFVINNTQRVSVHLYLWKCTLGDMGLLQMWKLQPPEEMFSLSIPGHLICSCLMDTVNYMIACISILLGLQGSSKPTGSLSLIL

SEQ ID NO: 835498 - protein, 360 aa, Homo sapiens
PPSPAGAAGEPGVAGCVGLPRRVSPRALPADSLGTQAQGLEPRDESAQGRCEPGGLPANLSLKPQKRALRPGLPCLRPSMRLSVRRVLLAAGCALVLVLAVQLGQQVLECRAVLAGLRSPRGAMRPEQEELVMVGTNHVEYRYGKAMPLIFVGGVPRSGTTLMRAMLDAHPEVRCGEETRIIPRVLAMRQAWSKSGREKLRLDEAGVTDEVLDAAMQAFILEVIAKHGEPARVLCNKDPFTLKSSVYLSRLFPNSKFLLMVRDGRASVHSMITRKVTIAGFDLSSYRDCLTKWNKAIEVMYAQCMEVGKEKCLPVYYEQLVLHPRRSLKLILDFLGIAWSDAVLHHEDLIGKPGGVSLSK

SEQ ID NO: 835499 - protein, 456 aa, Homo sapiens; identical to SEQ ID NO: 835496

SEQ ID NO: 835500 - protein, 456 aa, Homo sapiens; identical to SEQ ID NO: 835496

SEQ ID NO: 835501 - protein, 241 aa, Homo sapiens
MQAFILEVIAKHGEPARVLCNKDPFTLKSSVYLSRLFPNSKFLLMVRDGRASVHSMITRKVTIAGFDLSSYRDCLTKWNKAIEVMYAQCMEVGKEKCLPVYYEQLVLHPRRSLKLILDFLGIAWSDAVLHHEDLIGKPGGVSLSKIERSTDQVIKPVNLEALSKWTGHIPGDVVRDMAQIAPMLAQLGYDPYANPPNYGNPDPFVINNTQRVLKGDYKTPANLKGYFQVNQNSTSSHLGSS

SEQ ID NO: 835502 - protein, 92 aa, Homo sapiens
MPSSTGRTMYVLPFSMGPVGSPLSRIGVQLTDSAYVVASMRIMTRLGTPVLQALGDGDFVKCLHSVGQPLTGQGKHLLCPKGNTEAFLYSEE

SEQ ID NO: 835503 - protein, 235 aa, Homo sapiens
MAALYRPGLRLNWHGLSPLGWPSCRSIQTLRVLSGDLGQLPTGIRDFVEHSARLCQPEGIHICDGTEAENTATLTLLEQQGLIRKLPKYNNCWLARTDPKDVARVESKTVIVTPSQRDTVPLPPGGARGQLGNWMSPADFQRAVDERFPGCMQGRTMYVLPFSMGPVGSPLSRIGVQLTDSAYVVASMRIMTRLGTPVLQALGDGDFVKCLHSVGQPLTGQGEPVSQLACTKRKT

SEQ ID NO: 835504 - protein, 106 aa, Homo sapiens
KGSENGIAEVLGERVPVKLTRRAGVRVQRKGLPVTLFIGDLGVPLVYEAFNWRHGVFVGSAMRSESTAAAEHKGEHPHHSSLSCVCTQHVLSPFLSQTFLLSTPGV

SEQ ID NO: 835505 - protein, 84 aa, Homo sapiens
CMCVLGVDMTLEIIVFVFPLPGDKEPCAHPNSRFCAPARQCPIMDPAWEAPEGVPIDAIIFGGRRPKGKQHMSSMFLAKGLSLY

SEQ ID NO: 835506 - protein, 640 aa, Homo sapiens
MAALYRPGLRLNWHGLSPLGWPSCRSIQTLRVLSGDLGQLPTGIRDFVEHSARLCQPEGIHICDGTEAENTATLTLLEQQGLIRKLPKYNNCWLARTDPKDVARVESKTVIVTPSQRDTVPLPPGGARGQLGNWMSPADFQRAVDERFPGCMQGRTMYVLPFSMGPVGSPLSRIGVQLTDSAYVVASMRIMTRLGTPVLQALGDGDFVKCLHSVGQPLTGQGEPVSQWPCNPEKTLIGHVPDQREIISFGSGYGGNSLLGKKCFALRIASRLARDEGWLAEHMLILGITSPAGKKRYVAAAFPSACGKTNLAMMRPALPGWKVECVGDDIAWMRFDSEGRLRAINPENGFFGVAPGTSATTNPNAMATIQSNTIFTNVAETSDGGVYWEGIDQPLPPGVTVTSWLGKPWKPGDKEPCAHPNSRFCAPARQCPIMDPAWEAPEGVPIDAIIFGGRRPKGVPLVYEAFNWRHGVFVGSAMRSESTAAAEHKGKIIMHDPFAMRPFFGYNFGHYLEHWLSMEGRKGAQLPRIFHVNWFRRDEAGHFLWPGFGENARVLDWICRRLEGEDSARETPIGLVPKEGALDLSGLRAIDTTQLFSLPKDFWEQEVRDIRSYLTEQVNQDLPKEVLAELEALERRVHKM

SEQ ID NO: 835507 - protein, 640 aa, Homo sapiens; identical to SEQ ID NO: 835506

SEQ ID NO: 835508 - protein, 497 aa, Homo sapiens
MAALYRPGLRLNWHGLSPLGWPSCRSIQTLRVLSGDLGQLPTGIRDFVEHSARLCQPEGIHICDGTEAENTATLTLLEQQGLIRKLPKYNNCWLARTDPKDVARVESKTVIVTPSQRDTVPLPPGGARGQLGNWMSPADFQRAVDERFPGCMQGRTMYVLPFSMGPVGSPLSRIGVQLTDSAYVVASMRIMTRLGTPVLQALGDGDFVKCLHSVGQPLTGQGEPVSQWPCNPEKTLIGHVPDQREIISFGSGYGGNSLLGKKCFALRIASRLARDEGWLAEHMLILGITSPAGKKRYVAAAFPSACGKTNLAMMRPALPGWKVECVGDDIAWMRFDSEGRLRAINPENGFFGVAPGTSATTNPNAMATIQSNTIFTNVAETSDGGVYWEGIDQPLPPGVTVTSWLGKPWKPGDKEPCAHPNSRFCAPARQCPIMDPAWEAPEGVPIDAIIFGGRRPKGVPLVYEAFNWRHGVFVGSAMRSESTAAAEHKGLLGTGGS

SEQ ID NO: 835509 - protein, 498 aa, Homo sapiens
MAALYRPGLRLNWHGLSPLGWPSCRSIQTLRVLSGDLGQLPTGIRDFVEHSARLCQPEGIHICDGTEAENTATLTLLEQQGLIRKLPKYNNCWLARTDPKDVARVESKTVIVTPSQRDTVPLPPGGARGQLGNWMSPADFQRAVDERFPGCMQGRTMYVLPFSMGPVGSPLSRIGVQLTDSAYVVASMRIMTRLGTPVLQALGDGDFVKCLHSVGQPLTGQGEPVSQWPCNPEKTLIGHVPDQREIISFGSGYGGNSLLGKKCFALRIASRLARDEGWLAEHMLILGITSPAGKKRYVAAAFPSACGKTNLAMMRPALPGWKVECVGDDIAWMRFDSEGRLRAINPENGFFGVAPGTSATTNPNAMATIQSNTIFTNVAETSDGGVYWEGIDQPLPPGVTVTSWLGKPWKPGDKEPCAHPNSRFCAPARQCPIMDPAWEAPEGVPIDAIIFGGRRPKEMGFRHIAQADLKFLWSSELPASASQSTGITGVSYHAYYTF

SEQ ID NO: 835510 - protein, 441 aa, Homo sapiens
MAALYRPGLRLNWHGLSPLGWPSCRSIQTLRVLSGDLGQLPTGIRDFVEHSARLCQPEGIHICDGTEAENTATLTLLEQQGLIRKLPKYNNCWLARTDPKDVARVESKTVIVTPSQRDTVPLPPGGARGQLGNWMSPADFQRAVDERFPGCMQGRTMYVLPFSMGPVGSPLSRIGVQLTDSAYVVASMRIMTRLGTPVLQALGDGDFVKCLHSVGQPLTGQGEPVSQWPCNPEKTLIGHVPDQREIISFGSGYGGNSLLGKKCFALRIASRLARDEGWLAEHMLILGITSPAGKKRYVAAAFPSACGKTNLAMMRPALPGWKVECVGDDIAWMRFDSEGRLRAINPENGFFGVAPGTSATTNPNAMATIQSNTIFTNVAETSDGGVYWEGIDQPLPPGVTVTSWLGKPWKPGMCGGEGVAQPPGLSTLMVEKLSPQPPTIF

SEQ ID NO: 835511 - protein, 441 aa, Homo sapiens; identical to SEQ ID NO: 835510

SEQ ID NO: 835512 - protein, 664 aa, Homo sapiens
MAALYRPGLRLTPSESELPASCCSTLPPTPKLSRLNWHGLSPLGWPSCRSIQTLRVLSGDLGQLPTGIRDFVEHSARLCQPEGIHICDGTEAENTATLTLLEQQGLIRKLPKYNNCWLARTDPKDVARVESKTVIVTPSQRDTVPLPPGGARGQLGNWMSPADFQRAVDERFPGCMQGRTMYVLPFSMGPVGSPLSRIGVQLTDSAYVVASMRIMTRLGTPVLQALGDGDFVKCLHSVGQPLTGQGEPVSQWPCNPEKTLIGHVPDQREIISFGSGYGGNSLLGKKCFALRIASRLARDEGWLAEHMLILGITSPAGKKRYVAAAFPSACGKTNLAMMRPALPGWKVECVGDDIAWMRFDSEGRLRAINPENGFFGVAPGTSATTNPNAMATIQSNTIFTNVAETSDGGVYWEGIDQPLPPGVTVTSWLGKPWKPGDKEPCAHPNSRFCAPARQCPIMDPAWEAPEGVPIDAIIFGGRRPKGVPLVYEAFNWRHGVFVGSAMRSESTAAAEHKGKIIMHDPFAMRPFFGYNFGHYLEHWLSMEGRKGAQLPRIFHVNWFRRDEAGHFLWPGFGENARVLDWICRRLEGEDSARETPIGLVPKEGALDLSGLRAIDTTQLFSLPKDFWEQEVRDIRSYLTEQVNQDLPKEVLAELEALERRVHKM

SEQ ID NO: 835513 - protein, 643 aa, Homo sapiens
MVLREAAGPWGQGLNWHGLSPLGWPSCRSIQTLRVLSGDLGQLPTGIRDFVEHSARLCQPEGIHICDGTEAENTATLTLLEQQGLIRKLPKYNNCWLARTDPKDVARVESKTVIVTPSQRDTVPLPPGGARGQLGNWMSPADFQRAVDERFPGCMQGRTMYVLPFSMGPVGSPLSRIGVQLTDSAYVVASMRIMTRLGTPVLQALGDGDFVKCLHSVGQPLTGQGEPVSQWPCNPEKTLIGHVPDQREIISFGSGYGGNSLLGKKCFALRIASRLARDEGWLAEHMLILGITSPAGKKRYVAAAFPSACGKTNLAMMRPALPGWKVECVGDDIAWMRFDSEGRLRAINPENGFFGVAPGTSATTNPNAMATIQSNTIFTNVAETSDGGVYWEGIDQPLPPGVTVTSWLGKPWKPGDKEPCAHPNSRFCAPARQCPIMDPAWEAPEGVPIDAIIFGGRRPKGVPLVYEAFNWRHGVFVGSAMRSESTAAAEHKGKIIMHDPFAMRPFFGYNFGHYLEHWLSMEGRKGAQLPRIFHVNWFRRDEAGHFLWPGFGENARVLDWICRRLEGEDSARETPIGLVPKEGALDLSGLRAIDTTQLFSLPKDFWEQEVRDIRSYLTEQVNQDLPKEVLAELEALERRVHKM

SEQ ID NO: 835514 - protein, 658 aa, Homo sapiens
  misc_feature (20)..(20): Xaa can be any naturally occurring amino acid
FKNWGTNWSGLEKARRLSGXLGGQVRFGTDEASSEGNPWTDKVGVYVRVCIFVACLYLPTGIRDFVEHSARLCQPEGIHICDGTEAENTATLTLLEQQGLIRKLPKYNNCWLARTDPKDVARVESKTVIVTPSQRDTVPLPPGGARGQLGNWMSPADFQRAVDERFPGCMQGRTMYVLPFSMGPVGSPLSRIGVQLTDSAYVVASMRIMTRLGTPVLQALGDGDFVKCLHSVGQPLTGQGEPVSQWPCNPEKTLIGHVPDQREIISFGSGYGGNSLLGKKCFALRIASRLARDEGWLAEHMLILGITSPAGKKRYVAAAFPSACGKTNLAMMRPALPGWKVECVGDDIAWMRFDSEGRLRAINPENGFFGVAPGTSATTNPNAMATIQSNTIFTNVAETSDGGVYWEGIDQPLPPGVTVTSWLGKPWKPGDKEPCAHPNSRFCAPARQCPIMDPAWEAPEGVPIDAIIFGGRRPKGVPLVYEAFNWRHGVFVGSAMRSESTAAAEHKGKIIMHDPFAMRPFFGYNFGHYLEHWLSMEGRKGAQLPRIFHVNWFRRDEAGHFLWPGFGENARVLDWICRRLEGEDSARETPIGLVPKEGALDLSGLRAIDTTQLFSLPKDFWEQEVRDIRSYLTEQVNQDLPKEVLAELEALERRVHKM

SEQ ID NO: 835515 - protein, 633 aa, Homo sapiens
YDSFLAHDSFTTRFLPTTRIQTLRVLSGDLGQLPTGIRDFVEHSARLCQPEGIHICDGTEAENTATLTLLEQQGLIRKLPKYNNCWLARTDPKDVARVESKTVIVTPSQRDTVPLPPGGARGQLGNWMSPADFQRAVDERFPGCMQGRTMYVLPFSMGPVGSPLSRIGVQLTDSAYVVASMRIMTRLGTPVLQALGDGDFVKCLHSVGQPLTGQGEPVSQWPCNPEKTLIGHVPDQREIISFGSGYGGNSLLGKKCFALRIASRLARDEGWLAEHMLILGITSPAGKKRYVAAAFPSACGKTNLAMMRPALPGWKVECVGDDIAWMRFDSEGRLRAINPENGFFGVAPGTSATTNPNAMATIQSNTIFTNVAETSDGGVYWEGIDQPLPPGVTVTSWLGKPWKPGDKEPCAHPNSRFCAPARQCPIMDPAWEAPEGVPIDAIIFGGRRPKGVPLVYEAFNWRHGVFVGSAMRSESTAAAEHKGKIIMHDPFAMRPFFGYNFGHYLEHWLSMEGRKGAQLPRIFHVNWFRRDEAGHFLWPGFGENARVLDWICRRLEGEDSARETPIGLVPKEGALDLSGLRAIDTTQLFSLPKDFWEQEVRDIRSYLTEQVNQDLPKEVLAELEALERRVHKM

SEQ ID NO: 835516 - protein, 484 aa, Homo sapiens
MYVLPFSMGPVGSPLSRIGVQLTDSAYVVASMRIMTRLGTPVLQALGDGDFVKCLHSVGQPLTGQGEPVSQWPCNPEKTLIGHVPDQREIISFGSGYGGNSLLGKKCFALRIASRLARDEGWLAEHMLILGITSPAGKKRYVAAAFPSACGKTNLAMMRPALPGWKVECVGDDIAWMRFDSEGRLRAINPENGFFGVAPGTSATTNPNAMATIQSNTIFTNVAETSDGGVYWEGIDQPLPPGVTVTSWLGKPWKPGDKEPCAHPNSRFCAPARQCPIMDPAWEAPEGVPIDAIIFGGRRPKGVPLVYEAFNWRHGVFVGSAMRSESTAAAEHKGKIIMHDPFAMRPFFGYNFGHYLEHWLSMEGRKGAQLPRIFHVNWFRRDEAGHFLWPGFGENARVLDWICRRLEGEDSARETPIGLVPKEGALDLSGLRAIDTTQLFSLPKDFWEQEVRDIRSYLTEQVNQDLPKEVLAELEALERRVHKM

SEQ ID NO: 835517 - protein, 269 aa, Homo sapiens
MAALYRPGLRLNWHGLSPLGWPSCRSIQTLRVLSGDLGQLPTGIRDFVEHSARLCQPEGIHICDGTEAENTATLTLLEQQGLIRKLPKYNNCWLARTDPKDVARVESKTVIVTPSQRDTVPLPPGGARGQLGNWMSPADFQRAVDERFPGCMQGRTMYVLPFSMGPVGSPLSRIGVQLTDSAYVVASMRIMTRLGTPVLQALGDGDFVKCLHSVGQPLTGQGEPVSQWPCNPEKTLIGHVPDQREIISFGSGYGGNSLWKMLPRIPGGR

SEQ ID NO: 835518 - protein, 551 aa, Homo sapiens
MAALYRPGLRLNWHGLSPLGWPSCRSIQTLRVLSGDLGQLPTGIRDFVEHSARLCQPEGIHICDGTEAENTATLTLLEQQGLIRKLPKYNNCWLARTDPKDVARVESKTLQALGDGDFVKCLHSVGQPLTGQGEPVSQWPCNPEKTLIGHVPDQREIISFGSGYGGNSLLGKKCFALRIASRLARDEGWLAEHMLILGITSPAGKKRYVAAAFPSACGKTNLAMMRPALPGWKVECVGDDIAWMRFDSEGRLRAINPENGFFGVAPGTSATTNPNAMATIQSNTIFTNVAETSDGGVYWEGIDQPLPPGVTVTSWLGKPWKPGDKEPCAHPNSRFCAPARQCPIMDPAWEAPEGVPIDAIIFGGRRPKGVPLVYEAFNWRHGVFVGSAMRSESTAAAEHKGKIIMHDPFAMRPFFGYNFGHYLEHWLSMEGRKGAQLPRIFHVNWFRRDEAGHFLWPGFGENARVLDWICRRLEGEDSARETPIGLVPKEGALDLSGLRAIDTTQLFSLPKDFWEQEVRDIRSYLTEQVNQDLPKEVLAELEALERRVHKM

SEQ ID NO: 835519 - protein, 235 aa, Homo sapiens; identical to SEQ ID NO: 835503

SEQ ID NO: 835520 - protein, 269 aa, Homo sapiens; identical to SEQ ID NO: 835517

SEQ ID NO: 835521 - protein, 640 aa, Homo sapiens; identical to SEQ ID NO: 835506

SEQ ID NO: 835522 - protein, 640 aa, Homo sapiens; identical to SEQ ID NO: 835506

SEQ ID NO: 835523 - protein, 613 aa, Homo sapiens
MAALYRPGLRLNWHGLSPLGWPSCRSIQTLRVLSGDLGQLPTGIRDFVEHSARLCQPEGIHICDGTEAENTATLTLLEQQGLIRKLPKYNNCWLARTDPKDVARVESKTVIVTPSQRDTVPLPPGGARGQLGNWMSPADFQRAVDERFPGCMQGRTMYVLPFSMGPVGSPLSRIGVQLTDSAYVVASMRIMTRLGTPVLQALGDGDFVKCLHSVGQPLTGQGEPVSQWPCNPEKTLIGHVPDQREIISFGSGYGGNSLLGKKCFALRIASRLARDEGWLAEHMLILGITSPAGKKRYVAAAFPSACGKTNLAMMRPALPGWKVECVGDDIAWMRFDSEGRLRAINPENGFFGVAPGTSATTNPNAMATIQSNTIFTNVAETSDGGVYWEGIDQPLPPGVTVTSWLGKPWKPGDKEPCAHPNSRFCAPARQCPIMDPAWEAPEGVPIDAIIFGGRRPKGVPLVYEAFNWRHGVFVGSAMRSESTAAAEHKGKIIMHDPFAMRPFFGYNFGHYLEHWFLWPGFGENARVLDWICRRLEGEDSARETPIGLVPKEGALDLSGLRAIDTTQLFSLPKDFWEQEVRDIRSYLTEQVNQDLPKEVLAELEALERRVHKM

SEQ ID NO: 835524 - protein, 522 aa, Homo sapiens
MAALYRPGLRLNWHGLSPLGWPSCRSIQTLRVLSGDLGQLPTGIRDFVEHSARLCQPEGIHICDGTEAENTATLTLLEQQGLIRKLPKYNNCWLARTDPKDVARVESKTVIVTPSQRDTVPLPPGGARGQLGNWMSPADFQRAVDERFPGCMQGRTMYVLPFSMGPVGSPLSRIGVQLTDSAYVVASMRIMTRLGTPVLQALGDGDFVKCLHSVGQPLTGQGEPVSQWPCNPEKTLIGHVPDQREIISFGSGYGGNSLLGKKCFALRIASRLARDEGWLAEHMLILGITSPAGKKRYVAAAFPSACGKTNLAMMRPALPGWKVECVGDDIAWMRFDSEGRLRAINPENGFFGVAPGTSATTNPNAMATIQSNTIFTNVAETSDGGVYWEGIDQPLPPGVTVTSWLGKPWKPGDKEPCAHPNSRFCAPARQCPIMDPAWEAPEGVPIDAIIFGGRRPKGVPLVYEAFNWRHGVFVGSAMRSESTAAAEHKGEHPHHSSLSCVCTQHVLSPFLSQTFLLSTPGV

SEQ ID NO: 835525 - protein, 441 aa, Homo sapiens; identical to SEQ ID NO: 835510

SEQ ID NO: 835526 - protein, 677 aa, Homo sapiens
PGPRELACQRGGGKLVPALPDTSLGPLTGSQPAPQVLREAAGPWGQGLNWHGLSPLGWPSCRSIQTLRVLSGDLGQLPTGIRDFVEHSARLCQPEGIHICDGTEAENTATLTLLEQQGLIRKLPKYNNCWLARTDPKDVARVESKTVIVTPSQRDTVPLPPGGARGQLGNWMSPADFQRAVDERFPGCMQGRTMYVLPFSMGPVGSPLSRIGVQLTDSAYVVASMRIMTRLGTPVLQALGDGDFVKCLHSVGQPLTGQGEPVSQWPCNPEKTLIGHVPDQREIISFGSGYGGNSLLGKKCFALRIASRLARDEGWLAEHMLILGITSPAGKKRYVAAAFPSACGKTNLAMMRPALPGWKVECVGDDIAWMRFDSEGRLRAINPENGFFGVAPGTSATTNPNAMATIQSNTIFTNVAETSDGGVYWEGIDQPLPPGVTVTSWLGKPWKPGDKEPCAHPNSRFCAPARQCPIMDPAWEAPEGVPIDAIIFGGRRPKGVPLVYEAFNWRHGVFVGSAMRSESTAAAEHKGKIIMHDPFAMRPFFGYNFGHYLEHWLSMEGRKGAQLPRIFHVNWFRRDEAGHFLWPGFGENARVLDWICRRLEGEDSARETPIGLVPKEGALDLSGLRAIDTTQLFSLPKDFWEQEVRDIRSYLTEQVNQDLPKEVLAELEALERRVHKM

SEQ ID NO: 835527 - protein, 650 aa, Homo sapiens
GAEGAGLPAGRRKASASPTRLNWHGLSPLGWPSCRSIQTLRVLSGDLGQLPTGIRDFVEHSARLCQPEGIHICDGTEAENTATLTLLEQQGLIRKLPKYNNCWLARTDPKDVARVESKTVIVTPSQRDTVPLPPGGARGQLGNWMSPADFQRAVDERFPGCMQGRTMYVLPFSMGPVGSPLSRIGVQLTDSAYVVASMRIMTRLGTPVLQALGDGDFVKCLHSVGQPLTGQGEPVSQWPCNPEKTLIGHVPDQREIISFGSGYGGNSLLGKKCFALRIASRLARDEGWLAEHMLILGITSPAGKKRYVAAAFPSACGKTNLAMMRPALPGWKVECVGDDIAWMRFDSEGRLRAINPENGFFGVAPGTSATTNPNAMATIQSNTIFTNVAETSDGGVYWEGIDQPLPPGVTVTSWLGKPWKPGDKEPCAHPNSRFCAPARQCPIMDPAWEAPEGVPIDAIIFGGRRPKGVPLVYEAFNWRHGVFVGSAMRSESTAAAEHKGKIIMHDPFAMRPFFGYNFGHYLEHWLSMEGRKGAQLPRIFHVNWFRRDEAGHFLWPGFGENARVLDWICRRLEGEDSARETPIGLVPKEGALDLSGLRAIDTTQLFSLPKDFWEQEVRDIRSYLTEQVNQDLPKEVLAELEALERRVHKM

SEQ ID NO: 835528 - protein, 667 aa, Homo sapiens
MAALYRPGLRYLPRTSNWALSQRPRVLREAAGPWGQGLNWHGLSPLGWPSCRSIQTLRVLSGDLGQLPTGIRDFVEHSARLCQPEGIHICDGTEAENTATLTLLEQQGLIRKLPKYNNCWLARTDPKDVARVESKTVIVTPSQRDTVPLPPGGARGQLGNWMSPADFQRAVDERFPGCMQGRTMYVLPFSMGPVGSPLSRIGVQLTDSAYVVASMRIMTRLGTPVLQALGDGDFVKCLHSVGQPLTGQGEPVSQWPCNPEKTLIGHVPDQREIISFGSGYGGNSLLGKKCFALRIASRLARDEGWLAEHMLILGITSPAGKKRYVAAAFPSACGKTNLAMMRPALPGWKVECVGDDIAWMRFDSEGRLRAINPENGFFGVAPGTSATTNPNAMATIQSNTIFTNVAETSDGGVYWEGIDQPLPPGVTVTSWLGKPWKPGDKEPCAHPNSRFCAPARQCPIMDPAWEAPEGVPIDAIIFGGRRPKGVPLVYEAFNWRHGVFVGSAMRSESTAAAEHKGKIIMHDPFAMRPFFGYNFGHYLEHWLSMEGRKGAQLPRIFHVNWFRRDEAGHFLWPGFGENARVLDWICRRLEGEDSARETPIGLVPKEGALDLSGLRAIDTTQLFSLPKDFWEQEVRDIRSYLTEQVNQDLPKEVLAELEALERRVHKM

SEQ ID NO: 835529 - protein, 506 aa, Homo sapiens
MSPADFQRAVDERFPGCMQGRTMYVLPFSMGPVGSPLSRIGVQLTDSAYVVASMRIMTRLGTPVLQALGDGDFVKCLHSVGQPLTGQGEPVSQWPCNPEKTLIGHVPDQREIISFGSGYGGNSLLGKKCFALRIASRLARDEGWLAEHMLILGITSPAGKKRYVAAAFPSACGKTNLAMMRPALPGWKVECVGDDIAWMRFDSEGRLRAINPENGFFGVAPGTSATTNPNAMATIQSNTIFTNVAETSDGGVYWEGIDQPLPPGVTVTSWLGKPWKPGDKEPCAHPNSRFCAPARQCPIMDPAWEAPEGVPIDAIIFGGRRPKGVPLVYEAFNWRHGVFVGSAMRSESTAAAEHKGKIIMHDPFAMRPFFGYNFGHYLEHWLSMEGRKGAQLPRIFHVNWFRRDEAGHFLWPGFGENARVLDWICRRLEGEDSARETPIGLVPKEGALDLSGLRAIDTTQLFSLPKDFWEQEVRDIRSYLTEQVNQDLPKEVLAELEALERRVHKM

SEQ ID NO: 835530 - protein, 492 aa, Homo sapiens
MPSSTGRTMYVLPFSMGPVGSPLSRIGVQLTDSAYVVASMRIMTRLGTPVLQALGDGDFVKCLHSVGQPLTGQGEPVSQWPCNPEKTLIGHVPDQREIISFGSGYGGNSLLGKKCFALRIASRLARDEGWLAEHMLILGITSPAGKKRYVAAAFPSACGKTNLAMMRPALPGWKVECVGDDIAWMRFDSEGRLRAINPENGFFGVAPGTSATTNPNAMATIQSNTIFTNVAETSDGGVYWEGIDQPLPPGVTVTSWLGKPWKPGDKEPCAHPNSRFCAPARQCPIMDPAWEAPEGVPIDAIIFGGRRPKGVPLVYEAFNWRHGVFVGSAMRSESTAAAEHKGKIIMHDPFAMRPFFGYNFGHYLEHWLSMEGRKGAQLPRIFHVNWFRRDEAGHFLWPGFGENARVLDWICRRLEGEDSARETPIGLVPKEGALDLSGLRAIDTTQLFSLPKDFWEQEVRDIRSYLTEQVNQDLPKEVLAELEALERRVHKM

SEQ ID NO: 835531 - protein, 451 aa, Homo sapiens
MRGFQAACRLQALGDGDFVKCLHSVGQPLTGQGEPVSQWPCNPEKTLIGHVPDQREIISFGSGYGGNSLLGKKCFALRIASRLARDEGWLAEHMLILGITSPAGKKRYVAAAFPSACGKTNLAMMRPALPGWKVECVGDDIAWMRFDSEGRLRAINPENGFFGVAPGTSATTNPNAMATIQSNTIFTNVAETSDGGVYWEGIDQPLPPGVTVTSWLGKPWKPGDKEPCAHPNSRFCAPARQCPIMDPAWEAPEGVPIDAIIFGGRRPKGVPLVYEAFNWRHGVFVGSAMRSESTAAAEHKGKIIMHDPFAMRPFFGYNFGHYLEHWLSMEGRKGAQLPRIFHVNWFRRDEAGHFLWPGFGENARVLDWICRRLEGEDSARETPIGLVPKEGALDLSGLRAIDTTQLFSLPKDFWEQEVRDIRSYLTEQVNQDLPKEVLAELEALERRVHKM

SEQ ID NO: 835532 - protein, 269 aa, Homo sapiens
MAALYRPGLRLNWHGLSPLGWPSCRSIQTLRVLSGDLGQLPTGIRDFVEHSARLCQPEGIHICDGTEAENTATLTLLEQQGLIRKLPKYNNCWLARTDPKDVARVESKTVIVTPSQRDTVPLPPGGARGQLGNWMSPADFQRAVDERFPGCMQGNQGRGTVARARKMWNRFGTFIQGMPSSTGRTMYVLPFSMGPVGSPLSRIGVQLTDSAYVVASMRIMTRLGTPVLQALGDGDFVKCLHSVGQPLTGQGKHLLCPKGNTEAFLYSEE

SEQ ID NO: 835533 - protein, 414 aa, Homo sapiens
RPVGNRGAGGERGSRVLRSGARGSVAPSWTQSPRHRPRPAAVSCASQRREFEHPPRRPLLGARSGEAKCERPRTPALSLPAARTTMTHFNKGPSYGLSAEVKNKIASKYDHQAEEDLRNWIEEVTGMSIGPNFQLGLKDGIILCELINKLQPGSVKKVNESSLNWPQLENIGNFIKAIQAYGMKPHDIFEANDLFENGNMTQVQTTLVALAGLAKTKGFHTTIDIGVKYAEKQTRRFDEGKLKAGQSVIGLQMGTNKCASQAGMTAYGTRRHLYDPKMQTDKPFDQTTISLQMGTNKGASQAGMLAPGTRRDIYDQKLTLQPVDNSTISLQMGTNKVASQKGMSVYGLGRQVYDPKYCAAPTEPVIHNGSQGTGTNGSEISDSDYQAEYPDEYHGEYQDDYPRDYQYSDQGIDY

SEQ ID NO: 835534 - protein, 206 aa, Homo sapiens
RPVGNRGAGGERGSRVLRSGARGSVAPSWTQSPRHRPRPAAVSCASQRREFEHPPRRPLLGARSGEAKCERPRTPALSLPAARTTMTHFNKGPSYGLSAEVKNKIASKYDHQAEEDLRNWIEEVTGMSIGPNFQLGLKDGIILCELINKLQPGSVKKVNESSLNWPQLENIGNFIKAIQAYGMKPHDIFEANDLFENGNMTSFLKY

SEQ ID NO: 835535 - protein, 414 aa, Homo sapiens; identical to SEQ ID NO: 835533

SEQ ID NO: 835536 - protein, 398 aa, Homo sapiens
RPVGNRGAGGERGSRVLRSGARGSVAPSWTQSPRHRPRPAAVSCASQRREFEHPPRRPLLGARSGEAKCERPRTPALSLPAARTTMTHFNKGPSYGLSAEVKNKIASKYDHQAEEDFQLGLKDGIILCELINKLQPGSVKKVNESSLNWPQLENIGNFIKAIQAYGMKPHDIFEANDLFENGNMTQVQTTLVALAGLAKTKGFHTTIDIGVKYAEKQTRRFDEGKLKAGQSVIGLQMGTNKCASQAGMTAYGTRRHLYDPKMQTDKPFDQTTISLQMGTNKGASQAGMLAPGTRRDIYDQKLTLQPVDNSTISLQMGTNKVASQKGMSVYGLGRQVYDPKYCAAPTEPVIHNGSQGTGTNGSEISDSDYQAEYPDEYHGEYQDDYPRDYQYSDQGIDY

SEQ ID NO: 835537 - protein, 414 aa, Homo sapiens; identical to SEQ ID NO: 835533

SEQ ID NO: 835538 - protein, 368 aa, Homo sapiens
RPVGNRGAGGERGSRVLRSGARGSVAPSWTQSPRHRPRPAAVSCASQRREFEHPPRRPLLGARSGEAKCERPRTPALSLPAARTTMTHFNKGPSYGLSAEVKNKIASKYDHQAEEDLRNWIEEVTGMSIGPNFQLGLKDGIILCELINKLQPGSVKKVNESSLNWPQAKTKGFHTTIDIGVKYAEKQTRRFDEGKLKAGQSVIGLQMGTNKCASQAGMTAYGTRRHLYDPKMQTDKPFDQTTISLQMGTNKGASQAGMLAPGTRRDIYDQKLTLQPVDNSTISLQMGTNKVASQKGMSVYGLGRQVYDPKYCAAPTEPVIHNGSQGTGTNGSEISDSDYQAEYPDEYHGEYQDDYPRDYQYSDQGIDY

SEQ ID NO: 835539 - protein, 125 aa, Homo sapiens
NSRVGTNKGASQAGMLAPGTRRDIYDQKLTLQPVDNSTISLQMGTNKVASQKGMSVYGLGRQVYDPKYCAAPTEPVIHNGSQGTGTNGSEISDSDYQAEYPDEYHGEYQDDYPRDYQYSDQGIDY

SEQ ID NO: 835540 - protein, 415 aa, Homo sapiens
RPVGNRGAGGERGSRVLRSGARGSVAPSWTQSPRHRPRPAAVSCASQRREFEHPPRRPLLGARSGEAKCERPRTPALSLPAARTTMTHFNKGPSYGLSAEVKNKIASKYDHQAEEDLRNWIEEVTGMSIGPNFQLGLKDGIILCELINKLQPGSVKKVNESSLNWPQLENIGNFIKAIQAYGMKPHDIFEANDLFENGNMTQVQTTLVALAGLAKTKGFHTTIDIGVKYAEKQTRRFDEGKLKAGQSVIGLQMGTNKCASQAGMTAYGTRRHLYDPKMQTDKPFDQTTISLQMGTNKGASQAGMLAPGTRRDIYDQKLTLQPVDNSTISLQMGTNKVASQKGMSVYGLGRQVYDPKYCAAPTEPVIHNGSQGTGTNGSEISDSDYQAEYPDEYHGEYQDDYPRDYQSSSYQAYYT

SEQ ID NO: 835541 - protein, 305 aa, Homo sapiens
RPVGNRGAGGERGSRVLRSGARGSVAPSWTQSPRHRPRPAAVSCASQRREFEHPPRRPLLGARSGEAKCERPRTPALSLPAARTTMTHFNKGPSYGLSAEVKNKIASKYDHQAEEDLRNWIEEVTGMSIGPNFQLGLKDGIILCELINKLQPGSVKKVNESSLNWPQLENIGNFIKAIQAYGMKPHDIFEANDLFENGNMTQVQTTLVALAGLAKTKGFHTTIDIGVKYAEKQTRRFDEGKLKAGQSVIGLQMGTNKCASQAGMTAYGTRRHLYDPKMQTDKPFDQTTISLQMGTNKGASQVSNT

SEQ ID NO: 835542 - protein, 414 aa, Homo sapiens; identical to SEQ ID NO: 835533

SEQ ID NO: 835543 - protein, 288 aa, Homo sapiens
MSIGPNFQLGLKDGIILCELINKLQPGSVKKVNESSLNWPQLENIGNFIKAIQAYGMKPHDIFEANDLFENGNMTQVQTTLVALAGLAKTKGFHTTIDIGVKYAEKQTRRFDEGKLKAGQSVIGLQMGTNKCASQAGMTAYGTRRHLYDPKMQTDKPFDQTTISLQMGTNKGASQAGMLAPGTRRDIYDQKLTLQPVDNSTISLQMGTNKVASQKGMSVYGLGRQVYDPKYCAAPTEPVIHNGSQGTGTNGSEISDSDYQAEYPDEYHGEYQDDYPRDYQYSDQGIDY

SEQ ID NO: 835544 - protein, 414 aa, Homo sapiens; identical to SEQ ID NO: 835533

SEQ ID NO: 835545 - protein, 162 aa, Homo sapiens
MGTNKCASQAGMTAYGTRRHLYDPKMQTDKPFDQTTISLQMGTNKGASQAGMLAPGTRRDIYDQKLTLQPVDNSTISLQMGTNKVASQKGMSVYGLGRQVYDPKYCAAPTEPVIHNGSQGTGTNGSEISDSDYQAEYPDEYHGEYQDDYPRDYQYSDQGIDY

SEQ ID NO: 835546 - protein, 248 aa, Homo sapiens
RPVGNRGAGGERGSRVLRSGARGSVAPSWTQSPRHRPRPAAVSCASQRREFEHPPRRPLLGARSGEAKCERPRTPALSLPAARTTMTHFNKGPSYGLSAEVKNKIASKYDHQAEEDLRNWIEEVTGMSIGPNFQLGLKDGIILCELINKLQPGSVKKVNESSLNWPQLENIGNFIKAIQAYGMKPHDIFEANDLFENGNMTQVQTTLVALAGLAKTKGFHTTIDIGVKYAENGNQQMCQPGRYDSLRD

SEQ ID NO: 835547 - protein, 414 aa, Homo sapiens; identical to SEQ ID NO: 835533

SEQ ID NO: 835548 - protein, 274 aa, Homo sapiens
RPVGNRGAGGERGSRVLRSGARGSVAPSWTQSPRHRPRPAAVSCASQRREFEHPPRRPLLGARSGEAKCERPRTPALSLPAARTTMTHFNKGPSYGLSAEVKNKIASKYDHQAEEDLRNWIEEVTGMSIGPNFQLGLKDGIILCELINKLQPGSVKKVNESSLNWPQLENIGNFIKAIQAYGMKPHDIFEANDLFENGNMTQVQTTLVALAGLAKTKGFHTTIDIGVKYAEKQTRRFDEGKLKAGQSVIGLQMGTNKCASQAGMTAYGTRRHLY

SEQ ID NO: 835549 - protein, 126 aa, Homo sapiens
MTAGSVCVPQIIPLRVPQPGKANHEIDNNTLLEMKSDTPDVNIYYTLDGSKPEFLKRIGYGENNTFKYIKPITLPDGKIQVKAIAVSKDCRQSGIVTKVFHVDYEPPNIVSPEDNVENVLKDSSRQ

SEQ ID NO: 835550 - protein, 138 aa, Homo sapiens
MSGSSPSHPQHTQGLLPESAKHIAFLSVDGTQSSIFLFSSGEKIKSLYVNMIDIHCAKKISVFLKKYKGKGKLICPSVTLRHTLVTSVQAPFQDSECTVYMNAYTEKFTFKSVLYLFFYNIRNRFLLRCLHVGNYRTT

SEQ ID NO: 835551 - protein, 76 aa, Homo sapiens
SSDGNSENQTWNTERMWACRGWGQQHMHAGLTEQPLGVLFPEELYGDFEDLETGDVHKGKSGPDTQNEDVEKQGRN

SEQ ID NO: 835552 - protein, 246 aa, Homo sapiens
HGTGRATPTGASSEGGALGGGPGGSAQGALPRRRGRRGRAEARGLEAPGGGCGRHGGGGDRATGRAGGQGRAEGGSGLRQDLSRKNLAAGDSPPFKRSLHSPHPTQGRAFPNAGAHWPPRAAPSSSPAPFTLRQPHCPLGVRPPTRARPPARPPARAMNAKVVVVLVLVLTALCLSDGKPVSLSYRCPCRFFESHVARANVKHLKILNTPNCALQIVARLKNNNRQVCIDPKLKWIQEYLEKALNK

SEQ ID NO: 835553 - protein, 250 aa, Homo sapiens
HGTGRATPTGASSEGGALGGGPGGSAQGALPRRRGRRGRAEARGLEAPGGGCGRHGGGGDRATGRAGGQGRAEGGSGLRQDLSRKNLAAGDSPPFKRSLHSPHPTQGRAFPNAGAHWPPRAAPSSSPAPFTLRQPHCPLGVRPPTRARPPARPPARAMNAKVVVVLVLVLTALCLSDGKPVSLSYRCPCRFFESHVARANVKHLKILNTPNCALQIVARLKNNNRQVCIDPKLKWIQEYLEKALNKRFKM

SEQ ID NO: 835554 - protein, 250 aa, Homo sapiens; identical to SEQ ID NO: 835553

SEQ ID NO: 835555 - protein, 250 aa, Homo sapiens; identical to SEQ ID NO: 835553

SEQ ID NO: 835556 - protein, 250 aa, Homo sapiens; identical to SEQ ID NO: 835553

SEQ ID NO: 835557 - protein, 250 aa, Homo sapiens; identical to SEQ ID NO: 835553

SEQ ID NO: 835558 - protein, 250 aa, Homo sapiens; identical to SEQ ID NO: 835553

SEQ ID NO: 835559 - protein, 250 aa, Homo sapiens; identical to SEQ ID NO: 835553

SEQ ID NO: 835560 - protein, 250 aa, Homo sapiens; identical to SEQ ID NO: 835553

SEQ ID NO: 835561 - protein, 260 aa, Homo sapiens
HGTGRATPTGASSEGGALGGGPGGSAQGALPRRRGRRGRAEARGLEAPGGGCGRHGGGGDRATGRAGGQGRAEGGSGLRQDLSRKNLAAGDSPPFKRSLHSPHPTQGRAFPNAGAHWPPRAAPSSSPAPFTLRQPHCPLGVRPPTRARPPARPPARAMNAKVVVVLVLVLTALCLSDGKPVSLSYRCPCRFFESHYCTCLIRVSFHGATPLTQGSWVLYSLSCAGGETGLREPGPMVSPRVESHQEGRLGVPGPVNLGKA

SEQ ID NO: 835562 - protein, 240 aa, Homo sapiens
HGTGRATPTGASSEGGALGGGPGGSAQGALPRRRGRRGRAEARGLEAPGGGCGRHGGGGDRATGRAGGQGRAEGGSGLRQDLSRKNLAAGDSPPFKRSLHSPHPTQGRAFPNAGAHWPPRAAPSSSPAPFTLRQPHCPLGVRPPTRARPPARPPARAMNAKVVVVLVLVLTALCLSDGKPVSLSYRCPCRFFESHVARANVKHLKILNTPNCALQIVARLKNNNRQVCIDLGSGLRFASI

SEQ ID NO: 835563 - protein, 250 aa, Homo sapiens; identical to SEQ ID NO: 835553

SEQ ID NO: 835564 - protein, 185 aa, Homo sapiens
GGGVPGAGRGALCRGSELGPAGGHGCHTLGPDMMASMRVVKELEDLQKKPPPYLRNLSSDDANVLVWHALLLPDQPPYHLKAFNLRISFPPEYPFKPPMIKFTTKIYHPNVDENGQICLPIISSENWKPCTKTCQVLEALNVLVNRPNIREPLRMDLADLLTQNPELFRKNAEEFTLRFGVDRPS

SEQ ID NO: 835565 - protein, 185 aa, Homo sapiens; identical to SEQ ID NO: 835564

SEQ ID NO: 835566 - protein, 187 aa, Homo sapiens
DWNPYERPPAPLSARRRCTAHPAGGRDRKAVRPEARPRLRTKTELEDLQKKPPPYLRNLSSDDANVLVWHALLLPDQPPYHLKAFNLRISFPPEYPFKPPMIKFTTKIYHPNVDENGQICLPIISSENWKPCTKTCQVLEALNVLVNRPNIREPLRMDLADLLTQNPELFRKNAEEFTLRFGVDRPS

SEQ ID NO: 835567 - protein, 269 aa, Homo sapiens
GGGVPGAGRGALCRGSELGPAGGHGCHTLGPDMMASMRVVKELEDLQKKPPPYLRNLSSDDANVLVWHALLLPEAEVAVSRDHAIALQPGQQSETPSQKKKKKEAWHQHLLLMRPSGSFHSWWKAKGSHVYRSHAREEVKERESEQVPGSSKQPAFSDQPPYHLKAFNLRISFPPEYPFKPPMIKFTTKIYHPNVDENGQICLPIISSENWKPCTKTCQVLEALNVLVNRPNIREPLRMDLADLLTQNPELFRKNAEEFTLRFGVDRPS

SEQ ID NO: 835568 - protein, 95 aa, Homo sapiens
FDHLRRMNGLLRVRTADAPLKACRSSGGSSDQEKTVPHQDIGIIAGAGGREAGGRELVEREPLRMDLADLLTQNPELFRKNAEEFTLRFGVDRPS

SEQ ID NO: 835569 - protein, 87 aa, Homo sapiens
GGGVPGAGRGALCRGSELGPAGGHGCHTLGPDMMASMRVVKELEDLQKKPPPYLRNLSSDDANVLVWHALLLPVSIHGDHGFGLGPN

SEQ ID NO: 835570 - protein, 67 aa, Homo sapiens
AGETLQPAPNAGQHKGSPTAGERCSEGTGLRHPPRSFGDGALGPWREGGRLGGSGSLLGQGLKAAVR

SEQ ID NO: 835571 - protein, 156 aa, Homo sapiens
MRRWTWKASWSSELEDLQKKPPPYLRNLSSDDANVLVWHALLLPDQPPYHLKAFNLRISFPPEYPFKPPMIKFTTKIYHPNVDENGQICLPIISSENWKPCTKTCQVLEALNVLVNRPNIREPLRMDLADLLTQNPELFRKNAEEFTLRFGVDRPS

SEQ ID NO: 835572 - protein, 179 aa, Homo sapiens
AGETLQPAPNAGQHKGSPTAGERCSEGTGLRHPPRSFGDGALGPWREGGRLSSDDANVLVWHALLLPDQPPYHLKAFNLRISFPPEYPFKPPMIKFTTKIYHPNVDENGQICLPIISSENWKPCTKTCQVLEALNVLVNRPNIREPLRMDLADLLTQNPELFRKNAEEFTLRFGVDRPS

SEQ ID NO: 835573 - protein, 212 aa, Homo sapiens
GGGVPGAGRGALCRGSELGPAGGHGCHTLGPDMMASMRVVKELEDLQKKPPPYLRNLSSDDANVLVWHALLLPDQPPYHLKAFNLRISFPPEYPFKPPMIKFTTKIYHPNVDENGQICLPIISSENWKPCTKTCQVLEALNVLVNRPNIREPLRMDLADFNGLSKNMVSVAPPGLNAGGYILHSLRPGPRNWQSNRMASGFETYRFSGWKFD

SEQ ID NO: 835574 - protein, 398 aa, Homo sapiens
MPKCSKSEKIEDALLWECPVGDILPNSSDYKSSLIALTAHNWLLRISATTGKILEKIYLAPYCKFRYLSWDTPQEVIAVKSAQNRGSAVARQAGIQQHVLLYLAVFRVLPFSLVGILEINKKIFGNVTDATLSHGILIVMYSSGLVRLYSFQTIAEQTCHHCSLRCHPWRMLFRLEAILGIYIVTPNKKKQKGVFHICALKDNSLAKNGIQEMDCCSLESDWIYFHPDASGRIIHVGPNQVKVLKLTEIENNSSQHQISEDFVILANRENHKNENVLTVTASGRVVKKSFNLLDDDPEQETFKIVDYEDELDLLSVVAVTQIDAEGKAHLDFHCNEYGTLLKSIPLVESWDVTYSHEVYFDRDLVLHIEQKPNRVFSCYVYQMICDTGEEEETINRSC

SEQ ID NO: 835575 - protein, 456 aa, Homo sapiens
RTNLGILRALVCQESTKFKNVWTTHSRSPIAYERGRIYFDNYRRCVSSVASEPRKLYEMPKCSKSEKIEDALLWECPVGDILPNSSDYKSSLIALTAHNWLLRISATTGKILEKIYLAPYCKFRYLSWDTPQEVIAVKSAQNRGSAVARQAGIQQHVLLYLAVFRVLPFSLVGILEINKKIFGNVTDATLSHGILIVMYSSGLVRLYSFQTIAEQIMPPLLFEVSSLENAFQIGGHPWHYIVTPNKKKQKGVFHICALKDNSLAKNGIQEMDCCSLESDWIYFHPDASGRIIHVGPNQVKVLKLTEIENNSSQHQISEDFVILANRENHKNENVLTVTASGRVVKKSFNLLDDDPEQETFKIVDYEDELDLLSVVAVTQIDAEGKAHLDFHCNEYGTLLKSIPLVESWDVTYSHEVYFDRDLVLHIEQKPNRVFSCYVYQMICDTGEEEETINRSC

SEQ ID NO: 835576 - protein, 198 aa, Homo sapiens
MPKCSKSEKIEDALLWECPVGDILPNSSDYKSSLIALTAHNWLLRISATTGKILEKIYLAPYCKFRYLSWDTPQEVIAVKSAQNRGSAVARQAEAFINLVWWTLQGPKVLTFLTLCTGIPRKIEERAFLGATARGRHTDGPTGTTRPAKDHGRARGKTIIETKQGGNNDGPQGTVRAHTRETQKSARHDTVGKERHTS

SEQ ID NO: 835577 - protein, 220 aa, Homo sapiens
MPLTGVGPGSCRRQIIRALCLLLLLLHAGSAKNIWKRALPARLAEKSRAEEAGAPGGPRQPRADRCPPPPRTLPPGACQAARCQADSECPRHRRCCYNGCAYACLEAVPPPPVLDWLVQPKPRWLGGNGWLLDGPEEVLQAEACSTTEDGAEPLLCPSGYECHILSPGDVAEGIPNRGQCVKQRRQADGRILRHKLYKEYPEGDSKNVAEPGRGQQKHFQ

SEQ ID NO: 835578 - protein, 320 aa, Homo sapiens
RGCSHPAPKQGPARQGPVGPYSLSCSPKRDPAAEKLETVIRTDWTLASRCLHLTLDPPGDSTGSRQLRLLGWIRVPAGAVGGPRGLHCSPDGLLFLTAGAAPCVHVLDLEGRPICLLPCRTPGSGAFVPEDVAVTASGLVVVSDPIHGAVHALQHTARDPGGHWVTVGTFLSPRGLAVDALNRLLVTDYLPGAVHSFSLGPAWEPLAPASMLGLEGPCWVGPGPDGGLAVSEEFGDVRLFGSARQPLGSLGGWTGHTFGCPAGICSNSEGNVIVADEQRRQVTLFPRAGPPSAWCQRGLGSPWEWPVHPRASSWWLMPRT

SEQ ID NO: 835579 - protein, 311 aa, Homo sapiens
RLQPPSPEAGPSETGPSPKRDPAAEKLETVIRTDWTLASRCLHLTLDPPGDSTGSRQLRLLGWIRVPAGAVGGPRGLHCSPDGLLFLTAGAAPCVHVLDLEGRPICLLPCRTPGSGAFVPEDVAVTASGLVVVSDPIHGAVHALQHTARDPGGHWVTVGTFLSPRGLAVDALNRLLVTDYLPGAVHSFSLGPAWEPLAPASMLGLEGPCWVGPGPDGGLAVSEEFGDVRLFGSARQPLGSLGGWTGHTFGCPAGICSNSEGNVIVADEQRRQVTLFPRAGPPSAWCQRGLGSPWEWPVHPRASSWWLMPRT

SEQ ID NO: 835580 - protein, 250 aa, Homo sapiens
SPSVPQEPPSWTRGSQEGLPQLRMGNCVKYPLRNLSRKMCQEEQTSYMVVQTSEEGLAADAELPGPLLMLAQNCAVMHNLLGPACIFLRKGFAENRQPDRSLRPEEIEELREAFREFDKDKDGYINCRDLGNCMRTMGYMPTEMELIELSQQINMNLGGHVDFDDFVELMGPKLLAETADMIGVKELRDAFREFDTNGDGEISTSELREAMRKLLGHQVGHRDIEEIIRDVDLNGDGRVDFEEFVRMMSR

SEQ ID NO: 835581 - protein, 212 aa, Homo sapiens
MCQEEQTSYMVVQTSEEGLAADAELPGPLLMLAQNCAVMHNLLGPACIFLRKGFAENRQPDRSLRPEEIEELREAFREFDKDKDGYINCRDLGNCMRTMGYMPTEMELIELSQQINMNLGGHVDFDDFVELMGPKLLAETADMIGVKELRDAFREFDTNGDGEISTSELREAMRKLLGHQVGHRDIEEIIRDVDLNGDGRVDFEEFVRMMSR

SEQ ID NO: 835582 - protein, 110 aa, Homo sapiens
MYWRMGPACTPGRRPPRTPTPPHCERLTPATGKRGRPPTRRPPCQAGRGHARRQGPCAQLLLAGWAREPASRPHTACPPQGKASHLRSAPVPARLSPVISEPIKIFPRAR

SEQ ID NO: 835583 - protein, 125 aa, Homo sapiens
CSMFLRVSSPFMGYMPTEMELIELSQQINMNLGGHVDFDDFVELMGPKLLAETADMIGVKELRDAFREFDTNGDGEISTSELREAMRKLLGHQVGHRDIEEIIRDVDLNGDGRVDFEEFVRMMSR

SEQ ID NO: 835584 - protein, 74 aa, Homo sapiens
GDSTGSYRLAGRGHARRQGPCAQLLLAGWAREPASRPHTACPPQGKASHLRSAPVPARLSPVISEPIKIFPRAR

SEQ ID NO: 835585 - protein, 190 aa, Homo sapiens
SPSVPQEPPSWTRGSQEGLPQLRMGNCVKYPLRNLSRKDRSLRPEEIEELREAFREFDKDKDGYINCRDLGNCMRTMGYMPTEMELIELSQQINMNLGGHVDFDDFVELMGPKLLAETADMIGVKELRDAFREFDTNGDGEISTSELREAMRKLLGHQVGHRDIEEIIRDVDLNGDGRVDFEEFVRMMSR

SEQ ID NO: 835586 - protein, 263 aa, Homo sapiens
AERVLGLGSRREPRSLPAGGPAPRRTAPPPPGHASAGPAAMSSHIAKSESKSSPLPPARGRDGEERGLSPALGLRGSLRARGRGDSVPAAASEADPFLHRLRPMLSSAFGQDRSLRPEEIEELREAFREFDKDKDGYINCRDLGNCMRTMGYMPTEMELIELSQQINMNLGGHVDFDDFVELMGPKLLAETADMIGVKELRDAFREFDTNGDGEISTSELREAMRKLLGHQVGHRDIEEIIRDVDLNGDGRVDFEEFVRMMSR

SEQ ID NO: 835587 - protein, 114 aa, Homo sapiens [sequence omitted]

SEQ ID NO: 835588 - protein, 325 aa, Homo sapiens
MESKMGELPLDINIQEPRWDQSTFLGRARHFFTVTDPRNLLLSGAQLEASRNIVQNYRAGVVTPGITEDQLWRAKYVYDSAFHPDTGEKVVLIGRMSAQVPMNMTITGCMLTFYRKTPTVVFWQWVNQSFNAIVNYSNRSGDTPITVRQLGTAYVSATTGAVATALGLKSLTKHLPPLVGRFVPFAAVAAANCINIPLMRQRELQVGIPVADEAGQRLGYSVTAAKQGIFQVVISRICMAIPAMAIPPLIMDTLEKKDFLKRRPWLGAPLQVGLVGFCLVFATPLCCALFPQKSSIHISNLEPELRAQIHEQNPSVEVVYYNKGL

SEQ ID NO: 835589 - protein, 325 aa, Homo sapiens; identical to SEQ ID NO: 835588

SEQ ID NO: 835590 - protein, 166 aa, Homo sapiens
MESKMCELPLDINIPLMSAEELQVGIPVADEDQLWRAKYVYDSAFHPDTGEKVVLIGRMSAQVPMNMTITGCMLTFYRKTPTVVFWQWVNQSFNAIVNYSNRSGDTPITVRQLGTAYVSATTGAVATALGLKSLTKHLPPLVGRFVPFAAVAAANCINIPLMRQSR

SEQ ID NO: 835591 - protein, 374 aa, Homo sapiens
MESKMGELPLDINIQEPRWDQSTFLGRARHFFTVTDPRNLLLSGAQLEASRNIVQNYRAGVVTPGITEDQLWRAKYVYDSAFHPDTGEKVVLIGRMSAQVPMNMTITGCMLTFYRKTPTVVFWQWVNQSFNAIVNYSNRSGDTPITVRQLGTAYVSATTGAVATALGLKSLTKHLPPLVGRFVPFAAVAAANCINIPLMRQRELQVGIPVADEAGQRLGYSVTAAKQGIFQVVISRICMAIPAMAIPPLIMDTLEKKDFLKVGDCTSLVLEWAMAGRSDQAPTLSPASPDSLRLASPSPDPCTASSTFVHSARMNWAGVKELCRGRRRGQRKETNFISVTPVASDTQKGTVIVMLDLMLILLPPSASILRGTHG

SEQ ID NO: 835592 - protein, 122 aa, Homo sapiens
MESKMGELPLDINIQEPRWDQSTFLGRARHFFTVTDPRNLLLSGAQLEASRNIVQNYRAGVVTPGITEDQLWRAKYVYDSAFHPDTGEKVVLIGRMSAQVPMNMTIMASPNKIWAWGWNGWW

SEQ ID NO: 835593 - protein, 325 aa, Homo sapiens; identical to SEQ ID NO: 835588

SEQ ID NO: 835594 - protein, 344 aa, Homo sapiens
MESKMGELPLDINIQEPRWDQSTFLGRARHFFTVTDPRNLLLSGAQLEASRNIVQNYRAGVVTPGITEDQLWRAKYVYDSAFHPDTGEKVVLIGRMSAQVPMNMTITGCMLTFYRKTPTVVFWQWVNQSFNAIVNYSNRSGDTPITVRQLGTAYVSATTGAVATALGLKSLTKSPSPAHGPSGPLNNTLPPQHLPPLVGRFVPFAAVAAANCINIPLMRQRELQVGIPVADEAGQRLGYSVTAAKQGIFQVVISRICMAIPAMAIPPLIMDTLEKKDFLKRRPWLGAPLQVGLVGFCLVFATPLCCALFPQKSSIHISNLEPELRAQIHEQNPSVEVVYYNKGL

SEQ ID NO: 835595 - protein, 325 aa, Homo sapiens; identical to SEQ ID NO: 835588

SEQ ID NO: 835596 - protein, 266 aa, Homo sapiens [sequence omitted]

SEQ ID NO: 835597 - protein, 128 aa, Homo sapiens
LVRGFQSSSIRGNHGNVPFGAIQEIHAHLIPDSATYWLWGSLSSEPDVQVGFTIPKRSFQLLSISTPRAYLQGWGGVQGGNTLRPKLYKPFQHLSPPAWYLQPPCAVPYSPRRGKCCPWAGWGTLDWT

SEQ ID NO: 835598 - protein, 142 aa, Homo sapiens
KRSQAGKEGFLEEDWLPGLRKNIHIHSESEASRSPQSPHCCTSGPPVPLSVAVALPHPSSPSCAGSHPLGSLPSSTPRRQESLSQRCESTRVAPYIHLPSSRPFNASGPFNASGPFNASGPFNASGPFNASGHSTPPAIQRL

SEQ ID NO: 835599 - protein, 57 aa, Homo sapiens
WDDSSSVSSGISDTIDNLSTDDINTSSSISSYANTPASSRKNLDVQVRNTGPPRLLQ

SEQ ID NO: 835600 - protein, 110 aa, Homo sapiens
SSNRAGAGLISLPAQTLAADINRPCKSWLLRDCEKEVPHGPFRSESCGADLWPVLFLTGSQARHFWQQDEPPQSPWDRVKDLATVYVDVLKDSGRDYVSQFEGSALGENS

SEQ ID NO: 835601 - protein, 125 aa, Homo sapiens
SSNRAGAGLISLPAQTLAADINRPCKSWLLRDCEKEVVLLPAPVTLAPQLKVPHGPFRSESCGADLWPVLFLTGSQARHFWQQDEPPQSPWDRVKDLATVYVDVLKDSGRDYVSQFEGSALGENS

SEQ ID NO: 835602 - protein, 82 aa, Homo sapiens
SSNRAGAGLISLPAQTLAADINRPCKSWLLRDCEKEVRPAACPGHSGSPAQGSGLAPGRASGSPTALSGVKAAVLTFGRCSS

SEQ ID NO: 835603 - protein, 267 aa, Homo sapiens
MKAAVLTLAVLFLTGSQARHFWQQDEPPQSPWDRVKDLATVYVDVLKDSGRDYVSQFEGSALGKQLNLKLLDNWDSVTSTFSKLREQLGPVTQEFWDNLEKETEGLRQEMSKDLEEVKAKVQPYLDDFQKKWQEEMELYRQKVEPLRAELQEGARQKLHELQEKLSPLGEEMRDRARAHVDALRTHLAPYSDELRQRLAARLEALKENGGARLAEYHAKATEHLSTLSEKAKPALEDLRQGLLPVLESFKVSFLSALEEYTKKLNTQ

SEQ ID NO: 835604 - protein, 125 aa, Homo sapiens; identical to SEQ ID NO: 835601

SEQ ID NO: 835605 - protein, 125 aa, Homo sapiens; identical to SEQ ID NO: 835601

SEQ ID NO: 835606 - protein, 125 aa, Homo sapiens; identical to SEQ ID NO: 835601

SEQ ID NO: 835607 - protein, 115 aa, Homo sapiens
MCSKTAPFSKLRDNSFGPVDPGSSWGLTLKAKVAALPGTTFQKKWQEEMELYRQKVEPLRAELQEGARQKAARAAREAEPTGRGDARPRARPCGRAAHASGPLQRRAAPALGRAP

SEQ ID NO: 835608 - protein, 110 aa, Homo sapiens; identical to SEQ ID NO: 835600

SEQ ID NO: 835609 - protein, 110 aa, Homo sapiens; identical to SEQ ID NO: 835600

SEQ ID NO: 835610 - protein, 122 aa, Homo sapiens
SSNRAGAGLISLPAQTLAADINRPCKSWLLRDCEKEVRPAACPGHSGSPAQGSGLAPGRASGYLRSSPALCPSPHLAAMSGGARGFCMLKAPHSARPFFSSRSPTALSGVKAAVLTFGRCSS

SEQ ID NO: 835611 - protein, 125 aa, Homo sapiens; identical to SEQ ID NO: 835601

SEQ ID NO: 835612 - protein, 115 aa, Homo sapiens
SSNRAGAGLISLPAQTLAADINRPCKSWLLRDCEKEVVLLPAPVTLAPQLKVPHGPFRSESCGADLWPVLFLTGSQARHFWQQDEPPQSPWDRVKDLATVYVDVLKDSTFQQAAR

SEQ ID NO: 835613 - protein, 110 aa, Homo sapiens; identical to SEQ ID NO: 835600

SEQ ID NO: 835614 - protein, 267 aa, Homo sapiens; identical to SEQ ID NO: 835603

SEQ ID NO: 835615 - protein, 267 aa, Homo sapiens; identical to SEQ ID NO: 835603

SEQ ID NO: 835616 - protein, 267 aa, Homo sapiens; identical to SEQ ID NO: 835603

SEQ ID NO: 835617 - protein, 749 aa, Homo sapiens
MGRAGAAAVIPGLALLWAVGLGSAAPSPPRLRLSFQELQAWHGLQTFSLERTCCYQALLVDEERGRLFVGAENHVASLNLDNISKRAKKLAWPAPVEWREECNWAGKDIGTECMNFVKLLHAYNRTHLLACGTGAFHPTCAFVEVGHRAEEPVLRLDPGRIEDGKGKSPYDPRHRAASVLVGEELYSGVAADLMGRDFTIFRSLGQRPSLRTEPHDSRWLNEPKFVKVFWIPESENPDDDKIYFFFRETAVEAAPALGRLSVSRVGQICRNDVGGQRSLVNKWTTFLKARLVCSVPGVEGDTHFDQLQDVFLLSSRDHRTPLLYAVFSTSSSIFQGSAVCVYSMNDVRRAFLGPFAHKEGPMHQWVSYQGRVPYPRPGMCPSKTFGTFSSTKDFPDDVIQFARNHPLMYNSVLPTGGRPLFLQVGANYTFTQIAADRVAAADGHYDVLFIGTDVGTVLKVISVPKGSRPSAEGLLLEELHVFEDSAAVTSMQISSKRHQLYVASRSAVAQIALHRCAAHGRVCTECCLARDPYCAWDGVACTRFQPSAKRRFRRQDVRNGDPSTLCSGDSSRPALLEHKVFGVEGSSAFLECEPRSLQARVEWTFQRAGVTAHTQVLAEERTERTARGLLLRRLRRRDSGVYLCAAVEQGFTQPLRRLSLHVLSATQAERLARAEEAAPAAPPGPKLWYRDFLQLVEPGGGGSANSLRMCRPQPALQSLPLESRRKGRNRRTHAPEPRAERGPRSATHW

SEQ ID NO: 835618 - protein, 636 aa, Homo sapiens
MNFVKLLHAYNRTHLLACGTGAFHPTCAFVEVGHRAEEPVLRLDPGRIEDGKGKSPYDPRHRAASVLVGEELYSGVAADLMGRDFTIFRSLGQRPSLRTEPHDSRWLNEPKFVKVFWIPESENPDDDKIYFFFRETAVEAAPALGRLSVSRVGQICRNDVGGQRSLVNKWTTFLKARLVCSVPGVEGDTHFDQLQDVFLLSSRDHRTPLLYAVFSTSSSIFQGSAVCVYSMNDVRRAFLGPFAHKEGPMHQWVSYQGRVPYPRPGMCPSKTFGTFSSTKDFPDDVIQFARNHPLMYNSVLPTGGRPLFLQVGANYTFTQIAADRVAAADGHYDVLFIGTDVGTVLKVISVPKGSRPSAEGLLLEELHVFEDSAAVTSMQISSKRHQLYVASRSAVAQIALHRCAAHGRVCTECCLARDPYCAWDGVACTRFQPSAKRRFRRQDVRNGDPSTLCSGDSSRPALLEHKVFGVEGSSAFLECEPRSLQARVEWTFQRAGVTAHTQVLAEERTERTARGLLLRRLRRRDSGVYLCAAVEQGFTQPLRRLSLHVLSATQAERLARAEEAAPAAPPGPKLWYRDFLQLVEPGGGGSANSLRMCRPQPALQSLPLESRRKGRNRRTHAPEPRAERGPRSATHW

SEQ ID NO: 835619 - protein, 786 aa, Homo sapiens
MGRAGAAAVIPGLALLWAVGLGSAAPSPPRLRLSFQELQAWHGLQTFSLERTCCYQALLVDEERGRLFVGAENHVASLNLDNISKRAKKLAWPAPVEWREECNWAGKDIGTECMNFVKLLHAYNRTHLLACGTGAFHPTCAFVEVGHRAEEPVLRLDPGRIEDGKGKSPYDPRHRAASVLVGEELYSGVAADLMGRDFTIFRSLGQRPSLRTEPHDSRWLNEPKFVKVFWIPESENPDDDKIYFFFRETAVEAAPALGRLSVSRVGQICRNDVGGQRSLVNKWTTFLKARLVCSVPGVEGDTHFDQLRECGSGYGVGRGAAAQTPGAPAAAGLCALPQLGPFPAEDVFLLSSRDHRTPLLYAVFSTSSSIFQGSAVCVYSMNDVRRAFLGPFAHKEGPMHQWVSYQGRVPYPRPGMCPSKTFGTFSSTKDFPDDVIQFARNHPLMYNSVLPTGGRPLFLQVGANYTFTQIAADRVAAADGHYDVLFIGTDVGTVLKVISVPKGSRPSAEGLLLEELHVFEDSAAVTSMQISSKRHQLYVASRSAVAQIALHRCAAHGRVCTECCLARDPYCAWDGVACTRFQPSAKRRFRRQDVRNGDPSTLCSGDSSRPALLEHKVFGVEGSSAFLECEPRSLQARVEWTFQRAGVTAHTQVLAEERTERTARGLLLRRLRRRDSGVYLCAAVEQGFTQPLRRLSLHVLSATQAERLARAEEAAPAAPPGPKLWYRDFLQLVEPGGGGSANSLRMCRPQPALQSLPLESRRKGRNRRTHAPEPRAERGPRSATHW

SEQ ID NO: 835620 - protein, 576 aa, Homo sapiens
TGHGARGWVVRHCDPGCCARTTGRGSSAWVSHQEARPGPADPCLLPRSEPKFVKVFWIPESENPDDDKIYFFFRETAVEAAPALGRLSVSRVGQICRNDVGGQRSLVNKWTTFLKARLVCSVPGVEGDTHFDQLQDVFLLSSRDHRTPLLYAVFSTSSSIFQGSAVCVYSMNDVRRAFLGPFAHKEGPMHQWVSYQGRVPYPRPGMCPSKTFGTFSSTKDFPDDVIQFARNHPLMYNSVLPTGGRPLFLQVGANYTFTQIAADRVAAADGHYDVLFIGTDVGTVLKVISVPKGSRPSAEGLLLEELHVFEDSAAVTSMQISSKRHQLYVASRSAVAQIALHRCAAHGRVCTECCLARDPYCAWDGVACTRFQPSAKRRFRRQDVRNGDPSTLCSGDSSRPALLEHKVFGVEGSSAFLECEPRSLQARVEWTFQRAGVTAHTQVLAEERTERTARGLLLRRLRRRDSGVYLCAAVEQGFTQPLRRLSLHVLSATQAERLARAEEAAPAAPPGPKLWYRDFLQLVEPGGGGSANSLRMCRPQPALQSLPLESRRKGRNRRTHAPEPRAERGPRSATHW

SEQ ID NO: 835621 - protein, 342 aa, Homo sapiens [sequence omitted]

SEQ ID NO: 835622 - protein, 447 aa, Homo sapiens
ALRIPVGSAEDGRVLRDADPLLYAVFSTSSIFQGSAVCVYSMNDVRRAFLGPFAHKEGPMHQWVSYQGRVPYPRPGMCPSKTFGTFSSTKDFPDDVIQFARNHPLMYNSVLPTGGRPLFLQVGANYTFTQIAADRVAAADGHYDVLFIGTDVGTVLKVISVPKGSRPSAEGLLLEELHVFEDSAAVTSMQISSKRHQLYVASRSAVAQIALHRCAAHGRVCTECCLARDPYCAWDGVACTRFQPSAKRRFRRQDVRNGDPSTLCSGDSSRPALLEHKVFGVEGSSAFLECEPRSLQARVEWTFQRAGVTAHTQVLAEERTERTARGLLLRRLRRRDSGVYLCAAVEQGFTQPLRRLSLHVLSATQAERLARAEEAAPAAPPGPKLWYRDFLQLVEPGGGGSANSLRMCRPQPALQSLPLESRRKGRNRRTHAPEPRAERGPRSATHW

SEQ ID NO: 835623 - protein, 749 aa, Homo sapiens; identical to SEQ ID NO: 835617

SEQ ID NO: 835624 - protein, 749 aa, Homo sapiens; identical to SEQ ID NO: 835617

SEQ ID NO: 835625 - protein, 497 aa, Homo sapiens
MGRAGAAAVIPGLALLWAVGLGSAAPSPPRLRLSFQELQAWHGLQTFSLERTCCYQALLVDEERGRLFVGAENHVASLNLDNISKRAKKLAWPAPVEWREECNWAGKDIGTECMNFVKLLHAYNRTHLLACGTGAFHPTCAFVEVGHRAEEPVLRLDPGRIEDGKGKSPYDPRHRAASVLVGEELYSGVAADLMGRDFTIFRSLGQRPSLRTEPHDSRWLNEPKFVKVFWIPESENPDDDKIYFFFRETAVEAAPALGRLSVSRVGQICRNDVGGQRSLVNKWTTFLKARLVCSVPGVEGDTHFDQLQDVFLLSSRDHRTPLLYAVFSTSSSIFQGSAVCVYSMNDVRRAFLGPFAHKEGPMHQWVSYQGRVPYPRPGMCPSKTFGTFSSTKDFPDDVIQFARNHPLMYNSVLPTGGRPLFLQVGANYTFTQIAADRVAAADGHYDVLFIGTDVGTVLKVISVPKGSRPSAEGLLLEELHVFEVRPHPQSPGTPPPH

SEQ ID NO: 835626 - protein, 396 aa, Homo sapiens [sequence omitted]

SEQ ID NO: 835627 - protein, 261 aa, Homo sapiens [sequence omitted]

SEQ ID NO: 835628 - protein, 749 aa, Homo sapiens; identical to SEQ ID NO: 835617

SEQ ID NO: 835629 - protein, 851 aa, Homo sapiens
MGRAGAAAVIPGLALLWAVGLGSAAPSPPRLRLSFQELQAWHGLQTFSLERTCCYQALLVDEERGRLFVGAENHVASLNLDNISKRAKKLAWPAPVEWREECNWAGKDIGTECMNFVKLLHAYNRTHLLACGTGAFHPTCAFVEVGHRAEEPVLRLDPGRIEDGKGKSPYDPRHRAASVLVGEELYSGVAADLMGRDFTIFRSLGQRPSLRTEPHDSRWLNEPKFVKVFWIPESENPDDDKIYFFFRETAVEAAPALGRLSVSRVGQICRNDVGGQRSLVNKWTTFLKARLVCSVPGVEGDTHFDQLQDVFLLSSRDHRTPLLYAVFSTSSSIFQGSAVCVYSMNDVRRAFLGPFAHKEGPMHQWVSYQGRVPYPRPGMVRSPGTSATTHFKSLKGLRTWPGVFLVNVVSSFSYGWENVSIIRQGLFPASDFLGKADLLSNSQGRVLSPSPSMFPEAGHGGLPIKPPYLYSLLCLPFPHPQCPSKTFGTFSSTKDFPDDVIQFARNHPLMYNSVLPTGGRPLFLQVGANYTFTQIAADRVAAADGHYDVLFIGTDVGTVLKVISVPKGSRPSAEGLLLEELHVFEDSAAVTSMQISSKRHQLYVASRSAVAQIALHRCAAHGRVCTECCLARDPYCAWDGVACTRFQPSAKRRFRRQDVRNGDPSTLCSGDSSRPALLEHKVFGVEGSSAFLECEPRSLQARVEWTFQRAGVTAHTQVLAEERTERTARGLLLRRLRRRDSGVYLCAAVEQGFTQPLRRLSLHVLSATQAERLARAEEAAPAAPPGPKLWYRDFLQLVEPGGGGSANSLRMCRPQPALQSLPLESRRKGRNRRTHAPEPRAERGPRSATHW

SEQ ID NO: 835630 - protein, 592 aa, Homo sapiens
ELHFASRHTRGSPTQGELQASVITLLHHVCHLVSPIQYTLNRNEPPFANPAGQRDSCGRPRWLNEPKFVKVFWIPESENPDDDKIYFFFRETAVEAAPALGRLSVSRVGQICRNDVGGQRSLVNKWTTFLKARLVCSVPGVEGDTHFDQLQDVFLLSSRDHRTPLLYAVFSTSSSIFQGSAVCVYSMNDVRRAFLGPFAHKEGPMHQWVSYQGRVPYPRPGMCPSKTFGTFSSTKDFPDDVIQFARNHPLMYNSVLPTGGRPLFLQVGANYTFTQIAADRVAAADGHYDVLFIGTDVGTVLKVISVPKGSRPSAEGLLLEELHVFEDSAAVTSMQISSKRHQLYVASRSAVAQIALHRCAAHGRVCTECCLARDPYCAWDGVACTRFQPSAKRRFRRQDVRNGDPSTLCSGDSSRPALLEHKVFGVEGSSAFLECEPRSLQARVEWTFQRAGVTAHTQVLAEERTERTARGLLLRRLRRRDSGVYLCAAVEQGFTQPLRRLSLHVLSATQAERLARAEEAAPAAPPGPKLWYRDFLQLVEPGGGGSANSLRMCRPQPALQSLPLESRRKGRNRRTHAPEPRAERGPRSATHW

SEQ ID NO: 835631 - protein, 613 aa, Homo sapiens
TGHGARGWVVRHCDPGCCARTTGRGSSAWVSHQEARPGPADPCLLPRSEPKFVKVFWIPESENPDDDKIYFFFRETAVEAAPALGRLSVSRVGQICRNDVGGQRSLVNKWTTFLKARLVCSVPGVEGDTHFDQLRECGSGYGVGRGAAAQTPGAPAAAGLCALPQLGPFPAEDVFLLSSRDHRTPLLYAVFSTSSSIFQGSAVCVYSMNDVRRAFLGPFAHKEGPMHQWVSYQGRVPYPRPGMCPSKTFGTFSSTKDFPDDVIQFARNHPLMYNSVLPTGGRPLFLQVGANYTFTQIAADRVAAADGHYDVLFIGTDVGTVLKVISVPKGSRPSAEGLLLEELHVFEDSAAVTSMQISSKRHQLYVASRSAVAQIALHRCAAHGRVCTECCLARDPYCAWDGVACTRFQPSAKRRFRRQDVRNGDPSTLCSGDSSRPALLEHKVFGVEGSSAFLECEPRSLQARVEWTFQRAGVTAHTQVLAEERTERTARGLLLRRLRRRDSGVYLCAAVEQGFTQPLRRLSLHVLSATQAERLARAEEAAPAAPPGPKLWYRDFLQLVEPGGGGSANSLRMCRPQPALQSLPLESRRKGRNRRTHAPEPRAERGPRSATHW

SEQ ID NO: 835632 - protein, 382 aa, Homo sapiens
VTILMLERPHIYIPAVPPVSPTSTKDFPDDVIQFARNHPLMYNSVLPTGGRPLFLQVGANYTFTQIAADRVAAADGHYDVLFIGTDVGTVLKVISVPKGSRPSAEGLLLEELHVFEDSAAVTSMQISSKRHQLYVASRSAVAQIALHRCAAHGRVCTECCLARDPYCAWDGVACTRFQPSAKRRFRRQDVRNGDPSTLCSGDSSRPALLEHKVFGVEGSSAFLECEPRSLQARVEWTFQRAGVTAHTQVLAEERTERTARGLLLRRLRRRDSGVYLCAAVEQGFTQPLRRLSLHVLSATQAERLARAEEAAPAAPPGPKLWYRDFLQLVEPGGGGSANSLRMCRPQPALQSLPLESRRKGRNRRTHAPEPRAERGPRSATHW

SEQ ID NO: 835633 - protein, 449 aa, Homo sapiens
ADGSSPCSVPSPHPFLGCVSTLWMLPNPHSSSPHSSQPKHAEGRRLKGEETLAPAVREHQWSLPLLIPADVGTVLKVISVPKGSRPSAEGLLLEELHVFEDSAAVTSMQISSKRVSDQDGGRGGMELSLCLARPKPLAPFGSLQSRALSTGSGFVRLCDLRRKTSVFPSVEWKKGSLTDGRQAWGRPRSAQSPSCPQHQLYVASRSAVAQIALHRCAAHGRVCTECCLARDPYCAWDGVACTRFQPSAKRRFRRQDVRNGDPSTLCSGDSSRPALLEHKVFGVEGSSAFLECEPRSLQARVEWTFQRAGVTAHTQVLAEERTERTARGLLLRRLRRRDSGVYLCAAVEQGFTQPLRRLSLHVLSATQAERLARAEEAAPAAPPGPKLWYRDFLQLVEPGGGGSANSLRMCRPQPALQSLPLESRRKGRNRRTHAPEPRAERGPRSATHW

SEQ ID NO: 835634 - protein, 446 aa, Homo sapiens
  misc_feature (428)..(428): Xaa can be any naturally occurring amino acid
  misc_feature (440)..(440): Xaa can be any naturally occurring amino acid
  misc_feature (444)..(444): Xaa can be any naturally occurring amino acid
MGRAGAAAVIPGLALLWAVGLGSAAPSPPRLRLSFQELQAWHGLQTFSLERTCCYQALLVDEERGRLFVGAENHVASLNLDNISKRAKKLAWPAPVEWREECNWAGKDIGTECMNFVKLLHAYNRTHLLACGTGAFHPTCAFVEVGHRAEEPVLRLDPGRIEDGKGKSPYDPRHRAASVLVGEELYSGVAADLMGRDFTIFRSLGQRPSLRTEPHDSRWLNEPKFVKVFWIPESENPDDDKIYFFFRETAVEAAPALGRLSVSRVGQICRNDVGGQRSLVNKWTTFLKARLVCSVPGVEGDTHFDQLQDVFLLSSRDHRTPLLYAVFSTSSSIFQGSAVCVYSMNDVRRAFLGPFAHKEGPMHQWVSYQGRVPYPRPGMCPSKTFGTFSSTKDFPDDVIQFARNHPLMYNSVLPTGGGAAPPFSLTKXLGGPKFYNPFNXQKFXPA

SEQ ID NO: 835635 - protein, 277 aa, Homo sapiens
MGRAGAAAVIPGLALLWAVGLGSAAPSPPRLRLSFQELQAWHGLQTFSLERTCCYQALLVDEERGRLFVGAENHVASLNLDNISKRAKKLAWPAPVEWREECNWAGKDIGTECMNFVKLLHAYNRTHLLACGTGAFHPTCAFVEVGHRAEEPVLRLDPGRIEDGKGKSPYDPRHRAASVLVGEELYSGVAADLMGRDFTIFRSLGQRPSLRTEPHDSRWLNEPKFVKVFWIPESENPDDDKIYFFFRETAVEAAPALGRLSVSRVGQICRVRSPWAT

SEQ ID NO: 835636 - protein, 261 aa, Homo sapiens [sequence omitted]

SEQ ID NO: 835637 - protein, 1260 aa, Homo sapiens
QNHSGSSARGNLSGKPDDWPQDMKEYVERCFTACESEEDKDRTEKLLKEVLQARLQDGSAYTIDWSREPLPGLTREPVAESPKKKRWEAASSLHPPRGAGSATRGGGAPSQRGTPGAGGAGRARGNSFTKFGNRNVFMKDNSSSSSTDSRSRSSSRSPTRHFRRSDSHSDSDSSYSGNECHPVGRRNPPPKGRGGRGAHMDRGRGRAQRGKRHDLAPTKRSRKKMAALECEDPERELKKQKRAARFQHGHSRRLRLEPLVLQMSSLESSGADPDWQELQIVGTCPDITKHYLRLTCAPDPSTVRPVAVLKKSLCMVKCHWKEKQDYAFACEQMKSIRQDLTVQGIRTEFTVEVYETHARIALEKGDHEEFNQCQTQLKSLYAENLPGNVGEFTAYRILYYIFTKNSGDITTELAYLTRELKADPCVAHALALREPAGWHSGVVAVLLIAWVVVGVSLQRRIRDSEKAVWLPRSTPYTPRSRWRPTWVINVAQIGLLSTAWWLGQAERMAWRRRCTRTRSGRRPVRPWPASASQELPAALPSPAAMGLWPVHSTCPRQKPQLCSSSSTTSGTSSTTMPTPTATTIPCPQSPAWMRACPTRLPLSSCRRLSPLSPQIPHMGLTTLNSGPQPGTAPATQHSQAGPATGQAYGPHTYTEPAKPKKGQQLWNRMKPAPGTGGLKFNIQKRPFAVTTQSFGSNAEGQHSGFGPQPNPEKVQNHSGSSARGNLSGKPDDWPQDMKEYVERCFTACESEEDKDRTEKLLKEVLQARLQDGSAYTIDWSREPLPGLTREPVAESPKKKRWEAASSLHPPRGAGSATRGGGAPSQRGTPGAGGAGRARGNSFTKFGNRNVFMKDNSSSSSTDSRSRSSSRSPTRHFRRSDSHSDSDSSYSGNECHPVGRRNPPPKGRGGRGAHMDRGRGRAQRGKRHDLAPTKRSRKKMAALECEDPERELKKQKRAARFQHGHSRRLRLEPLVLQMSSLESSGADPDWQELQIVGTCPDITKHYLRLTCAPDPSTVRPVAVLKKSLCMVKCHWKEKQDYAFACEQMKSIRQDLTVQGIRTEFTVEVYETHARIALEKGDHEEFNQCQTQLKSLYAENLPGNVGEFTAYRILYYIFTKNSGDITTELAYLTRELKADPCVAHALALRTAWALGNYHRFFRLYCHAPCMSGYLVDKFADRERKVALKAMIKTYVVPSSLLPLLFPSFRLVSSCIKLSPCPLLPLPPVFLLIFFSPFPPSLSAFFPWFSTGKTVPLPPSSAM

SEQ ID NO: 835638 - protein, 874 aa, Homo sapiens
MAANVGDQRSTDWSSQYSMVAGAGRENGMETPMHENPEWEKARQALASISKSGAAGGSAKSSSNGPVASAQYVSQAEASALQQQQYYQWYQQYNYAYPYSYYYPMSMYQSYGSPSQYGMAGSYGSATPQQPSAPQHQGTLNQPPVPGMDESMSYQAPPQQLPSAQPPQPSNPPHGAHTLNSGPQPGTAPATQHSQAGPATGQAYGPHTYTEPAKPKKGQQLWNRMKPAPGTGGLKFNIQKRPFAVTTQSFGSNAEGQHSGFGPQPNPEKVQNHSGSSARGNLSGKPDDWPQDMKEYVERCFTACESEEDKDRTEKLLKEVLQARLQDGSAYTIDWSREPLPGLTREPVAESPKKKRWEAASSLHPPRGAGSATRGGGAPSQRGTPGAGGAGRARGNSFTKFGNRNVFMKDNSSSSSTDSRSRSSSRSPTRHFRRSDSHSDSDSSYSGNECHPVGRRNPPPKGRGGRGAHMDRGRGRAQRGKRHDLAPTKRSRKKMAALECEDPERELKKQKRAARFQHGHSRRLRLEPLVLQMSSLESSGADPDWQELQIVGTCPDITKHYLRLTCAPDPSTVRPVAVLKKSLCMVKCHWKEKQDYAFACEQMKSIRQDLTVQGIRTEFTVEVYETHARIALEKGDHEEFNQCQTQLKSLYAENLPGNVGEFTAYRILYYIFTKNSGDITTELAYLTRELKADPCVAHALALRTAWALGNYHRFFRLYCHAPCMSGYLVDKFADRERKVALKAMIKTYVVPSSLLPLLFPSFRLAPPLRPAPGRRPPPAPNPCPGPCFPIIFLHSALPSPVPLALLVGHLCVPGHSSPSPHCSQLTASGASSPPHLCVSSSCSLLPGPPSSLLALGFLRTLRSLLSQLVAVLPP

SEQ ID NO: 835639 - protein, 874 aa, Homo sapiens; identical to SEQ ID NO: 835638

SEQ ID NO: 835640 - protein, 874 aa, Homo sapiens; identical to SEQ ID NO: 835638

SEQ ID NO: 835641 - protein, 856 aa, Homo sapiens
MVAGAGRENGMETPMHENPEWEKARQALASISKSGAAGGSAKSSSNGPVASAQYVSQAEASALQQQQYYQWYQQYNYAYPYSYYYPMSMYQSYGSPSQYGMAGSYGSATPQQPSAPQHQGTLNQPPVPGMDESMSYQAPPQQLPSAQPPQPSNPPHGAHTLNSGPQPGTAPATQHSQAGPATGQAYGPHTYTEPAKPKKGQQLWNRMKPAPGTGGLKFNIQKRPFAVTTQSFGSNAEGQHSGFGPQPNPEKVQNHSGSSARGNLSGKPDDWPQDMKEYVERCFTACESEEDKDRTEKLLKEVLQARLQDGSAYTIDWSREPLPGLTREPVAESPKKKRWEAASSLHPPRGAGSATRGGGAPSQRGTPGAGGAGRARGNSFTKFGNRNVFMKDNSSSSSTDSRSRSSSRSPTRHFRRSDSHSDSDSSYSGNECHPVGRRNPPPKGRGGRGAHMDRGRGRAQRGKRHDLAPTKRSRKKMAALECEDPERELKKQKRAARFQHGHSRRLRLEPLVLQMSSLESSGADPDWQELQIVGTCPDITKHYLRLTCAPDPSTVRPVAVLKKSLCMVKCHWKEKQDYAFACEQMKSIRQDLTVQGIRTEFTVEVYETHARIALEKGDHEEFNQCQTQLKSLYAENLPGNVGEFTAYRILYYIFTKNSGDITTELAYLTRELKADPCVAHALALRTAWALGNYHRFFRLYCHAPCMSGYLVDKFADRERKVALKAMIKTYVVPSSLLPLLFPSFRLAPPLRPAPGRRPPPAPNPCPGPCFPIIFLHSALPSPVPLALLVGHLCVPGHSSPSPHCSQLTASGASSPPHLCVSSSCSLLPGPPSSLLALGFLRTLRSLLSQLVAVLPP

SEQ ID NO: 835642 - protein, 837 aa, Homo sapiens
MAANVGDQRSTDWSSQYSMVAGAGRENGMETPMHENPEWEKARQALASISKSGAAGGSAKSSSNGPVASAQYVSQAEASALQQQQYYQWYQQYNYAYPYSYYYPMPPVPGMDESMSYQAPPQQLPSAQPPQPSNPPHGAHTLNSGPQPGTAPATQHSQAGPATGQAYGPHTYTEPAKPKKGQQLWNRMKPAPGTGGLKFNIQKRPFAVTTQSFGSNAEGQHSGFGPQPNPEKVQNHSGSSARGNLSGKPDDWPQDMKEYVERCFTACESEEDKDRTEKLLKEVLQARLQDGSAYTIDWSREPLPGLTREPVAESPKKKRWEAASSLHPPRGAGSATRGGGAPSQRGTPGAGGAGRARGNSFTKFGNRNVFMKDNSSSSSTDSRSRSSSRSPTRHFRRSDSHSDSDSSYSGNECHPVGRRNPPPKGRGGRGAHMDRGRGRAQRGKRHDLAPTKRSRKKMAALECEDPERELKKQKRAARFQHGHSRRLRLEPLVLQMSSLESSGADPDWQELQIVGTCPDITKHYLRLTCAPDPSTVRPVAVLKKSLCMVKCHWKEKQDYAFACEQMKSIRQDLTVQGIRTEFTVEVYETHARIALEKGDHEEFNQCQTQLKSLYAENLPGNVGEFTAYRILYYIFTKNSGDITTELAYLTRELKADPCVAHALALRTAWALGNYHRFFRLYCHAPCMSGYLVDKFADRERKVALKAMIKTYVVPSSLLPLLFPSFRLAPPLRPAPGRRPPPAPNPCPGPCFPIIFLHSALPSPVPLALLVGHLCVPGHSSPSPHCSQLTASGASSPPHLCVSSSCSLLPGPPSSLLALGFLRTLRSLLSQLVAVLPP

SEQ ID NO: 835643 - protein, 874 aa, Homo sapiens; identical to SEQ ID NO: 835638

SEQ ID NO: 835644 - protein, 467 aa, Homo sapiens [sequence omitted]

SEQ ID NO: 835645 - protein, 604 aa, Homo sapiens
QNHSGSSARGNLSGKPDDWPQDMKEYVERCFTACESEEDKDRTEKLLKEVLQARLQDGSAYTIDWSREPLPGLTREPVAESPKKKRWEAASSLHPPRGAGSATRGGGAPSQRGTPGAGGAGRARGNSFTKFGNRNVFMKDNSSSSSTDSRSRSSSRSPTRHFRRSDSHSDSDSSYSGNECHPVGRRNPPPKGRGGRGAHMDRGRGRAQRGKRHDLAPTKRSRKKMAALECEDPERELKKQKRAARFQHGHSRRLRLEPLVLQMSSLESSGADPDWQELQIVGTCPDITKHYLRLTCAPDPSTVRPVAVLKKSLCMVKCHWKEKQDYAFACEQMKSIRQDLTVQGIRTEFTVEVYETHARIALEKGDHEEFNQCQTQLKSLYAENLPGNVGEFTAYRILYYIFTKNSGDITTELAYLTRELKADPCVAHALALRTAWALGNYHRFFRLYCHAPCMSGYLVDKFADRERKVALKAMIKTYVVPSSLLPLLFPSFRLAPPLRPAPGRRPPPAPNPCPGPCFPIIFLHSALPSPVPLALLVGHLCVPGHSSPSPHCSQLTASGASSPPHLCVSSSCSLLPGPPSSLLALGFLRTLRSLLSQLVAVLPP

SEQ ID NO: 835646 - protein, 874 aa, Homo sapiens; identical to SEQ ID NO: 835638

SEQ ID NO: 835647 - protein, 874 aa, Homo sapiens; identical to SEQ ID NO: 835638

SEQ ID NO: 835648 - protein, 800 aa, Homo sapiens
MAANVGDQRSTDWSSQYSMVAGAGRENGMETPMHENPEWEKARQALASISKSGAAGGSAKSSSNGPVASAQYVSQAEASALQQQQYYQWYQQYNYAYPYSYYYPMSMYQSYGSPSQYGMAGSYGSATPQQPSAPQHQGTLNQPPVPGMDESMSYQAPPQQLPSAQPPQPSNPPHGAHTLNSGPQPGTAPATQHSQAGPATGQAYGPHTYTEPAKPKKGQQLWNRMKPAPGTGGLKFNIQKRPFAVTTQSFGSNAEGQHSGFGPQPNPEKVQNHSGSSARGNLSGKPDDWPQDMKEYVERCFTACESEEDKDRTEKLLKEVLQARLQDGSAYTIDWSREPLPGLTREPVAESPKKKRWEAASSLHPPRGAGSATRGGGAPSQRGTPGAGGAGRARGNSFTKFGNRNVFMKDNSSSSSTDSRSRSSSRSPTRHFRRSDSHSDSDSSYSGNECHPVGRRNPPPKGRGGRGAHMDRGRGRAQRGKRHDLAPTKRSRKKMAALECEDPERELKKQKRAARFQHGHSRRLRLEPLVLQMSSLESSGADPDWQELQIVGTCPDITKHYLRLTCAPDPSTVRPVAVLKKSLCMVKCHWKEKQDYAFACEQMKSIRQDLTVQGIRTEFTVEVYETHARIALEKGDHEEFNQCQTQLKSLYAENLPGNVGEFTAYRILYYIFTKNSGDITTELAYLTRELKADPCVAHALALRTAWALGNYHRFFRLYCHAPCMSGYLVDKFADRERKVALKAMIKTFRPALPVSYLQAELAFEGEAACRAFLEPLGLAYTGPDNSSIDCRLSLAQLSAF

SEQ ID NO: 835649 - protein, 833 aa, Homo sapiens
MAANVGDQRSTDWSSQYSMVAGAGRENGMETPMHENPEWEKARQALASISKSGAAGGSAKSSSNGPVASAQYVSQAEASALQQQQYYQWYQQYNYAYPYSYYYPMSMYQSYGSPSQYGMAGSYGSATPQQPSAPQHQGTLNQPPVPGMDESMSYQAPPQQLPSAQPPQPSNPPHGAHTLNSGPQPGTAPATQHSQAGPATGQAYGPHTYTEPAKPKKGQQLWNRMKPAPGTGGLKFNIQKRPFAVTTQSFGSNAEGQHSGFGPQPNPEKVQNHSGSSARGNLSGKPDDWPQDMKEYVERCFTACESEEDKDRTEKLLKEVLQARLQDGSAYTIDWSREPLPGLTREPVAESPKKKRWEAASSLHPPRGAGSATRGGGAPSQRGTPGAGGAGRARGNSFTKFGNRNVFMKDNSSSSSTDSRSRSSSRSPTRHFRRSDSHSDSDSSYSGNECHPVGRRNPPPKGRGGRGAHMDRGRGRAQRGKRHDLAPTKRSRKKMAALECEDPERELKKQKRAARFQHGHSRRLRLEPLVLQMSSLESSGADPDWQELQIVGTCPDITKHYLRLTCAPDPSTVRPVAVLKKSLCMVKCHWKEKQDYAFACEQMKSIRQDLTVQGIRTEFTVEVYETHARIALEKGDHEEFNQCQTQLKSLYAENLPGNVGEFTAYRILYYIFTKNSGDITTELAYLTRELKADPCVAHALALRTAWALGNYHRFFRLYCHAPCMSGYLVDKFADRERKVALKAMIKTYVVPSSLLPLLFPSFRLVSSCIKLSPCPLLPLPPVFLLIFFSPFPPSLSAFFPWFSTGKTVPLPPCLHGSPAHVMLPSLFFVCVFI

SEQ ID NO: 835650 - protein, 874 aa, Homo sapiens; identical to SEQ ID NO: 835638

SEQ ID NO: 835651 - protein, 874 aa, Homo sapiens; identical to SEQ ID NO: 835638

SEQ ID NO: 835652 - protein, 361 aa, Homo sapiens
MCGARLARGCNTKAGPFVLGPGRRTPLGFCRLSGAPRDSQGLCFLAPQQCGPGGCCWLQCLLSHSGEASSWGQCSQISSCAQRPLLGRLQLSGFLHAWFLVPCAERPCAPSLGGSLGLLTCPRQCPLGTLCPVGALGVRCVQDGGPASRRRARAKDEVGARGAVPHKAAMEAEEAHAVLGHCQHARPERRQRLVPAKGAEGLLAHTQKAVDVAHREVGGVEARVPADALDDVRGCAQRRLLGPGLRCASRPGGAGAPGWGWRQRAPKRQRPSRKKRQAGGGAGSVAGASCGNSGSLAAAMGAGNWHARRADEVAPHGGRLPMDAPSLTRQWRQRPALRPSSGDHAACPREDSGPVPPWWRA

SEQ ID NO: 835653 - protein, 180 aa, Homo sapiens
MAANVGDQRSTDWSSQYSMVAGAGRENGMETPMHENPEWEKARQALASISKSGAAGGSAKSSSNGPVASAQYVSQAEASALQQQQYYQWYQQYNYAYPYSYYYPMSMYQSYGSPSQYGMAGSYGSATPQQPSAPQHQGTLNQPPVPGMDESMSYQAPPQQLPSAQPPQPWSPWDPLDHMQ

SEQ ID NO: 835654 - protein, 134 aa, Homo sapiens
MAANVGDQRSTDWSSQYSMVAGAGRENGMETPMHENPEWEKARQALASISKSGAAGGSAKSSSNGPVASAQYVSQAEASALQQQQYYQWYQQYNYAYPYSYYYPMVSAQPVGPPLPSFSFLPSFPWSTEHHLEA

SEQ ID NO: 835655 - protein, 874 aa, Homo sapiens; identical to SEQ ID NO: 835638

SEQ ID NO: 835656 - protein, 856 aa, Homo sapiens; identical to SEQ ID NO: 835641

SEQ ID NO: 835657 - protein, 874 aa, Homo sapiens; identical to SEQ ID NO: 835638

SEQ ID NO: 835658 - protein, 893 aa, Homo sapiens
WSPDPDVTLLAEALVTVTNIEVINCSITEIETTTSSIPGASDTGLIPMEGVKASSTSDPPALPDSTNTKPHITEVTASAETLSTAGTTESAAPHATVGTPLPTEESVTLSLWGYAYPYSYYYPMSMYQSYGSPSQYGMAGSYGSATPQQPSAPQHQGTLNQPPVPGMDESMSYQAPPQQLPSAQPPQPSNPPHGAHTLNSGPQPGTAPATQHSQAGPATGQAYGPHTYTEPAKPKKGQQLWNRMKPAPGTGGLKFNIQKRPFAVTTQSFGSNAEGQHSGFGPQPNPEKVQNHSGSSARGNLSGKPDDWPQDMKEYVERCFTACESEEDKDRTEKLLKEVLQARLQDGSAYTIDWSREPLPGLTREPVAESPKKKRWEAASSLHPPRGAGSATRGGGAPSQRGTPGAGGAGRARGNSFTKFGNRNVFMKDNSSSSSTDSRSRSSSRSPTRHFRRSDSHSDSDSSYSGNECHPVGRRNPPPKGRGGRGAHMDRGRGRAQRGKRHDLAPTKRSRKKMAALECEDPERELKKQKRAARFQHGHSRRLRLEPLVLQMSSLESSGADPDWQELQIVGTCPDITKHYLRLTCAPDPSTVRPVAVLKKSLCMVKCHWKEKQDYAFACEQMKSIRQDLTVQGIRTEFTVEVYETHARIALEKGDHEEFNQCQTQLKSLYAENLPGNVGEFTAYRILYYIFTKNSGDITTELAYLTRELKADPCVAHALALRTAWALGNYHRFFRLYCHAPCMSGYLVDKFADRERKVALKAMIKTYVVPSSLLPLLFPSFRLAPPLRPAPGRRPPPAPNPCPGPCFPIIFLHSALPSPVPLALLVGHLCVPGHSSPSPHCSQLTASGASSPPHLCVSSSCSLLPGPPSSLLALGFLRTLRSLLSQLVAVLPP

SEQ ID NO: 835659 - protein, 874 aa, Homo sapiens; identical to SEQ ID NO: 835638

SEQ ID NO: 835660 - protein, 874 aa, Homo sapiens; identical to SEQ ID NO: 835638

SEQ ID NO: 835661 - protein, 874 aa, Homo sapiens; identical to SEQ ID NO: 835638

SEQ ID NO: 835662 - protein, 874 aa, Homo sapiens; identical to SEQ ID NO: 835638

SEQ ID NO: 835663 - protein, 874 aa, Homo sapiens; identical to SEQ ID NO: 835638

SEQ ID NO: 835664 - protein, 874 aa, Homo sapiens; identical to SEQ ID NO: 835638

SEQ ID NO: 835665 - protein, 623 aa, Homo sapiens
MAANVGDQRSTDWSSQYSMVAGAGRENGMETPMHENPEWEKARQALASISKSGAAGGSAKSSSNGPVASAQYVSQAEASALQQQQYYQWYQQYNYAYPYSYYYPMSMYQSYGSPSQYGMAGSYGSATPQQPSAPQHQGTLNQPPVPGMDESMSYQAPPQQLPSAQPPQPSNPPHGAHTLNSGPQPGTAPATQHSQAGPATGQAYGPHTYTEPAKPKKGQQLWNRMKPAPGTGGLKFNIQKRPFAVTTQSFGSNAEGQHSGFGPQPNPEKVQNHSGSSARGNLSGKPDDWPQDMKEYVERCFTACESEEDKDRTEKLLKEVLQARLQDGSAYTIDWSREPLPGLTREPVAESPKKKRWEAASSLHPPRGAGSATRGGGAPSQRGTPGAGGAGRARGNSFTKFGNRNVFMKDNSSSSSTDSRSRSSSRSPTRHFRRSDSHSDSDSSYSGNECHPVGRRNPPPKGRGGRGAHMDRGRGRAQRGKRHDLAPTKRSRKKMAALECEDPERELKKQKRAARFQHGHSRRLRLEPLVLQMSSLESSGADPDWQELQIVGTCPDITKHYLRLTCAPDPSTVRPVAVLKKSLCMVKCHWKEKQDYAFACEQMKSIRQDLTVQGIRTEFLVKM

SEQ ID NO: 835666 - protein, 189 aa, Homo sapiens
MAANVGDQRSTDWSSQYSMVAGAGRENGMETPMHENPEWEKARQALASISKSGAAGGSAKSSSNGPVASAQYVSQAEASALQQQQYYQWYQQYNYAYPYSYYYPMSMYQSYGSPSQYGMAGSYGSATPQQPSAPQHQGTLNQPPVPGMDESMSYQAPPQQLPSAQPPQPLKSLAFKCTHTPRELLTANK

SEQ ID NO: 835667 - protein, 148 aa, Homo sapiens
MAANVGDQRSTDWSSQYSMVAGAGRENGMETPMHENPEWEKARQALASISKSGAAGGSAKSSSNGPVASAQYVSQAEASALQQQQYYQWYQQYNYAYPLASGGCGQNVNHWTGYSCSSLGSPLGQSDWSYFEAVSAAAHPIAAPQHCW

SEQ ID NO: 835668 - protein, 670 aa, Homo sapiens
KTQTQRIKGKQRKNAQLKKKIMFLFFPLDHFHELYKVILLPNQTHYIIPKGECLPYFSFAEVAKRGVEGAYSDNPIIRHASIANKWKTIHLIMHSGMNATTIHFNLTFQNTNDEEFKMQITVEVDTREGPKLNSTAQKGYENLVSPITLLPEAEILFEDIPKEKRFPKFKRHDVNSTRRAQEEVKIPLVNISLLPKDAQLSLNTLDLQLEHGDITLKGYNLSKSALLRSFLMNSQHAKIKNQAIITDETNDSLVAPQEKQVHKSILPNSLGVSERLQRLTFPAVSVKVNGHDQGQNPPLDLETTARFRVETHTQKTIGGNVTKEKPPSLIVPLESQMTKEKKITGKEKENSRMEENAENHIGVTEVLLGRKLQHYTDSYLGFLPWEKKKYFQDLLDEEESLKTQLAYFTDSKNTGRQLKDTFADSLRYVNKILNSKFGFTSRKVPAHMPHMIDRIVMQELQDMFPEEFDKTSFHKVRHSEDMQFAFSYFYYLMSAVQPLNISQVFDEVDTDQSGVLSDREIRTLATRIHELPLSLQDLTGLEHMLINCSKMLPADITQLNNIPPTQESYYDPNLPPVTKSLVTNCKPVTDKIHKAYKDKNKYRFEIMGEEEIAFKMIRTNVSHVVGQLDDIRKNPRISLCCPSWNAVMQTWLTVASTSWAQAILPPQPPD

SEQ ID NO: 835669 - protein, 907 aa, Homo sapiens
LKFRKTSWCVTIVTRGLSRFSQDGICPLVTMKIFRTHGACLSIHRIEGLSQKFIYLNDDVMFGKDVWPDDFYSHSKGQKVYLTWPVPNCAEGCPGSWIKDGYCDKACNNSACDWDGGDCSGNSGGSRYIAGGGGTGSIGVGQPWQFGGGINSVSYCNQGCANSWLADKFCDQACNVLSCGFDAGDCGQDHFHELYKVILLPNQTHYIIPKGECLPYFSFAEVAKRGVEGAYSDNPIIRHASIANKWKTIHLIMHSGMNATTIHFNLTFQNTNDEEFKMQITVEVDTREGPKLNSTAQKGYENLVSPITLLPEAEILFEDIPKEKRFPKFKRHDVNSTRRAQEEVKIPLVNISLLPKDAQLSLNTLDLQLEHGDITLKGYNLSKSALLRSFLMNSQHAKIKNQAIITDETNDSLVAPQEKQVHKSILPNSLGVSERLQRLTFPAVSVKVNGHDQGQNPPLDLETTARFRVETHTQKTIGGNVTKEKPPSLIVPLESQMTKEKKITGKEKENSRMEENAENHIGVTEVLLGRKLQHYTDSYLGFLPWEKKKYFQDLLDEEESLKTQLAYFTDSKNTGRQLKDTFADSLRYVNKILNSKFGFTSRKVPAHMPHMIDRIVMQELQDMFPEEFDKTSFHKVRHSEDMQFAFSYFYYLMSAVQPLNISQVFDEVDTDQSGVLSDREIRTLATRIHELPLSLQDLTGLEHMLINCSKMLPADITQLNNIPPTQESYYDPNLPPVTKSLVTNCKPVTDKIHKAYKDKNKYRFEIMGEEEIAFKMIRTNVSHVVGQLDDIRKNPRKFVCLNDNIDHNHKDAQTVKAVLRDFYESMFPIPSQFELPREYRNRFLHMHELQEWRAYRDKLKFWTHCVLATLIMFTIFSFFAEQLIALKRKIFPRRRIHKEASPNRIRV

SEQ ID NO: 835670 - protein, 655 aa, Homo sapiens
MHSGMNATTIHFNLTFQNTNDEEFKMQITVEVDTREGPKLNSTAQKGYENLVSPITLLPEAEILFEDIPKEKRFPKFKRHDVNSTRRAQEEVKIPLVNISLLPKDAQLSLNTLDLQLEHGDITLKGYNLSKSALLRSFLMNSQHAKIKNQAIITDETNDSLVAPQEKQVHKSILPNSLGVSERLQRLTFPAVSVKVNGHDQGQNPPLDLETTARFRVETHTQKTIGGNVTKEKPPSLIVPLESQMTKEKKITGKEKENSRMEENAENHIGVTEVLLGRKLQHYTDSYLGFLPWEKKKYFQDLLDEEESLKTQLAYFTDSKNTGRQLKDTFADSLRYVNKILNSKFGFTSRKVPAHMPHMIDRIVMQELQDMFPEEFDKTSFHKVRHSEDMQFAFSYFYYLMSAVQPLNISQVFDEVDTDQSGVLSDREIRTLATRIHELPLSLQDLTGLEHMLINCSKMLPADITQLNNIPPTQESYYDPNLPPVTKSLVTNCKPVTDKIHKAYKDKNKYRFEIMGEEEIAFKMIRTNVSHVVGQLDDIRKNPRKFVCLNDNIDHNHKDAQTVKAVLRDFYESMFPIPSQFELPREYRNRFLHMHELQEWRAYRDKLKFWTHCVLATLIMFTIFSFFAEQLIALKRKIFPRRRIHKEASPNRIRV

SEQ ID NO: 835671 - protein, 347 aa, Homo sapiens
RSRGSHFWTDSKNTGRQLKDTFADSLRYVNKILNSKFGFTSRKVPAHMPHMIDRIVMQELQDMFPEEFDKTSFHKVRHSEDMQFAFSYFYYLMSAVQPLNISQVFDEVDTDQSGVLSDREIRTLATRIHELPLSLQDLTGLEHMLINCSKMLPADITQLNNIPPTQESYYDPNLPPVTKSLVTNCKPVTDKIHKAYKDKNKYRFEIMGEEEIAFKMIRTNVSHVVGQLDDIRKNPRKFVCLNDNIDHNHKDAQTVKAVLRDFYESMFPIPSQFELPREYRNRFLHMHELQEWRAYRDKLKFWTHCVLATLIMFTIFSFFAEQLIALKRKIFPRRRIHKEASPNRIRV

SEQ ID NO: 835672 - protein, 1059 aa, Homo sapiens
LLKGNSRQTVWRGYLTTDKEVPGLVLMQDLAFLSGFPPTFKETNQLKTKLPENLSSKVKLLQLYSEASVALLKLNNPKDFQELNKQTKKNMTIDGKELTISPAYLLWDLSAISQSKQDEDISASRFEDNEELRYSLRSIERHAPWVRNIFIVTNGQIPSWLNLDNPRVTIVTHQDVFRNLSHLPTFSSPAIESHIHRIEGLSQKFIYLNDDVMFGKDVWPDDFYSHSKGQKVYLTWPVPNCAEGCPGSWIKDGYCDKACNNSACDWDGGDCSGNSGGSRYIAGGGGTGSIGVGQPWQFGGGINSVSYCNQGCANSWLADKFCDQACNVLSCGFDAGDCGQDHFHELYKVILLPNQTHYIIPKGECLPYFSFAEVAKRGVEGAYSDNPIIRHASIANKWKTIHLIMHSGMNATTIHFNLTFQNTNDEEFKMQITVEVDTREGPKLNSTAQKGYENLVSPITLLPEAEILFEDIPKEKRFPKFKRHDVNSTRRAQEEVKIPLVNISLLPKDAQLSLNTLDLQLEHGDITLKGYNLSKSALLRSFLMNSQHAKIKNQAIITDETNDSLVAPQEKQVHKSILPNSLGVSERLQRLTFPAVSVKVNGHDQGQNPPLDLETTARFRVETHTQKTIGGNVTKEKPPSLIVPLESQMTKEKKITGKEKENSRMEENAENHIGVTEVLLGRKLQHYTDSYLGFLPWEKKKYFQDLLDEEESLKTQLAYFTDSKNTGRQLKDTFADSLRYVNKILNSKFGFTSRKVPAHMPHMIDRIVMQELQDMFPEEFDKTSFHKVRHSEDMQFAFSYFYYLMSAVQPLNISQVFDEVDTDQSGVLSDREIRTLATRIHELPLSLQDLTGLEHMLINCSKMLPADITQLNNIPPTQESYYDPNLPPVTKSLVTNCKPVTDKIHKAYKDKNKYRFEIMGEEEIAFKMIRTNVSHVVGQLDDIRKNPRKFVCLNDNIDHNHKDAQTVKAVLRDFYESMFPIPSQFELPREYRNRFLHMHELQEWRAYRDKLKFWTHCVLATLIMFTIFSFFAEQLIALKRKIFPRRRIHKEASPNRIRV

SEQ ID NO: 835673 - protein, 1059 aa, Homo sapiens; identical to SEQ ID NO: 835672

SEQ ID NO: 835674 - protein, 845 aa, Homo sapiens
MGFYHVGQAGLKLLTSGDPASSASQSVEITGVSHHTQSRTVFQNCNYSKKSLFFLRSTGNSGGSRYIAGGGGTGSIGVGQPWQFGGGINSVSYCNQGCANSWLADKFCDQACNVLSCGFDAGDCGQDHFHELYKVILLPNQTHYIIPKGECLPYFSFAEVAKRGVEGAYSDNPIIRHASIANKWKTIHLIMHSGMNATTIHFNLTFQNTNDEEFKMQITVEVDTREGPKLNSTAQKGYENLVSPITLLPEAEILFEDIPKEKRFPKFKRHDVNSTRRAQEEVKIPLVNISLLPKDAQLSLNTLDLQLEHGDITLKGYNLSKSALLRSFLMNSQHAKIKNQAIITDETNDSLVAPQEKQVHKSILPNSLGVSERLQRLTFPAVSVKVNGHDQGQNPPLDLETTARFRVETHTQKTIGGNVTKEKPPSLIVPLESQMTKEKKITGKEKENSRMEENAENHIGVTEVLLGRKLQHYTDSYLGFLPWEKKKYFQDLLDEEESLKTQLAYFTDSKNTGRQLKDTFADSLRYVNKILNSKFGFTSRKVPAHMPHMIDRIVMQELQDMFPEEFDKTSFHKVRHSEDMQFAFSYFYYLMSAVQPLNISQVFDEVDTDQSGVLSDREIRTLATRIHELPLSLQDLTGLEHMLINCSKMLPADITQLNNIPPTQESYYDPNLPPVTKSLVTNCKPVTDKIHKAYKDKNKYRFEIMGEEEIAFKMIRTNVSHVVGQLDDIRKNPRKFVCLNDNIDHNHKDAQTVKAVLRDFYESMFPIPSQFELPREYRNRFLHMHELQEWRAYRDKLKFWTHCVLATLIMFTIFSFFAEQLIALKRKIFPRRRIHKEASPNRIRV

SEQ ID NO: 835675 - protein, 1059 aa, Homo sapiens; identical to SEQ ID NO: 835672

SEQ ID NO: 835676 - protein, 197 aa, Homo sapiens
KSALLRSFLMNSQHAKIKNQAIITDETNDSLVAPQEKQVHKSILPNSLGVSERLQRLTFPAVSVKVNGHDQGQNPPLDLETTARFRVETHTQKTIGGNVTKEKPPSLIVPLESQMTKEKKITGKEKENSRMEENAENHIGVTEVLLGRKLQHYTDSYLGFLPWEKKKYFQDLLDVSNIQPHSFSCSGRVNNLMIISL

SEQ ID NO: 835677 - protein, 798 aa, Homo sapiens
MEIRGALDLRKRQVLIFLVLLGLSRAGTESAHYSVAEETEIGSFVANLARDLGLGVEELSSREARVVSDDNKKYLHLDLLTGNLLLNEKLDRDELCGSTEPCVLHFQVVLENPLQFFRFELCVKDINDHSPTFLDKEILIKISEGTTVGATFLMESAQDLDVGSNSLQNYTISPNSHFYIKIPDSSDRKIYPELVLDRALDYEQEAELRLTLTAVDGGSPPKSGTTLVLIKVLDINDNAPEFPQSLYEVQVPEDRPLGSWIATISAKDLDAGNYGKISYTFFHASEDIRKTFEINPISGEVNLRSPLDFEVIQSYTINIQATDGGGLSGKCTLLVKVMDINDNPPEVTISSITKRIPENASETLVALFSILDQDSGDNGRMICSIQDNLPFFLKPTFKNFFTLVSEKALDRESQAEYNITITVTDLGTPRLKTEYNITVLLSDVNDNAPTFTQTSYTLFVRENNSPALHIGSVSATDRDSGTNAQVNYSLLPPQDRHLPLASLVSINADNGHLFALRSLDYEALQEFEFRVGATDRGSPALSSEALVRVLVLDANDNSPFVLYPLQNGSAPCTELVPRAAEPGYLVTKVVAVDGDSGQNAWLSYQLLKATEPGLFGVWAHNGEVRTARLLSERDAAKHRLVVLVKDNGEPPRSATATLHVLLVDGFSQPYLPLPEAAPAQAQADSLTVYLVVALASVSSLFLFSVLLFVAVRLCRRSRAASVGRCSVPEGPFPGHLVDVSGTGTLSQSYQYEVCLTGGSGTNEFKFLKPIIPNFQVHDTGRNMGEIENFRNSFGLNIQ

SEQ ID NO: 835678 - protein, 437 aa, Homo sapiens
MSVSARSAAAEERSVNSSTMVAQQKNLEGYVGFANLPNQVYRKSVKRGFEFTLMVVGESGLGKSTLINSLFLTDLYSPEYPGPSHRIKKTVQVEQSKVLIKEGGVQLLLTIVDTPGFGDAVDNSNCWQPVIDYIDSKFEDYLNAESRVNRRQMPDNRVQCCLYFIAPSGHGLKPLDIEFMKRLHEKVNIIPLIAKADTLTPEECQQFKKQIMKEIQEHKIKIYEFPETDDEEENKLVKKIKDRLPLAVVGSNTIIEVNGKRVRGRQYPWGVAEVENGEHCDFTILRNMLIRTHMQDLKDVTNNVHYENYRSRKLAAVTYNGVDNNKNKGQLTKSPLAQMEEERREHVAKMKKMEMEMEQVFEMKVKEKVQKLKDSEAELQRRHEQMKKNLEAQHKELEEKRRQFEDEKANWEAQQRILEQQNSSRTLEKNKKKGKIF

SEQ ID NO: 835679 - protein, 448 aa, Homo sapiens
MSVSARSAAAEERSVNSSTMVAQQKNLEGYVGFANLPNQVYRKSVKRGFEFTLMVVGESGLGKSTLINSLFLTDLYSPEYPGPSHRIKKTVQVEQSKVLIKEGGVQLLLTIVDTPGFGDAVDNSNCWQPVIDYIDSKFEDYLNAESRVNRRQMPDNRVQCCLYFIAPSGHGLKPLDIEFMKRLHEKVNIIPLIAKADTLTPEECQQFKKQIMKEIQEHKIKIYEFPETDDEEENKLVKKIKDRLPLAVVGSNTIIEVNGKRVRGRQYPWGVAEVENGEHCDFTILRNMLIRTHMQDLKDVTNNVHYENYRSRKLAAVTYNGVDNNKNKGQLTKHLMITLNIRDRSPLAQMEEERREHVAKMKKMEMEMEQVFEMKVKEKVQKLKDSEAELQRRHEQMKKNLEAQHKELEEKRRQFEDEKANWEAQQRILEQQNSSRTLEKNKKKGKIF

SEQ ID NO: 835680 - protein, 437 aa, Homo sapiens; identical to SEQ ID NO: 835678

SEQ ID NO: 835681 - protein, 384 aa, Homo sapiens
MVVGESGLGKSTLINSLFLTDLYSPEYPGPSHRIKKTVQVEQSKVLIKEGGVQLLLTIVDTPGFGDAVDNSNCWQPVIDYIDSKFEDYLNAESRVNRRQMPDNRVQCCLYFIAPSGHGLKPLDIEFMKRLHEKVNIIPLIAKADTLTPEECQQFKKQIMKEIQEHKIKIYEFPETDDEEENKLVKKIKDRLPLAVVGSNTIIEVNGKRVRGRQYPWGVAEVENGEHCDFTILRNMLIRTHMQDLKDVTNNVHYENYRSRKLAAVTYNGVDNNKNKGQLTKSPLAQMEEERREHVAKMKKMEMEMEQVFEMKVKEKVQKLKDSEAELQRRHEQMKKNLEAQHKELEEKRRQFEDEKANWEAQQRILEQQNSSRTLEKNKKKGKIF

SEQ ID NO: 835682 - protein, 437 aa, Homo sapiens; identical to SEQ ID NO: 835678

SEQ ID NO: 835683 - protein, 437 aa, Homo sapiens; identical to SEQ ID NO: 835678

SEQ ID NO: 835684 - protein, 384 aa, Homo sapiens; identical to SEQ ID NO: 835681

SEQ ID NO: 835685 - protein, 520 aa, Homo sapiens
MLFLSDPLRRCLRTERVKNGEGKRVAHGVEQRRKSERWLGESAGAGRGGGEGMSVSARSAAAEERSVNSSTMVAQQKNLEGYVGFANLPNQVYRKSVKRGFEFTLMVVEVMFHHVAVANLELLGSSDPSALASQSARITGESGLGKSTLINSLFLTDLYSPEYPGPSHRIKKTVQVEQSKVLIKEGGVQLLLTIVDTPGFGDAVDNSNCWQPVIDYIDSKFEDYLNAESRVNRRQMPDNRVQCCLYFIAPSGHGLKPLDIEFMKRLHEKVNIIPLIAKADTLTPEECQQFKKQIMKEIQEHKIKIYEFPETDDEEENKLVKKIKDRLPLAVVGSNTIIEVNGKRVRGRQYPWGVAEVENGEHCDFTILRNMLIRTHMQDLKDVTNNVHYENYRSRKLAAVTYNGVDNNKNKGQLTKSPLAQMEEERREHVAKMKKMEMEMEQVFEMKVKEKVQKLKDSEAELQRRHEQMKKNLEAQHKELEEKRRQFEDEKANWEAQQRILEQQNSSRTLEKNKKKGKIF

SEQ ID NO: 835686 - protein, 285 aa, Homo sapiens
MPDNRVQCCLYFIAPSGHGLKPLDIEFMKRLHEKVNIIPLIAKADTLTPEECQQFKKQIMKEIQEHKIKIYEFPETDDEEENKLVKKIKDRLPLAVVGSNTIIEVNGKRVRGRQYPWGVAEVENGEHCDFTILRNMLIRTHMQDLKDVTNNVHYENYRSRKLAAVTYNGVDNNKNKGQLTKSPLAQMEEERREHVAKMKKMEMEMEQVFEMKVKEKVQKLKDSEAELQRRHEQMKKNLEAQHKELEEKRRQFEDEKANWEAQQRILEQQNSSRTLEKNKKKGKIF

SEQ ID NO: 835687 - protein, 241 aa, Homo sapiens
MSVSARSAAAEERSVNSSTMVAQQKNLEGYVGFANLPNQVYRKSVKRGFEFTLMVVGESGLGKSTLINSLFLTDLYSPEYPGPSHRIKKTVQVEQSKVLIKEGGVQLLLTIVDTPGFGDAVDNSNCWQPVIDYIDSKFEDYLNAESRVNRRQMPDNRVQCCLYFIAPSGHGLKPLDIEFMKRLHEKVNIIPLIAKADTLTPEECQQFKKQIMKEIQEHKIKIYEFPETDDEEDGDGDGAGV

SEQ ID NO: 835688 - protein, 286 aa, Homo sapiens
  misc_feature (16)..(16): Xaa can be any naturally occurring amino acid
  misc_feature (20)..(20): Xaa can be any naturally occurring amino acid
CEVLVEGVWLRVEVEXRIKXLKPLDIEFMKRLHEKVNIIPLIAKADTLTPEECQQFKKQIMKEIQEHKIKIYEFPETDDEEENKLVKKIKDRLPLAVVGSNTIIEVNGKRVRGRQYPWGVAEVENGEHCDFTILRNMLIRTHMQDLKDVTNNVHYENYRSRKLAAVTYNGVDNNKNKGQLTKSPLAQMEEERREHVAKMKKMEMEMEQVFEMKVKEKVQKLKDSEAELQRRHEQMKKNLEAQHKELEEKRRQFEDEKANWEAQQRILEQQNSSRTLEKNKKKGKIF

SEQ ID NO: 835689 - protein, 437 aa, Homo sapiens; identical to SEQ ID NO: 835678

SEQ ID NO: 835690 - protein, 73 aa, Homo sapiens
AGVEREPVEESACCSVRKQGSYAGRLRCGIGVGAFGESAGCAPLGLVAEGGRGCRSVRDPLLLRRGASTAAPW

SEQ ID NO: 835691 - protein, 354 aa, Homo sapiens
MSVSARSAAAEERSVNSSTMVAQQKNLEGYVGFANLPNQVYRKSVKRGFEFTLMVVGESGLGKSTLINSLFLTDLYSPEYPGPSHRIKKTVQVEQSKVLIKEGGVQLLLTIVDTPGFGDAVDNSNCWQPVIDYIDSKFEDYLNAESRVNRRQMPDNRVQCCLYFIAPSGHGLKPLDIEFMKRLHEKVNIIPLIAKADTLTPEECQQFKKQIMKEIQEHKIKIYEFPETDDEEENKLVKKIKDRLPLAVVGSNTIIEVNGKRVRGRQYPWGVAEVENGEHCDFTILRNMLIRTHMQDLKDVTNNVHYENYRSRKLAQGGKCIYRSFLGKIVKLMTNLFLPICSLFILLEMGIMAS

SEQ ID NO: 835692 - protein, 225 aa, Homo sapiens
MSVSARSAAAEERSVNSSTMVAQQKNLEGYVGFANLPNQVYRKSVKRGFEFTLMVVGESGLGKSTLINSLFLTDLYSPEYPGPSHRIKKTVQVEQSKVLIKEGGVQLLLTIVDTPGFGDAVDNSNCWQPVIDYIDSKFEDYLNAESRVNRRQMPDNRVQCCLYFIAPSGHGLKPLDIEFMKRLHEKVNIIPLIAKADTLTPEECQQFKKQIMKEIQEQRSSGMKR

SEQ ID NO: 835693 - protein, 489 aa, Homo sapiens
MLFLSDPLRRCLRTERVKNGEGKRVAHGVEQRRKSERWLGESAGAGRGGGEGMSVSARSAAAEERSVNSSTMVAQQKNLEGYVGFANLPNQVYRKSVKRGFEFTLMVVGESGLGKSTLINSLFLTDLYSPEYPGPSHRIKKTVQVEQSKVLIKEGGVQLLLTIVDTPGFGDAVDNSNCWQPVIDYIDSKFEDYLNAESRVNRRQMPDNRVQCCLYFIAPSGHGLKPLDIEFMKRLHEKVNIIPLIAKADTLTPEECQQFKKQIMKEIQEHKIKIYEFPETDDEEENKLVKKIKDRLPLAVVGSNTIIEVNGKRVRGRQYPWGVAEVENGEHCDFTILRNMLIRTHMQDLKDVTNNVHYENYRSRKLAAVTYNGVDNNKNKGQLTKSPLAQMEEERREHVAKMKKMEMEMEQVFEMKVKEKVQKLKDSEAELQRRHEQMKKNLEAQHKELEEKRRQFEDEKANWEAQQRILEQQNSSRTLEKNKKKGKIF

SEQ ID NO: 835694 - protein, 437 aa, Homo sapiens; identical to SEQ ID NO: 835678

SEQ ID NO: 835695 - protein, 437 aa, Homo sapiens; identical to SEQ ID NO: 835678

SEQ ID NO: 835696 - protein, 437 aa, Homo sapiens; identical to SEQ ID NO: 835678

SEQ ID NO: 835697 - protein, 437 aa, Homo sapiens; identical to SEQ ID NO: 835678

SEQ ID NO: 835698 - protein, 384 aa, Homo sapiens; identical to SEQ ID NO: 835681

SEQ ID NO: 835699 - protein, 475 aa, Homo sapiens
MLFLSDPLRRCLRTERVKNGEGKRVAHGVEQRRKSERWLGESAGAGRGGGEGMSVSARSAAAEERSVNSSTMVAQQKNLEGYVGFANLPNQVYRKSVKRGFEFTLMVVGESGLGKSTLINSLFLTDLYSPEYPGPSHRIKKTVQLLLTIVDTPGFGDAVDNSNCWQPVIDYIDSKFEDYLNAESRVNRRQMPDNRVQCCLYFIAPSGHGLKPLDIEFMKRLHEKVNIIPLIAKADTLTPEECQQFKKQIMKEIQEHKIKIYEFPETDDEEENKLVKKIKDRLPLAVVGSNTIIEVNGKRVRGRQYPWGVAEVENGEHCDFTILRNMLIRTHMQDLKDVTNNVHYENYRSRKLAAVTYNGVDNNKNKGQLTKSPLAQMEEERREHVAKMKKMEMEMEQVFEMKVKEKVQKLKDSEAELQRRHEQMKKNLEAQHKELEEKRRQFEDEKANWEAQQRILEQQNSSRTLEKNKKKGKIF

SEQ ID NO: 835700 - protein, 289 aa, Homo sapiens
MKIFYTLIRLGLSFFVYPPSGHGLKPLDIEFMKRLHEKVNIIPLIAKADTLTPEECQQFKKQIMKEIQEHKIKIYEFPETDDEEENKLVKKIKDRLPLAVVGSNTIIEVNGKRVRGRQYPWGVAEVENGEHCDFTILRNMLIRTHMQDLKDVTNNVHYENYRSRKLAAVTYNGVDNNKNKGQLTKSPLAQMEEERREHVAKMKKMEMEMEQVFEMKVKEKVQKLKDSEAELQRRHEQMKKNLEAQHKELEEKRRQFEDEKANWEAQQRILEQQNSSRTLEKNKKKGKIF

SEQ ID NO: 835701 - protein, 437 aa, Homo sapiens; identical to SEQ ID NO: 835678

SEQ ID NO: 835702 - protein, 437 aa, Homo sapiens; identical to SEQ ID NO: 835678

SEQ ID NO: 835703 - protein, 241 aa, Homo sapiens; identical to SEQ ID NO: 835687

SEQ ID NO: 835704 - protein, 106 aa, Homo sapiens
MYYNNKFVRHSLFYHPNENFQKSFFIHGMPRVLPESDDRIYITLLGLLIVDSRLRYIRRFFLPFGLWMSEKIIHNTCKIQVGLRKGQPVESKMAVSVLHCWRHYVI

SEQ ID NO: 835705 - protein, 448 aa, Homo sapiens; identical to SEQ ID NO: 835679

SEQ ID NO: 835706 - protein, 236 aa, Homo sapiens
MSVSARSAAAEERSVNSSTMVAQQKNLEGYVGFANLPNQVYRKSVKRGFEFTLMVVGESGLGKSTLINSLFLTDLYSPEYPGPSHRIKKTVQVEQSKVLIKEGGVQLLLTIVDTPGFGDAVDNSNCWQPVIDYIDSKFEDYLNAESRVNRRQMPDNRVQCCLYFIAPSGHGLKPLDIEFMKRLHEKVNIIPLIAKADTLTPEECQQFKKQIMKEIQEHKIEYSIFHMVGTNKETFL

SEQ ID NO: 835707 - protein, 226 aa, Homo sapiens
MLFLSDPLRRCLRTERVKNGEGKRVAHGVEQRRKSERWLGESAGAGRGGGEGMSVSARSAAAEERSVNSSTMVAQQKNLEGYVGFANLPNQVYRKSVKRGFEFTLMVVGESGLGKSTLINSLFLTDLYSPEYPGPSHRIKKTVQVEQSKVLIKEGGVQLLLTIVDTPGFGDAVDNSNCWQPVIDYIDSKFEDYLNAESRVNRRQMPDNRVQCCLYFIAPSGHGSVP

SEQ ID NO: 835708 - protein, 941 aa, Homo sapiens
MGQACGHSILCRSQQYPAARPAEPRGQQVFLKPDEPPPPPQPCADSLQDALLSLGSVIDISGLQRAVKEALSAVLPRVETVYTYLLDGESQLVCEDPPHELPQEGKVREAIISQKRLGCNGLGFSDLPGKPLARLVAPLAPDTQVLVMPLADKEAGAVAAVILVHCGQLSDNEEWSLQAVEKHTLVALRRVQVLQQRGPREAPRAVQNPPEGTAEDQKGGAAYTDRDRKILQLCGELYDLDASSLQLKVLQYLQQETRASRCCLLLVSEDNLQLSCKVIGDKVLGEEVSFPLTGCLGQVVEDKKSIQLKDLTSEDVQQLQSMLGCELQAMLCVPVISRATDQVVALACAFNKLEGDLFTDEDEHVIQHCFHYTSTVLTSTLAFQKEQKLKCECQALLQVAKNLFTHLDDVSVLLQEIITEARNLSNAEICSVFLLDQNELVAKVFDGGVVDDESYEIRIPADQGIAGHVATTGQILNIPDAYAHPLFYRGVDDSTGFRTRNILCFPIKNENQEVIGVAELVNKINGPWFSKFDEDLATAFSIYCGISIAHSLLYKKVNEAQYRSHLANEMMMYHMKVSDDEYTKLLHDGIQPVAAIDSNFASFTYTPRSLPEDDTSMAILSMLQDMNFINNYKIDCPTLARFCLMVKKGYRDPPYHNWMHAFSVSHFCYLLYKNLELTNYLEDIEIFALFISCMCHDLDHRGTNNSFQVASKSVLAALYSSEGSVMERHHFAQAIAILNTHGCNIFDHFSRKDYQRMLDLMRDIILATDLAHHLRIFKDLQKMAEVGYDRNNKQHHRLLLCLLMTSCDLSDQTKGWKTTRKIAELIYKEFFSQGDLEKAMGNRPMEMMDREKAYIPELQISFMEHIAMPIYKLLQDLFPKAAELYERVASNREHWTKVSHKFTIRGLPSNNSLDFLDEEYEVPDLDGTRAPINGCCSLDAE

SEQ ID NO: 835709 - protein, 1021 aa, Homo sapiens
LPERGSHRGTADRVALGPAPSPAPGTATETCPPRPGGPSQWRPPCVRSVSAGPAGLPQAGRAAAAAAAMRRQPAAASLDPLAKEPGPPGSRDDRLEDALLSLGSVIDISGLQRAVKEALSAVLPRVETVYTYLLDGESQLVCEDPPHELPQEGKVRQFLQAQLSGGSMRDEEPRTINHQGVTFGAELREAIISQKRLGCNGLGFSDLPGKPLARLVAPLAPDTQVLVMPLADKEAGAVAAVILVHCGQLSDNEEWSLQAVEKHTLVALRRVQVLQQRGPREAPRAVQNPPEGTAEDQKGGAAYTDRDRKILQLCGELYDLDASSLQLKVLQYLQQETRASRCCLLLVSEDNLQLSCKVIGDKVLGEEVSFPLTGCLGQVVEDKKSIQLKDLTSEDVQQLQSMLGCELQAMLCVPVISRATDQVVALACAFNKLEGDLFTDEDEHVIQHCFHYTSTVLTSTLAFQKEQKLKCECQALLQVAKNLFTHLDDVSVLLQEIITEARNLSNAEICSVFLLDQNELVAKVFDGGVVDDESYEIRIPADQGIAGHVATTGQILNIPDAYAHPLFYRGVDDSTGFRTRNILCFPIKNENQEVIGVAELVNKINGPWFSKFDEDLATAFSIYCGISIAHSLLYKKVNEAQYRSHLANEMMMYHMKVSDDEYTKLLHDGIQPVAAIDSNFASFTYTPRSLPEDDTSMAILSMLQDMNFINNYKIDCPTLARFCLMVKKGYRDPPYHNWMHAFSVSHFCYLLYKNLELTNYLEDIEIFALFISCMCHDLDHRGTNNSFQVASKSVLAALYSSEGSVMERHHFAQAIAILNTHGCNIFDHFSRKDYQRMLDLMRDIILATDLAHHLRIFKDLQKMAEVGYDRNNKQHHRLLLCLLMTSCDLSDQTKGWKTTRKIAELIYKEFFSQGDLEKAMGNRPMEMMDREKAYIPELQISFMEHIAMPIYKLLQDLFPKAAELYERVASNREHWTKVSHKFTIRGLPSNNSLDFLDEEYEVPDLDGTRAPINGCCSLDAE

SEQ ID NO: 835710 - protein, 399 aa, Homo sapiens
LEDPLHCRSLLYKKVNEAQYRSHLANEMMMYHMKVSDDEYTKLLHDGIQPVAAIDSNFASFTYTPRSLPEDDTSMAILSMLQDMNFINNYKIDCPTLARFCLMVKKGYRDPPYHNWMHAFSVSHFCYLLYKNLELTNYLEDIEIFALFISCMCHDLDHRGTNNSFQVASKSVLAALYSSEGSVMERHHFAQAIAILNTHGCNIFDHFSRKDYQRMLDLMRDIILATDLAHHLRIFKDLQKMAEVGYDRNNKQHHRLLLCLLMTSCDLSDQTKGWKTTRKIAELIYKEFFSQGDLEKAMGNRPMEMMDREKAYIPELQISFMEHIAMPIYKLLQDLFPKAAELYERVASNREHWTKVSHKFTIRGLPSNNSLDFLDEEYEVPDLDGTRAPINGCCSLDAE

SEQ ID NO: 835711 - protein, 941 aa, Homo sapiens; identical to SEQ ID NO: 835708

SEQ ID NO: 835712 - protein, 941 aa, Homo sapiens; identical to SEQ ID NO: 835708

SEQ ID NO: 835713 - protein, 302 aa, Homo sapiens
LPERGSHRGTADRVALGPAPSPAPGTATETCPPRPGGPSQWRPPCVRSVSAGPAGLPQAGRAAAAAAAMRRQPAAASLDPLAKEPGPPGSRDDRLEDALLSLGSVIDISGLQRAVKEALSAVLPRVETVYTYLLDGESQLVCEDPPHELPQEGKVRQFLQAQLSGGSMRDEEPRTINHQGVTFGAELREAIISQKRLGCNGLGFSDLPGKPLARLVAPLAPDTQVLVMPLADKEAGAVAAVILVHCGQLSDNEEWSLQAVEKHVSGSGAMCNEAEDPYHSWWEDGLARELDRPGFQLRLCCF

SEQ ID NO: 835714 - protein, 107 aa, Homo sapiens
SRSAEKRAPGARVPPRNCGPCGPGACTLSGSGDGDRDLPTQAWGPQSVAAAVCALGVCAHVSPSQMGDCSRACPSHSDLQHSPDFPLPPRLRERSKPEAPAVSAAPA

SEQ ID NO: 835715 - protein, 938 aa, Homo sapiens
ELRTPPTSPTAPRLARQPRLARQPASLDPLAKEPGPPGSRDDRLEDALLSLGSVIDISGLQRAVKEALSAVLPRVETVYTYLLDGESQLVCEDPPHELPQEGKVREAIISQKRLGCNGLGFSDLPGKPLARLVAPLAPDTQVLVMPLADKEAGAVAAVILVHCGQLSDNEEWSLQAVEKHTLVALRRVQVLQQRGPREAPRAVQNPPEGTAEDQKGGAAYTDRDRKILQLCGELYDLDASSLQLKVLQYLQQETRASRCCLLLVSEDNLQLSCKVIGDKVLGEEVSFPLTGCLGQVVEDKKSIQLKDLTSEDVQQLQSMLGCELQAMLCVPVISRATDQVVALACAFNKLEGDLFTDEDEHVIQHCFHYTSTVLTSTLAFQKEQKLKCECQALLQVAKNLFTHLDDVSVLLQEIITEARNLSNAEICSVFLLDQNELVAKVFDGGVVDDESYEIRIPADQGIAGHVATTGQILNIPDAYAHPLFYRGVDDSTGFRTRNILCFPIKNENQEVIGVAELVNKINGPWFSKFDEDLATAFSIYCGISIAHSLLYKKVNEAQYRSHLANEMMMYHMKVSDDEYTKLLHDGIQPVAAIDSNFASFTYTPRSLPEDDTSMAILSMLQDMNFINNYKIDCPTLARFCLMVKKGYRDPPYHNWMHAFSVSHFCYLLYKNLELTNYLEDIEIFALFISCMCHDLDHRGTNNSFQVASKSVLAALYSSEGSVMERHHFAQAIAILNTHGCNIFDHFSRKDYQRMLDLMRDIILATDLAHHLRIFKDLQKMAEVGYDRNNKQHHRLLLCLLMTSCDLSDQTKGWKTTRKIAELIYKEFFSQGDLEKAMGNRPMEMMDREKAYIPELQISFMEHIAMPIYKLLQDLFPKAAELYERVASNREHWTKVSHKFTIRGLPSNNSLDFLDEEYEVPDLDGTRAPINGCCSLDAE

SEQ ID NO: 835716 - protein, 117 aa, Homo sapiens
MVPWADRFVHENKSISFYQKKQPYPHRHTKARHATQKRTTTRGAKVTAFPQACAQSGPLRRTRDTRRRDTGRGVSQTPERRDTGTPAHPGKKPSTRGRHHTGRHTHVNSHYNNPRHD

SEQ ID NO: 835717 - protein, 445 aa, Homo sapiens
MNRHLCVWLFRHPSLNGYLQCHIQLHSHQFRQIHLDTRLQVFRQNRNCILHLLSKNWSRRYCHQDTKMLWKHKALQKYMENLSKEYQTLEQCLQHIPVNEENRRSLNRRHAELAPLAAIYQEIQETEQAIEELESMCKSLNKQDEKQLQELALEERQTIDQKINMLYNELFQSLVPKEKYDKNDVILEVTAGRTTGGDICQQFTREIFDMYQNYSCYKHWQFELLNYTPADYGGLHHAAARISGDGVYKHLKYEGGIHRVQRIPEVGLSSRMQRIHTGTMSVIVLPQPDEVDVKLDPKDLRIDTFRAKGAGGQHVNKTDSAVRLVHIPTGLVVECQQERSQIKNKEIAFRVLRARLYQQIIEKDKRQQQSARKLQVGTRAQSERIRTYNFTQDRVSDHRIAYEVRDIKEFLCGGKGLDQLIQRLLQSADEEAIAELLDEHLKSAK

SEQ ID NO: 835718 - protein, 486 aa, Homo sapiens
MNRHLCVWLFRHPSLNGYLQCHIQLHSHQFRQIHLDTRLQVFRQNRNCILHLLSKNWSRRYCHQDTKMLWKHKALQKYMENLSKEYQTLEQCLQHIPVNEENRRSLNRRHAELAPLAAIYQEIQETEQAIEELESMCKNRVLLCGPGWNAVVYIIAHFNLELLDSSNPPTSASQVAGTTGLNKQDEKQLQELALEERQTIDQKINMLYNELFQSLVPKEKYDKNDVILEVTAGRTTGGDICQQFTREIFDMYQNYSCYKHWQFELLNYTPADYGGLHHAAARISGDGVYKHLKYEGGIHRVQRIPEVGLSSRMQRIHTGTMSVIVLPQPDEVDVKLDPKDLRIDTFRAKGAGGQHVNKTDSAVRLVHIPTGLVVECQQERSQIKNKEIAFRVLRARLYQQIIEKDKRQQQSARKLQVGTRAQSERIRTYNFTQDRVSDHRIAYEVRDIKEFLCGGKGLDQLIQRLLQSADEEAIAELLDEHLKSAK

SEQ ID NO: 835719 - protein, 445 aa, Homo sapiens; identical to SEQ ID NO: 835717

SEQ ID NO: 835720 - protein, 496 aa, Homo sapiens
MNRHLCVWLFRHPSLNGYLQCHIQLHSHQFRQIHLDTRLQVFRQNRNCILHLLSKNWSRRYCHQDTKMLWKHKALQKYMENLSKEYQTLEQCLQHIPVNEENRRSLNRRHAELAPLAAIYQEIQETEQAIEELESMCKNRVLLCGPGWNAVVYIIAHFNLELLDSSNPPTSASQVAGTTGLNKQDEKQLQELALEERQTIDQKINMLYNELFQSLVPKEKYDKNDVILEVTAGRTTGGDICQQFTREIFDMYQNYSCYKHWQFELLNYTPADYGGLHHAAARISGDGVYKHLKYEGGIHRVQRIPEVGLSSRMQRIHTGTMSVIVLPQPDEVDVKLDPKDLRIDTFRAKGAGGQHVNKTDSAVRLVHIPTGLVVECQQERSQIKNKEIAFRVLRARLYQQIIEKDKRQQQSARKLQVGTRAQSERIRTYNFTQDRVSDHRIAYEVRDIKAQSHSTGGSRDPAHSTFLSLDSVRSPGILIMTSSVRNFYVVGRAWIS

SEQ ID NO: 835721 - protein, 270 aa, Homo sapiens
  misc_feature (56)..(56): Xaa can be any naturally occurring amino acid
  misc_feature (71)..(71): Xaa can be any naturally occurring amino acid
  misc_feature (112)..(112): Xaa can be any naturally occurring amino acid
  misc_feature (127)..(127): Xaa can be any naturally occurring amino acid
  misc_feature (134)..(134): Xaa can be any naturally occurring amino acid
  misc_feature (180)..(180): Xaa can be any naturally occurring amino acid
MTLHAYLAPYPLRTTPTASPSTRFNTNSTNPHELPLHLLLSSPTTLYAQTAPSTRXTPTYSALLTCTQLQXLRYTPDWLALCAISLYRTLTLHPHNLRSTHIPRIATPLTTXPHSPSTPHSLKHRRXTTRLHYXTGPRQRYPLPHPTQQAHISAHFPIHYLDFNSSHDISASTRTHHSRXTPNATPRRLPPAHTRFTTHRPRNILIAHEPSHVNGATEHHLCSAIAPRQPYSPAAHRSNNPERFLETARPCLELGTLFASPYSEHTSSEN

SEQ ID NO: 835722 - protein, 445 aa, Homo sapiens; identical to SEQ ID NO: 835717

SEQ ID NO: 835723 - protein, 67 aa, Homo sapiens
VSMCVEYVLLWKVYQKTPALAVKAGLKEEETELKQLNLHQDTEPKEQEGSMLIKLIVPSDLSTSPQG

SEQ ID NO: 835724 - protein, 152 aa, Homo sapiens
MNRHLCVWLFRHPSLNGYLQCHIQLHSHQFRQIHLDTRLQVFRQNRNCILHLLSKNWSRRYCHQDTKMLWKHKALQKYMENLSKEYQTLEQCLQHIPVNEENRRSLNRRHAELAPLAAIYQEIQETEQAIEELESMCKNRVLLCGPGWNAVV

SEQ ID NO: 835725 - protein, 686 aa, Homo sapiens
MESQDIFTGTQTELIAGGQLLSCLSPQPAPGVDNVPEGSLPVHGEQALPKDQQITALGREEPVAIESPGQDLLGESRSEPVDVKPFASCEDSEAPVPAEDGGSDAGMCGLCQKAQLERMGVSGPSGSDLWAGAAVAKPQAKGQLAGGSLLMHCPCYGSEWGLWWRSQDLAPSPSGMAGLSFGTPTLDEPWLGVENDREELQTCLIKEQLSQLSLAGALDVPHAELVPTECQAVTAPVSSCDLGGRDLCGGCTGSSSACYALATDLPGGLEAVEAQEVDVNSFSWNLKELFFSDQTDQTSSNCSCATSELRETPSSLAVGSDPDVGSLQEQGSCVLDDRELLLLTGTCVDLGQGRRFRESCVGHDPTEPLEVCLVSSEHYAASDRESPGHVPSTLDAGPEDTCPSAEEPRLNVQVTSTPVIVMRGAAGLQREIQEGAYSGSCYHRDGLRLSIQFEVRRVELQGPTPLFCCWLVKDLLHSQRDSAARTRLFLASLPGSTHSTAAELTGPSLVEVLRARPWFEEPPKAVELEGLAACEGEYSQKYSTMSPLGSGAFGFVWTAVDKEKNKEVVVKFIKKEKVLEDCWIEDPKLGKVTLEIAILSRVEHANIIKVLDIFENQGFFQLVMEKHGSGLDLFAFIDRHPRLDEPLASYIFRQVRAGQSRVSVNAGLGAWVRWLQRSVIHTRFSL

SEQ ID NO: 835726 - protein, 1330 aa, Homo sapiens
MEDGGLTAFEEDQRCLSQSLPLPVSAEGPAAQTTAEPSRSFSSAHRHLSRRNGLSRLCQSRTALSEDRWSSYCLSSLAAQNICTSKLHCPAAPEHTDPSEPRGSVSCCSLLRGLSSGWSSPLLPAPVCNPNKAIFTVDAKTTEILVANDKACGLLGYSSQDLIGQKLTQFFLRSDSDVVEALSEEHMEADGHAAVVFGTVVDIISRSGEKIPVSVWMKRMRQERRLCCVVVLEPVERVSTWVAFQSDGTVTSCDSLFAHLHGYVSGEDVAGQHITDLIPSVQLPPSGQHIPKNLKIQRSVGRARDGTTFPLSLKLKSQPSSEEATTGEAAPVSGYRASVWVFCTISGLITLLPDGTIHGINHSFALTLFGYGKTELLGKNITFLIPGFYSYMDLAYNSSLQLPDLASCLDVGNESGCGERTLDPWQGQDPAEGGQDPRINVVLAGGHVVPRDEIRKLMESQDIFTGTQTELIAGGQLLSCLSPQPAPGVDNVPEGSLPVHGEQALPKDQQITALGREEPVAIESPGQDLLGESRSEPVDVKPFASCEDSEAPVPAEDGGSDAGMCGLCQKAQLERMGVSGPSGSDLWAGAAVAKPQAKGQLAGGSLLMHCPCYGSEWGLWWRSQDLAPSPSGMAGLSFGTPTLDEPWLGVENDREELQTCLIKEQLSQLSLAGALDVPHAELVPTECQAVTAPVSSCDLGGRDLCGGCTGSSSACYALATDLPGGLEAVEAQEVDVNSFSWNLKELFFSDQTDQTSSNCSCATSELRETPSSLAVGSDPDVGSLQEQGSCVLDDRELLLLTGTCVDLGQGRRFRESCVGHDPTEPLEVCLVSSEHYAASDRESPGHVPSTLDAGPEDTCPSAEEPRLNVQVTSTPVIVMRGAAGLQREIQEGAYSGSCYHRDGLRLSIQFEVRRVELQGPTPLFCCWLVKDLLHSQRDSAARTRLFLASLPGSTHSTAAELTGPSLVEVLRARPWFEEPPKAVELEGLAACEGEYSQKYSTMSPLGSGAFGFVWTAVDKEKNKEVVVKFIKKEKVLEDCWIEDPKLGKVTLEIAILSRVEHANIIKVLDIFENQGFFQLVMEKHGSGLDLFAFIDRHPRLDEPLASYIFRQVRAGQSRLVSAVGYLRLKDIIHRDIKDENIVIAEDFTIKLIDFGSAAYLERGKLFYTFCGTIEYCAPEVLMGNPYRGPELEMWSLGVTLYTLVFEENPFCELEETVEAAIHPPYLVSKELMSLVSGLLQPVPERRTTLEKLVTDPWVTQPVNLADYTWEEVFRVNKPESGVLSAASLEMGNRSLSDVAQAQELCGGPVPGEAPNGQGCLHPGDPRLLTS

SEQ ID NO: 835727 - protein, 162 aa, Homo sapiens [sequence omitted]

SEQ ID NO: 835728 - protein, 1323 aa, Homo sapiens
MEDGGLTAFEEDQRCLSQSLPLPVSAEGPAAQTTAEPSRSFSSAHRHLSRRNGLSRLCQSRTALSEDRWSSYCLSSLAAQNICTSKLHCPAAPEHTDPSEPRGSVSCCSLLRGLSSGWSSPLLPAPVCNPNKAIFTVDAKTTEILVANDKACGLLGYSSQDLIGQKLTQFFLRSDSDVVEALSEEHMEADGHAAVVFGTVVDIISRSGEKIPVSVWMKRMRQERRLCCVVVLEPVERVSTWVAFQSDGTVTSCDSLFAHLHGYVSGEDVAGQHITDLIPSVQLPPSGQHIPKNLKIQRSVGRARDGTTFPLSLKLKSQPSSEEATTGEAAPVSGYRASVWVFCTISGLITLLPDGTIHGINHSFALTLFGYGKTELLGKNITFLIPGFYSYMDLAYNSSLQLPDLASCLDVGNESGCGERTLDPWQGQDPAEGGQDPRINVVLAGGHVVPRDEIRKLMESQDIFTGTQTELIAGGQLLSCLSPQPAPGVDNVPEGSLPVHGEQALPKDQQITALGREEPVAIESPGQDLLGESRSEPVDVKPFASCEDSEAPVPAEDGGSDAGMCGLCQKAQLERMGVSGPSGSDLWAGAAVAKPQAKGQLAGGSLLMHCPCYGSEWGLWWRSQDLAPSPSGMAGLSFGTPTLDEPWLGVENDREELQTCLIKEQLSQLSLAGALDVPHAELVPTECQAVTAPVSSCDLGGRDLCGGCTGSSSACYALATDLPGGLEAVEAQEVDVNSFSWNLKELFFSDQTDQTSSNCSCATSELRETPSSLAVGSDPDVGSLQEQGSCVLDDRELLLLTGTCVDLGQGRRFRESCVGHDPTEPLEVCLVSSEHYAASDRESPGHVPSTLDAGPEDTCPSAEEPRLNVQVTSTPVIVMRGAAGLQREIQEGAYSGSCYHRDGLRLSIQFEVRRVELQGPTPLFCCWLVKDLLHSQRDSAARTRLFLASLPGSTHSTAAELTGPSLVEVLRARPWFEEPPKAVELEGLAACEGEYSQKYSTMSPLGSGAFGFVWTAVDKEKNKEVVVKFIKKEKVLEDCWIEDPKLGKVTLEIAILSRVEHANIIKVLDIFENQGFFQLVMEKHGSGLDLFAFIDRHPRLDEPLASYIFRQLVSAVGYLRLKDIIHRDIKDENIVIAEDFTIKLIDFGSAAYLERGKLFYTFCGTIEYCAPEVLMGNPYRGPELEMWSLGVTLYTLVFEENPFCELEETVEAAIHPPYLVSKELMSLVSGLLQPVPERRTTLEKLVTDPWVTQPVNLADYTWEEVFRVNKPESGVLSAASLEMGNRSLSDVAQAQELCGGPVPGEAPNGQGCLHPGDPRLLTS

SEQ ID NO: 835729 - protein, 1137 aa, Homo sapiens
MGFPDSARAGQRSLVDIISRSGEKIPVSVWMKRMRQERRLCCVVVLEPVERVSTWVAFQSDGTVTSCDSLFAHLHGYVSGEDVAGQHITDLIPSVQLPPSGQHIPKNLKIQRSVGRARDGTTFPLSLKLKSQPSSEEATTGEAAPVSGYRASVWVFCTISGLITLLPDGTIHGINHSFALTLFGYGKTELLGKNITFLIPGFYSYMDLAYNSSLQLPDLASCLDVGNESGCGERTLDPWQGQDPAEGGQDPRINVVLAGGHVVPRDEIRKLMESQDIFTGTQTELIAGGQLLSCLSPQPAPGVDNVPEGSLPVHGEQALPKDQQITALGREEPVAIESPGQDLLGESRSEPVDVKPFASCEDSEAPVPAEDGGSDAGMCGLCQKAQLERMGVSGPSGSDLWAGAAVAKPQAKGQLAGGSLLMHCPCYGSEWGLWWRSQDLAPSPSGMAGLSFGTPTLDEPWLGVENDREELQTCLIKEQLSQLSLAGALDVPHAELVPTECQAVTAPVSSCDLGGRDLCGGCTGSSSACYALATDLPGGLEAVEAQEVDVNSFSWNLKELFFSDQTDQTSSNCSCATSELRETPSSLAVGSDPDVGSLQEQGSCVLDDRELLLLTGTCVDLGQGRRFRESCVGHDPTEPLEVCLVSSEHYAASDRESPGHVPSTLDAGPEDTCPSAEEPRLNVQVTSTPVIVMRGAAGLQREIQEGAYSGSCYHRDGLRLSIQFEVRRVELQGPTPLFCCWLVKDLLHSQRDSAARTRLFLASLPGSTHSTAAELTGPSLVEVLRARPWFEEPPKAVELEGLAACEGEYSQKYSTMSPLGSGAFGFVWTAVDKEKNKEVVVKFIKKEKVLEDCWIEDPKLGKVTLEIAILSRVEHANIIKVLDIFENQGFFQLVMEKHGSGLDLFAFIDRHPRLDEPLASYIFRQLVSAVGYLRLKDIIHRDIKDENIVIAEDFTIKLIDFGSAAYLERGKLFYTFCGTIEYCAPEVLMGNPYRGPELEMWSLGVTLYTLVFEENPFCELEETVEAAIHPPYLVSKELMSLVSGLLQPVPERRTTLEKLVTDPWVTQPVNLADYTWEEVFRVNKPESGVLSAASLEMGNRSLSDVAQAQELCGGPVPGEAPNGQGCLHPGDPRLLTS

SEQ ID NO: 835730 - protein, 1220 aa, Homo sapiens
MEDGGLTAFEEDQRCLSQSLPLPVSAEGPAAQTTAEPSRSFSSAHRHLSRRNGLSRLCQSRTALSEDRWSSYCLSSLAAQNICTSKLHCPAAPEHTDPSEPRGSVSCCSLLRGLSSGWSSPLLPAPVCNPNKAIFTVDAKTTEILVANDKACGLLGYSSQDLIGQKLTQFFLRSDSDVVEALSEEHMEADGHAAVVFGTVVDIISRSGEKIPVSVWMKRMRQERRLCCVVVLEPVERVSTWVAFQSDGTVTSCDSLFAHLHGYVSGEDVAGQHITDLIPSVQLPPSGQHIPKNLKIQRSVGRARDGTTFPLSLKLKSQPSSEEATTGEAAPVSGYRASVWVFCTISGLITLLPDGTIHGINHSFALTLFGYGKTELLGKNITFLIPGFYSYMDLAYNSSLQLPDLASCLDVGNESGCGERTLDPWQGQDPAEGGQDPRINVVLAGGHVVPRDEIRKLMESQDIFTGTQTELIAGGQLLSCLSPQPAPGVDNVPEGSLPVHGEQALPKDQQITALGREEPVAIESPGQDLLGESRSEPVDVKPFASCEDSEAPVPAEDGGSDAGMCGLCQKAQLERMGVSGPSGSDLWAGAAVAKPQAKGQLAGGSLLMHCPCYGSEWGLWWRSQDLAPSPSGMAGLSFGTPTLDEPWLGVENDREELQTCLIKEQLSQLSLAGALDVPHAELVPTECQAVTAPVSSCDLGGRDLCGGCTGSSSACYALATDLPGGLEAVEAQEVDVNSFSWNLKELFFSDQTDQTSSNCSCATSELRETPSSLAVGSDPDVGSLQEQGSCVLDDRELLLLTGTCVDLGQGRRFRESCVGHDPTEPLEVCLVSSEHYAASDRESPGHVPSTLDAGPEDTCPSAEEPRLNVQVTSTPVIVMRGAAGLQREIQEGAYSGSCYHRDGLRLSIQFEVRRVELQGPTPLFCCWLVKDLLHSQRDSAARTRLFLASLPGSTHSTAAELTGPSLVEVLRARPWFEEPPKAVELEGLAACEGEYSQKYSTMSPLGSGAFGFVWTAVDKEKNKEVVVKFIKKEKVLEDCWIEDPKLGKVTLEIAILSRVEHANIIKVLDIFENQGFFQLVMEKHGSGLDLFAFIDRHPRLDEPLASYIFRQVRAGQSRLVSAVGYLRLKDIIHRDIKDENIVIAEDFTIKLIDFGSAAYLERGKLFYTFCGTIEYCAPEVLMGNPLVLQHPSHRRHSHLPKGHVCPWSHQARSHQDREHA

SEQ ID NO: 835731 - protein, 351 aa, Homo sapiens
TRKLTESAVLCWRLAGRGAESGLPRRGFFFLLECKYQSRYIEIRRSYSVGEAMEELLPDGQIWANMDPEERMLAAATAFTHICAGQGEGDVRREAQSIQYDPYSKASVAPGKRPALPVQLQYPHVESNVPSETVSEASQRLRKPVMKRKVLRRKPDGEVLVTDESIISESESGTENDQDLWDLRQRLMNVQFQEDKESSFDVSQKFNLPHEYQGISQDQLICSLQREGMGSPAYEQDLIVASRPKSFILPKLDQLSRNRGKTDRVARYFEYKRDWDSIRLPGEDHRKELRWGVREQMLCRAEPQSKPQHIYVPNNYLVPTEKKRSALRWGVRCDLANGVIPRKLPFPLSPS

SEQ ID NO: 835732 - protein, 351 aa, Homo sapiens; identical to SEQ ID NO: 835731

SEQ ID NO: 835733 - protein, 299 aa, Homo sapiens
MEELLPDGQIWANMDPEERMLAAATAFTHICAGQGEGDVRREAQSIQYDPYSKASVAPGKRPALPVQLQYPHVESNVPSETVSEASQRLRKPVMKRKVLRRKPDGEVLVTDESIISESESGTENDQDLWDLRQRLMNVQFQEDKESSFDVSQKFNLPHEYQGISQDQLICSLQREGMGSPAYEQDLIVASRPKSFILPKLDQLSRNRGKTDRVARYFEYKRDWDSIRLPGEDHRKELRWGVREQMLCRAEPQSKPQHIYVPNNYLVPTEKKRSALRWGVRCDLANGVIPRKLPFPLSPS

SEQ ID NO: 835734 - protein, 330 aa, Homo sapiens
MEPSKVFFFLLECKYQSRYIEIRRSYSVGEAMEELLPDGQIWANMDPEERMLAAATAFTHICAGQGEGDVRREAQSIQYDPYSKASVAPGKRPALPVQLQYPHVESNVPSETVSEASQRLRKPVMKRKVLRRKPDGEVLVTDESIISESESGTENDQDLWDLRQRLMNVQFQEDKESSFDVSQKFNLPHEYQGISQDQLICSLQREGMGSPAYEQDLIVASRPKSFILPKLDQLSRNRGKTDRVARYFEYKRDWDSIRLPGEDHRKELRWGVREQMLCRAEPQSKPQHIYVPNNYLVPTEKKRSALRWGVRCDLANGVIPRKLPFPLSPS

SEQ ID NO: 835735 - protein, 334 aa, Homo sapiens
TRKLTESAVLCWRLAGRGAESGLPRRGRSYSVGEAMEELLPDGQIWANMDPEERMLAAATAFTHICAGQGEGDVRREAQSIQYDPYSKASVAPGKRPALPVQLQYPHVESNVPSETVSEASQRLRKPVMKRKVLRRKPDGEVLVTDESIISESESGTENDQDLWDLRQRLMNVQFQEDKESSFDVSQKFNLPHEYQGISQDQLICSLQREGMGSPAYEQDLIVASRPKSFILPKLDQLSRNRGKTDRVARYFEYKRDWDSIRLPGEDHRKELRWGVREQMLCRAEPQSKPQHIYVPNNYLVPTEKKRSALRWGVRCDLANGVIPRKLPFPLSPS

SEQ ID NO: 835736 - protein, 2622 aa, Homo sapiens
QLEEEYENLLKASFERMDHLRQLQNIIQATSREIMWINDCEEEELLYDWSDKNTNIAQKQEAFSIRMSQLEVKEKELNKLKQESDQLVLNQHPASDKIEAYMDTLQTQWSWILQITKCIDVHLKENAAYFQFFEEAQSTEAYLKGLQDSIRKKYPCDKNMPLQHLLEQIKELEKEREKILEYKRQVQNLVNKSKKIVQLKPRNPDYRSNKPIILRALCDYKQDQKIVHKGDECILKDNNERSKWYVTGPGGVDMLVPSVGLIIPPPNPLAVDLSCKIEQYYEAILALWNQLYINMKSLVSWHYCMIDIEKIRAMTIAKLKTMRQEDYMKTIADLELHYQEFIRNSQGSEMFGDDDKRKIQSQFTDAQKHYQTLVIQLPGYPQHQTVTTTEITHHGTCQDVNHNKVIETNRENDKQETWMLMELQKIRRQIEHCEGRMTLKNLPLADQGSSHHITVKINELKSVQNDSQAIAEVLNQLKDMLANFRGSEKYCYLQNEVFGLFQKLENINGVTDGYLNSLCTVRALLQAILQTEDMLKVYEARLTEEETVCLDLDKVEAYRCGLKKIKNDLNLKKSLLATMKTELQKAQQIHSQTSQQYPLYDLDLGKFGEKVTQLTDRWQRIDKQIDFRLWDLEKQIKQLRNYRDNYQAFCKWLYDAKRRQDSLESMKFGDSNTVMRFLNEQKNLHSEISGKRDKSEEVQKIAELCANSIKDYELQLASYTSGLETLLNIPIKRTMIQSPSGVILQEAADVHARYIELLTRSGDYYRFLSEMLKSLEDLKLKNTKIEVLEEELRLARDANSENCNKNKFLDQNLQKYQAECSQFKAKLASLEELKRQAELDGKSAKQNLDKCYGQIKELNEKITRLTYEIEDEKRRRKSVEDRFDQQKNDYDQLQKARQCEKENLGWQKLESEKAIKEKEYEIERLRVLLQEEGTRKREYENELAKVRNHYNEEMSNLRNKYETEINITKTTIKEISMQKEDDSKNLRNQLDRLSRENRDLKDEIVRLNDSILQATEQRRRAEENALQQKACGSEIMQKKQHLEIELKQVMQQRSEDNARHKQSLEEAAKTIQDKNKEIERLKAEFQEEAKRRWEYENELSKVRNNYDEEIISLKNQFETEINITKTTIHQLTMQKEEDTSGYRAQIDNLTRENRSLSEEIKRLKNTLTQTTENLRRVEEDIQQQKATGSEVSQRKQQLEVELRQVTQMRTEESVRYKQSLDDAAKTIQDKNKEIERLKQLIDKETNDRKCLEDENARLQRVQYDLQKANSSATETINKLKVQEQELTRLRIDYERVSQERTVKDQDITRFQNSLKELQLQKQKVEEELNRLKRTASEDSCKRKKLEEELEGMRRSLKEQAIKITNLTQQLEQASIVKKRSEDDLRQQRDVLDGHLREKQRTQEELRRLSSEVEALRRQLLQEQESVKQAHLRNEHFQKAIEDKSRSLNESKIEIERLQSLTENLTKEHLMLEEELRNLRLEYDDLRRGRSEADSDKNATILELRSQLQISNNRTLELQGLINDLQRERENLRQEIEKFQKQALEASNRIQESKNQCTQVVQERESLLVKIKVLEQDKARLQRLEDELNRAKSTLEAETRVKQRLECEKQQIQNDLNQWKTQYSRKEEAIRKIESEREKSEREKNSLRSEIERLQAEIKRIEERCRRKLEDSTRETQSQLETERSRYQREIDKLRQRPYGSHRETQTECEWTVDTSKLVFDGLRKKVTAMQLYECQLIDKTTLDKLLKGKKSVEEVASEIQPFLRGAGSIAGASASPKEKYSLVEAKRKKLISPESTVMLLEAQAATGGIIDPHRNEKLTVDSAIARDLIDFDDRQQIYAAEKAITGFDDPFSGKTVSVSEAIKKNLIDRETGMRLLEAQIASGGVVDPVNSVFLPKDVALARGLIDRDLYRSLNDPRDSQKNFVDPVTKKKVSYVQLKERCRIEPHTGLLLLSVQKRSMSFQGIRQPVTVTELVDSGILRPSTVNELESGQISYDEVGERIKDFLQGSSCIAGIYNETTKQKLGIYEAMKIGLVRPGTALELLEAQAATGFIVDPVSNLRLPVEEAYKRGLVGIEFKEKLLSAERAVTGYNDPETGNIISLFQAMNKELIEKGHGIRLLEAQIATGGIIDPKESHRLPVDIAYKRGYFNEELSEILSDPSDDTKGFFDPNTEENLTYLQLKERCIKDEETGLCLLPLKEKKKQVQTSQKNTLRKRRVVIVDPETNKEMSVQEAYKKGLIDYETFKELCEQECEWEEITITGSDGSTRVVLVDRKTGSQYDIQDAIDKGLVDRKFFDQYRSGSLSLTQFADMISLKNGVGTSSSMGSGVSDDVFSSSRHESVSKISTISSVRNLTIRSSSFSDTLEESSPIAAIFDTENLEKISITEGIERGIVDSITGQRLLEAQACTGGIIHPTTGQKLSLQDAVSQGVIDQDMATRLKPAQKAFIGFEGVKGKKKMSAAEAVKEKWLPYEAGQRFLEFQYLTGGLVDPEVHGRISTEEAIRKGFIDGRAAQRLQDTSSYAKILTCPKTKLKISYKDAINRSMVEDITGLRLLEAASVSSKGLPSPYNMSSAPGSRSGSRSGSRSGSRSGSRSGSRRGSFDATGNSSYSYSYSFSSSSIGH

SEQ ID NO: 835737 - protein, 2622 aa, Homo sapiens; identical to SEQ ID NO: 835736

SEQ ID NO: 835738 - protein, 1810 aa, Homo sapiens
  misc_feature (4)..(4): Xaa can be any naturally occurring amino acid
MVLXIGMFSRVSSPEVYDGQLKRQAELDGKSAKQNLDKCYGQIKELNEKITRLTYEIEDEKRRRKSVEDRFDQQKNDYDQLQKARQCEKENLGWQKLESEKAIKEKEYEIERLRVLLQEEGTRKREYENELAKVRNHYNEEMSNLRNKYETEINITKTTIKEISMQKEDDSKNLRNQLDRLSRENRDLKDEIVRLNDSILQATEQRRRAEENALQQKACGSEIMQKKQHLEIELKQVMQQRSEDNARHKQSLEEAAKTIQDKNKEIERLKAEFQEEAKRRWEYENELSKVRNNYDEEIISLKNQFETEINITKTTIHQLTMQKEEDTSGYRAQIDNLTRENRSLSEEIKRLKNTLTQTTENLRRVEEDIQQQKATGSEVSQRKQQLEVELRQVTQMRTEESVRYKQSLDDAAKTIQDKNKEIERLKQLIDKETNDRKCLEDENARLQRVQYDLQKANSSATETINKLKVQEQELTRLRIDYERVSQERTVKDQDITRFQNSLKELQLQKQKVEEELNRLKRTASEDSCKRKKLEEELEGMRRSLKEQAIKITNLTQQLEQASIVKKRSEDDLRQQRDVLDGHLREKQRTQEELRRLSSEVEALRRQLLQEQESVKQAHLRNEHFQKAIEDKSRSLNESKIEIERLQSLTENLTKEHLMLEEELRNLRLEYDDLRRGRSEADSDKNATILELRSQLQISNNRTLELQGLINDLQRERENLRQEIEKFQKQALEASNRIQESKNQCTQVVQERESLLVKIKVLEQDKARLQRLEDELNRAKSTLEAETRVKQRLECEKQQIQNDLNQWKTQYSRKEEAIRKIESEREKSEREKNSLRSEIERLQAEIKRIEERCRRKLEDSTRETQSQLETERSRYQREIDKLRQRPYGSHRETQTECEWTVDTSKLVFDGLRKKVTAMQLYECQLIDKTTLDKLLKGKKSVEEVASEIQPFLRGAGSIAGASASPKEKYSLVEAKRKKLISPESTVMLLEAQAATGGIIDPHRNEKLTVDSAIARDLIDFDDRQQIYAAEKAITGFDDPFSGKTVSVSEAIKKNLIDRETGMRLLEAQIASGGVVDPVNSVFLPKDVALARGLIDRDLYRSLNDPRDSQKNFVDPVTKKKVSYVQLKERCRIEPHTGLLLLSVQKRSMSFQGIRQPVTVTELVDSGILRPSTVNELESGQISYDEVGERIKDFLQGSSCIAGIYNETTKQKLGIYEAMKIGLVRPGTALELLEAQAATGFIVDPVSNLRLPVEEAYKRGLVGIEFKEKLLSAERAVTGYNDPETGNIISLFQAMNKELIEKGHGIRLLEAQIATGGIIDPKESHRLPVDIAYKRGYFNEELSEILSDPSDDTKGFFDPNTEENLTYLQLKERCIKDEETGLCLLPLKEKKKQVQTSQKNTLRKRRVVIVDPETNKEMSVQEAYKKGLIDYETFKELCEQECEWEEITITGSDGSTRVVLVDRKTGSQYDIQDAIDKGLVDRKFFDQYRSGSLSLTQFADMISLKNGVGTSSSMGSGVSDDVFSSSRHESVSKISTISSVRNLTIRSSSFSDTLEESSPIAAIFDTENLEKISITEGIERGIVDSITGQRLLEAQACTGGIIHPTTGQKLSLQDAVSQGVIDQDMATRLKPAQKAFIGFEGVKGKKKMSAAEAVKEKWLPYEAGQRFLEFQYLTGGLVDPEVHGRISTEEAIRKGFIDGRAAQRLQDTSSYAKILTCPKTKLKISYKDAINRSMVEDITGLRLLEAASVSSKGLPSPYNMSSAPGSRSGSRSGSRSGSRSGSRSGSRRGSFDATGNSSYSYSYSFSSSSIGH

SEQ ID NO: 835739 - protein, 2021 aa, Homo sapiens
QLEEEYENLLKASFERMDHLRQLQNIIQATSREIMWINDCEEEELLYDWSDKNTNIAQKQEAFSIRMSQLEVKEKELNKLKQESDQLVLNQHPASDKIEAYMDTLQTQWSWILQITKCIDVHLKENAAYFQFFEEAQSTEAYLKGLQDSIRKKYPCDKNMPLQHLLEQIKELEKEREKILEYKRQVQNLVNKSKKIVQLKPRNPDYRSNKPIILRALCDYKQDQKIVHKGDECILKDNNERSKWYVTGPGGVDMLVPSVGLIIPPPNPLAVDLSCKIEQYYEAILALWNQLYINMKSLVSWHYCMIDIEKIRAMTIAKLKTMRQEDYMKTIADLELHYQEFIRNSQGSEMFGDDDKRKIQSQFTDAQKHYQTLVIQLPGYPQHQTVTTTEITHHGTCQDVNHNKVIETNRENDKQETWMLMELQKIRRQIEHCEGRMTLKNLPLADQGSSHHITVKINELKSVQNDSQAIAEVLNQLKDMLANFRGSEKYCYLQNEVFGLFQKLENINGVTDGYLNSLCTVRALLQAILQTEDMLKVYEARLTEEETVCLDLDKVEAYRCGLKKIKNDLNLKKSLLATMKTELQKAQQIHSQTSQQYPLYDLDLGKFGEKVTQLTDRWQRIDKQIDFRLWDLEKQIKQLRNYRDNYQAFCKWLYDAKRRQDSLESMKFGDSNTVMRFLNEQKNLHSEISGKRDKSEEVQKIAELCANSIKDYELQLASYTSGLETLLNIPIKRTMIQSPSGVILQEAADVHARYIELLTRSGDYYRFLSEMLKSLEDLKLKNTKIEVLEEELRLARDANSENCNKNKFLDQNLQKYQAECSQFKAKLASLEELKRQAELDGKSAKQNLDKCYGQIKELNEKITRLTYEIEDEKRRRKSVEDRFDQQKNDYDQLQKARQCEKENLGWQKLESEKAIKEKEYEIERLRVLLQEEGTRKREYENELASNRIQESKNQCTQVVQERESLLVKIKVLEQDKARLQRLEDELNRAKSTLEAETRVKQRLECEKQQIQNDLNQWKTQYSRKEEAIRKIESEREKSEREKNSLRSEIERLQAEIKRIEERCRRKLEDSTRETQSQLETERSRYQREIDKLRQRPYGSHRETQTECEWTVDTSKLVFDGLRKKVTAMQLYECQLIDKTTLDKLLKGKKSVEEVASEIQPFLRGAGSIAGASASPKEKYSLVEAKRKKLISPESTVMLLEAQAATGGIIDPHRNEKLTVDSAIARDLIDFDDRQQIYAAEKAITGFDDPFSGKTVSVSEAIKKNLIDRETGMRLLEAQIASGGVVDPVNSVFLPKDVALARGLIDRDLYRSLNDPRDSQKNFVDPVTKKKVSYVQLKERCRIEPHTGLLLLSVQKRSMSFQGIRQPVTVTELVDSGILRPSTVNELESGQISYDEVGERIKDFLQGSSCIAGIYNETTKQKLGIYEAMKIGLVRPGTALELLEAQAATGFIVDPVSNLRLPVEEAYKRGLVGIEFKEKLLSAERAVTGYNDPETGNIISLFQAMNKELIEKGHGIRLLEAQIATGGIIDPKESHRLPVDIAYKRGYFNEELSEILSDPSDDTKGFFDPNTEENLTYLQLKERCIKDEETGLCLLPLKEKKKQVQTSQKNTLRKRRVVIVDPETNKEMSVQEAYKKGLIDYETFKELCEQECEWEEITITGSDGSTRVVLVDRKTGSQYDIQDAIDKGLVDRKFFDQYRSGSLSLTQFADMISLKNGVGTSSSMGSGVSDDVFSSSRHESVSKISTISSVRNLTIRSSSFSDTLEESSPIAAIFDTENLEKISITEGIERGIVDSITGQRLLEAQACTGGIIHPTTGQKLSLQDAVSQGVIDQDMATRLKPAQKAFIGFEGVKGKKKMSAAEAVKEKWLPYEAGQRFLEFQYLTGGLVDPEVHGRISTEEAIRKGFIDGRAAQRLQDTSSYAKILTCPKTKLKISYKDAINRSMVEDITGLRLLEAASVSSKGLPSPYNMSSAPGSRSGSRSGSRSGSRSGSRSGSRRGSFDATGNSSYSYSYSFSSSSIGH

SEQ ID NO: 835740 - protein, 1567 aa, Homo sapiens
MTIGGNLKRGNLDTPPQAQDQVQSGLFLDVVSDRVRRWEYENELSKVRNNYDEEIISLKNQFETEINITKTTIHQLTMQKEEDTSGYRAQIDNLTRENRSLSEEIKRLKNTLTQTTENLRRVEEDIQQQKATGSEVSQRKQQLEVELRQVTQMRTEESVRYKQSLDDAAKTIQDKNKEIERLKQLIDKETNDRKCLEDENARLQRVQYDLQKANSSATETINKLKVQEQELTRLRIDYERVSQERTVKDQDITRFQNSLKELQLQKQKVEEELNRLKRTASEDSCKRKKLEEELEGMRRSLKEQAIKITNLTQQLEQASIVKKRSEDDLRQQRDVLDGHLREKQRTQEELRRLSSEVEALRRQLLQEQESVKQAHLRNEHFQKAIEDKSRSLNESKIEIERLQSLTENLTKEHLMLEEELRNLRLEYDDLRRGRSEADSDKNATILELRSQLQISNNRTLELQGLINDLQRERENLRQEIEKFQKQALEASNRIQESKNQCTQVVQERESLLVKIKVLEQDKARLQRLEDELNRAKSTLEAETRVKQRLECEKQQIQNDLNQWKTQYSRKEEAIRKIESEREKSEREKNSLRSEIERLQAEIKRIEERCRRKLEDSTRETQSQLETERSRYQREIDKLRQRPYGSHRETQTECEWTVDTSKLVFDGLRKKVTAMQLYECQLIDKTTLDKLLKGKKSVEEVASEIQPFLRGAGSIAGASASPKEKYSLVEAKRKKLISPESTVMLLEAQAATGGIIDPHRNEKLTVDSAIARDLIDFDDRQQIYAAEKAITGFDDPFSGKTVSVSEAIKKNLIDRETGMRLLEAQIASGGVVDPVNSVFLPKDVALARGLIDRDLYRSLNDPRDSQKNFVDPVTKKKVSYVQLKERCRIEPHTGLLLLSVQKRSMSFQGIRQPVTVTELVDSGILRPSTVNELESGQISYDEVGERIKDFLQGSSCIAGIYNETTKQKLGIYEAMKIGLVRPGTALELLEAQAATGFIVDPVSNLRLPVEEAYKRGLVGIEFKEKLLSAERAVTGYNDPETGNIISLFQAMNKELIEKGHGIRLLEAQIATGGIIDPKESHRLPVDIAYKRGYFNEELSEILSDPSDDTKGFFDPNTEENLTYLQLKERCIKDEETGLCLLPLKEKKKQVQTSQKNTLRKRRVVIVDPETNKEMSVQEAYKKGLIDYETFKELCEQECEWEEITITGSDGSTRVVLVDRKTGSQYDIQDAIDKGLVDRKFFDQYRSGSLSLTQFADMISLKNGVGTSSSMGSGVSDDVFSSSRHESVSKISTISSVRNLTIRSSSFSDTLEESSPIAAIFDTENLEKISITEGIERGIVDSITGQRLLEAQACTGGIIHPTTGQKLSLQDAVSQGVIDQDMATRLKPAQKAFIGFEGVKGKKKMSAAEAVKEKWLPYEAGQRFLEFQYLTGGLVDPEVHGRISTEEAIRKGFIDGRAAQRLQDTSSYAKILTCPKTKLKISYKDAINRSMVEDITGLRLLEAASVSSKGLPSPYNMSSAPGSRSGSRSGSRSGSRSGSRSGSRRGSFDATGNSSYSYSYSFSSSSIGH

SEQ ID NO: 835741 - protein, 457 aa, Homo sapiens
MNIPNTEENLTYLQLKERCIKDEETGLCLLPLKEKKKQVQTSQKNTLRKRRVVIVDPETNKEMSVQEAYKKGLIDYETFKELCEQECEWEEITITGSDGSTRVVLVDRKTGSQYDIQDAIDKGLVDRKFFDQYRSGSLSLTQFADMISLKNGVGTSSSMGSGVSDDVFSSSRHESVSKISTISSVRNLTIRSSSFSDTLEESSPIAAIFDTENLEKISITEGIERGIVDSITGQRLLEAQACTGGIIHPTTGQKLSLQDAVSQGVIDQDMATRLKPAQKAFIGFEGVKGKKKMSAAEAVKEKWLPYEAGQRFLEFQYLTGGLVDPEVHGRISTEEAIRKGFIDGRAAQRLQDTSSYAKILTCPKTKLKISYKDAINRSMVEDITGLRLLEAASVSSKGLPSPYNMSSAPGSRSGSRSGSRSGSRSGSRSGSRRGSFDATGNSSYSYSYSFSSSSIGH

SEQ ID NO: 835742 - protein, 2524 aa, Homo sapiens
QLEEEYENLLKASFERMDHLRQLQNIIQATSREIMWINDCEEEELLYDWSDKNTNIAQKQEAFSIRMSQLEVKEKELNKLKQESDQLVLNQHPASDKIEAYMDTLQTQWSWILQITKCIDVHLKENAAYFQFFEEAQSTEAYLKGLQDSIRKKYPCDKNMPLQHLLEQIKELEKEREKILEYKRQVQNLVNKSKKIVQLKPRNPDYRSNKPIILRALCDYKQDQKIVHKGDECILKDNNERSKWYVTGPGGVDMLVPSVGLIIPPPNPLAVDLSCKIEQYYEAILALWNQLYINMKSLVSWHYCMIDIEKIRAMTIAKLKTMRQEDYMKTIADLELHYQEFIRNSQGSEMFGDDDKRKIQSQFTDAQKHYQTLVIQLPGYPQHQTVTTTEITHHGTCQDVNHNKVIETNRENDKQETWMLMELQKIRRQIEHCEGRMTLKNLPLADQGSSHHITVKINELKSVQNDSQAIAEVLNQLKDMLANFRGSEKYCYLQNEVFGLFQKLENINGVTDGYLNSLCTVRALLQAILQTEDMLKVYEARLTEEETVCLDLDKVEAYRCGLKKIKNDLNLKKSLLATMKTELQKAQQIHSQTSQQYPLYDLDLGKFGEKVTQLTDRWQRIDKQIDFRLWDLEKQIKQLRNYRDNYQAFCKWLYDAKRRQDSLESMKFGDSNTVMRFLNEQKNLHSEISGKRDKSEEVQKIAELCANSIKDYELQLASYTSGLETLLNIPIKRTMIQSPSGVILQEAADVHARYIELLTRSGDYYRFLSEMLKSLEDLKLKNTKIEVLEEELRLARDANSENCNKNKFLDQNLQKYQAECSQFKAKLASLEELKRQAELDGKSAKQNLDKCYGQIKELNEKITRLTYEIEDEKRRRKSVEDRFDQQKNDYDQLQKARQCEKENLGWQKLESEKAIKEKEYEIERLRVLLQEEGTRKREYENELAKVRNHYNEEMSNLRNKYETEINITKTTIKEISMQKEDDSKNLRNQLDRLSRENRDLKDEIVRLNDSILQATEQRRRAEENALQQKACGSEIMQKKQHLEIELKQVMQQRSEDNARHKQSLEEAAKTIQDKNKEIERLKAEFQEEAKRRWEYENELSKVRNNYDEEIISLKNQFETEINITKTTIHQLTMQKEEDTSGYRAQIDNLTRENRSLSEEIKRLKNTLTQTTENLRRVEEDIQQQKATGSEVSQRKQQLEVELRQVTQMRTEESVRYKQSLDDAAKTIQDKNKEIERLKQLIDKETNDRKCLEDENARLQRVQYDLQKANSSATETINKLKVQEQELTRLRIDYERVSQERTVKDQDITRFQNSLKELQLQKQKVEEELNRLKRTASEDSCKRKKLEEELEGMRRSLKEQAIKITNLTQQLEQASIVKKRSEDDLRQQRDVLDGHLREKQRTQEELRRLSSEVEALRRQLLQEQESVKQAHLRNEHFQKAIEDKSRSLNESKIEIERLQSLTENLTKEHLMLEEELRNLRLEYDDLRRGRSEADSDKNATILELRSQLQISNNRTLELQGLINDLQRERENLRQEIEKFQKQALEASNRIQESKNQCTQVVQERESLLVKIKVLEQDKARLQRLEDELNRAKSTLEAETRVKQRLECEKQQIQNDLNQWKTQYSRKEEAIRKIESEREKSEREKNSLRSEIERLQAEIKRIEERCRRKLEDSTRETQSQLETERSRYQREIDKLRQRPYGSHRETQTECEWTVDTSKLVFDGLRKKVTAMQLYECQLIDKTTLDKLLKGKKSVEEVASEIQPFLRGAGSIAGASASPKEKYSLVEAKRKKLISPESTVMLLEAQAATGGIIDPHRNEKLTVDSAIARDLIDFDDRQQIYAAEKAITGFDDPFSGKTVSVSEAIKKNLIDRETGMRLLEAQIASGGVVDPVNSVFLPKDVALARGLIDRDLYRSLNDPRDSQKNFVDPVTKKKVSYVQLKERCRIEPHTGLLLLSVQKRSMSFQGIRQPVTVTELVDSGILRPSTVNELESGQISYDEVGERIKDFLQGSSCIAGIYNETTKQKLGIYEAMKIGLVRPGTALELLEAQAATGFIVDPVSNLRLPVEEAYKRGLVGIEFKEKLLSAERAVTGYNDPETGNIISLFQAMNKELIEKGHGIRLLEAQIATGGIIDPKESHRLPVDIAYKRGYFNEELSEILSDPSDDTKGFFDPNTEENLTYLQLKERCIKDEETGLCLLPLKEKKKQVQTSQKNTLRKRRVVIVDPETNKEMSVQEAYKKGLIDYETFKELCEQECEWEEITITGSDGSTRVVLVDRKTGSQYDIQDAIDKGLVDRKFFDQYRSGSLSLTQFADMISLKNGVGTSSSMGSGVSDDVFSSSRHESVSKISTISSVRNLTIRSSSFSDTLEESSPIAAIFDTENLEKISITEGIERGIVDSITGQRLLEAQACTGGIIHPTTGQKLSLQDAVSQGVIDQDMATRLKPAQKAFIGFEGVKGKKKMSAAEAVKEKWLPYEAGQRFLEFQYLTGGLAASVGAAIYEPLPDGFFGAYPPMHFRVNKTSREVLVD

SEQ ID NO: 835743 - protein, 2129 aa, Homo sapiens
QLEEEYENLLKASFERMDHLRQLQNIIQATSREIMWINDCEEEELLYDWSDKNTNIAQKQEAFSIRMSQLEVKEKELNKLKQESDQLVLNQHPASDKIEAYMDTLQTQWSWILQITKCIDVHLKENAAYFQFFEEAQSTEAYLKGLQDSIRKKYPCDKNMPLQHLLEQIKELEKEREKILEYKRQVQNLVNKSKKIVQLKPRNPDYRSNKPIILRALCDYKQDQKIVHKGDECILKDNNERSKWYVTGPGGVDMLVPSVGLIIPPPNPLAVDLSCKIEQYYEAILALWNQLYINMKSLVSWHYCMIDIEKIRAMTIAKLKTMRQEDYMKTIADLELHYQEFIRNSQGSEMFGDDDKRKIQSQFTDAQKHYQTLVIQLPGYPQHQTVTTTEITHHGTCQDVNHNKVIETNRENDKQETWMLMELQKIRRQIEHCEGRMTLKNLPLADQGSSHHITVKINELKSVQNDSQAIAEVLNQLKDMLANFRGSEKYCYLQNEVFGLFQKLENINGVTDGYLNSLCTVRALLQAILQTEDMLKVYEARLTEEETVCLDLDKVEAYRCGLKKIKNDLNLKKSLLATMKTELQKAQQIHSQTSQQYPLYDLDLGKFGEKVTQLTDRWQRIDKQIDFRLWDLEKQIKQLRNYRDNYQAFCKWLYDAKRRQDSLESMKFGDSNTVMRFLNEQKNLHSEISGKRDKSEEVQKIAELCANSIKDYELQLASYTSGLETLLNIPIKRTMIQSPSGVILQEAADVHARYIELLTRSGDYYRFLSEMLKSLEDLKLKNTKIEVLEEELRLARDANSENCNKNKFLDQNLQKYQAECSQFKAKLASLEELKRQAELDGKSAKQNLDKCYGQIKELNEKITRLTYEIEDEKRRRKSVEDRFDQQKNDYDQLQKARQCEKENLGWQKLESEKAIKEKEYEIERLRVLLQEEGTRKREYENELAKVRNHYNEEMSNLRNKYETEINITKTTIKEISMQKEDDSKNLRNQLDRLSRENRDLKDEIVRLNDSILQATEQRRRAEENALQQKACGSEIMQKKQHLEIELKQVMQQRSEDNARHKQSLEEAAKTIQDKNKEIERLKAEFQEEAKRRWEYENELSKVRNNYDEEIISLKNQFETEINITKTTIHQLTMQKEEDTSGYRAQIDNLTRENRSLSEEIKRLKNTLTQTTENLRRVEEDIQQQKATGSEVSQRKQQLEVELRQVTQMRTEESVRYKQSLDDAAKTIQDKNKEIERLKQLIDKETNDRKCLEDENARLQRVQYDLQKANSSATETINKLKVQEQELTRLRIDYERVSQERTVKDQDITRFQNSLKELQLQKQKVEEELNRLKRTASEDSCKRKKLEEELEGMRRSLKEQAIKITNLTQQLEQASIVKKRSEDDLRQQRDVLDGHLREKQRTQEELRRLSSEVEALRRQLLQEQESVKQAHLRNEHFQKAIEDKSRSLNESKIEIERLQSLTENLTKEHLMLEEELRNLRLEYDDLRRGRSEADSDKNATILELRSQLQISNNRTLELQGLINDLQRERENLRQEIEKFQKQALEASNRIQESKNQCTQVVQERESLLVKIKVLEQDKARLQRLEDELNRAKSTLEAETRVKQRLECEKQQIQNDLNQWKTQYSRKEEAIRKIESEREKSEREKNSLRSEIERLQAEIKRIEERCRRKLEDSTRETQSQLETERSRYQREIDKLRQRPYGSHRETQTECEWTVDTSKLVFDGLRKKVTAMQLYECQLIDKTTLDKLLKGKKSVEEVASEIQPFLRGAGSIAGASASPKEKYSLVEAKRKKLISPESTVMLLEAQAATGGIIDPHRNEKLTVDSAIARDLIDFDDRQQIYAAEKAITGFDDPFSGKTVSVSEAIKKNLIDRETGMRLLEAQIASGGVVDPVNSVFLPKDVALARGLIDRDLYRSLNDPRDSQKNFVDPVTKKKVSYVQLKERCRIEPHTGLLLLSVQKRSMSFQGIRQPVTVTELVDSGILRPSTVNELESGQISYDEVGERIKDFLQGSSCIAGIYNETTKQKLGIYEAMKIGLVRPGTALELLEAQAATGFIVDPVSNLRLPVEEAYKRGLVGIEFKEKLLSAERAVTGYNDPETGNIISLFQAMNKELIEKGQQRVDAAANLVVVGGR

SEQ ID NO: 835744 - protein, 1291 aa, Homo sapiens
QLEEEYENLLKASFERMDHLRQLQNIIQATSREIMWINDCEEEELLYDWSDKNTNIAQKQEAFSIRMSQLEVKEKELNKLKQESDQLVLNQHPASDKIEAYMDTLQTQWSWILQITKCIDVHLKENAAYFQFFEEAQSTEAYLKGLQDSIRKKYPCDKNMPLQHLLEQIKELEKEREKILEYKRQVQNLVNKSKKIVQLKPRNPDYRSNKPIILRALCDYKQDQKIVHKGDECILKDNNERSKWYVTGPGGVDMLVPSVGLIIPPPNPLAVDLSCKIEQYYEAILALWNQLYINMKSLVSWHYCMIDIEKIRAMTIAKLKTMRQEDYMKTIADLELHYQEFIRNSQGSEMFGDDDKRKIQSQFTDAQKHYQTLVIQLPGYPQHQTVTTTEITHHGTCQDVNHNKVIETNRENDKQETWMLMELQKIRRQIEHCEGRMTLKNLPLADQGSSHHITVKINELKSVQNDSQAIAEVLNQLKDMLANFRGSEKYCYLQNEVFGLFQKLENINGVTDGYLNSLCTVRALLQAILQTEDMLKVYEARLTEEETVCLDLDKVEAYRCGLKKIKNDLNLKKSLLATMKTELQKAQQIHSQTSQQYPLYDLDLGKFGEKVTQLTDRWQRIDKQIDFRLWDLEKQIKQLRNYRDNYQAFCKWLYDAKRRQDSLESMKFGDSNTVMRFLNEQKNLHSEISGKRDKSEEVQKIAELCANSIKDYELQLASYTSGLETLLNIPIKRTMIQSPSGVILQEAADVHARYIELLTRSGDYYRFLSEMLKSLEDLKLKNTKIEVLEEELRLARDANSENCNKNKFLDQNLQKYQAECSQFKAKLASLEELKRQAELDGKSAKQNLDKCYGQIKELNEKITRLTYEIEDEKRRRKSVEDRFDQQKNDYDQLQKARQCEKENLGWQKLESEKAIKEKEYEIERLRVLLQEEGTRKREYENELAKVRNHYNEEMSNLRNKYETEINITKTTIKEISMQKEDDSKNLRNQLDRLSRENRDLKDEIVRLNDSILQATEQRRRAEENALQQKACGSEIMQKKQHLEIELKQVMQQRSEDNARHKQSLEEAAKTIQDKNKEIERLKAEFQEEAKRRWEYENELSKVRNNYDEEIISLKNQFETEINITKTTIHQLTMQKEEDTSGYRAQIDNLTRENRSLSEEIKRLKNTLTQTTENLRRVEEDIQQQKATGSEVSQRKQQLEVELRQVTQMRTEESVRYKQSLDDAAKTIQDKNKEIERLKQLIDKETNDRKCLEDENARLQRVQYDLQKANSSATETINKLKVQGRGSTRPRI

SEQ ID NO: 835745 - protein, 2707 aa, Homo sapiens
QLEEEYENLLKASFERMDHLRQLQNIIQATSREIMWINDCEEEELLYDWSDKNTNIAQKQEAFSIRMSQLEVKEKELNKLKQESDQLVLNQHPASDKIEAYMDTLQTQWSWILQITKCIDVHLKENAAYFQFFEEAQSTEAYLKGLQDSIRKKYPCDKNMPLQHLLEQIKELEKEREKILEYKRQVQNLVNKSKKIVQLKPRNPDYRSNKPIILRALCDYKQDQKIVHKGDECILKDNNERSKWYVTGPGGVDMLVPSVGLIIPPPNPLAVDLSCKIEQYYEAILALWNQLYINMKSLVSWHYCMIDIEKIRAMTIAKLKTMRQEDYMKTIADLELHYQEFIRNSQGSEMFGDDDKRKIQSQFTDAQKHYQTLVIQLPGYPQHQTGRLGTSFSLYQPSIHFKKKGVCIKLVSEPFLWMLYSQCSSCTKFSELILKFKGRRYTFRKYGCFLRPSTLIPRYSLIFVALTSFSVTTTEITHHGTCQDVNHNKVIETNRENDKQETWMLMELQKIRRQIEHCEGRMTLKNLPLADQGSSHHITVKINELKSVQNDSQAIAEVLNQLKDMLANFRGSEKYCYLQNEVFGLFQKLENINGVTDGYLNSLCTVRALLQAILQTEDMLKVYEARLTEEETVCLDLDKVEAYRCGLKKIKNDLNLKKSLLATMKTELQKAQQIHSQTSQQYPLYDLDLGKFGEKVTQLTDRWQRIDKQIDFRLWDLEKQIKQLRNYRDNYQAFCKWLYDAKRRQDSLESMKFGDSNTVMRFLNEQKNLHSEISGKRDKSEEVQKIAELCANSIKDYELQLASYTSGLETLLNIPIKRTMIQSPSGVILQEAADVHARYIELLTRSGDYYRFLSEMLKSLEDLKLKNTKIEVLEEELRLARDANSENCNKNKFLDQNLQKYQAECSQFKAKLASLEELKRQAELDGKSAKQNLDKCYGQIKELNEKITRLTYEIEDEKRRRKSVEDRFDQQKNDYDQLQKARQCEKENLGWQKLESEKAIKEKEYEIERLRVLLQEEGTRKREYENELAKVRNHYNEEMSNLRNKYETEINITKTTIKEISMQKEDDSKNLRNQLDRLSRENRDLKDEIVRLNDSILQATEQRRRAEENALQQKACGSEIMQKKQHLEIELKQVMQQRSEDNARHKQSLEEAAKTIQDKNKEIERLKAEFQEEAKRRWEYENELSKVRNNYDEEIISLKNQFETEINITKTTIHQLTMQKEEDTSGYRAQIDNLTRENRSLSEEIKRLKNTLTQTTENLRRVEEDIQQQKATGSEVSQRKQQLEVELRQVTQMRTEESVRYKQSLDDAAKTIQDKNKEIERLKQLIDKETNDRKCLEDENARLQRVQYDLQKANSSATETINKLKVQEQELTRLRIDYERVSQERTVKDQDITRFQNSLKELQLQKQKVEEELNRLKRTASEDSCKRKKLEEELEGMRRSLKEQAIKITNLTQQLEQASIVKKRSEDDLRQQRDVLDGHLREKQRTQEELRRLSSEVEALRRQLLQEQESVKQAHLRNEHFQKAIEDKSRSLNESKIEIERLQSLTENLTKEHLMLEEELRNLRLEYDDLRRGRSEADSDKNATILELRSQLQISNNRTLELQGLINDLQRERENLRQEIEKFQKQALEASNRIQESKNQCTQVVQERESLLVKIKVLEQDKARLQRLEDELNRAKSTLEAETRVKQRLECEKQQIQNDLNQWKTQYSRKEEAIRKIESEREKSEREKNSLRSEIERLQAEIKRIEERCRRKLEDSTRETQSQLETERSRYQREIDKLRQRPYGSHRETQTECEWTVDTSKLVFDGLRKKVTAMQLYECQLIDKTTLDKLLKGKKSVEEVASEIQPFLRGAGSIAGASASPKEKYSLVEAKRKKLISPESTVMLLEAQAATGGIIDPHRNEKLTVDSAIARDLIDFDDRQQIYAAEKAITGFDDPFSGKTVSVSEAIKKNLIDRETGMRLLEAQIASGGVVDPVNSVFLPKDVALARGLIDRDLYRSLNDPRDSQKNFVDPVTKKKVSYVQLKERCRIEPHTGLLLLSVQKRSMSFQGIRQPVTVTELVDSGILRPSTVNELESGQISYDEVGERIKDFLQGSSCIAGIYNETTKQKLGIYEAMKIGLVRPGTALELLEAQAATGFIVDPVSNLRLPVEEAYKRGLVGIEFKEKLLSAERAVTGYNDPETGNIISLFQAMNKELIEKGHGIRLLEAQIATGGIIDPKESHRLPVDIAYKRGYFNEELSEILSDPSDDTKGFFDPNTEENLTYLQLKERCIKDEETGLCLLPLKEKKKQVQTSQKNTLRKRRVVIVDPETNKEMSVQEAYKKGLIDYETFKELCEQECEWEEITITGSDGSTRVVLVDRKTGSQYDIQDAIDKGLVDRKFFDQYRSGSLSLTQFADMISLKNGVGTSSSMGSGVSDDVFSSSRHESVSKISTISSVRNLTIRSSSFSDTLEESSPIAAIFDTENLEKISITEGIERGIVDSITGQRLLEAQACTGGIIHPTTGQKLSLQDAVSQGVIDQDMATRLKPAQKAFIGFEGVKGKKKMSAAEAVKEKWLPYEAGQRFLEFQYLTGGLVDPEVHGRISTEEAIRKGFIDGRAAQRLQDTSSYAKILTCPKTKLKISYKDAINRSMVEDITGLRLLEAASVSSKGLPSPYNMSSAPGSRSGSRSGSRSGSRSGSRSGSRRGSFDATGNSSYSYSYSFSSSSIGH

SEQ ID NO: 835746 - protein, 1855 aa, Homo sapiens
MTGTTIGRAGTGDCLRLFTLAGRMCCTLTGLVASLELPSKFLDQNLQKYQAECSQFKAKLASLEELKRQAELDGKSAKQNLDKCYGQIKELNEKITRLTYEIEDEKRRRKSVEDRFDQQKNDYDQLQKARQCEKENLGWQKLESEKAIKEKEYEIERLRVLLQEEGTRKREYENELAKVRNHYNEEMSNLRNKYETEINITKTTIKEISMQKEDDSKNLRNQLDRLSRENRDLKDEIVRLNDSILQATEQRRRAEENALQQKACGSEIMQKKQHLEIELKQVMQQRSEDNARHKQSLEEAAKTIQDKNKEIERLKAEFQEEAKRRWEYENELSKVRNNYDEEIISLKNQFETEINITKTTIHQLTMQKEEDTSGYRAQIDNLTRENRSLSEEIKRLKNTLTQTTENLRRVEEDIQQQKATGSEVSQRKQQLEVELRQVTQMRTEESVRYKQSLDDAAKTIQDKNKEIERLKQLIDKETNDRKCLEDENARLQRVQYDLQKANSSATETINKLKVQEQELTRLRIDYERVSQERTVKDQDITRFQNSLKELQLQKQKVEEELNRLKRTASEDSCKRKKLEEELEGMRRSLKEQAIKITNLTQQLEQASIVKKRSEDDLRQQRDVLDGHLREKQRTQEELRRLSSEVEALRRQLLQEQESVKQAHLRNEHFQKAIEDKSRSLNESKIEIERLQSLTENLTKEHLMLEEELRNLRLEYDDLRRGRSEADSDKNATILELRSQLQISNNRTLELQGLINDLQRERENLRQEIEKFQKQALEASNRIQESKNQCTQVVQERESLLVKIKVLEQDKARLQRLEDELNRAKSTLEAETRVKQRLECEKQQIQNDLNQWKTQYSRKEEAIRKIESEREKSEREKNSLRSEIERLQAEIKRIEERCRRKLEDSTRETQSQLETERSRYQREIDKLRQRPYGSHRETQTECEWTVDTSKLVFDGLRKKVTAMQLYECQLIDKTTLDKLLKGKKSVEEVASEIQPFLRGAGSIAGASASPKEKYSLVEAKRKKLISPESTVMLLEAQAATGGIIDPHRNEKLTVDSAIARDLIDFDDRQQIYAAEKAITGFDDPFSGKTVSVSEAIKKNLIDRETGMRLLEAQIASGGVVDPVNSVFLPKDVALARGLIDRDLYRSLNDPRDSQKNFVDPVTKKKVSYVQLKERCRIEPHTGLLLLSVQKRSMSFQGIRQPVTVTELVDSGILRPSTVNELESGQISYDEVGERIKDFLQGSSCIAGIYNETTKQKLGIYEAMKIGLVRPGTALELLEAQAATGFIVDPVSNLRLPVEEAYKRGLVGIEFKEKLLSAERAVTGYNDPETGNIISLFQAMNKELIEKGHGIRLLEAQIATGGIIDPKESHRLPVDIAYKRGYFNEELSEILSDPSDDTKGFFDPNTEENLTYLQLKERCIKDEETGLCLLPLKEKKKQVQTSQKNTLRKRRVVIVDPETNKEMSVQEAYKKGLIDYETFKELCEQECEWEEITITGSDGSTRVVLVDRKTGSQYDIQDAIDKGLVDRKFFDQYRSGSLSLTQFADMISLKNGVGTSSSMGSGVSDDVFSSSRHESVSKISTISSVRNLTIRSSSFSDTLEESSPIAAIFDTENLEKISITEGIERGIVDSITGQRLLEAQACTGGIIHPTTGQKLSLQDAVSQGVIDQDMATRLKPAQKAFIGFEGVKGKKKMSAAEAVKEKWLPYEAGQRFLEFQYLTGGLVDPEVHGRISTEEAIRKGFIDGRAAQRLQDTSSYAKILTCPKTKLKISYKDAINRSMVEDITGLRLLEAASVSSKGLPSPYNMSSAPGSRSGSRSGSRSGSRSGSRSGSRRGSFDATGNSSYSYSYSFSSSSIGH

SEQ ID NO: 835747 - protein, 2538 aa, Homo sapiens
QLEEEYENLLKASFERMDHLRQLQNIIQATSREIMWINDCEEEELLYDWSDKNTNIAQKQEAFSIRMSQLEVKEKELNKLKQESDQLVLNQHPASDKIEAYMDTLQTQWSWILQITKCIDVHLKENAAYFQFFEEAQSTEAYLKGLQDSIRKKYPCDKNMPLQHLLEQIKELEKEREKILEYKRQVQNLVNKSKKIVQLKPRNPDYRSNKPIILRALCDYKQDQKIVHKGDECILKDNNERSKWYVTGPGGVDMLVPSVGLIIPPPNPLAVDLSCKIEQYYEAILALWNQLYINMKSLVSWHYCMIDIEKIRAMTIAKLKTMRQEDYMKTIADLELHYQEFIRNSQGSEMFGDDDKRKIQSQFTDAQKHYQTLVIQLPGYPQHQTVTTTEITHHGTCQDVNHNKVIETNRENDKQETWMLMELQKIRRQIEHCEGRMTLKNLPLADQGSSHHITVKINELKSVQNDSQAIAEVLNQLKDMLANFRGSEKYCYLQNEVFGLFQKLENINGVTDGYLNSLCTVRALLQAILQTEDMLKVYEARLTEEETVCLDLDKVEAYRCGLKKIKNDLNLKKSLLATMKTELQKAQQIHSQTSQQYPLYDLDLGKFGEKVTQLTDRWQRIDKQIDFRLWDLEKQIKQLRNYRDNYQAFCKWLYDAKRRQDSLESMKFGDSNTVMRFLNEQKNLHSEISGKRDKSEEVQKIAELCANSIKDYELQLASYTSGLETLLNIPIKRTMIQSPSGVILQEAADVHARYIELLTRSGDYYRFLSEMLKSLEDLKLKNTKIEVLEEELRLARDANSENCNKNKFLDQNLQKYQAECSQFKAKLASLEELKRQAELDGKSAKQNLDKCYGQIKELNEKITRLTYEIEDEKRRRKSVEDRFDQQKNDYDQLQKARQCEKENLGWQKLESEKAIKEKEYEIERLRVLLQEEGTRKREYENELAKVRNHYNEEMSNLRNKYETEINITKTTIKEISMQKEDDSKNLRNQLDRLSRENRDLKDEIVRLNDSILQATEQRRRAEENALQQKACGSEIMQKKQHLEIELKQVMQQRSEDNARHKQSLEEAAKTIQDKNKEIERLKAEFQEEAKRRWEYENELSKVRNNYDEEIISLKNQFETEINITKTTIHQLTMQKEEDTSGYRAQIDNLTRENRSLSEEIKRLKNTLTQTTENLRRVEEDIQQQKATGSEVSQRKQQLEVELRQVTQMRTEESVRYKQSLDDAAKTIQDKNKEIERLKQLIDKETNDRKCLEDENARLQRVQYDLQKANSSATETINKLKVQEQELTRLRIDYERVSQERTVKDQDITRFQNSLKELQLQKQKVEEELNRLKRTASEDSCKRKKLEEELEGMRRSLKEQAIKITNLTQQLEQASIVKKRSEDDLRQQRDVLDGHLREKQRTQEGRSEADSDKNATILELRSQLQISNNRTLELQGLINDLQRERENLRQEIEKFQKQALEASNRIQESKNQCTQVVQERESLLVKIKVLEQDKARLQRLEDELNRAKSTLEAETRVKQRLECEKQQIQNDLNQWKTQYSRKEEAIRKIESEREKSEREKNSLRSEIERLQAEIKRIEERCRRKLEDSTRETQSQLETERSRYQREIDKLRQRPYGSHRETQTECEWTVDTSKLVFDGLRKKVTAMQLYECQLIDKTTLDKLLKGKKSVEEVASEIQPFLRGAGSIAGASASPKEKYSLVEAKRKKLISPESTVMLLEAQAATGGIIDPHRNEKLTVDSAIARDLIDFDDRQQIYAAEKAITGFDDPFSGKTVSVSEAIKKNLIDRETGMRLLEAQIASGGVVDPVNSVFLPKDVALARGLIDRDLYRSLNDPRDSQKNFVDPVTKKKVSYVQLKERCRIEPHTGLLLLSVQKRSMSFQGIRQPVTVTELVDSGILRPSTVNELESGQISYDEVGERIKDFLQGSSCIAGIYNETTKQKLGIYEAMKIGLVRPGTALELLEAQAATGFIVDPVSNLRLPVEEAYKRGLVGIEFKEKLLSAERAVTGYNDPETGNIISLFQAMNKELIEKGHGIRLLEAQIATGGIIDPKESHRLPVDIAYKRGYFNEELSEILSDPSDDTKGFFDPNTEENLTYLQLKERCIKDEETGLCLLPLKEKKKQVQTSQKNTLRKRRVVIVDPETNKEMSVQEAYKKGLIDYETFKELCEQECEWEEITITGSDGSTRVVLVDRKTGSQYDIQDAIDKGLVDRKFFDQYRSGSLSLTQFADMISLKNGVGTSSSMGSGVSDDVFSSSRHESVSKISTISSVRNLTIRSSSFSDTLEESSPIAAIFDTENLEKISITEGIERGIVDSITGQRLLEAQACTGGIIHPTTGQKLSLQDAVSQGVIDQDMATRLKPAQKAFIGFEGVKGKKKMSAAEAVKEKWLPYEAGQRFLEFQYLTGGLVDPEVHGRISTEEAIRKGFIDGRAAQRLQDTSSYAKILTCPKTKLKISYKDAINRSMVEDITGLRLLEAASVSSKGLPSPYNMSSAPGSRSGSRSGSRSGSRSGSRSGSRRGSFDATGNSSYSYSYSFSSSSIGH

SEQ ID NO: 835748 - protein, 1561 aa, Homo sapiens
SRVKNERESSCTDIGRYPYCTQLLSATCMRRWEYENELSKVRNNYDEEIISLKNQFETEINITKTTIHQLTMQKEEDTSGYRAQIDNLTRENRSLSEEIKRLKNTLTQTTENLRRVEEDIQQQKATGSEVSQRKQQLEVELRQVTQMRTEESVRYKQSLDDAAKTIQDKNKEIERLKQLIDKETNDRKCLEDENARLQRVQYDLQKANSSATETINKLKVQEQELTRLRIDYERVSQERTVKDQDITRFQNSLKELQLQKQKVEEELNRLKRTASEDSCKRKKLEEELEGMRRSLKEQAIKITNLTQQLEQASIVKKRSEDDLRQQRDVLDGHLREKQRTQEELRRLSSEVEALRRQLLQEQESVKQAHLRNEHFQKAIEDKSRSLNESKIEIERLQSLTENLTKEHLMLEEELRNLRLEYDDLRRGRSEADSDKNATILELRSQLQISNNRTLELQGLINDLQRERENLRQEIEKFQKQALEASNRIQESKNQCTQVVQERESLLVKIKVLEQDKARLQRLEDELNRAKSTLEAETRVKQRLECEKQQIQNDLNQWKTQYSRKEEAIRKIESEREKSEREKNSLRSEIERLQAEIKRIEERCRRKLEDSTRETQSQLETERSRYQREIDKLRQRPYGSHRETQTECEWTVDTSKLVFDGLRKKVTAMQLYECQLIDKTTLDKLLKGKKSVEEVASEIQPFLRGAGSIAGASASPKEKYSLVEAKRKKLISPESTVMLLEAQAATGGIIDPHRNEKLTVDSAIARDLIDFDDRQQIYAAEKAITGFDDPFSGKTVSVSEAIKKNLIDRETGMRLLEAQIASGGVVDPVNSVFLPKDVALARGLIDRDLYRSLNDPRDSQKNFVDPVTKKKVSYVQLKERCRIEPHTGLLLLSVQKRSMSFQGIRQPVTVTELVDSGILRPSTVNELESGQISYDEVGERIKDFLQGSSCIAGIYNETTKQKLGIYEAMKIGLVRPGTALELLEAQAATGFIVDPVSNLRLPVEEAYKRGLVGIEFKEKLLSAERAVTGYNDPETGNIISLFQAMNKELIEKGHGIRLLEAQIATGGIIDPKESHRLPVDIAYKRGYFNEELSEILSDPSDDTKGFFDPNTEENLTYLQLKERCIKDEETGLCLLPLKEKKKQVQTSQKNTLRKRRVVIVDPETNKEMSVQEAYKKGLIDYETFKELCEQECEWEEITITGSDGSTRVVLVDRKTGSQYDIQDAIDKGLVDRKFFDQYRSGSLSLTQFADMISLKNGVGTSSSMGSGVSDDVFSSSRHESVSKISTISSVRNLTIRSSSFSDTLEESSPIAAIFDTENLEKISITEGIERGIVDSITGQRLLEAQACTGGIIHPTTGQKLSLQDAVSQGVIDQDMATRLKPAQKAFIGFEGVKGKKKMSAAEAVKEKWLPYEAGQRFLEFQYLTGGLVDPEVHGRISTEEAIRKGFIDGRAAQRLQDTSSYAKILTCPKTKLKISYKDAINRSMVEDITGLRLLEAASVSSKGLPSPYNMSSAPGSRSGSRSGSRSGSRSGSRSGSRRGSFDATGNSSYSYSYSFSSSSIGH

SEQ ID NO: 835749 - protein, 1050 aa, Homo sapiens
QDRRSGCESAAEEHDSLRLKTPLAETRVKQRLECEKQQIQNDLNQWKTQYSRKEEAIRKIESEREKSEREKNSLRSEIERLQAEIKRIEERCRRKLEDSTRETQSQLETERSRYQREIDKLRQRPYGSHRETQTECEWTVDTSKLVFDGLRKKVTAMQLYECQLIDKTTLDKLLKGKKSVEEVASEIQPFLRGAGSIAGASASPKEKYSLVEAKRKKLISPESTVMLLEAQAATGGIIDPHRNEKLTVDSAIARDLIDFDDRQQIYAAEKAITGFDDPFSGKTVSVSEAIKKNLIDRETGMRLLEAQIASGGVVDPVNSVFLPKDVALARGLIDRDLYRSLNDPRDSQKNFVDPVTKKKVSYVQLKERCRIEPHTGLLLLSVQKRSMSFQGIRQPVTVTELVDSGILRPSTVNELESGQISYDEVGERIKDFLQGSSCIAGIYNETTKQKLGIYEAMKIGLVRPGTALELLEAQAATGFIVDPVSNLRLPVEEAYKRGLVGIEFKEKLLSAERAVTGYNDPETGNIISLFQAMNKELIEKGHGIRLLEAQIATGGIIDPKESHRLPVDIAYKRGYFNEELSEILSDPSDDTKGFFDPNTEENLTYLQLKERCIKDEETGLCLLPLKEKKKQVQTSQKNTLRKRRVVIVDPETNKEMSVQEAYKKGLIDYETFKELCEQECEWEEITITGSDGSTRVVLVDRKTGSQYDIQDAIDKGLVDRKFFDQYRSGSLSLTQFADMISLKNGVGTSSSMGSGVSDDVFSSSRHESVSKISTISSVRNLTIRSSSFSDTLEESSPIAAIFDTENLEKISITEGIERGIVDSITGQRLLEAQACTGGIIHPTTGQKLSLQDAVSQGVIDQDMATRLKPAQKAFIGFEGVKGKKKMSAAEAVKEKWLPYEAGQRFLEFQYLTGGLVDPEVHGRISTEEAIRKGFIDGRAAQRLQDTSSYAKILTCPKTKLKISYKDAINRSMVEDITGLRLLEAASVSSKGLPSPYNMSSAPGSRSGSRSGSRSGSRSGSRSGSRRGSFDATGNSSYSYSYSFSSSSIGH

SEQ ID NO: 835750 - protein, 2265 aa, Homo sapiens
QLEEEYENLLKASFERMDHLRQLQNIIQATSREIMWINDCEEEELLYDWSDKNTNIAQKQEAFSIRMSQLEVKEKELNKLKQESDQLVLNQHPASDKIEAYMDTLQTQWSWILQITKCIDVHLKENAAYFQFFEEAQSTEAYLKGLQDSIRKKYPCDKNMPLQHLLEQIKELEKEREKILEYKRQVQNLVNKSKKIVQLKPRNPDYRSNKPIILRALCDYKQDQKIVHKGDECILKDNNERSKWYVTGPGGVDMLVPSVGLIIPPPNPLAVDLSCKIEQYYEAILALWNQLYINMKSLVSWHYCMIDIEKIRAMTIAKLKTMRQEDYMKTIADLELHYQEFIRNSQGSEMFGDDDKRKIQSQFTDAQKHYQTLVIQLPGYPQHQTVTTTEITHHGTCQDVNHNKVIETNRENDKQETWMLMELQKIRRQIEHCEGRMTLKNLPLADQGSSHHITVKINELKSVQNDSQAIAEVLNQLKDMLANFRGSEKYCYLQNEVFGLFQKLENINGVTDGYLNSLCTVRALLQAILQTEDMLKVYEARLTEEETVCLDLDKVEAYRCGLKKIKNDLNLKKSLLATMKTELQKAQQIHSQTSQQYPLYDLDLGKFGEKVTQLTDRWQRIDKQIDFRLWDLEKQIKQLRNYRDNYQAFCKWLYDAKRRQDSLESMKFGDSNTVMRFLNEQKNLHSEISGKRDKSEEVQKIAELCANSIKDYELQLASYTSGLETLLNIPIKRTMIQSPSGVILQEAADVHARYIELLTRSGDYYRFLSEMLKSLEDLKLKNTKIEVLEEELRLARDANSENCNKNKFLDQNLQKYQAECSQFKAKLASLEELKRQAELDGKSAKQNLDKCYGQIKELNEKITRLTYEIEDEKRRRKSVEDRFDQQKNDYDQLQKARQCEKENLGWQKLESEKAIKEKEYEIERLRVLLQEEGTRKREYENELAKVRNHYNEEMSNLRNKYETEINITKTTIKEISMQKEDDSKNLRNQLDRLSRENRDLKDEIVRLNDSILQATEQRRRAEENALQQKACGSEIMQKKQHLEIELKQVMQQRSEDNARHKQSLEEAAKTIQDKNKEIERLKAEFQEEAKRRWEYENELSKVRNNYDEEIISLKNQFETEINITKTTIHQLTMQKEEDTSGYRAQIDNLTRENRSLSEEIKRLKNTLTQTTENLRRVEEDIQQQKATGSEVSQRKQQLEVELRQVTQMRTEESVRYKQSLDDAAKTIQDKNKEIERLKQLIDKETNDRKCLEDENARLQRVQYDLQKANSSATETINKLKVQEQELTRLRIDYERVSQERTVKDQDITRFQNSLKELQLQKQKVEEELNRLKRTASEDSCKRKKLEEELEGMRRSLKEQAIKITNLTQQLEQASIVKKRSEDDLRQQRDVLDGHLREKQRTQEELRRLSSEVEALRRQLLQEQESVKQAHLRNEHFQKAIEDKSRSLNESKIEIERLQSLTENLTKEHLMLEEELRNLRLEYDDLRRGRSEADSDKNATILELRSQLQISNNRTLELQGLINDLQRERENLRQEIEKFQKQALEASNRIQESKNQCTQVVQERESLLVKIKVLEQDKARLQRLEDELNRAKSTLEAETRVKQRLECEKQQIQNDLNQWKTQYSRKEEAIRKIESEREKSEREKNSLRSEIERLQAEIKRIEERCRRKLEDSTRETQSQLETERSRYQREIDKLRQRPYGSHRETQTECEWTVDTSKLVFDGLRKKVTAMQLYECQLIDKTTLDKLLKGKKSVEEVASEIQPFLRGAGSIAGASASPKEKYSLVEAKRKKLISPESTVMLLEAQAATGGIIDPHRNEKLTVDSAIARDLIDFDDRQQIYAAEKAITGFDDPFSGKTVSVSEAIKKNLIDRETGMRLLEAQIASGGVVDPVNSVFLPKDVALARGLIDRDLYRSLNDPRDSQKNFVDPVTKKKVSYVQLKERCRIEPHTGLLLLSVQKRSMSFQGIRQPVTVTELVDSGILRPSTVNELESGQISYDEVGERIKDFLQGSSCIAGIYNETTKQKLGIYEAMKIGLVRPGTALELLEAQAATGFIVDPVSNLRLPVEEAYKRGLVGIEFKEKLLSAERAVTGYNDPETGNIISLFQAMNKELIEKGHGIRLLEAQIATGGIIDPKESHRLPVDIAYKRGYFNEELSEILSDPSDDTKGFFDPNTEENLTYLQLKERCIKDEETGLCLLPLKEKKKQVQTSQKNTLRKRRVVIVDPETNKEMSVQEAYKKGLIDYETFIIAALAALRLLFLHETGSTTP

SEQ ID NO: 835751 - protein, 1718 aa, Homo sapiens
QLEEEYENLLKASFERMDHLRQLQNIIQATSREIMWINDCEEEELLYDWSDKNTNIAQKQEAFSIRMSQLEVKEKELNKLKQESDQLVLNQHPASDKIEAYMDTLQTQWSWILQITKCIDVHLKENAAYFQFFEEAQSTEAYLKGLQDSIRKKYPCDKNMPLQHLLEQIKELEKEREKILEYKRQVQNLVNKSKKIVQLKPRNPDYRSNKPIILRALCDYKQDQKIVHKGDECILKDNNERSKWYVTGPGGVDMLVPSVGLIIPPPNPLAVDLSCKIEQYYEAILALWNQLYINMKSLVSWHYCMIDIEKIRAMTIAKLKTMRQEDYMKTIADLELHYQEFIRNSQGSEMFGDDDKRKIQSQFTDAQKHYQTLVIQLPGYPQHQTVTTTEITHHGTCQDVNHNKVIETNRENDKQETWMLMELQKIRRQIEHCEGRMTLKNLPLADQGSSHHITVKINELKSVQNDSQAIAEVLNQLKDMLANFRGSEKYCYLQNEVFGLFQKLENINGVTDGYLNSLCTVRALLQAILQTEDMLKVYEARLTEEETVCLDLDKVEAYRCGLKKIKNDLNLKKSLLATMKTELQKAQQIHSQTSQQYPLYDLDLGKFGEKVTQLTDRWQRIDKQIDFRLWDLEKQIKQLRNYRDNYQAFCKWLYDAKRRQDSLESMKFGDSNTVMRFLNEQKNLHSEISGKRDKSEEVQKIAELCANSIKDYELQLASYTSGLETLLNIPIKRTMIQSPSGVILQEAADVHARYIELLTRSGDYYRFLSEMLKSLEDLKLKNTKIEVLEEELRLARDANSENCNKNKFLDQNLQKYQAECSQFKAKLASLEELKRQAELDGKSAKQNLDKCYGQIKELNEKITRLTYEIEDEKRRRKSVEDRFDQQKNDYDQLQKARQCEKENLGWQKLESEKAIKEKEYEIERLRVLLQEEGTRKREYENELAKVRNHYNEEMSNLRNKYETEINITKTTIKEISMQKEDDSKNLRNQLDRLSRENRDLKDEIVRLNDSILQATEQRRRAEENALQQKACGSEIMQKKQHLEIELKQVMQQRSEDNARHKQSLEEAAKTIQDKNKEIERLKAEFQEEAKRRWEYENELSKVRNNYDEEIISLKNQFETEINITKTTIHQLTMQKEEDTSGYRAQIDNLTRENRSLSEEIKRLKNTLTQTTENLRRVEEDIQQQKATGSEVSQRKQQLEVELRQVTQMRTEESVRYKQSLDDAAKTIQDKNKEIERLKQLIDKETNDRKCLEDENARLQRVQYDLQKANSSATETINKLKVQEQELTRLRIDYERVSQERTVKDQDITRFQNSLKELQLQKQKVEEELNRLKRTASEDSCKRKKLEEELEGMRRSLKEQAIKITNLTQQLEQASIVKKRSEDDLRQQRDVLDGHLREKQRTQEELRRLSSEVEALRRQLLQEQESVKQAHLRNEHFQKAIEDKSRSLNESKIEIERLQSLTENLTKEHLMLEEELRNLRLEYDDLRRGRSEADSDKNATILELRSQLQISNNRTLELQGLINDLQRERENLRQEIEKFQKQALEASNRIQESKNQCTQVVQERESLLVKIKVLEQDKARLQRLEDELNRAKSTLEAETRVKQRLECEKQQIQNDLNQWKTQYSRKEEAIRKIESEREKSEREKNSLRSEIERLQAEIKRIEERCRRKLEDSTRETQSQLETERSRYLWPVFIEFRASGSPYWVATRADRSVHVVSYWS

SEQ ID NO: 835752 - protein, 489 aa, Homo sapiens
AELPARPSSAGRDKVMDRNPSPPPPGRDKEEEEEVAGGDCIGSTVYSKHWLFGVLSGLIQIVSPENTKSSSDDEEQLTELDEEMENEICRVWDMSMDEDVALFLQEFNAPDIFMGVLAKSKCPRLREICVGILGNMACFQEICVSISSDKNLGQVLLHCLYDSDPPTLLETSRLLLTCLSQAEVASVWVERIQEHPAIYDSICFIMSSSTNVDLLVKVGEVVDKLFDLDEKLMLEWVRNGAAQPLDQPQEESEEQPVFRLVPCILEAAKQVRSENPEWLDVYMHILQLLTTVDDGIQAIVHCPDTGKDIWNLLFDLVCHEFCQSDDPPIILQEQKTVLASVFSVLSAIYASQTEQEYLKIEKVDLPLIDSLIRVLQNMEQCQKKPENSAESNTEETKRTDLTQDDFHLKILKDILCEFLSNIFQALTKETVAQGVKEGQLSKQKCSSAFQNLLPFYSPVVEDFIKILREVDKALADDLEKNFPSLKVQT

SEQ ID NO: 835753 - protein, 135 aa, Homo sapiens
AELPARPSSAGRDKVMDRNPSPPPPGRDKEEEEEVAGGDCIGSTVYSKHWLFGVLSGLIQIVSPENTKSSSDDEEQLTELDEEMENEICRVWDMSMDEDVALFLQEFNAPDIFMGVLAKSKCPRLRFSCQRDQYH

SEQ ID NO: 835754 - protein, 489 aa, Homo sapiens; identical to SEQ ID NO: 835752

SEQ ID NO: 835755 - protein, 494 aa, Homo sapiens
AELPARPSSAGRDKVMDRNPSPPPPGRDKEEEEEVAGGDCIGSTVYSKHWLFGVLSGLIQIVSPENTKSSSDDEEQLTELDEEMENEICRVWDMSMDEDVALFLQEFNAPDIFMGVLAKSKCPRLREICVGILGNMACFQEICVSISSDKNLGQVLLHCLYDSDPPTLLETSRLLLTCLSQAEVASVWVERIQEHPAIYDSICFIMSSSTNVDLLVKVGEVVDKLFDLDEKLMLEWVRNGAAQPLDQPQEESEEQPVFRLVPCILEAAKQVRSENPEWLDVYMHILQLLTTVDDGIQAIVHCPDTGKDIWNLLFDLVCHEFCQSDDPPIILQEQKTVLASVFSVLSAIYASQTEQEYLKIEKVDLPLIDSLIRVLQNMEQCQKKPENSAESNTEETKRTDLTQDDFHLKILKDILCEFLSNIFQALTKETVAQGVKEGQLSKQKCSSAFQNLLPFYSPVVEDFIKILREVDKALADDLEKNFPSLKEPYAKIQM

SEQ ID NO: 835756 - protein, 390 aa, Homo sapiens
AELPARPSSAGRDKVMDRNPSPPPPGRDKEEEEEVAGGDCIGSTVYSKHWLFGVLSGLIQIVSPENTKSSSDDEEQLTELDEEMENEICRVWDMSMDEDVALFLQEFNAPDIFMGVLAKSKCPRLREICVGILGNMACFQEICVSISSDKNLGQVLLHCLYDSDPPTLLETSRLLLTCLSQAEVASVWVERIQEHPAIYDSICFIMSSSTNVDLLVKVGEVVDKLFDLDEKLMLEWVRNGAAQPLDQPQEESEEQPVFRLVPCILEAAKQVRSENPEWLDVYMHILQLLTTVDDGIQAIVHCPDTGKDIWNLLFDLVCHEFCQSDDPPIILQEQKTVLASVFSVLSAIYASQTEQEYLKIEKGDGGSGSKGRPVEQTEVFLCISKPSSFL

SEQ ID NO: 835757 - protein, 179 aa, Homo sapiens
AELPARPSSAGRDKVMDRNPSPPPPGRDKEEEEEVAGGDCIGSTVYSKHWLFGVLSGLIQIVSPENTKSSSDDEEQLTELDEEMENEICRVWDMSMDEDVALFLQEFNAPDIFMGVLAKSKCPRLREICVGILGNMACFQEICVSISSDKNLGQVLLHCLYDSDPPTLLETSRSGQCLG

SEQ ID NO: 835758 - protein, 146 aa, Homo sapiens
QHALHLDESAEDAEEPVFAVDRAPYAVSTGHLLLLLLVCDPAAAARGCDKEETKRTDLTQDDFHLKILKDILCEFLSNIFQALTKETVAQGVKEGQLSKQKCSSAFQNLLPFYSPVVEDFIKILREVDKALADDLEKNFPSLKVQT

SEQ ID NO: 835759 - protein, 154 aa, Homo sapiens
IRLGTRLGVVMDRNPSPPPPGRDKEEEEEVAGGDCIGSTVYSKHWLFGVLSGLIQIVSPENTKSSSDDEEQLTELDEEMENEICRVWDMSMDEETVAQGVKEGQLSKQKCSSAFQNLLPFYSPVVEDFIKILREVDKALADDLEKNFPSLKVQT

SEQ ID NO: 835760 - protein, 489 aa, Homo sapiens; identical to SEQ ID NO: 835752

SEQ ID NO: 835761 - protein, 493 aa, Homo sapiens
AELPARPSSAGRDKVMDRNPSPPPPGRDKEEEEEVAGGDCIGSTVYSKHWLFGVLSGLIQIVSPENTKSSSDDEEQLTELDEEMENEICRVWDMSMDEDVALFLQEFNAPDIFMGVLAKSKCPRLREICVGILGNMACFQEICVSISSDKNLGQVLLHCLYDSDPPTLLETSRLLLTCLSQAEVASVWVERIQEHPAIYDSICFIMSSSTNVDLLVKVGEVVDKLFDLDEKLMLEWVRNGAAQPLDQPQEESEEQPVFRLVPCILEAAKQVRSENPEWLDVYMHILQLLTTVDDGIQAIVHCPDTGKDIWNLLFDLVCHEFCQSDDPPIILQEQKTVLASVFSVLSAIYASQTEQEYLKIEKVDLPLIDSLIRVLQNMEQCQKKPENSAESNTEETKRTDLTQDDFHLKILKDILCEFLSNIFQALTKETVAQGVKEGQLSKQKCSSAFQNLLPFYSPVVEDFIKILREVDKALADDLEKNFPSLKGFRSLNP

SEQ ID NO: 835762 - protein, 393 aa, Homo sapiens
AELPARPSSAGRDKVMDRNPSPPPPGRDKEEEEEVAGGDCIGSTVYSKHWLFGVLSGLIQIVSPENTKSSSDDEEQLTELDEEMENEICRVWDMSMDEDVALFLQEFNAPDIFMGVLAKSKCPRLREICVGILGNMACFQEICVSISSDKNLGQVLLHCLYDSDPPTLLETSRLLLTCLSQAEVASVWVERIQEHPAIYDSICFIMSSSTNVDLLVKVGEVVDKLFDLDEKLMLEWVRNGAAQPLDQPQEESEEQPVFRLVPCILEAAKQVRSENPEWLDVYMHILQLLTTVDDGIQAIVHCPDTGKDIWNLLFDLVCHEFCQSDDPPIILQEQKTVLASVFSVLSAIYASQTEQEYLKIEKASFGSYKIWNSVRKNQRTRQSLTQRKLKGLI

SEQ ID NO: 835763 - protein, 484 aa, Homo sapiens
IRLGTRLGVVMDRNPSPPPPGRDKEEEEEVAGGDCIGSTVYSKHWLFGVLSGLIQIVSPENTKSSSDDEEQLTELDEEMENEICRVWDMSMDEDVALFLQEFNAPDIFMGVLAKSKCPRLREICVGILGNMACFQEICVSISSDKNLGQVLLHCLYDSDPPTLLETSRLLLTCLSQAEVASVWVERIQEHPAIYDSICFIMSSSTNVDLLVKVGEVVDKLFDLDEKLMLEWVRNGAAQPLDQPQEESEEQPVFRLVPCILEAAKQVRSENPEWLDVYMHILQLLTTVDDGIQAIVHCPDTGKDIWNLLFDLVCHEFCQSDDPPIILQEQKTVLASVFSVLSAIYASQTEQEYLKIEKVDLPLIDSLIRVLQNMEQCQKKPENSAESNTEETKRTDLTQDDFHLKILKDILCEFLSNIFQALTKETVAQGVKEGQLSKQKCSSAFQNLLPFYSPVVEDFIKILREVDKALADDLEKNFPSLKVQT

SEQ ID NO: 835764 - protein, 446 aa, Homo sapiens
IRLGTRLGVVMDRNPSPPPPGRDKEEEEEVAGGDCIGSTVYSKHWLFGVLSGLIQDVALFLQEFNAPDIFMGVLAKSKCPRLREICVGILGNMACFQEICVSISSDKNLGQVLLHCLYDSDPPTLLETSRLLLTCLSQAEVASVWVERIQEHPAIYDSICFIMSSSTNVDLLVKVGEVVDKLFDLDEKLMLEWVRNGAAQPLDQPQEESEEQPVFRLVPCILEAAKQVRSENPEWLDVYMHILQLLTTVDDGIQAIVHCPDTGKDIWNLLFDLVCHEFCQSDDPPIILQEQKTVLASVFSVLSAIYASQTEQEYLKIEKVDLPLIDSLIRVLQNMEQCQKKPENSAESNTEETKRTDLTQDDFHLKILKDILCEFLSNIFQALTKETVAQGVKEGQLSKQKCSSAFQNLLPFYSPVVEDFIKILREVDKALADDLEKNFPSLKVQT

SEQ ID NO: 835765 - protein, 130 aa, Homo sapiens
MNDTVTIRTRKFMTNRLLQRKQMVIDVLHPGKATVPKTEIREKLAKMYKTTPDVIFVFGFRTHFGGGKTTGFGMIYDSLDYAKKNEPKHRLARHGLYEKKKTSRKQRKERKNRMKKVRGTAKANVGAGKK

SEQ ID NO: 835766 - protein, 130 aa, Homo sapiens; identical to SEQ ID NO: 835765

SEQ ID NO: 835767 - protein, 130 aa, Homo sapiens; identical to SEQ ID NO: 835765

SEQ ID NO: 835768 - protein, 130 aa, Homo sapiens; identical to SEQ ID NO: 835765

SEQ ID NO: 835769 - protein, 104 aa, Homo sapiens
MGLHYGGCYQHVDICVPNTTISEAARTPENKTKNSRPDSRPKPERGTEEKKKHPAREETTHRRRPNTQKGEHYEPTEGRPQHEQTEAPQNTRNIHSNPQPASST

SEQ ID NO: 835770 - protein, 68 aa, Homo sapiens
AAAYYYYYKFAAARPKMYKTTPDVIFVFGFRTHFGGGKTTGFGMIYDSLGIMQRKMNPNIDFARHGPV

SEQ ID NO: 835771 - protein, 73 aa, Homo sapiens
YPYTVKKGRQKVIPGYLKDFPGKISKGDRLVASRVYPQHFGRQEDSLAEEFETTRAEFGTIDRHHERHRNYPH

SEQ ID NO: 835772 - protein, 70 aa, Homo sapiens
AATTTKFAAASTCLKTSRKQRKGTQEQNERKSGGLQRANVGAGKKEVSWRLDQNEVSSMSWRLDHSRRSK

SEQ ID NO: 835773 - protein, 105 aa, Homo sapiens
NTRAPRFIKQVLRDLQRDLGSHTIIMGDFNTPLSTLDRSTRQKVNKDIQELNSALHQADLTGGIDKHRVYRCHHQNVQDHTGCHLCIWIQNSFWWWQDNWLWHDL

SEQ ID NO: 835774 - protein, 130 aa, Homo sapiens; identical to SEQ ID NO: 835765

SEQ ID NO: 835775 - protein, 130 aa, Homo sapiens; identical to SEQ ID NO: 835765

SEQ ID NO: 835776 - protein, 130 aa, Homo sapiens; identical to SEQ ID NO: 835765

SEQ ID NO: 835777 - protein, 130 aa, Homo sapiens; identical to SEQ ID NO: 835765

SEQ ID NO: 835778 - protein, 130 aa, Homo sapiens; identical to SEQ ID NO: 835765

SEQ ID NO: 835779 - protein, 130 aa, Homo sapiens; identical to SEQ ID NO: 835765

SEQ ID NO: 835780 - protein, 130 aa, Homo sapiens; identical to SEQ ID NO: 835765

SEQ ID NO: 835781 - protein, 130 aa, Homo sapiens; identical to SEQ ID NO: 835765

SEQ ID NO: 835782 - protein, 195 aa, Homo sapiens
MTCPKSFSSFMLGKGVSFRRLPLEFTPPLTASEPFATQVLFLAFLKMRELGLGVQALGRISQEERCTDVKNSKARESRGVVWQVEVPGPWSVWTCGRLRRGCGKYLQVAVTWRKTENREQCCQACLLERALVRNGAFMSPASPAPAGSPHPVDGDLVLHLPEALSATLTLSPHIQAINKSFGPFFEIHQESSCFS

SEQ ID NO: 835783 - protein, 98 aa, Homo sapiens
  misc_feature (17)..(17): Xaa can be any naturally occurring amino acid
  misc_feature (22)..(22): Xaa can be any naturally occurring amino acid
  misc_feature (30)..(30): Xaa can be any naturally occurring amino acid
  misc_feature (35)..(35): Xaa can be any naturally occurring amino acid
  misc_feature (37)..(37): Xaa can be any naturally occurring amino acid
EESLPGPERVEVSSEGXLRVTXTAIFSALXKFMHXTXLLSEENKWSLMSFTPGKATVPKTEIREKLAQNVQDHTGCHLCIWIQNSFWWWQDNWLWHDL

SEQ ID NO: 835784 - protein, 139 aa, Homo sapiens
CCGRSRGSLHVQGLHAGKATVPKTEIREKLAQNVQDHTGCHLCIWIQNSFWWWQDNWLWHERPRMNSCQPLHPQDNCNTLRRSRAVEAEETTLCVCMSVHRISKTPEYHVSLHDLITYDSIQMVKSRRSYSEGHEALDM

SEQ ID NO: 835785 - protein, 149 aa, Homo sapiens
MRELGLGVQALGRISQEERCTDVKNSKARESRGVVWQVEVPGPWSVWTCGRLRRGCGKYLQVAVTWRKTENREQCCQACLLERALVRNGAFMSPASPAPAGSPHPVDGDLVLHLPEALSATLTLSPHIQAINKSFGPFFEIHQESSCFS

SEQ ID NO: 835786 - protein, 130 aa, Homo sapiens; identical to SEQ ID NO: 835765

SEQ ID NO: 835787 - protein, 130 aa, Homo sapiens; identical to SEQ ID NO: 835765

SEQ ID NO: 835788 - protein, 130 aa, Homo sapiens; identical to SEQ ID NO: 835765

SEQ ID NO: 835789 - protein, 130 aa, Homo sapiens; identical to SEQ ID NO: 835765

SEQ ID NO: 835790 - protein, 130 aa, Homo sapiens; identical to SEQ ID NO: 835765

SEQ ID NO: 835791 - protein, 130 aa, Homo sapiens; identical to SEQ ID NO: 835765

SEQ ID NO: 835792 - protein, 130 aa, Homo sapiens; identical to SEQ ID NO: 835765

SEQ ID NO: 835793 - protein, 607 aa, Homo sapiens
MIARCLLAVRSLRRVGGSRILLRMTLGREVMSPLQAMSSYTVAGRNVLRWDLSPEQIKTRTEELIVQTKQVYDAVGMLGIEEVTYENCLQALADVEVKYIVERTMLDFPQHVSSDKEVRAASTEADKRLSRFDIEMSMRGDIFERIVHLQETCDLGKIKPEARRYLEKSIKMGKRNGLHLPEQVQNEIKSMKKRMSELCIDFNKNLNEDDTFLVFSKAELGALPDDFIDSLEKTDDDKYKITLKYPHYFPVMKKCCIPETRRRMEMAFNTRCKEENTIILQQLLPLRTKVAKLLGYSTHADFVLEMNTAKSTSRVTAFLDDLSQKLKPLGEAEREFILNLKKKECKDRGFEYDGKINAWDLYYYMTQTEELKYSIDQEFLKEYFPIEVVTEGLLNTYQELLGLSFEQMTDAHVWNKSVTLYTVKDKATGEVLGQFYLDLYPREGKYNHAACFGLQPGCLLPDGSRMMAVAALVVNFSQPVAGRPSLLRHDEVRTYFHEFGHVMHQICAQVSFFFPPVNLPISFFRKLLDCCQVSAPNRFFQKLNVFKNFIGLLQNQNFPYPVLFHNIFLLGGSSTSERCLLNNSLWKKNKTICKERLQILCFFLLIL

SEQ ID NO: 835794 - protein, 96 aa, Homo sapiens
ARPSLWSAMPVDRMMMVYTVPTEISGHRDIVLWILTIRKRLVQTVLCVTDPDATCVRVITGISELAGPSRARLSEPLDLSLTLFIVSLNSNSAADQ

SEQ ID NO: 835795 - protein, 704 aa, Homo sapiens
MIARCLLAVRSLRRVGGSRILLRMTLGREVMSPLQAMSSYTVAGRNVLRWDLSPEQIKTRTEELIVQTKQVYDAVGMLGIEEVTYENCLQALADVEVKYIVERTMLDFPQHVSSDKEVRAASTEADKRLSRFDIEMSMRGDIFERIVHLQETCDLGKIKPEARRYLEKSIKMGKRNGLHLPEQVQNEIKSMKKRMSELCIDFNKNLNEDDTFLVFSKAELGALPDDFIDSLEKTDDDKYKITLKYPHYFPVMKKCCIPETRRRMEMAFNTRCKEENTIILQQLLPLRTKVAKLLGYSTHADFVLEMNTAKSTSRVTAFLDDLSQKLKPLGEAEREFILNLKKKECKDRGFEYDGKINAWDLYYYMTQTEELKYSIDQEFLKEYFPIEVVTEGLLNTYQELLGLSFEQMTDAHVWNKSVTLYTVKDKATGEVLGQFYLDLYPREGKYNHAACFGLQPGCLLPDGSRMMAVAALVVNFSQPVAGRPSLLRHDEVRTYFHEFGHVMHQICAQTDFARFSGTNVETDFVEVPSQMLENWVWDVDSLRRLSKHYKDGSPIADDLLEKLVASRLVNTGLLTLRQIVLSKVDQSLHTNTSLDAASEYAKYCSEILGVAATPGTNMPATFGHLAGGYDGQYYGYLWSEVFSMDMFYSCFKKEGIMNPEVGMKYRNLILKPGGSLDGMDMLHNFLKREPNQKAFLMSRGLHAP

SEQ ID NO: 835796 - protein, 173 aa, Homo sapiens
MIARCLLAVRSLRRVGGSRILLRMTLGREVMSPLQAMSSYTVAGRNVLRWDLSPEQIKTRTEELIVQTKQVYDAVGMLGIEEVTYENCLQALADVEVKYIVERTMLDFPQHVSSDKEVRAASTEADKRLSRFDIEMSMRGDIFERIVHLQVSGVINPFKEGKTLQQKRTFSHK

SEQ ID NO: 835797 - protein, 704 aa, Homo sapiens; identical to SEQ ID NO: 835795

SEQ ID NO: 835798 - protein, 686 aa, Homo sapiens
MIARCLLAVRSLRRVGGSRILLRMTLGREVMSPLQAMSSYTVAGRNVLRWDLSPEQIKTRTEELIVQTKQVYDAVGMLGIEEVTYENCLQALADVEVKYIVERTMLDFPQHVSSDKEVRAASTEADKRLSRFDIEMSMRGDIFERIVHLQETCDLGKIKPEARRYLEKSIKMGKRNGLHLPEQVQNEIKSMKKRMSELCIDFNKNLNEDDTFLVFSKAELGALPDDFIDSLEKTDDDKYKITLKYPHYFPVMKKCCIPETRRRMEMAFNTRCKEENTIILQQLLPLRTKVAKLLGYSTHADFVLEMNTAKSTSRVTAFLDDLSQKLKPLGEAEREFILNLKKKECKDRGFEYDGKINAWDLYYYMTQTEELKYSIDQEFLKEYFPIEVVTEGLLNTYQELLGLSFEQMTDAHVWNKSVTLYTVKDKATGEVLGQFYLDLYPREGKYNHAACFGLQPGCLLPDGSRMMAVAALVVNFSQPVAGRPSLLRHDETDFARFSGTNVETDFVEVPSQMLENWVWDVDSLRRLSKHYKDGSPIADDLLEKLVASRLVNTGLLTLRQIVLSKVDQSLHTNTSLDAASEYAKYCSEILGVAATPGTNMPATFGHLAGGYDGQYYGYLWSEVFSMDMFYSCFKKEGIMNPEVGMKYRNLILKPGGSLDGMDMLHNFLKREPNQKAFLMSRGLHAP

SEQ ID NO: 835799 - protein, 144 aa, Homo sapiens
VPMLAASRVCACGPFPRRGTDSKSNTPELSRRGRPPARPWGRTGAPPAAAVDLAGLPSPGPLPAPPSQPLGAAAPLPRLWTPRLWGVSTGVVPLPAHRPGLSELERTSDLGRQRPAPPLLPPSTSMPSVHERGGGGQKSPVAYE

SEQ ID NO: 835800 - protein, 144 aa, Homo sapiens; identical to SEQ ID NO: 835799

SEQ ID NO: 835801 - protein, 152 aa, Homo sapiens
VPMLAASRVCACGPFPRRGTDSKSNTPELSRRGRPPARPWGRTGAPPAAAVDLAGLPSPGPLPAPPSQPLGAAAPLPRLWTPRLWGVSTGVVPLPAHRPGLSELERTSDLSVRHRCAIAAHLSLPAPMRPTMALCVALKLLCLAVLAQECPP

SEQ ID NO: 835802 - protein, 290 aa, Homo sapiens
MPQSRGNRWGGAQGGGGGAPRWGGPAGTSGSLAGVCAKAVLWEPLKVGQAGGRGKVTLGKEPAEAKPERQPDPGREPVIACLSSCQPVSLFGGIGLPGDRPVRLRARGHCSRDPVCVPRSYLHLFSICHVPVTSSLLPFPSCSSPSTGLRNCQAKVMELAHGPDALPQGSAPPRHCSENLRRRWWLLQGSIQRKGGKKRGRGCWRPAGLWLPGLGGCLGSWGAMWAGWGGCLPQGAGWLWWEQIVFTPSPHTQPTLASYSRGLSHPWALCAVCTFAAPAAESYLSQPRAP

SEQ ID NO: 835803 - protein, 290 aa, Homo sapiens; identical to SEQ ID NO: 835802

SEQ ID NO: 835804 - protein, 160 aa, Homo sapiens
MPESKVGDTCVWDSKVENQQKKPVENRMKEDKSSIREAISKAKSTANIKTEQEGEASEKSLHLSPQHITHQTMPIGQRGSEQGKRVENINGTSYPSLQQKTNAVKKLHKCDECGKSFKYNSRLVQHKIMHTGEKRYECDDCGGTFRSSSSLRVHKRIHTG

SEQ ID NO: 835805 - protein, 335 aa, Homo sapiens
DVCGKTFRNNAGLKVHRRLHTGEKPYKCDVCGKAYISRSSLKNHKGIHLGEKPYKCSYCEKSFNYSSALEQHKRIHTREKPFGCDECGKAFRNNSGLKVHKRIHTGERPYKCEECGKAYISLSSLINHKSVHPGEKPFKCDECEKAFITYRTLTNHKKVHLGEKPYKCDVCEKSFNYTSLLSQHRRVHTREKPYECDRCEKVFRNNSSLKVHKRIHTGERPYECDVCGKAYISHSSLINHKSTHPGRTPHTCDECGKAFFSSRTLISHKRVHLGEKPFKCVECGKSFSYSSLLSQHKRIHTGEKPYVCDRCGKAFRNSSGLTVHKRIHTVSDELP

SEQ ID NO: 835806 - protein, 449 aa, Homo sapiens
DVCGKTFRNNAGLKVHRRLHTGEKPYKCDVCGKAYISRSSLKNHKGIHLGEKPYKCSYCEKSFNYSSALEQHKRIHTREKPFGCDECGKAFRNNSGLKVHKRIHTGERPYKCEECGKAYISLSSLINHKSVHPGEKPFKCDECEKAFITYRTLTNHKKVHLGEKPYKCDVCEKSFNYTSLLSQHRRVHTREKPYECDRCEKVFRNNSSLKVHKRIHTGERPYECDVCGKAYISHSSLINHKSTHPGRTPHTCDECGKAFFSSRTLISHKRVHLGEKPFKCVECGKSFSYSSLLSQHKRIHTGEKPYVCDRCGKAFRNSSGLTVHKRIHTGEKPYECDECGKAYISHSSLINHKSVHQGKQPYNCECGKSFNYRSVLDQHKRIHTGKKPYRCNECGKAFNIRSNLTKHKRTHTGEESLNVIYVGSYSGTSQKRTYEGGNALDGGRMRMPL

SEQ ID NO: 835807 - protein, 449 aa, Homo sapiens; identical to SEQ ID NO: 835806

SEQ ID NO: 835808 - protein, 111 aa, Homo sapiens
DILRTLKTDSIFVGLKVKNRSALLEAAPPLNKNVGGRARWLTAVIPALWEAEAGGSRGQEIETSLANSETPSLPKIQKISRECWRAPVVPATWEAEAGERFNPGDGACREP

SEQ ID NO: 835809 - protein, 357 aa, Homo sapiens
RAARSNAHFLSRNPRRERRLEELLDAEALPLPDGADMSEQSKDLSDPNFAAEAPNSEVHSSPGVSEGVPPSATLAEPQSPPLGPTAAPQAAPPPQAPNDEGDPKALQQAAEEGRAHQAPSAAQPGPAPPAPAQLVQKAHELMWYVLVKDQKKMIIWFPDMVKDVIGSYKKWCRSILRRTSLILARVFGLHLRLTSLHTMEFALVKALEPEELDRVALSNRMPMTGLLLMILSLIYVKGRGARESAVWNVLRILGLRPWKKHSTFGDVRKLITEEFVQMNYLKYQRVPYVEPPEYEFFWGSRASREITKMQIMEFLARVFKKDPQAWPSRYREALEEARALREANPTAHYPRSSVSED

SEQ ID NO: 835810 - protein, 357 aa, Homo sapiens; identical to SEQ ID NO: 835809

SEQ ID NO: 835811 - protein, 357 aa, Homo sapiens; identical to SEQ ID NO: 835809

SEQ ID NO: 835812 - protein, 365 aa, Homo sapiens
  misc_feature (365)..(365): Xaa can be any naturally occurring amino acid
RAARSNAHFLSRNPRRERRLEELLDAEALPLPDGADMSEQSKDLSDPNFAAEAPNSEVHSSPGVSEGVPPSATLAEPQSPPLGPTAAPQAAPPPQAPNDEGDPKALQQAAEEGRAHQAPSAAQPGPAPPAPAQLVQKAHELMWYVLVKDQKKMIIWFPDMVKDVIGSYKKWCRSILRRTSLILARVFGLHLRLTSLHTMEFALVKALEPEELDRVALSNRMPMTGLLLMILSLIYVKGRGARESAVWNVLRILGLRPWKKHSTFGDVRKLITEEFVQMNYLKYQRVPYVEPPEYEFFWGSRASREITKMQIMEFLARVFKKDPQAWPSRYREALEEARALREANPTAHYPRSSVSEEKKKNEKKX

SEQ ID NO: 835813 - protein, 138 aa, Homo sapiens
RGGARRQHNSKGYRVMGSEFRGGARRQRDSKGYRDTGSEFRGGARRQHNSKGYRDMGSEFRGGPRRQRDSKGYRDTGIFEEENGIEGQGGSLTGSSPQTAHSTAAEPPGEVTAARLLDSERRGARRNHREKCHPNFEL

SEQ ID NO: 835814 - protein, 216 aa, Homo sapiens
MPKGKKAKGKKVAPAPAVVKKQEAKKVVNPLFEKRPKNFGIGQDIQPKRDLTRFVKWPRYIRLQRQRAILYKRLKVPPAINQFTQALDRQTATQLLKLAHKYRPETKQEKKQRLLARAEKKAAGKGDVPTKRPPVLRAGVNTVTTLVENKKAQLVVIAHDVDPIELVVFLPALCRKMGVPYCIIKGTGKTGTSSPQEDLHHCRLHTGELGRQRRFG

SEQ ID NO: 835815 - protein, 228 aa, Homo sapiens
NIRLGTRLGVIGRGKGKKAKGKKVAPAPAVVKKQEAKKVVNPLFEKRPKNFGIGQDIQPKRDLTRFVKWPRYIRLQRQRAILYKRLKVPPAINQFTQALDRQTATQLLKLAHKYRPETKQEKKQRLLARAEKKAAGKGDVPTKRPPVLRAGVNTVTTLVENKKAQLVVIAHDVDPIELVVFLPALCRKMGVPYCIIKGTGKTGTSSPQEDLHHCRLHTGELGRQRRFG

SEQ ID NO: 835816 - protein, 228 aa, Homo sapiens; identical to SEQ ID NO: 835815

SEQ ID NO: 835817 - protein, 216 aa, Homo sapiens; identical to SEQ ID NO: 835814

SEQ ID NO: 835818 - protein, 216 aa, Homo sapiens; identical to SEQ ID NO: 835814

SEQ ID NO: 835819 - protein, 216 aa, Homo sapiens; identical to SEQ ID NO: 835814

SEQ ID NO: 835820 - protein, 228 aa, Homo sapiens; identical to SEQ ID NO: 835815

SEQ ID NO: 835821 - protein, 216 aa, Homo sapiens; identical to SEQ ID NO: 835814

SEQ ID NO: 835822 - protein, 122 aa, Homo sapiens
NQRGIRAPIANAGGDIRSTYLTLLTFRSVTNHPLNSKHRHDLCISKLDLYQKPLNMFWFEGIGMIKRPDIPYFSWPKRHEPGKLSRVRNPRDTCGSRSEMHLLVLPLQDPTHQFLACPSGEN

SEQ ID NO: 835823 - protein, 112 aa, Homo sapiens
VFDGTGANAIISCYNDENADFPVTCAAPQPPLQTQTPGTWLRKAIDPPPKPPKFFWQPLDKTRVGIQEFLAQKARSRQCSQRRGHLRLQVRDAPASPASTGPNPSVPSLSFW

SEQ ID NO: 835824 - protein, 122 aa, Homo sapiens; identical to SEQ ID NO: 835822

SEQ ID NO: 835825 - protein, 73 aa, Homo sapiens
RMRRIAAIRANHYRSPSTLTRPFIVSHYTSLQPPCSFTLHPLLDPSLSSIAPSCSHHHMGRLFFLAPHRIYSP

SEQ ID NO: 835826 - protein, 122 aa, Homo sapiens; identical to SEQ ID NO: 835822

SEQ ID NO: 835827 - protein, 950 aa, Homo sapiens
PRLAPRARDCAPGPAPGLPPAPTGRSAARGSAGSMGKAAAPSRGGGCGGRSRGLSSLFTVVPCLSCHTAAPGMSASTSGSGPEPKPQPQPVPEPERGPLSEQVSEAVSEAVPRSEPVSETTSEPEPGAGQPSELLQGSRPGSESSSGVGAGPFTKAASEPLSRAVGSATFLRPESGSLPALKPLPLLRPGQAKTPLGVPMSGTGTTSSAPLALLPLDSFEGWLLKWTNYLKGYQRRWFVLGNGLLSYYRNQGEMAHTCRGTINLSTAHIDTEDSCGILLTSGARSYHLKASSEVDRQQWITALELAKAKAVRVMNTHSDDSGDDDEATTPADKSELHHTLKNLSLKLDDLSTCNDLIAKHGAALQRSLTELDGLKIPSESGEKLKVVNERATLFRITSNAMINACRDFLELAEIHSRKWQRALQYEQEQRVHLEETIEQLAKQHNSLERAFHSAPGRPANPSKSFIEGSLLTPKGEDSEEDEDTEYFDAMEDSTSFITVITEAKEDSRKAEGSTGTSSVDWSSADNVLDGASLVPKGSSKVKRRVRIPNKPNYSLNLWSIMKNCIGRELSRIPMPVNFNEPLSMLQRLTEDLEYHHLLDKAVHCTSSVEQMCLVAAFSVSSYSTTVHRIAKPFNPMLGETFELDRLDDMGLRSLCEQVSHHPPSAAHYVFSKHGWSLWQEITISSKFRGKYISIMPLGAIHLEFQASGNHYVWRKSTSTVHNIIVGKLWIDQSGDIEIVNHKTNDRCQLKFLPYSYFSKEAARKVTGVVSDSQGKAHYVLSGSWDEQMECSKVMHSSPSSPSSDGKQKTVYQTLSAKLLWKKYPLPENAENMYYFSELALTLNEHEEGVAPTDSRLRPDQRLMEKGRWDEANTEKQRLEEKQRLSRRRRLEACGPGSSCSSEEEKEADAYTPLWFEKRLDPLTGEMACVYKGGYWEAKEKQDWHMCPNIF

SEQ ID NO: 835828 - protein, 853 aa, Homo sapiens
PRLAPRARDCAPGPAPGLPPAPTGRSAARGSAGSMGKAAAPSRGGGCGGRSRGLSSLFTVVPCLSCHTAAPGMSASTSGSGPEPKPQPQPVPEPERGPLSEQVSEAVSEAVPRSEPVSETTSEPEPGAGQPSELLQGSRPGSESSSGVGAGPFTKAASEPLSRAVGSATFLRPESGSLPALKPLPLLRPGQAKTPLGVPMSGTGTTSSAPLALLPLDSFEGWLLKWTNYLKGYQRRWFVLGNGLLSYYRNQGEMAHTCRGTINLSTAHIDTEDSCGILLTSGARSYHLKASSEVDRQQWITALELAKAKAVRVMNTHSDDSGDDDEATTPADKSELHHTLKNLSLKLDDLSTCNDLIAKHGAALQRSLTELDGLKIPSESGEKLKVVNERATLFRITSNAMINACRDFLELAEIHSRKWQRALQYEQEQRVHLEETIEQLAKQHNSLERAFHSAPGRPANPSKSFIEGSLLTPKGEDSEEDEDTEYFDAMEDSTSFITVITEAKEDSRKAEGSTGTSSVDWSSADNVLDGASLVPKGSSKVKRRVRIPNKPNYSLNLWSIMKNCIGRELSRIPMPVNFNEPLSMLQRLTEDLEYHHLLDKAVHCTSSVEQMCLVAAFSVSSYSTTVHRIAKPFNPMLGETFELDRLDDMGLRSLCEQVSHHPPSAAHYVFSKHGWSLWQEITISSKFRGKYISIMPLGAIHLEFQASGNHYVWRKSTSTVHNIIVGKLWIDQSGDIEIVNHKTNDRCQLKFLPYSYFSKEAARKGERGEHVLLLRAGPDPQRARGGRSANRQPPAARPAADGEGPLGRGQYREAAAGGEAAPVAAPAAGGLRAGQQLQLGGREGGGCLHATVV

SEQ ID NO: 835829 - protein, 486 aa, Homo sapiens
SRATPGACLSPQHSQDGAWRRPAAAEETLGVRDGHQACRDFLELAEIHSRKWQRALQYEQEQRVHLEETIEQLAKQHNSLERAFHSAPGRPANPSKSFIEGSLLTPKGEDSEEDEDTEYFDAMEDSTSFITVITEAKEDSRKAEGSTGTSSVDWSSADNVLDGASLVPKGSSKVKRRVRIPNKPNYSLNLWSIMKNCIGRELSRIPMPVNFNEPLSMLQRLTEDLEYHHLLDKAVHCTSSVEQMCLVAAFSVSSYSTTVHRIAKPFNPMLGETFELDRLDDMGLRSLCEQVSHHPPSAAHYVFSKHGWSLWQEITISSKFRGKYISIMPLGAIHLEFQASGNHYVWRKSTSTVHNIIVGKLWIDQSGDIEIVNHKTNDRCQLKFLPYSYFSKEAARKGERGEHVLLLRAGPDPQRARGGRSANRQPPAARPAADGEGPLGRGQYREAAAGGEAAPVAAPAAGGLRAGQQLQLGGREGGGCLHATVV

SEQ ID NO: 835830 - protein, 556 aa, Homo sapiens
MIVRSPQPRGALEELPLTSLMDDSGDDDEATTPADKSELHHTLKNLSLKLDDLSTCNDLIAKHGAALQRSLTELDGLKIPSESGEKLKVVNERATLFRITSNAMINACRDFLELAEIHSRKWQRALQYEQEQRVHLEETIEQLAKQHNSLERAFHSAPGRPANPSKSFIEGSLLTPKGEDSEEDEDTEYFDAMEDSTSFITVITEAKEDSRKAEGSTGTSSVDWSSADNVLDGASLVPKGSSKVKRRVRIPNKPNYSLNLWSIMKNCIGRELSRIPMPVNFNEPLSMLQRLTEDLEYHHLLDKAVHCTSSVEQMCLVAAFSVSSYSTTVHRIAKPFNPMLGETFELDRLDDMGLRSLCEQVSHHPPSAAHYVFSKHGWSLWQEITISSKFRGKYISIMPLGAIHLEFQASGNHYVWRKSTSTVHNIIVGKLWIDQSGDIEIVNHKTNDRCQLKFLPYSYFSKEAARKGERGEHVLLLRAGPDPQRARGGRSANRQPPAARPAADGEGPLGRGQYREAAAGGEAAPVAAPAAGGLRAGQQLQLGGREGGGCLHATVV

SEQ ID NO: 835831 - protein, 959 aa, Homo sapiens
PRLAPRARDCAPGPAPGLPPAPTGRSAARGSAGSMGKAAAPSRGGGCGGRSRGLSSLFTVVPCLSCHTAAPGMSASTSGSGPEPKPQPQPVPEPERGPLSEQVSEAVSEAVPRSEPVSETTSEPEPGAGQPSELLQGSRPGSESSSGVGAGPFTKAASEPLSRAVGSATFLRPESGSLPALKPLPLLRPGQAKTPLGVPMSGTGTTSSAPLALLPLDSFEGWLLKWTNYLKGYQRRWFVLGNGLLSYYRNQGEMAHTCRGTINLSTAHIDTEDSCGILLTSGARSYHLKASSEVDRQQWITALELAKAKAVRVMNTHSDDSGDDDEATTPADKSELHHTLKNLSLKLDDLSTCNDLIAKHGAALQRSLTELDGLKIPSESGEKLKVVNERATLFRITSNAMINACRDFLELAEIHSRKWQRALQYEQEQRVHLEETIEQLAKQHNSLERAFHSAPGRPANPSKSFIEGSLLTPKGEDSEEDEDTEYFDAMEDSTSFITVITEAKEDSRKAEGSTGTSSVDWSSADNVLDGASLVPKGSSKVKRRVRIPNKPNYSLNLWSIMKNCIGRELSRIPMPVNFNEPLSMLQRLTEDLEYHHLLDKAVHCTSSVEQMCLVAAFSVSSYSTTVHRIAKPFNPMLGETFELDRSTTWACAPSVSSLWQEITISSKFRGKYISIMPLGAIHLEFQASGNHYVWRKSTSTVHNIIVGKLWIDQSGDIEIVNHKTNDRCQLKFLPYSYFSKEAARKDKQDQPPLSTPGGPGQSLHLRWSCQCPQVTGVVSDSQGKAHYVLSGSWDEQMECSKVMHSSPSSPSSDGKQKTVYQTLSAKLLWKKYPLPENAENMYYFSELALTLNEHEEGVAPTDSRLRPDQRLMEKGRWDEANTEKQRLEEKQRLSRRRRLEACGPGSSCSSEEEKEADAYTPLWFEKRLDPLTGEMACVYKGGYWEAKEKQDWHMCPNIF

SEQ ID NO: 835832 - protein, 102 aa, Homo sapiens
MRPRSGLGWVSQALPGPLGTSPCQSLCRAPSLIQLIKHTAHSPAQHSENSRATPGACLSPQHSQDGAWRRPAAAEETLGVRDGHQVGASGLGEVDGLSASMG

SEQ ID NO: 835833 - protein, 111 aa, Homo sapiens
DIIMRLYFPVPPRSHCRRLPRHCLPTRDQNCFVLNKQFWLFRDNERLSWLPSCTVFYQTSEAHLCLRSHQNSSKFKCLMNCFMRNTTPWGWSRFLSAAPASGEHGGRVSPE

SEQ ID NO: 835834 - protein, 163 aa, Homo sapiens
TCPLPPGAIHLEFQASGNHYVWRKSTSTVHNIIVGKLWIDQSGDIEIVNHKTNDRCQLKFLPYSYFSKEAARKVKQDQPPLSTPGGPGQSLHLRWSCQCPQVTGVVSDSQGKAHYVLSGSWDEQMECSKVMHSSPSSPSSDGKQKTVYQTLSAKLLWKKYPLP

SEQ ID NO: 835835 - protein, 561 aa, Homo sapiens
AAAAAAARALAASGQDPRPHPRAPPWDDSGDDDEATTPADKSELHHTLKNLSLKLDDLSTCNDLIAKHGAALQRSLTELDGLKIPSESGEKLKVVNERATLFRITSNAMINACRDFLELAEIHSRKWQRALQYEQEQRVHLEETIEQLAKQHNSLERAFHSAPGRPANPSKSFIEGSLLTPKGEDSEEDEDTEYFDAMEDSTSFITVITEAKEDSRKAEGSTGTSSVDWSSADNVLDGASLVPKGSSKVKRRVRIPNKPNYSLNLWSIMKNCIGRELSRIPMPVNFNEPLSMLQRLTEDLEYHHLLDKAVHCTSSVEQMCLVAAFSVSSYSTTVHRIAKPFNPMLGETFELDRLDDMGLRSLCEQVSHHPPSAAHYVFSKHGWSLWQEITISSKFRGKYISIMPLGAIHLEFQASGNHYVWRKSTSTVHNIIVGKLWIDQSGDIEIVNHKTNDRCQLKFLPYSYFSKEAARKGERGEHVLLLRAGPDPQRARGGRSANRQPPAARPAADGEGPLGRGQYREAAAGGEAAPVAAPAAGGLRAGQQLQLGGREGGGCLHATVV

SEQ ID NO: 835836 - protein, 950 aa, Homo sapiens; identical to SEQ ID NO: 835827

SEQ ID NO: 835837 - protein, 425 aa, Homo sapiens
PRLAPRARDCAPGPAPGLPPAPTGRSAARGSAGSMGKAAAPSRGGGCGGRSRGLSSLFTVVPCLSCHTAAPGMSASTSGSGPEPKPQPQPVPEPERGPLSEQVSEAVSEAVPRSEPVSETTSEPEPGAGQPSELLQGSRPGSESSSGVGAGPFTKAASEPLSRAVGSATFLRPESGSLPALKPLPLLRPGQAKTPLGVPMSGTGTTSSAPLALLPLDSFEGWLLKWTNYLKGYQRRWFVLGNGLLSYYRNQGEMAHTCRGTINLSTAHIDTEDSCGILLTSGARSYHLKASSEVDRQQWITALELAKAKAVRVMNTHSDDSGDDDEATTPADKSELHHTLKNLSLKLDDLSTCNDLIAKHGAALQRSLTELDGLKIPSESGEKLKVVNERATLFRITSNAMINKPLPEASQALPPYPRPKLLCLE

SEQ ID NO: 835838 - protein, 74 aa, Homo sapiens
MKFQECHSEVMRHGQKIYPSHHRIEMAVEIASLKCQHSSINQSPTRKNSNSTTGWLLWDLLMGIGNSGSNVVLT

SEQ ID NO: 835839 - protein, 74 aa, Homo sapiens; identical to SEQ ID NO: 835838

SEQ ID NO: 835840 - protein, 499 aa, Homo sapiens
DREDVYKFFCGIRGHAYYNQKTTSITARMDEQALLGLNPNADSDFRQRALAYFEQLKISPDAWQVCAEALAQRTYSDDHVKFFCFQVLEHQVKYKYSELTTVQQQLIRETLISWLQAQMLNPQPEKTFIRNKAAQVFALLFVTEYLTKWPKFFFDILSVVDLNPRGVDLYLRILMAIDSELVDRDVVHTSEEARRNTLIKDTMREQCIPNLVESWYQILQNYQFTNSEVTCQCLEVVGAYVSWIDLSLIANDRFINMLLGHMSIEVLREEACDCLFEVVNKGMDPVDKMKLVESLCQVLQSAGFFSIDQEEDVDFLARFSKLVNGMGQSLIVSWSKLIKNGDIKNAQEALQAIETKVALMLQLLIHEDDDISSNIIGFCYDYLHILKQLTVLSDQQKANVEAIMLAVMKKLTYDEEYNFENEGEDEAMFVEYRKQLKLLLDRLAQVSPELLLASVRRVFSSTLQNWQTTRFMEVEVAIRLLYMLAEALPVSHGAHFSVW

SEQ ID NO: 835841 - protein, 972 aa, Homo sapiens
DREDVYKFFCGIRGHAYYNQKTTSITARMDEQALLGLNPNADSDFRQRALAYFEQLKISPDAWQVCAEALAQRTYSDDHVKFFCFQVLEHQVKYKYSELTTVQQQLIRETLISWLQAQMLNPQPEKTFIRNKAAQVFALLFVTEYLTKWPKFFFDILSVVDLNPRGVDLYLRILMAIDSELVDRDVVHTSEEARRNTLIKDTMREQCIPNLVESWYQILQNYQFTNSEVTCQCLEVVGAYVSWIDLSLIANDRFINMLLGHMSIEVLREEACDCLFEVVNKGMDPVDKMKLVESLCQVLQSAGFFSIDQEEDVDFLARFSKLVNGMGQSLIVSWSKLIKNGDIKNAQEALQAIETKVALMLQLLIHEDDDISSNIIGFCYDYLHILKQLTVLSDQQKANVEAIMLAVMKKLTYDEEYNFENEGEDEAMFVEYRKQLKLLLDRLAQVSPELLLASVRRVFSSTLQNWQTTRFMEVEVAIRLLYMLAEALPVSHGAHFSGDVSKASALQDMMRTLVTSGVSSYQHTSVTLEFFETVVRYEKFFTVEPQHIPCVLMAFLDHRGLRHSSAKQMNPFIEDILNRIQDLLELSPPENGHQSLLSSDDQLFIYETAGVLIVNSEYPAERKQALMRNLLTPLMEKFKILLEKLMLAQDEERQASLADCLNHAVGFASRTSKAFSNKQTVKQCGCSEVYLDCLQTFLPALSCPLQKDILRSGVRTFLHRMIICLEEEVLPFIPSASEHMLKDCEAKDLQEFIPLINQITAKFKIQVSPFLQQMFMPLLHAIFEVLLRPAEENDQSAALEKQMLRRSYFAFLQTVTGSGMSEVIANQGAENVERVLVTVIQGAVEYPDPIAQKTCFIILSKLVELWGGKDGPVGFADFVYKHIVPACFLAPLKQTFDLADAQTVLALSECAVTLKTIHLKRGPECVQYLQQEYLPSLQVAPEIIQEFCQALQQPDAKVFKNYLKVFFQRAKP

SEQ ID NO: 835842 - protein, 990 aa, Homo sapiens
DREDVYKFFCGIRGHAYYNQKTTSITARMDEQALLGLNPNADSDFRQRALAYFEQLKISPDAWQVCAEALAQRTYSDDHVKFFCFQVLEHQVKYKYSELTTVQQQLIRETLISWLQAQMLNPQPEKTFIRNKAAQVFALLFVTEYLTKWPKFFFDILSVVDLNPRGVDLYLRILMAIDSELVDRDVVHTSEEARRNTLIKDTMREQCIPNLVESWYQILQNYQFTNSEVTCQCLEVVGAYVSWIDLSLIANDRFINMLLGHMSIEVLREEACDCLFEVVNKGMDPVDKMKLVESLCQVLQSAGFFSIDQEEDVDFLARFSKLVNGMGQSLIVSWSKLIKNGDIKNAQEALQAIETKVALMLQLLIHEDDDISSNIIGFCYDYLHILKQLTVLSDQQKANVEAIMLAVMKKLTYDEEYNFENEGEDEAMFVEYRKQLKLLLDRLAQVSPELLLASVRRVFSSTLQNWQTTRFMEVEVAIRLLYMLAEALPVSHGAHFSGDVSKASALQDMMRTLVTSGVSSYQHTSVTLEFFETVVRYEKFFTVEPQHIPCVLMAFLDHRGLRHSSAKVRSRTAYLFSRFVKSLNKQMNPFIEDILNRIQDLLELSPPENGHQSLLSSDDQLFIYETAGVLIVNSEYPAERKQALMRNLLTPLMEKFKILLEKLMLAQDEERQASLADCLNHAVGFASRTSKAFSNKQTVKQCGCSEVYLDCLQTFLPALSCPLQKDILRSGVRTFLHRMIICLEEEVLPFIPSASEHMLKDCEAKDLQEFIPLINQITAKFKIQVSPFLQQMFMPLLHAIFEVLLRPAEENDQSAALEKQMLRRSYFAFLQTVTGSGMSEVIANQGAENVERVLVTVIQGAVEYPDPIAQKTCFIILSKLVELWGGKDGPVGFADFVYKHIVPACFLAPLKQTFDLADAQTVLALSECAVTLKTIHLKRGPECVQYLQQEYLPSLQVAPEIIQEFCQALQQPDAKVFKNYLKVFFQRAKP

SEQ ID NO: 835843 - protein, 420 aa, Homo sapiens
DREDVYKFFCGIRGHAYYNQKTTSITARMDEQALLGLNPNADSDFRQRALAYFEQLKISPDAWQVCAEALAQRTYSDDHVKFFCFQVLEHQVKYKYSELTTVQQQLIRETLISWLQAQMLNPQPEKTFIRNKAAQVFALLFVTEYLTKWPKFFFDILSVVDLNPRGVDLYLRILMAIDSELVDRDVVHTSEEARRNTLIKDTMREQCIPNLVESWYQILQNYQFTNSEVTCQCLEVVGAYVSWIDLSLIANDRFINMLLGHMSIEVLREEACDCLFEVVNKGMDPVDKMKLVESLCQVLQSAGFFSIDQEEDVDFLARFSKLVNGMGQSLIVSWSKLIKNGDIKNAQEALQAIETKVALMLQLLIHEDDDISSNIIGFCYDYLHILKQVSFCFILFAQYIIQRSHGEVENMEKLKMRKYP

SEQ ID NO: 835844 - protein, 541 aa, Homo sapiens
NSARGTAGPASGPGVVRDPAASQPRKRPGREGGEGARRSDTMAGGGGSSDGSGRAAGRRASRSSGRARRGRHEPGLGGPAERGAGEARLEEAVNRWVLKFYFHEALRAFRGSRYGDFRQIRDIMQALLVRPLGKEHTVSRLLRVMQCLSRIEEGENLDCSFDMEAELTPLESAINVLEMIKTEFTLTEAVVESSRKLVKEAAVIICIKNKEFEKASKILKKHMSKDPTTQKLRNDLLNIIREKNLAHPVIQNFSYETFQQKMLRFLESHLDDAEPYLLTMAKKALKSESAASSTGKEDKQPAPGPVEKPPREPARQLRNPPTTIGMMTLKAAFKTLSGAQDSEAAFAKLDQKDLVLPTQALPASPALKNKRPRKDENESSAPADGEGGSELQPKNKRMTISRLVLEEDSQSTEPSAGLNSSQEAASAPPSKPTVLNQPLPGEKNPKVPKGKWNSSNGVEEKETWVEEDELFQVQAAPDEDSTTNITKKQKWTVEESEWVKAGVQKYGEGNWAAISKNYPFVNRTAVMIKDRWRTMKRLGMN

SEQ ID NO: 835845 - protein, 541 aa, Homo sapiens; identical to SEQ ID NO: 835844

SEQ ID NO: 835846 - protein, 360 aa, Homo sapiens
RLFDQGWQWSNPVESWSREAAVIICIKNKEFEKASKILKKHMSKDPTTQKLRNDLLNIIREKNLAHPVIQNFSYETFQQKMLRFLESHLDDAEPYLLTMAKKALKSESAASSTGKEDKQPAPGPVEKPPREPARQLRNPPTTIGMMTLKAAFKTLSGAQDSEAAFAKLDQKDLVLPTQALPASPALKNKRPRKDENESSAPADGEGGSELQPKNKRMTISRLVLEEDSQSTEPSAGLNSSQEAASAPPSKPTVLNQPLPGEKNPKVPKGKWNSSNGVEEKETWVEEDELFQVQAAPDEDSTTNITKKQKWTVEESEWVKAGVQKYGEGNWAAISKNYPFVNRTAVMIKDRWRTMKRLGMN

SEQ ID NO: 835847 - protein, 435 aa, Homo sapiens
MEEDDSYVPSDLTAEERQELENIRRRKQELLADIQRLKDEIAEVANEIENLGSTEEKAVIICIKNKEFEKASKILKKHMSKDPTTQKLRNDLLNIIREKNLAHPVIQNFSYETFQQKMLRFLESHLDDAEPYLLTIGFVSELVCILSIFLVKEAENYMQFCGLFFLMTSFLSQMAKKALKSESAASSTGKEDKQPAPGPVEKPPREPARQLRNPPTTIGMMTLKAAFKTLSGAQDSEAAFAKLDQKDLVLPTQALPASPALKNKRPRKDENESSAPADGEGGSELQPKNKRMTISRLVLEEDSQSTEPSAGLNSSQEAASAPPSKPTVLNQPLPGEKNPKVPKGKWNSSNGVEEKETWVEEDELFQVQAAPDEDSTTNITKKQKWTVEESEWVKAGVQKYGEGNWAAISKNYPFVNRTAVMIKDRWRTMKRLGMN

SEQ ID NO: 835848 - protein, 454 aa, Homo sapiens
MAGGGGSSDGSGRAAGRRASRSSGRARRGRHEPGLGGPAERGAGEARLEEAVNRWVLKFYFHEALRAFRGSRYGDFRQIRDIMQALLVRPLGKEHTVSRLLRVMQCLSRIEEGENLDCSFDMEAELTPLESAINVLEMIKTEFTLTEAVVESSRKLVKEAAVIICIKNKEFEKASKILKKHMSKDPTTQKLRNDLLNIIREKNLAHPVIQNFSYETFQQKMLRFLESHLDDAEPYLLTMAKKALKSESAASSTGKEDKQPAPGPVEKPPREPARQLRNPPTTIGMMTLKAAFKTLSGAQDSEAAFAKLDQKDLVLPTQALPASPALKNKRPRKDENESSAPADGEGGSELQPKNKRMTISRLVLEEDSQSTEPSAGLNSSQEAASAPPSKPTVLNQPLPGEKNPKVPKGKWNSSNGVEEKETWVEEDELFQVQGKQKILLGLFLMLAEVQMRVT

SEQ ID NO: 835849 - protein, 115 aa, Homo sapiens
FSYEAFQQKILRFLESHLDDAEPYLLTAVIICIKNKEFEKASKILKKHMSKDPTTQKLRNDLLNIIREKNLAHPVIQNFSYETFQQKMLRFLESHLDDAEPYLLTLSLFVSKTKN

SEQ ID NO: 835850 - protein, 529 aa, Homo sapiens
GIRHEGRRAPLPARASCVTQRRHSRGSGPAGRAGRARGDRTRWREEAGVATAAGGQLAGGRPAVAGGPGGGATSRGWGARRSAARGRHGWKRQSIAGCSSSTSTRRCGPFGVAALLVRPLGKEHTVSRLLRVMQCLSRIEEGENLDCSFDMEAELTPLESAINVLEMIKTEFTLTEAVVESSRKLVKEAAVIICIKNKEFEKASKILKKHMSKDPTTQKLRNDLLNIIREKNLAHPVIQNFSYETFQQKMLRFLESHLDDAEPYLLTMAKKALKSESAASSTGKEDKQPAPGPVEKPPREPARQLRNPPTTIGMMTLKAAFKTLSGAQDSEAAFAKLDQKDLVLPTQALPASPALKNKRPRKDENESSAPADGEGGSELQPKNKRMTISRLVLEEDSQSTEPSAGLNSSQEAASAPPSKPTVLNQPLPGEKNPKVPKGKWNSSNGVEEKETWVEEDELFQVQAAPDEDSTTNITKKQKWTVEESEWVKAGVQKYGEGNWAAISKNYPFVNRTAVMIKDRWRTMKRLGMN

SEQ ID NO: 835851 - protein, 428 aa, Homo sapiens
MAGGGGSSDGSGRAAGRRASRSSGRARRGRHEPGLGGPAERGAGEARLEEAVNRWVLKFYFHEALRAFRGSRYGDFRQIRDIMQALLVRPLGKEHTVSRLLRVMQCLSRIEEGENLDCSFDMEAELTPLESAINVLEMIKTEFTLTEAVVESSRKLVKEAAVIICIKNKEFEKASKILKKHMSKDPTTQKLRNDLLNIIREKNLAHPVIQNFSYETFQQKMLRFLESHLDDAEPYLLTMAKKALKSESAASSTGKEDKQPAPGPVEKPPREPARQLRNPPTTIGMMTLKAAFKTLSGAQDSEAAFAKLDQKDLVLPTQALPASPALKNKRPRKDENESSAPADGEGGSELQPKNKRMTISRLVLEEDSQSTEPSAGLNSSQEAASAPPSKPTVLNQPLPGEKNPKYEDLLCRNFGAGWWSWLGLVLLP

SEQ ID NO: 835852 - protein, 38 aa, Homo sapiens
MGSTTRAHDQGFMRVRVKRPPNRICVSNMAVYFTWVQA

SEQ ID NO: 835853 - protein, 725 aa, Homo sapiens
MAKGFYISKSLGILGILLGVAAVCTIIALSVVYSQEKNKNANSSPVASTTPSASATTNPASATTLDQSKAWNRYRLPNTLKPDSYRVTLRPYLTPNDRGLYVFKGSSTVRFTCKEATDVIIIHSKKLNYTLSQGHRVVLRGVGGSQPPDIDKTELVEPTEYLVVHLKGSLVKDSQYEMDSEFEGELADDLAGFYRSEYMEGNVRKVVATTQMQAADARKSFPCFDEPAMKAEFNITLIHPKDLTALSNMLPKGPSTPLPEDPNWNVTEFHTTPKMSTYLLAFIVSEFDYVEKQASNGVLIRIWARPSAIAAGHGDYALNVTGPILNFFAGHYDTPYPIPKSDQIGLPDFNAGAMENWGLVTYRENSLLFDPLSSSSSNKERVVTVIAHELAHQWFGNLVTIEWWNDLWLNEGFASYVEYLGADYAEPTWNLKDLMVLNDVYRVMAVDALASSHPLSTPASEINTPAQISELFDAISYSKGASVLRMLSSFLSEDVFKQGLASYLHTFAYQNNIYLNLWDHLQEAVNNRSINFPHTVRDIMNRWTLQMGFLVITVGYQHGGTLYPGKNFLLGTRIPMVPGPQIQYVWIVPIKSIRDGRQTAGLWGGKWEKPNGPSGIRQSGAQRNHNVMRQSRGANTRNCYNTHWPEQEHCAPRCIGETKIELTTEPDTVLQVHTTTCRKDTQQQRQRLAAHVHSQTASYCIAAVARYDRIYAELSDERSKTARAE

SEQ ID NO: 835854 - protein, 725 aa, Homo sapiens; identical to SEQ ID NO: 835853

SEQ ID NO: 835855 - protein, 707 aa, Homo sapiens
MAKGFYISKSLGILGILLGVAAVCTIIALSVVYSQEKNKNANSSPVASTTPSASATTNPASATTLDQSKAWNRYRLPNTLKPDSYRVTLRPYLTPNDRGLYVFKGSSTVRFTCKEATDVIIIHSKKLNYTLSQGHRVVLRGVGGSQPPDIDKTELVEPTEYLVVHLKGSLVKDSQYEMDSEFEGELADDLAGFYRSEYMEGNVRKVVATTQMQAADARKSFPCFDEPAMKAEFNITLIHPKDLTALSNMLPKGPSTPLPEDPNWNVMEFDYVEKQASNGVLIRIWARPSAIAAGHGDYALNVTGPILNFFAGHYDTPYPIPKSDQIGLPDFNAGAMENWGLVTYRENSLLFDPLSSSSSNKERVVTVIAHELAHQWFGNLVTIEWWNDLWLNEGFASYVEYLGADYAEPTWNLKDLMVLNDVYRVMAVDALASSHPLSTPASEINTPAQISELFDAISYSKGASVLRMLSSFLSEDVFKQGLASYLHTFAYQNNIYLNLWDHLQEAVNNRSINFPHTVRDIMNRWTLQMGFLVITVGYQHGGTLYPGKNFLLGTRIPMVPGPQIQYVWIVPIKSIRDGRQTAGLWGGKWEKPNGPSGIRQSGAQRNHNVMRQSRGANTRNCYNTHWPEQEHCAPRCIGETKIELTTEPDDSLQVHTTTCRKDTQQQRQRLAAHVHSQTASYCIAAVARYDRIYAELSDERSKTARAE

SEQ ID NO: 835856 - protein, 135 aa, Homo sapiens
DIDKTELVEPTEYLVVHLKGSLVKDSQYEMDSEFEGELADDLAGFYRSEYMEGNVRKLSSGWAARWGGSEVLRQGWILRAKEGLSLQAFEPCGARDWPIASPPAAGKAAANAPNWEGFPTPHQGAGDEGQSVPWT

SEQ ID NO: 835857 - protein, 535 aa, Homo sapiens
MAKGFYISKSLGILGILLGVAAVCTIIALSVVYSQEKNKNANSSPVASTTPSASATTNPASATTLDQSKAWNRYRLPNTLKPDSYRVTLRPYLTPNDRGLYVFKGSSTVRFTCKEATDVIIIHSKKLNYTLSQGHRVVLRGVGGSQPPDIDKTELVEPTEYLVVHLKGSLVKDSQYEMDSEFEGELADDLAGFYRSEYMEGNVRKVVATTQMQAADARKSFPCFDEPAMKAEFNITLIHPKDLTALSNMLPKGPSTPLPEDPNWNVTEFHTTPKMSTYLLAFIVSEFDYVEKQASNGVLIRIWARPSAIAAGHGDYALNVTGPILNFFAGHYDTPYPIPKSDQIGLPDFNAGAMENWGLVTYRENSLLFDPLSSSSSNKERVVTVIAHELAHQWFGNLVTIEWWNDLWLNEGFASYVEYLGADYAEPTWNLKDLMVLNDVYRVMAVDALASSHPLSTPASEINTPAQISELFDAISYSKGASVLRMLSSFLSEDVFKQGLASYLHTFAYQNNIYLNLWDHLGGQHHLGASHHLGA

SEQ ID NO: 835858 - protein, 521 aa, Homo sapiens
MAKGFYISKSLGILGILLGVAAVCTIIALSVVYSQEKNKNANSSPVASSPSTPLPEDPNWNVTEFHTTPKMSTYLLAFIVSEFDYVEKQASNGVLIRIWARPSAIAAGHGDYALNVTGPILNFFAGHYDTPYPIPKSDQIGLPDFNAGAMENWGLVTYRENSLLFDPLSSSSSNKERVVTVIAHELAHQWFGNLVTIEWWNDLWLNEGFASYVEYLGADYAEPTWNLKDLMVLNDVYRVMAVDALASSHPLSTPASEINTPAQISELFDAISYSKGASVLRMLSSFLSEDVFKQGLASYLHTFAYQNNIYLNLWDHLQEAVNNRSINFPHTVRDIMNRWTLQMGFLVITVGYQHGGTLYPGKNFLLGTRIPMVPGPQIQYVWIVPIKSIRDGRQTAGLWGGKWEKPNGPSGIRQSGAQRNHNVMRQSRGANTRNCYNTHWPEQEHCAPRCIGETKIELTTEPDTVLQVHTTTCRKDTQQQRQRLAAHVHSQTASYCIAAVARYDRIYAELSDERSKTARAE

SEQ ID NO: 835859 - protein, 1251 aa, Homo sapiens
MSTERDSETTFDEDSQPNDEVVPYSDDETEDELDDQGSAVEPEQNRVNREAEENREPFRKECTWQVKANDRKYHEQPHFMNTKFLCIKESKYANNAIKTYKYNAFTFIPMNLFEQFKRAANLYFLALLILQAVPQISTLAWYTTLVPLLVVLGVTAIKDLVDDVARHKMDKEINNRTCEVIKDGRFKVAKWKEIQVGDVIRLKKNDFVPADILLLSSSEPNSLCYVETAELDGETNLKFKMSLEITDQYLQREDTLATFDGFIECEEPNNRLDKFTGTLFWRNTSFPLDADKILLRGCVIRNTDFCHGLVIFAGADTKIMKNSGKTRFKRTKIDYLMNYMVYTIFVVLILLSAGLAIGHAYWEAQVGNSSWYLYDGEDDTPSYRGFLIFWGYIIVLNTMVPISLYVSVEVIRLGQSHFINWDLQMYYAEKDTPAKARTTTLNEQLGQIHYIFSDKTGTLTQNIMTFKKCCINGQIYGDHRDASQHNHNKIEQVDFSWNTYADGKLAFYDHYLIEQIQSGKEPEVRQFFFLLAVCHTVMVDRTDGQLNYQAASPDEGALVNAARNFGFAFLARTQNTITISELGTERTYNVLAILDFNSDRKRMSIIVRTPEGNIKLYCKGADTVIYERLHRMNPTKQETQDALDIFANETLRTLCLCYKEIEEKEFTEWNKKFMAASVASTNRDEALDKVYEEIEKDLILLGATAIEDKLQDGVPETISKLAKADIKIWVLTGDKKETAENIGFACELLTEDTTICYGEDINSLLHARMENQRNRGGVYAKFAPPVQESFFPPGGNRALIITGSWLNEILLEKKTKRNKILKLKFPRTEEERRMRTQSKRRLEAKKEQRQKNFVDLACECSAVICCRVTPKQKAMVVDLVKRYKKAITLAIGDGANDVNMIKTAHIGVGISGQEGMQAVMSSDYSFAQFRYLQRLLLVHGRWSYIRMCKFLRYFFYKNFAFTLVHFWYSFFNGYSAQTAYEDWFITLYNVLYTSLPVLLMGLLDQDVSDKLSLRFPGLYIVGQRDLLFNYKRFFVSLLHGVLTSMILFFIPLGAYLQTVGQDGEAPSDYQSFAVTIASALVITVNFQIGLDTSYWTFVNAFSIFGSIALYFGIMFDFHSAGIHVLFPSAFQFTGTASNALRQPYIWLTIILTVAVCLLPVVAIRFLSMTIWPSESDKIQKHRKRLKAEEQWQRRQQVFRRGVSTRRSAYAFSHQRGYADLISSGRSIRKKRSPLDAIVADGTAEYRRTGDS

SEQ ID NO: 835860 - protein, 1251 aa, Homo sapiens; identical to SEQ ID NO: 835859

SEQ ID NO: 835861 - protein, 722 aa, Homo sapiens
MSTERDSETTFDEDSQPNDEVVPYSDDETEDELDDQGSAVEPEQNRVNREAEENREPFRKECTWQVKANDRKYHEQPHFMNTKFLCIKESKYANNAIKTYKYNAFTFIPMNLFEQFKRAANLYFLALLILQAVPQISTLAWYTTLVPLLVVLGVTAIKDLVDDVARHKMDKEINNRTCEVIKDGRFKVAKWKEIQVGDVIRLKKNDFVPADILLLSSSEPNSLCYVETAELDGETNLKFKMSLEITDQYLQREDTLATFDGFIECEEPNNRLDKFTGTLFWRNTSFPLDADKILLRGCVIRNTDFCHGLVIFAGADTKIMKNSGKTRFKRTKIDYLMNYMVYTIFVVLILLSAGLAIGHAYWEAQVGNSSWYLYDGEDDTPSYRGFLIFWGYIIVLNTMVPISLYVSVEVIRLGQSHFINWDLQMYYAEKDTPAKARTTTLNEQLGQIHYIFSDKTGTLTQNIMTFKKCCINGQIYGDHRDASQHNHNKIEQVDFSWNTYADGKLAFYDHYLIEQIQSGKEPEVRQFFFLLAVCHTVMVDRTDGQLNYQAASPDEGALVNAARNFGFAFLARTQNTITISELGTERTYNVLAILDFNSDRKRMSIIVRTPEGNIKLYCKGADTVIYERLHRMNPTKQETQDALDIFANETLRTLCLCYKEIEEKEFTEWNKKFMAASVASTNRDEALDKVYEEIEKDLIVSFSLNNFFFDILSRIEIFIKFY

SEQ ID NO: 835862 - protein, 722 aa, Homo sapiens; identical to SEQ ID NO: 835861

SEQ ID NO: 835863 - protein, 1251 aa, Homo sapiens; identical to SEQ ID NO: 835859

SEQ ID NO: 835864 - protein, 258 aa, Homo sapiens [sequence omitted]

SEQ ID NO: 835865 - protein, 722 aa, Homo sapiens; identical to SEQ ID NO: 835861

SEQ ID NO: 835866 - protein, 160 aa, Homo sapiens
GGGHPGDTFFRRGRARLFSGASGNSWSLYKGSASSRPGVSATPPKSPVYLDLAYLPSGSSAHLVDEEFFQRVRALCYVISGQDQRKEEGMRAVLDALLASKQHWDRDLQVTLIPTFDSVAMHTWYAETHARHQALGITVLGSNSMVSMQDDAFPACKVEF

SEQ ID NO: 835867 - protein, 1047 aa, Homo sapiens
GAARRWRRWLDLGLPRLRAHCSSWWAASSGARGSSPTSWRSSKELKVFVSRHSATFSSIVKGQRSLHHRGDNLETLVLLNPSDKSLYDELRNLLLDPASHKLLVLAGPCLEETGELLLQTGGFSPHHFLQVLKDREIRDILATTPPPVQPPILTITCPTFGDWAQLAPAVPGLQGALRLQLRLNPPAQLPNSEGLCEFLEYVAESLEPPSPFELLEPPTSGGFLRLGRPCCYIFPGGLGDAAFFAVNGFTVLVNGGSNPKSSFWKLVRHLDRVDAVLVTHPGADSLPGLNSLLRRKLAERSEVAAGGGSWDDRLRRLISPNLGVVFFNACEAASRLARGEDEAELALSLLAQLGITPLPLSRGPVPAKPTVLFEKMGVGRLDMYVLHPPSAGAERTLASVCALLVWHPAGPGEKVVRVLFPGCTPPACLLDGLVRLQHLRFLREPVVTPQDLEGPGRAESKESVGSRDSSKREGLLATHPRPGQERPGVARKEPARAEAPRKTEKEAKTPRELKKDPKPSVSRTQPREVRRAASSVPNLKKTNAQAAPKPRKAPSTSHSGFPPVANGPRSPPSLRCGEASPPSAACGSPASQLVATPSLELGPIPAGEEKALELPLAASSIPRPRTPSPESHRSPAEGSERLSLSPLRGGEAGPDASPTVTTPTVTTPSLPAEVGSPHSTEVDESLSVSFEQVLPPSAPTSEAGLSLPLRGPRARRSASPHDVDLCLVSPCEFEHRKAVPMAPAPASPGSSNDSSARSQERAGGLGAEETPPTSVSESLPTLSDSDPVPLAPGAADSDEDTEGFGVPRHDPLPDPLKVPPPLPDPSSICMVDPEMLPPKTARQTENVSRTRKPLARPNSRAAAPKATPVAAAKTKGLAGGDRASRPLSARSEPSEKGGRAPLSRKSSTPKTATRGPSGSASSRPGVSATPPKSPVYLDLAYLPSGSSAHLVDEEFFQRVRALCYVISGQDQRKEEGMRAVLDALLASKQHWDRDLQVTLIPTFDSVAMHTWYAETHARHQALGITVLGSNSMVSMQDDAFPACKVEF

SEQ ID NO: 835868 - protein, 550 aa, Homo sapiens
  misc_feature (539)..(539): Xaa can be any naturally occurring amino acid
  misc_feature (549)..(549): Xaa can be any naturally occurring amino acid
RGGPKMAAVAGSGAAAAPSSLLLVVGSEFGSPGLLTYVLEELERGIRSWDVDPGVCNLDEQLKVFVSRHSATFSSIVKGQRSLHHRGDNLETLVLLNPSDKSLYDELRNLLLDPASHKLLVLAGPCLEETGELLLQTGGFSPHHFLQVLKDREIRDILATTPPPVQPPILTITCPTFGDWAQLAPAVPGLQGALRLQLRLNPPAQLPNSEGLCEFLEYVAESLEPPSPFELLEPPTSGGFLRLGRPCCYIFPGGLGDAAFFAVNGFTVLVNGGSNPKSSFWKLVRHLDRVDAVLVTHPGADSLPGLNSLLRRKLAERSEVAAGGGSWDDRLRRLISPNLGVVFFNACEAASRLARGEDEAELALSLLAQLGITPLPLSRGPVPAKPTVLFEKMGVGRLDMYVLHPPSAGAERTLASVCALLVWHPAGPGEKVVRVLFPGCTPPACLLDGLVRLQHLRFLREPVVTPQDLEGPGRAESKESVGSRDSSKREGLLATHPRPGQERPGVARKEPARAEAPRKTEKEAKTPELRRPTCPTREXDFGTKNQDSXG

SEQ ID NO: 835869 - protein, 1064 aa, Homo sapiens
RGGPKMAAVAGSGAAAAPSSLLLVVGSEFGSPGLLTYVLEELERGIRSWDVDPGVCNLDEQLKVFVSRHSATFSSIVKGQRSLHHRGDNLETLVLLNPSDKSLYDELRNLLLDPASHKLLVLAGPCLEETGELLLQTGGFSPHHFLQVLKDREIRDILATTPPPVQPPILTITCPTFGDWAQLAPAVPGLQGALRLQLRLNPPAQLPNSEGLCEFLEYVAESLEPPSPFELLEPPTSGGFLRLGRPCCYIFPGGLGDAAFFAVNGFTVLVNGGSNPKSSFWKLVRHLDRVDAVLVTHPGADSLPGLNSLLRRKLAERSEVAAGGGSWDDRLRRLISPNLGVVFFNACEAASRLARGEDEAELALSLLAQLGITPLPLSRGPVPAKPTVLFEKMGVGRLDMYVLHPPSAGAERTLASVCALLVWHPAGPGEKVVRVLFPGCTPPACLLDGLVRLQHLRFLREPVVTPQDLEGPGRAESKESVGSRDSSKREGLLATHPRPGQERPGVARKEPARAEAPRKTEKEAKTPRELKKDPKPSVSRTQPREVRRAASSVPNLKKTNAQAAPKPRKAPSTSHSGFPPVANGPRSPPSLRCGEASPPSAACGSPASQLVATPSLELGPIPAGEEKALELPLAASSIPRPRTPSPESHRSPAEGSERLSLSPLRGGEAGPDASPTVTTPTVTTPSLPAEVGSPHSTEVDESLSVSFEQVLPPSAPTSEAGLSLPLRGPRARRSASPHDVDLCLVSPCEFEHRKAVPMAPAPASPGSSNDSSARSQERAGGLGAEETPPTSVSESLPTLSDSDPVPLAPGAADSDEDTEGFGVPRHDPLPDPLKVPPPLPDPSSICMVDPEMLPPKTARQTENVSRTRKPLARPNSRAAAPKATPVAAAKTKGLAGGDRASRPLSARSEPSEKGGRAPLSRKSSTPKTATRGPSGSASSRPGVSATPPKSPVYLDLAYLPSGSSAHLVDEEFFQRVRALCYVISGQDQRKEEGMRAVLDALLASKQHWDRDLQVTLIPTFDSVAMHTWYAETHARHQALGITVLGSNSMVSMQDDAFPACKVEF

SEQ ID NO: 835870 - protein, 1022 aa, Homo sapiens
MFSIRSWDVDPGVCNLDEQLKVFVSRHSATFSSIVKGQRSLHHRGDNLETLVLLNPSDKSLYDELRNLLLDPASHKLLVLAGPCLEETGELLLQTGGFSPHHFLQVLKDREIRDILATTPPPVQPPILTITCPTFGDWAQLAPAVPGLQGALRLQLRLNPPAQLPNSEGLCEFLEYVAESLEPPSPFELLEPPTSGGFLRLGRPCCYIFPGGLGDAAFFAVNGFTVLVNGGSNPKSSFWKLVRHLDRVDAVLVTHPGADSLPGLNSLLRRKLAERSEVAAGGGSWDDRLRRLISPNLGVVFFNACEAASRLARGEDEAELALSLLAQLGITPLPLSRGPVPAKPTVLFEKMGVGRLDMYVLHPPSAGAERTLASVCALLVWHPAGPGEKVVRVLFPGCTPPACLLDGLVRLQHLRFLREPVVTPQDLEGPGRAESKESVGSRDSSKREGLLATHPRPGQERPGVARKEPARAEAPRKTEKEAKTPRELKKDPKPSVSRTQPREVRRAASSVPNLKKTNAQAAPKPRKAPSTSHSGFPPVANGPRSPPSLRCGEASPPSAACGSPASQLVATPSLELGPIPAGEEKALELPLAASSIPRPRTPSPESHRSPAEGSERLSLSPLRGGEAGPDASPTVTTPTVTTPSLPAEVGSPHSTEVDESLSVSFEQVLPPSAPTSEAGLSLPLRGPRARRSASPHDVDLCLVSPCEFEHRKAVPMAPAPASPGSSNDSSARSQERAGGLGAEETPPTSVSESLPTLSDSDPVPLAPGAADSDEDTEGFGVPRHDPLPDPLKVPPPLPDPSSICMVDPEMLPPKTARQTENVSRTRKPLARPNSRAAAPKATPVAAAKTKGLAGGDRASRPLSARSEPSEKGGRAPLSRKSSTPKTATRGPSGSASSRPGVSATPPKSPVYLDLAYLPSGSSAHLVDEEFFQRVRALCYVISGQDQRKEEGMRAVLDALLASKQHWDRDLQVTLIPTFDSVAMHTWYAETHARHQALGITVLGSNSMVSMQDDAFPACKVEF

SEQ ID NO: 835871 - protein, 121 aa, Homo sapiens
LWVLVGRNRDLTDGLTTHCRPQGGAHKIREKPGGVSNARKGRRLGPRPEGQGAPPSLVVHSPHTPPLHLQVTLIPTFDSVAMHTWYAETHARHQALGITVLGSNSMVSMQDDAFPACKVEF

SEQ ID NO: 835872 - protein, 617 aa, Homo sapiens
MSSLPTSDGFNHPARSSGQSPDVGNPMSLARSVSASVCPIKPSDSDRIEPKAVKALKASAEFQLNSEKKEHLSLQDLSDHASSADHAPTDQSPAMPMQNSSEEITVAGNLEKSAERSTQGLKFHLHTRQEASLSVTSTRMHEPQMFLGEKDWHPENQNLSQVSDPQQHEEPGNEQYEVAQQKASHDQEYLCNIGDLELPEERQQNQHKIVDLEATMKGNGLPQNVDPPSAKKSIPSSECSGCSNSETFMEIDTAQQSLVTLLNSTGRQNANVKNIGALDLTLDNPLMEVETSKCNPSSEILNDSISTQDLQPPETNVEIPGTNKEYGHYSSPSLCGSCQPSVESAEESCPSITAALKELHELLVVSSKPASENTSEEVICQSETIAEGQTSIKDLSERWTQNEHLTQNEQCPQVSFHQAISVSVETEKLTGTSSDTGREAVENVNFRSLGDGLSTDKEGVPKSRESINKNRSVTVTSAKTSNQLHCTLGVEISPKLLAGEEDALNQTSEQTKSLSSNFILVKDLGQGIQNSVTDRPETRENVCPDASRPLLEYEPPTSHPSSSPAILPPLIFPATDIDRILRAGFTLQEALGALHRVGGNADLALLVLLAKNIVVPT

SEQ ID NO: 835873 - protein, 617 aa, Homo sapiens; identical to SEQ ID NO: 835872

SEQ ID NO: 835874 - protein, 186 aa, Homo sapiens
PPGAQMTIMSQACAERCNIMRLVDRRWAGIAKGVGTQKIIGRVHLAQVQIEGDFLPCSFSILEEQPMDMLLGLDMLKRHQCSIDLKKNVLVIGTTGSQTTFLPEGELPECARLAYGAGREDVRPEEIADQELAEALQKSAEDADCCVYCERMEATNKYFGCPNYRNIPQLGIYQFLILKMAKERKL

SEQ ID NO: 835875 - protein, 617 aa, Homo sapiens; identical to SEQ ID NO: 835872

SEQ ID NO: 835876 - protein, 168 aa, Homo sapiens
PPGAQMTIMSQACAERCNIMRLVDRRWAGIAKGVGTQKIIGRVHLAQVQIEGDFLPCSFSILEEQPMDMLLGLDMLKRHQCSIDLKKNVLVIGTTGSQTTFLPEGELPECARLAYGAGREDVRPEEIADQELAEALQKSAEDAGIWDGQTLQYLLLMGKPGKCGLQKG

SEQ ID NO: 835877 - protein, 350 aa, Homo sapiens
MSAACWEEPWGLPGGFAKRVLVTGGAGFIASHMIVSLVEDYPNYMIINLDKLDYCASLKNLETISNKQNYKFIQGDICDSHFVKLLFETEKIDIVLHFAAQTHVDLSFVRAFEFTYVNVYGTHVLVSAAHEARVEKFIYVSTDEVYGGSLDKEFDESSPKQPTNPYASSKAAAECFVQSYWEQYKFPVVITRSSNVYGPHQYPEKVIPKFISLLQHNRKCCIHGSGLQTRNFLYATDVVEAFLTVLKKGKPGEIYNIGTNFEMSVVQLAKELIQLIKETNSESEMENWVDYVNDRPTNDMRYPMKSEKIHGLGWRPKVPWKEGIKKTIEWYRENFHNWKNVEKALEPFPV

SEQ ID NO: 835878 - protein, 318 aa, Homo sapiens
MIVSLVEDYPNYMIINLDKLDYCASLKNLETISNKQNYKFIQGDICDSHFVKLLFETEKIDIVLHFAAQTHVDLSFVRAFEFTYVNVYGTHVLVSAAHEARVEKFIYVSTDEVYGGSLDKEFDESSPKQPTNPYASSKAAAECFVQSYWEQYKFPVVITRSSNVYGPHQYPEKVIPKFISLLQHNRKCCIHGSGLQTRNFLYATDVVEAFLTVLKKGKPGEIYNIGTNFEMSVVQLAKELIQLIKETNSESEMENWVDYVNDRPTNDMRYPMKSEKIHGLGWRPKVPWKEGIKKTIEWYRENFHNWKNVEKALEPFPV

SEQ ID NO: 835879 - protein, 104 aa, Homo sapiens
PEAASGCSVNVSRERGASQKVAAELPCAFQTILFTVLGTAELGDVGGVLGGTVGSSRRLCEAGPGDRRCWFHCITYDCLFSGRLSKLYDHKSRQAGLLCKLEES

SEQ ID NO: 835880 - protein, 405 aa, Homo sapiens
SQCGRDRKEQICFFAGRIWKDAADQSFAHWLPRGGLGKWKPAFRCGTRSLVARGRCLGLESRTSGVGKERIPPFAAAAATLEVHASHMIVSLVEDYPNYMIINLDKLDYCASLKNLETISNKQNYKFIQGDICDSHFVKLLFETEKIDIVLHFAAQTHVDLSFVRAFEFTYVNVYGTHVLVSAAHEARVEKFIYVSTDEVYGGSLDKEFDESSPKQPTNPYASSKAAAECFVQSYWEQYKFPVVITRSSNVYGPHQYPEKVIPKFISLLQHNRKCCIHGSGLQTRNFLYATDVVEAFLTVLKKGKPGEIYNIGTNFEMSVVQLAKELIQLIKETNSESEMENWVDYVNDRPTNDMRYPMKSEKIHGLGWRPKVPWKEGIKKTIEWYRENFHNWKNVEKALEPFPV

SEQ ID NO: 835881 - protein, 330 aa, Homo sapiens
MSAACWEEPWGLPGGFAKRVLVTGGAGFIASHMIVSLVEDYPNYMIINLDKLDYCASLKNLETISNKQNYKFIQGDICDSHFVKLLFETEKIDIVLHFAAQTHVDLSFVRAFEFTYVNVYGTHVLVSAAHEARVEKFIYVSTDEVYGGSLDKEFDESSPKQPTNPYASSKAAAECFVQSYWEQYKFPVVITRSSNVYGPHQYPEKVIPKFISLLQHNRKCCIHGSGLQTRNFLYATDVVEAFLTVLKKGKPGEIYNIGTNFEMSVVQLAKELIQLIKETNSESEMENWVDYVNDRPTNDMRYPMKSEKIHGLGWRPKVPWKEGIKKTSMF

SEQ ID NO: 835882 - protein, 350 aa, Homo sapiens; identical to SEQ ID NO: 835877

SEQ ID NO: 835883 - protein, 242 aa, Homo sapiens
MSAACWEEPWGLPGGFAKRVLVTGGAGFIASHMIVSLVEDYPNYMIINLDKLDYCASLKNLETISNKQNYKFIQGDICDSHFVKLLFETEKIDIVLHFAAQTHVDLSFVRAFEFTYVNVYGTHVLVSAAHEARVEKFIYVSTDEVYGGSLDKEFDESSPKQPTNPYASSKAAAECFVQSYWEQYKFPVVITRSSNVYGPHQYPEKVFQNLYLCSAHQEMFDYWVGLKQELLFTTDVKTIFIA

SEQ ID NO: 835884 - protein, 330 aa, Homo sapiens; identical to SEQ ID NO: 835881

SEQ ID NO: 835885 - protein, 101 aa, Homo sapiens
PEAASGCSVNVSRERGASQKVAAELPCAFQTILFTVLGTAELGDVGGVLGGTVGSSRRLCEAGPGDRRCWFHVGNGAASQAVAPQKPLPFPAALLALVHHI

SEQ ID NO: 835886 - protein, 142 aa, Homo sapiens
MAVAAVKWVMSKRTILKHLFPVQNGALYCVCHKSTYSPLPDDYNCNVELALTSDGRTIVCYHPSVDIPYEHTKPIPRPDPVHNNEETHDQVLKTRLEEKVEHLEEGPMIEQLSKMFFTTKHRWYPHGRYHRCRKNLNPPKDR

SEQ ID NO: 835887 - protein, 142 aa, Homo sapiens; identical to SEQ ID NO: 835886

SEQ ID NO: 835888 - protein, 142 aa, Homo sapiens; identical to SEQ ID NO: 835886

SEQ ID NO: 835889 - protein, 142 aa, Homo sapiens; identical to SEQ ID NO: 835886

SEQ ID NO: 835890 - protein, 155 aa, Homo sapiens
MAVAAVKWVMSKRTILKHLFPVQNGALYCVCHKSTYSPLPDDYNCNVELALTSDGRTIVCYHPSVDIPYEHTKPIPRPDPVHNNEETHDQVLKTRLEEKVEHLEEGPMIEQLSKMFFTTKHRWYPHGRGKVSLTVLRRLILNSWTQVILLPQLGL

SEQ ID NO: 835891 - protein, 142 aa, Homo sapiens; identical to SEQ ID NO: 835886

SEQ ID NO: 835892 - protein, 142 aa, Homo sapiens; identical to SEQ ID NO: 835886

SEQ ID NO: 835893 - protein, 142 aa, Homo sapiens; identical to SEQ ID NO: 835886

SEQ ID NO: 835894 - protein, 167 aa, Homo sapiens
MAVAAVKWVMSKRTILKHLFPVQNGALYCVCHKSTYSPLPDDYNCNVELALTSDGRTIVCYHPSVDIPYEHTKPIPRPDPVHNNEETHDQVLKTRLEEKVEHLEEGPMIEQLSKMFFTTKHRWYPHGRYHRCRKNLNLCLICHLRKCSLVYSVIYSKVIMIKYLFIY

SEQ ID NO: 835895 - protein, 142 aa, Homo sapiens; identical to SEQ ID NO: 835886

SEQ ID NO: 835896 - protein, 142 aa, Homo sapiens; identical to SEQ ID NO: 835886

SEQ ID NO: 835897 - protein, 142 aa, Homo sapiens; identical to SEQ ID NO: 835886

SEQ ID NO: 835898 - protein, 142 aa, Homo sapiens; identical to SEQ ID NO: 835886

SEQ ID NO: 835899 - protein, 142 aa, Homo sapiens; identical to SEQ ID NO: 835886

SEQ ID NO: 835900 - protein, 142 aa, Homo sapiens; identical to SEQ ID NO: 835886

SEQ ID NO: 835901 - protein, 142 aa, Homo sapiens; identical to SEQ ID NO: 835886

SEQ ID NO: 835902 - protein, 142 aa, Homo sapiens; identical to SEQ ID NO: 835886

SEQ ID NO: 835903 - protein, 154 aa, Homo sapiens
MADIDNKEQSELDQDLDDVEEVEEEETGEETKLKARQLTVQMMQNPQILAALQERLDGLVETPTGYIESLPRVVKRRVNALKNLQVKCAQIEAKFYEEVHDLERKYAVLYQPLFDKRFEIINAIYEPTEEECEWKPDEEDEISEELKEKAKIER

SEQ ID NO: 835904 - protein, 158 aa, Homo sapiens
MRSEPDDSDPFSFDGPEIMGCTGCQIDWKHTGKNVTLKTIKKKQKHKGRGTVRTVTKTVSNDSFFNFFAPPEVPESGDLDDDAEAILAADFEIGHFLRERIIPRSVLYFTGEAIEDDDDDYDEEGEEADEEGEEEGDEENDPDYDPKKDQNPAECKQQ

SEQ ID NO: 835905 - protein, 92 aa, Homo sapiens
EDSLTEEFQSGDLDDDAEAILAADFEIGHFLRERIIPRSVLYFTGEAIEDDDDDYDEEGEEADEEGEEEGDEENDPDYDPKKDQNPAECKQQ

SEQ ID NO: 835906 - protein, 110 aa, Homo sapiens
AQLRSYSVDPLCEPDEFFEKLFEFLFDLFNNKSKTPSQKKKDFEIGHFLRERIIPRSVLYFTGEAIEDDDDDYDEEGEEADEEGEEEGDEENDPDYDPKKDQNPAECKQQ

SEQ ID NO: 835907 - protein, 72 aa, Homo sapiens
TRGSTHASREAKFYEEVHDLERKYAVLYQPLFDKRFEIINAIYEPTEEECEWKPDEEDEISEELKEKAKIER

SEQ ID NO: 835908 - protein, 171 aa, Homo sapiens
MITNSWPCSGDIWSSYNMADIDNKEQSELDQDLDDVEEVEEEETGEETKLKARQLTVQMMQNPQILAALQERLDGLVETPTGYIESLPRVVKRRVNALKNLQVKCAQIEAKFYEEVHDLERKYAVLYQPLFDKRFEIINAIYEPTEEECEWKPDEEDEISEELKEKAKIER

SEQ ID NO: 835909 - protein, 171 aa, Homo sapiens; identical to SEQ ID NO: 835908

SEQ ID NO: 835910 - protein, 171 aa, Homo sapiens; identical to SEQ ID NO: 835908

SEQ ID NO: 835911 - protein, 171 aa, Homo sapiens; identical to SEQ ID NO: 835908

SEQ ID NO: 835912 - protein, 171 aa, Homo sapiens; identical to SEQ ID NO: 835908

SEQ ID NO: 835913 - protein, 171 aa, Homo sapiens; identical to SEQ ID NO: 835908

SEQ ID NO: 835914 - protein, 171 aa, Homo sapiens; identical to SEQ ID NO: 835908

SEQ ID NO: 835915 - protein, 171 aa, Homo sapiens; identical to SEQ ID NO: 835908

SEQ ID NO: 835916 - protein, 171 aa, Homo sapiens; identical to SEQ ID NO: 835908

SEQ ID NO: 835917 - protein, 171 aa, Homo sapiens; identical to SEQ ID NO: 835908

SEQ ID NO: 835918 - protein, 171 aa, Homo sapiens; identical to SEQ ID NO: 835908

SEQ ID NO: 835919 - protein, 171 aa, Homo sapiens; identical to SEQ ID NO: 835908

SEQ ID NO: 835920 - protein, 171 aa, Homo sapiens; identical to SEQ ID NO: 835908

SEQ ID NO: 835921 - protein, 171 aa, Homo sapiens; identical to SEQ ID NO: 835908

SEQ ID NO: 835922 - protein, 171 aa, Homo sapiens; identical to SEQ ID NO: 835908

SEQ ID NO: 835923 - protein, 171 aa, Homo sapiens; identical to SEQ ID NO: 835908

SEQ ID NO: 835924 - protein, 171 aa, Homo sapiens; identical to SEQ ID NO: 835908

SEQ ID NO: 835925 - protein, 171 aa, Homo sapiens; identical to SEQ ID NO: 835908

SEQ ID NO: 835926 - protein, 171 aa, Homo sapiens; identical to SEQ ID NO: 835908

SEQ ID NO: 835927 - protein, 171 aa, Homo sapiens; identical to SEQ ID NO: 835908

SEQ ID NO: 835928 - protein, 171 aa, Homo sapiens; identical to SEQ ID NO: 835908

SEQ ID NO: 835929 - protein, 120 aa, Homo sapiens
QRRLDTGGNQRSPSAAPGPRGCRSPRWGYGGRRGRRTVQLLGNPAWTRLSLALLGDYKAGRRAAKGPYVLTLIVYERERRALGSFLAPSARGAASCSSRCCCRCRPESLPAQLRPPGSPY

SEQ ID NO: 835930 - protein, 112 aa, Homo sapiens
MQNPQILAALQERLDGLVETPTGYIESLPRVVKRRVNALKNLQVKCAQIEAKFYEEVHDLERKYAVLYQPLFDKRFEIINAIYEPTEEECEWKPDEEDEISEELKEKAKIER

SEQ ID NO: 835931 - protein, 159 aa, Homo sapiens
HSRPPNTRRTAFESGRGDPFLLMDQKLMGCTWCQIDWKHTGKNVTLKTIKKKQKHKGRGTVRTVTKTVSNDSFFNFFAPPEVPESGDLDDDAEAILAADFEIGHFLRERIIPRSVLYFTGEAIEDDDDDYDEEGEEADEGYQLFEEVKSCSKLFQRWLQ

SEQ ID NO: 835932 - protein, 128 aa, Homo sapiens
TGRLYSTGRGRGTVRTVTKTVSNDSFFNFFAPPEVPESGDLDDDAEAILAADFEIGHFLRERIIPRSVLYFTGEAIEDDDDDYDEEGEEADEEGEEEGDEENDPDYDPKKDQTQQSTAGGVHLPWGRP

SEQ ID NO: 835933 - protein, 171 aa, Homo sapiens; identical to SEQ ID NO: 835908

SEQ ID NO: 835934 - protein, 171 aa, Homo sapiens; identical to SEQ ID NO: 835908

SEQ ID NO: 835935 - protein, 171 aa, Homo sapiens; identical to SEQ ID NO: 835908

SEQ ID NO: 835936 - protein, 171 aa, Homo sapiens; identical to SEQ ID NO: 835908

SEQ ID NO: 835937 - protein, 171 aa, Homo sapiens; identical to SEQ ID NO: 835908

SEQ ID NO: 835938 - protein, 171 aa, Homo sapiens; identical to SEQ ID NO: 835908

SEQ ID NO: 835939 - protein, 171 aa, Homo sapiens; identical to SEQ ID NO: 835908

SEQ ID NO: 835940 - protein, 171 aa, Homo sapiens; identical to SEQ ID NO: 835908

SEQ ID NO: 835941 - protein, 171 aa, Homo sapiens; identical to SEQ ID NO: 835908

SEQ ID NO: 835942 - protein, 171 aa, Homo sapiens; identical to SEQ ID NO: 835908

SEQ ID NO: 835943 - protein, 171 aa, Homo sapiens; identical to SEQ ID NO: 835908

SEQ ID NO: 835944 - protein, 171 aa, Homo sapiens; identical to SEQ ID NO: 835908

SEQ ID NO: 835945 - protein, 171 aa, Homo sapiens; identical to SEQ ID NO: 835908

SEQ ID NO: 835946 - protein, 171 aa, Homo sapiens; identical to SEQ ID NO: 835908

SEQ ID NO: 835947 - protein, 171 aa, Homo sapiens; identical to SEQ ID NO: 835908

SEQ ID NO: 835948 - protein, 171 aa, Homo sapiens; identical to SEQ ID NO: 835908

SEQ ID NO: 835949 - protein, 475 aa, Homo sapiens
MADMQNLVERLERAVGRLEAVSHTSDMHRGYADSPSKAGAAPYVQAFDSLLAGPVAEYLKISKEIGGDVQKHAEMVHTGLKLERALLVTASQCQQPAENKLSDLLAPISEQIKEVITFREKNRGSKLFNHLSAVSESIQALGWVAMAPKPGPYVKEMNDAAMFYTNRVLKEYKDVDKKHVDWVKAYLSIWTELQAYIKEFHTTGLAWSKTGPVAKELSGLPSGPSAGSGPPPPPPGPPPPPVSTSSGSDESASRSALFAQINQGESITHALKHVSDDMKTHKNPALKAQSGPVRSGPKPFSAPKPQTSPSPKRATKKEPAVLELEGKKWRVENQENVSNLVIEDTELKQVAYIYKCVNTTLQIKGKINSITVDNCKKLGLVFDDVVGIVEIINSKDVKVQVMGKVPTISINKTDGCHAYLSKNSLDCEIVSAKSSEMNVLIPTEGGDFNEFPVPEQFKTLWNGQKLVTTVTEIAG

SEQ ID NO: 835950 - protein, 317 aa, Homo sapiens
MADMQNLVERLERAVGRLEAVSHTSDMHRGYADSPSKAGAAPYVQAFDSLLAGPVAEYLKISKEIGGDVQKHAEMVHTGLKLERALLVTASQCQQPAENKLSDLLAPISEQIKEVITFREKNRGSKLFNHLSAVSESIQALGWVAMAPKPGPYVKEMNDAAMFYTNRVLKEYKDVDKKHVDWVKAYLSIWTELQAYIKEFHTTGLAWSKTRGLWAKRNGTGTGISGNPLPEEGRTSPINRGPVQYPRNLTSEGKKSMDEGSSGSEGRKGGEQKCTKGGDEERKTGKFKRKRRHKYGDTLRRHKENTNGTNEKRRKGK

SEQ ID NO: 835951 - protein, 475 aa, Homo sapiens; identical to SEQ ID NO: 835949

SEQ ID NO: 835952 - protein, 475 aa, Homo sapiens; identical to SEQ ID NO: 835949

SEQ ID NO: 835953 - protein, 475 aa, Homo sapiens; identical to SEQ ID NO: 835949

SEQ ID NO: 835954 - protein, 464 aa, Homo sapiens
MADMQNLVERLERAVGRLEAVSHTSDMHRGYADSPSKAGAAPYVQAFDSLLAGPVAEYLKISKEIGGDVQKHAEMVHTGLKLERALLVTASQCQQPAENKLSDLLAPISEQIKEVITFREKNRGSKLFNHLSAVSESIQALGWVAMAPKPGPYVKEMNDAAMFYTNRVLKEYKDVDKKHVDWVKAYLSIWTELQAYIKEFHTTGLAWSKTGPVAKELSGLPSGPSAGSGPPPPSSGSDESASRSALFAQINQGESITHALKHVSDDMKTHKNPALKAQSGPVRSGPKPFSAPKPQTSPSPKRATKKEPAVLELEGKKWRVENQENVSNLVIEDTELKQVAYIYKCVNTTLQIKGKINSITVDNCKKLGLVFDDVVGIVEIINSKDVKVQVMGKVPTISINKTDGCHAYLSKNSLDCEIVSAKSSEMNVLIPTEGGDFNEFPVPEQFKTLWNGQKLVTTVTEIAG

SEQ ID NO: 835955 - protein, 475 aa, Homo sapiens; identical to SEQ ID NO: 835949

SEQ ID NO: 835956 - protein, 475 aa, Homo sapiens; identical to SEQ ID NO: 835949

SEQ ID NO: 835957 - protein, 452 aa, Homo sapiens
MGGTRRGYADSPSKAGAAPYVQAFDSLLAGPVAEYLKISKEIGGDVQKHAEMVHTGLKLERALLVTASQCQQPAENKLSDLLAPISEQIKEVITFREKNRGSKLFNHLSAVSESIQALGWVAMAPKPGPYVKEMNDAAMFYTNRVLKEYKDVDKKHVDWVKAYLSIWTELQAYIKEFHTTGLAWSKTGPVAKELSGLPSGPSAGSGPPPPPPGPPPPPVSTSSGSDESASRSALFAQINQGESITHALKHVSDDMKTHKNPALKAQSGPVRSGPKPFSAPKPQTSPSPKRATKKEPAVLELEGKKWRVENQENVSNLVIEDTELKQVAYIYKCVNTTLQIKGKINSITVDNCKKLGLVFDDVVGIVEIINSKDVKVQVMGKVPTISINKTDGCHAYLSKNSLDCEIVSAKSSEMNVLIPTEGGDFNEFPVPEQFKTLWNGQKLVTTVTEIAG

SEQ ID NO: 835958 - protein, 490 aa, Homo sapiens
FAAASTEKTTEGGGERLIAVRSRWSIMADMQNLVERLERAVGRLEAVSHTSDMHRGYADSPSKAGAAPYVQAFDSLLAGPVAEYLKISKEIGGDVQKHAEMVHTGLKLERALLVTASQCQQPAENKLSDLLAPISEQIKEVITFREKNRGSKLFNHLSAVSESIQALGWVAMAPKPGPYVKEMNDAAMFYTNRVLKEYKDVDKKHVDWVKAYLSIWTELQAYIKEFHTTGLAWSKTGPVAKELSGLPSGPSAGSGPPPPSSGSDESASRSALFAQINQGESITHALKHVSDDMKTHKNPALKAQSGPVRSGPKPFSAPKPQTSPSPKRATKKEPAVLELEGKKWRVENQENVSNLVIEDTELKQVAYIYKCVNTTLQIKGKINSITVDNCKKLGLVFDDVVGIVEIINSKDVKVQVMGKVPTISINKTDGCHAYLSKNSLDCEIVSAKSSEMNVLIPTEGGDFNEFPVPEQFKTLWNGQKLVTTVTEIAG

SEQ ID NO: 835959 - protein, 475 aa, Homo sapiens; identical to SEQ ID NO: 835949

SEQ ID NO: 835960 - protein, 211 aa, Homo sapiens
MADMQNLVERLERAVGRLEAVSHTSDMHRGYADSPSKAGAAPYVQAFDSLLAGPVAEYLKISKEIGGDVQKHAEMVHTGLKLERALLVTASQCQQPAENKLSDLLAPISEQIKEVITFREKNRGSKLFNHLSAVSESIQALGWVAMAPKPGPYVKEMNDAAMFYTNRVLKEYKDVDKKHVDWVKAYLSIWTELQAYIKEFHTTGLAWSKTP

SEQ ID NO: 835961 - protein, 302 aa, Homo sapiens
MADMQNLVERLERAVGRLEAVSHTSDMHRGYADSPSKAGAAPYVQAFDSLLAGPVAEYLNPPGPPPPPVSTSSGSDESASRSALFAQINQGESITHALKHVSDDMKTHKNPALKAQSGPVRSGPKPFSAPKPQTSPSPKRATKKEPAVLELEGKKWRVENQENVSNLVIEDTELKQVAYIYKCVNTTLQIKGKINSITVDNCKKLGLVFDDVVGIVEIINSKDVKVQVMGKVPTISINKTDGCHAYLSKNSLDCEIVSAKSSEMNVLIPTEGGDFNEFPVPEQFKTLWNGQKLVTTVTEIAG

SEQ ID NO: 835962 - protein, 178 aa, Homo sapiens
MADMQNLVERLERAVGRLEAVSHTSDMHRGYADSPSKAGAAPYVQAFDSLLAGPVAEYLKISKEIGGDVQKHAEMVHTGLKLERALLVTASQCQQPAENKLSDLLAPISEQIKEVITFREKNRGSKLFNHLSAVSESIQALGWVAMAPKPGPYVKEMNDAAMFYTNRETSHKEGASCT

SEQ ID NO: 835963 - protein, 475 aa, Homo sapiens; identical to SEQ ID NO: 835949

SEQ ID NO: 835964 - protein, 428 aa, Homo sapiens
MADMQNLVERLERAVGRLEAVSHTSDMHRGYADSPSKAGAAPYVQAFDSLLAGPVAEYLKISKEIGGDVQKHAEMVHTGLKLERALLVTASQCQQPAENKLSDLLAPISEQIKEVITFREKNRGSKLFNHLSAVSESIQALGWVAMAPKPGPYVKEMNDAAMFYTNRVLKEYKDVDKKHVDWVKAYLSIWTELQAYIKEFHTTGLAWSKTGPVAKELSGLPSGPSAGSGPPPPPPGPPPPPVSTSSGSDESASRSALFAQINQGESITHALKHVSDDMKTHKNPALKAQSGPVRSGPKPFSAPKPQTSPSPKRATKKEPAVLELEGKKWRVENQENVSNLVIEDTELKQVAYIYKCVNTTLQIKGKINSITVDNCKKLGLVFDDVVGIVEIINSKDVKVQVMGKVPTISINASRHSSEMNCLIPTERP

SEQ ID NO: 835965 - protein, 401 aa, Homo sapiens
MADMQNLVERLERAVGRLEAVSHTSDMHRGYADSPSKAGAAPYVQAFDSLLAGPVAEYLKISKEIGGDVQKHAEMVHTGLKLERALLVTASQCQQPAENKLSDLLAPISEQIKEVITFREKNRGSKLFNHLSAVSESIQALGWVAMAPKPGPYVKEMNDAAMFYTNRVLKEYKDVDKKHVDWVKAYLSIWTELQAYIKEFHTTGLAWSKTGPVAKELSGLPSGPSAGSGPPPPPPGPPPPPVSTSSGSDESASRSALFAQINQGESITHALKHVSDDMKTHKNPALKAQSGPVRSGPKPFSAPKPQTSPSPKRATKKEPAVLELEGKKWRVENQENVSNLVIEDTELKQVAYIYKCVNTTLQIKGKINSITVDNCKKLGLELRRVAHAESPDLSSTSTFLP

SEQ ID NO: 835966 - protein, 274 aa, Homo sapiens
MADMQNLVERLERAVGRLEAVSHTSDMHRGYADSPSKAGAAPYVQAFDSLLAGPVAEYLKISKEIGGDVQKHAEMVHTGLKLERALLVTASQCQQPAENKLSDLLAPISEQIKEVITFREKNRGSKLFNHLSAVSESIQALGWVAMAPKPGPYVKEMNDAAMFYTNRVLKEYKDVDKKHVDWVKAYLSIWTELQAYIKEFHTTGLAWSKTGPVAKELSGLPSGPSAGSGPPPPFTAYEQRAPVAHTQFVTSFTVQMSLVHRETCPAINKGEHSE

SEQ ID NO: 835967 - protein, 317 aa, Homo sapiens
MADMQNLVERLERAVGRLEAVSHTSDMHRGYADSPSKAGAAPYVQAFDSLLAGPVAEYLKISKEIGGDVQKHAEMVHTGLKLERALLVTASQCQQPAENKLSDLLAPISEQIKEVITFREKNRGSKLFNHLSAVSESIQALGWVAMAPKPGPYVKEMNDAAMFYTNRVLKEYKDVDKKHVDWVKAYLSIWTELQAYIKEFHTTGLAWSKTRGLWAKRNGSGTGISGNPLPEEGRTSPINRGPVQYPRNLTSEGKKSMDEGSSGSEGCKGGEQKCTKGGDEERKTGKFKRKRRHKYGDTLRRHKENTNGTNEKRRKGK

SEQ ID NO: 835968 - protein, 274 aa, Homo sapiens; identical to SEQ ID NO: 835966

SEQ ID NO: 835969 - protein, 198 aa, Homo sapiens
MADMQNLVERLERAVGRLEAVSHTSDMHRGYADSPSKAGAAPYVQAFDSLLAGPVAEYLKISKEIGGDVQKHAEMVHTGLKLERALLVTASQCQQPAENKLSDLLAPISEQIKEVITFREKNRGSKLFNHLSAVSESIQALGWVAMAPKPGPYVKEMNDAAMFYTNRVLKEYKDVDKKHCSRRIIRGESITHALNMYL

SEQ ID NO: 835970 - protein, 131 aa, Homo sapiens [sequence omitted]

SEQ ID NO: 835971 - protein, 475 aa, Homo sapiens; identical to SEQ ID NO: 835949

SEQ ID NO: 835972 - protein, 475 aa, Homo sapiens; identical to SEQ ID NO: 835949

SEQ ID NO: 835973 - protein, 501 aa, Homo sapiens
FAAASTEKTTEGGGERLIAVRSRWSIMADMQNLVERLERAVGRLEAVSHTSDMHRGYADSPSKAGAAPYVQAFDSLLAGPVAEYLKISKEIGGDVQKHAEMVHTGLKLERALLVTASQCQQPAENKLSDLLAPISEQIKEVITFREKNRGSKLFNHLSAVSESIQALGWVAMAPKPGPYVKEMNDAAMFYTNRVLKEYKDVDKKHVDWVKAYLSIWTELQAYIKEFHTTGLAWSKTGPVAKELSGLPSGPSAGSGPPPPPPGPPPPPVSTSSGSDESASRSALFAQINQGESITHALKHVSDDMKTHKNPALKAQSGPVRSGPKPFSAPKPQTSPSPKRATKKEPAVLELEGKKWRVENQENVSNLVIEDTELKQVAYIYKCVNTTLQIKGKINSITVDNCKKLGLVFDDVVGIVEIINSKDVKVQVMGKVPTISINKTDGCHAYLSKNSLDCEIVSAKSSEMNVLIPTEGGDFNEFPVPEQFKTLWNGQKLVTTVTEIAG

SEQ ID NO: 835974 - protein, 501 aa, Homo sapiens
VKDEAGVESAPRGEPADLQVRSRWSIMADMQNLVERLERAVGRLEAVSHTSDMHRGYADSPSKAGAAPYVQAFDSLLAGPVAEYLKISKEIGGDVQKHAEMVHTGLKLERALLVTASQCQQPAENKLSDLLAPISEQIKEVITFREKNRGSKLFNHLSAVSESIQALGWVAMAPKPGPYVKEMNDAAMFYTNRVLKEYKDVDKKHVDWVKAYLSIWTELQAYIKEFHTTGLAWSKTGPVAKELSGLPSGPSAGSGPPPPPPGPPPPPVSTSSGSDESASRSALFAQINQGESITHALKHVSDDMKTHKNPALKAQSGPVRSGPKPFSAPKPQTSPSPKRATKKEPAVLELEGKKWRVENQENVSNLVIEDTELKQVAYIYKCVNTTLQIKGKINSITVDNCKKLGLVFDDVVGIVEIINSKDVKVQVMGKVPTISINKTDGCHAYLSKNSLDCEIVSAKSSEMNVLIPTEGGDFNEFPVPEQFKTLWNGQKLVTTVTEIAG

SEQ ID NO: 835975 - protein, 479 aa, Homo sapiens
VKDEAACSIGTEERLERAVGRLEAVSHTSDMHRGYADSPSKAGAAPYVQAFDSLLAGPVAEYLKISKEIGGDVQKHAEMVHTGLKLERALLVTASQCQQPAENKLSDLLAPISEQIKEVITFREKNRGSKLFNHLSAVSESIQALGWVAMAPKPGPYVKEMNDAAMFYTNRVLKEYKDVDKKHVDWVKAYLSIWTELQAYIKEFHTTGLAWSKTGPVAKELSGLPSGPSAGSGPPPPPPGPPPPPVSTSSGSDESASRSALFAQINQGESITHALKHVSDDMKTHKNPALKAQSGPVRSGPKPFSAPKPQTSPSPKRATKKEPAVLELEGKKWRVENQENVSNLVIEDTELKQVAYIYKCVNTTLQIKGKINSITVDNCKKLGLVFDDVVGIVEIINSKDVKVQVMGKVPTISINKTDGCHAYLSKNSLDCEIVSAKSSEMNVLIPTEGGDFNEFPVPEQFKTLWNGQKLVTTVTEIAG

SEQ ID NO: 835976 - protein, 463 aa, Homo sapiens
MADMQNLVERLERAVGRLEAVSHTSDMHRGYADSPSKAGAAPYVQAFDSLLAGPVAEYLKISKEIGGDVQKHAEMVHTGLKLERALLVTASQCQQPAEQIKEVITFREKNRGSKLFNHLSAVSESIQALGWVAMAPKPGPYVKEMNDAAMFYTNRVLKEYKDVDKKHVDWVKAYLSIWTELQAYIKEFHTTGLAWSKTGPVAKELSGLPSGPSAGSGPPPPPPGPPPPPVSTSSGSDESASRSALFAQINQGESITHALKHVSDDMKTHKNPALKAQSGPVRSGPKPFSAPKPQTSPSPKRATKKEPAVLELEGKKWRVENQENVSNLVIEDTELKQVAYIYKCVNTTLQIKGKINSITVDNCKKLGLVFDDVVGIVEIINSKDVKVQVMGKVPTISINKTDGCHAYLSKNSLDCEIVSAKSSEMNVLIPTEGGDFNEFPVPEQFKTLWNGQKLVTTVTEIAG

SEQ ID NO: 835977 - protein, 272 aa, Homo sapiens
MQTVLQKGPVAKELSGLPSGPSAGSGPPPPPPGPPPPPVSTSSGSDESASRSALFAQINQGESITHALKHVSDDMKTHKNPALKAQSGPVRSGPKPFSAPKPQTSPSPKRATKKEPAVLELEGKKWRVENQENVSNLVIEDTELKQVAYIYKCVNTTLQIKGKINSITVDNCKKLGLVFDDVVGIVEIINSKDVKVQVMGKVPTISINKTDGCHAYLSKNSLDCEIVSAKSSEMNVLIPTEGGDFNEFPVPEQFKTLWNGQKLVTTVTEIAG

SEQ ID NO: 835978 - protein, 475 aa, Homo sapiens; identical to SEQ ID NO: 835949

SEQ ID NO: 835979 - protein, 232 aa, Homo sapiens
MPPCFIQTESRSALFAQINQGESITHALKHVSDDMKTHKNPALKAQSGPVRSGPKPFSAPKPQTSPSPKRATKKEPAVLELEGKKWRVENQENVSNLVIEDTELKQVAYIYKCVNTTLQIKGKINSITVDNCKKLGLVFDDVVGIVEIINSKDVKVQVMGKVPTISINKTDGCHAYLSKNSLDCEIVSAKSSEMNVLIPTEGGDFNEFPVPEQFKTLWNGQKLVTTVTEIAG

SEQ ID NO: 835980 - protein, 455 aa, Homo sapiens
MADMQNLVERLERAVGRLEAVSHTSDMHRGYADSPSKAGAAPYVQAFDSLLAGPVAEYLKISKEIGGDVQKHAEMVHTGLKLERALLVTASQCQQPAENKLSDLLAPISEQIKEVITFREKNRGSKLFNHLSAVSESIQALGWVAMAPKPGPYVKEMNDAAMFYTNRVLKEYKDVDKKHVDWVKAYLSIWTELQAYIKEFHTTGLAWSKTGPVAKELSGLPSGPSAGSGPPPPPPGPPPPPVSTSSGSDESASRSALFAQINQGESITHALKHVSDDMKTHKNPALKAQSGPVRSGPKPFSAPKPQTSPSPKRATKKEPAVLELEGKKWRVENQENVSNLVIEDTELKQVAYIYKCVNTTLQIKGKINSITVDNCKKLGLVFDDVVGIVEIINSKDVKVQVMGKVPTISINKTDGCHAYLSKNSLDCEIVSAKSSEMNVLIPTEGGDFAALRYRL

SEQ ID NO: 835981 - protein, 409 aa, Homo sapiens
MADMQNLVERLERAVGRLEAVSHTSDMHRGYADSPSKAGAAPYVQAFDSLLAGPVAEYLKISKEIGGDVQKHAEMVHTGLKLERALLVTASQCQQPAENKLSDLLAPISEQIKEVITFREKNRGSKLFNHLSAVSESIQALGWVAMAPKPGPYVKEMNDAAMFYTNRVLKEYKDVDKKHVDWVKAYLSIWTELQAYIKEFHTTGLAWSKTGPVAKELSGLPSGPSAGSGPPPPPPGPPPPPVSTSSGSDESASRSALFAQINQGESITHALKHVSDDMKTHKNPALKAQSGPVRSGPKPFSAPKPQTSPSPKRATKKEPAVLELEGKKWRVENQENVSNLVIEDTELKQVAYIYKCVNTTLQIKGKINSITVDNCKKLGLVFDDVVGIVEIINSKDVKVQVMVIPGPSS

SEQ ID NO: 835982 - protein, 278 aa, Homo sapiens
MADMQNLVERLERAVGRLEAVSHTSDMHRGYADSPSKAGAAPYVQAFDSLLAGPVAEYLKISKEIGGDVQKHAEMVHTGLKLERALLVTASQCQQPAENKLSDLLAPISEQIKEVITFREKNRGSKLFNHLSAVSESIQALGWVAMAPKPGPYVKEMNDAAMFYTNRVLKEYKDVDKKHVDWVKAYLSIWTELQAYIKEFHTTGLAWSKTGPVAKELSGLPSGPSAGSGPPPPRYQKGTRSVAQASQSQAQKSLVPDQHGTSRIKQGARHNKCPEKCS

SEQ ID NO: 835983 - protein, 248 aa, Homo sapiens
MADMQNLVERLERAVGRLEAVSHTSDMHRGYADSPSKAGAAPYVQAFDSLLAGPVAEYLKISKEIGGDVQKHAEMVHTGLKLERALLVTASQCQQPAENKLSDLLAPISEQIKEVITFREKNRGSKLFNHLSAVSESIQALGWVAMAPKPGPYVKEMNDAAMFYTNRVLKEYKDVDKKHVDWVKAYLSIWTELQAYIKEFHTTGLAWSKTWALEATNGGLVRYRTWSWTDHLGAFCPDLRVLLSTINK

SEQ ID NO: 835984 - protein, 178 aa, Homo sapiens; identical to SEQ ID NO: 835962

SEQ ID NO: 835985 - protein, 815 aa, Homo sapiens
MGSDKRVSRTERSGRYGSIIDRDDRDERESRSRRRDSDYKRSSDDRRGDRYDDYRDYDSPERERERRNSDRSEDGYHSDGDYGEHDYRHDISDERESKTIMLRGLPITITESDIREMMESFEGPQPADVRLMKRKTGVSRGFAFVEFYHLQDATSWMEANQKKLVIQGKHIAMHYSNPRPKFEDWLCNKCCLNNFRKRLKCFRCGADKFDSEQEVPPGTTESVQSVDYYCDTIILRNIAPHTVVDSIMTALSPYASLAVNNIRLIKDKQTQQNRGFAFVQLSSAMDASQLLQILQSLHPPLKIDGKTIGVDFAKSARKDLVLSDGNRVSAFSVASTAIAAAQWSSTQSQSGEGGSVDYSYLQPGQDGYAQYAQYSQDYQQFYQQQAGGLESDASSASGTAVTTTSAAVVSQSPQLYNQTSNPPGSPTEEAQPSTSTSTQAPAASPTGVVPGTKYAVPDTSTYQYDESSGYYYDPTTGLYYDPNSQYYYNSLTQQYLYWDGEKETYVPAAESSSHQQSGLPPAKEGKEKKEKPKSKTAQQIAKDMERWAKSLNKQKENFKNSFQPVNSLREEERRESAAADAGFALFEKKGALAERQQLIPELVRNGDEENPLKRGLVAAYSGDSDNEEELVERLESEEEKLADWKKMACLLCRRQFPNKDALVRHQQLSDLHKQNMDIYRRSRLSEQELEALELREREMKYRDRAAERREKYGIPEPPEPKRKKQFDAGTVNYEQPTKDGIDHSNIGNKMLQAMGWREGSGLGRKCQGITAPIEAQVRLKGAGLGAKGSAYGLSGADSYKDAVRKAMFARFTEME

SEQ ID NO: 835986 - protein, 867 aa, Homo sapiens
MTWLQLTGKKKSHLVVLELVAFRIVLLRKNCNQIPFKNEFPSLSPQRTHPEAEGVGGRRNVKAFTLHKDGGLEEKGEAKPKDTMLRAKVRDSLRTERIVSSAFSSRLSHSGSLSMLNVRTSVSAGDTAWCKSAFSVVTAFSALPDSVYLYSASHSLTAYLKDWMGRVWWRWLVLPVCCPFNSRALIFPKCALPWENGHMFLTMGITNYFFFLQKKLVIQGKHIAMHYSNPRPKFEDWLCNKCCLNNFRKRLKCFRCGADKFDSEQEVPPGTTESVQSVDYYCDTIILRNIAPHTVVDSIMTALSPYASLAVNNIRLIKDKQTQQNRGFAFVQLSSAMDASQLLQILQSLHPPLKIDGKTIGVDFAKSARKDLVLSDGNRVSAFSVASTAIAAAQWSSTQSQSGEGGSVDYSYLQPGQDGYAQYAQYSQDYQQFYQQQAGGLESDASSASGTAVTTTSAAVVSQSPQLYNQTSNPPGSPTEEAQPSTSTSTQAPAASPTGVVPGTKYAVPDTSTYQYDESSGYYYDPTTGLYYDPNSQYYYNSLTQQYLYWDGEKETYVPAAESSSHQQSGLPPAKEGKEKKEKPKSKTAQQIAKDMERWAKSLNKQKENFKNSFQPVNSLREEERRESAAADAGFALFEKKGALAERQQLIPELVRNGDEENPLKRGLVAAYSGDSDNEEELVERLESEEEKLADWKKMACLLCRRQFPNKDALVRHQQLSDLHKQNMDIYRRSRLSEQELEALELREREMKYRDRAAERREKYGIPEPPEPKRKKQFDAGTVNYEQPTKDGIDHSNIGNKMLQAMGWREGSGLGRKCQGITAPIEAQVRLKGAGLGAKGSAYGLSGADSYKDAVRKAMFARFTEME

SEQ ID NO: 835987 - protein, 867 aa, Homo sapiens; identical to SEQ ID NO: 835986

SEQ ID NO: 835988 - protein, 216 aa, Homo sapiens
MTWLQLTGKKKSHLVVLELVAFRIVLLRKNCNQIPFKNEFPSLSPQRTHPEAEGVGGRRNVKAFTLHKDGGLEEKGEAKPKDTMLRAKVRDSLRTERIVSSAFSSRLSHSGSLSMLNVRTSVSAGDTAWCKSAFSVVTAFSALPDSVYLYSASHSLTAYLKDWMGRVWWRWLVLPVCCPFNSRALIFPKCALPWENGHMFLTMGITNYFFSYRKSW

SEQ ID NO: 835989 - protein, 770 aa, Homo sapiens
MTWLQLTGKKKSHLVVLELVAFRIVLLRKNCNQIPFKNEFPSLSPQRTHPEAEGVGGRRNVKAFTLHKDGGLEEKGEAKPKDTMLRAKVRDSLRTERIVSSAFSSRLSHSGSLSMLNVRTSVSAGDTAWCKSAFSVVTAFSALPDSVYLYSASHSLTAYLKDWMGRVWWRWLVLPVCCPFNSRALIFPKCALPWENGHMFLTMGITNYFFFLQKKLVIQGKHIAMHYSNPRPKFEDWLCNKCCLNNFRKRLKCFRCGADKFGKTGFSCLQYALKPTNWGREQWLTVIPPLCKAKVGRSLEDRSSIPAWQEIARPCLYKKRNFKFLGVVAHTCSPSYSGGLGERIAGVQELKAAVSYGHTTALQPGQQTRPCLSKKTKQKSDKVGLLTVSLRKSIDFSVLKQLVCFLYIFSLRLDNAAHDCESTESSFVFYELSLLTWFAFCICLSLVQGSVSPTVAQSLHSALTKSQLMRFYYRHKCLKKKKTMFCVVKIKTCGDFNVFLWWKYISCLSLIGSLSLLDSEQEVPPGTTESVQSVDYYCDTIILRNIAPHTVVDSIMTALSPYASLAVNNIRLIKDKQTQQNRGFAFVQLSSAMDASQLLQILQSLHPPLKIDGKTIGVDFAKSARKDLVLSDGNRVSAFSVASTAIAAAQWSSTQSQSGEGGSVDYSYLQPGQDGYAQYAQYSQDYQQFYQQQAGGLESDASSASGTAVTTTSAAVVSQSPQLYNQTSNPPGSPQYLTRPLTSMMNLQDITMIRQQGSIMTPTRNTTIIP

SEQ ID NO: 835990 - protein, 892 aa, Homo sapiens
MVAVDRKKKISFSCFRVGGIQNESLLRKNCNQIPFKNEFPSLSPQRTHPEAEGVGGRRNVKAFTLHKDGGTGEKGEAKPKDTMLRAKVRDSLRTERIVSSAFSSRLSHSGSLSMLNVRTSVSAGDTAWCKSAFSVVTAFSALPDSVYLYSASHSLTAYLKDWMGRVWWRWLVLPVCCPFNSRALIFPKCALPWENGHMFLTMGITNYFFFLQKKLVIQGKHIAMHYSNPRPKFEDWLCNKCCLNNFRKRLKCFRCGADKFDSEQEVPPGTTESVQSVDYYCDTIILRNIAPHTVVDSIMTALSPYASLAVNNIRLIKDKQTQQNRGFAFVQLSSAMDASQLLQILQSLHPPLKIDGKTIGVDFAKSARKDLVLSDGNRVSAFSVASTAIAAAQWSSTQSQSGEGGSVDYSYLQPGQDGYAQYAQYSQDYQQFYQQQAGGLESDASSASGTAVTTTSAAVVSQSPQLYNQTSNPPGSPTEEAQPSTSTSTQAPAASPTGVVPGTKYAVPDTSTYQYDESSGYYYDPTTGLYYDPNSQYYYNSLTQQYLYWDGEKETYVPAAESSSHQQSGLPPAKEGKEKKEKPKSKTAQQIAKDMERWAKSLNKQKENFKNSFQPVNSLREEERRESAAADAGFALFEKKGALAERQQLIPELVRNGDEENPLKRGLVAAYSGDSDNEEELVERLESEEEKLADWKKMACLLCRRQFPNKDALVRHQQLSDLHKQNMDIYRRSRLSEQELEALELREREMKYRDRAAERREKYGIPEPPEPKRKKQFDAGTVYVMCTFSSSYAGALAVLSNCVFATGRNYEQPTKDGIDHSNIGNKMLQAMGWREGSGLGRKCQGITAPIEAQVRLKGAGLGAKGSAYGLSGADSYKDAVRKAMFARFTEME

SEQ ID NO: 835991 - protein, 393 aa, Homo sapiens
RIVKMMSVEGRLMVDIARGAASPTGVVPGTKYAVPDTSTYQYDESSGYYYDPTTGLYYDPNSQYYYNSLTQQYLYWDGEKETYVPAAESSSHQQSGLPPAKEGKEKKEKPKSKTAQQIAKDMERWAKSLNKQKENFKNSFQPVNSLREEERRESAAADAGFALFEKKGALAERQQLIPELVRNGDEENPLKRGLVAAYSGDSDNEEELVERLESEEEKLADWKKMACLLCRRQFPNKDALVRHQQLSDLHKQNMDIYRRSRLSEQELEALELREREMKYRDRAAERREKYGIPEPPEPKRKKQFDAGTVNYEQPTKDGIDHSNIGNKMLQAMGWREGSGLGRKCQGITAPIEAQVRLKGAGLGAKGSAYGLSGADSYKDAVRKAMFARFTEME

SEQ ID NO: 835992 - protein, 867 aa, Homo sapiens; identical to SEQ ID NO: 835986

SEQ ID NO: 835993 - protein, 867 aa, Homo sapiens; identical to SEQ ID NO: 835986

SEQ ID NO: 835994 - protein, 143 aa, Homo sapiens
MGSDKRVSRTERSGRYGSIIDRDDRDERESRSRRRDSDYKRSSDDRRGDRYDDYRDYDSPERERERRNSDRSEDGYHSDGDYGEHDYRHDISDERESKTIMLRGLPITITESDIREMMESFEGPQPADVRLMKRKTGESLLSS

SEQ ID NO: 835995 - protein, 143 aa, Homo sapiens; identical to SEQ ID NO: 835994

SEQ ID NO: 835996 - protein, 143 aa, Homo sapiens; identical to SEQ ID NO: 835994

SEQ ID NO: 835997 - protein, 143 aa, Homo sapiens; identical to SEQ ID NO: 835994

SEQ ID NO: 835998 - protein, 143 aa, Homo sapiens; identical to SEQ ID NO: 835994

SEQ ID NO: 835999 - protein, 143 aa, Homo sapiens; identical to SEQ ID NO: 835994

SEQ ID NO: 836000 - protein, 143 aa, Homo sapiens; identical to SEQ ID NO: 835994

SEQ ID NO: 836001 - protein, 143 aa, Homo sapiens
MGSDKRVSRTERSGRYGSIIDRDDRDERESRSRRRDSDYKRSSDDRRGDRYDDYRDYDSPERERERRNSDRSEDGYHSDGDYGEHDYRHDISDERESKTIMLRGLPITITESDVRGNDSYNQQSVGTMNFELLPLFSHAIVLS

SEQ ID NO: 836002 - protein, 134 aa, Homo sapiens
MRHYFIQVHTTAIFLLYISSDLSSFCLQRGLVAAYSGDSDNEEELVERLESEEEKLADWKKMACLLCRRQFPNKDALVRHQQLSDLHKQNMDIYRRSRLSEQELEALELREREVNGKLCHKEEDIGIIAFSFYL

SEQ ID NO: 836003 - protein, 1123 aa, Homo sapiens
MTWLQLTGKKKSHLVVLELVAFRIVLLRKNCNQIPFKNEFPSLSPQRTHPEAEGVGGRRNVKAFTLHKDGGLEEKGEAKPKDTMLRAKVRDSLRTERIVSSAFSSRLSHSGSLSMLNVRTSVSAGDTAWCKSAFSVVTAFSALPDSVYLYSASHSLTAYLKDWMGRVWWRWLVLPVCCPFNSRALIFPKCALPWENGHMFLTMGITNYFFFLQKKLVIQGKHIAMHYSNPRPKFEDWLCNKCCLNNFRKRLKCFRCGADKFGKTGFSCLQYALKPTNWGREQWLTVIPPLCKAKVGRSLEDRSSIPAWQEIARPCLYKKRNFKFLGVVAHTCSPSYSGGLGERIAGVQELKAAVSYGHTTALQPGQQTRPCLSKKTKQKSDKVGLLTVSLRKSIDFSVLKQLVCFLYIFSLRLDNAAHDCESTESSFVFYELSLLTWFAFCICLSLVQGSVSPTVAQSLHSALTKSQLMRFYYRHKCLKKKKTMFCVVKIKTCGDFNVFLWWKYISCLSLIGSLSLLDSEQEVPPGTTESVQSVDYYCDTIILRNIAPHTVVDSIMTALSPYASLAVNNIRLIKDKQTQQNRGFAFVQLSSAMDASQLLQILQSLHPPLKIDGKTIGVDFAKSARKDLVLSDGNRVSAFSVASTAIAAAQWSSTQSQSGEGGSVDYSYLQPGQDGYAQYAQYSQDYQQFYQQQAGGLESDASSASGTAVTTTSAAVVSQSPQLYNQTSNPPGSPTEEAQPSTSTSTQAPAASPTGVVPGTKYAVPDTSTYQYDESSGYYYDPTTGLYYDPNSQYYYNSLTQQYLYWDGEKETYVPAAESSSHQQSGLPPAKEGKEKKEKPKSKTAQQIAKDMERWAKSLNKQKENFKNSFQPVNSLREEERRESAAADAGFALFEKKGALAERQQLIPELVRNGDEENPLKRGLVAAYSGDSDNEEELVERLESEEEKLADWKKMACLLCRRQFPNKDALVRHQQLSDLHKQNMDIYRRSRLSEQELEALELREREMKYRDRAAERREKYGIPEPPEPKRKKQFDAGTVNYEQPTKDGIDHSNIGNKMLQAMGWREGSGLGRKCQGITAPIEAQVRLKGAGLGAKGSAYGLSGADSYKDAVRKAMFARFTEME

SEQ ID NO: 836004 - protein, 1208 aa, Homo sapiens
MTWLQLTGKKKSHLVVLELVAFRIVLLRKNCNQIPFKNEFPSLSPQRTHPEAEGVGGRRNVKAFTLHKDGGLEEKGEAKPKDTMLRAKVRDSLRTERIVSSAFSSRLSHSGSLSMLNVRTSVSAGDTAWCKSAFSVVTAFSALPDSVYLYSASHSLTAYLKDWMGRVWWRWLVLPVCCPFNSRALIFPKCALPWENGHMFLTMGITNYFFFLQKKLVIQGKHIAMHYSNPRPKFEDWLCNKCCLNNFRKRLKCFRCGADKFDSEQEVPPGTTESVQSVDYYCDTIILRNIAPHTVVDSIMTALSPYASLAVNNIRLIKDKQTQQNRGFAFVQLSSAMDASQLLQILQSLHPPLKIDGKTIGVDFAKSARKDLVLSDGNRVSAFSVASTAIAAAQWSSTQSQSGEGGSVDYSYLQPGQDGYAQYAQYSQDYQQFYQQQAGGLESDASSASGTAVTTTSAAVVSQSPQLYNQTSNPPGSPTEEAQPSTSTSTQAPAASPTGVVPGTKYAVPDTSTYQYDESSGYYYDPTTGLYYDPNSQVNVLLSSSISLEVVSLSAFMRHKMKYFLQKNICLRLVLTSSKPPKCNFYMEIVSFNCRVKKCFEVIIYTQKNTQNRNVQFFECLYMSIHLYITCVYTPPCAQPSVLDISYKWSQTIDYLLCPASFTLPPCVFLRVEFEQMYGVMFYFWWHIELLKGKNNFNTPEITLFMTGSCIYRTVISIFNRNLALIGVVSERLKCEAVCDVPKQAKPLHTSSIHFSQFVKPGHLFPCQFFFFFFFFPVQFSLVALEVVSVAGITGMSHCSRLGTKLFKEIIFYFYSSSVTPLCQVVHHLYLYQGVPRVFSGQEISLVHNILYLFFDKICNRLTEQKVCINCFLFVVFYYYYNSLTQQYLYWDGEKETYVPAAESSSHQQSGLPPAKEGKEKKEKPKSKTAQQIAKDMERWAKSLNKQKENFKNSFQPVNSLREEERRESAAADAGFALFEKKGALAERQQLIPELVRNGDEENPLKRGLVAAYSGDSDNEEELVERLESEEEKLADWKKMACLLCRRQFPNKDALVRHQQLSDLHKQNMDIYRRSRLSEQELEALELREREMKYRDRAAERREKYGIPEPPEPKRKKQFDAGTVNYEQPTKDGIDHSNIGNKMLQAMGWREGSGLGRKCQGITAPIEAQVRLKGAGLGAKGSAYGLSGADSYKDAVRKAMFARFTEME

SEQ ID NO: 836005 - protein, 894 aa, Homo sapiens
MTWLQLTGKKKSHLVVLELVAFRIVLLRKNCNQIPFKNEFPSLSPQRTHPEAEGVGGRRNVKAFTLHKDGGLEEKGEAKPKDTMLRAKVRDSLRTERIVSSAFSSRLSHSGSLSMLNVRTSVSAGDTAWCKSAFSVVTAFSALPDSVYLYSASHSLTAYLKDWMGRVWWRWLVLPVCCPFNSRALIFPKCALPWENGHMFLTMGITNYFFFLQKKLVIQGKHIAMHYSNPRPKFEDWLCNKCCLNNFRKRLKCFRCGADKFDSEQEVPPGTTESVQSVDYYCDTIILRNIAPHTVVDSIMTALSPYASLAVNNIRLIKDKQTQQNRGFAFVQLSSAMDASQLLQILQSLHPPLKIDGKTIGVDFAKSARKDLVLSDGNRVSAFSVASTAIAAAQWSSTQSQSGEGGSVDYSYLQPGQDGYAQYAQYSQDYQQFYQQQAGGLESDASSASGTAVTTTSAAVVSQSPQLYNQTSNPPGSPTEEAQPSTSTSTQAPAASPTGVVPGTKYAVPDTSTYQYDESSGYYYDPTTGLYYDPNSQYYYNSLTQQYLYWDGEKETYVPAAESSSHQQSGLPPAKEGKEKKEKPKSKTAQQIAKDMERWAKSLNKQKENFKNSFQPVNSLREEERRESAAADAGFALFEKKVIAGMAKYVMMGTYLKLESHGLSSVSQGALAERQQLIPELVRNGDEENPLKRGLVAAYSGDSDNEEELVERLESEEEKLADWKKMACLLCRRQFPNKDALVRHQQLSDLHKQNMDIYRRSRLSEQELEALELREREMKYRDRAAERREKYGIPEPPEPKRKKQFDAGTVNYEQPTKDGIDHSNIGNKMLQAMGWREGSGLGRKCQGITAPIEAQVRLKGAGLGAKGSAYGLSGADSYKDAVRKAMFARFTEME

SEQ ID NO: 836006 - protein, 643 aa, Homo sapiens [sequence omitted]

SEQ ID NO: 836007 - protein, 568 aa, Homo sapiens
MTALSPYASLAVNNIRLIKDKQTQQNRGFAFVQLSSAMDASQLLQILQSLHPPLKIDGKTIGVDFAKSARKDLVLSDGNRVSAFSVASTAIAAAQWSSTQSQSGEGGSVDYSYLQPGQDGYAQYAQYSQDYQQFYQQQAGGLESDASSASGTAVTTTSAAVVSQSPQLYNQTSNPPGSPTEEAQPSTSTSTQAPAASPTGVVPGTKYAVPDTSTYQYDESSGYYYDPTTGLYYDPNSQYYYNSLTQQYLYWDGEKETYVPAAESSSHQQSGLPPAKEGKEKKEKPKSKTAQQIAKDMERWAKSLNKQKENFKNSFQPVNSLREEERRESAAADAGFALFEKKGALAERQQLIPELVRNGDEENPLKRGLVAAYSGDSDNEEELVERLESEEEKLADWKKMACLLCRRQFPNKDALVRHQQLSDLHKQNMDIYRRSRLSEQELEALELREREMKYRDRAAERREKYGIPEPPEPKRKKQFDAGTVNYEQPTKDGIDHSNIGNKMLQAMGWREGSGLGRKCQGITAPIEAQVRLKGAGLGAKGSAYGLSGADSYKDAVRKAMFARFTEME

SEQ ID NO: 836008 - protein, 395 aa, Homo sapiens
IPKYSLNCVLAGEQEHLQMNLQIGKYCYTTMLGMELQMPVFSHQGHLTRNHNKASFIPTKMVKMKKMDNNTGAHEDLNLRASLMGARCAQSSSHQQSGLPPAKEGKEKKEKPKSKTAQQIAKDMERWAKSLNKQKENFKNSFQPVNSLREEERRESAAADAGFALFEKKGALAERQQLIPELVRNGDEENPLKRGLVAAYSGDSDNEEELVERLESEEEKLADWKKMACLLCRRQFPNKDALVRHQQLSDLHKQNMDIYRRSRLSEQELEALELREREMKYRDRAAERREKYGIPEPPEPKRKKQFDAGTVNYEQPTKDGIDHSNIGNKMLQAMGWREGSGLGRKCQGITAPIEAQVRLKGAGLGAKGSAYGLSGADSYKDAVRKAMFARFTEME

SEQ ID NO: 836009 - protein, 867 aa, Homo sapiens; identical to SEQ ID NO: 835986

SEQ ID NO: 836010 - protein, 235 aa, Homo sapiens
RKCQGITAPIEAQVRLKGAGLGAKGAHMVCRAPIPTKMLSGKPCLPGSELVERLESEEEKLADWKKMACLLCRRQFPNKDALVRHQQLSDLHKQNMDIYRRSRLSEQELEALELREREMKYRDRAAERREKYGIPEPPEPKRKKQFDAGTVNYEQPTKDGIDHSNIGNKMLQAMGWREGSGLGRKCQGITAPIEAQVRLKGAGLGAKGSAYGLSGADSYKDAVRKAMFARFTEME

SEQ ID NO: 836011 - protein, 143 aa, Homo sapiens; identical to SEQ ID NO: 835994

SEQ ID NO: 836012 - protein, 143 aa, Homo sapiens; identical to SEQ ID NO: 835994

SEQ ID NO: 836013 - protein, 143 aa, Homo sapiens; identical to SEQ ID NO: 835994

SEQ ID NO: 836014 - protein, 89 aa, Homo sapiens
MLIVILFIVTQRERERRNSDRSEDGYHSDGDYGEHDYRHDISDERESKTIMLRGLPITITESDVRGNDSYNQQSVGTMNFELLPLFSHA

SEQ ID NO: 836015 - protein, 428 aa, Homo sapiens
QHAPQLEHRPSGWSHCKPPPHAPPPSLGARHAHASVAARPTPDVSPPRRPESVNMANEVIKCKAAVAWEAGKPLSIEEIEVAPPKAHEVRIKIIATAVCHTDAYTLSGADPEGCFPVILGHEGAGIVESVGEGVTKLKAGDTVIPLYIPQCGECKFCLNPKTNLCQKIRVTQGKGLMPDGTSRFTCKGKTILHYMGTSTFSEYTVVADISVAKIDPLAPLDKVCLLGCGISTGYGAAVNTAKLEPGSVCAVFGLGGVGLAVIMGCKVAGASRIIGVDINKDKFARAKEFGATECINPQDFSKPIQEVLIEMTDGGVDYSFECIGNVKVMRAALEACHKGWGVSVVVGVAASGEEIATRPFQLVTGRTWKGTAFGGWKSVESVPKLVSEYMSKKIKVDEFVTHNLSFDEINKAFELMHSGKSIRTVVKI

SEQ ID NO: 836016 - protein, 421 aa, Homo sapiens
QHAPQLEHRPSGWSHCKPPPHAPPPSLGARHAHASVAARPTPDVSPPRRPESVNMANEVIKCKAAVAWEAGKPLSIEEIEVAPPKAHEVRIKIIATAVCHTDAYTLSGADPEGCFPVILGHEGAGIVESVGEGVTKLKAGDTVIPLYIPQCGECKFCLNPKTNLCQKIRVTQGKGLMPDGTSRFTCKGKTILHYMGTSTFSEYTVVADISVAKIDPLAPLDKVCLLGCGISTGYGAAVNTAKLEPGSVCAVFGLGGVGLAVIMGCKVAGASRIIGVDINKDKFARAKEFGATECINPQDFSKPIQEVLIEMTDGGVDYSFECIGNVKVMRAALEACHKGWGVSVVVGVAASGEEIATRPFQLVTGRTWKGTAFGGWKSVESVPKLVSEYMSKKIKVDEFVTHNLSFDEINKAFELMHSGKR

SEQ ID NO: 836017 - protein, 428 aa, Homo sapiens; identical to SEQ ID NO: 836015

SEQ ID NO: 836018 - protein, 428 aa, Homo sapiens; identical to SEQ ID NO: 836015

SEQ ID NO: 836019 - protein, 421 aa, Homo sapiens; identical to SEQ ID NO: 836016

SEQ ID NO: 836020 - protein, 252 aa, Homo sapiens [sequence omitted]

SEQ ID NO: 836021 - protein, 365 aa, Homo sapiens
WPTGKESVYMANEVIKCKAAVAWEAGKPLSIEEIEVAPPKAHEVRIKIIATAVCHTDAYTLSGADPEGCFPVILGHEGAGIVESVGEGVTKLKAGDTVIPLYIPQCGECKFCLNPDGTSRFTCKGKTILHYMGTSTFSEYTVVADISVAKIDPLAPLDKVCLLGCGISTGYGAAVNTAKLEPGSVCAVFGLGGVGLAVIMGCKVAGASRIIGVDINKDKFARAKEFGATECINPQDFSKPIQEVLIEMTDGGVDYSFECIGNVKVMRAALEACHKGWGVSVVVGVAASGEEIATRPFQLVTGRTWKGTAFGGWKSVESVPKLVSEYMSKKIKVDEFVTHNLSFDEINKAFELMHSGKSIRTVVKI

SEQ ID NO: 836022 - protein, 347 aa, Homo sapiens
QHAPQLEHRPSGWSHCKPPPHAPPPSLGARHAHASVAARPTPDVSPPRRPESVNMANEVIKCKAAVAWEAGKPLSIEEIEVAPPKAHEVRIKIIATAVCHTDAYTLSGADPEGCFPVILGHEGAGIVESVGEGVTKLKAGDTVIPLYIPQCGECKFCLNPKTNLCQKIRVTQGKGLMPDGTSRFTCKGKTILHYMGTSTFSEYTVVADISVAKIDPLAPLDKVCLLGCGISTGYGAAVNTAKLEPGSVCAVFGLGGVGLAVIMGCKVAGASRIIGVDINKDKFARAKELGLDVYLRFCIPPGVLDDEGEAILSLEGAKRLGVRGQPWKPGESPPPGGQKGLGEEPPL

SEQ ID NO: 836023 - protein, 428 aa, Homo sapiens; identical to SEQ ID NO: 836015

SEQ ID NO: 836024 - protein, 428 aa, Homo sapiens; identical to SEQ ID NO: 836015

SEQ ID NO: 836025 - protein, 428 aa, Homo sapiens; identical to SEQ ID NO: 836015

SEQ ID NO: 836026 - protein, 421 aa, Homo sapiens; identical to SEQ ID NO: 836016

SEQ ID NO: 836027 - protein, 383 aa, Homo sapiens
WPTGKESVYMANEVIKCKAAVAWEAGKPLSIEEIEVAPPKAHEVRIKIIATAVCHTDAYTLSGADPEGCFPVILGHEGAGIVESVGEGVTKLKAGDTVIPLYIPQCGECKFCLNPKTNLCQKIRVTQGKGLMPDGTSRFTCKGKTILHYMGTSTFSEYTVVADISVAKIDPLAPLDKVCLLGCGISTGYGAAVNTAKLEPGSVCAVFGLGGVGLAVIMGCKVAGASRIIGVDINKDKFARAKEFGATECINPQDFSKPIQEVLIEMTDGGVDYSFECIGNVKVMRAALEACHKGWGVSVVVGVAASGEEIATRPFQLVTGRTWKGTAFGGWKSVESVPKLVSEYMSKKIKVDEFVTHNLSFDEINKAFELMHSGKSIRTVVKI

SEQ ID NO: 836028 - protein, 585 aa, Homo sapiens
WLFWLAFHPCSCTGLHLPAEGAAMNPLFGPNLFLLQQEQQGLAGPLGDSLGGDHFAGGGDLPPAPLSPAGPAAYSPPGPGPAPPAAMALRNDLGSNINVLKTLNLRFRCFLAKVHELERRNRLLEKQLQQALEEGKQGRRGLGRRDQAVQTGFVSPIRPLGLQLGARPAAVCSPSARVLGSPARSPAGPLAPSAASLSSSSTSTSTTYSSSARFMPGTIWSFSHARRLGPGLEPTLVQGPGLSWVHPDGVGVQIDTITPEIRALYNVLAKVKRERDEYKRRWEEEYTVRIQLQDRVNELQEEAQEADACQEELALKVEQLKAELVVFKGLMSNNLSELDTKIQEKAMKVDMDICRRIDITAKLCDVAQQRNCEDMIQMFQKLVPSMGGRKRERKAAVEEDTSLSESEGPRQPDGDEEESTALSINEEMQRMLNQLREYDFEDDCDSLTWEETEETLLLWEDFSGYAMAAAEAQGEQQEDSLEKVIKDTESLFKTREKEYQETIDQIELELATAKNDMNRHLHEYMEMCSMKRGLDVQMETCRRLITQSGDRKSPAFTAVPLSDPPPPPSEAEDSDRDVSSDSSMR

SEQ ID NO: 836029 - protein, 549 aa, Homo sapiens
LALLARLPSLLLHRSASPSRRRSHESVIRPQPLPPAAYSPPGPGPAPPAAMALRNDLGSNINVLKTLNLRFRCFLAKVHELERRNRLLEKQLQQALEEGKQGRRGLGRRDQAVQTGFVSPIRPLGLQLGARPAAVCSPSARVLGSPARSPAGPLAPSAASLSSSSTSTSTTYSSSARFMPGTIWSFSHARRLGPGLEPTLVQGPGLSWVHPDGVGVQIDTITPEIRALYNVLAKVKRERDEYKRRWEEEYTVRIQLQDRVNELQEEAQEADACQEELALKVEQLKAELVVFKGLMSNNLSELDTKIQEKAMKVDMDICRRIDITAKLCDVAQQRNCEDMIQMFQKLVPSMGGRKRERKAAVEEDTSLSESEGPRQPDGDEEESTALSINEEMQRMLNQLREYDFEDDCDSLTWEETEETLLLWEDFSGYAMAAAEAQGEQQEDSLEKVIKDTESLFKTREKEYQETIDQIELELATAKNDMNRHLHEYMEMCSMKRGLDVQMETCRRLITQSGDRKSPAFTAVPLSDPPPPPSEAEDSDRDVSSDSSMR

SEQ ID NO: 836030 - protein, 472 aa, Homo sapiens
WLFWLAFHPCSCTGLHLPAEGAAMNPLFGPNLFLLQQEQQGLAGPLGDSLGGDHFAGGGDLPPAPLSPAGPAAYSPPGPGPAPPAAMALRNDLGSNINVLKTLNLRFRCFLAKVHELERRNRLLEKQLQQALEEGKQGRRGLGRRDQAVQTGFVSPIRPLGLQLGARPAAVCSPSARVLGSPARSPAGPLAPSAASLSSSSTSTSTTYSSSARFMPGTIWSFSHARRLGPGLEPTLVQGPGLSWVHPDGVGVQIDTITPEIRALYNVLAKVKRERDEYKRRWEEEYTVRIQLQDRVNELQEEAQEADACQEELALKVEQLKAELVVFKGLMSNNLSELDTKIQEKAMKVDMDICRRIDITAKLCDVAQQRNCEDMIQMFQKKLVSLISRKLINVPVPVSKLPRPPGPQFGPAGLLSTDFFLPFPFSLLFPLFLSISCSLDCISFSPFSPGFPDLDVIQVLFCTHCTLILLAS

SEQ ID NO: 836031 - protein, 510 aa, Homo sapiens
WLFWLAFHPCSCTGLHLPAEGAAMNPLFGPNLFLLQQEQQGLAGPLGDSLGGDHFAGGGDLPPAPLSPAGPAAYSPPGPGPAPPAAMALRNDLGSNINVLKTLNLRFRCFLAKVHELERRNRLLEKQLQQALEEGKQGRRGLGRRDQAVQTGFVSPIRPLGLQLGARPAAVCSPSARVLGSPARSPAGPLAPSAASLSSSSTSTSTTYSSSARFMPGTIWSFSHARRLGPGLEPTLVQGPGLSWVHPDGVGVQIDTITPEIRALYNVLAKVKRERDEYKRRCFYRVEMIPQEAGQRARRALFWCGQEAGARICATEAGTMEYTGAGSMLQDLCNMSSSEEAQEADACQEELALKVEQLKAELVVFKGLMSNNLSELDTKIQEKAMKVDMDICRRIDITAKLCDVAQQRNCEDMIQMFQKKLVSLISRKLINVPVPVSKLPRPPGPQFGPAGLLSTDFFLPFPFSLLFPLFLSISCSLDCISFSPFSPGFPDLDVIQVLFCTHCTLILLAS

SEQ ID NO: 836032 - protein, 535 aa, Homo sapiens
WLFWLAFHPCSCTGLHLPAEGAAMNPLFGPNLFLLQQEQQGLAGPLGDSLGGDHFAGGGDLPPAPLSPAGPAAYSPPGPGPAPPAAMALRNDLGSNINVLKTLNLRFRCFLAKVHELERRNRLLEKQLQQALEEGKQGRRGLGRRDQAVQTGFVSPIRPLGLQLGARPAAVCSPSARVLGSPARSPAGPLAPSAASLSSSSTSTSTTYSSSARFMPGTIWSFSHARRLGPGLEPTLVQGPGLSWVHPDGVGVQIDTITPEIRALYNVLAKVKRERDEYKRRWEEEYTVRIQLQDRVNELQEEAQEADACQEELALKVEQLKAELVVFKGLMSNNLSELDTKIQEKAMKVDMDICRRIDITAKLCDVAQQRNCEDMIQMFQKLVPSMGGRKRERKAAVEEDTSLSESEGPRQPDGDEEESTALSINEEMQRMLNQLREYDFEDDCDSLTWEETEETLLLWEDFSGYAMAAAEAQGEQQEDSLEKVIKDTESLFKTREKEYQETIDQIELELAGQEEMTGTAEYLGCALNAAGLRWD

SEQ ID NO: 836033 - protein, 533 aa, Homo sapiens
WLFWLAFHPCSCTGLHLPAEGAAMNPLFGPNLFLLQQEQQGLAGPLGDSLGGDHFAGGGDLPPAPLSPAGPAAYSPPGPGPAPPAAMALRNDLGSNINVLKTLNLRFRCFLAKVHELERRNRLLEKQLQQALEEGKQGRRGLGRRDQAVQTGFVSPIRPLGLQLGARPAAVCSPSARVLGSPARSPAGPLAPSAASLSSSSTSTSTTYSSSARFMPGTIWSFSHARRLGPGLEPTLVQGPGLSWVHPDGVGVQIDTITPEIRALYNVLAKVKRERDEYKRRWEEEYTVRIQLQDRVNELQEEAQEADACQEELALKVEQLKAELVVFKGLMSNNLSELDTKIQEKAMKVDMDICRRIDITAKLCDVAQQRNCEDMIQMFQKLVPSMGGRKRERKAAVEEDTSLSESEGPRQPDGDEEESTALSINEEMQRMLNQLREYDFEDDCDSLTWEETEETLLLWEDFSGYAMAAAEAQGEQQEDSLEKVIKDTESLFKTREKEYQETIDQIEAKISRKSRGNNGVFAAFCLGLVYFKI

SEQ ID NO: 836034 - protein, 621 aa, Homo sapiens
WLFWLAFHPCSCTGLHLPAEGAAMNPLFGPNLFLLQQEQQGLAGPLGDSLGGDHFAGGGDLPPAPLSPAGPAAYSPPGPGPAPPAAMALRNDLGSNINVLKTLNLRFRCFLAKVHELERRNRLLEKQLQQALEEGKQGRRGLGRRDQAVQTGFVSPIRPLGLQLGARPAAVCSPSARVLGSPARSPAGPLAPSAASLSSSSTSTSTTYSSSARFMPGTIWSFSHARRLGPGLEPTLVQGPGLSWVHPDGVGVQIDTITPEIRALYNVLAKVKRERDEYKRRCFYRVEMIPQEAGQRARRALFWCGQEAGARICATEWWEEEYTVRIQLQDRVNELQEEAQEADACQEELALKVEQLKAELVVFKGLMSNNLSELDTKIQEKAMKVDMDICRRIDITAKLCDVAQQRNCEDMIQMFQKLVPSMGGRKRERKAAVEEDTSLSESEGPRQPDGDEEESTALSINEEMQRMLNQLREYDFEDDCDSLTWEETEETLLLWEDFSGYAMAAAEAQGEQQEDSLEKVIKDTESLFKTREKEYQETIDQIELELATAKNDMNRHLHEYMEMCSMKRGLDVQMETCRRLITQSGDRKSPAFTAVPLSDPPPPPSEAEDSDRDVSSDSSMR

SEQ ID NO: 836035 - protein, 585 aa, Homo sapiens
LALLARLPSLLLHRSASPSRRRSHESVIRPQPLPPAAYSPPGPGPAPPAAMALRNDLGSNINVLKTLNLRFRCFLAKVHELERRNRLLEKQLQQALEEGKQGRRGLGRRDQAVQTGFVSPIRPLGLQLGARPAAVCSPSARVLGSPARSPAGPLAPSAASLSSSSTSTSTTYSSSARFMPGTIWSFSHARRLGPGLEPTLVQGPGLSWVHPDGVGVQIDTITPEIRALYNVLAKVKRERDEYKRRCFYRVQMIPQEAGQRARRALFWCGQEAGARICATERWEEEYTVRIQLQDRVNELQEEAQEADACQEELALKVEQLKAELVVFKGLMSNNLSELDTKIQEKAMKVDMDICRRIDITAKLCDVAQQRNCEDMIQMFQKLVPSMGGRKRERKAAVEEDTSLSESEGPRQPDGDEEESTALSINEEMQRMLNQLREYDFEDDCDSLTWEETEETLLLWEDFSGYAMAAAEAQGEQQEDSLEKVIKDTESLFKTREKEYQETIDQIELELATAKNDMNRHLHEYMEMCSMKRGLDVQMETCRRLITQSGDRKSPAFTAVPLSDPPPPPSEAEDSDRDVSSDSSMR

SEQ ID NO: 836036 - protein, 383 aa, Homo sapiens
WLFWLAFHPCSCTGLHLPAEGAAMNPLFGPNLFLLQQEQQGLAGPLGDSLGGDHFAGGGDLPPAPLSPAGPAAYSPPGPGPAPPAAMALRNDLGSNINVLKTLNLRFRCFLAKVHELERRNRLLEKQLQQALEEGKQGRRGLGRRDQAVQTGFVSPIRPLGLQLGARPAAVCSPSARVLGSPARSPAGPLAPSAASLSSSSTSTSTTYSSSARFMPGTIWSFSHARRLGPGLEPTLVQGPGLSWVHPDGVGVQIDTITPEIRALYNVLAKVKRERDEYKRRWEEEYTVRIQLQDRVNELQEEAQEADACQEELALKVEQLKAELVVFKGLMSNNLSELDTKIQEKAMKVDMDICRRIDITAKLCDVAQQRNCEDMIQMFQIWM

SEQ ID NO: 836037 - protein, 129 aa, Homo sapiens [sequence omitted]

SEQ ID NO: 836038 - protein, 434 aa, Homo sapiens
MESELDLNDIIQEMHVVATMPDLYHLLVELNAVQSLLGLLGHDNTDILSDLTSVGELDMVDGQVVALLVQNLERLDESVKEEADGVHNTLAIVENMAEFRPEMCTEGAQQGLLQWLLKRLKAKMPFDANKLYCSEVLAILLQDNDENRELLGELDGIDVLLQQLSVFKRHNPSTAEEQEMMENLFDSLCSCLMLSSNRERFLKGEGLQLMNLMLREKKISRSSALKVLDHAMIGPEGTDNCHKFVDILGLRTIFPLFMKSPRKIKKVGTTEKEHEEHVCSILASLLRNLRGQQRTRLLNKFTENDSEKVDRLMELHFKYLGAMQVADKKIEGEKHDMVRRGEIIDNDTEEEFYLRRLDAGLFVLQHICYIMAEICNANVPQIRQRVHQILNMRGSSIKIVRHIIKEYAENIGDGRSPEFRENEQKRILGLLENF

SEQ ID NO: 836039 - protein, 179 aa, Homo sapiens
MRRKQTGTRERGRYREEEMTVVEEADDDKKRLLQIIDRDGEEEEEEEEPLDESSVKKMILTFEKRSYKNQELRIKFPDNPEKFMESELDLNDIIQEMHVVATMPDLYHLLVELNAVQSLLGLLGHDNTDVSIAVVDLLQELTDIDTLHESEEGAEVLIDALGWARWLALVGNRILERLG

SEQ ID NO: 836040 - protein, 59 aa, Homo sapiens
MAEICNANVPQIRQRVHQILNMRGSSIKIVRHIIKEYAENIGDGRKERTAILVRTVTIR

SEQ ID NO: 836041 - protein, 563 aa, Homo sapiens
MDVGELLSYQPNRGTKRPRDDEEEEQKMRRKQTGTRERGRYREEEMTVVEEADDDKKRLLQIIDRDGEEEEEEEEPLDESSVKKMILTFEKRSYKNQELRIKFPDNPEKFMESELDLNDIIQEMHVVATMPDLYHLLVELNAVQSLLGLLGHDNTDVSIAVVDLLQELTDIDTLHESEEGAEVLIDALVDGQVVALLVQNLERLDESVKEEADGVHNTLAIVENMAEFRPEMCTEGAQQGLLQWLLKRLKAKMPFDANKLYCSEVLAILLQDNDENRELLGELDGIDVLLQQLSVFKRHNPSTAEEQEMMENLFDSLCSCLMLSSNRERFLKGEGLQLMNLMLREKKISRSSALKVLDHAMIGPEGTDNCHKFVDILGLRTIFPLFMKSPRKIKKVGTTEKEHEEHVCSILASLLRNLRGQQRTRLLNKFTENDSEKVDRLMELHFKYLGAMQVADKKIEGEKHDMVRRGEIIDNDTEEEFYLRRLDAGLFVLQHICYIMAEICNANVPQIRQRVHQILNMRGSSIKIVRHIIKEYAENIGDGRSPEFRENEQKRILGLLENF

SEQ ID NO: 836042 - protein, 563 aa, Homo sapiens; identical to SEQ ID NO: 836041

SEQ ID NO: 836043 - protein, 563 aa, Homo sapiens; identical to SEQ ID NO: 836041

SEQ ID NO: 836044 - protein, 536 aa, Homo sapiens
MRRKQTGTRERGRYREEEMTVVEEADDDKKRLLQIIDRDGEEEEEEEEPLDESSVKKMILTFEKRSYKNQELRIKFPDNPEKFMESELDLNDIIQEMHVVATMPDLYHLLVELNAVQSLLGLLGHDNTDVSIAVVDLLQELTDIDTLHESEEGAEVLIDALVDGQVVALLVQNLERLDESVKEEADGVHNTLAIVENMAEFRPEMCTEGAQQGLLQWLLKRLKAKMPFDANKLYCSEVLAILLQDNDENRELLGELDGIDVLLQQLSVFKRHNPSTAEEQEMMENLFDSLCSCLMLSSNRERFLKGEGLQLMNLMLREKKISRSSALKVLDHAMIGPEGTDNCHKFVDILGLRTIFPLFMKSPRKIKKVGTTEKEHEEHVCSILASLLRNLRGQQRTRLLNKFTENDSEKVDRLMELHFKYLGAMQVADKKIEGEKHDMVRRGEIIDNDTEEEFYLRRLDAGLFVLQHICYIMAEICNANVPQIRQRVHQILNMRGSSIKIVRHIIKEYAENIGDGRSPEFRENEQKRILGLLENF

SEQ ID NO: 836045 - protein, 473 aa, Homo sapiens
MDVGELLSYQPNRGTKRPRDDEEEEQKMRRKQTGTRERGRYREEEMTVVEEADDDKKRLLQIIDRDGEEEEEEEEPLDESSVKKMILTFEKRSYKNQELRIKFPDNPEKFMESELDLNDIIQEMHVVATMPDLYHLLVELNAVQSLLGLLGHDNTDVSIAVVDLLQELTDIDTLHESEEGAEVLIDALVDGQVVALLVQNLERLDESVKEEADGVHNTLAIVENMAEFRPEMCTEGAQQGLLQWLLKRLKAKMPFDANKLYCSEVLAILLQDNDENRELLGELDGIDVLLQQLSVFKRHNPSTAEEQEMMENLFDSLCSCLMLSSNRERFLKGEGLQLMNLMLREKKISRSSALKVLDHAMIGPEGTDNCHKFVDILGLRTIFPLFMKSPRKIKKVGTTEKEHEEHVCSILASLLRNLRGQQRTRLLNKFTENDSEKVDRLMELHFKYLGAMQVADKKIEGEKHVCIPASLLP

SEQ ID NO: 836046 - protein, 455 aa, Homo sapiens
MFMESELDLNDIIQEMHVVATMPDLYHLLVELNAVQSLLGLLGHDNTDVSIAVVDLLQELTDIDTLHESEEGAEVLIDALVDGQVVALLVQNLERLDESVKEEADGVHNTLAIVENMAEFRPEMCTEGAQQGLLQWLLKRLKAKMPFDANKLYCSEVLAILLQDNDENRELLGELDGIDVLLQQLSVFKRHNPSTAEEQEMMENLFDSLCSCLMLSSNRERFLKGEGLQLMNLMLREKKISRSSALKVLDHAMIGPEGTDNCHKFVDILGLRTIFPLFMKSPRKIKKVGTTEKEHEEHVCSILASLLRNLRGQQRTRLLNKFTENDSEKVDRLMELHFKYLGAMQVADKKIEGEKHDMVRRGEIIDNDTEEEFYLRRLDAGLFVLQHICYIMAEICNANVPQIRQRVHQILNMRGSSIKIVRHIIKEYAENIGDGRSPEFRENEQKRILGLLENF

SEQ ID NO: 836047 - protein, 501 aa, Homo sapiens
MDVGELLSYQPNRGTKRPRDDEEEEQKMRRKQTGTRERGRYREEEMTVVEEADDDKKRLLQIIDRDGEEEEEEEEPLDESSVKKMILTFEKRSYKNQELRIKFPDNPEKFMESELDLNDIIQEMHVVATMPDLYHLLVELNAVQSLLGLLGHDNTDVSIAVVDLLQELTDIDTLHESEEGAEVLIDALAKMPFDANKLYCSEVLAILLQDNDENRELLGELDGIDVLLQQLSVFKRHNPSTAEEQEMMENLFDSLCSCLMLSSNRERFLKGEGLQLMNLMLREKKISRSSALKVLDHAMIGPEGTDNCHKFVDILGLRTIFPLFMKSPRKIKKVGTTEKEHEEHVCSILASLLRNLRGQQRTRLLNKFTENDSEKVDRLMELHFKYLGAMQVADKKIEGEKHDMVRRGEIIDNDTEEEFYLRRLDAGLFVLQHICYIMAEICNANVPQIRQRVHQILNMRGSSIKIVRHIIKEYAENIGDGRSPEFRENEQKRILGLLENF

SEQ ID NO: 836048 - protein, 84 aa, Homo sapiens
MDVGELLSYQPNRGTKRPRDDEEEEQKMRRKQTGTRERGRYREEEMTVVEEADDDKKRLLQIIDRSRAEDVDAAANLVVVVGGR

SEQ ID NO: 836049 - protein, 235 aa, Homo sapiens
MDVGELLSYQPNRGTKRPRDDEEEEQKMRRKQTGTRERGRYREEEMTVVEEADDDKKRLLQIIDRDGEEEEEEEEPLDESSVKKMILTFEKRSYKNQELRIKFPDNPEKFMESELDLNDIIQEMHVVATMPDLYHLLVELNAVQSLLGLLGHDNTDVSIAVVDLLQELTDIDTLHESEEGAEVLIDALVDGQVVALLVQNLERLDESVKEEADGVHNTLAIVGNMAEFRPVLGIL

SEQ ID NO: 836050 - protein, 112 aa, Homo sapiens
MQVADKKIEGEKHDMVRRGEIIDNDTEEEFYLRRLDAGLFVLQHICYIMAEICNANVPQIRQRVHQILNMRGSSIKIVRHIIKEYAENIGDGRSPEFRENEQKRILGLLENF

SEQ ID NO: 836051 - protein, 563 aa, Homo sapiens; identical to SEQ ID NO: 836041

SEQ ID NO: 836052 - protein, 563 aa, Homo sapiens; identical to SEQ ID NO: 836041

SEQ ID NO: 836053 - protein, 536 aa, Homo sapiens; identical to SEQ ID NO: 836044

SEQ ID NO: 836054 - protein, 558 aa, Homo sapiens
MDVGELLSYQPNRGTKRPRDDEEEEQKMRRKQTGTRERGRYREEEMTVVEEADDDKKRLLQIIDRDGEEEEEEEEPLDESSVKKMILTFEKRSYKNQELRIKFPDNPEKFMESELDLNDIIQEMHVVATMPDLYHLLVELNAVQSLLGLLGHDNTDVSIAVVDLLQELTDIDTLHESEEGAEVLIDALVDGQVVALLVQNLERLDESVKEEADGVHNTLAIVENMAEFRPEMCTEGAQQGLLQWLLKRLKAKMPFDANKLYCSEVLAILLQDNDENRELLGELDGIDVLLQQLSVFKRHNPSTAEEQEMMENLFDSLCSCLMLSSNRERFLKGEGLQLMNLMLREKKISRSSALKVLDHAMIGPEGTDNCHKFVDILGLRTIFPLFMKSPRKIKKVGTTEKEHEEHVCSILASLLRNLRGQQRTRLLNKFTENDSEKVDRLMELHFKYLGAMQVADKKIEGEKHDMVRRGEIIDNDTEEEFYLRRLDAGLFVLQHICYIMAEICNANVPQIRQRVHQILNMRGSSIKIVRHIIKEYAENIGDGRKERTAILVRTVTIR

SEQ ID NO: 836055 - protein, 453 aa, Homo sapiens
MESELDLNDIIQEMHVVATMPDLYHLLVELNAVQSLLGLLGHDNTDVSIAVVDLLQELTDIDTLHESEEGAEVLIDALVDGQVVALLVQNLERLDESVKEEADGVHNTLAIVENMAEFRPEMCTEGAQQGLLQWLLKRLKAKMPFDANKLYCSEVLAILLQDNDENRELLGELDGIDVLLQQLSVFKRHNPSTAEEQEMMENLFDSLCSCLMLSSNRERFLKGEGLQLMNLMLREKKISRSSALKVLDHAMIGPEGTDNCHKFVDILGLRTIFPLFMKSPRKIKKVGTTEKEHEEHVCSILASLLRNLRGQQRTRLLNKFTENDSEKVDRLMELHFKYLGAMQVADKKIEGEKHDMVRRGEIIDNDTEEEFYLRRLDAGLFVLQHICYIMAEICNANVPQIRQRVHQILNMRGSSIKIVRHIIKEYAENIGDGRSPEFRENEQKRILGLLENF

SEQ ID NO: 836056 - protein, 338 aa, Homo sapiens
  misc_feature (338)..(338): Xaa can be any naturally occurring amino acid
MDVGELLSYQPNRGTKRPRDDEEEEQKMRRKQTGTRERGRYREEEMTVVEEADDDKKRLLQIIDRDGEEEEEEEEPLDESSVKKMILTFEKRSYKNQELRIKFPDNPEKFMESELDLNDIIQEMHVVATMPDLYHLLVELNAVQSLLGLLGHDNTDVSIAVVDLLQELTDIDTLHESEEGAEVLIDALVDGQVVALLVQNLERLDESVKEEADGVHNTLAIVENMAEFRPEMCTEGAQQGLLQWLLKRLKAKMPFDANKLYCSEVLAILLQDNDENRELLGELDGIDVLLQQLSVFKRHNPSTAEEQEMMENLFDSLCSCLMLSSNRERFLKGEGLQX

SEQ ID NO: 836057 - protein, 184 aa, Homo sapiens
SIMCAHFLDLPGRFHKVGTTEKEHEEHVCSILASLLRNLRGQQRTRLLNKFTENDSEKVDRLMELHFKYLGAMQVADKKIEGEKHDMVRRGEIIDNDTEEEFYLRRLDAGLFVLQHICYIMAEICNANVPQIRQRVHQILNMRGSSIKIVRHIIKEYAENIGDGRSPEFRENEQKRILGLLENF

SEQ ID NO: 836058 - protein, 500 aa, Homo sapiens
HGGGALGGTGPQLSGLPGNLAPRAWSRDLVGRSPPLAAAAPDSASAVFSPSGPAAAGNDAGAPTATAPGGEGEPHSRPCDARLGSTDKELKAGAAATGSAPTAPGTPWQREPRVEVMDPAGGPRGVLPRPCRVLVLLNPRGGKGKALQLFRSHVQPLLAEAEISFTLMLTERRNHARELVRSEELGRWDALVVMSGDGLMHEVVNGLMERPDWETAIQKPLCSLPAGSGNALAASLNHYAGYEQVTNEDLLTNCTLLLCRRLLSPMNLLSLHTASGLRLFSVLSLAWGFIADVDLESEKYRRLGEMRFTLGTFLRLAALRTYRGRLAYLPVGRVGSKTPASPVVVQQGPVDAHLVPLEEPVPSHWTVVPDEDFVLVLALLHSHLGSEMFAAPMGRCAAGVMHLFYVRAGVSRAMLLRLFLAMEKGRHMEYECPYLVYVPVVAFRLEPKDGKGVFAVDGELMVSEAVQGQVHPNYFWMVSGCVEPPPSWKPQQMPPPEEPL

SEQ ID NO: 836059 - protein, 398 aa, Homo sapiens
MDPVVGCGRGLFGFVFSAGGPRGVLPRPCRVLVLLNPRGGKGKALQLFRSHVQPLLAEAEISFTLMLTERRNHARELVRSEELGRWDALVVMSGDGLMHEVVNGLMERPDWETAIQKPLCSLPAGSGNALAASLNHYAGYEQVTNEDLLTNCTLLLCRRLLSPMNLLSLHTASGLRLFSVLSLAWGFIADVDLESEKYRRLGEMRFTLGTFLRLAALRTYRGRLAYLPVGRVGSKTPASPVVVQQGPVDAHLVPLEEPVPSHWTVVPDEDFVLVLALLHSHLGSEMFAAPMGRCAAGVMHLFYVRAGVSRAMLLRLFLAMEKGRHMEYECPYLVYVPVVAFRLEPKDGKGVFAVDGELMVSEAVQGQVHPNYFWMVSGCVEPPPSWKPQQMPPPEEPL

SEQ ID NO: 836060 - protein, 384 aa, Homo sapiens
MDPAGGPRGVLPRPCRVLVLLNPRGGKGKALQLFRSHVQPLLAEAEISFTLMLTERRNHARELVRSEELGRWDALVVMSGDGLMHEVVNGLMERPDWETAIQKPLCSLPAGSGNALAASLNHYAGYEQVTNEDLLTNCTLLLCRRLLSPMNLLSLHTASGLRLFSVLSLAWGFIADVDLESEKYRRLGEMRFTLGTFLRLAALRTYRGRLAYLPVGRVGSKTPASPVVVQQGPVDAHLVPLEEPVPSHWTVVPDEDFVLVLALLHSHLGSEMFAAPMGRCAAGVMHLFYVRAGVSRAMLLRLFLAMEKGRHMEYECPYLVYVPVVAFRLEPKDGKGVFAVDGELMVSEAVQGQVHPNYFWMVSGCVEPPPSWKPQQMPPPEEPL

SEQ ID NO: 836061 - protein, 384 aa, Homo sapiens; identical to SEQ ID NO: 836060

SEQ ID NO: 836062 - protein, 195 aa, Homo sapiens
MRFTLGTFLRLAALRTYRGRLAYLPVGRVGSKTPASPVVVQQGPVDAHLVPLEEPVPSHWTVVPDEDFVLVLALLHSHLGSEMFAAPMGRCAAGVMHLFYVRAGVSRAMLLRLFLAMEKGRHMEYECPYLVYVPVVAFRLEPKDGKGVFAVDGELMVSEAVQGQVHPNYFWMVSGCVEPPPSWKPQQMPPPEEPL

SEQ ID NO: 836063 - protein, 384 aa, Homo sapiens; identical to SEQ ID NO: 836060

SEQ ID NO: 836064 - protein, 470 aa, Homo sapiens
MSAQVLGFLRSWTPLPLAAPRGPAAAGNDAGAPTATAPGGEGEPHSRPCDARLGSTDKELKAGAAATGSAPTAPGTPWQREPRVEVMDPAGGPRGVLPRPCRVLVLLNPRGGKGKALQLFRSHVQPLLAEAEISFTLMLTERRNHARELVRSEELGRWDALVVMSGDGLMHEVVNGLMERPDWETAIQKPLCSLPAGSGNALAASLNHYAGYEQVTNEDLLTNCTLLLCRRLLSPMNLLSLHTASGLRLFSVLSLAWGFIADVDLESEKYRRLGEMRFTLGTFLRLAALRTYRGRLAYLPVGRVGSKTPASPVVVQQGPVDAHLVPLEEPVPSHWTVVPDEDFVLVLALLHSHLGSEMFAAPMGRCAAGVMHLFYVRAGVSRAMLLRLFLAMEKGRHMEYECPYLVYVPVVAFRLEPKDGKGVFAVDGELMVSEAVQGQVHPNYFWMVSGCVEPPPSWKPQQMPPPEEPL

SEQ ID NO: 836065 - protein, 384 aa, Homo sapiens; identical to SEQ ID NO: 836060

SEQ ID NO: 836066 - protein, 431 aa, Homo sapiens
MSAQVLGFLRSWTPLPLAAPRGPAAAGNDAGAPTATAPGGEGEPHSRPCDARLGSTDKELKAGAAATGSAPTAPGTPLQLFRSHVQPLLAEAEISFTLMLTERRNHARELVRSEELGRWDALVVMSGDGLMHEVVNGLMERPDWETAIQKPLCSLPAGSGNALAASLNHYAGYEQVTNEDLLTNCTLLLCRRLLSPMNLLSLHTASGLRLFSVLSLAWGFIADVDLESEKYRRLGEMRFTLGTFLRLAALRTYRGRLAYLPVGRVGSKTPASPVVVQQGPVDAHLVPLEEPVPSHWTVVPDEDFVLVLALLHSHLGSEMFAAPMGRCAAGVMHLFYVRAGVSRAMLLRLFLAMEKGRHMEYECPYLVYVPVVAFRLEPKDGKGVFAVDGELMVSEAVQGQVHPNYFWMVSGCVEPPPSWKPQQMPPPEEPL

SEQ ID NO: 836067 - protein, 56 aa, Homo sapiens
  misc_feature (32)..(32): Xaa can be any naturally occurring amino acid
SKPIRSQKTVTKPFGGLSDAASLGFLSQRTVXGQRTVTHGIEKELSICQSCPYGAL

SEQ ID NO: 836068 - protein, 576 aa, Homo sapiens
MSTSSLRRQMKNIVHNYSEAEIKVREATSNDPWGPSSSLMSEIADLTYNVVAFSEIMSMIWKRLNDHGKNWRHVYKAMTLMEYLIKTGSERVSQQCKENMYAVQTLKDFQYVDRDGKDQGVNVREKAKQLVALLRDEDRLREERAHALKTKEKLAQTATASSAAVGSGPPPEAEQAWPQSSGEEELQLQLALAMSKEEADQPPSCGPEDDAQLQLALSLSREEHDKEERIRRGDDLRLQMAIEESKRETGGKEESSLMDLADVFTAPAPAPTTDPWGGPAPMAAAVPTAAPTSDPWGGPPVPPAADPWGGPAPTPASGDPWRPAAPAGPSVDPWGGTPAPAAGEGPTPDPWGSSDGGVPVSGPSASDPWTPAPAFSDPWGGSPAKPSTNGTTAAGGFDTEPDEFSDFDRLRTALPTSGSSAGELELLAGEVPARSPGAFDMSGVRGSLAEAVGSPPPAATPTPTPPTRKTPESFLGPNAALVDLDSLVSRPGPTPPGAKASNPFLPGGGPATGPSVTNPFQPAPPATLTLNQLRLSPVPPVPGAPPTYISPLGGGPGLPPMMPPGPPAPNTNPFLL

SEQ ID NO: 836069 - protein, 576 aa, Homo sapiens; identical to SEQ ID NO: 836068

SEQ ID NO: 836070 - protein, 576 aa, Homo sapiens; identical to SEQ ID NO: 836068

SEQ ID NO: 836071 - protein, 443 aa, Homo sapiens
MSTSSLRRQMKNIVHNYSEAEIKVREATSNDPWGPSSSLMSEIADLTYNVVAFSEIMSMIWKRLNDHGKNWRHVYKAMTLMEYLIKTGSERVSQQCKENMYAVQTLKDFQYVDRDGKDQGVNVREKAKQLVALLRDEDRLREERAHALKTKEKLAQTATASSAAVGSGPPPEAEQAWPQSSGEEELQLQLALAMSKEEADQPPSCGPEDDAQLQLALSLSREEHDKEERIRRGDDLRLQMAIEESKRETGGKEESSLMDLADVFTAPAPAPTTDPWGGPAPMAAAVPTAAPTSDPWGGPPVPPAADPWGGPAPTPASGDPWRPAAPAGPSVDPWGGTPAPAAGEGPTPDPWGSSDGGVPVSGPSASDPWTPAPAFSDPWGGSPAKPSTNGTTAAGGFDTEPDEFSDFDRLRTALPTSGSSAAYWTRLPPGFYSLNSYRSCFIR

SEQ ID NO: 836072 - protein, 223 aa, Homo sapiens
MSTSSLRRQMKNIVHNYSEAEIKVREATSNDPWGPSSSLMSEIADLTYNVVAFSEIMSMIWKRLNDHGKNWRHVYKAMTLMEYLIKTGSERVSQQCKENMYAVQTLKDFQYVDRDGKDQGVNVREKAKQLVALLRDEDRLREERAHALKTKEKLAQTATASSAVVGSWPHPRRTRLAESTGGRPESSWPGMTGGATTRLWPRKQVKAYAENKREAQEPRKERT

SEQ ID NO: 836073 - protein, 662 aa, Homo sapiens
MGDQSWLWNQAAPGVRSPVFACSVEKGNVPLVLSEHLAHSRDPGSGAVRFLISPEPWASAILGTSGLLASPVLPAALDAVTCQHLPQPSSGSRPISPRIGALCPLLLQPGTMSTSSLRRQMKNIVHNYSEAEIKVREATSNDPWGPSSSLMSEIADLTYNVVAFSEIMSMIWKRLNDHGKNWRHVYKAMTLMEYLIKTGSERVSQQCKENMYAVQTLKDFQYVDRDGKDQGVNVREKAKQLVALLRDEDRLREERAHALKTKEKLAQTATASSAAVGSGPPPEAEQAWPQSSGEEELQLQLALAMSKEEADQEERIRRGDDLRLQMAIEESKRETGGKEESSLMDLADVFTAPAPAPTTDPWGGPAPMAAAVPTAAPTSDPWGGPPVPPAADPWGGPAPTPASGDPWRPAAPAGPSVDPWGGTPAPAAGEGPTPDPWGSSDGGVPVSGPSASDPWTPAPAFSDPWGGSPAKPSTNGTTAAGGFDTEPDEFSDFDRLRTALPTSGSSAGELELLAGEVPARSPGAFDMSGVRGSLAEAVGSPPPAATPTPTPPTRKTPESFLGPNAALVDLDSLVSRPGPTPPGAKASNPFLPGGGPATGPSVTNPFQPAPPATLTLNQLRLSPVPPVPGAPPTYISPLGGGPGLPPMMPPGPPAPNTNPFLL

SEQ ID NO: 836074 - protein, 665 aa, Homo sapiens
MSTSSLRRQMKNIVHNYSEAEIKVREATSNDPWGPSSSLMSEIADLTYNVVAFSEIMSMIWKRLNDHGKNWRHVYKAMTLMEYLIKTGSERVSQQCKENMYAVQTLKDFQYVDRDGKDQGVNVREKAKQLVALLRDEDRLREERAHALKTKEKLAQTATASSAAVGSGPPPEAEQAWPQSSGEEELQLQLALAMSKEEADQPPSCGPEDDAQLQLALSLSREEHDKEERIRRGDDLRLQMAIEESKRETGGKEESSLMDLADVFTAPAPAPTTDPWGGPAPMAAAVPTAAPTSDPWGGPPVPPAADPWGGPAPTPASGDPWRPAAPAGPSVDPWGGTPAPAAGEGPTPDPWGSSDGGVPVSGPSASDPWTPAPAFSDPWGGSPAKPSTNGTTAAGGFDTEPDEFSDFDRLRTALPTSGSSAGELELLAGEVPARSPGAFDMSGVRGSLAEAVGSPPPAATPTPTPPTRKTPESFLGPNAALVDLDSLVSRPGPTPPGAKASNPFLPGGGPATGPSVTNPFQPAPPATLTLNQLRLSPVPPVPGAPPTAEGGLAPSGCPIPAPWEISVVSACEMGDPHPQCPSPSWGPLTLHPLPFPPHLPGEKLDMGPGEGSWPEEDPFPVALEGGGVAGAPTHSPSLQTPNPQSVFEPPRSPHAPAHAPSVNPW

SEQ ID NO: 836075 - protein, 689 aa, Homo sapiens
ASFCCFPSPRRLPSPARLSAPLLGGGAAEPSACGPPCVRACARGPAHVPRHRGRAGQGADRHDPPEPGVRGPRGPLPLADAVTCQHLPQPSSGSRPISPRIGALCPLLLQPGTMSTSSLRRQMKNIVHNYSEAEIKVREATSNDPWGPSSSLMSEIADLTYNVVAFSEIMSMIWKRLNDHGKNWRHVYKAMTLMEYLIKTGSERVSQQCKENMYAVQTLKDFQYVDRDGKDQGVNVREKAKQLVALLRDEDRLREERAHALKTKEKLAQTATASSAAVGSGPPPEAEQAWPQSSGEEELQLQLALAMSKEEADQPPSCGPEDDAQLQLALSLSREEHDKEERIRRGDDLRLQMAIEESKRETGGKEESSLMDLADVFTAPAPAPTTDPWGGPAPMAAAVPTAAPTSDPWGGPPVPPAADPWGGPAPTPASGDPWRPAAPAGPSVDPWGGTPAPAAGEGPTPDPWGSSDGGVPVSGPSASDPWTPAPAFSDPWGGSPAKPSTNGTTAAGGFDTEPDEFSDFDRLRTALPTSGSSAGELELLAGEVPARSPGAFDMSGVRGSLAEAVGSPPPAATPTPTPPTRKTPESFLGPNAALVDLDSLVSRPGPTPPGAKASNPFLPGGGPATGPSVTNPFQPAPPATLTLNQLRLSPVPPVPGAPPTYISPLGGGPGLPPMMPPGPPAPNTNPFLL

SEQ ID NO: 836076 - protein, 260 aa, Homo sapiens
MSTSSLRRQMKNIVHNYSEAEIKVREATSNDPWGPSSSLMSEIADLTYNVVAFSEIMSMIWKRLNDHGKNWRHVYKAMTLMEYLIKTGSERVSQQCKENMYAVQTLKDFQYVDRDGKDQGVNVREKAKQLVALLRDEDRLREERAHALKTKEKLAQTATASSAAVGSGPPPEAEQAWPQSSGEEELQLQLALAMSKEEADQPPSCGPEDDAQLQLALSLSREEHDKGSVPGIDCGLADGTRRKPTGTLGDKKESILMDLD

SEQ ID NO: 836077 - protein, 105 aa, Homo sapiens
FSGCDYSTARTQINPEHPLPPIFTPIHFPQTRHTFLLVISIFFLNGFSSFQGKAYFFPSFNFFSKYNINARGQARWLTSVTPALWEAKAVGSPEVTSSRPAWPTW

SEQ ID NO: 836078 - protein, 128 aa, Homo sapiens
MAGCGWVGQSLQQQQGGCLLRDRLDVGTNTLDLTRSSTLDALLGIDDLETMPDDLLTTLDDTCGSLVAPLVQETNKAGPPPDGEPQSWAISQKSFNEKPDQVCPLHLLTTFFPFPQGSCPPLQIIPLV

SEQ ID NO: 836079 - protein, 171 aa, Homo sapiens
MAGCGWVGQSLQQQQGGCLLRDRLDVGTNTLDLTRSSTLDALLGIDDLETMPDDLLTTLDDTCGSLVAPLVQETNKAGPPPDGEPQSWAISQKSFNELPFNLPSLSQGRSPSQSYFSRMAGMDLRREEAKTCRADTVVGETLYVCFIDFGLASGLKTLVWAPLKKGDRKNV

SEQ ID NO: 836080 - protein, 128 aa, Homo sapiens
MAGCGWVGQSLQQQQGGCLLRDRLDVGTNTLDLTRSSTLDALLGIDDLETMPDDLLTTLDDTCGSLVAPLVQETNKAGPPPDGEPQSWAISQKSFNEFTLTLSFPGSVSIKNLNKLAEGDTEDEQQVV

SEQ ID NO: 836081 - protein, 149 aa, Homo sapiens [sequence omitted]

SEQ ID NO: 836082 - protein, 149 aa, Homo sapiens [sequence omitted]

SEQ ID NO: 836083 - protein, 149 aa, Homo sapiens [sequence omitted]

SEQ ID NO: 836084 - protein, 149 aa, Homo sapiens [sequence omitted]

SEQ ID NO: 836085 - protein, 149 aa, Homo sapiens [sequence omitted]

SEQ ID NO: 836086 - protein, 129 aa, Homo sapiens
MIPQCIKEEDTPSDNDSGICMSPESYLGSPQHSPSTRGSPNRSLPSPGVLCGSARPKPYDPPGEKMVAAKVKGEKLDKKLKKMEQNKTAATRYRQKKRAEQEALTGECKELESRKPAYLDLTLGSDEPS

SEQ ID NO: 836087 - protein, 128 aa, Homo sapiens; identical to SEQ ID NO: 836078

SEQ ID NO: 836088 - protein, 128 aa, Homo sapiens; identical to SEQ ID NO: 836078

SEQ ID NO: 836089 - protein, 149 aa, Homo sapiens [sequence omitted]

SEQ ID NO: 836090 - protein, 128 aa, Homo sapiens; identical to SEQ ID NO: 836078

SEQ ID NO: 836091 - protein, 128 aa, Homo sapiens; identical to SEQ ID NO: 836078

SEQ ID NO: 836092 - protein, 149 aa, Homo sapiens [sequence omitted]

SEQ ID NO: 836093 - protein, 149 aa, Homo sapiens [sequence omitted]

SEQ ID NO: 836094 - protein, 149 aa, Homo sapiens [sequence omitted]

SEQ ID NO: 836095 - protein, 149 aa, Homo sapiens [sequence omitted]

SEQ ID NO: 836096 - protein, 137 aa, Homo sapiens
MAGCGWVGQSLQQQQGGCLLRDRLDVGTNTLDLTRSSTLDALLGIDDLETMPDDLLTTLDDTCGSLVAPLVQETNKAGPPPDGEPQSWAISQKSFNEKPDQVCPLHLLTTFFPLNLQTSPTAACQLSQGSSSRGEVG

SEQ ID NO: 836097 - protein, 111 aa, Homo sapiens
MAGCGWVGQSLQQQQGGCLLRDRLDVGTNTLDLTRSSTLDALLGIDDLETMPDDLLTTLDDTCGSLVAPLVQETNKAGPPPDGEPQSWAISQKSFNEGSGVLCSIHNIFFI

SEQ ID NO: 836098 - protein, 128 aa, Homo sapiens
MAGCGWVGQSLQQQQGGCLLRDRLDVGTNTLDLTRSSTLDALLGIDDLETMPDDLLTTLDDTCGSLVAPLVQETNKAGPPPDGEPQSWAISQKSFNEFTLTLSFPGSVSIKNLNKLAEEDTEDEQQVV

SEQ ID NO: 836099 - protein, 136 aa, Homo sapiens
MAGCGWVGQSLQQQQGGCLLRDRLDVGTNTLDLTRSSTLDALLGIDDLETMPETRPGLPPSPSYNLLPLSPGVLSSTPDHSFSLELKEERGSKREGGFPGQGDPVPERFDRRGPQGKGEEKGPLVEDSQERQCACT

SEQ ID NO: 836100 - protein, 94 aa, Homo sapiens
MALLTAFSSSVAVTDKDTFELSTFLDSSKAPQHDRNELPEQRGVGGGLDYAFLNKLGYHKTVKGRLGFSTEDLSEISDRWLATGVFTDHHLTLW

SEQ ID NO: 836101 - protein, 149 aa, Homo sapiens [sequence omitted]

SEQ ID NO: 836102 - protein, 128 aa, Homo sapiens
MTPRAKVSPQHSPSTRGSPNRSLPSPGVLCGSARPKPYDPPGEKMVAAKVKGEKLDKKLKKMEQNKTAATRYRQKKRAEQEALTGECKELEKKNEALKERADSLAKEIQYLKDLIEEVRKARGKKRVP

SEQ ID NO: 836103 - protein, 149 aa, Homo sapiens [sequence omitted]

SEQ ID NO: 836104 - protein, 149 aa, Homo sapiens [sequence omitted]

SEQ ID NO: 836105 - protein, 149 aa, Homo sapiens [sequence omitted]

SEQ ID NO: 836106 - protein, 149 aa, Homo sapiens [sequence omitted]

SEQ ID NO: 836107 - protein, 149 aa, Homo sapiens [sequence omitted]

SEQ ID NO: 836108 - protein, 143 aa, Homo sapiens
MIPQCIKEEDTPSDNDSGICMSPESYLGSPQHSPSTRGSPNRSLPSPGVLCGSARPKPYDPPGEKMVAAKVKGEKLDKKLKKMEQNKTAATRYRQKKRAEQEALTGECKELEKKNEALKERADSLAKEIQFLTLYFCCYHLLS

SEQ ID NO: 836109 - protein, 128 aa, Homo sapiens; identical to SEQ ID NO: 836078

SEQ ID NO: 836110 - protein, 128 aa, Homo sapiens; identical to SEQ ID NO: 836078

SEQ ID NO: 836111 - protein, 149 aa, Homo sapiens [sequence omitted]

SEQ ID NO: 836112 - protein, 149 aa, Homo sapiens [sequence omitted]

SEQ ID NO: 836113 - protein, 149 aa, Homo sapiens [sequence omitted]

SEQ ID NO: 836114 - protein, 283 aa, Homo sapiens
MAGCGWVGQSLQQQQGGCLLRDRLDVGTNTLDLTRSSTVDALLGIDDLETMPDDLLTTLDDTCGSLVAPLVQETNKAGPPPDGEPQSWAISQKSFNESPGVLSSTPDHSFSLELGSEVDITEGDRKPDYTAYVAMIPQCIKEEDTPSDNDSGICMSPESYLGSPQHSPSTRGSPNRSLPSPGVLCGSARPKPYDPPGEKMVAAKVKGEKLDKKLKKMEQNKTAATRYRQKKRAEQEALTGECKELEKKNEALKERADSLAKEIQYLKDLIEEVRKARGKKRVP

SEQ ID NO: 836115 - protein, 128 aa, Homo sapiens; identical to SEQ ID NO: 836078

SEQ ID NO: 836116 - protein, 151 aa, Homo sapiens
MAGCGWVGQSLQQQQGGCLLRDRLDVGTNTLDLTRSSTLDALLGIDDLETMPDDLLTTLDDTCGSLVAPLVQETNKAGPPPDGEPQSWAISQKSFNEKPDQVCPLHLLTTFFPFGQGDPVPERFDRRGPQGKGEEKGPLVEDSQERQCACT

SEQ ID NO: 836117 - protein, 203 aa, Homo sapiens
MAGCGWVGQSLQQQQGGCLLRDRLDVGTNTLDLTRSSTLDALLGIDDLETMPDDLLTTLDDTCGSLVAPLVQETNKAGPPPDGEPQSWAISQKSFNELPSPGVLCGSARPKPYDPPGEKMVAAKVKGEKLDKKLKKMEQNKTAATRYRQKKRAEQEALTGECKELEKKNEALKERADSLAKEIQYLKDLIEEVRKARGKKRVP

SEQ ID NO: 836118 - protein, 116 aa, Homo sapiens
MAGCGWVGQSLQQQQGGCLLRDRLDVGTNTLDLTRSSTLDALLGIDDLETMPDDLLTTLDDTCGSLVAPLVQETNKAGPPPDGEPQSWAISQKSFNERVNEGPSQLATESLPGNLY

SEQ ID NO: 836119 - protein, 70 aa, Homo sapiens
MAGCGWVGQSLQQQQGGCLLRDRLDVGTNTLDLTRSSTLDALLGIDDLETMPADAFLSMNAFFICPVSPS

SEQ ID NO: 836120 - protein, 160 aa, Homo sapiens
MTLEELVACDNAAQKMQTVTAAVEELLVAAQRQDRLTVGVYESAKLMNVDPDSVVLCLLAIDEEEEDDIALQIHFTLIQSFCCDNDINIVRVSGMQRLAQLLGEPAETQGTTEARDLHCLLVTNPHTDAWKSHGLVEVASYCEESRGNNQWVPYISLQER

SEQ ID NO: 836121 - protein, 160 aa, Homo sapiens; identical to SEQ ID NO: 836120

SEQ ID NO: 836122 - protein, 177 aa, Homo sapiens
MTLEELVACDNAAQKMQTVTAAVEELLVAAQRQDRLTVGVYESAKLMNVDPDSVVLCLLAIDEEEEDDIALQIHFTLIQSFCCDNDINIVRVSGMQRLAQLLGEPAETQGTTEARDLHCLLVTTVSRASALPRHARAPGPVFVNKVGLTGPAQLSAQPRLACPVGSRAGASSPRKLF

SEQ ID NO: 836123 - protein, 292 aa, Homo sapiens
MTLEELVACDNAAQKMQTVTAAVEELLVAAQRQDRLTVGVYESAKLMNVESDPLPGLGAGGTGPPLRSGRFPHACLAWSWDFPKCPPLWMQSFSAVLWIGGCRILMYRLQTPLPPWACLPLPHTLNRVPSPPPTVTSLQRQSPAPLQFLFCSCTLLFCKLPLQVAPPLSPADPSLPFGPLRDPDSVVLCLLAIDEEEEDDIALQIHFTLIQSFCCDNDINIVRVSGMQRLAQLLGEPAETQGTTEARDLHCLLVTNPHTDAWKSHGLVEVASYCEESRGNNQWVPYISLQER

SEQ ID NO: 836124 - protein, 185 aa, Homo sapiens
MTLEELVACDNAAQKMQTVTAAVEELLVAAQRQDRLTVGVYESAKLMNVESDPLPGLGAGGTGPPLRSGRFPHACLAWSWDFPKCPPLWMQSFSAVLWIGGCRILMYRLQTPLPPWACLPLPHTLNRVPSPPPTVTSLQRQSPAPLQFNPHTDAWKSHGLVEVASYCEESRGNNQWVPYISLQER

SEQ ID NO: 836125 - protein, 160 aa, Homo sapiens; identical to SEQ ID NO: 836120

SEQ ID NO: 836126 - protein, 160 aa, Homo sapiens; identical to SEQ ID NO: 836120

SEQ ID NO: 836127 - protein, 145 aa, Homo sapiens [sequence omitted]

SEQ ID NO: 836128 - protein, 309 aa, Homo sapiens
MTLEELVACDNAAQKMQTVTAAVEELLVAAQRQDRLTVGVYESAKLMNVESDPLPGLGAGGTGPPLRSGRFPHACLAWSWDFPKCPPLWMQSFSAVLWIGGCRILMYRLQTPLPPWACLPLPHTLNRVPSPPPTVTSLQRQSPAPLQFLFCSCTLLFCKLPLQVAPPLSPADPSLPFGPLRDPDSVVLCLLAIDEEEEDDIALQIHFTLIQSFCCDNDINIVRVSGMQRLAQLLGEPAETQGTTEARDLHCLLVTTVSRASALPRHARAPGPVFVNKVGLTGPAQLSAQPRLACPVGSRAGASSPRKLF

SEQ ID NO: 836129 - protein, 114 aa, Homo sapiens
KFFRGPRYLGRRDSWAGVCQQSRADWSCTAQRSATFGMSRGQPGWGLLTQEAILSLTVFPTQGPREREAPLNPFFSLNPHTDAWKSHGLVEVASYCEESRGNNQWVPYISLQER

SEQ ID NO: 836130 - protein, 288 aa, Homo sapiens
KIRKRKVTTKINRHDKINGKRKTARKQKMFQRAQELRRRAEDYHKCKIPPSARKPLCNWVRMAAAEHRHSSGLPCWPYLTAETLKNRMGRQPPPPTQQHSITDNSLSLKTPPECLLHPLPPSVDDNIKECPLAPLPPSVDDNLKECLLVPLPPSPLPPSVDDNLKDCLFVPLPPSPLPPSVDDNLKTPPLATQEAEAEKPPKPKRWRVDEVEQSPKPKRRRADEVEQSPKPKRQREAEAQQLPKPKRRRLSKLRTRHCTQAWAIRINPWVEKKKKIKKQNKTHAPKTN

SEQ ID NO: 836131 - protein, 189 aa, Homo sapiens
KIRKRKVTTKINRHDKINGKRKTARKQKMFQRAQELRRRAEDYHKCKIPPSARKPLCNWVRMAAAEHRHSSGLPCWPYLTAETLKNRMGRQPPPPTQQHSITDNSLSLKTPPECLLHPLPPSVDDNIKECPLAPLPPSVDDNLKECLLVPLPPSPLPPSVDDNLKDCLFVPLPPSPLPPSVDDNLKTPE

SEQ ID NO: 836132 - protein, 81 aa, Homo sapiens
KIRKRKVTTKINRHDKINGKKEDRQKTENVSTCARVAAAGRGLPQMQNPPFCKKASLQLGQNGGSGASSFFRIALLALPHS

SEQ ID NO: 836133 - protein, 145 aa, Homo sapiens
KIRKRKVTTKINRHDKINGKRKTARKQKMFQRAQELRRRAEDYHKCKIPPSARKPLCNWVRMAAAEHRHSSGLPCWPYLTAETLKNRMGRQPPPPTQQHSITDNSLSLKTPPECLLHPLPPSVDDNIKECPLAPLPPLSSSTLSG

SEQ ID NO: 836134 - protein, 209 aa, Homo sapiens
MAAAEHRHSSGLPCWPYLTAETLKNRMGRQPPPPTQQHSITDNSLSLKTPPECLLHPLPPSVDDNIKECPLAPLPPSVDDNLKECLLVPLPPSPLPPSVDDNLKDCLFVPLPPSPLPPSVDDNLKTPPLATQEAEAEKPPKPKRWRVDEVEQSPKPKRRRADEVEQSPKPKRQREAEAQQLPKPKRRRLSKLRTRHCTQAWAIRINPWV

SEQ ID NO: 836135 - protein, 332 aa, Homo sapiens
MLLETQDALYVALELVIAALSVAGNVLVCAAVGTANTLQTPTNYFLVSLAAADVAVGLFAIPFAITISLGFCTDFYGCLFLACFVLVLTQSSIFSLLAVAVDRYLAICVPLRYKSLVTGTRARGVIAVLWVLAFGIGLTPFLGWNSKDSATNNCTEPWDGTTNESCCLVKCLFENVVPMSYMVYFNFFGCVLPPLLIMLVIYIKIFLVACRQLQRTELMDHSRTTLQREIHAAKSLAMIVGIFALCWLPVHAVNCVTLFQPAQGKNKPKWAMNMAILLSHANSVVNPIVYAYRNRDFRYTFHKIISRYLLCQADVKSGNGQAGVQPALGVGL

SEQ ID NO: 836136 - protein, 332 aa, Homo sapiens; identical to SEQ ID NO: 836135

SEQ ID NO: 836137 - protein, 94 aa, Homo sapiens
SSSSAVSFLLLLSFFLLLFFFLLLLSSSFVLVLRLPSPDKGSPGIFSAKQMSRVGMVRLGYSLLSVWAYDLGSRLFQEKIQIHKKQRGHGWFSL

SEQ ID NO: 836138 - protein, 285 aa, Homo sapiens
LTEFSRAKLLIPACMSLVLRVKALVPWKVNFEVVKGSWKKEEVGSWIVVAERYKLTVTDGILLNRYKSLVTGTRARGVIAVLWVLAFGIGLTPFLGWNSKDSATNNCTEPWDGTTNESCCLVKCLFENVVPMSYMVYFNFFGCVLPPLLIMLVIYIKIFLVACRQLQRTELMDHSRTTLQREIHAAKSLAMIVGIFALCWLPVHAVNCVTLFQPAQGKNKPKWAMNMAILLSHANSVVNPIVYAYRNRDFRYTFHKIISRYLLCQADVKSGNGQAGVQPALGVGL

SEQ ID NO: 836139 - protein, 477 aa, Homo sapiens
MANMQGLVERLERAVSRLESLSAESHRPPGNCGEVNGVIAGVAPSVEAFDKLMDSMVAEFLKNSRILAGDVETHAEMVHSAFQAQRAFLLMASQYQQPHENDVAALLKPISEKIQEIQTFRERNRGSNMFNHLSAVSESIPALGWIAVSPKPGPYVKEMNDAATFYTNRVLKDYKHSDLRHVDWVKSYLNIWSELQAYIKEHHTTGLTWSKTGPVASTVSAFSVLSSGPGLPPPPPPLPPPGPPPLFENEGKKEESSPSRSALFAQLNQGEAITKGLRHVTDDQKTYKNPSLRAQGGQTQSPTKSHTPSPTSPKSYPSQKHAPVLELEGKKWRVEYQEDRNDLVISETELKQVAYIFKCEKSTIQIKGKVNSIIIDNCKKLGLVFDNVVGIVEVINSQDIQIQVMGRVPTISINKTEGCHIYLSEDALDCEIVSAKSSEMNILIPQDGDYREFPIPEQFKTAWDGSKLITEPAEIMA

SEQ ID NO: 836140 - protein, 504 aa, Homo sapiens
SLGRQLGWCGRPRICIAEDGTPGQRSRMANMQGLVERLERAVSRLESLSAESHRPPGNCGEVNGVIAGVAPSVEAFDKLMDSMVAEFLKNSRILAGDVETHAEMVHSAFQAQRAFLLMASQYQQPHENDVAALLKPISEKIQEIQTFRERNRGSNMFNHLSAVSESIPALGWIAVSPKPGPYVKEMNDAATFYTNRVLKDYKHSDLRHVDWVKSYLNIWSELQAYIKEHHTTGLTWSKTGPVASTVSAFSVLSSGPGLPPPPPPLPPPGPPPLFENEGKKEESSPSRSALFAQLNQGEAITKGLRHVTDDQKTYKNPSLRAQGGQTQSPTKSHTPSPTSPKSYPSQKHAPVLELEGKKWRVEYQEDRNDLVISETELKQVAYIFKCEKSTIQIKGKVNSIIIDNCKKLGLVFDNVVGIVEVINSQDIQIQVMGRVPTISINKTEGCHIYLSEDALDCEIVSAKSSEMNILIPQDGDYREFPIPEQFKTAWDGSKLITEPAEIMA

SEQ ID NO: 836141 - protein, 413 aa, Homo sapiens
MANMQGLVERLERAVSRLESLSAESHRPPGNCGEVNGVIAGVAPSVEAFDKLMDSMVAEFLKNSRILAGDVETHAEMVHSAFQAQRAFLLMASQYQQPHENDVAALLKPISEKIQEIQTFRERNRGSNMFNHLSAVSESIPALGWIAVGPVASTVSAFSVLSSGPGLPPPPPPLPPPGPPPLFENEGKKEESSPSRSALFAQLNQGEAITKGLRHVTDDQKTYKNPSLRAQGGQTQSPTKSHTPSPTSPKSYPSQKHAPVLELEGKKWRVEYQEDRNDLVISETELKQVAYIFKCEKSTIQIKGKVNSIIIDNCKKLGLVFDNVVGIVEVINSQDIQIQVMGRVPTISINKTEGCHIYLSEDALDCEIVSAKSSEMNILIPQDGDYREFPIPEQFKTAWDGSKLITEPAEIMA

SEQ ID NO: 836142 - protein, 477 aa, Homo sapiens; identical to SEQ ID NO: 836139

SEQ ID NO: 836143 - protein, 451 aa, Homo sapiens
MANMQGLVERLERAVSRLESLSAESHRPPGNCGEVNGVIAGVAPSVEAFDKLMDSMVAEFLKNSRILAGDVETHNDVAALLKPISEKIQEIQTFRERNRGSNMFNHLSAVSESIPALGWIAVSPKPGPYVKEMNDAATFYTNRVLKDYKHSDLRHVDWVKSYLNIWSELQAYIKEHHTTGLTWSKTGPVASTVSAFSVLSSGPGLPPPPPPLPPPGPPPLFENEGKKEESSPSRSALFAQLNQGEAITKGLRHVTDDQKTYKNPSLRAQGGQTQSPTKSHTPSPTSPKSYPSQKHAPVLELEGKKWRVEYQEDRNDLVISETELKQVAYIFKCEKSTIQIKGKVNSIIIDNCKKLGLVFDNVVGIVEVINSQDIQIQVMGRVPTISINKTEGCHIYLSEDALDCEIVSAKSSEMNILIPQDGDYREFPIPEQFKTAWDGSKLITEPAEIMA

SEQ ID NO: 836144 - protein, 477 aa, Homo sapiens; identical to SEQ ID NO: 836139

SEQ ID NO: 836145 - protein, 360 aa, Homo sapiens
MANMQGLVERLERAVSRLESLSAESHRPPGNCGEVNGVIAGVAPSVEAFDKLMDSMVAEFLKNSRILAGDVETHAEMVHSAFQAQRAFLLMASQYQQPHENDVAALLKPISEKIQEIQTFRERNRGSNMFNHLSAVSESIPALGWIAVSPKPGPYVKEMNDAATFYTNRVLKDYKHSDLRHVDWVKSYLNIWSELQAYIKEHHTTGLTWSKTGPVASTVSAFSVLSSGPGLPPPPPPLPPPGPPPLFENEGKKEESSPSRSALFAQLNQGEAITKGLRHVTDDQKTYKNPSLRAQGGQTQSPTKSHTPSPTSPKSYPSQKHAPVLELEGKKWRVEYQRKDYLVIQRLAEQCFISIEITFS

SEQ ID NO: 836146 - protein, 44 aa, Homo sapiens
MSRFCLEEKRLAAREQEAVGTGHAGEDKAMAVGTKGVRTAPKGL

SEQ ID NO: 836147 - protein, 85 aa, Homo sapiens
  misc_feature (3)..(3): Xaa can be any naturally occurring amino acid
  misc_feature (9)..(9): Xaa can be any naturally occurring amino acid
  misc_feature (17)..(17): Xaa can be any naturally occurring amino acid
  misc_feature (26)..(26): Xaa can be any naturally occurring amino acid
PGXVCCVEXVKRITISXQETAYDPGXTPKLGTRYGSLGMMTSVLVCPDGKTVEAEAAHGTVTRHYRMYQKGQETSTNPIAPPGLA

SEQ ID NO: 836148 - protein, 414 aa, Homo sapiens
MSKKISGGSVVEMQGDEMTRIIWELIKEKLIFPYVELDLHSYDLGIENRDATNDQVTKDAAEAIKKHNVGVKCATITPDEKRVEEFKLKQMWKSPNGTIRNILGGTVFREAIICKNIPRLVSGWVKPIIIGRHAYGDQYRATDFVVPGPGKVEITYTPSDGTQKVTYLVHNFEEGGGVAMGMYNQDKSIEDFAHSSFQMALSKGWPLYLSTKNTILKKYDGRFKDIFQEIYDKQYKSQFEAQKIWYEHRLIDDMVAQAMKSEGGFIWACKNYDGDVQSDSVAQGYGSLGMMTSVLVCPDGKTVEAEAAHGTVTRHYRMYQKGQETSTNPIASIFAWTRGLAHRAKLDNNKELAFFANALEEVSIETIEAGFMTKDLAACIKGLPNVQRSDYLNTFEFMDKLGENLKIKLAQAKL

SEQ ID NO: 836149 - protein, 173 aa, Homo sapiens
MSKKISGGSVVEMQGDEMTRIIWELIKEKLIFPYVELDLHSYDLGIENRDATNDQVTKDAAEAIKKHNVGVKCATITPDEKRVEEFKLKQMWKSPNGTIRNILGGTVFREAIICKNIPRLVSGWVKPIIIGRHAYGDQVSHVGNNVILHVFFSWPRNFQLVCVPFLSFGIYTH

SEQ ID NO: 836150 - protein, 74 aa, Homo sapiens
  misc_feature (25)..(25): Xaa can be any naturally occurring amino acid
KDLSHGTQMYSSSQNVAHLGTFNEXQVLGHEASLNCHNKELAFFANALEEVSIETIEAGFMTKDLAACIKGLPK

SEQ ID NO: 836151 - protein, 414 aa, Homo sapiens; identical to SEQ ID NO: 836148

SEQ ID NO: 836152 - protein, 414 aa, Homo sapiens; identical to SEQ ID NO: 836148

SEQ ID NO: 836153 - protein, 239 aa, Homo sapiens
MSKKISGGSVVEMQGDEMTRIIWELIKEKLIFPYVELDLHSYDLGIENRDATNDQVTKDAAEAIKKHNVGVKCATITPDEKRVEEFKLKQMWKSPNGTIRNILGGTVFREAIICKNIPRLVSGWVKPIIIGRHAYGDQYRATDFVVPGPGKVEITYTPSDGTQKVTYLVHNFEEGGGVAMGMYNQDKSIEDFAHSSFQMALSKGWPLYLSTKNSSTSPSLKLKRSGMSIGSSTTWWPKL

SEQ ID NO: 836154 - protein, 409 aa, Homo sapiens
MSKKISGGSVVEMQGDEMTRIIWELIKEKLIFPYVELDLHSYDLGIENRDATNDQVTKDAAEAIKKHNVGVKCATITPDEKRVEEFKLKQMWKSPNGTIRNILGGTVFREAIICKNIPRLVSGWVKPIIIGRHAYGDQYRATDFVVPGPGKVEITYTPSDGTQKVTYLVHNFEEGGGVAMGMYNQDKSIEDFAHSSFQMALSKGWPLYLSTKNTILKKYDGRFKDIFQEIYDKQYKSQFEAQKIWYEHRLIDDMVAQAMKSEGGFIWACKNYDGDVQSDSVAQGYGSLGMMTSVLVCPDGKTVEAEAAHGTVTRHYRMYQKGQETSTNPIASIFAWTRGLAHRAKLDNNKELAFFANALEEVSIETIEAGFMTKDLAACIKGLPNVQRSDYLNTFEFMDKLGEKIIVFW

SEQ ID NO: 836155 - protein, 414 aa, Homo sapiens; identical to SEQ ID NO: 836148

SEQ ID NO: 836156 - protein, 414 aa, Homo sapiens; identical to SEQ ID NO: 836148

SEQ ID NO: 836157 - protein, 336 aa, Homo sapiens
MSKKISGGSVVEMQGDEMTRIIWELIKEKLIFPYVELDLHSYDLGIENRDATNDQVTKDAAEAIKKHNVGVKCATITPDEKRVEEFKLKQMWKSPNGTIRNILGGTVFREAIICKNIPRLVSGWVKPIIIGRHAYGDQYRATDFVVPGPGKVEITYTPSDGTQKVTYLVHNFEEGGGVAMGMYNQDKSIEDFAHSSFQMALSKGWPLYLSTKNTILKKYDGRFKDIFQEIYDKQYKSQFEAQKIWYEHRLIDDMVAQAMKSEGGFIWACKNYDGDVQSDSVAQGYGSLGMMTSVLVCPDGKTVEAEAAHGTVTRHYRMYQKGQETSTNPIAPPGLA

SEQ ID NO: 836158 - protein, 414 aa, Homo sapiens; identical to SEQ ID NO: 836148

SEQ ID NO: 836159 - protein, 414 aa, Homo sapiens; identical to SEQ ID NO: 836148

SEQ ID NO: 836160 - protein, 136 aa, Homo sapiens
MSKKISGGSVVEMQGDEMTRIIWELIKEKLIFPYVELDLHSYDLGIENRDATNDQVTKDAAEAIKKHNVGVKCATITPDEKRVEEFKLKQMWKSPNGTIRNILGGTVFREAIICKNIPRLVSGWVFVVPGPWVEIL

SEQ ID NO: 836161 - protein, 400 aa, Homo sapiens
MSKKISGGSVVEMQGDEMTRIIWELIKEKLIFPYVELDLHSYDLGIENRDATNDQVTKDAAEAIKKHNVGVKCATITPDEKRVEEFKLKQMWKSPNGTIRNILGGTVFREAIICKNIPRLVSGWVKPIIIGRHAYGDQYRATDFVVPGPGKVEITYTPSDGTQKVTYLVHNFEEGGGVAMGMYNQDKSIEDFAHSSFQMALSKGWPLYLSTKNTILKKYDGRFKDIFQEIYDKQYKSQFEAQKIWYEHRLIDDMVAQAMKSEGGFIWACRYGSLGMMTSVLVCPDGKTVEAEAAHGTVTRHYRMYQKGQETSTNPIASIFAWTRGLAHRAKLDNNKELAFFANALEEVSIETIEAGFMTKDLAACIKGLPNVQRSDYLNTFEFMDKLGENLKIKLAQAKL

SEQ ID NO: 836162 - protein, 414 aa, Homo sapiens; identical to SEQ ID NO: 836148

SEQ ID NO: 836163 - protein, 295 aa, Homo sapiens
MSKKISGGSVVEMQGDEMTRIIWELIKEKLIFPYVELDLHSYDLGIENRDATNDQVTKDAAEAIKKHNVGVKCATITPDEKRVEEFKLKQMWKSPNGTIRNILGGTVFREAIICKNIPRLVSGWVKPIIIGRHAYGDQYRATDFVVPGPGKVEITYTPSDGTQKVTYLVHNFEEGGGVAMGMYNQDKSIEDFAHSSFQMALSKGWPLYLSTKNTILKKYDGRFKDIFQEIYDKVWLSRHDDQRAGLSRWQDSRSRGCPRDCNPSLPHVPERTGDVHQSHCFHFCLDQRVSPQSKA

SEQ ID NO: 836164 - protein, 396 aa, Homo sapiens
MSKKISGGSVVEMQGDEMTRIIWELIKEKLIFPYVELDLHSYDLGIENRDATNDQVTKDAAEAIKKHNVGVKCATITPDEKRVEEFKLKQMWKSPNGTIRNILGGTVFREAIICKNIPRLVSGWVKPIIIGRHAYGDQYRATDFVVPGPGKVEITYTPSDGTRMYNQDKSIEDFAHSSFQMALSKGWPLYLSTKNTILKKYDGRFKDIFQEIYDKQYKSQFEAQKIWYEHRLIDDMVAQAMKSEGGFIWACKNYDGDVQSDSVAQGYGSLGMMTSVLVCPDGKTVEAEAAHGTVTRHYRMYQKGQETSTNPIASIFAWTRGLAHRAKLDNNKELAFFANALEEVSIETIEAGFMTKDLAACIKGLPNVQRSDYLNTFEFMDKLGENLKIKLAQAKL

SEQ ID NO: 836165 - protein, 414 aa, Homo sapiens; identical to SEQ ID NO: 836148

SEQ ID NO: 836166 - protein, 396 aa, Homo sapiens
MSKIWELIKEKLIFPYVELDLHSYDLGIENRDATNDQVTKDAAEAIKKHNVGVKCATITPDEKRVEEFKLKQMWKSPNGTIRNILGGTVFREAIICKNIPRLVSGWVKPIIIGRHAYGDQYRATDFVVPGPGKVEITYTPSDGTQKVTYLVHNFEEGGGVAMGMYNQDKSIEDFAHSSFQMALSKGWPLYLSTKNTILKKYDGRFKDIFQEIYDKQYKSQFEAQKIWYEHRLIDDMVAQAMKSEGGFIWACKNYDGDVQSDSVAQGYGSLGMMTSVLVCPDGKTVEAEAAHGTVTRHYRMYQKGQETSTNPIASIFAWTRGLAHRAKLDNNKELAFFANALEEVSIETIEAGFMTKDLAACIKGLPNVQRSDYLNTFEFMDKLGENLKIKLAQAKL

SEQ ID NO: 836167 - protein, 530 aa, Homo sapiens
  misc_feature (103)..(103): Xaa can be any naturally occurring amino acid
  misc_feature (118)..(118): Xaa can be any naturally occurring amino acid
  misc_feature (122)..(123): Xaa can be any naturally occurring amino acid
WEGTKRGKRKSSDLPCGPGFLQSLLQKRRHWESGLGLPGCGCESELVSGCGAPTLRQHIIPAGDKLHSVESARLGGTGVIRNLFTVKLLKSKCPKEISCAVLXGTSTATDDLKHWDRXDTSXXGGTLTLQRSKHPSKFSFCSAAVNRMGQTLGILHSYDLGIENRDATNDQVTKDAAEAIKKHNVGVKCATITPDEKRVEEFKLKQMWKSPNGTIRNILGGTVFREAIICKNIPRLVSGWVKPIIIGRHAYGDQYRATDFVVPGPGKVEITYTPSDGTQKVTYLVHNFEEGGGVAMGMYNQDKSIEDFAHSSFQMALSKGWPLYLSTKNTILKKYDGRFKDIFQEIYDKQYKSQFEAQKIWYEHRLIDDMVAQAMKSEGGFIWACKNYDGDVQSDSVAQGYGSLGMMTSVLVCPDGKTVEAEAAHGTVTRHYRMYQKGQETSTNPIASIFAWTRGLAHRAKLDNNKELAFFANALEEVSIETIEAGFMTKDLAACIKGLPNVQRSDYLNTFEFMDKLGENLKIKLAQAKL

SEQ ID NO: 836168 - protein, 235 aa, Homo sapiens
MGMYNQDKSIEDFAHSSFQMALSKGWPLYLSTKNTILKKYDGRFKDIFQEIYDKQYKSQFEAQKIWYEHRLIDDMVAQAMKSEGGFIWACKNYDGDVQSDSVAQGYGSLGMMTSVLVCPDGKTVEAEAAHGTVTRHYRMYQKGQETSTNPIASIFAWTRGLAHRAKLDNNKELAFFANALEEVSIETIEAGFMTKDLAACIKGLPNVQRSDYLNTFEFMDKLGENLKIKLAQAKL

SEQ ID NO: 836169 - protein, 269 aa, Homo sapiens
MSKKISGGSVVEMQGDEMTRIIWELIKEKLIFPYVELDLHSYDLGIENRDATNDQVTKDAAEAIKKHNVGVKCATITPDEKRVEEFKLKQMWKSPNGTIRNILGGTVFREAIICKNIPRLVSGWVKPIIIGRHAYGDQYRATALVFLGLEKKKKNKKKKIWGGLGGERVFKTLWWGGGAMGYAHIAQSAAPEETCGPELRWWVFSTQIKKRRGNTGCFWNNSRVGCRGHDPVLSKGSKECQFYAPPRGGGHVQKKRNPRKQKIQQKEGP

SEQ ID NO: 836170 - protein, 355 aa, Homo sapiens
MALRLLKLAATSASARVVAAGAQRVRGIHSSVQCKLRYGMWHFLLGDKASKRLTERSRVITVDGNICTGKGKLAKEIAEKLGFKHFPEAGIHYPDSTTGDGKPLATDYNGNCSLEKFYDDPRSNDGNSYRLQSWLYSSRLLQYSDALEHLLTTGQGVVLERSIFSDFVFLEAMYNQGFIRKQCVDHYNEVKSVTICDYLPPHLVIYIDVPVPEVQRRIQKKGDPHEMKITSAYLQDIENAYKKTFLPEMSEKCEVLQYSAREAQDSKKVVEDIEYLKFDKGPWLKQDNRTLYHLRLLVQDKFEVLNYTSIPIFLPEVTIGAHQTDRVLHQFRELPGRKYSPGYNTEVGDKWIWLK

SEQ ID NO: 836171 - protein, 355 aa, Homo sapiens; identical to SEQ ID NO: 836170

SEQ ID NO: 836172 - protein, 355 aa, Homo sapiens; identical to SEQ ID NO: 836170

SEQ ID NO: 836173 - protein, 355 aa, Homo sapiens; identical to SEQ ID NO: 836170

SEQ ID NO: 836174 - protein, 355 aa, Homo sapiens; identical to SEQ ID NO: 836170

SEQ ID NO: 836175 - protein, 297 aa, Homo sapiens
MALRLLKLAATSASARVVAAGAQRVRGIHSSVQCKLRYGMWHFLLGDKASKRLTERSRVITVDGNICTGKGKLAKEIAEKLGFKHFPEAGIHYPDSTTGDGKPLATDYNGNCSLEKFYDDPRSNDGNSYRLQSWLYSSRLLQYSDALEHLLTTGQGVVLERSIFSDFVFLEAMYNQGFIRKQCVDHYNEVKSVTICDYLPPHLVIYIDVPVPEVQRRIQKKGDPHEMKITSAYLQDIENAYKKTFLPEMSEKCEVLQYSAREAQDSKKVVEDIEYLKFDKGPWLKQDNRTLYHLRLL

SEQ ID NO: 836176 - protein, 353 aa, Homo sapiens
EDKTRSKETSAFARVVSGGEKSVRGIHSSVQCKLRYGMWHFLLGDKASKRLTERSRVITVDGNICTGKGKLAKEIAEKLGFKHFPEAGIHYPDSTTGDGKPLATDYNGNCSLEKFYDDPRSNDGNSYRLQSWLYSSRLLQYSDALEHLLTTGQGVVLERSIFSDFVFLEAMYNQGFIRKQCVDHYNEVKSVTICDYLPPHLVIYIDVPVPEVQRRIQKKGDPHEMKITSAYLQDIENAYKKTFLPEMSEKCEVLQYSAREAQDSKKVVEDIEYLKFDKGPWLKQDNRTLYHLRLLVQDKFEVLNYTSIPIFLPEVTIGAHQTDRVLHQFRELPGRKYSPGYNTEVGDKWIWLK

SEQ ID NO: 836177 - protein, 236 aa, Homo sapiens
MALRLLKLAATSASARVVAAGAQRVRGIHSSVQCKLRYGMWHFLLGDKASKRLTERSRVITVDGNICTGKGKLAKEIAEKLGFKHFPEAGIHYPDSTTGDGKPLATDYNGNCSLEKFYDDPRSNDGNSYRLQSWLYSSRLLQYSDALEHLLTTGQGVVLERSIFSDFVFLEAMYNQGFIRKQCVDHYNEVKSVTICDYLPPHLVIYIDVPVPEVQRRIQKKGDVMQFSIKGQASLF

SEQ ID NO: 836178 - protein, 183 aa, Homo sapiens
MYNQGFIRKQCVDHYNEVKSVTICDYLPPHLVIYIDVPVPEVQRRIQKKGDPHEMKITSAYLQDIENAYKKTFLPEMSEKCEVLQYSAREAQDSKKVVEDIEYLKFDKGPWLKQDNRTLYHLRLLVQDKFEVLNYTSIPIFLPEVTIGAHQTDRVLHQFRELPGRKYSPGYNTEVGDKWIWLK

SEQ ID NO: 836179 - protein, 236 aa, Homo sapiens; identical to SEQ ID NO: 836177

SEQ ID NO: 836180 - protein, 203 aa, Homo sapiens
MALRLLKLAATSASARVVAAGAQRVRGIHSSVQCKLRYGMWPICDYLPPHLVIYIDVPVPEVQRRIQKKGDPHEMKITSAYLQDIENAYKKTFLPEMSEKCEVLQYSAREAQDSKKVVEDIEYLKFDKGPWLKQDNRTLYHLRLLVQDKFEVLNYTSIPIFLPEVTIGAHQTDRVLHQFRELPGRKYSPGYNTEVGDKWIWLK

SEQ ID NO: 836181 - protein, 129 aa, Homo sapiens [sequence omitted]

SEQ ID NO: 836182 - protein, 129 aa, Homo sapiens [sequence omitted]

SEQ ID NO: 836183 - protein, 355 aa, Homo sapiens; identical to SEQ ID NO: 836170

SEQ ID NO: 836184 - protein, 348 aa, Homo sapiens
MALRLLKLAATSASARVVRGIHSSVQCKLRYGMWHFLLGDKASKRLTERSRVITVDGNICTGKGKLAKEIAEKLGFKHFPEAGIHYPDSTTGDGKPLATDYNGNCSLEKFYDDPRSNDGNSYRLQSWLYSSRLLQYSDALEHLLTTGQGVVLERSIFSDFVFLEAMYNQGFIRKQCVDHYNEVKSVTICDYLPPHLVIYIDVPVPEVQRRIQKKGDPHEMKITSAYLQDIENAYKKTFLPEMSEKCEVLQYSAREAQDSKKVVEDIEYLKFDKGPWLKQDNRTLYHLRLLVQDKFEVLNYTSIPIFLPEVTIGAHQTDRVLHQFRELPGRKYSPGYNTEVGDKWIWLK

SEQ ID NO: 836185 - protein, 236 aa, Homo sapiens; identical to SEQ ID NO: 836177

SEQ ID NO: 836186 - protein, 201 aa, Homo sapiens
MALRLLKLAATSASARVVAAGAQRVRGIHSSVQCKLRYGMWHFLLGDKASKRLTERSRVITVDGNICTGKGKLAKEIAEKLGFKHFPEAGIHYPDSTTGDGKPLATDYNGNCSLEKFYDDPRSNDGNSYRLQSWLYSSRLLQYSDALEHLLTTGQGVVLERSIFSDFVFLEAMYNQGFIRKQCESALQTHFWVCGATLQGL

SEQ ID NO: 836187 - protein, 151 aa, Homo sapiens
APFLPILHNTIPCCDLCLMSVSPTNNPHSSHGVCCGQVKASHRVGRCSRAHRDCPSSGSGPSGDWAQKNLEPQASYTMGTDLARIGTLDTRPGFCPLYPLSHEAAKDGSSSWQVIRISSWKDSWLENWPLPRLGFFDALKLLGTWGMGGRG

SEQ ID NO: 836188 - protein, 83 aa, Homo sapiens
EEQVSTLYQNINLVEPRLIQPYEHVIKNFIREIRLQSTEMENLAIAVKRAQDKAAMQLSELEEEMDQRIQAAEHKTRKDVSFW

SEQ ID NO: 836189 - protein, 177 aa, Homo sapiens
RPALGAPYQCLTSPSHQPKWAAGTAKSNYFRLLIVWRCQWPEESTPLGLRSQGRGRVLGICALADTEPELWAPIRIQILACHVPGESQAHLSYLFAVSSGPTLLGASRTLASRLLPPWWRQINAMSKTKVLGSNGSASEAWLPSTSCVTLGQSLGVSEPPYTEIIQDLASRVAVETE

SEQ ID NO: 836190 - protein, 216 aa, Homo sapiens
FFFFFWAQKKIASLSHSGFLHWFLLFEAVSSNGVLLFFSRFRWRRRLLVISAPNDEDWAYSQQLSALSGQACNFGLRHITILKLLGVGEEVGGVLELFPINGSSVVEREDVPAHLVKDIRNYFQVSPEYFSMLLVGKDGNVKSWYPSPMWSMVIVYDLIDSMQLRRQEMAIQQSLGMRCPEDEYAGYGYHSYHQGYQDGYQDDYRHHESYHHGYPY

SEQ ID NO: 836191 - protein, 205 aa, Homo sapiens
KCQSRKTVKLQQKNYRSVAMQFNGFEKQWFRWRRRLLVISAPNDEDWAYSQQLSALSGQACNFGLRHITILKLLGVGEEVGGVLELFPINGSSVVEREDVPAHLVKDIRNYFQVSPEYFSMLLVGKDGNVKSWYPSPMWSMVIVYDLIDSMQLRRQEMAIQQSLGMRCPEDEYAGYGYHSYHQGYQDGYQDDYRHHESYHHGYPY

SEQ ID NO: 836192 - protein, 950 aa, Homo sapiens
MTWRMGPRFTMLLAMWLVCGSEPHPHATIRGSHGGRKVPLVSPDSSRPARFLRHTGRSRGIERSTLEEPNLQPLQRRRSVPVLRLARPTEPPARSDINGAAVRPEQRPAARGSPREMIRDEGSSARSRMLRFPSGSSSPNILASFAGKNRVWVISAPHASEGYYRLMMSLLKDDVYCELAERHIQQIVLFHQAGEEGGKVRRITSEGQILEQPLDPSLIPKLMSFLKLEKGKFGMVLLKKTLQVEERYPYPVRLEAMYEVIDQGPIRRIEKIRQKGFVQKCKASGVEGQVVAEGNDGGGGAGRPSLGSEKKKEDPRRAQVPPTRESRVKVLRKLAATAPALPQPPSTPRATTLPPAPATTVTRSTSRAVTVAARPMTTTAFPTTQRPWTPSPSHRPPTTTEVITARRPSVSENLYPPSRKDQHRERPQTTRRPSKATSLESFTNAPPTTISEPSTRAAGPGRFRDNRMDRREHGHRDPNVVPGPPKPAKEKPPKKKAQDKILSNEYEEKYDLSRPTASQLEDELQVGNVPLKKAKESKKHEKLEKPEKEKKKKMKNENADKLLKSEKQMKKSEKKSKQEKEKSKKKKGGKTEQDGYQKPTNKHFTQSPKKSVADLLGSFEGKRRLLLITAPKAENNMYVQQRDEYLESFCKMATRKISVITIFGPVNNSTMKIDHFQLDNEKPMRVVDDEDLVDQRLISELRKEYGMTYNDFFMVLTDVDLRVKQYYEVPITMKSVFDLIDTFQSRIKDMEKQKKEGIVCKEDKKQSLENFLSRFRWRRRLLVISAPNDEDWAYSQQLSALSGQACNFGLRHITILKLLGVGEEVGGVLELFPINGSSVVEREDVPAHLVKDIRNYFQVSPEYFSMLLVGKDGNVKSWYPSPMWSMVIVYDLIDSMQLRRQEMAIQQSLGMRCPEDEYAGYGYHSYHQGYQDGYQDDYRHHESYHHGYPY

SEQ ID NO: 836193 - protein, 950 aa, Homo sapiens; identical to SEQ ID NO: 836192

SEQ ID NO: 836194 - protein, 950 aa, Homo sapiens; identical to SEQ ID NO: 836192

SEQ ID NO: 836195 - protein, 923 aa, Homo sapiens
MTWRMGPRFTMLLAMWLVCGSEPHPHATIRGSHGGRKVPLVSPDSSRPARFLRHTGRSRGIERSTLEEPNLQPLQRRRSVPVLRLARPTEPPARSDINGAAVRPEQRPAARGSPREMIRDEGSSARSRMLRFPSGSSSPNILASFAGKNRVWVISAPHASEGYYRLMMSLLKDDVYCELAERHIQQIVLFHQAGEEGGKVRRITSEGQILEQPLDPSLIPKLMSFLKLEKGKFGMVLLKKTLQVEERYPYPVRLEAMYEVIDQGPIRRIEKIRQKGFVQKCKASGVEGQVVAEGNDGGGGAGRPSLGSEKKKEDPRRAQVPPTRESRVKVLRKLAATAPALPQPPSTPRATTLPPAPATTVTRSTSRAVTVAARPMTTTAFPTTQRPWTPSPSHRPPTTTEVITARRPSVSENLYPPSRKDQHRERPQTTRRPSKATSLESFTNAPPTTISEPSTRAAGPGRFRDNRMDRREHGHRDPNVVPGPPKPAKEKPPKKKAQDKILSNEYEEKYDLSRPTASQLEDELQVGNVPLKKAKESKKHEKLEKPEKEKKKKMKNENADKLLKSEKQMKKSEKKSKQEKEKSKKKKGGKTEQDGYQKPTNKHFTQSPKKSVADLLGSFEGKRRLLLITAPKAENNMYVQQRDEYLESFCKMATRKISVITIFGPVNNSTMKIDHFQLDNEKPMRVVDDEDLVDQRLISELRKEYGMTYNDFFMVLTDVDLRVKQYYEVPITMKSVFDLIDTFQSRIKDMEKQKKEGIVCKEDKKQSLENFLSRFRWRRRLLVISAPNDEDWAYSQQLSALSGQACNFGSSVVEREDVPAHLVKDIRNYFQVSPEYFSMLLVGKDGNVKSWYPSPMWSMVIVYDLIDSMQLRRQEMAIQQSLGMRCPEDEYAGYGYHSYHQGYQDGYQDDYRHHESYHHGYPY

SEQ ID NO: 836196 - protein, 950 aa, Homo sapiens; identical to SEQ ID NO: 836192

SEQ ID NO: 836197 - protein, 892 aa, Homo sapiens
MTWRMGPRFTMLLAMWLVCGSEPHPHATIRGSHGGRKVPLVSPDSSRPARFLRHTGRSRGIERSTLEEPNLQPLQRRRSVPVLRLARPTEPPARSDINGAAVRPEQRPAARGSPREMIRDEGSSARSRMLRFPSGSSSPNILASFAGKNRVWVISAPHASEGYYRLMMSLLKDDVYCELAERHIQQIVLFHQAGEEGGKVRRITSEGQILEQPLDPSLIPKLMSFLKLEKGKFGMVLLKKTLQVEERYPYPVRLEAMYEVIDQGPIRRIEKIRQKGFVQKCKASGVEGQVVAEGNDGGGGAGRPSLGSEKKKEDPRRAQVPPTRESRVKVLRKLAATAPALPQPPSTPRATTLPPAPATTVTRSTSRAVTVAARPMTTTAFPTTQRPWTPSPSHRPPTTTEVITARRPSVSENLYPPSRKDQHRERPQTTRRPSKATSLESFTNAPPTTISEPSTRAAGPGRFRDNRMDRREHGHRDPNVVPGPPKPAKEKPPKKKAQDKILSNEYEEKYDLSRPTASQLEDELQVGNVPLKKAKESKKHEKLEKPEKEKKKKMKNENADKLLKSEKQMKKSEKKSKQEKEKSKKKKGGKTEQDGYQKPTNKHFTQSPKKSVADLLGSFEGKRRLLLITAPKAENNMYVQQRDEYLESFCKMATRKISVITIFGPVNNSTMKIDHFQLDNEKPMRVVDDEDLVDQRLISELRKEYGMTYNDFFMVLTDVDLRVKQYYEVPITMKSVFDLIDTFQSRIKDMEKQKKEGIVCKEDKKQSLENFLSRFRWRRRLLVISAPNDEDWAYSQQLSALSGQACNFGLRHITILKLLGVGEEVGGVLELFPINGSSVVEREDVPAHLVKDIRNYFQVSPEYFSMLLVGKDGNVKSWYPSPMWSMPGWLPG

SEQ ID NO: 836198 - protein, 703 aa, Homo sapiens
  misc_feature (701)..(701): Xaa can be any naturally occurring amino acid
MTWRMGPRFTMLLAMWLVCGSEPHPHATIRGSHGGRKVPLVSPDSSRPARFLRHTGRSRGIERSTLEEPNLQPLQRRRSVPVLRLARPTEPPARSDINGAAVRPEQRPAARGSPREMIRDEGSSARSRMLRFPSGSSSPNILASFAGKNRVWVISAPHASEGYYRLMMSLLKDDVYCELAERHIQQIVLFHQAGEEGGKVRRITSEGQILEQPLDPSLIPKLMSFLKLEKGKFGMVLLKKTLQVEERYPYPVRLEAMYEVIDQGPIRRIEKIRQKGFVQKCKASGVEGQVVAEGNDGGGGAGRPSLGSEKKKEDPRRAQVPPTRESRVKVLRKLAATAPALPQPPSTPRATTLPPAPATTVTRSTSRAVTVAARPMTTTAFPTTQRPWTPSPSHRPPTTTEVITARRPSVSENLYPPSRKDQHRERPQTTRRPSKATSLESFTNAPPTTISEPSTRAAGPGRFRDNRMDRREHGHRDPNVVPGPPKPAKEKPPKKKAQDKILSNEYEEKYDLSRPTASQLEDELQVGNVPLKKAKESKKHEKLEKPEKEKKKKMKNENADKLLKSEKQMKKSEKKSKQEKEKSKKKKGGKTEQDGYQKPTNKHFTQSPKKSVADLLGSFEGKRRLLLITAPKAENNMYVQQRDEYLESFCKMATRKWKKLEKPEKEKKKKMKNENADKLLKSEKQMKKSEKKSKPEKEKSXKK

SEQ ID NO: 836199 - protein, 68 aa, Homo sapiens
EMSKESEHDSDESSDDDSDSEEPSKYINASFIMSYWKPEVMIAAQGPLQDGYQDDYRHHESYHHGYPY

SEQ ID NO: 836200 - protein, 950 aa, Homo sapiens; identical to SEQ ID NO: 836192

SEQ ID NO: 836201 - protein, 483 aa, Homo sapiens [sequence omitted]

SEQ ID NO: 836202 - protein, 950 aa, Homo sapiens; identical to SEQ ID NO: 836192

SEQ ID NO: 836203 - protein, 700 aa, Homo sapiens
MTWRMGPRFTMLLAMWLVCGSEPHPHATIRGSHGGRKVPLVSPDSSRPARFLRHTGRSRGIERSTLEEPNLQPLQRRRSVPVLRLARPTEPPARSDINGAAVRPEQRPAARGSPREMIRDEGSSARSRMLRFPSGSSSPNILASFAGKNRVWVISAPHASEGYYRLMMSLLKDDVYCELAERHIQQIVLFHQAGEEGGKVRRITSEGQILEQPLDPSLIPKLMSFLKLEKGKFGMVLLKKTLQVEERYPYPVRLEAMYEVIDQGPIRRIEKIRQKGFVQKCKASGVEGQVVAEGNDGGGGAGRPSLGSEKKKEDPRRAQVPPTRESRVKVLRKLAATAPALPQPPSTPRATTLPPAPATTVTRSTSRAVTVAARPMTTTAFPTTQRPWTPSPSHRPPTTTEVITARRPSVSENLYPPSRKDQHRERPQTTRRPSKATSLESFTNAPPTTISEPSTRAAGPGRFRDNRMDRREHGHRDPNVVPGPPKPAKEKPPKKKAQDKILSNEYEEKYDLSRPTASQLEDELQVGNVPLKKAKESKKHEKLEKPEKEKKKKMKNENADKLLKSEKQMKKSEKKSKQEKEKSKKKKGGKTEQDGYQKPTNKHFTQSPKKSVADLLGSFEGKRRLLLITAPKAENNMYVQQRDEYLESFCKMATRKISVITIFGPVNNSTMKIDHFQLGSLKHFNYIIVFLISKVGQTLW

SEQ ID NO: 836204 - protein, 321 aa, Homo sapiens
MSGPSLVGQGISQGEHVRGHAGTARVNGFNRMPPTPQSPRRLGGPHRRWVQRHSGCEASQAFPDLAGLGWAAPEIDRNRDYEKIVEQSRSQLKSGGSRAISSWAVPEIDWNRDYEKIVGQRRSKLKSGVSKPFQPSRPSQSKQWRGASQAQEPEMEEVVEELGLPLQLSTLGGGNLPGGVLEVRNLRPRNGLQLDVIAKTLLGCFQKRGGWGAVRTGEHMRGHAGTTGANGFNPTPPTPHFTVAMKTGRSAKAAGTSHGGQEASQAFLDLAQLSWAALEIDRNRNYEKIVGQMRSKLKSVGSRAISSRAAPEIDQNRDYEK

SEQ ID NO: 836205 - protein, 119 aa, Homo sapiens
MATVKCGVGGVGLKPFAPVVPACPLMCSPVRTAPQPPRFWKQPRRVLAITSSCKPFRGLRLRTSARPLAGSLRLGWKAAKAAPTLPPPPPSPAPGLGRPRATASTGWGGKVEMALRLHF

SEQ ID NO: 836206 - protein, 265 aa, Homo sapiens
EAARNRRTSESSGGVCFTAWKCECAKMRKVVLITGASSGIGLALCKRLLAEDDELHLCLACRNMSKAEAVCAALLASHPTAEVTIVQVDVSNLQSFFRASKELKQRMIKKWLYVIRVEDHCRFQRLDRIYLNAGIMPNPQLNIKALLFGLFSRKVIHMFSTAEGLLTQGDKITADGLQEVFETDVFGHFILIRELEPLLCHSDNPSQLIWTSSRNARKSNFSLEDFQHSKGKEPYSSSKYATDLLSVALNRNFQPAGAVFVCVCH

SEQ ID NO: 836207 - protein, 251 aa, Homo sapiens
EAARNRRTSESSGGVCFTAWKCECAKMRKVVLITGASSGIGLALCKRLLAEDDELHLCLACRNMSKAEAVCAALLASHPTAEVTIVQVDVSNLQSFFRASKELKQSCRFQRLDRIYLNAGIMPNPQLNIKALLFGLFSRKVIHMFSTAEGLLTQGDKITADGLQEVFETDVFGHFILIRELEPLLCHSDNPSQLIWTSSRNARKSNFSLEDFQHSKGKEPYSSSKYATDLLSVALNRNFQPAGAVFVCVCH

SEQ ID NO: 836208 - protein, 134 aa, Homo sapiens
MPNPQLNIKALLFGLFSRKVIHMFSTAEGLLTQGDKITADGLQEVFETDVFGHFILIRELEPLLCHSDNPSQLIWTSSRNARKSNFSLEDFQHSKGKEPYSSSKYATDLLSVALNRNFQPAASLFCKCIHFDTI

SEQ ID NO: 836209 - protein, 110 aa, Homo sapiens
EAARNRRTSESSGGVCFTAWKCECAKMRKVVLITGASSGIGLALCKRLLAEDDELHLCLACRNMSKAEAVCAALLASHPTAEVTIVQVDVSNLQSFFRASKELKQRYISC

SEQ ID NO: 836210 - protein, 255 aa, Homo sapiens
EAARNRRTSESSGGVCFTAWKCECAKMRKVVLITGASSGIGLALCKRLLAEDDELHLCLACRNMSKAEAVCAALLASHPTAEVTIVQVDVSNLQSFFRASKELKQSCRFQRLDRIYLNAGIMPNPQLNIKALLFGLFSRKVIHMFSTAEGLLTQGDKITADGLQEVFETDVFGHFILIRELEPLLCHSDNPSQLIWTSSRNARKSNFSLEDFQHSKGKEPYSSSKYATDLLSVALNRNFQPAASLFCKCIHFDTI

SEQ ID NO: 836211 - protein, 183 aa, Homo sapiens
EAARNRRTSESSGGVCFTAWKCECAKMRKVVLITGASSGIGLALCKRLLAEDDELHLCLACRNMSKAEAVCAALLASHPTAEVTIVQVDVSNLQSFFRASKELKQSCRFQRLDRIYLNAGIMPNPQLNIKALLFGLFSRKVIHMFSTAEGLLTQGDKITADGLQEVFETDVFGHFILVKKLWA

SEQ ID NO: 836212 - protein, 523 aa, Homo sapiens
MTQNKLKLCSKANVYTEVPDGGWGWAVAVSFFFVEVFTYGIIKTFGVFFNDLMDSFNESNSRISWIISICVFVLTFSAPLATVLSNRFGHRLVVMLGGLLVSTGMVAASFSQEVSHMYVAIGIISGLGYCFSFLPTVTILSQYFGKRRSIVTAVASTGECFAVFAFAPAIMALKERIGWRYSLLFVGLLQLNIVIFGALLRPIFIRGPASPKIVIQENRKEAQYMLENEKTRTSIDSIDSGVELTTSPKNVPTHTNLELEPKADMQQVLVKTSPRPSEKKAPLLDFSILKEKSFICYALFGLFATLGFFAPSLYIIPLGISLGIDQDRAAFLLSTMAIAEVFGRIGAGFVLNREPIRKIYIELICVILLTVSLFAFTFATEFWGLMSCSIFFGFMVGTIGGLTFHCLLKMMSWALQKMSSAAGVYIFIQSIAGLAGPPLAGLLVDQSKIYSRAFYSCAAGMALAAVCLALVRPCKMGLCQRHHSGETKVVSHRGKTLQDIPEDFLEMDLAKNEHRVHVQMEPV

SEQ ID NO: 836213 - protein, 523 aa, Homo sapiens; identical to SEQ ID NO: 836212

SEQ ID NO: 836214 - protein, 523 aa, Homo sapiens; identical to SEQ ID NO: 836212

SEQ ID NO: 836215 - protein, 466 aa, Homo sapiens
  misc_feature (14)..(14): Xaa can be any naturally occurring amino acid
  misc_feature (17)..(17): Xaa can be any naturally occurring amino acid
  misc_feature (19)..(19): Xaa can be any naturally occurring amino acid
QVGIPLLDNLQPVXFVXTXSAPLATVLSNRFGHRLVVMLGGLLVSTGMVAASFSQEVSHMYVAIGIISGLGYCFSFLPTVTILSQYFGKRRSIVTAVASTGECFAVFAFAPAIMALKERIGWRYSLLFVGLLQLNIVIFGALLRPIFIRGPASPKIVIQENRKEAQYMLENEKTRTSIDSIDSGVELTTSPKNVPTHTNLELEPKADMQQVLVKTSPRPSEKKAPLLDFSILKEKSFICYALFGLFATLGFFAPSLYIIPLGISLGIDQDRAAFLLSTMAIAEVFGRIGAGFVLNREPIRKIYIELICVILLTVSLFAFTFATEFWGLMSCSIFFGFMVGTIGGLTFHCLLKMMSWALQKMSSAAGVYIFIQSIAGLAGPPLAGLLVDQSKIYSRAFYSCAAGMALAAVCLALVRPCKMGLCQRHHSGETKVVSHRGKTLQDIPEDFLEMDLAKNEHRVHVQMEPV

SEQ ID NO: 836216 - protein, 182 aa, Homo sapiens
HSCLSPTVALDFLPEWYSELALGFLALPSFAFSVPTGALATCAGHEDKAGCPPRPHPPPAPPARSRPYACSVCGKRFSLKHQMETHYRVHTGEKPFSCSLCPQRSRDFSAMTKHLRTHGAAPYRCSLCGAGCPSLASMQAHMRGHSPSQLPPGWTIRSTFLYSSSRPSRPSTSPCCPSSSTT

SEQ ID NO: 836217 - protein, 487 aa, Homo sapiens
MSLPPIRLPSPYGSDRLVQLAARLRPALCDTLITVGSQEFPAHSLVLAGVSQQLGRRGQWALGEGISPSTFAQLLNFVYGESVELQPGELRPLQEAARALGVQSLEEACWRARGDRAKKPDPGLKKHQEEPEKPSRNPERELGDPGEKQKPEQVSRTGGREQEMLHKHSPPRGRPEMAGATQEAQQEQTRSKEKRLQAPVGQRGADGKHGVLTWLRENPGGSEESLRKLPGPLPPAGSLQTSVTPRPSWAEAPWLVGGQPALWSILLMPPRYGIPFYHSTPTTGAWQEVWREQRIPLSLNAPKGLWSQNQLASSSPTPGSLPQGPAQLSPGEMEESDQGHTGALATCAGHEDKAGCPPRPHPPPAPPARSRPYACSVCGKRFSLKHQMETHYRVHTGEKPFSCSLCPQRSRDFSAMTKHLRTHGAAPYRCSLCGAGCPSLASMQAHMRGHSPSQLPPGWTIRSTFLYSSSRPSRPSTSPCCPSSSTT

SEQ ID NO: 836218 - protein, 487 aa, Homo sapiens; identical to SEQ ID NO: 836217

SEQ ID NO: 836219 - protein, 1474 aa, Homo sapiens
PVTAAVTTTTPQVFLENTTAVTPMTAISDVETKETTYSSGATTTGVVEVSETNTSTSVTSTQSTATVNLTKTTGITTPVASVAFPKSLVASPSTITLPVASTASTSLVVVTAAASSSMVTTPTSSLGSVPIILSGINGSPPVSQRPENAAQIPVATPQVSPNTVKRAGPRLLLIPVQQGSPTLRPVSNTQLQGHRMVLQPVRSPSGMNLFRHPNGQIVQLLPLHQLRGSNTQPNLQPVMFRNPGSVMGIRLPAPSKPSETPPSSTSSSAFSVMNPVIQAVGSSSAVNVITQAPSLLSSGASFVSQAGTLTLRISPPEPQSFASKTGSETKITYSSGGQPVGTASLIPLQSGSFALLQLPGQKPVPSSILQHVASLQMKRESQNPDQKDETNSIKREQETKKVLQSEGEAVDPEANVIKQNSGAATSEETLNDSLEDRGDHLDEECLPEEGCATVKPSEHSCITGSHTDQDYKDVNEEYGARNRKSSKEKVAVLEVRTISEKASNKTVQNLSKVQHQKLGDVKVEQQKGFDNPEENSSEFPVTFKEESKFELSGSKVMEQQSNLQPEAKEKECGDSLEKDRERWRKHLKGPLTRKCVGASQECKKEADEQLIKETKTCQENSDVFQQEQGISDLLGKSGITEDARVLKTECDSWSRISNPSAFSIVPRRAAKSSRGNGHFQGHLLLPGEQIQPKQEKKGGRSSADFTVLDLEEDDEDDNEKTDDSIDEIVDVVSDYQSEEVDDVEKNNCVEYIEDDEEHVDIETVEELSEEINVAHLKTTAAHTQSFKQPSCTHISADEKAAERSRKAPPIPLKLKPDYWSDKLQKEAEAFAYYRRTHTANERRRRGEMRDLFEKLKITLGLLHSSKVSKSLILTRAFSEIQGLTDQADKLIGQKNLLTRKRNILIRKVSSLSGKTEEVVLKKLEYIYAKQQALEAQKRKKKMGSDEFDISPRISKQQEGSSASSVDLGQMFINNRRGKPLILSRKKDQATENTSPLNTPHTSANLVMTPQGQLLTLKGPLFSGPVVAVSPDLLESDLKPQVAGSAVALPENDDLFMMPRIVNVTSLATEGGLVDMGGSKYPHEVPDSKPSDHLKDTVRNEDNSLEDKGRISSRGNRDGRVTLGPTQVFLANKDSGYPQIVDVSNMQKAQEFLPKKISGDMRGIQYKWKESESRGERVKSKDSSFHKLKMKDLKDSSIEMELRKVTSAIEEAALDSSELLTNMEDEDDTDETLTSLLNEIAFLNQQLNDDSVGLAELPSSMDTEFPGDARRAFISKVPPGSRATFQVEHLGTGLKELPDVQGESDSISPLLLHLEDDDFSENEKQLAEPASEPDVLKIVIDSEIKDSLLSNKKAIDGGKNTSGLPAEPESVSSPPTLHMKTGLENSNSTDTLWRPMPKLAPLGLKVANPSSDADGQSLKVMPCLAPIAAKVGSVGHKMNLTGNDQEGRESKVMPTLAPVVAKLGNSGASPSSAGK

SEQ ID NO: 836220 - protein, 1279 aa, Homo sapiens
MVLQPVRSPSGMNLFRHPNGQIVQLLPLHQLRGSNTQPNLQPVMFRNPGSVMGIRLPAPSKPSETPPSSTSSSAFSVMNPVIQAVGSSSAVNVITQAPSLLSSGASFVSQAGTLTLRISPPEPQSFASKTGSETKITYSSGGQPVGTASLIPLQSGSFALLQLPGQKPVPSSILQHVASLQMKRESQNPDQKDETNSIKREQETKKVLQSEGEAVDPEANVIKQNSGAATSEETLNDSLEDRGDHLDEECLPEEGCATVKPSEHSCITGSHTDQDYKDVNEEYGARNRKSSKEKVAVLEVRTISEKASNKTVQNLSKVQHQKLGDVKVEQQKGFDNPEENSSEFPVTFKEESKFELSGSKVMEQQSNLQPEAKEKECGDSLEKDRERWRKHLKGPLTRKCVGASQECKKEADEQLIKETKTCQENSDVFQQEQGISDLLGKSGITEDARVLKTECDSWSRISNPSAFSIVPRRAAKSSRGNGHFQGHLLLPGEQIQPKQEKKGGRSSADFTVLDLEEDDEDDNEKTDDSIDEIVDVVSDYQSEEVDDVEKNNCVEYIEDDEEHVDIETVEELSEEINVAHLKTTAAHTQSFKQPSCTHISADEKAAERSRKAPPIPLKLKPDYWSDKLQKEAEAFAYYRRTHTANERRRRGEMRDLFEKLKITLGLLHSSKVSKSLILTRAFSEIQGLTDQADKLIGQKNLLTRKRNILIRKVSSLSGKTEEVVLKKLEYIYAKQQALEAQKRKKKMGSDEFDISPRISKQQEGSSASSVDLGQMFINNRRGKPLILSRKKDQATENTSPLNTPHTSANLVMTPQGQLLTLKGPLFSGPVVAVSPDLLESDLKPQVAGSAVALPENDDLFMMPRIVNVTSLATEGGLVDMGGSKYPHEVPDSKPSDHLKDTVRNEDNSLEDKGRISSRGNRDGRVTLGPTQVFLANKDSGYPQIVDVSNMQKAQEFLPKKISGDMRGIQYKWKESESRGERVKSKDSSFHKLKMKDLKDSSIEMELRKVTSAIEEAALDSSELLTNMEDEDDTDETLTSLLNEIAFLNQQLNDDSVGLAELPSSMDTEFPGDARRAFISKVPPGSRATFQVEHLGTGLKELPDVQGESDSISPLLLHLEDDDFSENEKQLAEPASEPDVLKIVIDSEIKDSLLSNKKAIDGGKNTSGLPAEPESVSSPPTLHMKTGLENSNSTDTLWRPMPKLAPLGLKVANPSSDADGQSLKVMPCLAPIAAKVGSVGHKMNLTGNDQEGRESKVMPTLAPVVAKLGNSGASPSSAGK

SEQ ID NO: 836221 - protein, 1279 aa, Homo sapiens; identical to SEQ ID NO: 836220

SEQ ID NO: 836222 - protein, 1279 aa, Homo sapiens; identical to SEQ ID NO: 836220

SEQ ID NO: 836223 - protein, 102 aa, Homo sapiens
YEGRINETFCLQSKFGLGPQNMKVKGRGRTDCPCPLLQNQVTWRERSMEQIASFVHALGPCSAGLREAEVLASRLQRLPATKGGGSNYPWGWTALGRARRQA

SEQ ID NO: 836224 - protein, 102 aa, Homo sapiens; identical to SEQ ID NO: 836223

SEQ ID NO: 836225 - protein, 102 aa, Homo sapiens; identical to SEQ ID NO: 836223

SEQ ID NO: 836226 - protein, 129 aa, Homo sapiens
MGAPALPSPSLKQLGSKSHVCRVPVSRLSKWHPAEAAPGSDACEILYWFPFWSNASVQCLGSSECQAQALAQWVEVSFRGQDYKSLFWSPRGFSLTVSPHQEPLPTLSRFPAGQAASNPLLTSHVSHIF

SEQ ID NO: 836227 - protein, 937 aa, Homo sapiens
TESHHVGQAGLKLPNSEIIHLPPPPKVPGLKAGANAHGLLGCWDYRREPRRLAFLLYFLNFPIVCMYDFYNHKVKNENAFLKINVKFENIVSFVLNDIESHAENKSAIDENQLSRLHMILKPFMLRRIKKDVENELSDKIEILMYCQLTSRQKLLYQALKNKISIEDLLQSSMGSTQQAQNTTSSLMNLVMQFRKVCNHPELFERQETWSPFHISLKPYHISKFIYRHGQIRVFNHSRDRWLRVLSPFAPDYIQRSLFHRKGINEESCFSFLRFIDISPAEMANLMLQGLLARWLALFLSLKASYRLHQLRSWGAPEGESHQRYLRNKDFLLGVNFPLSFPNLCSCPLLKSLVFSSHCKAVSGYSDQVVHQRRSATSSLRRCLLTELPSFLCVASPRVTAVPLDSYCNDRSAEYERRVLKEGGSLAAKQCLLNGAPELAADWLNRRSQFFPEPAGGLWSIRPQNGWSFIRIPGKESLITDSGKLYALDVLLTRLKSQGHRVLIYSQMTRMIDLLEEYMVYRKHTYMRLDGSSKISERRDMVADFQNRNDIFVFLLSTRAGGLGINLTAADTVIFYDSDWNPTVDQQAMDRAHRLGQTKQVTVYRLICKGTIEERILQRAKEKSEIQRMVISGGNFKPDTLKPKEVVSLLLDDEELEKKLRLRQEEKRQQEETNRVKERKRKREKYAEKKKKEDELDGKRRKEGVNLVIPFVPSADNSNLSADGDDSFISVDSAMPSPFSEISISSELHTGSIPLDESSSDMLVIVDDPASSAPQSRATNSPASITGSVSDTVNGISIQEMPAAGRGHSARSRGRPKGSGSTAKGAGKGRSRKSTAGSAAAMAGAKAGAAAASAAAYAAYGYNVSKGISASSPLQTSLVRPAGLADFGPSSASSPLSSPLSKGNNVPGNPKNLHMTSSLAPDSLVRKQGKGTNPSGGR

SEQ ID NO: 836228 - protein, 896 aa, Homo sapiens
NSVRWKILLQFQCRNRLLLTGTPIQNTMAELWALLHFIMPTLFDSHEEFNEWFSKDIESHAENKSAIDENQLSRLHMILKPFMLRRIKKDVENELSDKIEILMYCQLTSRQKLLYQALKNKISIEDLLQSSMGSTQQAQNTTSSLMNLVMQFRKVCNHPELFERQETWSPFHISLKPYHISKFIYRHGQIRVFNHSRDRWLRVLSPFAPDYIQRSLFHRKGINEESCFSFLRFIDISPAEMANLMLQGLLARWLALFLSLKASYRLHQLRSWGAPEGESHQRYLRNKDFLLGVNFPLSFPNLCSCPLLKSLVFSSHCKAVSGYSDQVVHQRRSATSSLRRCLLTELPSFLCVASPRVTAVPLDSYCNDRSAEYERRVLKEGGSLAAKQCLLNGAPELAADWLNRRSQFFPEPAGGLWSIRPQNGWSFIRIPGKESLITDSGKLYALDVLLTRLKSQGHRVLIYSQMTRMIDLLEEYMVYRKHTYMRLDGSSKISERRDMVADFQNRNDIFVFLLSTRAGGLGINLTAADTVIFYDSDWNPTVDQQAMDRAHRLGQTKQVTVYRLICKGTIEERILQRAKEKSEIQRMVISGGNFKPDTLKPKEVVSLLLDDEELEKKLRLRQEEKRQQEETNRVKERKRKREKYAEKKKKEDELDGKRRKEGVNLVIPFVPSADNSNLSADGDDSFISVDSAMPSPFSEISISSELHTGSIPLDESSSDMLVIVDDPASSAPQSRATNSPASITGSVSDTVNGISIQEMPAAGRGHSARSRGRPKGSGSTAKGAGKGRSRKSTAGSAAAMAGAKAGAAAASAAAYAAYGYNVSKGISASSPLQTSLVRPAGLADFGPSSASSPLSSPLSKGNNVPGNPKNLHMTSSLAPDSLVRKQGKGTNPSGGR

SEQ ID NO: 836229 - protein, 325 aa, Homo sapiens
EHKQNTADKILPKDQIFQFSLKIEKISMHVPEKYKHHDASRGYKNVKNAHKANRKTEETAKREEKQAGRTQKKNRKKKKEDELDGKRRKEGVNLVIPFVPSADNSNLSADGDDSFISVDSAMPSPFSEISISSELHTGSIPLDESSSDMLVIVDDPASSAPQSRATNSPASITGSVSDTVNGISIQEMPAAGRGHSARSRGRPKGSGSTAKGAGKGRSRKSTAGSAAAMAGAKAGAAAASAAAYAAYGYNVSKGISASSPLQTSLVRPAGLADFGPSSASSPLSSPLSKGNNVPGNPKNLHMTSSLAPDSLVRKQGKGTNPSGGR

SEQ ID NO: 836230 - protein, 109 aa, Homo sapiens
VTAVPLDSYCNDRSAEYERRVLKEGGSLAAKQCLLNGAPELAADWLNRRSQFFPEPAGGLWSIRPQNGWSFIRIPGEFSILLECVPRFGKGRTRVIFMWSFQIFGIYCS

SEQ ID NO: 836231 - protein, 896 aa, Homo sapiens; identical to SEQ ID NO: 836228

SEQ ID NO: 836232 - protein, 896 aa, Homo sapiens; identical to SEQ ID NO: 836228

SEQ ID NO: 836233 - protein, 292 aa, Homo sapiens
RAVTRRRAARRISASGEWLVCSARRGPSCDPGPAPGTPAMDELFPLIFPAEPAQASGPYVEIIEQPKQRGMRFRYKCEGRSAGSIPGERSTDTTKTHPTIKINGYTGPGTVRISLVTKDPPHRPHPHELVGKDCRDGFYEAELCPDRCIHSFQNLGIQCVKKRDLEQAISQRIQTNNNPFQVPIEEQRGDYDLNAVRLCFQVTVRDPSGRPLRLPPVLSHPIFDNRAPNTAELKICRVNRNSGSCLGGDEIFLLCDKVQKVSPWNSSTCQIQTIVTGLRRNVKGHMRPSRAS

SEQ ID NO: 836234 - protein, 135 aa, Homo sapiens
  misc_feature (7)..(7): Xaa can be any naturally occurring amino acid
  misc_feature (21)..(21): Xaa can be any naturally occurring amino acid
  misc_feature (24)..(26): Xaa can be any naturally occurring amino acid
  misc_feature (28)..(31): Xaa can be any naturally occurring amino acid
ESGPPSXLPSLLVAPPPTPQXEDXXXPXXXXYELGALLGNSTDPAVFTDLASVDNSEFQQLLNQGIPVAPHTTEPMLMEYPEAITRLVTGAQRPPDPAPAPLGAPGLPNGLLSGDEDFSSIADMDFSALLSQISS

SEQ ID NO: 836235 - protein, 88 aa, Homo sapiens
RSSSLVFTASGAPNTAELKICRVNRNSGSCLGGDEIFLLCDKVQKGIHQEAGVGSWEQGVKLSREVECQVTGFGYFLLCLGGLRWAEG

SEQ ID NO: 836236 - protein, 590 aa, Homo sapiens
RAVTRRRAARRISASGEWLVCSARRGPSCDPGPAPGTPAMDELFPLIFPAEPAQASGPYVEIIEQPKQRGMRFRYKCEGRSAGSIPGERSTDTTKTHPTIKINGYTGPGTVRISLVTKDPPHRPHPHELVGKDCRDGFYEAELCPDRCIHSFQNLGIQCVKKRDLEQAISQRIQTNNNPFQVPIEEQRGDYDLNAVRLCFQVTVRDPSGRPLRLPPVLSHPIFDNRAPNTAELKICRVNRNSGSCLGGDEIFLLCDKVQKEDIEVYFTGPGWEARGSFSQADVHRQVAIVFRTPPYADPSLQAPVRVSMQLRRPSDRELSEPMEFQYLPDTDDRHRIEEKRKRTYETFKSIMKKSPFSGPTDPRPPPRRIAVPSRSSASVPKPAPQPYPFTSSLSTINYDEFPTMVFPSGQISQASALAPAPPQVLPQAPAPAPAPAMVSALAQAPAPVPVLAPGPPQAVAPPAPKPTQAGEGTLSEALLQLQFDDEDLGALLGNSTDPAVFTDLASVDNSEFQQLLNQGIPVAPHTTEPMLMEYPEAITRLVTGAQRPPDPAPAPLGAPGLPNGLLSGDEDFSSIADMDFSALLSQISS

SEQ ID NO: 836237 - protein, 590 aa, Homo sapiens; identical to SEQ ID NO: 836236

SEQ ID NO: 836238 - protein, 590 aa, Homo sapiens; identical to SEQ ID NO: 836236

SEQ ID NO: 836239 - protein, 581 aa, Homo sapiens
RAVTRRRAARRISASGEWLVCSARRGPSCDPGPAPGTPAMDEPAQASGPYVEIIEQPKQRGMRFRYKCEGRSAGSIPGERSTDTTKTHPTIKINGYTGPGTVRISLVTKDPPHRPHPHELVGKDCRDGFYEAELCPDRCIHSFQNLGIQCVKKRDLEQAISQRIQTNNNPFQVPIEEQRGDYDLNAVRLCFQVTVRDPSGRPLRLPPVLSHPIFDNRAPNTAELKICRVNRNSGSCLGGDEIFLLCDKVQKEDIEVYFTGPGWEARGSFSQADVHRQVAIVFRTPPYADPSLQAPVRVSMQLRRPSDRELSEPMEFQYLPDTDDRHRIEEKRKRTYETFKSIMKKSPFSGPTDPRPPPRRIAVPSRSSASVPKPAPQPYPFTSSLSTINYDEFPTMVFPSGQISQASALAPAPPQVLPQAPAPAPAPAMVSALAQAPAPVPVLAPGPPQAVAPPAPKPTQAGEGTLSEALLQLQFDDEDLGALLGNSTDPAVFTDLASVDNSEFQQLLNQGIPVAPHTTEPMLMEYPEAITRLVTGAQRPPDPAPAPLGAPGLPNGLLSGDEDFSSIADMDFSALLSQISS

SEQ ID NO: 836240 - protein, 557 aa, Homo sapiens
RAVSDGGPRGAFPPLANGSSVVHAAGPAATPAPPPGPRPWTNCSPSSSRQSIPGERSTDTTKTHPTIKINGYTGPGTVRISLVTKDPPHRPHPHELVGKDCRDGFYEAELCPDRCIHSFQNLGIQCVKKRDLEQAISQRIQTNNNPFQVPIEEQRGDYDLNAVRLCFQVTVRDPSGRPLRLPPVLSHPIFDNRAPNTAELKICRVNRNSGSCLGGDEIFLLCDKVQKEDIEVYFTGPGWEARGSFSQADVHRQVAIVFRTPPYADPSLQAPVRVSMQLRRPSDRELSEPMEFQYLPDTDDRHRIEEKRKRTYETFKSIMKKSPFSGPTDPRPPPRRIAVPSRSSASVPKPAPQPYPFTSSLSTINYDEFPTMVFPSGQISQASALAPAPPQVLPQAPAPAPAPAMVSALAQAPAPVPVLAPGPPQAVAPPAPKPTQAGEGTLSEALLQLQFDDEDLGALLGNSTDPAVFTDLASVDNSEFQQLLNQGIPVAPHTTEPMLMEYPEAITRLVTGAQRPPDPAPAPLGAPGLPNGLLSGDEDFSSIADMDFSALLSQISS

SEQ ID NO: 836241 - protein, 500 aa, Homo sapiens
LAEYQGAKLPSINGYTGPGTVRISLVTKDPPHRPHPHELVGKDCRDGFYEAELCPDRCIHSFQNLGIQCVKKRDLEQAISQRIQTNNNPFQVPIEEQRGDYDLNAVRLCFQVTVRDPSGRPLRLPPVLSHPIFDNRAPNTAELKICRVNRNSGSCLGGDEIFLLCDKVQKEDIEVYFTGPGWEARGSFSQADVHRQVAIVFRTPPYADPSLQAPVRVSMQLRRPSDRELSEPMEFQYLPDTDDRHRIEEKRKRTYETFKSIMKKSPFSGPTDPRPPPRRIAVPSRSSASVPKPAPQPYPFTSSLSTINYDEFPTMVFPSGQISQASALAPAPPQVLPQAPAPAPAPAMVSALAQAPAPVPVLAPGPPQAVAPPAPKPTQAGEGTLSEALLQLQFDDEDLGALLGNSTDPAVFTDLASVDNSEFQQLLNQGIPVAPHTTEPMLMEYPEAITRLVTGAQRPPDPAPAPLGAPGLPNGLLSGDEDFSSIADMDFSALLSQISS

SEQ ID NO: 836242 - protein, 475 aa, Homo sapiens
MGDDLGVGRVGRSRLGKAGRSGLCERQWDRRLGALSFQNLGIQCVKKRDLEQAISQRIQTNNNPFQVPIEEQRGDYDLNAVRLCFQVTVRDPSGRPLRLPPVLSHPIFDNRAPNTAELKICRVNRNSGSCLGGDEIFLLCDKVQKEDIEVYFTGPGWEARGSFSQADVHRQVAIVFRTPPYADPSLQAPVRVSMQLRRPSDRELSEPMEFQYLPDTDDRHRIEEKRKRTYETFKSIMKKSPFSGPTDPRPPPRRIAVPSRSSASVPKPAPQPYPFTSSLSTINYDEFPTMVFPSGQISQASALAPAPPQVLPQAPAPAPAPAMVSALAQAPAPVPVLAPGPPQAVAPPAPKPTQAGEGTLSEALLQLQFDDEDLGALLGNSTDPAVFTDLASVDNSEFQQLLNQGIPVAPHTTEPMLMEYPEAITRLVTGAQRPPDPAPAPLGAPGLPNGLLSGDEDFSSIADMDFSALLSQISS

SEQ ID NO: 836243 - protein, 463 aa, Homo sapiens
MTFRPQWSQCWVLPPLGLVFHTRTSGPPSAELPAPTDSTYIPTSPALLIACFLAVPIEEQRGDYDLNAVRLCFQVTVRDPSGRPLRLPPVLSHPIFDNRAPNTAELKICRVNRNSGSCLGGDEIFLLCDKVQKEDIEVYFTGPGWEARGSFSQADVHRQVAIVFRTPPYADPSLQAPVRVSMQLRRPSDRELSEPMEFQYLPDTDDRHRIEEKRKRTYETFKSIMKKSPFSGPTDPRPPPRRIAVPSRSSASVPKPAPQPYPFTSSLSTINYDEFPTMVFPSGQISQASALAPAPPQVLPQAPAPAPAPAMVSALAQAPAPVPVLAPGPPQAVAPPAPKPTQAGEGTLSEALLQLQFDDEDLGALLGNSTDPAVFTDLASVDNSEFQQLLNQGIPVAPHTTEPMLMEYPEAITRLVTGAQRPPDPAPAPLGAPGLPNGLLSGDEDFSSIADMDFSALLSQISS

SEQ ID NO: 836244 - protein, 282 aa, Homo sapiens
MQLRRPSDRELSEPMEFQYLPDTDDRHRIEEKRKRTYETFKSIMKKSPFSGPTDPRPPPRRIAVPSRSSASVPKPAPQPYPFTSSLSTINYDEFPTMVFPSGQISQASALAPAPPQVLPQAPAPAPAPAMVSALAQAPAPVPVLAPGPPQAVAPPAPKPTQAGEGTLSEALLQLQFDDEDLGALLGNSTDPAVFTDLASVDNSEFQQLLNQGIPVAPHTTEPMLMEYPEAITRLVTGAQRPPDPAPAPLGAPGLPNGLLSGDEDFSSIADMDFSALLSQISS

SEQ ID NO: 836245 - protein, 235 aa, Homo sapiens
RAVTRRRAARRISASGEWLVCSARRGPSCDPGPAPGTPAMDELFPLIFPAEPAQASGPYVEIIEQPKQRGMRFRYKCEGRSAGSIPGERSTDTTKTHPTIKINGYTGPGTVRISLVTKDPPHRPSDRELSEPMEFQYLPDTDDRHRIEEKRKRTYETFKSIMKKSPFSGPTDPRPPPRRIAVPSRSSASVPKPGPGPSPCPSPSPRPSSGCGPTCPQAHPGWGRNAVRGPAAAAV

SEQ ID NO: 836246 - protein, 366 aa, Homo sapiens
MGDDLGVGRVGRSRLGKAGRSGLCERQWDRRLGALSFQNLGIQCVKKRDLEQAISQRIQTNNNPFQVPIEEQRGDYDLNAVRVSMQLRRPSDRELSEPMEFQYLPDTDDRHRIEEKRKRTYETFKSIMKKSPFSGPTDPRPPPRRIAVPSRSSASVPKPAPQPYPFTSSLSTINYDEFPTMVFPSGQISQASALAPAPPQVLPQAPAPAPAPAMVSALAQAPAPVPVLAPGPPQAVAPPAPKPTQAGEGTLSEALLQLQFDDEDLGALLGNSTDPAVFTDLASVDNSEFQQLLNQGIPVAPHTTEPMLMEYPEAITRLVTGAQRPPDPAPAPLGAPGLPNGLLSGDEDFSSIADMDFSALLSQISS

SEQ ID NO: 836247 - protein, 416 aa, Homo sapiens
RAVTRRRAARRISASGEWLVCSARRGPSCDPGPAPGTPAMDELFPLIFPAEPAQASGPYVEIIEQPKQRGMRFRYKCEGRSAGSIPGERSTDTTKTHPTIKINGYTGPGTVRISLVTKDPPHRPHPHELVGKDCRDGFYEAELCPDRCIHSFQNLGIQCVKKRDLEQAISQRIQTNNNPFQVPIEEQRGDYDLNAVRLCFQVTVRDPSGRPLRLPPVLSHPIFDNRAPNTAELKICRVNRNSGSCLGGDEIFLLCDKVQKEDIEVYFTGPGWEARGSFSQADVHRQVAIVFRTPPYADPSLQAPVRVSMQLRRPSDRELSEPMEFQYLPDTDDRHRIEEKRKRTYETFKSIMKKSPFSGPTDPRPPPRRIAVPSRSSASVPKPGKDFLLSHWNDRFSSVQLRSSGDEDSWAPLQTY

SEQ ID NO: 836248 - protein, 386 aa, Homo sapiens
RAVTRRRAARRISASGEWLVCSARRGPSCDPGPAPGTPAMDELFPLIFPAEPAQASGPYVEIIEQPKQRGMRFRYKCEGRSAGSIPGERSTDTTKTHPTIKINGYTGPGTVRISLVTKDPPHRPHPHELVGKDCRDGFYEAELCPDRCIHSFQNLGIQCVKKRDLEQAISQRIQTNNNPFQVPIEEQRGDYDLNAVRLCFQVTVRDPSGRPLRLPPVLSHPIFDNRAPNTAELKICRVNRNSGSCLGGDEIFLLCDKVQKEDIEVYFTGPGWEARGSFSQADVHRQVAIVFRTPPYADPSLQAPVRVSMQLRRPSDRELSEPMEFQYLPDTDDRHRIEEKRKRTYETFKSIMKKSPFSGTTCPTCGTSYCRNRNSIQAHAVSALPV

SEQ ID NO: 836249 - protein, 550 aa, Homo sapiens
HEAGPGRSWARGMDELFPLIFPAEQPKQRGMRFRYKCEGRSAGSIPGERSTDTTKTHPTIKINGYTGPGTVRISLVTKDPPHRPHPHELVGKDCRDGFYEAELCPDRCIHSFQNLGIQCVKKRDLEQAISQRIQTNNNPFQVPIEEQRGDYDLNAVRLCFQVTVRDPSGRPLRLPPVLSHPIFDNRAPNTAELKICRVNRNSGSCLGGDEIFLLCDKVQKEDIEVYFTGPGWEARGSFSQADVHRQVAIVFRTPPYADPSLQAPVRVSMQLRRPSDRELSEPMEFQYLPDTDDRHRIEEKRKRTYETFKSIMKKSPFSGPTDPRPPPRRIAVPSRSSASVPKPAPQPYPFTSSLSTINYDEFPTMVFPSGQISQASALAPAPPQVLPQAPAPAPAPAMVSALAQAPAPVPVLAPGPPQAVAPPAPKPTQAGEGTLSEALLQLQFDDEDLGALLGNSTDPAVFTDLASVDNSEFQQLLNQGIPVAPHTTEPMLMEYPEAITRLVTGAQRPPDPAPAPLGAPGLPNGLLSGDEDFSSIADMDFSALLSQISS

SEQ ID NO: 836250 - protein, 467 aa, Homo sapiens
RAVTRRRAARRISASGEWLVCSARRGPSCDPGPAPGTPAMDELFPLIFPAEPAQASGPYVEIIEQPKQRGMRFRYKCEGRSAGSIPGERSTDTTKTHPTIKINGYTGPGTVRISLVTKDPPHRPHPHELVGKDCRDGFYEAELCPDRCIHSFQNLGIQCVKKRDLEQAISQRIQTNNNPFQVPIEEQRGDYDLNAVRLCFQVTVRDPSGRPLRLPPVLSHPIFDNRAPNTAELKICRVNRNSGSCLGGDEIFLLCDKVQKAPQPYPFTSSLSTINYDEFPTMVFPSGQISQASALAPAPPQVLPQAPAPAPAPAMVSALAQAPAPVPVLAPGPPQAVAPPAPKPTQAGEGTLSEALLQLQFDDEDLGALLGNSTDPAVFTDLASVDNSEFQQLLNQGIPVAPHTTEPMLMEYPEAITRLVTGAQRPPDPAPAPLGAPGLPNGLLSGDEDFSSIADMDFSALLSQISS

SEQ ID NO: 836251 - protein, 285 aa, Homo sapiens
RAVSDGGPRGAFPPLANGSSVVHAAGPAATPAPPPGPRPWTNCSPSSSRQINGYTGPGTVRISLVTKDPPHRPHPHELVGKDCRDGFYEAELCPDRCIHSFQNLGIQCVKKRDLEQAISQRIQTNNNPFQVPIEEQRGDYDLNAVRLCFQVTVRDPSGRPLRLPPVLSHPIFDNRAPNTAELKICRVNRNSGSCLGGDEIFLLCDKVQKEDIEVYFTGPGWEARGSFSQADVHRQVAIVFRTPPYADPSLQAPVRVSMQLRRPSDRELSEPMEFQYLPDTDDRPA

SEQ ID NO: 836252 - protein, 590 aa, Homo sapiens; identical to SEQ ID NO: 836236

SEQ ID NO: 836253 - protein, 663 aa, Homo sapiens
RAVTRRRAARRISASGEWLVCSARRGPSCDPGPAPGTPAMDELFPLIFPAEPAQASGPYVEIIEQPKQRGMRFRYKCEGRSAGSIPGERSTDTTKTHPTIKINGYTGPGTVRISLVTKDPPHRPHPHELVGKDCRDGFYEAELCPDRCIHSFQNLGIQCVKKRDLEQAISQRIQTNNNPFQVPIEEQRGDYDLNAVRLCFQVTVRDPSGRPLRLPPVLSHPIFDNRAPNTAELKICRVNRNSGSCLGGDEIFLLCDKVQKGIHQEAGVGSWEQGVKLSREVECQVTGFGYFLLCLGGLRWAEGRCIRRQASEVEGETMEGYDTLTHTATASPAEDIEVYFTGPGWEARGSFSQADVHRQVAIVFRTPPYADPSLQAPVRVSMQLRRPSDRELSEPMEFQYLPDTDDRHRIEEKRKRTYETFKSIMKKSPFSGPTDPRPPPRRIAVPSRSSASVPKPAPQPYPFTSSLSTINYDEFPTMVFPSGQISQASALAPAPPQVLPQAPAPAPAPAMVSALAQAPAPVPVLAPGPPQAVAPPAPKPTQAGEGTLSEALLQLQFDDEDLGALLGNSTDPAVFTDLASVDNSEFQQLLNQGIPVAPHTTEPMLMEYPEAITRLVTGAQRPPDPAPAPLGAPGLPNGLLSGDEDFSSIADMDFSALLSQISS

SEQ ID NO: 836254 - protein, 590 aa, Homo sapiens; identical to SEQ ID NO: 836236

SEQ ID NO: 836255 - protein, 590 aa, Homo sapiens
AGAARLCGAARAAFPPHSRRRSCAGSGRPAGWWRGAGQAGRELFPLIFPAEPAQASGPYVEIIEQPKQRGMRFRYKCEGRSAGSIPGERSTDTTKTHPTIKINGYTGPGTVRISLVTKDPPHRPHPHELVGKDCRDGFYEAELCPDRCIHSFQNLGIQCVKKRDLEQAISQRIQTNNNPFQVPIEEQRGDYDLNAVRLCFQVTVRDPSGRPLRLPPVLSHPIFDNRAPNTAELKICRVNRNSGSCLGGDEIFLLCDKVQKEDIEVYFTGPGWEARGSFSQADVHRQVAIVFRTPPYADPSLQAPVRVSMQLRRPSDRELSEPMEFQYLPDTDDRHRIEEKRKRTYETFKSIMKKSPFSGPTDPRPPPRRIAVPSRSSASVPKPAPQPYPFTSSLSTINYDEFPTMVFPSGQISQASALAPAPPQVLPQAPAPAPAPAMVSALAQAPAPVPVLAPGPPQAVAPPAPKPTQAGEGTLSEALLQLQFDDEDLGALLGNSTDPAVFTDLASVDNSEFQQLLNQGIPVAPHTTEPMLMEYPEAITRLVTGAQRPPDPAPAPLGAPGLPNGLLSGDEDFSSIADMDFSALLSQISS

SEQ ID NO: 836256 - protein, 539 aa, Homo sapiens
RAVSDGGPRGAFPPLANGSSVVHAAGPAATPAPPPGPRPWTNCSPSSSRQINGYTGPGTVRISLVTKDPPHRPHPHELVGKDCRDGFYEAELCPDRCIHSFQNLGIQCVKKRDLEQAISQRIQTNNNPFQVPIEEQRGDYDLNAVRLCFQVTVRDPSGRPLRLPPVLSHPIFDNRAPNTAELKICRVNRNSGSCLGGDEIFLLCDKVQKEDIEVYFTGPGWEARGSFSQADVHRQVAIVFRTPPYADPSLQAPVRVSMQLRRPSDRELSEPMEFQYLPDTDDRHRIEEKRKRTYETFKSIMKKSPFSGPTDPRPPPRRIAVPSRSSASVPKPAPQPYPFTSSLSTINYDEFPTMVFPSGQISQASALAPAPPQVLPQAPAPAPAPAMVSALAQAPAPVPVLAPGPPQAVAPPAPKPTQAGEGTLSEALLQLQFDDEDLGALLGNSTDPAVFTDLASVDNSEFQQLLNQGIPVAPHTTEPMLMEYPEAITRLVTGAQRPPDPAPAPLGAPGLPNGLLSGDEDFSSIADMDFSALLSQISS

SEQ ID NO: 836257 - protein, 463 aa, Homo sapiens; identical to SEQ ID NO: 836243

SEQ ID NO: 836258 - protein, 484 aa, Homo sapiens
RAVTRRRAARRISASGEWLVCSARRGPSCDPGPAPGTPAMDELFPLIFPAEPAQASGPYVEIIEQPKQRGMRFRYKCEGRSAGSIPGERSTDTTKTHPTIKINGYTGPGTVRISLVTKDPPHRPHPHELVGKDCRDGFYEAELCPDRCIHSFQNLGIQCVKKRDLEQAISQRIQTNNNPFQVPIEEQRGDYDLNAVRLCFQVTVRDPSGRPLRLPPVLSHPIFDNHDRHRIEEKRKRTYETFKSIMKKSPFSGPTDPRPPPRRIAVPSRSSASVPKPAPQPYPFTSSLSTINYDEFPTMVFPSGQISQASALAPAPPQVLPQAPAPAPAPAMVSALAQAPAPVPVLAPGPPQAVAPPAPKPTQAGEGTLSEALLQLQFDDEDLGALLGNSTDPAVFTDLASVDNSEFQQLLNQGIPVAPHTTEPMLMEYPEAITRLVTGAQRPPDPAPAPLGAPGLPNGLLSGDEDFSSIADMDFSALLSQISS

SEQ ID NO: 836259 - protein, 400 aa, Homo sapiens
RAVTRRRAARRISASGEWLVCSARRGPSCDPGPAPGTPAMDELFPLIFPAEPAQASGPYVEIIEQPKQRGMRFRYKCEGRSAGSIPGERSTDTTKTHPTIKINGYTGPGTVRISLVTKDPPHRPSDRELSEPMEFQYLPDTDDRHRIEEKRKRTYETFKSIMKKSPFSGPTDPRPPPRRIAVPSRSSASVPKPAPQPYPFTSSLSTINYDEFPTMVFPSGQISQASALAPAPPQVLPQAPAPAPAPAMVSALAQAPAPVPVLAPGPPQAVAPPAPKPTQAGEGTLSEALLQLQFDDEDLGALLGNSTDPAVFTDLASVDNSEFQQLLNQGIPVAPHTTEPMLMEYPEAITRLVTGAQRPPDPAPAPLGAPGLPNGLLSGDEDFSSIADMDFSALLSQISS

SEQ ID NO: 836260 - protein, 239 aa, Homo sapiens
MKKSPFSGPTDPRPPPRRIAVPSRSSASVPKPAPQPYPFTSSLSTINYDEFPTMVFPSGQISQASALAPAPPQVLPQAPAPAPAPAMVSALAQAPAPVPVLAPGPPQAVAPPAPKPTQAGEGTLSEALLQLQFDDEDLGALLGNSTDPAVFTDLASVDNSEFQQLLNQGIPVAPHTTEPMLMEYPEAITRLVTGAQRPPDPAPAPLGAPGLPNGLLSGDEDFSSIADMDFSALLSQISS

SEQ ID NO: 836261 - protein, 402 aa, Homo sapiens
  misc_feature (395)..(395): Xaa can be any naturally occurring amino acid
  misc_feature (399)..(399): Xaa can be any naturally occurring amino acid
  misc_feature (402)..(402): Xaa can be any naturally occurring amino acid
RAVTRRRAARRISASGEWLVCSARRGPSCDPGPAPGTPAMDELFPLIFPAEPAQASGPYVEIIEQPKQRGMRFRYKCEGRSAGSIPGERSTDTTKTHPTIKINGYTGPGTVRISLVTKDPPHRPHPHELVGKDCRDGFYEAELCPDRCIHSFQNLGIQCVKKRDLEQAISQRIQTNNNPFQVPIEEQRGDYDLNAVRLCFQVTVRDPSGRPLRLPPVLSHPIFDNRAPNTAELKICRVNRNSGSCLGGDEIFLLCDKVQKEDIEVYFTGPGWEARGSFSQADVHRQVAIVFRTPPYADPSLQAPVRVSMQLRRPSDRELSEPMEFQYLPDTDDRHRIEEKRKRTYETFKSIMKKSPFSGPTDPRPPPRRIAVPSRSSASVPKPAPQPSSAYPMGXRAEXVTX

SEQ ID NO: 836262 - protein, 336 aa, Homo sapiens
RAVTRRRAARRISASGEWLVCSARRGPSCDPGPAPGTPAMDELFPLIFPAEPAQASGPYVEIIEQPKQRGMRFRYKCEGRSAGSIPGERSTDTTKTHPTIKINGYTGPGTVRISLVTKDPPHRPHPHELVGKDCRDGFYEAELCPDRCIHSFQNLGIQCVKKRDLEQAISQRIQTNNNPFQVPIEEQRGDYDLNAVRLCFQVTVRDPSGRPLRLPPVLSHPIFDNRAPNTAELKICRVNRNSGSCLGGDEIFLLCDKVQKEDIEVYFTGPGWEARGSFSQADVHRQVAIVFRTPPYADPSLQAPVRVSMQLRRPSDRELSEPMEFQYLPDTDDRPA

SEQ ID NO: 836263 - protein, 284 aa, Homo sapiens
MSMLPSFGFTQEQVACVCEVLQQGGNLERLGRFLWSLPACDHLHKNESVLKAKAVVAFHRGNFRELYKILESHQFSPHNHPKLQQLWLKAHYVEAEKLRGRPLGAVGKYRVRRKFPLPRTIWDGEETSYCFKEKSRGVLREWYAHNPYPSPREKRELAEATGLTTTQVSNWFKNRRQRDRAAEAKERENTENNNSSSNKQNQLSPLEGGKPLMSSSEEEFSPPQSPDQNSVLLLQGNMGHARSSNYSLPGLTASQPSHGLQTHQHQLQDSLLGPLTSSLVDLGS

SEQ ID NO: 836264 - protein, 173 aa, Homo sapiens
MSMLPSFGFTQEQVACVCEVLQQGGNLERLGRFLWSLPACDHLHKNESVLKAKAVVAFHRGNFRELYKILESHQFSPHNHPKLQQLWLKAHYVEAEKLRGRPLGAVGKYRVRRKFPLPRTIWDGEETSYCFKEKSRGVLREWYAHNPYPSPREKRELAEATGLTTTQGEHRKQ

SEQ ID NO: 836265 - protein, 251 aa, Homo sapiens
RDLFFRTASGWERTLTTQNSFTNGLVLGFSSLSPQISLPEPQAYSDLAGSGVPQEQVGCCSGATPAIGAGVPKGRGHPEFPTKQRKKNFGTSAGFGESPHCPRAMTRIIEETPLYALPFQIFVGRVESSPSFWMVKEFQESGPGAPNYLATSQKGNKWVPARGVCIKACQPSRETLATANAVPLNAFSSTKAHAAVTCTEEALESRNLASGAPCQRCSLPSRAAARAAAGWLELLISFKSPTHLCFSCDLH

SEQ ID NO: 836266 - protein, 284 aa, Homo sapiens; identical to SEQ ID NO: 836263

SEQ ID NO: 836267 - protein, 251 aa, Homo sapiens; identical to SEQ ID NO: 836265

SEQ ID NO: 836268 - protein, 1122 aa, Homo sapiens
MVEEAIVSMTAVAWYINDMKRKQEHAARLQEVQRRLGGWTGPELSAFGELVLEGAFRGGGGGGPRLRGGERLLFLFSRMLLVAKRRGLEYTYKGHIFCCNLSVSESPRDPLGFKVSDLTIPKHRHLLQAKNQEEKRLWIHCLQRLFFENHPASIPAKAKQVLLENSLHCAPKSKPVLEPLTPPLGSPRPRDARSFTPGRRNTAPSPGPSVIRRGRRQSEPVKDPYVMFPQNAKPGFKHAGSEGELYPPESQPPVSGSAPPEDLEDAGPPTLDPSGTSITEEILELLNQRGLRDPGPSTHDIPKFPGDSQVPGDSETLTFQALPSRDSSEEEEEEEEGLEMDERGPSPLHVLEGLESSIAAEMPSIPCLTKIPDVPNLPEIPSRCEIPEGSRLPSLSDISDVFEMPCLPAIPSVPNTPSLSSTPTLSCDSWLQGPLQEPAEAPATRRELFSGSNPGKLGEPPSGGKAGPEEDEEGVSFTDFQPQDVTQHQGFPDELAFRSCSEIRSAWQALEQGQLARPGFPEPLLILEDSDLGGDSGSGKAGAPSSERTASRVRELARLYSERIQQMQRAETRASANAPRRRPRVLAQPQPSPCLPQEQAEPGLLPAFGHVLVCELAFPLTCAQESVPLGPAVWVQAAIPLSKQGGSPDGQGLHVSNLPKQDLPGIHVSAATLLPEQGGSRHVQAPAATPLPKQEGPLHLQVPALTTFSDQGHPEIQVPATTPLPEHRSHMVIPAPSTAFCPEQGHCADIHVPTTPALPKEICSDFTVSVTTPVPKQEGHLDSESPTNIPLTKQGGSRDVQGPDPVCSQPIQPLSWHGSSLDPQGPGDTLPPLPCHLPDLQIPGTSPLPAHGSHLDHRIPANAPLSLSQELPDTQVPATTPLPLPQVLTDIWVQALPTSPKQGSLPDIQGPAAAPPLPEPSLTDTQVQKLTPSLEQKSLIDAHVPAATPLPERGGSLDIQGLSPTPVQTTMVLSKPGGSLASHVARLESSDLTPPHSPPPSSRQLLGPNAAALSRYLAASYISQSLARRQGPGGGAPAASRGSWSSAPTSRASSPPPQPQPPPPPARRLSYATTVNIHVGGGGRLRPAKAQVRLNHPALLASTQESMGLHRAQGAPDAPFHM

SEQ ID NO: 836269 - protein, 1122 aa, Homo sapiens; identical to SEQ ID NO: 836268

SEQ ID NO: 836270 - protein, 1032 aa, Homo sapiens
MVEEAIVSMTAVAWYINDMKRKQEHAARLQEVQRRLGGWTGPELSAFGELVLEGAFRGGGGGGPRLRGGERLLFLFSRMLLVAKRRGLEYTYKGHIFCCNLSVSESPRDPLGFKVSDLTIPKHRHLLQAKNQEEKRLWIHCLQRLFFENHPASIPAKAKQVLLENSLHCAPKSKPVLEPLTPPLGSPRPRDARSFTPGRRNTAPSPGPSVIRRGRRQSEPVKDPYVMFPQNAKPGFKHAGSEGELYPPESQPPVSGSAPPEDLEDAGPPTLDPSGTSITEEILELLNQRGLRDPGPSTHDIPKFPGDSQVPGDSETLTFQALPSRDSSEEEEEEEEGLEMDERGPSPLHVLEGLESSIAAEMPSIPCLTKIPDVPNLPEIPSRCEIPEGSRLPSLSDISDVFEMPCLPAIPSVPNTPSLSSTPTLSCDSWLQGPLQEPAEAPATRRELFSGSNPGKLGEPPSGGKAGPEEDEEGVSFTDFQPQDVTQHQGFPDELAFRSCSEIRSAWQALEQGQLARPGFPEPLLILEDSDLGGDSGSGKAGAPSSERTASRVRELARLYSERIQQMQRAETRASANAPRRRPRVLAQPQPSPCLPQEQAEPGLLPAFGHVLVCELAFPLTCAQESVPLGPAVWVQAAIPLSKQGGSPDGQGLHVSNLPKQDLPGIHVSAATLLPEQGGSRHVQAPAATPLPKQEGPLHLQVPALTTFSDQGHPEIQVPATTPLPEHRSHMVIPAPSTAFCPEQGHCADIHVPTTPALPKEICSDFTVSVTTPVPKQEGHLDSESPTNIPLTKQGGSRDVQGPDPVCSQPIQPLSWHGSSLDPQGPGDTLPPLPCHLPDLQIPGTSPLPAHGSHLDHRIPANAPLSLSQELPDTQVPATTPLPLPQVLTDIWVQALPTSPKQGSLPDIQGPAAAPPLPEPSLTDTQVQKLTPSLEQKSLIDAHVPAATPLPERGGSLDIQGLSPTPVQTTMVLSKPGGSLASHVARNLWAFTGPRGLLMPPSTCEPGHEASLKQGFQPDAIDPQNLTWKSRH

SEQ ID NO: 836271 - protein, 577 aa, Homo sapiens
MPEGAQGLSLSKPSPSLGCGRRGEVCDCGTVCETRTAPAAPTMASPRGSGSSTSLSTVGSEGDPAPGPTPACSASRPEPLPGPPIRLHLSPVGIPGSARPSRLERVAREIVETERAYVRDLRSIVEDYLGPLLDGGVLGLSVEQVGTLFANIEDIYEFSSELLEDLENSSSAGGIAECFVQRSEDFDIYTLYCMNYPSSLALLRELSLSPPAALWLQERQAQLRHSLPLQSFLLKPVQRILKYHLLLQELGKHWAEGPGTGGREMVEEAIVSMTAVAWYINDMKRKQEHAARLQEVQRRLGGWTGPELSAFGELVLEGAFRGGGGGGPRLRGGERLLFLFSRMLLVAKRRGLEYTYKGHIFCCNLSVSESPRDPLGFKVSDLTIPKHRHLLQAKNQEEKRLWIHCLQRLFFENHPASIPAKAKQVLLENSLHCAPKSKPVLEPLTPPLGSPRPRDARSFTPGRRNTAPSPGPSVIRRGRRQSEPVKDPYVMFPQNAKPGFKHAGSEGELYPPESQPPVSGSAPPEDLEDAGPPTLDPSGTSITEEILELLNQRGLRDPGESMGLHRAQGAPDAPFHM

SEQ ID NO: 836272 - protein, 534 aa, Homo sapiens
RWSSGPDSILFSHSGLLPAFGHVLVCELAFPLTCAQESVPLGPAVWVQAAIPLSKQGGSPDGQGLHVSNLPKQDLPGIHVSAATLLPEQGGSRHVQAPAATPLPKQEGPLHLQVPALTTFSDQGHPEIQVPATTPLPEHRSHMVIPAPSTAFCPEQGHCADIHVPTTPALPKEICSDFTVSVTTPVPKQEGHLDSESPTNIPLTKQGGSRDVQGPDPVCSQPIQPLSWHGSSLDPQGPGDTLPPLPCHLPDLQIPGTSPLPAHGSHLDHRIPANAPLSLSQELPDTQVPATTPLPLPQVLTDIWVQALPTSPKQGSLPDIQGPAAAPPLPEPSLTDTQVQKLTPSLEQKSLIDAHVPAATPLPERGGSLDIQGLSPTPVQTTMVLSKPGGSLASHVARLESSDLTPPHSPPPSSRQLLGPNAAALSRYLAASYISQSLARRQGPGGGAPAASRGSWSSAPTSRASSPPPQPQPPPPPARRLSYATTVNIHVGGGGRLRPAKAQVRLNHPALLASTQESMGLHRAQGAPDAPFHM

SEQ ID NO: 836273 - protein, 437 aa, Homo sapiens
MVEEAIVSMTAVAWYINDMKRKQEHAARLQEVQRRLGGWTGPELSAFGELVLEGAFRGGGGGGPRLRGGERLLFLFSRMLLVAKRRGLEYTYKGHIFCCNLSVSESPRDPLGFKVSDLTIPKHRHLLQAKNQEEKRLWIHCLQRLFFENHPASIPAKAKQVLLENSLHCAPKSKPVLEPLTPPLGSPRPRDARSFTPGRRNTAPSPGPSVIRRGRRQSEPVKDPYVMFPQNAKPGFKHAGSEGELYPPESQPPVSGSAPPEDLEDAGPPTLDPSGTSITEEILELLNQRGLRDPGPSTHDIPKFPGDSQVPGDSETLTFQALPSRDSSEEEEEEEEGLEMDERGPSPLHVLEGLESSIAAEMPSIPCLTKIPDVPNLPEIPSRCEIPEGSRLPSLSDISDVFEMPCLPAIPSVPNTPSLSSTPTLSCDSWLQGPLWG

SEQ ID NO: 836274 - protein, 97 aa, Homo sapiens
SGYVVGRGGPRWSSGPDSILFSHSGLLPAFGHVLVCELAFPLTCAQESVPLGPAVWVQAAIPLSKQGGSPDGQGLHVSNLPKQDLPGIHVSAATLLP

SEQ ID NO: 836275 - protein, 1386 aa, Homo sapiens
MPEGAQGLSLSKPSPSLGCGRRGEVCDCGTVCETRTAPAAPTMASPRGSGSSTSLSTVGSEGDPAPGPTPACSASRPEPLPGPPIRLHLSPVGIPGSARPSRLERVAREIVETERAYVRDLRSIVEDYLGPLLDGGVLGLSVEQVGTLFANIEDIYEFSSELLEDLENSSSAGGIAECFVQRSEDFDIYTLYCMNYPSSLALLRELSLSPPAALWLQERQAQLRHSLPLQSFLLKPVQRILKYHLLLQELGKHWAEGPGTGGREMVEEAIVSMTAVAWYINDMKRKQEHAARLQEVQRRLGGWTGPELSAFGELVLEGAFRGGGGGGPRLRGGERLLFLFSRMLLVAKRRGLEYTYKGHIFCCNLSVSESPRDPLGFKVSDLTIPKHRHLLQAKNQEEKRLWIHCLQRLFFENHPASIPAKAKQVLLENSLHCAPKSKPVLEPLTPPLGSPRPRDARSFTPGRRNTAPSPGPSVIRRGRRQSEPVKDPYVMFPQNAKPGFKHAGSEGELYPPESQPPVSGSAPPEDLEDAGPPTLDPSGTSITEEILELLNQRGLRDPGPSTHDIPKFPGDSQVPGDSETLTFQALPSRDSSEEEEEEEEGLEMDERGPSPLHVLEGLESSIAAEMPSIPCLTKIPDVPNLPEIPSRCEIPEGSRLPSLSDISDVFEMPCLPAIPSVPNTPSLSSTPTLSCDSWLQGPLQEPAEAPATRRELFSGSNPGKLGEPPSGGKAGPEEDEEGVSFTDFQPQDVTQHQGFPDELAFRSCSEIRSAWQALEQGQLARPGFPEPLLILEDSDLGGDSGSGKAGAPSSERTASRVRELARLYSERIQQMQRAETRASANAPRRRPRVLAQPQPSPCLPQEQAEPGLLPAFGHVLVCELAFPLTCAQESVPLGPAVWVQAAIPLSKQGGSPDGQGLHVSNLPKQDLPGIHVSAATLLPEQGGSRHVQAPAATPLPKQEGPLHLQVPALTTFSDQGHPEIQVPATTPLPEHRSHMVIPAPSTAFCPEQGHCADIHVPTTPALPKEICSDFTVSVTTPVPKQEGHLDSESPTNIPLTKQGGSRDVQGPDPVCSQPIQPLSWHGSSLDPQGPGDTLPPLPCHLPDLQIPGTSPLPAHGSHLDHRIPANAPLSLSQELPDTQVPATTPLPLPQVLTDIWVQALPTSPKQGSLPDIQGPAAAPPLPEPSLTDTQVQKLTPSLEQKSLIDAHVPAATPLPERGGSLDIQGLSPTPVQTTMVLSKPGGSLASHVARLESSDLTPPHSPPPSSRQLLGPNAAALSRYLAASYISQSLARRQGPGGGAPAASRGSWSSAPTSRASSPPPQPQPPPPPARRLSYATTVNIHVGGGGRLRPAKAQVRLNHPALLASTQESMGLHRAQGAPDAPFHM

SEQ ID NO: 836276 - protein, 896 aa, Homo sapiens [sequence omitted]

SEQ ID NO: 836277 - protein, 732 aa, Homo sapiens
MVEEAIVSMTAVAWYINDMKRKQEHAARLQEVQRRLGGWTGPELSAFGELVLEGAFRGGGGGGPRLRGGERLLFLFSRMLLVAKRRGLEYTYKGHIFCCNLSVSESPRDPLGFKVSDLTIPKHRHLLQAKNQEEKRLWIHCLQRLFFENHPASIPAKAKQVLLENSLHCAPKSKPVLEPLTPPLGSPRPRDARSFTPGRRNTAPSPGPSVIRRGRRQSEPVKDPYVMFPQNAKPGFKHAGSEGELYPPESQPPVSGSAPPEDLEDAGPPTLDPSGTSITEEILELLNQRGLRDPGPSTHDIPKFPGDSQVPGDSETLTFQALPSRDSSEEEEEEEEGLEMDERGPSPLHVLEGLESSIAAEMPSIPCLTKIPDVPNLPEIPSRCEIPEGSRLPSLSDISDVFEMPCLPAIPSVPNTPSLSSTPTLSCDSWLQGPLQEPAEAPATRRELFSGSNPGKLGEPPSGGKAGPEEDEEGVSFTDFQPQDVTQHQGFPDELAFRSCSEIRSAWQALEQGHLPDIQGPAAAPPLPEPSLTDTQVQKLTPSLEQKSLIDAHVPAATPLPERGGSLDIQGLSPTPVQTTMVLSKPGGSLASHVARLESSDLTPPHSPPPSSRQLLGPNAAALSRYLAASYISQSLARRQGPGGGAPAASRGSWSSAPTSRASSPPPQPQPPPPPARRLSYATTVNIHVGGGGRLRPAKAQVRLNHPALLASTQESMGLHRAQGAPDAPFHM

SEQ ID NO: 836278 - protein, 102 aa, Homo sapiens
SYHADMFGLFSCAHYSRPPMTFPSSPETPRCLATAKPSHSKPCPAGTLQKRRRRKRKGWRWMNGGLPHSTSWKGSKVPLQLKCPAFPALPKFLTCPTFLKFP

SEQ ID NO: 836279 - protein, 157 aa, Homo sapiens
TLEDTLRLWDQSDCGQPGPCRQSSGKVGAQCWLLHLYPALPSSPELGGKKRAAGGSTARVCWGLHTCPFLWLCVPRSLHSWGGGEYPVLSQTPARPEFSDSSTSSACLHWVLSLRGNKPREPRELQGGERAERAPGSSALAGAPSWEADCRKKAQPC

SEQ ID NO: 836280 - protein, 856 aa, Homo sapiens
TSVGTRSPFIHQNTVYFGAPGAYNWKGNSYMIQRKEWDLSEYSYKDPEDQGNLYIGYTMQVGSFILHPKNITIVTGAPRHRHMGAVFLLSQEAGGDLRRRQVLEGSQVGAYFGSAIALADLNNDGWQDLLVGAPYYFERKEEVGGAIYVFMNQAGTSFPAHPSLLLHGPSGSAFGLSVASIGDINQDGFQDIAVGAPFEGLGKVYIYHSSSKGLLRQPQQVIHGEKLGLPGLATFGYSLSGQMDVDENFYPDLLVGSLSDHIVLLRARPVINIVHKTLVPRPAVLDPALCTATSCVQVELCFAYNQSAGNPNYRRNITLAYTLEADRDRRPPRLRFAGSESAVFHGFFSMPEMRCQKLELLLMDNLRDKLRPIIISMNYSLPLRMPDRPRLGLRSLDAYPILNQAQALENHTEVQFQKECGPDNKCESNLQMRAAFVSEQQQKLSRLQYSRDVRKLLLSINVTNTRTSERSGEDAHEALLTLVVPPALLLSSVRPPGACQANETIFCELGNPFKRNQRMELLIAFEVIGVTLHTRDLQVQLQLSTSSHQDNLWPMILTLLVDYTLQTSLSMVNHRLQSFFGGTVMGESGMKTVEDVGSPLKYEFQVGPMGEGLVGLGTLVLGLEWPYEVSNGKWLLYPTEITVHGNGSWPCRPPGDLINPLNLTLSDPGDRPSSPQRRRRQLDPGGGQGPPPVTLAAAKKAKSETVLTCATGRAHCVWLECPIPDAPVVTNVTVKARVWNSTFIEDYRDFDRVRVNGWATLFLRTSIPTINMENKTTWFSVDIDSELVEELPAEIELWLVLVAVGAGLLLLGLIILLLWKCGFFKRARTRALYEAKRQKAEMKSQPSETERLTDDY

SEQ ID NO: 836281 - protein, 507 aa, Homo sapiens
MPEMRCQKLELLLMDNLRDKLRPIIISMNYSLPLRMPDRPRLGLRSLDAYPILNQAQALENHTEVQFQKECGPDNKCESNLQMRAAFVSEQQQKLSRLQYSRDVRKLLLSINVTNTRTSERSGEDAHEALLTLVVPPALLLSSVRPPGACQANETIFCELGNPFKRNQRMELLIAFEVIGVTLHTRDLQVQLQLSTSSHQDNLWPMILTLLVDYTLQTSLSMVNHRLQSFFGGTVMGESGMKTVEDVGSPLKYEFQVGPMGEGLVGLGTLVLGLEWPYEVSNGKWLLYPTEITVHGNGSWPCRPPGDLINPLNLTLSDPGDRPSSPQRRRRQLDPGGGQGPPPVTLAAAKKAKSETVLTCATGRAHCVWLECPIPDAPVVTNVTVKARVWNSTFIEDYRDFDRVRVNGWATLFLRTSIPTINMENKTTWFSVDIDSELVEELPAEIELWLVLVAVGAGLLLLGLIILLLWKCGFFKRARTRALYEAKRQKAEMKSQPSETERLTDDY

SEQ ID NO: 836282 - protein, 916 aa, Homo sapiens
MGPGPSRAPRAPRLMLCALALMVAAGGCVVSAFNLDTRFLVVKEAGNPGSLFGYSVALHRQTERQQRYLLLAGAPRELAVPDGYTNRTGAVYLCPLTAHKDDCERMNITVKNDPGHHIIEDMWLGVTVASQGPAGRVLVCAHRYTQVLWSGSEDQRRMVGKCYVRGNDLELDSSDDWQTYHNEMCNSNTDYLETGMCQLGTSGGFTQNTVYFGAPGAYNWKGNSYMIQRKEWDLSEYSYKDPEDQGNLYIDIAVGAPFEGLGKVYIYHSSSKGLLRQPQQVIHGEKLGLPGLATFGYSLSGQMDVDENFYPDLLVGSLSDHIVLLRARPVINIVHKTLVPRPAVLDPALCTATSCVQVELCFAYNQSAGNPNYRRNITLAYTLEADRDRRPPRLRFAGSESAVFHGFFSMPEMRCQKLELLLMDNLRDKLRPIIISMNYSLPLRMPDRPRLGLRSLDAYPILNQAQALENHTEVQFQKECGPDNKCESNLQMRAAFVSEQQQKLSRLQYSRDVRKLLLSINVTNTRTSERSGEDAHEALLTLVVPPALLLSSVRPPGACQANETIFCELGNPFKRNQRMELLIAFEVIGVTLHTRDLQVQLQLSTSSHQDNLWPMILTLLVDYTLQTSLSMVNHRLQSFFGGTVMGESGMKTVEDVGSPLKYEFQVGPMGEGLVGLGTLVLGLEWPYEVSNGKWLLYPTEITVHGNGSWPCRPPGDLINPLNLTLSDPGDRPSSPQRRRRQLDPGGGQGPPPVTLAAAKKAKSETVLTCATGRAHCVWLECPIPDAPVVTNVTVKARVWNSTFIEDYRDFDRVRVNGWATLFLRTSIPTINMENKTTWFSVDIDSELVEELPAEIELWLVLVAVGAGLLLLGLIILLLWKCGFFKRARTRALYEAKRQKAEMKSQPSETERLTDDY

SEQ ID NO: 836283 - protein, 585 aa, Homo sapiens
KVPASRAAVIGRGLDPALCTGTSCVQVELCFAYNQSAGNPNYRRNITLAYTLEADRDRRPPRLRFAGSESAVFHGFFSMPEMRCQKLELLLMDNLRDKLRPIIISMNYSLPLRMPDRPRLGLRSLDAYPILNQAQALENHTEVQFQKECGPDNKCESNLQMRAAFVSEQQQKLSRLQYSRDVRKLLLSINVTNTRTSERSGEDAHEALLTLVVPPALLLSSVRPPGACQANETIFCELGNPFKRNQRMELLIAFEVIGVTLHTRDLQVQLQLSTSSHQDNLWPMILTLLVDYTLQTSLSMVNHRLQSFFGGTVMGESGMKTVEDVGSPLKYEFQVGPMGEGLVGLGTLVLGLEWPYEVSNGKWLLYPTEITVHGNGSWPCRPPGDLINPLNLTLSDPGDRPSSPQRRRRQLDPGGGQGPPPVTLAAAKKAKSETVLTCATGRAHCVWLECPIPDAPVVTNVTVKARVWNSTFIEDYRDFDRVRVNGWATLFLRTSIPTINMENKTTWFSVDIDSELVEELPAEIELWLVLVAVGAGLLLLGLIILLLWKCGFFKRARTRALYEAKRQKAEMKSQPSETERLTDDY

SEQ ID NO: 836284 - protein, 1051 aa, Homo sapiens
MGPGPSRAPRAPRLMLCALALMVAAGGCVVSAFNLDTRFLVVKEAGNPGSLFGYSVALHRQTERQQRYLLLAGAPRELAVPDGYTNRTGAVYLCPLTAHKDDCERMNITVKNDPGHHIIEDMWLGVTVASQGPAGRVLVCAHRYTQVLWSGSEDQRRMVGKCYVRGNDLELDSSDDWQTYHNEMCNSNTDYLETGMCQLGTSGGFTQNTVYFGAPGAYNWKGNSYMIQRKEWDLSEYSYKDPEDQGNLYIGYTMQVGSFILHPKNITIVTGAPRHRHMGAVFLLSQEAGGDLRRRQVLEGSQVGAYFGSAIALADLNNDGWQDLLVGAPYYFERKEEVGGAIYVFMNQAGTSFPAHPSLLLHGPSGSAFGLSVASIGDINQDGFQDIAVGAPFEGLGKVYIYHSSSKGLLRQPQQVIHGEKLGLPGLATFGYSLSGQMDVDENFYPDLLVGSLSDHIVLLRARPVINIVHKTLVPRPAVLDPALCTATSCVQVELCFAYNQSAGNPNYRRNITLAYTLEADRDRRPPRLRFAGSESAVFHGFFSMPEMRCQKLELLLMDNLRDKLRPIIISMNYSLPLRMPDRPRLGLRSLDAYPILNQAQALENHTEVQFQKECGPDNKCESNLQMRAAFVSEQQQKLSRLQYSRDVRKLLLSINVTNTRTSERSGEDAHEALLTLVVPPALLLSSVRPPGACQANETIFCELGNPFKRNQRMELLIAFEVIGVTLHTRDLQVQLQLSTSSHQDNLWPMILTLLVDYTLQTSLSMVNHRLQSFFGGTVMGESGMKTVEDVGSPLKYEFQVGPMGEGLVGLGTLVLGLEWPYEVSNGKWLLYPTEITVHGNGSWPCRPPGDLINPLNLTLSDPGDRPSSPQRRRRQLDPGGGQGPPPVTLAAAKKAKSETVLTCATGRAHCVWLECPIPDAPVVTNVTVKARVWNSTFIEDYRDFDRVRVNGWATLFLRTSIPTINMENKTTWFSVDIDSELVEELPAEIELWLVLVAVGAGLLLLGLIILLLWKCGFFKRARTRALYEAKRQKAEMKSQPSETERLTDDY

SEQ ID NO: 836285 - protein, 1066 aa, Homo sapiens
MGPGPSRAPRAPRLMLCALALMVAAGGCVVSAFNLDTRFLVVKEAGNPGSLFGYSVALHRQTERQQRYLLLAGAPRELAVPDGYTNRTGAVYLCPLTAHKDDCERMNITVKNDPGHHIIEDMWLGVTVASQGPAGRVLVCAHRYTQVLWSGSEDQRRMVGKCYVRGNDLELDSSDDWQTYHNEMCNSNTDYLETGMCQLGTSGGFTQNTVYFGAPGAYNWKGNSYMIQRKEWDLSEYSYKDPEDQGNLYIGYTMQVGSFILHPKNITIVTGAPRHRHMGAVFLLSQEAGGDLRRRQVLEGSQVGAYFGSAIALADLNNDGWQDLLVGAPYYFERKEEVGGAIYVFMNQAGTSFPAHPSLLLHGPSGSAFGLSVASIGDINQDGFQDIAVGAPFEGLGKVYIYHSSSKGLLRQPQQVIHGEKLGLPGLATFGYSLSGQMDVDENFYPDLLVGSLSDHIVLLRARPVINIVHKTLVPRPAVLDPALCTATSCVQVELCFAYNQSAGNPNYRRNITLAYTLEADRDRRPPRLRFAGSESAVFHGFFSMPEMRCQKLELLLMDNLRDKLRPIIISMNYSLPLRMPDRPRLGLRSLDAYPILNQAQALENHTEVQFQKECGPDNKCESNLQMRAAFVSEQQQKLSRLQYSRDVRKLLLSINVTNTRTSERSGEDAHEALLTLVVPPALLLSSVRPPGACQANETIFCELGNPFKRNQRMELLIAFEVIGVTLHTRDLQVQLQLSTSSHQDNLWPMILTLLVDYTLQTSLSMVNHRLQSFFGGTVMGESGMKTVEDVGSPLKYEFQVGPMGEGLVGLGTLVLGLEWPYEVSNGKWLLYPTEITVHGNGSWPCRPPGDLINPLNLTLSDPGDRPSSPQRRRRQLDPGGGQGPPPVTLAAAKKAKSETVLTCATGRAHCVWLECPIPDAPVVTNVTVKARVWNSTFIEDYRDFDRVRVNGWATLFLRTSIPTINMENKTTWFSVDIDSELVEELPAEIELWLVLVAVGAGLLLLGLIILLLWKCDFFKRTRYYQIMPKYHAVRIREEERYPPPGSTLPTKKHWVTSWQTRDQYY

SEQ ID NO: 836286 - protein, 375 aa, Homo sapiens
TGKENRQGPCPTHPPGACQANETIFCELGNPFKRNQRMELLIAFEVIGVTLHTRDLQVQLQLSTSSHQDNLWPMILTLLVDYTLQTSLSMVNHRLQSFFGGTVMGESGMKTVEDVGSPLKYEFQVGPMGEGLVGLGTLVLGLEWPYEVSNGKWLLYPTEITVHGNGSWPCRPPGDLINPLNLTLSDPGDRPSSPQRRRRQLDPGGGQGPPPVTLAAAKKAKSETVLTCATGRAHCVWLECPIPDAPVVTNVTVKARVWNSTFIEDYRDFDRVRVNGWATLFLRTSIPTINMENKTTWFSVDIDSELVEELPAEIELWLVLVAVGAGLLLLGLIILLLWKCGFFKRARTRALYEAKRQKAEMKSQPSETERLTDDY

SEQ ID NO: 836287 - protein, 1051 aa, Homo sapiens; identical to SEQ ID NO: 836284

SEQ ID NO: 836288 - protein, 201 aa, Homo sapiens
MLGTRLVHRRDDPGDRPSSPQRRRRQLDPGGGQGPPPVTLAAAKKAKSETVLTCATGRAHCVWLECPIPDAPVVTNVTVKARVWNSTFIEDYRDFDRVRVNGWATLFLRTSIPTINMENKTTWFSVDIDSELVEELPAEIELWLVLVAVGAGLLLLGLIILLLWKCGFFKRARTRALYEAKRQKAEMKSQPSETERLTDDY

SEQ ID NO: 836289 - protein, 1051 aa, Homo sapiens; identical to SEQ ID NO: 836284

SEQ ID NO: 836290 - protein, 1051 aa, Homo sapiens; identical to SEQ ID NO: 836284

SEQ ID NO: 836291 - protein, 128 aa, Homo sapiens
MGPGPSRAPRAPRLMLCALALMVAAGGCVVSAFNLDTRFLVVKEAGNPGSLFGYSVALHRQTERQQRYLLLAGAPRELVSKLLTGSSPRAAGWWAPNDTHAREVGILPKVVYGGTWRTWRAQTQQQRN

SEQ ID NO: 836292 - protein, 1007 aa, Homo sapiens
MGPGPSRAPRAPRLMLCALALMVAAGGCVVSAFNLDTRFLVVKEAGNPGSLFGYSVALHRQTERQQRYLLLAGAPRELAVPDGYTNRTGAVYLCPLTAHKDDCERMNITVKNDPGHHIIEDMWLGVTVASQGPAGRVLVCAHRYTQVLWSGSEDQRRMVGKCYVRGNDLELDSSDDWQTYHNEMCNSNTDYLETGMCQLGTSGGFTQNTVYFGAPGAYNWKGNSYMIQRKEWDLSEYSYKDPEDQGNLYIGYTMQVGSFILHPKNITIVTGAPRHRHMGAVFLLSQEAGGDLRRRQVLEGSQVGAYFGSAIALADLNNDGWQDLLVGAPYYFERKEEVGGAIYVFMNQAGTSFPAHPSLLLHGPSGSAFGLSVASIGDINQDGFQDIAVGAPFEGLGKVYIYHSSSKGLLRQPQQVIHGEKLGLPGLATFGYSLSGQMDVDENFYPDLLVGSLSDHIVLLRARPVINIVHKTLVPRPAVLDPALCTATSCVQVELCFAYNQSAGNPNYRRNITLAYTLEADRDRRPPRLRFAGSESAVFHGFFSMPEMRCQKLELLLMDNLRDKLRPIIISMNYSLPLRMPDRPRLGLRSLDAYPILNQAQALENHTEVQFQKECGPDNKCESNLQMRAAFVSEQQQKLSRLQYSRDVRKLLLSINVTNTRTSERSGEDAHEALLTLVVPPALLLSSVRPPGACQANETIFCELGNPFKRNQRMELLIAFEVIGVTLHTRDLQVQLQLSTSSHQDNLWPMILTLLVDYTLQTSLSMVNHRLQSFFGGTVMGESGMKTVEDVGSPLKYEFQVGPMGEGLVGLGTLVLGLEWPYEVSNGKWLLYPTEITVHGNGSWPCRPPGDLINPLNLTLSDPGDRPSSPQRRRRQLDPGGGQGPPPVTLAAAKKAKSETVLTCATGRAHCVWLECPIPDAPVVTNVTVKARVWNSTFIEDYRDFDRVRVNGWATLFLRTSIPTINMENKTTWFSVDIDSELVEEEEGSPASYPDSFKVSVSSLSHA

SEQ ID NO: 836293 - protein, 844 aa, Homo sapiens
MGPGPSRAPRAPRLMLCALALMVAAGGCVVSAFNLDTRFLVVKEAGNPGSLFGYSVALHRQTERQQRYLLLAGAPRELAVPDGYTNRTGAVYLCPLTAHKDDCERMNITVKNDPGHHIIEDMWLGVTVASQGPAGRVLVCAHRYTQVLWSGSEDQRRMVGKCYVRGNDLELDSSDDWQTYHNEMCNSNTDYLETGMCQLGTSGGFTQNTVYFGAPGAYNWKGNSYMIQRKEWDLSEYSYKDPEDQGNLYIGYTMQVGSFILHPKNITIVTGAPRHRHMGAVFLLSQEAGGDLRRRQVLEGSQVGAYFGSAIALADLNNDGWQDLLVGAPYYFERKEEVGGAIYVFMNQAGTSFPAHPSLLLHGPSGSAFGLSVASIGDINQDGFQDIAVGAPFEGLGKVYIYHSSSKGLLRQPQQVIHGEKLGLPGLATFGYSLSGQMDVDENFYPDLLVGSLSDHIVLLRARPVINIVHKTLVPRPAVLDPALCTATSCVQVELCFAYNQSAGNPNYRRNITLAYTLEADRDRRPPRLRFAGSESAVFHGFFSMPEMRCQKLELLLMDNLRDKLRPIIISMNYSLPLRMPDRPRLGLRSLDAYPILNQAQALENHTEVQFQKECGPDNKCESNLQMRAAFVSEQQQKLSRLQYSRDVRKLLLSINVTNTRTSERSGEDAHEALLTLVVPPALLLSSVRPPGACQANETIFCELGNPFKRNQRMELLIAFEVIGVTLHTRDLQVQLQLSTSSHQDNLWPMILTLLVDYTLQTSLSMVNHRLQSFFGGTVMGESGMKTVEDVGSPLKYEFQIQPDPTLTMRQGPRGGVLSYPWLSEPAWLCPLPHGLCPKAHLRS

SEQ ID NO: 836294 - protein, 248 aa, Homo sapiens
MGPGPSRAPRAPRLMLCALALMVAAGGCVVSAFNLDTRFLVVKEAGNPGSLFGYSVALHRQTERQQRYLLLAGAPRELAVPDGYTNRTGAVYLCPLTAHKDDYDPGHHIIEDMWLGVTVASQGPAGRVLVCAHRYTQVLWSGSEDQRRMVGKCYVRGNDLELDSSDDWQTYHNEMCNSNTDYLETGMCQLGTSGGFTQNTVYFGAPGAYNWKGGDHGAMGEERKSRDHPPLVSHGDSWPRPSTLETGP

SEQ ID NO: 836295 - protein, 34 aa, Homo sapiens
GAGLLAESWAPALRLQYSRDVRKLLLSINVTNTR

SEQ ID NO: 836296 - protein, 82 aa, Homo sapiens
MILPVPTDDPGHHIIEDMWLGVTVASQGPAGRVLVSGCSVLAPPPLPGSPLISRAGRKEEGSRGVHGACVLGPAHMSLPVAV

SEQ ID NO: 836297 - protein, 1051 aa, Homo sapiens; identical to SEQ ID NO: 836284

SEQ ID NO: 836298 - protein, 732 aa, Homo sapiens
SENAAQSDVESGKLIIKKSKDGSEESSTATRNSFPAHPSLLLHGPSGSAFGLSVASIGDINQDGFQDIAVGAPFEGLGKVYIYHSSSKGLLRQPQQVIHGEKLGLPGLATFGYSLSGQMDVDENFYPDLLVGSLSDHIVLLRARPVINIVHKTLVPRPAVLDPALCTATSCVQVELCFAYNQSAGNPNYRRNITLAYTLEADRDRRPPRLRFAGSESAVFHGFFSMPEMRCQKLELLLMDNLRDKLRPIIISMNYSLPLRMPDRPRLGLRSLDAYPILNQAQALENHTEVQFQKECGPDNKCESNLQMRAAFVSEQQQKLSRLQYSRDVRKLLLSINVTNTRTSERSGEDAHEALLTLVVPPALLLSSVRPPGACQANETIFCELGNPFKRNQRMELLIAFEVIGVTLHTRDLQVQLQLSTSSHQDNLWPMILTLLVDYTLQTSLSMVNHRLQSFFGGTVMGESGMKTVEDVGSPLKYEFQVGPMGEGLVGLGTLVLGLEWPYEVSNGKWLLYPTEITVHGNGSWPCRPPGDLINPLNLTLSDPGDRPSSPQRRRRQLDPGGGQGPPPVTLAAAKKAKSETVLTCATGRAHCVWLECPIPDAPVVTNVTVKARVWNSTFIEDYRDFDRVRVNGWATLFLRTSIPTINMENKTTWFSVDIDSELVEELPAEIELWLVLVAVGAGLLLLGLIILLLWKCGFFKRARTRALYEAKRQKAEMKSQPSETERLTDDY

SEQ ID NO: 836299 - protein, 1050 aa, Homo sapiens
MGPGPSRAPRAPRLMLCALALMVAAGGCVVSAFNLDTRFLVVKEAGNPGSLFGYSVALHRQTERQQRYLLLAGAPRELAVPDGYTNRTGAVYLCPLTAHKDDCERMNITVKNDPGHHIIEDMWLGVTVASQGPAGRVLVCAHRYTQVLWSGSEDQRRMVGKCYVRGNDLELDSSDDWQTYHNEMCNSNTDYLETGMCQLGTSGGFTQNTVYFGAPGAYNWKGNSYMIQRKEWDLSEYSYKDPEDQGNLYIGYTMQVGSFILHPKNITIVTGAPRHRHMGAVFLLSQEAGGDLRRRQVLEGSQVGAYFGSAIALADLNNDGWQDLLVGAPYYFERKEEVGGAIYVFMNQAGTSFPAHPSLLLHGPSGSAFGLSVASIGDINQDGFQDIAVGAPFEGLGKVYIYHSSSKGLLRQPQQVIHGEKLGLPGLATFGYSLSGQMDVDENFYPDLLVGSLSDHIVLLRARPVINIVHKTLVPRPAVLDPALCTATSCGQVTVLWLTPECRDPIYGQNITLAYTLEADRDRRPPRLRFAGSESAVFHGFFSMPEMRCQKLELLLMDNLRDKLRPIIISMNYSLPLRMPDRPRLGLRSLDAYPILNQAQALENHTEVQFQKECGPDNKCESNLQMRAAFVSEQQQKLSRLQYSRDVRKLLLSINVTNTRTSERSGEDAHEALLTLVVPPALLLSSVRPPGACQANETIFCELGNPFKRNQRMELLIAFEVIGVTLHTRDLQVQLQLSTSSHQDNLWPMILTLLVDYTLQTSLSMVNHRLQSFFGGTVMGESGMKTVEDVGSPLKYEFQVGPMGEGLVGLGTLVLGLEWPYEVSNGKWLLYPTEITVHGNGSWPCRPPGDLINPLNLTLSDPGDRPSSPQRRRRQLDPGGGQGPPPVTLAAAKKAKSETVLTCATGRAHCVWLECPIPDAPVVTNVTVKARVWNSTFIEDYRDFDRVRVNGWATLFLRTSIPTINMENKTTWFSVDIDSELVEELPAEIELWLVLVAVGAGLLLLGLIILLLWKCGFFKRARTRALYEAKRQKAEMKSQPSETERLTDDY

SEQ ID NO: 836300 - protein, 1051 aa, Homo sapiens; identical to SEQ ID NO: 836284

SEQ ID NO: 836301 - protein, 886 aa, Homo sapiens
MGPGPSRAPRAPRLMLCALALMVAAGGCVVSAFNLDTRFLVVKEAGNPGSLFGYSVALHRQTERQQRYLLLAGAPRELAVPDGYTNRTGAVYLCPLTAHKDDCERMNITVKNDPGHHIIEDMWLGVTVASQGPAGRVLVCAHRYTQVLWSGSEDQRRMVGKCYVRGNDLELDSSDDWQTYHNEMCNSNTDYLETGMCQLGTSGGFTQNTVYFGAPGAYNWKGNSYMIQRKEWDLSEYSYKDPEDQGNLYIGYTMQVGSFILHPKNITIVTGAPRHRHMGAVFLLSQEAGGDLRRRQVLEGSQVGAYFGSAIALADLNNDGWQDLLVGAPYYFERKEEVGGAIYVFMNQAGTSFPAHPSLLLHGPSGSAFGLSVASIGDINQDGFQDIAVGAPFEGLGKVYIYHSSSKGLLRQPQQVIHGEKLGLPGLATFGYSLSGQMDVDENFYPDLLVGSLSDHIVLLRARPVINIVHKTLVPRPAVLDPALCTATSCVQVELCFAYNQSAGNPNYRRNITLAYTLEADRDRRPPRLRFAGSESAVFHGFFSMPEMRCQKLELLLMDNLRDKLRPIIISMNYSLPLRMPDRPRLGLRSLDAYPILNQAQALENHTEVQFQKECGPDNKCESNLQMRAAFVSEQQQKLSRLQYSRDVRKLLLSINVTNTRTSERSGEDAHEALLTLVVPPALLLSSVRPPGACQANETIFCELGNPFKRNQRMELLIAFEVIGVTLHTRDLQVQLQLSTSSHQDNLWPMILTLLVDYTLQTSLSMVNHRLQSFFGGTVMGESGMKTVEDVGSPLKYEFQVGPMGEGLVGLGTLVLGLEWPYEVSNGKWLLYPTEITVHGNGSWPCRPPGDLINPLNLTLSDPGDRPSSPQRPPTCHSGCCQKSQV

SEQ ID NO: 836302 - protein, 294 aa, Homo sapiens
DSSILLTPRVNHRLQSFFGGTVMGESGMKTVEDVGSPLKYEFQVGPMGEGLVGLGTLVLGLEWPYEVSNGKWLLYPTEITVHGNGSWPCRPPGDLINPLNLTLSDPGDRPSSPQRRRRQLDPGGGQGPPPVTLAAAKKAKSETVLTCATGRAHCVWLECPIPDAPVVTNVTVKARVWNSTFIEDYRDFDRVRVNGWATLFLRTSIPTINMENKTTWFSVDIDSELVEELPAEIELWLVLVAVGAGLLLLGLIILLLWKCGFFKRARTRALYEAKRQKAEMKSQPSETERLTDDY

SEQ ID NO: 836303 - protein, 1084 aa, Homo sapiens
MGPGPSRAPRAPRLMLCALALMVAAGGCVVSAFNLDTRFLVVKEAGNPGSLFGYSVALHRQTERQQRYLLLAGAPRELAVPDGYTNRTGAVYLCPLTAHKDDCERMNITVKNDPGHHIIEDMWLGVTVASQGPAGRVLVCAHRYTQVLWSGSEDQRRMVGKCYVRGNDLELDSSDDWQTYHNEMCNSNTDYLETGMCQLGTSGGFTQNTVYFGAPGAYNWKGNSYMIQRKEWDLSEYSYKDPEDQGNLYIGYTMQVGSFILHPKNITIVTGAPRHRHMGAVFLLSQEAGGDLRRRQVLEGSQVGAYFGSAIALADLNNDGWQDLLVGAPYYFERKEEVGGAIYVFMNQAGTSFPAHPSLLLHGPSGSAFGLSVASIGDINQDGFQDIAVGAPFEGLGKVYIYHSSSKGLLRQPQQVIHGEKLGLPGLATFGYSLSGQMDVDENFYPDLLVGSLSDHIVLLRARPVINIVHKTLVPRPAVLDPALCTATSCVQVELCFAYNQSAGNPNYRRNITLAYTLEADRDRRPPRLRFAGSESAVFHGFFSMPEMRCQKLELLLMDNLRDKLRPIIISMNYSLPLRMPDRPRLGLRSLDAYPILNQAQALENHTEVQFQKECGPDNKCESNLQMRAAFVSEQQQKLSRLQYSRDVRKLLLSINVTNTRTSERSGEDAHEALLTLVVPPALLLSSVRPPGACQANETIFCELGNPFKRNQRMELLIAFEVIGVTLHTRDLQVQLQLSTSSHQDNLWPMILTLLVDYTLQTSLSMVNHRLQSFFGGTVMGESGMKTVEDVGSPLKYEFQVGPMGEGLVGLGTLVLGLEWPYEVSNGKWLLYPTEITVHGNGSWPCRPPGDLINPLNLTLSDPGDRPSSPQRRRRQLDPGGGQGPPPVTLAAAKKAKSETVLTCATGRAHCVWLECPIPDAPVVTNVTVKARVWNSTFIEHPAQDLTAEMNEQINEVMRICVWRGGLADRSFGDYRDFDRVRVNGWATLFLRTSIPTINMENKTTWFSVDIDSELVEELPAEIELWLVLVAVGAGLLLLGLIILLLWKCGFFKRARTRALYEAKRQKAEMKSQPSETERLTDDY

SEQ ID NO: 836304 - protein, 1051 aa, Homo sapiens; identical to SEQ ID NO: 836284

SEQ ID NO: 836305 - protein, 143 aa, Homo sapiens [sequence omitted]

SEQ ID NO: 836306 - protein, 134 aa, Homo sapiens [sequence omitted]

SEQ ID NO: 836307 - protein, 1036 aa, Homo sapiens
MGPGPSRAPRAPRLMLCALALMVAAGGCVVSAFNLDTRFLVVKEAGNPGSLFGYSVALHRQTERQQRYLLLAGAPRELAVPDGYTNRTGAVYLCPLTAHKDDCERMNITVKNDPGHHIIEDMWLGVTVASQGPAGRVLVCAHRYTQVLWSGSEDQRRMVGKCYVRGNDLELDSSDDWQTYHNEMCNSNTDYLETGMCQLGTSGGFTQNTVYFGAPGAYNWKGNSYMIQRKEWDLSEYSYKDPEDQGNLYIGYTMQVGSFILHPKNITIVTGAPRHRHMGAVFLLSQEAGGDLRRRQVLEGSQVGAYFGSAIALADLNNDGWQDLLVGAPYYFERKEEVGGAIYVFMNQAGTSFPAHPSLLLHGPSGSAFGLSVASIGDINQDGFQDIAVGAPFEGLGKVYIYHSSSKGLLRQPQQVIHGEKLGLPGLATFGYSLSGQMDVDENFYPDLLVGSLSDHIVLLRARPVINIVHKTLVPRPAVLDPALCTATSCVQVELCFAYNQSAGNPNYRRNITLAYTLEADRDRRPPRLRFAGSESAVFHGFFSMPEMRCQKLELLLMDNLRDKLRPIIISMNYSLPLRMPDRPRLGLRSLDAYPILNQAQALENHTEVQFQKECGPDNKCESNLQMRAAFVSEQQQKLSRLQYSRDVRKLLLSINVTNTRTSERSGEDAHEALLTLVVPPALLLSSVRPPGACQANETIFCELGNPFKRNQRMELLIAFEVIGVTLHTRDLQVQLQLSTSSHQDNLWPMILTLLVDYTLQTSLSMVNHRLQSFFGGTVMGESGMKTVEDVGSPLKYEFQVGPMGEGLVGLGTLVLGLEWPYEVSNGKWLLYPTEITVHGNGSWPCRPPGDLINPLNLTLSDPGDRPSSPQRRRRQLDPGGGQGPPPVTLAAAKKAKSETVLTCATGRAHCVWLECPIPDAPVVTNVTVKARVWNSTFIEDYRDFDRVRVNGWATLFLRTSIPTINMENKTTWFSVDIDSELVEELPAEIELWLVLVAVGAGLLLLGLIILLLWKCGFFKRARTRATLQDHGGSDT

SEQ ID NO: 836308 - protein, 257 aa, Homo sapiens
MGPGPSRAPRAPRLMLCALALMVAAGGCVVSAFNLDTRFLVVKEAGNPGSLFGYSVALHRQTERQQRYLLLAGAPRELAVPDGYTNRTGAVYLCPLTAHKDDCERMNITVKNDPGHHIIEDMWLGVTVASQGPAGRVLVCAHRYTQVLWSGSEDQRRMVGKCYVRGNDLELDSSDDWQTYHNEMCNSNTDYLETGMCQLGTSGGFTQNTVYFGAPGAYNWKGGDHGAMGEERKSRDHPPLVSHGDSWPRPSTLETGP

SEQ ID NO: 836309 - protein, 297 aa, Homo sapiens
MGPGPSRAPRAPRLMLCALALMVAAGGCVVSAFNLDTRFLVVKEAGNPGSLFGYSVALHRQTERQQRYLLLAGAPRELAVPDGYTNRTGAVYLCPLTAHKDDCERMNITVKNDPGHHIIEDMWLGVTVASQGPAGRVLVRWVLSVGSSTSTRLSPHLQSWEERRGQQGGPRRVCAGACTHVPSCGCVSLALCTPGEGVSILCSPKPPHGLSSLTHPLPPHAYTGCSAFVGTSRGSRGNCKEEKGQRGPQAAQRWLALLPGRLTAGRRPSPADPGSPSSGLGANQMCHLLPTFYSGSS

SEQ ID NO: 836310 - protein, 113 aa, Homo sapiens
INVTNTRTSERSGEDAHEALLTLVVPPALLLSSVRPVSARRPAQSPSRAPRVFASPYPCPVQVLSSATCPPPLVWAFLGALASLLLGESGSQALGLLTLHHRGGRTSPTLTRP

SEQ ID NO: 836311 - protein, 73 aa, Homo sapiens
QTPPCLPSLASSDLVPRSPASAGDEEEHAGVRLGFWLLFEPPASQPFRKPVKNVIPGPHQDPPKPSLGLGAGL

SEQ ID NO: 836312 - protein, 183 aa, Homo sapiens
MSRYLRPPNTSLFVRNVADDTRSEDLRREFGRYGPIVDVYVPLDFYTRRPRGFAYVQFEDVRDAEDALHNLDRKWICGRQIEIQFAQGDRKTPNQMKAKEGRNVYSSSRYDDYDRYRRSRSRSYERRRSRSRSFDYNYRRSYSPRNSRPTGRPRRSRSHSDNDRPNCSWNTQYSSAYYTSRKI

SEQ ID NO: 836313 - protein, 233 aa, Homo sapiens
MSRYLRPPNTSLFVRNVADDTRSEDLRREFGRYGPIVDVYVPLDFYTRRPRGFAYVQFEDVRDAEDALHNLDRKWICGRQIEIQFAQGDRKTPNQMKAKEGRNVYSSSRYDDYDRYRRSRSRSYERRRSRSRSFDYNYRRSYSPRNSRPTGRPRRSRSHSDNDRFKHRNRSFSRSKSNSRSRSKSQPKKEMKAKSRSRSASHTKTRGTSKTDSKPLVGQIGGRKDPTIKKRSR

SEQ ID NO: 836314 - protein, 173 aa, Homo sapiens
MSRYLRPPNTSLFVRNVADDTRSEDLRREFGRYGPIVDVYVPLDFYTRRPRGFAYVQFEDVRDAEDALHNLDRKWICGRQIEIQFAQGDRKTPNQMKAKEGRNVYSSSRYDDYDRYRRSRSRSYERRRSRSRSFDYNYRRSYSPRNSRPTGRPRRSRSHSDNDSQVSKKKNER

SEQ ID NO: 836315 - protein, 120 aa, Homo sapiens
MLFSSRPTGRPRRSRSHSDNDRFKHRNRSFSRSKSNSRSRSKSQPKKEMKAKSRSRSASHTKTRGTSKTDSKTHYKSGSRYEKESRKKEPPRSKSQSRSQSRSRSKSRSRSWTSPKSSGH

SEQ ID NO: 836316 - protein, 262 aa, Homo sapiens
MSRYLRPPNTSLFVRNVADDTRSEDLRREFGRYGPIVDVYVPLDFYTRRPRGFAYVQFEDVRDAEDALHNLDRKWICGRQIEIQFAQGDRKTPNQMKAKEGRNVYSSSRYDDYDRYRRSRSRSYERRRSRSRSFDYNYRRSYSPRNSRPTGRPRRSRSHSDNDRFKHRNRSFSRSKSNSRSRSKSQPKKEMKAKSRSRSASHTKTRGTSKTDSKTHYKSGSRYEKESRKKEPPRSKSQSRSQSRSRSKSRSRSWTSPKSSGH

SEQ ID NO: 836317 - protein, 262 aa, Homo sapiens; identical to SEQ ID NO: 836316

SEQ ID NO: 836318 - protein, 183 aa, Homo sapiens; identical to SEQ ID NO: 836312

SEQ ID NO: 836319 - protein, 183 aa, Homo sapiens; identical to SEQ ID NO: 836312

SEQ ID NO: 836320 - protein, 104 aa, Homo sapiens
TPGVLAGKNRCARLCAEVGGGSGGGSEVSREESVAVAEPSSCVCLRLGRLSRGRFAEPVSAPGRDTPPPCPATCVPPTRLCSSGTWPTTPGLKTCGVNLVVMVL

SEQ ID NO: 836321 - protein, 167 aa, Homo sapiens
MKAKEGRNVYSSSRYDDYDRYRRSRSRSYERRRSRSRSFDYNYRRSYSPRNSRPTGRPRRSRSHSDNDRFKHRNRSFSRSKSNSRSRSKSQPKKEMKAKSRSRSASHTKTRGTSKTDSKTHYKSGSRYEKESRKKEPPRSKSQSRSQSRSRSKSRSRSWTSPKSSGH

SEQ ID NO: 836322 - protein, 167 aa, Homo sapiens; identical to SEQ ID NO: 836321

SEQ ID NO: 836323 - protein, 104 aa, Homo sapiens; identical to SEQ ID NO: 836320

SEQ ID NO: 836324 - protein, 165 aa, Homo sapiens
MSRYLRPPNTSLFVRNVADDTRSEDLRREFGRYGPIVDVYVPLDFYTRRPRGFAYVQFEDVRDAEDALHNLDRKWICGRQIEIQFAQGDRKTPNQMKAKEGRNVYSSSRYDDYDRYRRSRSRSYERRRSRSRSFDYNYRRSYSPRKPNCSWNTQYSSAYYTSRKI

SEQ ID NO: 836325 - protein, 262 aa, Homo sapiens; identical to SEQ ID NO: 836316

SEQ ID NO: 836326 - protein, 104 aa, Homo sapiens; identical to SEQ ID NO: 836320

SEQ ID NO: 836327 - protein, 104 aa, Homo sapiens; identical to SEQ ID NO: 836320

SEQ ID NO: 836328 - protein, 262 aa, Homo sapiens; identical to SEQ ID NO: 836316

SEQ ID NO: 836329 - protein, 183 aa, Homo sapiens; identical to SEQ ID NO: 836312

SEQ ID NO: 836330 - protein, 125 aa, Homo sapiens
  misc_feature (22)..(22): Xaa can be any naturally occurring amino acid
  misc_feature (26)..(26): Xaa can be any naturally occurring amino acid
  misc_feature (33)..(33): Xaa can be any naturally occurring amino acid
  misc_feature (36)..(37): Xaa can be any naturally occurring amino acid
  misc_feature (58)..(59): Xaa can be any naturally occurring amino acid
  misc_feature (64)..(65): Xaa can be any naturally occurring amino acid
  misc_feature (75)..(75): Xaa can be any naturally occurring amino acid
  misc_feature (93)..(93): Xaa can be any naturally occurring amino acid
IPEAVLRRHFLWLIDMSCERGXHKSXQCRSLEXQCXXVVTTGSRKGEEGRQRNDATLXXLWLPXXLPGSQWFPQXRHLPLPEMLQPTKCNEGXILELENLPQHFRKWKVSCYLPFKSIQYLITLL

SEQ ID NO: 836331 - protein, 262 aa, Homo sapiens; identical to SEQ ID NO: 836316

SEQ ID NO: 836332 - protein, 262 aa, Homo sapiens; identical to SEQ ID NO: 836316

SEQ ID NO: 836333 - protein, 183 aa, Homo sapiens; identical to SEQ ID NO: 836312

SEQ ID NO: 836334 - protein, 167 aa, Homo sapiens; identical to SEQ ID NO: 836321

SEQ ID NO: 836335 - protein, 164 aa, Homo sapiens
MSRYLRPPNTSLFVRNVADDTRSEDLRREFGRYGPIVDVYVPLDFYTRRPRGFAYVQFEDVRDAEDALHNLDRKWICGRQIEIQFAQGDRKTPNQMKAKEGRNVYSSSRYDDYDRYRRSRSRSYERRRSRSRSFDYNYRRSYSPRNSRPTGRPRRSRSHSDNDR

SEQ ID NO: 836336 - protein, 104 aa, Homo sapiens; identical to SEQ ID NO: 836320

SEQ ID NO: 836337 - protein, 272 aa, Homo sapiens
MSRYLRPPNTSLFVRNVADDTRSEDLRREFGRYGPIVDVYVPLDFYTRRPRGFAYVQFEDVRDAEDALHNLDRKWICGRQIEIQFAQGDRKTPNQMKAKEGRNVYSSSRYDDYDRYRRSRSRSYERRRSTKAALFEIHTHYTKIAIVLENYAFLRSRPQLKNTGSRKPLPDHDRFKHRNRSFSRSKSNSRSRSKSQPKKEMKAKSRSRSASHTKTRGTSKTDSKTHYKSGSRYEKESRKKEPPRSKSQSRSQSRSRSKSRSRSWTSPKSSGH

SEQ ID NO: 836338 - protein, 173 aa, Homo sapiens; identical to SEQ ID NO: 836314

SEQ ID NO: 836339 - protein, 201 aa, Homo sapiens
EGMQGFFSLFIEGFNTVFNIFKYFCSLYFLAPNQMKAKEGRNVYSSSRYDDYDRYRRSRSRSYERRRSRSRSFDYNYRRSYSPRNSRPTGRPRRSRSHSDNDRFKHRNRSFSRSKSNSRSRSKSQPKKEMKAKSRSRSASHTKTRGTSKTDSKTHYKSGSRYEKESRKKEPPRSKSQSRSQSRSRSKSRSRSWTSPKSSGH

SEQ ID NO: 836340 - protein, 217 aa, Homo sapiens
MSRYLRPPNTSLFVRNVADDTRSEDLRREFGRYGPIVDVYVPLDFYTRRPRGFAYVQFEDVRDAEDALHNLDRKWICGRQIEIQFAQGDRKTPNQMKAKEGRNVYSSSRYDDYDRYRRSRSRSYERRRSRSRSFDYNYRRSYSPRNSRPTGRPRRSRSHSDNDRFKHRNRSFSRSKSNSRSRSKSQPKKEMKAKSRSRPNCSWNTQYSSAYYTSRKI

SEQ ID NO: 836341 - protein, 183 aa, Homo sapiens; identical to SEQ ID NO: 836312

SEQ ID NO: 836342 - protein, 182 aa, Homo sapiens
TPGVLAGKNRCARLCAEVGGGSGGGSEVSREESVAVAEPSSCVCLRLGRLSRGRFAEPVSAPGRDTPPPCPATCVPPTRLCSSGTWPTTPAPNQMKAKEGRNVYSSSRYDDYDRYRRSRSRSYERRRSRSRSFDYNYRRSYSPRNSRPTGRPRRSRSHSDNDRPNCSWNTQYSSAYYTSRKI

SEQ ID NO: 836343 - protein, 262 aa, Homo sapiens; identical to SEQ ID NO: 836316

SEQ ID NO: 836344 - protein, 104 aa, Homo sapiens; identical to SEQ ID NO: 836320

SEQ ID NO: 836345 - protein, 82 aa, Homo sapiens
MVRSRSGVEDIPRQEQAGRRSAGGSTDIAPRSTESIRGGERERGYSDSRARRKHRKARYKQSRAKGEEQSTYQTKRCVVHAQ

SEQ ID NO: 836346 - protein, 459 aa, Homo sapiens
RPRSHASAGALRRALASAAPPPGPANREPRRPARGRCRAEGLGRCAGAGEVAPPARGGGVAGAGSCGRAELRRGKEPLGADRAAAGAAPAQARGGRRRASGCCAPLGVRASGRAVPRAVFAGMKRPCEETTSESDMDETIDVGSENNYSGQSTSSVIRLNSPTTTSQIMARKKRRGIIEKRRRDRINNSLSELRRLVPTAFEKQGSAKLEKAEILQMTVDHLKMLQATGGKGYFDAHALAMDFMSIGFRECLTEVARYLSSVEGLDSSDPLRVRLVSHLSTCATQREAAAMTSSMAHHHHPLHPHHWAAAFHHLPAALLQPNGLHASESTPCRLSTTSEVPPAHGSALLTATFAHADSALRMPSTGSVAPCVPPLSTSLLSLSATVHAAAAAATAAAHSFPLSFAGAFPMLPPNAAAAVAAATAISPPLSVSATSSPQQTSSGTNNKPYRPWGTEVGAF

SEQ ID NO: 836347 - protein, 459 aa, Homo sapiens; identical to SEQ ID NO: 836346

SEQ ID NO: 836348 - protein, 291 aa, Homo sapiens
MARKKRRGIIEKRRRDRINNSLSELRRLVPTAFEKQGSAKLEKAEILQMTVDHLKMLQATGGKGYFDAHALAMDFMSIGFRECLTEVARYLSSVEGLDSSDPLRVRLVSHLSTCATQREAAAMTSSMAHHHHPLHPHHWAAAFHHLPAALLQPNGLHASESTPCRLSTTSEVPPAHGSALLTATFAHADSALRMPSTGSVAPCVPPLSTSLLSLSATVHAAAAAATAAAHSFPLSFAGAFPMLPPNAAAAVAAATAISPPLSVSATSSPQQTSSGTNNKPYRPWGTEVGAF

SEQ ID NO: 836349 - protein, 765 aa, Homo sapiens
MSGDHLHNDSQIEADFRLNDSHKHKDKHKDREHRHKEHKKEKDREKSKHSNSEHKDSEKKHKEKEKTKHKDGSSEKHKDKHKDRDKEKRKEEKVRASGDAKIKKEKENGFSSPPQIKDEPEDDGYFVPPKEDIKPLKRPRDEDDADYKPKKIKTEDTKKEKKRKLEEEEDGKLKKPKNKDKDKKVPEPDNKKKKPKKEEEQKWKWWEEERYPEGIKWKFLEHKGPVFAPPYEPLPENVKFYYDGKVMKLSPKAEEVATFFAKMLDHEYTTKEIFRKNFFKDWRKEMTNEEKNIITNLSKCDFTQMSQYFKAQTEARKQMSKEEKLKIKEENEKLLKEYGFCIMDNHKERIANFKIEPPGLFRGRGNHPKMGMLKRRIMPEDIIINCSKDAKVPSPPPGHKWKEVRHDNKVTWLVSWTENIQGSIKYIMLNPSSRIKGEKDWQKYETARRLKKCVDKIRNQYREDWKSKEMKVRQRAVALYFIDKLALRAGNEKEEGETADTVGCCSLRVEHINLHPELDGQEYVVEFDFLGKDSIRYYNKVPVEKRVFKNLQLFMENKQPEDDLFDRLNTGILNKHLQDLMEGLTAKVFRTYNASITLQQQLKELTAPDENIPAKILSYNRANRAVAILCNHQRAPPKTFEKSMMNLQTKIDAKKEQLADARRDLKSAKADAKVMKDAKTKKVVESKKKAVQRLEEQLMKLEVQATDREENKQIALGTSKLNYLDPRITVAWCKKWGVPIEKIYNKTQREKFAWAIDMADEDYEF

SEQ ID NO: 836350 - protein, 82 aa, Homo sapiens
KCELRLLHNCWGLFSPPARQSGSVAAVVAASAVSGVSGPQSPPLTCASSSLRSPRPPAQAGSPSASPPRRLACRRARPSGPT

SEQ ID NO: 836351 - protein, 314 aa, Homo sapiens
  misc_feature (250)..(250): Xaa can be any naturally occurring amino acid
MSGDHLHNDSQIEADFRLNDSHKHKDKHKDREHRHKEHKKEKDREKSKHSNSEHKDSEKKHKEKEKTKHKDGSSEKHKDKHKDRDKEKRKEEKVRASGDAKIKKEKENGFSSPPQIKDEPEDDGYFVPPKEDIKPLKRPRDEDDADYKPKKIKTEDTKKEKKRKLEEEEGGSAEKKFFKNNCVWGGGPQVLWEQWAKAADHKEDAGPRTGGPGSPPIKKSARRHRGALETTRTRGSGAISGPTPGEPSGXDNNGRAAECNKRRHEDEDTTTPTEKNKHRDDEKNTRDSTSKTQKQTHIDTTDRHRSERRARREN

SEQ ID NO: 836352 - protein, 751 aa, Homo sapiens
DEGIRLNILKHKMTRVGGGGEMTTKKEKDREKSKHSNSEHKDSEKKHKEKEKTKHKDGSSEKHKDKHKDRDKEKRKEEKVRASGDAKIKKEKENGFSSPPQIKDEPEDDGYFVPPKEDIKPLKRPRDEDDADYKPKKIKTEDTKKEKKRKLEEEEDGKLKKPKNKDKDKKVPEPDNKKKKPKKEEEQKWKWWEEERYPEGIKWKFLEHKGPVFAPPYEPLPENVKFYYDGKVMKLSPKAEEVATFFAKMLDHEYTTKEIFRKNFFKDWRKEMTNEEKNIITNLSKCDFTQMSQYFKAQTEARKQMSKEEKLKIKEENEKLLKEYGFCIMDNHKERIANFKIEPPGLFRGRGNHPKMGMLKRRIMPEDIIINCSKDAKVPSPPPGHKWKEVRHDNKVTWLVSWTENIQGSIKYIMLNPSSRIKGEKDWQKYETARRLKKCVDKIRNQYREDWKSKEMKVRQRAVALYFIDKLALRAGNEKEEGETADTVGCCSLRVEHINLHPELDGQEYVVEFDFLGKDSIRYYNKVPVEKRVFKNLQLFMENKQPEDDLFDRLNTGILNKHLQDLMEGLTAKVFRTYNASITLQQQLKELTAPDENIPAKILSYNRANRAVAILCNHQRAPPKTFEKSMMNLQTKIDAKKEQLADARRDLKSAKADAKVMKDAKTKKVVESKKKAVQRLEEQLMKLEVQATDREENKQIALGTSKLNYLDPRITVAWCKKWGVPIEKIYNKTQREKFAWAIDMADEDYEF

SEQ ID NO: 836353 - protein, 752 aa, Homo sapiens
MRQWSSEDRIYIGFEKFRNSNYLIHTLLKKFKNAKHSSSEHKDSEKKHKEKEKTKHKDGSSEKHKDKHKDRDKEKRKEEKVRASGDAKIKKEKENGFSSPPQIKDEPEDDGYFVPPKEDIKPLKRPRDEDDADYKPKKIKTEDTKKEKKRKLEEEEDGKLKKPKNKDKDKKVPEPDNKKKKPKKEEEQKWKWWEEERYPEGIKWKFLEHKGPVFAPPYEPLPENVKFYYDGKVMKLSPKAEEVATFFAKMLDHEYTTKEIFRKNFFKDWRKEMTNEEKNIITNLSKCDFTQMSQYFKAQTEARKQMSKEEKLKIKEENEKLLKEYGFCIMDNHKERIANFKIEPPGLFRGRGNHPKMGMLKRRIMPEDIIINCSKDAKVPSPPPGHKWKEVRHDNKVTWLVSWTENIQGSIKYIMLNPSSRIKGEKDWQKYETARRLKKCVDKIRNQYREDWKSKEMKVRQRAVALYFIDKLALRAGNEKEEGETADTVGCCSLRVEHINLHPELDGQEYVVEFDFLGKDSIRYYNKVPVEKRVFKNLQLFMENKQPEDDLFDRLNTGILNKHLQDLMEGLTAKVFRTYNASITLQQQLKELTAPDENIPAKILSYNRANRAVAILCNHQRAPPKTFEKSMMNLQTKIDAKKEQLADARRDLKSAKADAKVMKDAKTKKVVESKKKAVQRLEEQLMKLEVQATDREENKQIALGTSKLNYLDPRITVAWCKKWGVPIEKIYNKTQREKFAWAIDMADEDYEF

SEQ ID NO: 836354 - protein, 519 aa, Homo sapiens
MKLSPKAEEVATFFAKMLDHEYTTKEIFRKNFFKDWRKEMTNEEKNIITNLSKCDFTQMSQYFKAQTEARKQMSKEEKLKIKEENEKLLKEYGFCIMDNHKERIANFKIEPPGLFRGRGNHPKMGMLKRRIMPEDIIINCSKDAKVPSPPPGHKWKEVRHDNKVTWLVSWTENIQGSIKYIMLNPSSRIKGEKDWQKYETARRLKKCVDKIRNQYREDWKSKEMKVRQRAVALYFIDKLALRAGNEKEEGETADTVGCCSLRVEHINLHPELDGQEYVVEFDFLGKDSIRYYNKVPVEKRVFKNLQLFMENKQPEDDLFDRLNTGILNKHLQDLMEGLTAKVFRTYNASITLQQQLKELTAPDENIPAKILSYNRANRAVAILCNHQRAPPKTFEKSMMNLQTKIDAKKEQLADARRDLKSAKADAKVMKDAKTKKVVESKKKAVQRLEEQLMKLEVQATDREENKQIALGTSKLNYLDPRITVAWCKKWGVPIEKIYNKTQREKFAWAIDMADEDYEF

SEQ ID NO: 836355 - protein, 296 aa, Homo sapiens
MKVRQRAVALYFIDKLALRAGNEKEEGETADTVGCCSLRVEHINLHPELDGQEYVVEFDFLGKDSIRYYNKVPVEKRVFKNLQLFMENKQPEDDLFDRLNTGILNKHLQDLMEGLTAKVFRTYNASITLQQQLKELTAPDENIPAKILSYNRANRAVAILCNHQRAPPKTFEKSMMNLQTKIDAKKEQLADARRDLKSAKADAKVMKDAKTKKVVESKKKAVQRLEEQLMKLEVQATDREENKQIALGTSKLNYLDPRITVAWCKKWGVPIEKIYNKTQREKFAWAIDMADEDYEF

SEQ ID NO: 836356 - protein, 765 aa, Homo sapiens; identical to SEQ ID NO: 836349

SEQ ID NO: 836357 - protein, 765 aa, Homo sapiens; identical to SEQ ID NO: 836349

SEQ ID NO: 836358 - protein, 765 aa, Homo sapiens; identical to SEQ ID NO: 836349

SEQ ID NO: 836359 - protein, 765 aa, Homo sapiens; identical to SEQ ID NO: 836349

SEQ ID NO: 836360 - protein, 339 aa, Homo sapiens
MSGDHLHNDSQIEADFRLNDSHKHKDKHKDREHRHKEHKKEKDREKSKHSNSEHKDSEKKHKEKEKTKHKDGSSEKHKDKHKDRDKEKRKEEKVRASGDAKIKKEKENGFSSPPQIKDEPEDDGYFVPPKEDIKPLKRPRDEDDADYKPKKIKTEDTKKEKKRKLEEEEDGKLKKPKNKDKDKKVPEPDNKKKKPKKEEEQKWKWWEEERYPEGIKWKFLEHKGPVFAPPYEPLPENVKFYYDGKVMKLSPKAEEVATFFAKMLDHEYTTKEIFRKNFFKDWRKEMTNEEKNIITNLSKCDFTQMSQYFKAQTEARKQMSKEEKLVLQNLLNLWRILEL

SEQ ID NO: 836361 - protein, 205 aa, Homo sapiens [sequence omitted]

SEQ ID NO: 836362 - protein, 629 aa, Homo sapiens
SSQKRYEEIVTEVDYIKKMAKPDTVALCQFLVGMVTNAGAKNKDKDKKVPEPDNKKKKPKKEEEQKWKWWEEERYPEGIKWKFLEHKGPVFAPPYEPLPENVKFYYDGKVMKLSPKAEEVATFFAKMLDHEYTTKEIFRKNFFKDWRKEMTNEEKNIITNLSKCDFTQMSQYFKAQTEARKQMSKEEKLKIKEENEKLLKEYGFCIMDNHKERIANFKIEPPGLFRGRGNHPKMGMLKRRIMPEDIIINCSKDAKVPSPPPGHKWKEVRHDNKVTWLVSWTENIQGSIKYIMLNPSSRIKGEKDWQKYETARRLKKCVDKIRNQYREDWKSKEMKVRQRAVALYFIDKLALRAGNEKEEGETADTVGCCSLRVEHINLHPELDGQEYVVEFDFLGKDSIRYYNKVPVEKRVFKNLQLFMENKQPEDDLFDRLNTGILNKHLQDLMEGLTAKVFRTYNASITLQQQLKELTAPDENIPAKILSYNRANRAVAILCNHQRAPPKTFEKSMMNLQTKIDAKKEQLADARRDLKSAKADAKVMKDAKTKKVVESKKKAVQRLEEQLMKLEVQATDREENKQIALGTSKLNYLDPRITVAWCKKWGVPIEKIYNKTQREKFAWAIDMADEDYEF

SEQ ID NO: 836363 - protein, 480 aa, Homo sapiens [sequence omitted]

SEQ ID NO: 836364 - protein, 178 aa, Homo sapiens
KSGINAESPLRPGQLKELTAPDENIPAKILSYNRANRAVAILCNHQRAPPKTFEKSMMNLQTKIDAKKEQLADARRDLKSAKADAKVMKDAKTKKVVESKKKAVQRLEEQLMKLEVQATDREENKQIALGTSKLNYLDPRITVAWCKKWGVPIEKIYNKTQREKFAWAIDMADEDYEF

SEQ ID NO: 836365 - protein, 765 aa, Homo sapiens; identical to SEQ ID NO: 836349

SEQ ID NO: 836366 - protein, 765 aa, Homo sapiens; identical to SEQ ID NO: 836349

SEQ ID NO: 836367 - protein, 548 aa, Homo sapiens
MSGDHLHNDSQIEADFRLNDSHKHKDKHKDREHRHKEHKKEKDREKSKHSNSEHKDSEKKHKEKEKTKHKDGSSEKHKDKHKDRDKEKRKEEKVRASGDAKIKKEKENGFSSPPQIKDEPEDDGYFVPPKEDIKPLKRPRDEDDADYKPKKIKTEDTKKEKKRKLEEEEDGKLKKPKNKDKDKKVPEPDNKKKKPKKEEEQKWKWWEEERYPEGIKWKFLEHKGPVFAPPYEPLPENVKFYYDGKVMKLSPKAEEVATFFAKMLDHEYTTKEIFRKNFFKDWRKEMTNEEKNIITNLSKCDFTQMSQYFKAQTEARKQMSKEEKLKIKEENEKLLKEYGFCIMDNHKERIANFKIEPPGLFRGRGNHPKMGMLKRRIMPEDIIINCSKDAKVPSPPPGHKWKEVRHDNKVTWLVSWTENIQGSIKYIMLNPSSRIKGEKDWQKYETARRLKKCVDKIRNQYREDWKSKEMKVRQRAVALYFIDKLALRAGNEKEEGETADTVGCCSLRVEHINLHPELDGQEYVVEFDFLGKDSIRYYNKVPVEKRVS

SEQ ID NO: 836368 - protein, 306 aa, Homo sapiens
KLSSSLGCQLADDKALPYNEPGILSSSFTICNCTFLPFTIKKYTISFHHPHPPKIPPHSNTPHEESEKAQNWAPHHNRTPTNLSYIHKTPGPSEHPRRTAAKPPPPSQAAAPTCATSYITSPNATDLMRNRAHSPVLGPAAPPQPATLLPLAHHTKIARPNAPTPHHTPHHPHPARPACVTTPYPHPEYHETDRLTTRSTSPTRPNAIHGPVSANSRLHPHSSPQWSARPPHTNRDHYRNMPPTPPTLNSPLHTQQCHSAPRLSRCDRSSPRCRIGLLTTSPLTKEYTLHNHRPPPKAPPARPAHV

SEQ ID NO: 836369 - protein, 104 aa, Homo sapiens
MNPCCLGFIAFAYSVKSRDRKMVGDVTGAQAYASTAKCLNIWALILGILMTISAHHHPSVGRPGPCDRSGGIIEARSSARDLYPTYSIFHSSPCPRRPSPASAL

SEQ ID NO: 836370 - protein, 103 aa, Homo sapiens
MNPCCLGFIAFAYSVKSRDRKMVGDVTGAQAYASTAKCLNIWALILGILMTISAHHHPSVGRPGPCDRSGGIIEARSSARDLYPTYSIFHSSPCPRRGQELCP

SEQ ID NO: 836371 - protein, 185 aa, Homo sapiens
  misc_feature (7)..(7): Xaa can be any naturally occurring amino acid
KGHEITXPPPGYRDYTVQTFLLSTAASLPTTRCSRCSRRSRKWLCWGAPHNPAPPTSTVIHIRSETSVPDHVVWSLFNTLFMNPCCLGFIAFAYSVKSRDRKMVGDVTGAQAYASTAKCLNIWALILGILMTISAHHHPSVGRPGPCDRSGGIIEARSSARDLYPTYSIFHSSPCPRRPSPASAL

SEQ ID NO: 836372 - protein, 154 aa, Homo sapiens
SARTQAARQQKTTLLKPSLNTSFPKARRRCSRRSRKWLCWGAPHNPAPPTSTVIHIRSETSVPDHVVWSLFNTLFMNPCCLGFIAFAYSVKSRDRKMVGDVTGAQAYASTAKCLNIWALILGILMTIGFILLLVFGSVTVYHIMLQIIQEKRGY

SEQ ID NO: 836373 - protein, 103 aa, Homo sapiens; identical to SEQ ID NO: 836370

SEQ ID NO: 836374 - protein, 103 aa, Homo sapiens; identical to SEQ ID NO: 836370

SEQ ID NO: 836375 - protein, 103 aa, Homo sapiens; identical to SEQ ID NO: 836370

SEQ ID NO: 836376 - protein, 103 aa, Homo sapiens; identical to SEQ ID NO: 836370

SEQ ID NO: 836377 - protein, 103 aa, Homo sapiens; identical to SEQ ID NO: 836370

SEQ ID NO: 836378 - protein, 104 aa, Homo sapiens; identical to SEQ ID NO: 836369

SEQ ID NO: 836379 - protein, 104 aa, Homo sapiens; identical to SEQ ID NO: 836369

SEQ ID NO: 836380 - protein, 103 aa, Homo sapiens; identical to SEQ ID NO: 836370

SEQ ID NO: 836381 - protein, 133 aa, Homo sapiens
MNPCCLGFIAFAYSVKSRDRKMVGDVTGAQAYASTAKCLNIWALILGILMTISAHHHPSVGRPGPCDRSGGIIEARSSARDLYPTYSIFHSSPCPRRPSPASALLSSHAFLPMAFNKGVYVSGKTEKQRTTKG

SEQ ID NO: 836382 - protein, 104 aa, Homo sapiens; identical to SEQ ID NO: 836369

SEQ ID NO: 836383 - protein, 104 aa, Homo sapiens; identical to SEQ ID NO: 836369

SEQ ID NO: 836384 - protein, 104 aa, Homo sapiens; identical to SEQ ID NO: 836369

SEQ ID NO: 836385 - protein, 110 aa, Homo sapiens
MNPCCLGFIAFAYSVKSRDRKMVGDVTGAQAYASTAKCLNIWALILGILMTISAHHHPSVGRPGPCDRSGGIIEARSSARDLYPTYSIFHSSPCPRRFDAAANLVVVVGG

SEQ ID NO: 836386 - protein, 161 aa, Homo sapiens
EATLEAPPAQRRCSRRSRKWLCWGAPHNPAPPTSTVIHIRSETSVPDHVVWSLFNTLFMNPCCLGFIAFAYSVKSRDRKMVGDVTGAQAYASTAKCLNIWALILGILMTISAHHHPSVGRPGPCDRSGGIIEARSSARDLYPTYSIFHSSPCPRRGQELCP

SEQ ID NO: 836387 - protein, 103 aa, Homo sapiens; identical to SEQ ID NO: 836370

SEQ ID NO: 836388 - protein, 119 aa, Homo sapiens
MNHIVQTFFFSPVNSGQPPNYEMLEMLKEEQEVAMLGRAPQPCSPDVHRDPHPQRDLRARPCRLVPVQHPLHEPLLPGLHSIRLLREGAYGPGGNPGGAGEPGAPPAHMLPGVGTCVSL

SEQ ID NO: 836389 - protein, 168 aa, Homo sapiens
  misc_feature (1)..(1): Xaa can be any naturally occurring amino acid
  misc_feature (13)..(13): Xaa can be any naturally occurring amino acid
  misc_feature (15)..(15): Xaa can be any naturally occurring amino acid
XGGDRVVGPPQHXHXVLLLSISLFGGLATVDRERRRFGQFDMVSSRSETSVPDHVVWSLFNTLFMNPCCLGFIAFAYSVKSRDRKMVGDVTGAQAYASTAKCLNIWALILGILMTISAHHHPSVGRPGPCDRSGGIIEARSSARDLYPTYSIFHSSPCPRRPSPASAL

SEQ ID NO: 836390 - protein, 119 aa, Homo sapiens; identical to SEQ ID NO: 836388

SEQ ID NO: 836391 - protein, 107 aa, Homo sapiens
ELEDPPTLCVGFIAFAYSVKSRDRKMVGDVTGAQAYASTAKCLNIWALILGILMTISAHHHPSVGRPGPCDRSGGIIEARSSARDLYPTYSIFHSSPCPRRGQELCP

SEQ ID NO: 836392 - protein, 93 aa, Homo sapiens
RPLQHQNGHEDAQNQGPDVQALGGGGICLNIWALILGILMTISAHHHPSVGRPGPCDRSGGIIEARSSARDLYPTYSIFHSSPCPRRGQELCP

SEQ ID NO: 836393 - protein, 93 aa, Homo sapiens
RPPTTTKFAAASTFLNWCCLGFIAFAYSVKSRDRKMVGDVTGAQAYASTAKCLNIWALILGILMTIGFILLLVFGSVTVYHIMLQIIQEKRGY

SEQ ID NO: 836394 - protein, 48 aa, Homo sapiens
MNHIVQTFFFSPVNSGQPPNYEMLGKGVWGTPGQVYDVEEDCERSPTM

SEQ ID NO: 836395 - protein, 103 aa, Homo sapiens; identical to SEQ ID NO: 836370

SEQ ID NO: 836396 - protein, 104 aa, Homo sapiens; identical to SEQ ID NO: 836369

SEQ ID NO: 836397 - protein, 152 aa, Homo sapiens
MRCSRRSRKWLCWGAPHNPAPPTSTVIHIRSETSVPDHVVWSLFNTLFMNPCCLGFIAFAYSVKSRDRKMVGDVTGAQAYASTAKCLNIWALILGILMTISAHHHPSVGRPGPCDRSGGIIEARSSARDLYPTYSIFHSSPCPRRPSPASAL

SEQ ID NO: 836398 - protein, 93 aa, Homo sapiens
MNPCCLGFIAFAYSVKSRDRKMVGDVTGAQAYASTAKCLNIWALILGILMTISAHHHPSVGRPGPCDRSGGIIEARSSARDLYPTIVQRLTGR

SEQ ID NO: 836399 - protein, 103 aa, Homo sapiens; identical to SEQ ID NO: 836370

SEQ ID NO: 836400 - protein, 103 aa, Homo sapiens; identical to SEQ ID NO: 836370

SEQ ID NO: 836401 - protein, 103 aa, Homo sapiens; identical to SEQ ID NO: 836370

SEQ ID NO: 836402 - protein, 103 aa, Homo sapiens; identical to SEQ ID NO: 836370

SEQ ID NO: 836403 - protein, 103 aa, Homo sapiens; identical to SEQ ID NO: 836370

SEQ ID NO: 836404 - protein, 112 aa, Homo sapiens
MNPCCLGFIAFAYSVKSRDRKMVGDVTGAQAYASTAKCLNIWALILGILMTISAHHHPSVGRPGPCDRSGGIIEARSSARDLYPTYSIFHSSPCPRSRVLYQPFILTVWGSS

SEQ ID NO: 836405 - protein, 133 aa, Homo sapiens
MNPCCLGFIAFAYSVKSRDRKMVGDVTGAQAYASTAKCLNIWALILGILMTISAHHHPSVGRPGPCDRSGGIIEARSSARDLYPTYSIFHSSPCPRRPSPASALLSSHAFLPMAFNKGVYVSGTYIFLLPVPP

SEQ ID NO: 836406 - protein, 198 aa, Homo sapiens
MNPCCLGFIAFAYSVKSRDRKMVGDVTGAQAYASTAKCLNIWALILGILMTISAHHHPSVGRPGPCDRSGGIIEARSSARDLYPTYSIFHSSPCPRRPSPASALLSSHAFLPMAFNKGVYVSGKKKKKQKTKQNTTTAERPIYGGGRGKTRVTRTGATRAERVFLQHPSFSGPPRRDNRPESPNRGEPIKLRKHRYPR

SEQ ID NO: 836407 - protein, 121 aa, Homo sapiens
MNPCCLGFIAFAYSVKSRDRKMVGDVTGAQAYASTAKCLNIWALILGILMTISAHHHPSVGRPGPCDRSGGIIEARSSARDLYPTYSIFHSSPCPRREPSPVSALYPTTLFHNARDKILRV

SEQ ID NO: 836408 - protein, 151 aa, Homo sapiens
MRCSRRSRKWLCWGAPHNPAPPTSTVIHIRSETSVPDHVVWSLFNTLFMNPCCLGFIAFAYSVKSRDRKMVGDVTGAQAYASTAKCLNIWALILGILMTISAHHHPSVGRPGPCDRSGGIIEARSSARDLYPTYSIFHSSPCPRRGQELCP

SEQ ID NO: 836409 - protein, 152 aa, Homo sapiens; identical to SEQ ID NO: 836397

SEQ ID NO: 836410 - protein, 107 aa, Homo sapiens; identical to SEQ ID NO: 836391

SEQ ID NO: 836411 - protein, 125 aa, Homo sapiens
MEYCTVTYWFYLHGVQASSYYQTYLPPLRFIAFAYSVKSRDRKMVGDVTGAQAYASTAKCLNIWALILGILMTISAHHHPSVGRPGPCDRSGGIIEARSSARDLYPTYSIFHSSPCPRRGQELCP

SEQ ID NO: 836412 - protein, 150 aa, Homo sapiens
  misc_feature (1)..(1): Xaa can be any naturally occurring amino acid
  misc_feature (13)..(13): Xaa can be any naturally occurring amino acid
  misc_feature (15)..(15): Xaa can be any naturally occurring amino acid
XGGDRVVGPPQHXHXVLLLSISLFGGLATVDRERRRFGQFDSGVQFMNPCCLGFIAFAYSVKSRDRKMVGDVTGAQAYASTAKCLNIWALILGILMTISAHHHPSVGRPGPCDRSGGIIEARSSARDLYPTYSIFHSSPCPRRPSPASAL

SEQ ID NO: 836413 - protein, 608 aa, Homo sapiens
AYRGGAGVAGAVWTVMAATVATAAAVAPAPAPGTDSASSVHWFRKGLRLHDNPALLAAVRGARCVRCVYILDPWFAASSSVGINRWRFLLQSLEDLDTSLRKLNSRLFVVRGQPADVFPRLFKEWGVTRLTFEYDSEPFGKERDAAIMKMAKEAGVEVVTENSHTLYDLDRIIELNGQKPPLTYKRFQAIISRMELPKKPVGLVTSQQMESCRAEIQENHDETYGVPSLEELGFPTEGLGPAVWQGGETEALARLDKHLERKAWVANYERPRMNANSLLASPTGLSPYLRFGCLSCRLFYYRLWDLYKKVKRNSTPPLSLFGQLLWREFFYTAATNNPRFDRMEGNPICIQIPWDRNPEALAKWAEGKTGFPWIDAIMTQLRQEGWIHHLARHAVACFLTRGDLWVSWESGVRVFDELLLDADFSVNAGSWMWLSCSAFFQQFFHCYCPVGFGRRTDPSGDYIRRYLPKLKAFPSRYIYEPWNAPESIQKAAKCIIGVDYPRPIVNHAETSRLNIERMKQIYQQLSRYRGLCLLASVPSCVEDLSHPVAEPSSSQAGSMSSAGPRPLPSGPASPKRKLEAAEEPPGEELSKRARVAELPTPELPSKDA

SEQ ID NO: 836414 - protein, 66 aa, Homo sapiens
MNANSLLASPTGLSPYLRFGCLSCRLFYYRLWDLYKKVRGTYLPTLHLRPAARPFGLVSHPKKGTG

SEQ ID NO: 836415 - protein, 608 aa, Homo sapiens; identical to SEQ ID NO: 836413

SEQ ID NO: 836416 - protein, 71 aa, Homo sapiens
  misc_feature (8)..(8): Xaa can be any naturally occurring amino acid
NKKQRPGXYVWTASIHSGLLSLQVLPHAQSQKPKAKKFPPPYRSTHRYLTGVGYAWYCNRSLRQHTYLFRI

SEQ ID NO: 836417 - protein, 336 aa, Homo sapiens
MNANSLLASPTGLSPYLRFGCLSCRLFYYRLWDLYKKVKRNSTPPLSLFGQLLWREFFYTAATNNPRFDRMEGNPICIQIPWDRNPEALAKWAEGKTGFPWIDAIMTQLRQEGWIHHLARHAVACFLTRGDLWVSWESGVRVFDELLLDADFSVNAGSWMWLSCSAFFQQFFHCYCPVGFGRRTDPSGDYIRRYLPKLKAFPSRYIYEPWNAPESIQKAAKCIIGVDYPRPIVNHAETSRLNIERMKQIYQQLSRYRGLCLLASVPSCVEDLSHPVAEPSSSQAGSMSSAGPRPLPSGPASPKRKLEAAEEPPGEELSKRARVAELPTPELPSKDA

SEQ ID NO: 836418 - protein, 608 aa, Homo sapiens; identical to SEQ ID NO: 836413

SEQ ID NO: 836419 - protein, 608 aa, Homo sapiens; identical to SEQ ID NO: 836413

SEQ ID NO: 836420 - protein, 608 aa, Homo sapiens; identical to SEQ ID NO: 836413

SEQ ID NO: 836421 - protein, 608 aa, Homo sapiens
AYRGGAGVAGAVWTVMAATVATAAAVAPAPAPGTDSASSVHWFRKGLRLHDNPALLAAVRGARCVRCVYILDPWFAASSSVGINRWRFLLQSLEDLDTSLRKLNSRLFVVRGQPADVFPRLFKEWGVTRLTFEYDSEPFGKERDAAIMKMAKEAGVEVVTENSHTLYDLDRIIELNGQKPPLTYKRFQAIISRMELPKKPVGLVTSQQMESCRAEIQENHDETYGVPSLEELGFPTEGLGPAVWQGGETEALARLDKHLERKAWVANYERPRMNANSLLASPTGLSPYLRFGCLSCRLFYYRLWDLYKKVKRNSTPPLSLFGQLLWREFFYTAATNNPRFDRMEGNPICIQIPWDRNPEALAKWAEGKTGFPWIDAIMTQLRQEGWIHHLARHAVACFLTRGDLWVSWESGVRVFDELLLDADFSVNAGSWMWLSCSAFFQQFFHCYCPVGFGRRTDPSGDYIRRYLPKLKAFPSRYIYEPWNAPESIQKAAKCIIGVDYPRPIVNHAETSRLNIERMKQIYQQLSRYRGLCLLASVPSCVEDLSHPVAEPSSSQAGSMSSAGPRPLPSGPASPKRKLEAAEEPPGEELSSSGVGNSATRARLLSSSP

SEQ ID NO: 836422 - protein, 81 aa, Homo sapiens
GPQQQFGGPGALYTTGFSAATRINQNTLMEPQVDSMPWELFLHIGSLKNSPDVCFIRTPNSKKEAPRDGQDICPLKLSTTV

SEQ ID NO: 836423 - protein, 81 aa, Homo sapiens; identical to SEQ ID NO: 836422

SEQ ID NO: 836424 - protein, 270 aa, Homo sapiens
MGNTSSERAALERHGGHKTPRRDSSGGTKDGDRPKILMDSPEDADLFHSEEIKAPEKEEFLAWQHDLEVNDKAPAQARPTVFRWTGGGKEVYLSGSFNNWSKLPLTRSHNNFVAILDLPEGEHQYKFFVDGQWTHDPSEPIVTSQLGTVNNIIQVKKTDFEVFDALMVDSQKCSDVSELSSSPPGPYHQEPYVCKPEERFRAPPILPPHLLQVILNKDTGISCDPALLPEPNHVMLNHLYALSIKDGVMVLSATHRYKKKYVTTLLYKPI

SEQ ID NO: 836425 - protein, 255 aa, Homo sapiens
MGNTSSERAALERHGGHKTPRRDSSGGTKDGDRPKILMDSPEDADLFHSEEIKAPEKEEFLAWQHDLEVNDKAPAQARPTVFRWTGGGKEVYLSGSFNNWSKLPLTRSHNNFVAILDLPEGEHQYKFFVDGQWTHDPSEPIVTSQLGTVNNIIQVKKTDFEVFDALMVDSQKCSDVSELSSSPPGPYHQEPYVCKPEERFRAPPILPPHLLQVILNKDTGISHLPTPTTPSRWQPPLYSLLLVIQLCFLSPITSC

SEQ ID NO: 836426 - protein, 264 aa, Homo sapiens
MGNTSSERAALERHGGHKTPRRDSSGGTKDGDRPKILMDSLLQGPFPAVKHRLLPQLLGTGSRPEGDGCPGAPTVFRWTGGGKEVYLSGSFNNWSKLPLTRSHNNFVAILDLPEGEHQYKFFVDGQWTHDPSEPIVTSQLGTVNNIIQVKKTDFEVFDALMVDSQKCSDVSELSSSPPGPYHQEPYVCKPEERFRAPPILPPHLLQVILNKDTGISCDPALLPEPNHVMLNHLYALSIKDGVMVLSATHRYKKKYVTTLLYKPI

SEQ ID NO: 836427 - protein, 104 aa, Homo sapiens
MVDSQKCSDVSELSSSPPGPYHQEPYVCKPEERFRAPPILPPHLLQVILNKDTGISCDPALLPEPNHVMLNHLYALSIKDGVMVLSATHRYKKKYVTTLLYKPI

SEQ ID NO: 836428 - protein, 270 aa, Homo sapiens; identical to SEQ ID NO: 836424

SEQ ID NO: 836429 - protein, 252 aa, Homo sapiens
MGNTSSERAALERHGGHKTPRRDSSGGTKDGDRPKILMDSPEDADLFHSEEIKAPEKEEFLAWQHDLEVNDKAPAQARPTVFRWTGGGKEVYLSGSFNNWSKLPLTRSHNNFVAILDLPEGEHQYKFFVDGQWTHDPSEPIVTSQLGTVNNIIQVKKTDFEVFDALMVDSQKCSDVSELSSSPPGPYHQEPYVCKPEERFRAPPILPPHLLQVILNKDTGISCDPALLPEPNHTQRDFTRSRGTLLRTSAPS

SEQ ID NO: 836430 - protein, 270 aa, Homo sapiens; identical to SEQ ID NO: 836424

SEQ ID NO: 836431 - protein, 238 aa, Homo sapiens
MIDTSTGPALDTWGLWGLQFKAPEKEEFLAWQHDLEVNDKAPAQARPTVFRWTGGGKEVYLSGSFNNWSKLPLTRSHNNFVAILDLPEGEHQYKFFVDGQWTHDPSEPIVTSQLGTVNNIIQVKKTDFEVFDALMVDSQKCSDVSELSSSPPGPYHQEPYVCKPEERFRAPPILPPHLLQVILNKDTGISCDPALLPEPNHVMLNHLYALSIKDGVMVLSATHRYKKKYVTTLLYKPI

SEQ ID NO: 836432 - protein, 153 aa, Homo sapiens
MGNTSSERAALERHGGHKTPRRDSSGGTKDGDRPKILMDSPEDADLFHSEEIKAPEKEEFLAWQHDLEVNDKAPAQARPTVFRWTGGGKEVYLSGSFNNWSKLPLTRRAVQFSPRTLPSGALRLQTRRALSGTPYSPPTSPPGHPEQGHGDFL

SEQ ID NO: 836433 - protein, 252 aa, Homo sapiens; identical to SEQ ID NO: 836429

SEQ ID NO: 836434 - protein, 170 aa, Homo sapiens
MPVMRLFPCFLQLLAGLALPAVPPQQWALSAGNGSSEVEVVPFQEVWGRSYCRALERLVDVVSEYPSEVEHMFSPSCVSLLRCTGCCGDENLHCVPVETANVTMQLLKIRSGDRPSYVELTFSQHVRCECRPLREKMKPERRRPKGRGKRRREKQRPTDCHLCGDAVPRR

SEQ ID NO: 836435 - protein, 85 aa, Homo sapiens
CVSFPFSGMGGSCHGPLKEVPGGKDIASPNFVLGQAVCPQERANGAEKQQEGQARVGEKGQKKSDTVASLMLQHPSTAPPNPQSL

SEQ ID NO: 836436 - protein, 85 aa, Homo sapiens; identical to SEQ ID NO: 836435

SEQ ID NO: 836437 - protein, 170 aa, Homo sapiens; identical to SEQ ID NO: 836434

SEQ ID NO: 836438 - protein, 163 aa, Homo sapiens
MCSKWEGTQRGPYLLAITLGPRVQSSKVPPAHLCTFLSKQWALSAGNGSSEVEVVPFQEVWGRSYCRALERLVDVVSEYPSEVEHMFSPSCVSLLRCTGCCGDENLHCVPVETANVTMQLLKIRSGDRPSYVELTFSQHVRCECRPLREKMKPERCGDAVPRR

SEQ ID NO: 836439 - protein, 149 aa, Homo sapiens
MPVMRLFPCFLQLLAGLALPAVPPQQWALSAGNGSSEVEVVPFQEVWGRSYCRALERLVDVVSEYPSEVEHMFSPSCVSLLRCTGCCGDENLHCVPVETANVTMQLLKIRSGDRPSYVELTFSQHVRCECRPLREKMKPERCGDAVPRR

SEQ ID NO: 836440 - protein, 136 aa, Homo sapiens
MPVMRLFPCFLQLLAGLALPAVPPQQWALSAGNGSSEVEVVPFQEVWGRSYCRALERLVDVVSEYPSEVEHMFSPSCVSLLRCTGCCGDENLHCVPVETANVTMQLSKDPFWGHGPQYVVTFSHTRSQLQRGYGTD

SEQ ID NO: 836441 - protein, 85 aa, Homo sapiens; identical to SEQ ID NO: 836435

SEQ ID NO: 836442 - protein, 331 aa, Homo sapiens
MEPEFLYDLLQLPKGVEPPAEEELSKGGKKKYLPPTSRKDPKFEELQKVLMEWINATLLPEHIVVRSLEEDMFDGLILHHLFQRLAALKLEAEDIALTATSQKHKLTVVLEAVNRSLQLEEWQAKWSVESIFNKDLLSTLHLLVALAKRFQPDLSLPTNVQVEVITIESTKSGLKSEKLVEQLTEYSTDKDEPPKDVFDELFKLAPEKVNAVKEAIVNFVNQKLDRLGLSVQNLDTQFADGVILLLLIGQLEGFFLHLKEFYLTPNSPAEMLHNVTLALELLKDEGLLSCPVSPEDIVNKDAKSTLRVLYGLFCKHTQKAHRDRTPHGAPN

SEQ ID NO: 836443 - protein, 331 aa, Homo sapiens; identical to SEQ ID NO: 836442

SEQ ID NO: 836444 - protein, 349 aa, Homo sapiens
MEPEFLYDLLQLPKGVEPPAEEELSKGGKKKYLPPTSRKDPKFEELQKVLMEWINATLLPEHIVVRSLEEDMFDGLILHHLFQRLAALKLEAEDIALTATSQKHKLTVVLEAVNRSLQLEEWQAKWSVESIFNKDLLSTLHLLVALAKRFQPDLSLPTNVQVEVITIESTKSGLKSEKLVEQLTEYSTDKDEPPKDVFDELFKLAPEKVNAVKEAIVNFVNQKLDRLGLSVQNLDTQFADGVILLLLIGQLEGFFLHLKEFYLTPNSPAEMLHNVTLALELLKDEGLLSCPVSPEVGHCHPGLTGCPALLWPADIVNKDAKSTLRVLYGLFCKHTQKAHRDRTPHGAPN

SEQ ID NO: 836445 - protein, 331 aa, Homo sapiens; identical to SEQ ID NO: 836442

SEQ ID NO: 836446 - protein, 366 aa, Homo sapiens
MEPEFLYDLLQLPKGVEPPAEEELSKGGKKKYLPPTSRKDPKFEELQKVLMEWINATLLPEHIVVRSLEEDMFDGLILHHLFQRLAALKLEAEDIALTATSQKHKLTVVLEAVNRSLQLEEWQAKWSVESIFNKDLLSTLHLLVALAKRFQPDLSLPTNVQVEVITIEVAAWAPGICKQKLSLLGPHCRTLHGWSWLGRGCPRSTKSGLKSEKLVEQLTEYSTDKDEPPKDVFDELFKLAPEKVNAVKEAIVNFVNQKLDRLGLSVQNLDTQFADGVILLLLIGQLEGFFLHLKEFYLTPNSPAEMLHNVTLALELLKDEGLLSCPVSPEDIVNKDAKSTLRVLYGLFCKHTQKAHRDRTPHGAPN

SEQ ID NO: 836447 - protein, 251 aa, Homo sapiens
SATDSGNCKRPHAQLWGKGALSLTVRTLGMPWGVRQTHPQPQDSWGRKTIKPEAVLRRDDTEQTDHWGFFGPQSFLDYLISSPFIFLQSTKSGLKSEKLVEQLTEYSTDKDEPPKDVFDELFKLAPEKVNAVKEAIVNFVNQKLDRLGLSVQNLDTQFADGVILLLLIGQLEGFFLHLKEFYLTPNSPAEMLHNVTLALELLKDEGLLSCPVSPEDIVNKDAKSTLRVLYGLFCKHTQKAHRDRTPHGAPN

SEQ ID NO: 836448 - protein, 132 aa, Homo sapiens
MPLGASGIEVNAVKEAIVNFVNQKLDRLGLSVQNLDTQFADGVILLLLIGQLEGFFLHLKEFYLTPNSPAEMLHNVTLALELLKDEGLLSCPVSPEDIVNKDAKSTLRVLYGLFCKHTQKAHRDRTPHGAPN

SEQ ID NO: 836449 - protein, 78 aa, Homo sapiens
PSSFSSSSARVTLCSISAGELGVRKNSFKCRKKPSSCPVSPEDIVNKDAKSTLRVLYGLFCKHTQKAHRDRTPHGAPN

SEQ ID NO: 836450 - protein, 332 aa, Homo sapiens
MEPEFLYDLLQLPKGVEPPAEEELSKGGKKKYLPPTSRKDPKFEELQKVLMEWINATLLPEHIVVRSLEEDMFDGLILHHLFQRLAALKLEAEDIALTATSQKHKLTVVLEAVNRSLQLEEWQAKWSVESIFNKDLLSTLHLLVALAKRFQPDLSLPTNVQVEVITIESTKSGLKSEKLVEQLTEYSTDKDEPPEEDVFDELFKLAPEKVNAVKEAIVNFVNQKLDRLGLSVQNLDTQFADGVILLLLIGQLEGFFLHLKEFYLTPNSPAEMLHNVTLALELLKDEGLLSCPVSPEDIVNKDAKSTLRVLYGLFCKHTQKAHRDRTPHGAPN

SEQ ID NO: 836451 - protein, 331 aa, Homo sapiens; identical to SEQ ID NO: 836442

SEQ ID NO: 836452 - protein, 331 aa, Homo sapiens; identical to SEQ ID NO: 836442

SEQ ID NO: 836453 - protein, 286 aa, Homo sapiens [sequence omitted]

SEQ ID NO: 836454 - protein, 321 aa, Homo sapiens
MEPEFLYDLLQLPKGVEPPAEEELSKGGKKKYLPPTSRKDPKFEELQKVLMEWINATLLPEHIVVRSLEEDMFDGLILHHLFQRLAALKLEAEDIALTATSQKHKLTVVLEAVNRSLQLEEWQAKWSVESIFNKDLLSTLHLLVALAKRFQPDLSLPTNVQVEVITIESTKSGLKSEKLVEQLTEYSTDKDEPPEEDVFDELFKLAPEKVNAVKEAIVNFVNQKLDRLGLSVQNLDTQFADGVILLLLIGQLEGFFLHLKEFYLTPNSPAEMLHNVTLALELLKDEGLLSCPVSPEVDSRESRMPRCYTAAASYVVFRSQY

SEQ ID NO: 836455 - protein, 173 aa, Homo sapiens
TFAVRVHVLSSLAEFFPSHLRTQNAPNRRVLRSLSPKDVFDELFKLAPEKVNAVKEAIVNFVNQKLDRLGLSVQNLDTQFADGVILLLLIGQLEGFFLHLKEFYLTPNSPAEMLHNVTLALELLKDEGLLSCPVSPEDIVNKDAKSTLRVLYGLFCKHTQKAHRDRTPHGAPN

SEQ ID NO: 836456 - protein, 110 aa, Homo sapiens
MEGGGQADRVLVVGCGGRPQALAYVAAILEVNSLRGNWHGLGKAGRGGEMKALSLSGLQNPGGPGGTAGAGAPGRAFWRFVAASLSRHPPPSGPAAERRKLLPAERAWRK

SEQ ID NO: 836457 - protein, 637 aa, Homo sapiens
RHSRTRARGGPRYADKMAAAAVDSAMEVVPALAEEAAPEVAGLSCLVNLPGEVLEYILCCGSLTAADIGRVSSTCRRLRELCQSSGKVWKEQFRVRWPSLMKHYSPTDYVNWLEEYKVRQKAGLEARKIVASFSKRFFSEHVPCNGFSDIENLEGPEIFFEDELVCILNMEGRKALTWKYYAKKILYYLRQQKILNNLKAFLQQPDDYESYLEGAVYIDQYCNPLSDISLKDIQAQIDSIVELVCKTLRGINSRHPSLAFKAGESSMIMEIELQSQVLDAMNYVLYDQLKFKGNRMDYYNALNLYMHQVLIRRTGIPISMSLLYLTIARQLGVPLEPVNFPSHFLLRWCQGAEGATLDIFDYIYIDAFGKGKQLTVKECEYLIGQHVTAALYGVVNVKKVLQRMVGNLLSLGKREGIDQSYQLLRDSLDLYLAMYPDQVQLLLLQARLYFHLGIWPEKVLDILQHIQTLDPGQHGAVGYLVQHTLEHIERKKEEVGVEVKLRSDEKHRDVCYSIGLIMKHKRYGYNCVIYGWDPTCMMGHEWIRNMNVHSLPHGHHQPFYNVLVEDGSCRYAAQENLEYNVEPQEISHPDVGRYFSEFTGTHYIPNAELEIRYPEDLEFVYETVQNIYSAKKENIDE

SEQ ID NO: 836458 - protein, 637 aa, Homo sapiens; identical to SEQ ID NO: 836457

SEQ ID NO: 836459 - protein, 637 aa, Homo sapiens; identical to SEQ ID NO: 836457

SEQ ID NO: 836460 - protein, 637 aa, Homo sapiens; identical to SEQ ID NO: 836457

SEQ ID NO: 836461 - protein, 537 aa, Homo sapiens
MKHYSPTDYVNWLEEYKVRQKAGLEARKIVASFSKRFFSEHVPCNGFSDIENLEGPEIFFEDELVCILNMEGRKALTWKYYAKKILYYLRQQKILNNLKAFLQQPDDYESYLEGAVYIDQYCNPLSDISLKDIQAQIDSIVELVCKTLRGINSRHPSLAFKAGESSMIMEIELQSQVLDAMNYVLYDQLKFKGNRMDYYNALNLYMHQVLIRRTGIPISMSLLYLTIARQLGVPLEPVNFPSHFLLRWCQGAEGATLDIFDYIYIDAFGKGKQLTVKECEYLIGQHVTAALYGVVNVKKVLQRMVGNLLSLGKREGIDQSYQLLRDSLDLYLAMYPDQVQLLLLQARLYFHLGIWPEKVLDILQHIQTLDPGQHGAVGYLVQHTLEHIERKKEEVGVEVKLRSDEKHRDVCYSIGLIMKHKRYGYNCVIYGWDPTCMMGHEWIRNMNVHSLPHGHHQPFYNVLVEDGSCRYAAQENLEYNVEPQEISHPDVGRYFSEFTGTHYIPNAELEIRYPEDLEFVYETVQNIYSAKKENIDE

SEQ ID NO: 836462 - protein, 468 aa, Homo sapiens
MEGRKALTWKYYAKKILYYLRQQKILNNLKAFLQQPDDYESYLEGAVYIDQYCNPLSDISLKDIQAQIDSIVELVCKTLRGINSRHPSLAFKAGESSMIMEIELQSQVLDAMNYVLYDQLKFKGNRMDYYNALNLYMHQVLIRRTGIPISMSLLYLTIARQLGVPLEPVNFPSHFLLRWCQGAEGATLDIFDYIYIDAFGKGKQLTVKECEYLIGQHVTAALYGVVNVKKVLQRMVGNLLSLGKREGIDQSYQLLRDSLDLYLAMYPDQVQLLLLQARLYFHLGIWPEKVLDILQHIQTLDPGQHGAVGYLVQHTLEHIERKKEEVGVEVKLRSDEKHRDVCYSIGLIMKHKRYGYNCVIYGWDPTCMMGHEWIRNMNVHSLPHGHHQPFYNVLVEDGSCRYAAQENLEYNVEPQEISHPDVGRYFSEFTGTHYIPNAELEIRYPEDLEFVYETVQNIYSAKKENIDE

SEQ ID NO: 836463 - protein, 198 aa, Homo sapiens
RHSRTRARGGPRYADKMAAAAVDSAMEVVPALAEEAAPEVAGLSCLVNLPGEVLEYILCCGSLTAADIGRVSSTCRRLRELCQSSGKVWKEQFRVRWPSLMKHYSPTDYVNWLEEYKVRQKAGLEARKIVASFSKRFFSEHVPCNGFSDIENLEGPEIFFEDELVCILNMEGRKALTWKYYAKSFEGKKSGFTPLVIP

SEQ ID NO: 836464 - protein, 354 aa, Homo sapiens
RHSRTRARGGPRYADKMAAAAVDSAMEVVPALAEEAAPEVAGLSCLVNLPGEVLEYILCCGSLTAADIGRVSSTCRRLRELCQSSGKVWKEQFRVRWPSLMKHYSPTDYVNWLEEYKVRQKAGLEARKIVASFSKRFFSEHVPCNGFSDIENLEGPEIFFEDELVCILNMEGRKALTWKYYAKKILYYLRQQKILNNLKAFLQQPDDYESYLEGAVYIDQYCNPLSDISLKDIQAQIDSIVELVCKTLRGINSRHPSLAFKAGESSMIMEIELQSQVLDAMNYVLYDQLKFKGNRMDYYNALNLYMHQVLIRRTGIPISMSLLYLTIARQLGVPLEPVNFPSHFLLRWCQGAEG

SEQ ID NO: 836465 - protein, 637 aa, Homo sapiens; identical to SEQ ID NO: 836457

SEQ ID NO: 836466 - protein, 644 aa, Homo sapiens
RHSRTRARGGPRYADKMAAAAVDSAMEVVPALAEEAAPEVAGLSCLVNLPGEVLEYILCCGSLTAADIGRVSSTCRRLRELCQSSGKVWKEQFRVRWPSLMKHYSPTDYVNWLEEYKVRQKAGLEARKIVASFSKRFFSEHVPCNGFSDIENLEGPEIFFEDELVCILNMEGRKALTWKYYAKKILYYLRQQKILNNLKAFLQQPDDYESYLEGAVYIDQYCNPLSDISLKDIQAQIDSIVELVCKTLRGINSRHPSLAFKAGESSMIMEIELQSQVLDAMNYVLYDQLKFKGNRMDYYNALNLYMHQVLIRRTGIPISMSLLYLTIARQLGVPLEPVNFPSHFLLRWCQGAEGATLDIFDYIYIDAFGKGKQLTVKECEYLIGQHVTAALYGVVNVKKVLQRMVGNLLSLGKREGIDQSYQLLRDSLDLYLAMYPDQVQLLLLQARLYFHLGIWPEKSFCLVLKVLDILQHIQTLDPGQHGAVGYLVQHTLEHIERKKEEVGVEVKLRSDEKHRDVCYSIGLIMKHKRYGYNCVIYGWDPTCMMGHEWIRNMNVHSLPHGHHQPFYNVLVEDGSCRYAAQENLEYNVEPQEISHPDVGRYFSEFTGTHYIPNAELEIRYPEDLEFVYETVQNIYSAKKENIDE

SEQ ID NO: 836467 - protein, 537 aa, Homo sapiens; identical to SEQ ID NO: 836461

SEQ ID NO: 836468 - protein, 223 aa, Homo sapiens
RHSRTRARGGPRYADKMAAAAVDSAMEVVPALAEEAAPEVAGLSCLVNLPGEVLEYILCCGSLTAADIGRVSSTCRRLRELCQSSGKVWKEQFRVRWPSLMKHYSPTDYVNWLEEYKVRQKAGLEARKIVASFSKRFFSEHVPCNGFSDIENLEGPEIFFEDELVCILNMEGRKALTWKYYAKKILYYLRQQKILNNLKAFLQQPDDYESYLEAAAPGKPLHQ

SEQ ID NO: 836469 - protein, 586 aa, Homo sapiens
RHSRTRARGGPRYADKMAAAAVDSAMEVVPALAEEAAPEVAGLSCLVNLPGEVLEYILCCGSLTAADIGRVSSTCRRLRELCQSSGKVWKEQFRVRWPSLMKHYSPTDYVNWLEEYKVRQKAGLEARKIVASFSKRFFSEHVPCNGFSDIENLEGPEIFFEDELVCILNMEGRKALTWKYYAKKILYYLRQQKILNNLKAFLQQPDDYESYLEGAVYIDQYCNPLSDISLKDIQAQIDSIVELVCKTLRGINSRHPSLAFKAGESSMIMEIELQSQVLDAMNYVLYDQLKFKGNRMDYYNALNLYMHQVLIRRTGIPISMSLLYLTIARQLGVPLEPVNFPSHFLLRWCQGAEGATLDIFDYIYIDAFGKGKQLTVKECEYLIGQHVTAALYGVVNVKKVLQRMVGNLLSLGKREGIDQSYQLLRDSLDLYLAMYPDQVQLLLLQARLYFHLGIWPEKVLDILQHIQTLDPGQHGAVGYLVQHTLEHIERKKEEVGVEVKLRSDEKHRDVCYSIGLIMKHKRYGYNCVIYGWDPTCMMGHEWIRNMNVHSLPHGHHQPFYNVLVEDGSCRYAAQGRLPCLSVMGMV

SEQ ID NO: 836470 - protein, 315 aa, Homo sapiens
LGAYLERHGPPEASELPEPGGALAGGPGSGGGGVVVGVAEVRNWRCCCLGSTCWCRSLVLVCVLAALCFASLALVRRYLHHLLLWVESLDSLLGVLLFVVGFIVVSFPCGWGYIVLNVAAGYLYGFVLGMGLMMVGVLIGTFIAHVVCKRLLTAWVAARIQSSEKLSAVIRVVEGGSGLKVVALARLTPIPFGLQNAVFSITDLSLPNYLMASSVGLLPTQLLNSYLGTTLRTMEDVIAEQSVSGYIVFWLQIIISIGLMFYVVHRAQVELNAAIVACEMELKSSLVKGNQPNTSGSSFYNKRTLTFSGGGINVV

SEQ ID NO: 836471 - protein, 315 aa, Homo sapiens; identical to SEQ ID NO: 836470

SEQ ID NO: 836472 - protein, 292 aa, Homo sapiens
LGAYLERHGPPEASELPEPGGALAGGPGSGGGGVVVGVAEVRNWRCCCLGSTCWCRSLVLVCVLAALCFASLALVRRYLHHLLLWVESLDSLLGVLLFVVGFIVVSFPCGWGYIVLNVAAGYLYGFVLGMGLMMVGVLIGTFIAHVVCKRLLTAWVAARIQSSEKLSAVIRVVEGGSGLKVVALARLTPIPFGLQNAVFSITDLSLPNYLMASSVGLLPTQLLNSYLGKQPKEKGESYETKYKKIRHGFTIKKCPRQMNHDQVMMRRTVMTTRYGPNVSYKTHRGTITHTGS

SEQ ID NO: 836473 - protein, 315 aa, Homo sapiens; identical to SEQ ID NO: 836470

SEQ ID NO: 836474 - protein, 175 aa, Homo sapiens
MEVPPPAPRSFLCRALCLFPRVFAAEAVTADSEVLEERQKRLPYVPEPYYPESGWDRLRELFGKDEQQRISKDLANICKTAATAGIIGWVYGGIPAFIHAKQQYIEQSQAEIYHNRFDAVQSAHRAATRGFIRYGWRWGWRTAVFVTIFNTVNTSLNVYRNKDALSHFVIAGALL

SEQ ID NO: 836475 - protein, 200 aa, Homo sapiens [sequence omitted]

SEQ ID NO: 836476 - protein, 165 aa, Homo sapiens
MGEYQLLFMLNNNTLSRARQKFIITGLMLCTVNTSLNVYRNKDALSHFVIAGAVTGSLFRINVGLRGLVAGGIIGALLGTPVGGLLMAFQKYSGETVQERKQKDRKALHELKLEEWKGRLQVTEHLPEKIESSLQEDEPENDAKKIEALLNLPRNPSVIDKQDKD

SEQ ID NO: 836477 - protein, 285 aa, Homo sapiens
MEVPPPAPRSFLCRALCLFPRVFAAEAVTADSEVLEERQKRLPYVPEPYYPESGWDRLRELFGKDEQQRISKDLANICKTAATAGIIGWVYGGIPAFIHAKQQYIEQSQAEIYHNRFDAVQSAHRAATRGFIRYGWRWGWRTAVFVTIFNTVNTSLNVYRNKDALSHFVIAGAVTGSLFRINVGLRGLVAGGIIGALLGTPVGGLLMAFQKYSGETVQERKQKDRKALHELKLEEWKGRLQVTEHLPEKIESSLQEDEPENDAKKIEALLNLPRNPSVIDKQDKD

SEQ ID NO: 836478 - protein, 285 aa, Homo sapiens; identical to SEQ ID NO: 836477

SEQ ID NO: 836479 - protein, 211 aa, Homo sapiens
MEVPPPAPRSFLCRALCLFPRVFAAEAVTADSEVLEERQKRLPYVPEPYYPESGWDRLRELFGKDEQQRISKDLANICKTAATAGIIGWVYGGIPAFIHAKQQYIEQSQAEIYHNRFDAVQSAHRAATRGFIRYGWRWGWRTAVFVTIFNTVNTSLNVYRNKDALSHFVIAGAVTGSLFRINVGLRGLVAGGIIGALLGTPVGGLLMAFQN

SEQ ID NO: 836480 - protein, 285 aa, Homo sapiens; identical to SEQ ID NO: 836477

SEQ ID NO: 836481 - protein, 128 aa, Homo sapiens
MEVPPPAPRSFLCRALCLFPRVFAAEAVTADSEVLEERQKRLPYVPEPYYPESGWDRLRELFGKDEQQRISKDLANICKTAATAGIIGWVYGGIPAFIHAKQQYIEQSQAEIYHNRFDAVLSREVFLG

SEQ ID NO: 836482 - protein, 285 aa, Homo sapiens; identical to SEQ ID NO: 836477

SEQ ID NO: 836483 - protein, 96 aa, Homo sapiens
ALEDPRGCMGTPVGGLLMAFQKYSGETVQERKQKDRKALHELKLEEWKGRLQVTEHLPEKIESSLQEDEPENDAKKIEALLNLPRNPSVIDKQDKD

SEQ ID NO: 836484 - protein, 150 aa, Homo sapiens
MEVPPPAPRSFLCRALCLFPRVFAAEAVTADSEVLEERQKRLPYVPEPYYPESGWDRLRELFGKDEQQRISKDLANICKTAATAGIIGWVYGGIPAFIHAKQQYIEQSQAEIYHNRFDAVQSAHRAATRGFIRYGWRWGWRTAVFVTIFK

SEQ ID NO: 836485 - protein, 590 aa, Homo sapiens
SQNKQVRITFGFSCKNSNQFGIMMYHNNRLIKSFEKVGCQVKPTRGEGVGVIGVIECNFLKPAYNKQDFEYTKEYRLTINALAQKLNAYWKEKTSQDNFETSTVARPIPKVPDQTWVQCDECLKWRKLPGKIDPSMLPARWFCYYNSHPKYRRCSVPEEQELTDEDLCLSKAKKQEQTVEEKKKMPMENENHQVFSNPPKILTVQEMAGLNNKTIGYEGIHSPSVLPSGGEESRSPSLQLKPLDSSVLQFSSKYKWILGEEPVEKRRRLQNEMTTPSLDYSMPAPYRRVEAPVAYPEGENSHDKSSSERSTPPYLFPEYPEASKNTGQNREVSILYPGAKDQRQGSLLPEELEDQMPRLVAEESNRGSTTINKEEVNKGPFVAVVGVAKGVRDSGAPIQLIPFNREELAERRKAVESWNPVPYSVASAAIPAAAIGEKARGYEESEGHNTPKLKNQRELEELKRTTEKLERVLAERNLFQQKVEELEQERNHWQSEFKKVQHELVIYSTQEAEGLYWSKKHMGYRQAEFQILKAELERTKEEKQELKEKLKETETHLEMLQKAQGFGKAYAATYPRQLSPYFCPPSLGAS

SEQ ID NO: 836486 - protein, 582 aa, Homo sapiens
SQNKQVRITFGFSCKNSNQFGIMMYHNNRLIKSFEKVGCQVKPTRGEGVGVIGVIECNFLKPAYNKQDFEYTKEYRLTINALAQKLNAYWKEKTSQDNFETSTVARPIPKVPDQTWVQCDECLKWRKLPGKIDPSMLPARWFCYYNSHPKYRRCSVPEEQELTDEDLCLSKAKKQEQTVEEKKKMPMENENHQVFSNPPKILTVQEMAGLNNKTIGYEGIHSPSVLPSGGEESRSPSLQLKPLDSSVLQFSSKYKWILGEEPVEKRRRLQNEMTTPSLDYSMPAPYRRVEAPVAYPEGENSHDKSSSERSTPPYLFPEYPEASKNTGQNREVSILYPGAKDQRQGSLLPEELEDQMPRLVAEESNRGSTTINKEEVNKGPFVAVVGVAKGVRDSGAPIQLIPFNREELAERRKAVESWNPVPYSVASAAIPAAAIGEKARGYEESEGHNTPKLKNQRELEELKRTTEKLERVLAERNLFQQKVEELEQERNHWQSEFKKVQHELVIYSTQEAEGLYWSKKHMGYRQAEFQILKAELERTKEEKQELKEKLKETETHLEMLQKAQVSYRTPEGDDLERLITRV

SEQ ID NO: 836487 - protein, 627 aa, Homo sapiens
SQNKQVRITFGFSCKNSNQFGIMMYHNNRLIKSFEKVGCQVKPTRGEGVGVIGVIECNFLKPAYNKQDFEYTKEYRLTINALAQKLNAYWKEKTSQDNFETSTVARPIPKVPDQTWVQCDECLKWRKLPGKIDPSMLPARWFCYYNSHPKYRRCSVPEEQELTDEDLCLSKAKKQEQTVEEKKKMPMENENHQVFSNPPKILTVQEMAGLNNKTIGYEGIHSPSVLPSGGEESRSPSLQLKPLDSSVLQFSSKYKWILGEEPVEKRRRLQNEMTTPSLDYSMPAPYRRVEAPVAYPEGENSHDKSSSERSTPPYLFPEYPEASKNTGQNREVSILYPGAKDQRQGSLLPEELEDQMPRLVAEESNRGSTTINKEEVNKGPFVAVVGVAKGVRDSGAPIQLIPFNREELAERRKAVESWNPVPYSVASAAIPAAAIGEKARGYEESEGHNTPKLKNQRELEELKRTTEKLERVLAERNLFQQKVEELEQERNHWQSEFKKVQHELVIYSTQEAEGLYWSKKHMGYRQAEFQILKAELERTKEEKQELKEKLKETETHLEMLQKAQVSYRTPEGDDLERALAKLTRLRIHVSYLLTSVLPHLELREIGYDSEQVDGILYTVLEANHILD

SEQ ID NO: 836488 - protein, 590 aa, Homo sapiens; identical to SEQ ID NO: 836485

SEQ ID NO: 836489 - protein, 411 aa, Homo sapiens
MSKRPSYAPPPTPAPATQMPSTPGFVGYNPYSHLAYNNYRLGGNPGTNSRVTASSGITIPKPPKPPDKPLMPYMRYSRKVWDQVKASNPDLKLWEIGKIIGGMWRDLTDEEKQEYLNEYEAEKIEYNESMKAYHNSPAYLAYINAKSRAEAALEEESRQRQSRMEKGEPYMSIQPAEDPDDYDDGFSMKHTATARFQRNHRLISEILSESVVPDVRSVVTTARMQVLKRQVQSLMVHQRKLEAELLQIEERHQEKKRKFLESTDSFNNELKRLCGLKVEVDMEKIAAEIAQAEEQARKRQEEREKEAAEQAERSQSSIVPEEEQAANKGEEKKDDENIPMETEETHLEETTESQQNGEEGTSTPEDKESGQEGVDSMAEEGTSDSNTGSESNSATVEEPPTDPIPEDEKKE

SEQ ID NO: 836490 - protein, 411 aa, Homo sapiens; identical to SEQ ID NO: 836489

SEQ ID NO: 836491 - protein, 411 aa, Homo sapiens; identical to SEQ ID NO: 836489

SEQ ID NO: 836492 - protein, 411 aa, Homo sapiens; identical to SEQ ID NO: 836489

SEQ ID NO: 836493 - protein, 272 aa, Homo sapiens
MSKRPSYAPPPTPAPATQMPSTPGFVGYNPYSHLAYNNYRLGGNPGTNSRVTASSGITIPKPPKPPDKPLMPYMRYSRKVWDQVKASNPDLKLWEIGKIIGGMWRDLTDEEKQEYLNEYEAEKIEYNESMKAYHNSPAYLAYINAKSRAEAALEEESRQRQSRMEKGEPYMSIQPAEDPDDYDDGFSMKHTATARFQRNHRLISEILSESVVPDVRSVVTTARMQVLKRQVQSLMVHQRKLEAELLQIEERHQEKKRKFLESTDSFNNELKR

SEQ ID NO: 836494 - protein, 349 aa, Homo sapiens
MSKRPSYAPPPTPAPATQMPSTPGFVGYNPYSHLAYNNYRLGGNPGTNSRVTASSGITIPKPPKPPDKPLMPYMRYSRKVWDQVKASNPDLKLWEIGKIIGGMWRDLTDEEKQEYLNEYEAEKIEYNESMKAYHNSPAYLAYINAKSRAEAALEEESRQRQSRMEKGEPYMSIQPAEDPDDYDDGFSMKHTATARFQRNHRLISEILSESVVPDVRSVVTTARMQVLKRQVQSLMVHQRKLEAELLQIEERHQEKKRKFLESTDSFNNELKRLCGLKVEVDMEKIAAEIAQAEEQARKRQEEREKEAAEQAERSQSSIVPEEEQAANKGEEKKDDENIPMETEETQPLA

SEQ ID NO: 836495 - protein, 351 aa, Homo sapiens
MSKRPSYAPPPTPAPATQMPSTPGFVGYNPYSHLAYNNYRLGGNPGTNSRVTASSGITIPKPPKPPDKPLMPYMRYSRKVWDQVKASNPDLKLWEIGKIIGGMWRDLTDEEKQEYLNEYEAEKIEYNESMKAYHNSPAYLAYINAKSRAEAALEEESRQRQSRMEKGEPYMSIQPAEDPDDYDDGFSMKHTATARFQRNHRLISEILSESVVPDVRSVVTTARMQVLKRQVQSLMVHQRKLEAELLQIEERHQEKKRKFLESTDSFNNELKRLCGLKVEVDMEKIAAEIAQAEEQARKRQEEREKEAAEQAERSQSSIVPEEEQAVRGCFTSNGRVHNDLETDGDTTLARR

SEQ ID NO: 836496 - protein, 303 aa, Homo sapiens
MSKRPSYAPPPTPAPATQMPSTPGFVGYNPYSHLAYNNYRLGGNPGTNSRVTASSGITIPKPPKPPDKPLMPYMRYSRKVWDQVKASNPDLKLWEIGKIIGGMWRDLTDEEKQEYLNEYEAEKIEYNESMKAYHNSPAYLAYINAKSRAEAALEEESRQRQSRMEKGEPYMSIQPAEDPDDYDDGFSMKHTATARFQRNHRLISEILSESVVPDVRSVVTTARMQVLKRQVQSLMVHQRKLEAELLQIEERHQEKKRKFLESTDSFNNELKRLCGLKVEVDMEKISARLFCIYVSQDAGDNEY

SEQ ID NO: 836497 - protein, 404 aa, Homo sapiens
SCFCLICFHQQMPSTPGFVGYNPYSHLAYNNYRLGGNPGTNSRVTASSGITIPKPPKPPDKPLMPYMRYSRKVWDQVKASNPDLKLWEIGKIIGGMWRDLTDEEKQEYLNEYEAEKIEYNESMKAYHNSPAYLAYINAKSRAEAALEEESRQRQSRMEKGEPYMSIQPAEDPDDYDDGFSMKHTATARFQRNHRLISEILSESVVPDVRSVVTTARMQVLKRQVQSLMVHQRKLEAELLQIEERHQEKKRKFLESTDSFNNELKRLCGLKVEVDMEKIAAEIAQAEEQARKRQEEREKEAAEQAERSQSSIVPEEEQAANKGEEKKDDENIPMETEETHLEETTESQQNGEEGTSTPEDKESGQEGVDSMAEEGTSDSNTGSESNSATVEEPPTDPIPEDEKKE

SEQ ID NO: 836498 - protein, 202 aa, Homo sapiens
TDEDAFRRVNPFEIFLEDEMGGGRDSEEMEIDGDPFSAIGFSMNGYPDEDAVFADSFNNELKRLCGLKVEVDMEKIAAEIAQAEEQARKRQEEREKEAAEQAERSQSSIVPEEEQAANKGEEKKDDENIPMETEETHLEETTESQQNGEEGTSTPEDKESGQEGVDSMAEEGTSDSNTGSESNSATVEEPPTDPIPEDEKKE

SEQ ID NO: 836499 - protein, 411 aa, Homo sapiens; identical to SEQ ID NO: 836489

SEQ ID NO: 836500 - protein, 411 aa, Homo sapiens; identical to SEQ ID NO: 836489

SEQ ID NO: 836501 - protein, 411 aa, Homo sapiens; identical to SEQ ID NO: 836489

SEQ ID NO: 836502 - protein, 411 aa, Homo sapiens; identical to SEQ ID NO: 836489

SEQ ID NO: 836503 - protein, 363 aa, Homo sapiens
MSKRPSYAPPPTPAPATQMPSTPGFVGYNPYSHLAYNNYRLGGNPGTNSRVTASSGITIPKPPKPPDKPLMPYMRYSRKVWDQVKASNPDLKLWEIGKIIGGMWRDLTDEEKQEYLNEYEAEKIEYNESMKAYHNSPAYLAYINAKSRAEAALEEESRQRQSRMEKGEPYMSIQPAEDPDDYDDGFSMKHTATARFQRNHRLISEILSESVVPDVRSVVTTARMQVLKRQVQSLMVHQRKLEAELLQIEERHQEKKRKFLESTDSFNNELKRLCGLKVEVDMEKIAAEIAQAEEQARKRQEEREKEAAEQAERSQSSIVPEEEQAANKGEEKKDDENIPMETEKNCQLCPRKTLTSRYTDFPD

SEQ ID NO: 836504 - protein, 435 aa, Homo sapiens
PTGAYEVNGGTERGTNETENLICQNVKRPSYAPPPTPAPATQMPSTPGFVGYNPYSHLAYNNYRLGGNPGTNSRVTASSGITIPKPPKPPDKPLMPYMRYSRKVWDQVKASNPDLKLWEIGKIIGGMWRDLTDEEKQEYLNEYEAEKIEYNESMKAYHNSPAYLAYINAKSRAEAALEEESRQRQSRMEKGEPYMSIQPAEDPDDYDDGFSMKHTATARFQRNHRLISEILSESVVPDVRSVVTTARMQVLKRQVQSLMVHQRKLEAELLQIEERHQEKKRKFLESTDSFNNELKRLCGLKVEVDMEKIAAEIAQAEEQARKRQEEREKEAAEQAERSQSSIVPEEEQAANKGEEKKDDENIPMETEETHLEETTESQQNGEEGTSTPEDKESGQEGVDSMAEEGTSDSNTGSESNSATVEEPPTDPIPEDEKKE

SEQ ID NO: 836505 - protein, 188 aa, Homo sapiens
MQVLKRQVQSLMVHQRKLEAELLQIEERHQEKKRKFLESTDSFNNELKRLCGLKVEVDMEKIAAEIAQAEEQARKRQEEREKEAAEQAERSQSSIVPEEEQAANKGEEKKDDENIPMETEETHLEETTESQQNGEEGTSTPEDKESGQEGVDSMAEEGTSDSNTGSESNSATVEEPPTDPIPEDEKKE

SEQ ID NO: 836506 - protein, 181 aa, Homo sapiens
QQNGEEGTSTPEDKESGQEGVDSMAEEGTSDSNTGSESNSATVEEPPTDPIPEDEAAEIAQAEEQARKRQEEREKEAAEQAERSQSSIVPEEEQAANKGEEKKDDENIPMETEETHLEETTESQQNGEEGTSTPEDKESGQEGVDSMAEEGTSDSNTGSESNSATVEEPPTDPIPEDEKKE

SEQ ID NO: 836507 - protein, 212 aa, Homo sapiens
MSKRPSYAPPPTPAPATQMPSTPGFVGYNPYSHLAYNNYRLGGNPGTNSRVTASSGITIPKPPKPPDKPLMPYMRYSRKVWDQVKASNPDLKLWEIGKIIGGMWRDLTDEEKQEYLNEYEAEKIEYNESMKAYHNSPAYLAYINAKSRAEAALEEESRQRQSRMEKGEPYMSIQPAEDPDDKRKKVGFCLCFLCELRYEKSLKYKFLFLILN

SEQ ID NO: 836508 - protein, 1086 aa, Homo sapiens
MATVGEWSCVRCTFLNPAGQRQCSICEAPRHKPDLNHILRLSVEEQKWPCARCTFRNFLGKEACEVCGFTPEPAPGAAFLPVLNGVLPKPPAILGEPKGSCQEEAGPVRTAGLVATEPARGQCEDKDEEEKEEQEEEEGAAEPRGGWACPRCTLHNTPVASSCSVCGGPRRLSLPRIPPEALVVPEVVAPAGFHVVPAAPPPGLPGEGAEANPPATSQGPAAEPEPPRVPPFSPFSSTLQNNPVPRSRREVPPQLQPPVPEAAQPSPSAGCRGAPQGSGWAGASRLAELLSGKRLSVLEEEATEGGTSRVEAGSSTSGSDIIDLAGDTVRYTPASPSSPDFTTWSCAKCTLRNPTVAPRCSACGCSKLHGFQEHGEPPTHCPDCGADKPSPCGRSCGRVSSAQKAARVLPERPGQWACPACTLLNALRAKHCAACHTPQLLVAQRRGAAPLRRRESMHVEQRRQTDEGEAKALWENIVAFCRENNVSFVDDSFPPGPESVGFPAGDSVQQRVRQWLRPQEINCSVFRDHRATWSVFHTLRPSDILQGLLGNCWFLSALAVLAERPDLVERVMVTRSLCAEGAYQVRLCKDGTWTTVLVDDMLPCDEAGCLLFSQAQRKQLWVALIEKALAKLHGSYFALQAGRAIEGLATLTGAPCESLALQLSSTNPREEPVDTDLIWAKMLSSKEAGFLMGASCGGGNMKVDDSAYESLGLRPRHAYSILDVRDVQGTRLLRLRNPWGRFSWNGSWSDEWPHWPGHLRGELMPHGSSEGVFWMEYGDFVRYFDSVDICKVHSDWQEARVQGCFPSSASAPVGVTALTVLERASLEFALFQEGSRRSDAVDSHLLDLCILVFRATFGSGGHLSLGRLLAHSKRAVKKFVSCDVMLEPGEYAVVCCAFNHWGPPLPGTPAPQASSPSAGVPRASPEPPGHVLAVYSSRLVMVEPVEAQPTTLADAIILLTESRGERHEGREGMTCYYLTHGWAGLIVVVENRHPKAYLHVQCDCTDSFNVVSTRGSLRTQDSVPPLHRQVLVILSQLEGNAGFSITHRLAHRKAAQAFLSDWTASKGTHSPPLTPEVAGLHGPRPL

SEQ ID NO: 836509 - protein, 1210 aa, Homo sapiens
QRRVRPGRAVAAGPGPGATLRRQRKAGAGRGQGPGPEPGRGAPRLRSGRPSGQRGRRREGPRRSPEAEVVDRPAGASGPGGRGRAARAARTRRRRRAVEAAAQTRHREGLGACCSFSHTHSPGSMATVGEWSCVRCTFLNPAGQRQCSICEAPRHKPDLNHILRLSVEEQKWPCARCTFRNFLGKEACEVCGFTPEPAPGAAFLPVLNGVLPKPPAILGEPKGSCQEEAGPVRTAGLVATEPARGQCEDKDEEEKEEQEEEEGAAEPRGGWACPRCTLHNTPVASSCSVCGGPRRLSLPRIPPEALVVPEVVAPAGFHVVPAAPPPGLPGEGAEANPPATSQGPAAEPEPPRVPPFSPFSSTLQNNPVPRSRREVPPQLQPPVPEAAQPSPSAGCRGAPQGSGWAGASRLAELLSGKRLSVLEEEATEGGTSRVEAGSSTSGSDIIDLAGDTVRYTPASPSSPDFTTWSCAKCTLRNPTVAPRCSACGCSKLHGFQEHGEPPTHCPDCGADKPSPCGRSCGRVSSAQKAARVLPERPGQWACPACTLLNALRAKHCAACHTPQLLVAQRRGAAPLRRRESMHVEQRRQTDEGEAKALWENIVAFCRENNVSFVDDSFPPGPESVGFPAGDSVQQRVRQWLRPQEINCSVFRDHRATWSVFHTLRPSDILQGLLGNCWFLSALAVLAERPDLVERVMVTRSLCAEGAYQVRLCKDGTWTTVLVDDMLPCDEAGCLLFSQAQRKQLWVALIEKALAKLHGSYFALQAGRAIEGLATLTGAPCESLALQLSSTNPREEPVDTDLIWAKMLSSKEAGFLMGASCGGGNMKVDDSAYESLGLRPRHAYSILDVRDVQGTRLLRLRNPWGRFSWNGSWSDEWPHWPGHLRGELMPHGSSEGVFWMEYGDFVRYFDSVDICKVHSDWQEARVQGCFPSSASAPVGVTALTVLERASLEFALFQEGSRRSDAVDSHLLDLCILVFRATFGSGGHLSLGRLLAHSKRAVKKFVSCDVMLEPGEYAVVCCAFNHWGPPLPGTPAPQASSPSAGVPRASPEPPGHVLAVYSSRLVMVEPVEAQPTTLADAIILLTESRGERHEGREGMTCYYLTHGWAGLIVVVENRHPKAYLHVQCDCTDSFNVVSTRGSLRTQDSVPPLHRQVLVILSQLEGNAGFSITHRLAHRKAAQAFLSDWTASKGTHSPPLTPEVAGLHGPRPL

SEQ ID NO: 836510 - protein, 1157 aa, Homo sapiens
QRRVRPGRAVAAGPGPGATLRRQRKAGAGRGQGPGPEPGRGAPRLRSGRPSGQRGRRREGPRRSPEAEVVDRPAGASGPGGRGRAARAARTRRRRRAVEAAAQTRHREGLGACCSFSHTHSPGSMATVGEWSCVRCTFLNPAGQRQCSICEAPRHKPDLNHILRLSVEEQKWPCARCTFRNFLGKEACEVCGFTPEPAPGAAFLPVLNGVLPKPPAILGEPKGSCQEEAGPVRTAGLVATEPARGQCEDKDEEEKEEQEEEEGAAEPRGGWACPRCTLHNTPVASSCSVCGGPRRLSLPRIPPEALVVPEVVAPAGFHVVPAAPPPGLPGEGAEANPPATSQGPAAEPEPPRVPPFSPFSSTLQNNPVPRSRREVPPQLQPPVPEAAQPSPSAGCRGAPQGSGWAGASRLAELLSGKRLSVLEEEATEGGTSRVEAGSSTSGSDIIDLAGDTVRYTPASPSSPDFTTWSCAKCTLRNPTVAPRCSACGCSKLHGFQEHGEPPTHCPDCGADKPSPCGRSCGRVSSAQKAARVLPERPGQWACPACTLLNALRAKHCAACHTPQLLVAQRRGAAPLRRRESMHVEQRRQTDEGEAKALWENIVAFCRENNVSFVDDSFPPGPESVGFPAGDSVQQRVRQWLRPQEINCSVFRDHRATWSVFHTLRPSDILQGLLGNCWFLSALAVLAERPDLVERVMVTRSLCAEGAYQVRLCKDGTWTTVLVDDMLPCDEAGCLLFSQAQRKQLWVALIEKALAKLHGSYFALQAGRAIEGLATLTGAPCESLALQLSSTNPREEPVDTDLIWAKMLSSKEAGFLMGASCGGGNMKVDDSAYESLGLRPRHAYSILDVRDVQGTRLLRLRNPWGRFSWNGSWSDEWPHWPGHLRGELMPHGSSEGVFWMEYGDFVRYFDSVDICKVHSDWQEARVQGCFPSSASAPVGVTALTVLERASLEFALFQEGSRRSDAVDSHLLDLCILVFRATFGSGGHLSLGRLLAHSKRAVKKFVSCDVMLEPGEYAVVCCAFNHWGPPLPGTPAPQASSPSAGVPRASPEPPGHVLAVYSSRLVMVEPVEAQPTTLADAIILLTESRGERHEGREGMTCYYLTHGWAGLIVVVENRHPKAYLHVQCDCTDSFNVVSTRGSLRTQDSVPPLHSPVPLP

SEQ ID NO: 836511 - protein, 1097 aa, Homo sapiens
QRRVRPGRAVAAGPGPGATLRRQRKAGAGRGQGPGPEPGRGAPRLRSGRPSGQRGRRREGPRRSPEAEVVDRPAGASGPGGRGRAARAARTRRRRRAVEAAAQTRHREGLGACCSFSHTHSPGSMATVGEWSCVRCTFLNPAGQRQCSICEAPRHKPDLNHILRLSVEEQKWPCARCTFRNFLGKEACEVCGFTPEPAPGAAFLPVLNGVLPKPPAILGEPKGSCQEEAGPVRTAGLVATEPARGQCEDKDEEEKEEQEEEEGAAEPRGGWACPRCTLHNTPVASSCSVCGGPRRLSLPRIPPEALVVPEVVAPAGFHVVPAAPPPGLPGEGAEANPPATSQGPAAEPEPPRVPPFSPFSSTLQNNPVPRSRREVPPQLQPPVPEAAQPSPSAGCRGAPQGSGWAGASRLAELLSGKRLSVLEEEATEGGTSRVEAGSSTSGSDIIDLAGDTVRYTPASPSSPDFTTWSCAKCTLRNPTVAPRCSACGCSKLHGFQEHGEPPTHCPDCGADKPSPCGRSCGRVSSAQKAARVLPERPGQWACPACTLLNALRAKHCAACHTPQLLVAQRRGAAPLRRRESMHVEQRRQTDEGEAKALWENIVAFCRENNVSFVDDSFPPGPESVGFPAGDSVQQRVRQWLRPQEINCSVFRDHRATWSVFHTLRPSDILQGLLGNCWFLSALAVLAERPDLVERVMVTRSLCAEGAYQVRLCKDGTWTTVLVDDMLPCDEAGCLLFSQAQRKQLWVALIEKALAKLHGSYFALQAGRAIEGLATLTGAPCESLALQLSSTNPREEPVDTDLIWAKMLSSKEAGFLMGASCGGGNMKVDDSAYESLGLRPRHAYSILDVRDVQGTRLLRLRNPWGRFSWNGSWSDEWPHWPGHLRGELMPHGSSEGVFWMEYGDFVRYFDSVDICKVHSDWQEARVQGCFPSSASAPVGVTALTVLERASLEFALFQEGSRRSDAVDSHLLDLCILVFRATFGSGGHLSLGRLLAHSKRAVKKFVSCDVMLEPGEYAVVCCAFNHWGPPLPGTPAPQASSPSAGVPRASPEPPGHVLAVYSSRLVMVEPVEAQPTTLADAIILLTPLWPPCTLSCEYF

SEQ ID NO: 836512 - protein, 1086 aa, Homo sapiens; identical to SEQ ID NO: 836508

SEQ ID NO: 836513 - protein, 429 aa, Homo sapiens
QRRVRPGRAVAAGPGPGATLRRQRKAGAGRGQGPGPEPGRGAPRLRSGRPSGQRGRRREGPRRSPEAEVVDRPAGASGPGGRGRAARAARTRRRRRAVEAAAQTRHREGLGACCSFSHTHSPGSMATVGEWSCVRCTFLNPAGQRQCSICEAPRHKPDLNHILRLSVEEQKWPCARCTFRNFLGKEACEVCGFTPEPAPGAAFLPVLNGVLPKPPAILGEPKGSCQEEAGPVRTAGLVATEPARGQCEDKDEEEKEEQEEEEGAAEPRGGWACPRCTLHNTPVASSCSVCGGPRRLSLPRIPPPHALYEGDPDRGRLSQNLRTPPRELPAQGSASHGPPAPLLPLPEPHSPPGQASWPPRRIPRTRRAVNQPRSPASPNTRRGPRPGCPSLWAQGLLRARQPGALSAKPNLGVRGQDPGVGSGTTPHGA

SEQ ID NO: 836514 - protein, 234 aa, Homo sapiens
  misc_feature (2)..(2): Xaa can be any naturally occurring amino acid
IXRAAGIRHEKNNATVHEQVGGPSLTSDLQAQSKGNPEQTPVLKPEEEAPAPEVGASKPEGIDSRPETLHPGRPQPPAEEELCSGKPFDAFTDLKNGSLFAFRGQYCYELDEGPIDAAFTRINCQGKTYLFKGSQYWRFEDGVLDPDYPRNISDGFDGIPDNVDAALALPAHSYSGRERVYFFKGNSTGVPVSTAQSESVKQLLLLVDTLHEQRTVGGISAFLETLLTDSSIAA

SEQ ID NO: 836515 - protein, 503 aa, Homo sapiens
MAPLRPLLILALLAWVALADQESCKGRCTEGFNVDKKCQCDELCSYYQSCCTDYTAECKPQGVFRAQVGGLGCPLLLETHYHPLSAVTRGDVFTMPEDEYTVYDDGEEKNNATVHEQVGGPSLTSDLQAQSKGNPEQTPVLKPEEEAPAPEVGASKPEGIDSRPETLHPGRPQPPAEEELCSGKPFDAFTDLKNGSLFAFRGQYCYELDEKAVRPGYPKLIRDVWGIEGPIDAAFTRINCQGKTYLFKGSQYWRFEDGVLDPDYPRNISDGFDGIPDNVDAALALPAHSYSGRERVYFFKGKQYWEYQFQHQPSQEECEGSSLSAVFEHFAMMQRDSWEDIFELLFWGRTSAGTRQPQFISRDWHGVPGQVDAAMAGRIYISGMAPRPSLAKKQRFRHRNRKGYRSQRGHSRGRNQNSRRPSRAMWLSLFSSEESNLGANNYDDYRMDWLVPATCEPIQSVFFFSGDKYYRVNLRTRRVDTVDPPYPRSIAQYWLGCPAPGHL

SEQ ID NO: 836516 - protein, 544 aa, Homo sapiens
MAPLRPLLILALLAWVALADQESCKGRCTEGFNVDKKCQCDELCSYYQSCCTDYTAECKPQVTRGDVFTMPEDEYTVYDDGEEKNNATVHEQVGGPSLTSDLQAQSKGNPEQTPVLKPEEEAPAPEVGASKPEGIDSRPETLHPGRPQPPAEEELCSGKPFDAFTDLKNGSLFAFRGQYCYELDEKAVRPGYPKLIRDVWGIEGPIDAAFTRINCQGKTYLFKGSQYWRFEDGVLDPDYPRNISDGFDGIPDNVDAALALPAHSYSGRERVYFFKGYSGGGGRLSRQWSSLGFLSHFTGDRPQHVPTPDPHLMLGDPNFNSLWDLQSCPGPALLMPTTRSSGKQYWEYQFQHQPSQEECEGSSLSAVFEHFAMMQRDSWEDIFELLFWGRTSAGTRQPQFISRDWHGVPGQVDAAMAGRIYISGMAPRPSLAKKQRFRHRNRKGYRSQRGHSRGRNQNSRRPSRAMWLSLFSSEESNLGANNYDDYRMDWLVPATCEPIQSVFFFSGDKYYRVNLRTRRVDTVDPPYPRSIAQYWLGCPAPGHL

SEQ ID NO: 836517 - protein, 478 aa, Homo sapiens
MAPLRPLLILALLAWVALADQESCKGRCTEGFNVDKKCQCDELCSYYQSCCTDYTAECKPQVTRGDVFTMPEDEYTVYDDGEEKNNATVHEQVGGPSLTSDLQAQSKGNPEQTPVLKPEEEAPAPEVGASKPEGIDSRPETLHPGRPQPPAEEELCSGKPFDAFTDLKNGSLFAFRGQYCYELDEKAVRPGYPKLIRDVWGIEGPIDAAFTRINCQGKTYLFKGSQYWRFEDGVLDPDYPRNISDGFDGIPDNVDAALALPAHSYSGRERVYFFKGKQYWEYQFQHQPSQEECEGSSLSAVFEHFAMMQRDSWEDIFELLFWGRTSAGTRQPQFISRDWHGVPGQVDAAMAGRIYISGMAPRPSLAKKQRFRHRNRKGYRSQRGHSRGRNQNSRRPSRAMWLSLFSSEESNLGANNYDDYRMDWLVPATCEPIQSVFFFSGDKYYRVNLRTRRVDTVDPPYPRSIAQYWLGCPAPGHL

SEQ ID NO: 836518 - protein, 478 aa, Homo sapiens; identical to SEQ ID NO: 836517

SEQ ID NO: 836519 - protein, 460 aa, Homo sapiens
MAPLRPLLILALLAWVALADQESCKGRCTEGFNVDKKCQCDELCSYYQSCCTDYTAECKPQVTRGDVFTMPEDEYTVYDDGEEKNNATVHEQVGGPSLTSDLQAQSKGNPEQTPVLKPEEEAPAPEVGASKPEGIDSRPETLHPGRPQPPAEEELCSGKPFDAFTDLKNGSLFAFRGQYCYELDEGPIDAAFTRINCQGKTYLFKGSQYWRFEDGVLDPDYPRNISDGFDGIPDNVDAALALPAHSYSGRERVYFFKGKQYWEYQFQHQPSQEECEGSSLSAVFEHFAMMQRDSWEDIFELLFWGRTSAGTRQPQFISRDWHGVPGQVDAAMAGRIYISGMAPRPSLAKKQRFRHRNRKGYRSQRGHSRGRNQNSRRPSRAMWLSLFSSEESNLGANNYDDYRMDWLVPATCEPIQSVFFFSGDKYYRVNLRTRRVDTVDPPYPRSIAQYWLGCPAPGHL

SEQ ID NO: 836520 - protein, 478 aa, Homo sapiens; identical to SEQ ID NO: 836517

SEQ ID NO: 836521 - protein, 552 aa, Homo sapiens
MAPLRPLLILALLAWVALADQESCKGRCTEGFNVDKKCQCDELCSYYQSCCTDYTAECKPQVTRGDVFTMPEDEYTVYDDGEEKNNATVHEQVGGPSLTSDLQAQSKGNPEQTPVLKPEEEAPAPEVGASKPEGIDSRPETLHPGRPQPPAEEELCSGKPFDAFTDLKNGSLFAFRGESRAGTGDAGLPQERPCSHTISSTLGQYCYELDEGPIDAAFTRINCQGKTYLFKGSQYWRFEDGVLDPDYPRNISDGFDGIPDNVDAALALPAHSYSGRERVYFFKGTQGVVGDWAGSGAVLDSFHISLGTGLSMCPPLTPTSCWEILTSTASGISSLALAQPSYCPPPRSSGKQYWEYQFQHQPSQEECEGSSLSAVFEHFAMMQRDSWEDIFELLFWGRTSAGTRQPQFISRDWHGVPGQVDAAMAGRIYISGMAPRPSLAKKQRFRHRNRKGYRSQRGHSRGRNQNSRRPSRAMWLSLFSSEESNLGANNYDDYRMDWLVPATCEPIQSVFFFSGDKYYRVNLRTRRVDTVDPPYPRSIAQYWLGCPAPGHL

SEQ ID NO: 836522 - protein, 449 aa, Homo sapiens
MAPLRPLLILALLAWVALADQESCKGRCTEGFNVDKKCQCDELCSYYQSCCTDYTAECKPQVTRGDVFTMPEDEYTVYDDGEEKNNATVHEQVGGPSLTSDLQAQSKGNPEQTPVLKPEEEAPAPEVGASKPEGIDSRPETLHPGRPQPPAEEELCSGKPFDAFTDLKNGSLFAFRGQYCYELDEKAVRPGYPKLIRDVWGIEGPIDAAFTRINCQGKTYLFKGSQYWRFEDGVLDPDYPRNISDGFDGIPDNVDAALALPAHSYSGRERVYFFKGKQYWEYQFQHQPSQEECEGSSLSAVFEHFAMMQRDSWEDIFELLFWGRTSAGTRQPQFISRDWHGVPGQVDAAMAGRIYISGMAPRPSLAKKQRFRLSLFSSEESNLGANNYDDYRMDWLVPATCEPIQSVFFFSGDKYYRVNLRTRRVDTVDPPYPRSIAQYWLGCPAPGHL

SEQ ID NO: 836523 - protein, 109 aa, Homo sapiens
MSGASRAPSMPPSPASTVRGRPTSSRVVSTGALRMVSWTLITPEISLTASMASRTTWMQPWPSLPIATVAGSGSTSSRGNSTGSTSSSTSPVRRSVKAAPCRLCLNTLP

SEQ ID NO: 836524 - protein, 283 aa, Homo sapiens [sequence omitted]

SEQ ID NO: 836525 - protein, 69 aa, Homo sapiens
LLKEILSYDDYRMDWLVPATCEPIQSVFFFSGDKYYRVNLRTRRVDTVDPPYPRSIAQYWLGCPAPGHL

SEQ ID NO: 836526 - protein, 478 aa, Homo sapiens; identical to SEQ ID NO: 836517

SEQ ID NO: 836527 - protein, 332 aa, Homo sapiens
  misc_feature (16)..(16): Xaa can be any naturally occurring amino acid
  misc_feature (23)..(23): Xaa can be any naturally occurring amino acid
  misc_feature (28)..(28): Xaa can be any naturally occurring amino acid
TFIQKLTPTKRNFNGXPRPFTTXERSFXLPRQYCYELDEKAVRPGYPKLIRDVWGIEGPIDAAFTRINCQGKTYLFKGSQYWRFEDGVLDPDYPRNISDGFDGIPDNVDAALALPAHSYSGRERVYFFKGKQYWEYQFQHQPSQEECEGSSLSAVFEHFAMMQRDSWEDIFELLFWGRTSAGTRQPQFISRDWHGVPGQVDAAMAGRIYISGMAPRPSLAKKQRFRHRNRKGYRSQRGHSRGRNQNSRRPSRAMWLSLFSSEESNLGANNYDDYRMDWLVPATCEPIQSVFFFSGDKYYRVNLRTRRVDTVDPPYPRSIAQYWLGCPAPGHL

SEQ ID NO: 836528 - protein, 486 aa, Homo sapiens
MAPLRPLLILALLAWVALADQESCKGRCTEGFNVDKKCQCDELCSYYQSCCTDYTAECKPQVTRGDVFTMPEDEYTVYDDGEEKNNATVHEQVGGPSLTSDLQAQSKGNPEQTPVLKPEEEAPAPEVGASKPEGIDSRPETLHPGRPQPPAEEELCSGKPFDAFTDLKNGSLFAFRGESRAGTGDAGLPQERPCSHTISSTLGQYCYELDEGPIDAAFTRINCQGKTYLFKGSQYWRFEDGVLDPDYPRNISDGFDGIPDNVDAALALPAHSYSGRERVYFFKGKQYWEYQFQHQPSQEECEGSSLSAVFEHFAMMQRDSWEDIFELLFWGRTSAGTRQPQFISRDWHGVPGQVDAAMAGRIYISGMAPRPSLAKKQRFRHRNRKGYRSQRGHSRGRNQNSRRPSRAMWLSLFSSEESNLGANNYDDYRMDWLVPATCEPIQSVFFFSGDKYYRVNLRTRRVDTVDPPYPRSIAQYWLGCPAPGHL

SEQ ID NO: 836529 - protein, 385 aa, Homo sapiens
DPPGCRNSALAARAVLPEEEAPAPEVGASKPEGIDSRPETLHPGRPQPPAEEELCSGKPFDAFTDLKNGSLFAFRGESRAGTGDAGLPQERPCSHTISSTLGQYCYELDEGPIDAAFTRINCQGKTYLFKGSQYWRFEDGVLDPDYPRNISDGFDGIPDNVDAALALPAHSYSGRERVYFFKGKQYWEYQFQHQPSQEECEGSSLSAVFEHFAMMQRDSWEDIFELLFWGRTSAGTRQPQFISRDWHGVPGQVDAAMAGRIYISGMAPRPSLAKKQRFRHRNRKGYRSQRGHSRGRNQNSRRPSRAMWLSLFSSEESNLGANNYDDYRMDWLVPATCEPIQSVFFFSGDKYYRVNLRTRRVDTVDPPYPRSIAQYWLGCPAPGHL

SEQ ID NO: 836530 - protein, 458 aa, Homo sapiens
MAPLRPLLILALLAWVALADQESCKGRCTEGFNVDKKCQCDELCSYYQSCCTDYTAECKPQVTRGDVFTMPEDEYTVYDDGEEKNNATVHEQVGGPSLTSDLQAQSKGNPEQTPVLKPEEEAPAPEVGASKPEGIDSRPETLHPGRPQPPAEEELCSGKPFDAFTDLKNGSLFAFRGQYCYELDEKAVRPGYPKLIRDVWGIEGPIDAAFTRINCQGKTYLFKGSQYWRFEDGVLDPDYPRNISDGFDGIPDNVDAALALPAHSYSGRERVYFFKGKQYWEYQFQHQPSQEECEGSSLSAVFEHFAMMQRDSWEDIFELLFWGRTSAGTRQPQFISRDWHARPSLAKKQRFRHRNRKGYRSQRGHSRGRNQNSRRPSRAMWLSLFSSEESNLGANNYDDYRMDWLVPATCEPIQSVFFFSGDKYYRVNLRTRRVDTVDPPYPRSIAQYWLGCPAPGHL

SEQ ID NO: 836531 - protein, 162 aa, Homo sapiens
MLGYNFSSFPAGTRQPQFISRDWHGVPGQVDAAMAGRIYISGMAPRPSLAKKQRFRHRNRKGYRSQRGHSRGRNQNSRRPSRAMWLSLFSSEESNLGANNYDDYRMDWLVPATCEPIQSVFFFSGDKYYRVNLRTRRVDTVDPPYPRSIAQYWLGCPAPGHL

SEQ ID NO: 836532 - protein, 283 aa, Homo sapiens [sequence omitted]

SEQ ID NO: 836533 - protein, 94 aa, Homo sapiens
MPEDEYTVYDDGEEKNNATVHEQVGGPSLTSDLQAQSKGNPEQTPVLKPEEEAPAPEVGASKPEGIDSRPETLHPGRPQPPAEEELCSGKPFDA

SEQ ID NO: 836534 - protein, 345 aa, Homo sapiens
MQRLVAWDPACLPLPPPPPAFKSMEVANFYYEADCLAAAYGGKAAPAAPPAARPGPRPPAGELGSIGDHERAIDFSPYLEPLGAPQAPAPATATDTFEAAPPAPAPAPASSGQHHDFLSDLFSDDYGGKNCKKPAEYGYVSLGRLGAAKGALHPGCFAPLHPPPPPPPPPAELKAEPGFEPADCKRKEEAGAPGGGAGMAAGFPYALRAYLGYQAVPSGSSGSLSTSSSSSPPGTPSPADAKAPPTACYAGAAPAPSQVKSKAKKTVDKHSDEYKIRRERNNIAVRKSRDKAKMRNLETQHKVLELTAENERLQKKVEQLSRELSTLRNLFKQLPEPLLASSGHC

SEQ ID NO: 836535 - protein, 345 aa, Homo sapiens; identical to SEQ ID NO: 836534

SEQ ID NO: 836536 - protein, 345 aa, Homo sapiens; identical to SEQ ID NO: 836534

SEQ ID NO: 836537 - protein, 345 aa, Homo sapiens; identical to SEQ ID NO: 836534

SEQ ID NO: 836538 - protein, 345 aa, Homo sapiens; identical to SEQ ID NO: 836534

SEQ ID NO: 836539 - protein, 345 aa, Homo sapiens; identical to SEQ ID NO: 836534

SEQ ID NO: 836540 - protein, 497 aa, Homo sapiens
RAAAGHVLRRLGEGRRGGVYSPGARGPHALTGSWQPESSSGRACSSPFAAVRRFLSPGRKMASVAVDPQPSVVTRVVNLPLVSSTYDLMSSAYLSTKDQYPYLKSVCEMAENGVKTITSVAMTSALPIIQKLEPQIAVANTYACKGLDRIEERLPILNQPSTQIVANAKGAVTGAKDAVTTTVTGAKDSVASTITGVMDKTKGAVTGSVEKTKSVVSGSINTVLGSRMMQLVSSGVENALTKSELLVEQYLPLTEEELEKEAKKVEGFDLVQKPSYYVRLGSLSTKLHSRAYQQALSRVKEAKQKSQQTISQLHSTVHLIEFARKNVYSANQKIQDAQDKLYLSWVEWKRSIGYDDTDESHCAEHIESRTLAIARNLTQQLQTTCHTLLSNIQGVPQNIQDQAKHMGVMAGDIYSVFRNAASFKEVSDSLLTSSKGQLQKMKESLDDVMDYLVNNTPLNWLVGPFYPQLTESQNAQDQGAEMDKSSQETQRSEHKTH

SEQ ID NO: 836541 - protein, 186 aa, Homo sapiens
RAAAGHVLRRLGEGRRGGVYSPGARGPHALTGSWQPESSSGRACSSPFAAVRRFLSPGRKMASVAVDPQPSVVTRVVNLPLVSSTYDLMSSAYLSTKDQYPYLKSVCEMAENGVKTITSVAMTSALPIIQKLEPQIAVANTYACKGLDRIEERLPILNQPSTQANTCFPNLDLDVCLKNNGHFLTS

SEQ ID NO: 836542 - protein, 138 aa, Homo sapiens
RAAAGHVLRRLGEGRRGGVYSPGARGPHALTGSWQPESSSGRACSSPFAAVRRFLSPGRKMASVAVDPQPSVVTRVVNLPLVSSTYDLMSSAYLSTKDQYPYLKSVCEMAENGVKTITSVAMTSALPIIQKLEPQSEF

SEQ ID NO: 836543 - protein, 103 aa, Homo sapiens
QYGMVLGQSNVYSANQKIQDAQDKLYLSWVEWKRSIGYDDTDESHCAEHIESRTLAIARNLTQQLQTTCHIRTGPHVSLTCWHCSGFREGRKYHATAPGVCLK

SEQ ID NO: 836544 - protein, 497 aa, Homo sapiens; identical to SEQ ID NO: 836540

SEQ ID NO: 836545 - protein, 512 aa, Homo sapiens
MAGVNSAEGECAPSGCPSEPVPGPQRRPVGVGGSPGPWDRCSAPRGAQRWTGRGGDGPRPPARLAASRFLSPGRKMASVAVDPQPSVVTRVVNLPLVSSTYDLMSSAYLSTKDQYPYLKSVCEMAENGVKTITSVAMTSALPIIQKLEPQIAVANTYACKGLDRIEERLPILNQPSTQIVANAKGAVTGAKDAVTTTVTGAKDSVASTITGVMDKTKGAVTGSVEKTKSVVSGSINTVLGSRMMQLVSSGVENALTKSELLVEQYLPLTEEELEKEAKKVEGFDLVQKPSYYVRLGSLSTKLHSRAYQQALSRVKEAKQKSQQTISQLHSTVHLIEFARKNVYSANQKIQDAQDKLYLSWVEWKRSIGYDDTDESHCAEHIESRTLAIARNLTQQLQTTCHTLLSNIQGVPQNIQDQAKHMGVMAGDIYSVFRNAASFKEVSDSLLTSSKGQLQKMKESLDDVMDYLVNNTPLNWLVGPFYPQLTESQNAQDQGAEMDKSSQETQRSEHKTH

SEQ ID NO: 836546 - protein, 437 aa, Homo sapiens
MASVAVDPQPSVVTRVVNLPLVSSTYDLMSSAYLSTKDQYPYLKSVCEMAENGVKTITSVAMTSALPIIQKLEPQIAVANTYACKGLDRIEERLPILNQPSTQIVANAKGAVTGAKDAVTTTVTGAKDSVASTITGVMDKTKGAVTGSVEKTKSVVSGSINTVLGSRMMQLVSSGVENALTKSELLVEQYLPLTEEELEKEAKKVEGFDLVQKPSYYVRLGSLSTKLHSRAYQQALSRVKEAKQKSQQTISQLHSTVHLIEFARKNVYSANQKIQDAQDKLYLSWVEWKRSIGYDDTDESHCAEHIESRTLAIARNLTQQLQTTCHTLLSNIQGVPQNIQDQAKHMGVMAGDIYSVFRNAASFKEVSDSLLTSSKGQLQKMKESLDDVMDYLVNNTPLNWLVGPFYPQLTESQNAQDQGAEMDKSSQETQRSEHKTH

SEQ ID NO: 836547 - protein, 505 aa, Homo sapiens
RAAAGHVLRRLGEGRRGGVYSPGARGPHALTGSWQPESSSGRACSSPFAAVRRFLSPGRKMASVAVDPQPSVVTRVVNLPLVSSTYDLMSSAYLSTKDQYPYLKSVCEMAENGVKTITSVAMTSALPIIQKLEPQIAVANTYACKGLDRIEERLPILNQPSTQIVANAKGAVTGAKDAVTTTVTGAKDSVASTITGVMDKTKGAVTGSVEKTKSVVSGSINTVLGSRMMQLVSSGVENALTKSELLVEQYLPLTEEELEKEAKKVEGFDLVQKPSYYVRLGSLSTKLHSRAYQQALSRVKEAKQKSQQTISQLHSTVHLIEFARKNVYSANQKIQDAQDKLYLSWVEWKRSIGYDDTDESHCAEHIESRTLAIARNLTQQLQTTCHTLLSNIQGVPQNIQDQAKHMGVMAGDIYSVFRNAASFKEVSDSLLTSSKGQLQKMKESLDDVMDYLVNNTPLNWLVFDFTTIDLTSETDEIPDIIALEEENGSNNSHANGPVLSGQDVE

SEQ ID NO: 836548 - protein, 170 aa, Homo sapiens
RAAAGHVLRRLGEGRRGGVYSPGARGPHALTGSWQPESSSGRACSSPFAAVRRFLSPGRKMASVAVDPQPSVVTRVVNLPLVSSTYDLMSSAYLSTKDQYPYLKSVCEMAENGVKTITSVAMTSALPIIQKLEPQIAVANTYACKGLDRIEERLPILNQPSTQVSLGQKC

SEQ ID NO: 836549 - protein, 131 aa, Homo sapiens
RAAAGHVLRRLGEGRRGGVYSPGARGPHALTGSWQPESSSGRACSSPFAAVRRFLSPGRKMASVAVDPQPSVVTRVVNLPLVSSTYDLMSSAYLSTKDQYPYLKSVCEMAENGVKTITSVAMTSALPIISV

SEQ ID NO: 836550 - protein, 497 aa, Homo sapiens; identical to SEQ ID NO: 836540

SEQ ID NO: 836551 - protein, 497 aa, Homo sapiens; identical to SEQ ID NO: 836540

SEQ ID NO: 836552 - protein, 497 aa, Homo sapiens; identical to SEQ ID NO: 836540

SEQ ID NO: 836553 - protein, 581 aa, Homo sapiens
RAAAGHVLRRLGEGRRGGVYSPGARGPHALTGSWQPESSSGRACSSPFAAVRRFLSPGRKMASVAVDPQPSVVTRVVNLPLVSSTYDLMSSAYLSTKDQYPYLKSVCEMAENGVKTITSVAMTSALPIIQKLEPQIAVANTYACKGLDRIEERLPILNQPSTQIVANAKGAVTGAKDAVTTTVTGAKDSVASTITGVMDKTKGAVTGSVEKTKSVVSGSINTVLGSRMMQLVSSGVENALTKSELLVEQYLPLTEEELEKEAKKVEGFDLVQKPSYYVRLGSLSTKLHSRAYQQALSRVKEAKQKSQQTISQHSGTHQDHHSPTASMEHTQYRNEELTDKTPSDHTAPPPTPREQPHNDNRRKNKKNTVQPQRQKATTHRTDRRVNKEATSKRSNAGRAQHKPDDAAVAAHPASDTSTRTRILPTATTRNRGRTSRRKPPKHQRRADKGRRTTPQHATTQWLKHRHGGPVERNWKPQSADDRETNTRRDTRSEARQHSSAPKDELDNSDHTHRAAESTEPDDKTEREVHTEAGRYHEQQDTERNASSTRAGRADPTQQSRQTGREAKPHAPTKPSRHNDHT

SEQ ID NO: 836554 - protein, 125 aa, Homo sapiens
GAFYHKRNMCVSACLGEKPRDAPLSGNTRQHVRSTIIRPAGAQILGVDRRLHPGLAVHLPADVDHQAGVRRGRPFHRPTANASRHTPPPARDFSGRRIFSMGGRLSSSHPAVTFFVTTSVAAIVN

SEQ ID NO: 836555 - protein, 188 aa, Homo sapiens
MTWRRSGTTPSTTSFAWAPEEHPTLLTEAPLNPKANREKMTQIMFETFNVPAMYVAIQAVLSLYASGRTTGIVLDSGDGVTHNVPIYEGYALPHAIMRLDFENEMATAASSSSLEKSYELPDGQVITIGNERFRCPETLFQPSFIGMESAGIHETTYNSIMKCDIDIRKDLYANNVMSGGTTMYPGNR

SEQ ID NO: 836556 - protein, 135 aa, Homo sapiens
MRLDLAGRDLTDYLMKILTERGYSFVTTAEREIVRDIKEKLCYVALDFENEMATAASSSSLEKSYELPDGQVITIGNERFRCPETLFQPSFIGMESAGIHETTYNSIMKCDIDIRKDLYANNVMSGGTTMYPGNR

SEQ ID NO: 836557 - protein, 132 aa, Homo sapiens
MTWRRSGTTPSTTSFAWAPEEHPTLLTEAPLNPKANREKMTQIMFETFNVPAMYVAIQAVLSLYASGRTTGIVLDSGDGVTHNVPIYEGCMESAGIHETTYNSIMKCDIDIRKDLYANNVMSGGTTMYPGNR

SEQ ID NO: 836558 - protein, 160 aa, Homo sapiens
MTWRRSGTTPSTTSFAWAPEEHPTLLTEAPLNPKANREKMTQIMFETFNVPAMYVAIQAVLSLYASGRTTGIVLDSGDGVTHNVPIYEGYALPHAIMRLDLAGRDLTDYLMKILTERGYSFVTTAEREIVRDIKEKLCYVALDFENEMATAASSSSPGNR

SEQ ID NO: 836559 - protein, 231 aa, Homo sapiens
MTWRRSGTTPSTTSFAWAPEEHPTLLTEAPLNPKANREKMTQIMFETFNVPAMYVAIQAVLSLYASGRTTGIVLDSGDGVTHNVPIYEGYALPHAIMRLDLAGRDLTDYLMKILTERGYSFVTTAEREIVRDIKEKLCYVALDFENEMATAASSSSLEKSYELPDGQVITIGNERFRCPETLFQPSFIGMESAGIHETTYNSIMKCDIDIRKDLYANNVMSGGTTMYPGNR

SEQ ID NO: 836560 - protein, 231 aa, Homo sapiens; identical to SEQ ID NO: 836559

SEQ ID NO: 836561 - protein, 231 aa, Homo sapiens; identical to SEQ ID NO: 836559

SEQ ID NO: 836562 - protein, 198 aa, Homo sapiens
MTWRRSGTTPSTTSFAWAPEEHPTLLTEAPLNPKANREKMTQIMFETFNVPAMYVAIQAVLSLYASGRTTGIVLDSGDGVTHNVPIYEGYALPHAIMRLDLAGRDLTDYLMKILTERGYSFVTTAEREIVRDIKEKLCYVALDFENEMATAASSSSLEKSYELPDGQVITIGNERFRCPETLFQPSFIGEPRSPSPRP

SEQ ID NO: 836563 - protein, 165 aa, Homo sapiens
MTWRRSGTTPSTTSFAWAPEEHPTLLTEAPLNPKANREKMTQIMFETFNVPAMYVAIQAVLSLYASGRTTGIVLDSGDGVTHNVPIYEGYALPHAIMRLDLAGRDLTDYLMKILTERGYSFVTTAEREIVRDIKEKLCYVALDYMAAIYSMQVQTALILLPRDAS

SEQ ID NO: 836564 - protein, 231 aa, Homo sapiens; identical to SEQ ID NO: 836559

SEQ ID NO: 836565 - protein, 127 aa, Homo sapiens
PGPEPARREDPGALCCGREPIRHPGTGLTSCCTTTLTLRGGHQEKFPVRIRRLHPGLAVHLPADVDHQAGVRRGRPFHRPTANASRHTPPPARDFSGRRIFSMGGRLSSSHPAVTFFVTTSVAAIVN

SEQ ID NO: 836566 - protein, 81 aa, Homo sapiens
PRASAHAPRRGPQVLPADVDHQAGVRRGRPFHRPTANASRHTPPPARDFSGRRIFSMGGRLSSSHPAVTFFVTTSVAAIVN

SEQ ID NO: 836567 - protein, 207 aa, Homo sapiens
VGPTTGRLPKANREKMTQIMFETFNVPAMYVAIQAVLSLYASGRTTGIVLDSGDGVTHNVPIYEGYALPHAIMRLDLAGRDLTDYLMKILTERGYSFVTTAEREIVRDIKEKLCYVALDFENEMATAASSSSLEKSYELPDGQVITIGNERFRCPETLFQPSFIGMESAGIHETTYNSIMKCDIDIRKDLYANNVMSGGTTMYPGNR

SEQ ID NO: 836568 - protein, 169 aa, Homo sapiens
  misc_feature (7)..(7): Xaa can be any naturally occurring amino acid
  misc_feature (16)..(16): Xaa can be any naturally occurring amino acid
  misc_feature (36)..(36): Xaa can be any naturally occurring amino acid
  misc_feature (57)..(57): Xaa can be any naturally occurring amino acid
  misc_feature (59)..(59): Xaa can be any naturally occurring amino acid
HRGEAYXTDHFSTQKXKHRHYPPACNYSNSLHRLCXPVRPNIILRGHSNYKLTIRHXLXEFGTEREIVRDIKEKLCYVALDFENEMATAASSSSLEKSYELPDGQVITIGNERFRCPETLFQPSFIGMESAGIHETTYNSIMKCDIDIRKDLYANNVMSGGTTMYPGNR

SEQ ID NO: 836569 - protein, 231 aa, Homo sapiens; identical to SEQ ID NO: 836559

SEQ ID NO: 836570 - protein, 231 aa, Homo sapiens; identical to SEQ ID NO: 836559

SEQ ID NO: 836571 - protein, 234 aa, Homo sapiens
MTWRRSGTTPSTTSFAWAPEEHPTLLTEAPLNPKANREKMTQIMFETFNVPAMYVAIQAVLSLYASGRTTGIVLDSGDGVTHNVPIYEGYALPHAIMRLDLAGRDLTDYLMKILTERGYSFVTTAEREIVRDIKEKLCYVALDFENEMATAASSSSLEKSYELPDGQVITIGNERFRCPETLFQPSFIGMESAGIHETTYNSIMKCDIDIRKDLYANNVMSGGTTMYPGISACS

SEQ ID NO: 836572 - protein, 574 aa, Homo sapiens
MASDLESSLTSIDWLPQLTLRATIEKLGSASQAGPPGSSRKCSPGSPTDPNATLSKDEAAVHQDGKPRYSYATLITYAINSSPAKKMTLSEIYRWICDNFPYYKNAGIGWKNSIRHNLSLNKCFRKVPRPRDDPGKGSYWTIDTCPDISRKRRHPPDDDLSQDSPEQEASKSPRGGVAGSGEASLPPEGNPQMSLQSPTSIASYSQGTGSVDGGAVAAGASGRESAEGPPPLYNTNHDFKFSYSEINFQDLSWSFRNLYKSMLEKSSSSSQHGFSSLLGDIPPSNNYYMYQQQQPPPPQQQQQQQQPPQPPPQQSQPQQQQAPAQGPSAVGGAPPLHTPSTDGCTPPGGKQAGAEGYGPPPVMAMHPPPLQHGGYHPHQHHPHSHPAQQPPPPQPQAQGQAPINNTGFAFPSDWCSNIDSLKESFKMVNRLNWSSIEQSQFSELMESLRQAEQKNWTLDQHHIANLCDSLNHFLTQTGHVPPQGGTHRPPAPARIADSCALTSGKQESAMSQVNSYGHPQAPHLYPGPSPMYPIPTQDSAGYNRPAHHMVPRPSVPPPGANEEIPDDFDWDLIT

SEQ ID NO: 836573 - protein, 526 aa, Homo sapiens
MASDLESSLTSIDWLPQLTLRATIEKLGSASQAGPPGSSRKCSPGSPTDPNATLSKDEAAVHQDGKPRYSYATLITYAINSSPAKKMTLSEIYRWICDNFPYYKNAGIGWKNSIRHNLSLNKCFRKVPRPRDDPGKGSYWTIDTCPDISRKRRHPPDDDLSQDSPEQEASKSPRGGVAGSGEASLPPEGNPQMSLQSPTSIASYSQGTGSVDGGAVAAGASGRESAEGPPPLYNTNHDFKFSYSEINFQDLSWSFRNLYKSMLEKSSSSSQHGFSSLLGDIPPSNNYYMYQQQQPPPPQQQQQQQQPPQPPPQQSQPQQQQAPAQGPSAVGGAPPLHTPSTDGCTPPGGKQAGAEGYGPPPVMAMHPPPLQHGGYHPHQHHPHSHPAQQPPPPQPQAQGQAPINNTGFAFPSDWCSNIDSLKESFKMVNRLNWSSIEQSQFSELMESLRQAEQKNWTLDQHHIANLCDSLNHFLTQTGHVPPQGGTHRPPAPARIADSCALTSGKQESAMSQGTAPSQLPWRWRLC

SEQ ID NO: 836574 - protein, 74 aa, Homo sapiens
APPSGAPRERRRERGREQPLPLLERKDPYHSGEGKKRPLEGTPLSCLEARKTPVLAGEETPRSGKKGAFRREAE

SEQ ID NO: 836575 - protein, 562 aa, Homo sapiens
MASDLESSLTSIDWLPQLTLRATIEKLGSASQAGPPGSSRKCSPGSPTDPNATLSKDEAAVHQDGKPRYSYATLITYAINSSPAKKMTLSEIYRWICDNFPYYKNAGIGWKNSIRHNLSLNKCFRKVPRPRDDPGKGSYWTIDTCPDISRKRRHPPDDDLSQDSPEQEASKSPRGGVAGSGEASLPPEGNPQMSLQSPTSIASYSQGTGSVDGGAVAAGASGRESAEGPPPLYNTNHDFKFSYSEINFQDLSWSFRNLYKSMLEKSSSSSQHGFSSLLGDIPPSNNYYMYHSSSRHSHLPSSPSHSSSRHLPRAPQLYGGAPPLHTPSTDGCTPPGGKQAGAEGYGPPPVMAMHPPPLQHGGYHPHQHHPHSHPAQQPPPPQPQAQGQAPINNTGFAFPSDWCSNIDSLKESFKMVNRLNWSSIEQSQFSELMESLRQAEQKNWTLDQHHIANLCDSLNHFLTQTGHVPPQGGTHRPPAPARIADSCALTSGKQESAMSQVNSYGHPQAPHLYPGPSPMYPIPTQDSAGYNRPAHHMVPRPSVPPPGANEEIPDDFDWDLIT

SEQ ID NO: 836576 - protein, 142 aa, Homo sapiens
MFEARLVQGSILKKVLEALKDLINEACWDISSSGVNLQSMDSSHVSLVQLTLRSEGFDTYRCDRNLAMGVNLTSMSKILKCAGNEDIITLRAEDNADTLALVFEAPNQEKVSDYEMKLMDLDVEQLWNSRTGVQLCSKDAFW

SEQ ID NO: 836577 - protein, 142 aa, Homo sapiens; identical to SEQ ID NO: 836576

SEQ ID NO: 836578 - protein, 142 aa, Homo sapiens; identical to SEQ ID NO: 836576

SEQ ID NO: 836579 - protein, 142 aa, Homo sapiens; identical to SEQ ID NO: 836576

SEQ ID NO: 836580 - protein, 142 aa, Homo sapiens; identical to SEQ ID NO: 836576

SEQ ID NO: 836581 - protein, 142 aa, Homo sapiens; identical to SEQ ID NO: 836576

SEQ ID NO: 836582 - protein, 124 aa, Homo sapiens
MFEARLVQGSILKKVLEALKDLINEACWDISSSGVNLQSMDSSHVSLVQLTLRSEGFDTYRCDRNLAMGVNLTSMSKILTLALVFEAPNQEKVSDYEMKLMDLDVEQLWNSRTGVQLCSKDAFW

SEQ ID NO: 836583 - protein, 124 aa, Homo sapiens; identical to SEQ ID NO: 836582

SEQ ID NO: 836584 - protein, 142 aa, Homo sapiens; identical to SEQ ID NO: 836576

SEQ ID NO: 836585 - protein, 142 aa, Homo sapiens; identical to SEQ ID NO: 836576

SEQ ID NO: 836586 - protein, 142 aa, Homo sapiens; identical to SEQ ID NO: 836576

SEQ ID NO: 836587 - protein, 142 aa, Homo sapiens; identical to SEQ ID NO: 836576

SEQ ID NO: 836588 - protein, 94 aa, Homo sapiens
MSKILKCAGNEDIITLRAEDNADTLALVFEAPNQEKVSDYEMKLMDLDVEQLWNSRTGVQLCRYRRVTFKSALFYIYRGGDSICFRVNLCNAKF

SEQ ID NO: 836589 - protein, 86 aa, Homo sapiens
TAPASQCPQRADPDRCRNDAVDEGHRDLSGSGSWANVWVHGMPLATAEAVPQPQVYALNFILRTAPVSHRPQLIETVVAPFCRRGN

SEQ ID NO: 836590 - protein, 612 aa, Homo sapiens
QALPVATSREAAVLPPPAPDHLLQDQPPGGTRHPAFTGTQGAVLSSVNMSRPSSRAIYLHRKEYSQNLTSEPTLLQHRVEHLMTCKQGSQRVQGPEDALQKLFEMDAQGRVWSQDLILQVRDGWLQLLDIETKEELDSYRLDSIQAMNVALNTCSYNSILSITVQEPGLPGTSTLLFQCQEVGAERLKTSLQKALEEELEQSRPRLGGLQPGQDRWRGPAMERPLPMEQARYLEPGIPPEQPHQRTLEHSLPPSPRPLPRHTSAREPSAFTLPPPRRSSSPEDPERDEEVLNHVLRDIELFMGKLEKAQAKTSRKKKFGKKNKDQGGLTQAQYIDCFQKIKYSFNLLGRLATWLKETSAPELVHILFKSLNFILARCPEAGLAAQVISPLLTPKAINLLQSCLSPPESNLWMGLGPAWTTSRADWTGDEPLPYQPTFSDDWQLPEPSSQAPLGYQDPVSLRPSSPKPAQPALKMQVLYEFEARNPRELTVVQGEKLEVLDHSKRWWLVKNEAGRSGYIPSNILEPLQPGTPGTQGQSPSRVPMLRLSSRPEEVTDWLQAENFSTATVRTLGSLTGSQLLRIRPGELQMLCPQEAPRILSRLEAVRRMLGISP

SEQ ID NO: 836591 - protein, 148 aa, Homo sapiens
QALPVATSREAAVLPPPAPDHLLQDQPPGGTRHPAFTGTQGAVLSSVNMSRPSSRAIYLHRKEYSQNLTSEPTLLQHRVEVSTSAAPGQCPTKPKCSHVPTALPEHGHFTQVPAPEANSLSQPCRMDSDPTSLPEHLLSVRDGEGWSD

SEQ ID NO: 836592 - protein, 580 aa, Homo sapiens
QALPVATSREAAVLPPPAPDHLLQDQPPGGTRHPAFTGTQGAVLSSVNMSRPSSRAIYLHRKEYSQNLTSEPTLLQHRVEHLMTCKQGSQRVQGPEDALQKLFEMDAQGRVWSQDLILQVRDGWLQLLDIETKEELDSYRLDSIQAMNVALNTCSYNSILSITVQEPGLPGTSTLLFQCQEVGAERLKTSLQKALEEELEQSRPRLGGLQPGQDRWRGPAMERPLPMEQARYLEPGIPPEQPHQRTLEHSLPPSPRPLPRHTSAREPSAFTLPPPRRSSSPEDPERDEEVLNHVLRDIELFMGKLEKAQAKTSRKKKFGKKNKDQGGLTQAQYIDCFQKIKYSFNLLGRLATWLKETSAPELVHILFKSLNFILARCPEAGLAAQVISPLLTPKAINLLQSCLSPPESNLWMGLGPAWTTSRADWTGDEPLPYQPTFSDDWQLPEPSSQAPLGYQDPVSLRRGSHRLGSTSHFPQEKTHNHDPQPGDPNSRPSSPKPAQPALKMQVLYEFEARNPRELTVVQGEKLEVLDHSKRWWLVKNEAGRSGYIPSNILEPLQPGTPGTQGQSPSRVLPSLDYPEP

SEQ ID NO: 836593 - protein, 520 aa, Homo sapiens
QALPVATSREAAVLPPPAPDHLLQDQPPGGTRHPAFTGTQGAVLSSVNMSRPSSRAIYLHRKEYSQNLTSEPTLLQHRVEHLMTCKQGSQRVQGPEDALQKLFEMDAQGRVWSQDLILQVRDGWLQLLDIETKEELDSYRLDSIQAMNVALNTCSYNSILSITVQEPGLPGTSTLLFQCQEVGAERLKTSLQKALEEELEQSRPRLGGLQPGQDRWRGPAMERPLPMEQARYLEPGIPPEQPHQRTLEHSLPPSPRPLPRHTSAREPSAFTLPPPRRSSSPEDPERDEEVLNHVLRDIELFMGKLEKAQAKTSRKKKFGKKNKDQGGLTQAQYIDCFQKIKYSFNLLGRLATWLKETSAPELVHILFKSLNFILARCPEAGLAAQVISPLLTPKAINLLQSCLSPPESNLWMGLGPAWTTSRADWTGDEPLPYQPTFSDDWQLPEPSSQAPLGYQDPVSLRYALSLIGTAWSWGGRDRTVVLWISGSLHLKRAKRVSFSQKNMYKDIPLLPWVKNSVLPS

SEQ ID NO: 836594 - protein, 545 aa, Homo sapiens
QALPVATSREAAVLPPPAPDHLLQDQPPGGTRHPAFTGTQGAVLSSVNMSRPSSRAIYLHRKEYSQNLTSEPTLLQHRVEHLMTCKQGSQRVQGPEDALQKLFEMDAQGRVWSQDLILQVRDGWLQLLDIETKEELDSYRLDSIQAMNVALNTCSYNSILSITVQEPGLPGTSTLLFQCQEVGAERLKTSLQKALEEELEQSRPRLGGLQPGQDRWRGPAMERPLPMEQARYLEPGIPPEQPHQRTLEHSLPPSPRPLPRHTSAREPSAFTLPPPRRSSSPEDPERDEEVLNHVLRDIELFMGKLEKAQAKTSRKKKFGKKNKDQGGLTQAQYIDCFQKIKYSFNLLGRLATWLKETSAPELVHILFKSLNFILARCPEAGLAAQVISPLLTPKAINLLQSCLSPPESNLWMGLGPAWTTSRADWTGDEPLPYQPTFSDDWQLPEPSSQAPLGYQDPVSLRRGSHRLGSTSHFPQEKTHNHDPQPGDPNSRPSSPKPAQPALKMQVLYEFEARNPRELETAQTSDDDVERDRCRDRCNQKGSARA

SEQ ID NO: 836595 - protein, 168 aa, Homo sapiens
AAKGGWSRDGAAKVGGLEREKEGRKELEGESLVWGGKAGWKEAQGTEVVTLGKVLDHSKRWWLVKNEAGRSGYIPSNILEPLQPGTPGTQGQSPSRVPMLRLSSRPEEVTDWLQAENFSTATVRTLGSLTGSQLLRIRPGELQMLCPQEAPRILSRLEAVRRMLGISP

SEQ ID NO: 836596 - protein, 642 aa, Homo sapiens
QALPVATSREAAVLPPPAPDHLLQDQPPGGTRHPAFTGTQGAVLSSVNMSRPSSRAIYLHRKEYSQNLTSEPTLLQHRVEHLMTCKQGSQRVQGPEDALQKLFEMDAQGRVWSQDLILQVRDGWLQLLDIETKEELDSYRLDSIQAMNVALNTCSYNSILSITVQEPGLPGTSTLLFQCQEVGAERLKTSLQKALEEELEQSRPRLGGLQPGQDRWRGPAMERPLPMEQARYLEPGIPPEQPHQRTLEHSLPPSPRPLPRHTSAREPSAFTLPPPRRSSSPEDPERDEEVLNHVLRDIELFMGKLEKAQAKTSRKKKFGKKNKDQGGLTQAQYIDCFQKIKYSFNLLGRLATWLKETSAPELVHILFKSLNFILARCPEAGLAAQVISPLLTPKAINLLQSCLSPPESNLWMGLGPAWTTSRADWTGDEPLPYQPTFSDDWQLPEPSSQAPLGYQDPVSLRRGSHRLGSTSHFPQEKTHNHDPQPGDPNSRPSSPKPAQPALKMQVLYEFEARNPRELTVVQGEKLEVLDHSKRWWLVKNEAGRSGYIPSNILEPLQPGTPGTQGQSPSRVPMLRLSSRPEEVTDWLQAENFSTATVRTLGSLTGSQLLRIRPGELQMLCPQEAPRILSRLEAVRRMLGISP

SEQ ID NO: 836597 - protein, 67 aa, Homo sapiens
SSGPSTLSQAPLGYQDPVSLRPSSPKPAQPALKMQVLYEFEARNPRELTVVQGEKLEVLDHSNALLV

SEQ ID NO: 836598 - protein, 613 aa, Homo sapiens
GGVECPEALNGPEALNGPEALNGPEALNGPEALNGPPPAAPQTQTWRPYPWPQCFDTVPHIGPGKLLYLKPGTSYLKGAEDTSSSSSAFLYPARLWSTSLSFLPVLGLPLSLQHLMTCKQGSQRVQGPEDALQKLFEMDAQGRVWSQDLILQVRDGWLQLLDIETKEELDSYRLDSIQAMNVALNTCSYNSILSITVQEPGLPGTSTLLFQCQEVGAERLKTSLQKALEEELEQSRPRLGGLQPGQDRWRGPAMERPLPMEQARYLEPGIPPEQPHQRTLEHSLPPSPRPLPRHTSAREPSAFTLPPPRRSSSPEDPERDEEVLNHVLRDIELFMGKLEKAQAKTSRKKKFGKKNKDQGGLTQAQYIDCFQKIKYSFNLLGRLATWLKETSAPELVHILFKSLNFILARCPEAGLAAQVISPLLTPKAINLLQSCLSPPESNLWMGLGPAWTTSRADWTGDEPLPYQPTFSDDWQLPEPSSQAPLGYQDPVSLRRGSHRLGSTSHFPQEKTHNHDPQPGDPNSRPSSPKPAQPALKMQVLYEFEARNPRELTVVQGEKLEVLDHSKRWWLVKNEAGRSGYIPSNILEPLQPGTPGTQGQSPSRVLPSLDYPEP

SEQ ID NO: 836599 - protein, 125 aa, Homo sapiens
QWTFYAQPSTLRIPGPCFPSEKTHNHDPQPGDPNSRPSSPKPAQPALKMQVLYEFEARNPRELTVVQGEKLEVLDHSKRWWLVKNEAGRSGYIPSNILEPLQPGTPGTQGQSPSRVLPSLDYPEP

SEQ ID NO: 836600 - protein, 110 aa, Homo sapiens
SSGPSTLSQAPLGYQDPVSLRPSSPKPAQPALKMQVLYEFEARNPRELTVVQGEKLEVLDHSKRWWLVKNEAGRSGYIPSNILEPLQPGTPGTQGQSPSRVLPSLDYPEP

SEQ ID NO: 836601 - protein, 105 aa, Homo sapiens
MCTASPYTMCCCACSCDDIRQEKQRLLKSCPKTVQKPQPPVAFSPPPLGAADQSKLTDRRRNVQMFMVSSVWKRSSGNFGQDFSVGNASKYKARAIFKKDLLNLY

SEQ ID NO: 836602 - protein, 285 aa, Homo sapiens
MAGLGHPAAFGRATHAVVRALPESLGQHALRSAKGEEVDVARAERQHQLYVGVLGSKLGLQVVELPADESLPDCVFVEDVAVVCEETALITRPGAPSRRKEVDMMKEALEKLQLNIVEMKDENATLDGGDVLFTGREFFVGLSKRTNQRGAEILADTFKDYAVSTVPVADGLHLKSFCSMAGPNLIAIGSSESAQKALKIMQQMSDHRYDKLTVPDDIAANCIYLNIPNKGHVLLHRTPEEYPESAKVYEKLKDHMLIPVSMSELEKVDGLLTCCSVLINKKVDS

SEQ ID NO: 836603 - protein, 285 aa, Homo sapiens; identical to SEQ ID NO: 836602

SEQ ID NO: 836604 - protein, 285 aa, Homo sapiens; identical to SEQ ID NO: 836602

SEQ ID NO: 836605 - protein, 285 aa, Homo sapiens; identical to SEQ ID NO: 836602

SEQ ID NO: 836606 - protein, 190 aa, Homo sapiens
MCKCLWVDMMKEALEKLQLNIVEMKDENATLDGGDVLFTGREFFVGLSKRTNQRGAEILADTFKDYAVSTVPVADGLHLKSFCSMAGPNLIAIGSSESAQKALKIMQQMSDHRYDKLTVPDDIAANCIYLNIPNKGHVLLHRTPEEYPESAKVYEKLKDHMLIPVSMSELEKVDGLLTCCSVLINKKVDS

SEQ ID NO: 836607 - protein, 105 aa, Homo sapiens; identical to SEQ ID NO: 836601

SEQ ID NO: 836608 - protein, 108 aa, Homo sapiens
MSLTSSSSVRVEWIAAVTIAAGTAAIGYLAYKRFYVKDHRNKAMINLHIQKDNPKIVHAFDMEDLGDKAVYCRCWRSKKFPFCDGAHTKHNEETGDNVGPLIIKKKET

SEQ ID NO: 836609 - protein, 108 aa, Homo sapiens; identical to SEQ ID NO: 836608

SEQ ID NO: 836610 - protein, 103 aa, Homo sapiens
MINLHIQKDNPKIVHAFDMEDLGDKAVYCRCWRSKKHNGETQKKKKKKKNLCGRALGPRKKFLKPFALGAPGPPRVGNTGPKGVPKEKTGAGTRGGVSPQKKS

SEQ ID NO: 836611 - protein, 108 aa, Homo sapiens; identical to SEQ ID NO: 836608

SEQ ID NO: 836612 - protein, 140 aa, Homo sapiens
MSLTSSSSVRAHSMLGIDNSPLRLRLTRLCRTFFSPTLPGAGLNGSQQLPCAAGTAAIGYLAYKRFYVKDHRNKAMINLHIQKDNPKIVHAFDMEDLGDKAVYCRCWRSKKFPFCDGAHTKHNEETGDNVGPLIIKKKET

SEQ ID NO: 836613 - protein, 108 aa, Homo sapiens; identical to SEQ ID NO: 836608

SEQ ID NO: 836614 - protein, 108 aa, Homo sapiens; identical to SEQ ID NO: 836608

SEQ ID NO: 836615 - protein, 108 aa, Homo sapiens; identical to SEQ ID NO: 836608

SEQ ID NO: 836616 - protein, 914 aa, Homo sapiens [sequence omitted]

SEQ ID NO: 836617 - protein, 699 aa, Homo sapiens
SLWISAEFGLLFMPTTSEKASIMFARHVDSIVEFCTEQNHNKEAPNKQNQKCNLRSTWEVIRDSEDFKKTTPMTTQPPNPTFSLLQIGQRIVCLVLDKSGSMATGNRLNRLNQAGQLFLLQTVELGSWVGMVTFDSAAHVQSELIQINSGSDRDTLAKRLPAAASGGTSICSGLRSAFTVIRKKYPTDGSEIVLLTDGEDNTISGCFNEVKQSGAIIHTVALGPSAAQELEELSKMTGGLQTYASDQVQNNGLIDAFGALSSGNGAVSQRSIQLESKGLTLQNSQWMNGTVIVDSTVGKDTLFLITWTTQPPQILLWDPSGQKQGGFVVDKNTKMAYLQIPGIAKVGTWKYSLQASSQTLTLTVTSRASNATLPPITVTSKTNKDTSKFPSPLVVYANIRQGASPILRASVTALIESVNGKTVTLELLDNGAGADATKDDGVYSRYFTTYDTNGRYSVKVRALGGVNAARRRVIPQQSGALYIPGWIENDEIQWNPPRPEINKDDVQHKQVCFSRTSSGGSFVASDVPNAPIPDLFPPGQITDLKAEIHGGSLINLTWTAPGDDYDHGTAHKYIIRISTSILDLRDKFNESLQVNTTALIPKEANSEEVFLFKPENITFENGTDLFIAIQAVDKVDLKSEISNIARVSLFIPPQTPPETPSPDETSAPCPNIHINSTIPGIHILKIMWKWIGELQLSIA

SEQ ID NO: 836618 - protein, 513 aa, Homo sapiens
MAWWLMPLIPALWEAEQSGCFNEVKQSGAIIHTVALGPSAAQELEELSKMTGGLQTYASDQVQNNGLIDAFGALSSGNGAVSQRSIQLESKGLTLQNSQWMNGTVIVDSTVGKDTLFLITWTTQPPQILLWDPSGQKQGGFVVDKNTKMAYLQIPGIAKVGTWKYSLQASSQTLTLTVTSRASNATLPPITVTSKTNKDTSKFPSPLVVYANIRQGASPILRASVTALIESVNGKTVTLELLDNGAGADATKDDGVYSRYFTTYDTNGRYSVKVRALGGVNAARRRVIPQQSGALYIPGWIENDEIQWNPPRPEINKDDVQHKQVCFSRTSSGGSFVASDVPNAPIPDLFPPGQITDLKAEIHGGSLINLTWTAPGDDYDHGTAHKYIIRISTSILDLRDKFNESLQVNTTALIPKEANSEEVFLFKPENITFENGTDLFIAIQAVDKVDLKSEISNIARVSLFIPPQTPPETPSPDETSAPCPNIHINSTIPGIHILKIMWKWIGELQLSIA

SEQ ID NO: 836619 - protein, 407 aa, Homo sapiens
MGPFKSSVFILILHLLEGALSNSLIQLNNNGYEGIVVAIDPNVPEDETLIQQIKDMVTQASLYLFEATGKRFYFKNVAILIPETWKTKADYVRPKLETYKNADVLVAESTPPGNDEPYTEQMGNCGEKGERIHLTPDFIAGKKLAEYGPQGRAFVHEWAHLRWGVFDEYNNDEKFYLSNGRIQAVRCSAGITGTNVVKKCQGGSCYTKRCTFNKVTGLYEKGCEFVLQSRQTEKASIMFAQHVDSIVEFCTEQNHNKEAPNKQNQKCNLRSTWEVIRDSEDFKKTTPMTTQPPNPTFSLLQIGQRIVCLVLDKSGSMATGNRLNRLNQAGQLFLLQTVELGSWVGMVTFDSAAHVQSELIQINSGSDRDTLAKRLPAAASGGTSICSGLRSAFTVIRKKYPKLGHSA

SEQ ID NO: 836620 - protein, 914 aa, Homo sapiens [sequence omitted]

SEQ ID NO: 836621 - protein, 547 aa, Homo sapiens
DGSESRYLWSYAVSRGSLVRDLIVHLIVIRKKYPTDGSEIVLLTDGEDNTISGCFNEVKQSGAIIHTVALGPSAAQELEELSKMTGGLQTYASDQVQNNGLIDAFGALSSGNGAVSQRSIQLESKGLTLQNSQWMNGTVIVDSTVGKDTLFLITWTTQPPQILLWDPSGQKQGGFVVDKNTKMAYLQIPGIAKVGTWKYSLQASSQTLTLTVTSRASNATLPPITVTSKTNKDTSKFPSPLVVYANIRQGASPILRASVTALIESVNGKTVTLELLDNGAGADATKDDGVYSRYFTTYDTNGRYSVKVRALGGVNAARRRVIPQQSGALYIPGWIENDEIQWNPPRPEINKDDVQHKQVCFSRTSSGGSFVASDVPNAPIPDLFPPGQITDLKAEIHGGSLINLTWTAPGDDYDHGTAHKYIIRISTSILDLRDKFNESLQVNTTALIPKEANSEEVFLFKPENITFENGTDLFIAIQAVDKVDLKSEISNIARVSLFIPPQTPPETPSPDETSAPCPNIHINSTIPGIHILKIMWKWIGELQLSIA

SEQ ID NO: 836622 - protein, 586 aa, Homo sapiens
RTHQEVHRRPACSSLPAAPGSISQRLRGPGSWCVCSAGGSWKTLSLPAEAMSDYENDDECWNVLEGFRVTLTSVIDPSRITPYLRQCKVLNPDDEEQVLSDPNLVIRKRKVGVLLDILQRTGHKGYVAFLESLELYYPQLYKKVTGKEPARVFSMIIDASGESGLTQLLMTEVMKLQKKVQDLTALLSSKDDFIKELRVKDSLLRKHQERVQRLKEECEAGSRELKRCKEENYDLAMRLAHQSEEKGAALMRNRDLQLEIDQLKHSLMKAEDDCKVERKHTLKLRHAMEQRPSQELLWELQQEKALLQARVQELEASVQEGKLDRSSPYIQVLEEDWRQALRDHQEQANTIFSLRKDLRQGEARRLRCMEEKEMFELQCLALRKDSKMYKDRIEAILLQMEEVAIERDQAIATREELHAQHARGLQEKDALRKQVRELGEKADELQLQVFQCEAQLLAVEGRLRRQQLETLVLSSDLEDGSPRRSQELSLPQDLEDTQLSDKGCLAGGGSPKQPFAALHQEQVLRNPHDAGLSSGEPPEKERRRLKESFENYRRKRALRKMQKGWRQGEEDRENTTGSDNTDTEGS

SEQ ID NO: 836623 - protein, 586 aa, Homo sapiens; identical to SEQ ID NO: 836622

SEQ ID NO: 836624 - protein, 91 aa, Homo sapiens
AHEQFRVPAGSGAAGPGWVLGLAIRQPSRLFWAWRGPGVAEGMPRAPWRIPLCALPTLCLGSPLPSQPTHPIFYDHRAPTWKMAHPGGPRR

SEQ ID NO: 836625 - protein, 127 aa, Homo sapiens
GRGGAGAGRTEPASGMLRTALRGAPRLLSRVQPRAPCLRRLWGRGARPEVAGRRRAWAWGWRRSSSEQGPGPAAALGRVEAAHYQLVYTCKVGARRDGTGDRPVSDATRPAGRSGPPGIREAAWSSH

SEQ ID NO: 836626 - protein, 636 aa, Homo sapiens
RTHQEVHRRPACSSLPAAPGSISQRLRGPGSWCVCSAGGSWKTLSLPAEAMSDYENDDECWNVLEGFRVTLTSVIDPSRITPYLRQCKVLNPDDEEQVLSDPNLVIRKRKVGVLLDILQRTGHKGYVAFLESLELYYPQLYKKVTGKEPARVFSMIIDASGESGLTQLLMTEVMKLQKKVQDLTALLSSKDDFIKELRVKDSLLRKHQERVQRLKEECEAGSRELKRCKEENYDLAMRLAHQSEEKGAALMRNRDLQLEIDQLKHSLMKAEDDCKVERKHTLKLRHAMEQRPSQELLWELQQEKALLQARVQELEASVQEGKLDRSSPYIQVLEEDWRQALRDHQEQANTIFSLRKDLRQGEARRLRCMEEKEMFELQCLALRKDSKMYKDRIEAILLQMEEVAIERDQSTQMEGLLTSLRAQRLDVLRSLCLELGGRAEGPGQSLGPSLRVGLVLSRQAIATREELHAQHARGLQEKDALRKQVRELGEKADELQLQVFQCEAQLLAVEGRLRRQQLETLVLSSDLEDGSPRRSQELSLPQDLEDTQLSDKGCLAGGGSPKQPFAALHQEQVLRNPHDAGLSSGEPPEKERRRLKESFENYRRKRALRKMQKGWRQGEEDRENTTGSDNTDTEGS

SEQ ID NO: 836627 - protein, 561 aa, Homo sapiens
RTHQEVHRRPACSSLPAAPGSISQRLRGPGSWCVCSAGGSWKTLSLPAEAMSDYENDDECWNVLEGFRVTLTSVIDPSRITPYLRQCKVLNPDDEEQVLSDPNLVIRKRKVGVLLDILQRTGHKGYVAFLESLELYYPQLYKKVTGKEPARVFSMIIDASGESGLTQLLMTEVMKLQKKVQDLTALLSSKDDFIKELRVKDSLLRKHQERVQRLKEECEAGSRELKRCKEENYDLAMRLAHQSEEKGAALMRNRDLQLEIDQLKHSLMKAEDDCKVERKHTLKLRHAMEQRPSQELLWELQQEKALLQARVQELEASVQEGKLDRSSPYIQVLEEDWRQALRDHQEQANTIFSLRKDLRQGEARRLRCMEEKEMFELQCLALRKDSKMYKDRIEAILLQMEEVAIERDQAIATREELHAQHARGLQEKDALRKQVRELGEKADELQLQVFQCEAQLLAVEGRLRRQQLETLVLSSDLEDGSPRRSQELSLPQDLEDTQLSDKGCLAGGGSPKQPFAALHQEQFCGTPMPSRTAGHWGRLLSGTHFAEAMRVLTTPMHTPSV

SEQ ID NO: 836628 - protein, 178 aa, Homo sapiens
MLRTALRGAPRLLSRVQPRAPCLRRLWGRGARPEVAGRRRAWAWGWRRSSSEQGPGPAAALGRVEAAHYQLVYTCKVCGTRSSKRISKLAYHQGVVIVTCPGCQNHHIIADNLGWFSDLNGKRNIEEILTARGEQVHRVAGEGALELVLEAAGAPTSTAAPEAGEDEGPPSPGKTEPS

SEQ ID NO: 836629 - protein, 84 aa, Homo sapiens
MGKYDQWEESPPLSANAFNPLNASASLPAAMPITAADGRSDHTLTSPGGGGKAKVSGRPSSSPLSQQLAPELAARSSVSSSLLS

SEQ ID NO: 836630 - protein, 2517 aa, Homo sapiens
MSGSTQPVAQTWRATEPRYPPHSLSYPVQIARTHTDVGLLEYQHHSRDYASHLSPGSIIQPQRRRPSLLSEFQPGNERSQELHLRPESHSYLPELGKSEMEFIESKRPRLELLPDPLLRPSPLLATGQPAGSEDLTKDRSLTGKLEPVSPPSPPHTDPELELVPPRLSKEELIQNMDRVDREITMVEQQISKLKKKQQQLEEEAAKPPEPEKPVSPPPIESKHRSLVQIIYDENRKKAEAAHRILEGLGPQVELPLYNQPSDTRQYHENIKINQAMRKKLILYFKRRNHARKQWEQKFCQRYDQLMEAWEKKVERIENNPRRRAKESKVREYYEKQFPEIRKQRELQERMQSRVGQRGSGLSMSAARSEHEVSEIIDGLSEQENLEKQMRQLAVIPPMLYDADQQRIKFINMNGLMADPMKVYKDRQVMNMWSEQEKETFREKFMQHPKNFGLIASFLERKTVAECVLYYYLTKKNENYKSLVRRSYRRRGKSQQQQQQQQQQQQQQQQQPMPRSSQEEKDEKEKEKEAEKEEEKPEVENDKEDLLKEKTDDTSGEDNDEKEAVASKGRKTANSQGRRKGRITRSMANEANSEEAITPQQSAELASMELNESSRWTEEEMETAKKGLLEHGRNWSAIARMVGSKTVSQCKNFYFNYKKRQNLDEILQQHKLKMEKERNARRKKKKAPAAASEEAAFPPVVEDEEMEASGVSGNEEEMVEEAEALHASGNEVPRGECSGPATVNNSSDTESIPSPHTEAAKDTGQNGPKPPATLGADGPPPGPPTPPPEDIPAPTEPTPASEATGAPTPPPAPPSPSAPPPVVPKEEKEEETAAAPPVEEGEEQKPPAAEELAVDTGKAEEPVKSECTEEAEEGPAKGKDAEAAEATAEGALKAEKKEGGSGRATTAKSSGAPQDSDSSATCSADEVDEAEGGDKNRLLSPRPSLLTPTGDPRANASPQKPLDLKQLKQRAAAIPPIQVTKVHEPPREDAAPTKPAPPAPPPPQNLQPESDAPQQPGSSPRGKSRSPAPPADKEAFAAEAQKLPGDPPCWTSGLPFPVPPREVIKASPHAPDPSAFSYAPPGHPLPLGLHDTARPVLPRPPTISNPPPLISSAKHPSVLERQIGAISQGMSVQLHVPYSEHAKAPVGPVTMGLPLPMDPKKLAPFSGVKQEQLSPRGQAGPPESLGVPTAQEASVLRGTALGSVPGGSITKGIPSTRVPSDSAITYRGSITHGTPADVLYKGTITRIIGEDSPSRLDRGREDSLPKGHVIYEGKKGHVLSYEGGMSVTQCSKEDGRSSSGPPHETAAPKRTYDMMEGRVGRAISSASIEGLMGRAIPPERHSPHHLKEQHHIRGSITQGIPRSYVEAQEDYLRREAKLLKREGTPPPPPPSRDLTEAYKTQALGPLKLKPAHEGLVATVKEAGRSIHEIPREELRHTPELPLAPRPLKEGSITQGTPLKYDTGASTTGSKKHDVRSLIGSPGRTFPPVHPLDVMADARALERACYEESLKSRPGTASSSGGSIARGAPVIVPELGKPRQSPLTYEDHGAPFAGHLPRGSPVTTREPTPRLQEGSLSSSKASQDRKLTSTPREIAKSPHSTVPEHHPHPISPYEHLLRGVSGVDLYRSHIPLAFDPTSIPRGIPLDAAAAYYLPRHLAPNPTYPHLYPPYLIRGYPDTAALENRQTIINDYITSQQMHHNTATAMAQRADMLRGLSPRESSLALNYAAGPRGIIDLSQVPHLPVLVPPTPGTPATAMDRLAYLPTAPQPFSSRHSSSPLSPGGPTHLTKPTTTSSSERERDRDRERDRDREREKSILTSTTTVEHAPIWRPGTEQSSGSSGSSGGGGGSSSRPASHSHAHQHSPISPRTQDALQQRPSVLHNTGMKGIITAVEPSTPTVLRSTSTSSPVRPAATFPPATHCPLGGTLDGVYPTLMEPVLLPKEAPRVARPERPRADTGHAFLAKPPARSGLEPASSPSKGSEPRPLVPPVSGHATIARTPAKNLAPHHASPDPPAPPASASDPHREKTQSKPFSIQELELRSLGYHGSSYSPEGVEPVSPVSSPSLTHDKGLPKHLEELDKSHLEGELRPKQPGPVKLGGEAAHLPHLRPLPESQPSSSPLLQTAPGVKGHQRVVTLAQHISEVITQDYTRHHPQQLSAPLPAPLYSFPGASCPVLDLRRPPSDLYLPPPDHGAPARGSPHSEGGKRSPEPNKTSVLGGGEDGIEPVSPPEGMTEPGHSRSAVYPLLYRDGEQTEPSRMGSKSPGNTSQPPAFFSKLTESNSAMVKSKKQEINKKLNTHNRNEPEYNISQPGTEIFNMPAITGTGLMTYRSQAVQEHASTNMGLEAIIRKALMGKYDQWEESPPLSANAFNPLNASASLPAAMPITAADGRSDHTLTSPGGGGKAKVSGRPSSRKAKSPAPGLASGDRPPSVSSVHSEGDCNRRTPLTNRVWEDRPSSAGSTPFPYNPLIMRLQAGVMASPPPPGLPAGSGPLAGPHHAWDEEPKPLLCSQYETLSDSE

SEQ ID NO: 836631 - protein, 2506 aa, Homo sapiens
MSGSTQPVAQTWRATEPRYPPHSLSYPVQIARTHTDVGLLEYQHHSRDYASHLSPGSIIQPQRRRPSLLSEFQPGNERSQELHLRPESHSYLPELGKSEMEFIESKRPRLELLPDPLLRPSPLLATGQPAGSEDLTKDRSLTGKLEPVSPPSPPHTDPELELVPPRLSKEELIQNMDRVDREITMVEQQISKLKKKQQQLEEEAAKPPEPEKPVSPPPIESKHRSLVQIIYDENRPLYNQPSDTRQYHENIKINQAMRKKLILYFKRRNHARKQWEQKFCQRYDQLMEAWEKKVERIENNPRRRAKESKVREYYEKQFPEIRKQRELQERMQSRVGQRGSGLSMSAARSEHEVSEIIDGLSEQENLEKQMRQLAVIPPMLYDADQQRIKFINMNGLMADPMKVYKDRQVMNMWSEQEKETFREKFMQHPKNFGLIASFLERKTVAECVLYYYLTKKNENYKSLVRRSYRRRGKSQQQQQQQQQQQQQQQQQPMPRSSQEEKDEKEKEKEAEKEEEKPEVENDKEDLLKEKTDDTSGEDNDEKEAVASKGRKTANSQGRRKGRITRSMANEANSEEAITPQQSAELASMELNESSRWTEEEMETAKKGLLEHGRNWSAIARMVGSKTVSQCKNFYFNYKKRQNLDEILQQHKLKMEKERNARRKKKKAPAAASEEAAFPPVVEDEEMEASGVSGNEEEMVEEAEALHASGNEVPRGECSGPATVNNSSDTESIPSPHTEAAKDTGQNGPKPPATLGADGPPPGPPTPPPEDIPAPTEPTPASEATGAPTPPPAPPSPSAPPPVVPKEEKEEETAAAPPVEEGEEQKPPAAEELAVDTGKAEEPVKSECTEEAEEGPAKGKDAEAAEATAEGALKAEKKEGGSGRATTAKSSGAPQDSDSSATCSADEVDEAEGGDKNRLLSPRPSLLTPTGDPRANASPQKPLDLKQLKQRAAAIPPIQVTKVHEPPREDAAPTKPAPPAPPPPQNLQPESDAPQQPGSSPRGKSRSPAPPADKEAEKPVFFPAFAAEAQKLPGDPPCWTSGLPFPVPPREVIKASPHAPDPSAFSYAPPGHPLPLGLHDTARPVLPRPPTISNPPPLISSAKHPSVLERQIGAISQGMSVQLHVPYSEHAKAPVGPVTMGLPLPMDPKKLAPFSGVKQEQLSPRGQAGPPESLGVPTAQEASVLRGTALGSVPGGSITKGIPSTRVPSDSAITYRGSITHGTPADVLYKGTITRIIGEDSPSRLDRGREDSLPKGHVIYEGKKGHVLSYEGGMSVTQCSKEDGRSSSGPPHETAAPKRTYDMMEGRVGRAISSASIEGLMGRAIPPERHSPHHLKEQHHIRGSITQGIPRSYVEAQEDYLRREAKLLKREGTPPPPPPSRDLTEAYKTQALGPLKLKPAHEGLVATVKEAGRSIHEIPREELRHTPELPLAPRPLKEGSITQGTPLKYDTGASTTGSKKHDVRSLIGSPGRTFPPVHPLDVMADARALERACYEESLKSRPGTASSSGGSIARGAPVIVPELGKPRQSPLTYEDHGAPFAGHLPRGSPVTTREPTPRLQEGSLSSSKASQDRKLTSTPREIAKSPHSTVPEHHPHPISPYEHLLRGVSGVDLYRSHIPLAFDPTSIPRGIPLDAAAAYYLPRHLAPNPTYPHLYPPYLIRGYPDTAALENRQTIINDYITSQQMHHNTATAMAQRADMLRGLSPRESSLALNYAAGPRGIIDLSQVPHLPVLVPPTPGTPATAMDRLAYLPTAPQPFSSRHSSSPLSPGGPTHLTKPTTTSSSERERDRDRERDRDREREKSILTSTTTVEHAPIWRPGTEQSSGSSGSSGGGGGSSSRPASHSHAHQHSPISPRTQDALQQRPSVLHNTGMKGIITAVEPSTPTVLRSTSTSSPVRPAATFPPATHCPLGGTLDGVYPTLMEPVLLPKEAPRVARPERPRADTGHAFLAKPPARSGLEPASSPSKGSEPRPLVPPVSGHATIARTPAKNLAPHHASPDPPAPPASASDPHREKTQSKPFSIQELELRSLGYHGSSYSPEGVEPVSPVSSPSLTHDKGLPKHLEELDKSHLEGELRPKQPGPVKLGGEAAHLPHLRPLPESQPSSSPLLQTAPGVKGHQRVVTLAQHISEVITQDYTRHHPQQLSAPLPAPLYSFPGASCPVLDLRRPPSDLYLPPPDHGAPARGSPHSEGGKRSPEPNKTSVLGGGEDGIEPVSPPEGMTEPGHSRSAVYPLLYRDGEQTEPSRMGSKSPGNTSQPPAFFSKLTESNSAMVKSKKQEINKKLNTHNRNEPEYNISQPGTEIFNMPAITGTGLMTYRSQAVQEHASTNMGLEAIIRKALMGKYDQWEESPPLSANAFNPLNASASLPAAMPITAADGRSDHTLTSPGGGGKAKVSGRPSSRKAKSPAPGLASGDRPPSVSSVHSEGDCNRRTPLTNRVWEDRPSSAGSTPFPYNPLIMRLQAGVMASPPPPGLPAGSGPLAGPHHAWDEEPKPLLCSQYETLSDSE

SEQ ID NO: 836632 - protein, 2697 aa, Homo sapiens
MSGSTQPVAQTWRATEPRYPPHSLSYPVQIARTHTDVGLLEYQHHSRDYASHLSPGSIIQPQRRRPSLLSEFQPGNERSQELHLRPESHSYLPELGKSEMEFIESKRPRLELLPDPLLRPSPLLATGQPAGSEDLTKDRSLTGKLEPVSPPSPPHTDPELELVPPRLSKEELIQNMDRVDREITMVEQQISKLKKKQQQLEEEAAKPPEPEKPVSPPPIESKHRSLVQIIYDENRKKAEAAHRILEGLGPQVELPLYNQPSDTRQYHENIKINQAMRKKLILYFKRRNHARKQWEQKFCQRYDQLMEAWEKKVERIENNPRRRAKESKVREYYEKQFPEIRKQRELQERMQSRVGQRGSGLSMSAARSEHEVSEIIDGLSEQENLEKQMRQLAVIPPMLYDADQQRIKFINMNGLMADPMKVYKDRQVMNMWSEQEKETFREKFMQHPKNFGLIASFLERKTVAECVLYYYLTKKNENYKSLVRRSYRRRGKSQQQQQQQQQQQQQQQQQPMPRSSQEEKDEKEKEKEAEKEEEKPEVENDKEDLLKEKTDDTSGEDNDEKEAVASKGRKTANSQGRRKGRITRSMANEANSEEAITPQQSAELASMELNESSRWTEEEMETAKKGLLEHGRNWSAIARMVGSKTVSQCKNFYFNYKKRQNLDEILQQHKLKMEKERNARRKKKKAPAAASEEAAFPPVVEDEEMEASGVSGNEEEMVEEAEALHASGNEVPRGECSGPATVNNSSDTESIPSPHTEAAKDTGQNGPKPPATLGADGPPPGPPTPPPEDIPAPTEPTPASEATGAPTPPPAPPSPSAPPPVVPKEEKEEETAAAPPVEEGEEQKPPAAEELAVDTGKAEEPVKSECTEEAEEGPAKGKDAEAAEATAEGALKAEKKEGGSGRATTAKSSGAPQDSDSSATCSADEVDEAEGGDKNRLLSPRPSLLTPTGDPRANASPQKPLDLKQLKQRAAAIPPIQVTKVHEPPREDAAPTKPAPPAPPPPQNLQPESDAPQQPGSSPRGKSRSPAPPADKEAEKPVFFPAFAAEAQKLPGDPPCWTSGLPFPVPPREVIKASPHAPDPSAFSYAPPGHPLPLGLHDTARPVLPRPPTISNPPPLISSAKHPSVLERQIGAISQGMSVQLHVPYSEHAKAPVGPVTMGLPLPMDPKKLAPFSGVKQEQLSPRGQAGPPESLGVPTAQEASVLRGTALGSVPGGSITKGIPSTRVPSDSAITYRGSITHGTPADVLYKGTITRIIGEDSPSRLDRGREDSLPKGHVIYEGKKGHVLSYEGGMSVTQCSKEDGRSSSGPPHETAAPKRTYDMMEGRVGRAISSASIEGLMGRAIPPERHSPHHLKEQHHIRGSITQGIPRSYVEAQEDYLRREAKLLKREGTPPPPPPSRDLTEAYKTQALGPLKLKPAHEGLVATVKEAGRSIHEIPREELRHTPELPLAPRPLKEGSITQGTPLKYDTGASTTGSKKHDVRSLIGSPGRTFPPVHPLDVMADARALERACYEESLKSRPGTASSSGGSIARGAPVIVPELGKPRQSPLTYEDHGAPFAGHLPRGSPVTTREPTPRLQEGSLSSSKASQDRKLTSTPREIAKSPHSTVPEHHPHPISPYEHLLRGVSGVDLYRSHIPLAFDPTSIPRGIPLDAAAAYYLPRHLAPNPTYPHLYPPYLIRGYPDTAALENRQTIINDYITSQQMHHNTATAMAQRADMLRGLSPRESSLALNYAAGPRGIIDLSQVPHLPVLVPPTPGTPATAMDRLAYLPTAPQPFSSRHSSSPLSPGGPTHLTKPTTTSSSERERDRDRERDRDREREKSILTSTTTVEHAPIWRPGTEQSSGSSGSSGGGGGSSSRPASHSHAHQHSPISPRTQDALQQRPSVLHNTGMKGIITAVEPSTPTVLRSTSTSSPVRPAATFPPATHCPLGGTLDGVYPTLMEPVLLPKEAPRVARPERPRADTGHAFLAKPPARSGLEPASSPSKGSEPRPLVPPVSGHATIARTPAKNLAPHHASPDPPAPPASASDPHREKTQSKPFSIQELELRSLGYHGSSYSPEGVEPVSPVSSPSLTHDKGLPKHLEELDKSHLEGELRPKQPGPVKLGGEAAHLPHLRPLPESQPSSSPLLQTAPGVKGHQRVVTLAQHISVTTRSLLLLVTFAPGGTRPGEGMGNPTALLSWRGGWGIQGMALGGSRAWVRVRSQSPEHRHHHRPLIHGRSLGCEPMASSRAMRPSWWPRFLSVMGWSHQPSANYQLGTADHSPTPMHTGTRRPRGWRAGPQSPRKLAPPRILPRAPSSPSPPPEGSVRRVLPDSGPPHFLQEVITQDYTRHHPQQLSAPLPAPLYSFPGASCPVLDLRRPPSDLYLPPPDHGAPARGSPHSEGGKRSPEPNKTSVLGGGEDGIEPVSPPEGMTEPGHSRSAVYPLLYRDGEQTEPSRMGSKSPGNTSQPPAFFSKLTESNSAMVKSKKQEINKKLNTHNRNEPEYNISQPGTEIFNMPAITGTGLMTYRSQAVQEHASTNMGLEAIIRKALMGKYDQWEESPPLSANAFNPLNASASLPAAMPITAADGRSDHTLTSPGGGGKAKVSGRPSSRKAKSPAPGLASGDRPPSVSSVHSEGDCNRRTPLTNRVWEDRPSSAGSTPFPYNPLIMRLQAGVMASPPPPGLPAGSGPLAGPHHAWDEEPKPLLCSQYETLSDSE

SEQ ID NO: 836633 - protein, 2479 aa, Homo sapiens
MSGSTQPVAQTWRATEPRYPPHSLSYPVQIARTHTDVGLLEYQHHSRDYASHLSPGSIIQPQRRRPSLLSEFQPGNERSQELHLRPESHSYLPELGKSEMEFIESKRPRLELLPDPLLRPSPLLATGQPAGSEDLTKDRSLTGKLEPVSPPSPPHTDPELELVPPRLSKEELIQNMDRVDREITMVEQQISKLKKKQQQLEEEAAKPPEPEKPVSPPPIESKHRSLVQIIYDENRKKAEAAHRILEGLGPQVELPLYNQPSDTRQYHENIKINQAMRKKLILYFKRRNHARKQWEQKFCQRYDQLMEAWEKKVERIENNPRRRAKESKVREYYEKQFPEIRKQRELQERMQSRVGQRGSGLSMSAARSEHEVSEIIDGLSEQENLEKQMRQLAVIPPMLYDADQQRIKFINMNGLMADPMKVYKDRQVMNMWSEQEKETFREKFMQHPKNFGLIASFLERKTVAECVLYYYLTKKNENYKSLVRRSYRRRGKSQQQQQQQQQQQQQQQQQPMPRSSQEEKDEKEKEKEAEKEEEKPEVENDKEDLLKEKTDDTSGEDNDEKEAVASKGRKTANSQGRRKGRITRSMANEANSEEAITPQQSAELASMELNESSRWTEEEMETAKKGLLEHGRNWSAIARMVGSKTVSQCKNFYFNYKKRQNLDEILQQHKLKMEKERNARRKKKKAPAAASEEAAFPPVVEDEEMEASGVSGNEEEMVEEAEALHASGNEVPRGECSGPATVNNSSDTESIPSPHTEAAKDTGQNGPKPPATLGADGPPPGPPTPPPEDIPAPTEPTPASEATGAPTPPPAPPSPSAPPPVVPKEEKEEETAAAPPVEEGEEQKPPAAEELAVDTGKAEEPVKSECTEEAEEGPAKGKDAEAAEATAEGALKAEKKEGGSGRATTAKSSGAPQDSDSSATCSADEVDEAEGGDKNRLLSPRPSLLTPTGDPRANASPQKPLDLKQLKQRAAAIPPIQVTKVHEPPREDAAPTKPAPPAPPPPQNLQPESDAPQQPGSSPRGKSRSPAPPADKEAEKPVFFPAFAAEAQKLPGDPPCWTSGLPFPVPPREVIKASPHAPDPSAFSYAPPGHPLPLGLHDTARPVLPRPPTISNPPPLISSAKHPSVLERQIGAISQGMSVQLHVPYSEHAKAPVGPVTMGLPLPMDPKKLAPFSGVKQEQLSPRGQAGPPESLGVPTAQEASVLRGTALGSVPGGSITKGIPSTRVPSDSAITYRGSITHGTPADVLYKGTITRIIGEDSPSRLDRGREDSLPKGHVIYEGKKGHVLSYEGGMSVTQCSKEDGRSSSGPPHETAAPKRTYDMMEGRVGRAISSASIEGLMGRAIPPERHSPHHLKEQHHIRGSITQGIPRSYVEAQEDYLRREAKLLKREGTPPPPPPSRDLTEAYKTQALGPLKLKPAHEGLVATVKEAGRSIHEIPREELRHTPELPLAPRPLKEGSITQGTPLKYDTGASTTGSKKHDVRSLIGSPGRTFPPVHPLDVMADARALERACYEESLKSRPGTASSSGGSIARGAPVIVPELGKPRQSPLTYEDHGAPFAGHLPRGSPVTTREPTPRLQEGSLSSSKASQDRKLTSTPREIAKSPHSTVPEHHPHPISPYEHLLRGVSGVDLYRSHIPLAFDPTSIPRGIPLDAAAAYYLPRHLAPNPTYPHLYPPYLIRGYPDTAALENRQTIINDYITSQQMHHNTATAMAQRADMLRGLSPRESSLALNYAAGPRGIIDLSQVPHLPVLVPPTPGTPATAMDRLAYLPTAPQPFSSRHSSSPLSPGGPTHLTKPTTTSSSERERDRDRERDRDREREKSILTSTTTVEHAPIWRPGTEQSSGSSGSSGGGGGSSSRPASHSHAHQHSPISPRTQDALQQRPSVLHNTGMKGIITAVEPSTPTVLRSTSTSSPVRPAATFPPATHCPLGGTLDGVYPTLMEPVLLPKEAPRVARPERPRADTGHAFLAKPPARSGLEPASSPSKGSEPRPLVPPVSGHATIARTPAKNLAPHHASPDPPAPPASASDPHREKTQSKPFSIQELELRSLGYHGSSYSPEGVEPVSPVSSPSLTHDKGLPKHLEELDKSHLEGELRPKQPGPVKLGGEAAHLPHLRPLPESQPSSSPLLQTAPGVKGHQRVVTLAQHISEVITQDYTRHHPQQLSAPLPAPLYSFPGASCPVLDLRRPPSDLYLPPPDHGAPARGSPHSEGGKRSPEPNKTSVLGGGEDGIEPVSPPEGMTEPGHSRSAVYPLLYRDGEQTEPSRMGSKSPGNTSQPPAFFSKLTESNSAMVKSKKQEINKKLNTHNRNEPEYNISQPGTEIFNMPAITGTGLMTYRSQAVQEHASTNMGLEAIIRKALMGGGGKAKVSGRPSSRKAKSPAPGLASGDRPPSVSSVHSEGDCNRRTPLTNRVWEDRPSSAGSTPFPYNPLIMRLQAGVMASPPPPGLPAGSGPLAGPHHAWDEEPKPLLCSQYETLSDSE

SEQ ID NO: 836634 - protein, 2452 aa, Homo sapiens
MSGSTQPVAQTWRATEPRYPPHSLSYPVQIARTHTDVGLLEYQHHSRDYASHLSPGSIIQPQRRRPSLLSEFQPGNERSQELHLRPESHSYLPELGKSEMEFIESKRPRLELLPDPLLRPSPLLATGQPAGSEDLTKDRSLTGKLEPVSPPSPPHTDPELELVPPRLSKEELIQNMDRVDREITMVEQQISKLKKKQQQLEEEAAKPPEPEKPVSPPPIESKHRSLVQIIYDENRPLYNQPSDTRQYHENIKINQAMRKKLILYFKRRNHARKQWEQKFCQRYDQLMEAWEKKVERIENNPRRRAKESKVNLEKQMRQLAVIPPMLYDADQQRIKFINMNGLMADPMKVYKDRQVMNMWSEQEKETFREKFMQHPKNFGLIASFLERKTVAECVLYYYLTKKNENYKSLVRRSYRRRGKSQQQQQQQQQQQQQQQQQPMPRSSQEEKDEKEKEKEAEKEEEKPEVENDKEDLLKEKTDDTSGEDNDEKEAVASKGRKTANSQGRRKGRITRSMANEANSEEAITPQQSAELASMELNESSRWTEEEMETAKKGLLEHGRNWSAIARMVGSKTVSQCKNFYFNYKKRQNLDEILQQHKLKMEKERNARRKKKKAPAAASEEAAFPPVVEDEEMEASGVSGNEEEMVEEAEALHASGNEVPRGECSGPATVNNSSDTESIPSPHTEAAKDTGQNGPKPPATLGADGPPPGPPTPPPEDIPAPTEPTPASEATGAPTPPPAPPSPSAPPPVVPKEEKEEETAAAPPVEEGEEQKPPAAEELAVDTGKAEEPVKSECTEEAEEGPAKGKDAEAAEATAEGALKAEKKEGGSGRATTAKSSGAPQDSDSSATCSADEVDEAEGGDKNRLLSPRPSLLTPTGDPRANASPQKPLDLKQLKQRAAAIPPIQVTKVHEPPREDAAPTKPAPPAPPPPQNLQPESDAPQQPGSSPRGKSRSPAPPADKEAEKPVFFPAFAAEAQKLPGDPPCWTSGLPFPVPPREVIKASPHAPDPSAFSYAPPGHPLPLGLHDTARPVLPRPPTISNPPPLISSAKHPSVLERQIGAISQGMSVQLHVPYSEHAKAPVGPVTMGLPLPMDPKKLAPFSGVKQEQLSPRGQAGPPESLGVPTAQEASVLRGTALGSVPGGSITKGIPSTRVPSDSAITYRGSITHGTPADVLYKGTITRIIGEDSPSRLDRGREDSLPKGHVIYEGKKGHVLSYEGGMSVTQCSKEDGRSSSGPPHETAAPKRTYDMMEGRVGRAISSASIEGLMGRAIPPERHSPHHLKEQHHIRGSITQGIPRSYVEAQEDYLRREAKLLKREGTPPPPPPSRDLTEAYKTQALGPLKLKPAHEGLVATVKEAGRSIHEIPREELRHTPELPLAPRPLKEGSITQGTPLKYDTGASTTGSKKHDVRSLIGSPGRTFPPVHPLDVMADARALERACYEESLKSRPGTASSSGGSIARGAPVIVPELGKPRQSPLTYEDHGAPFAGHLPRGSPVTTREPTPRLQEGSLSSSKASQDRKLTSTPREIAKSPHSTVPEHHPHPISPYEHLLRGVSGVDLYRSHIPLAFDPTSIPRGIPLDAAAAYYLPRHLAPNPTYPHLYPPYLIRGYPDTAALENRQTIINDYITSQQMHHNTATAMAQRADMLRGLSPRESSLALNYAAGPRGIIDLSQVPHLPVLVPPTPGTPATAMDRLAYLPTAPQPFSSRHSSSPLSPGGPTHLTKPTTTSSSERERDRDRERDRDREREKSILTSTTTVEHAPIWRPGTEQSSGSSGSSGGGGGSSSRPASHSHAHQHSPISPRTQDALQQRPSVLHNTGMKGIITAVEPSTPTVLRSTSTSSPVRPAATFPPATHCPLGGTLDGVYPTLMEPVLLPKEAPRVARPERPRADTGHAFLAKPPARSGLEPASSPSKGSEPRPLVPPVSGHATIARTPAKNLAPHHASPDPPAPPASASDPHREKTQSKPFSIQELELRSLGYHGSSYSPEGVEPVSPVSSPSLTHDKGLPKHLEELDKSHLEGELRPKQPGPVKLGGEAAHLPHLRPLPESQPSSSPLLQTAPGVKGHQRVVTLAQHISEVITQDYTRHHPQQLSAPLPAPLYSFPGASCPVLDLRRPPSDLYLPPPDHGAPARGSPHSEGGKRSPEPNKTSVLGGGEDGIEPVSPPEGMTEPGHSRSAVYPLLYRDGEQTEPSRMGSKSPGNTSQPPAFFSKLTESNSAMVKSKKQEINKKLNTHNRNEPEYNISQPGTEIFNMPAITGTGLMTYRSQAVQEHASTNMGLEAIIRKALMGKYDQWEESPPLSANAFNPLNASASLPAAMPITAADGRSDHTLTSPGGGGKAKVSGRPSSRKAKSPAPGLASGDRPPSVSSVHSEGDCNRRTPLTNRVWEDRPSSAGSTPFPYNPLIMRLQAGVMASPPPPGLPAGSGPLAGPHHAWDEEPKPLLCSQYETLSDSE

SEQ ID NO: 836635 - protein, 2507 aa, Homo sapiens
MSGSTQPVAQTWRATEPRYPPHSLSYPVQIARTHTDVGLLEYQHHSRDYASHLSPGSIIQPQRRRPSLLSEFQPGNERSQELHLRPESHSYLPELGKSEMEFIESKRPRLELLPDPLLRPSPLLATGQPAGSEDLTKDRSLTGKLEPVSPPSPPHTDPELELVPPRLSKEELIQNMDRVDREITMVEQQISKLKKKQQQLEEEAAKPPEPEKPVSPPPIESKHRSLVQIIYDENRKKAEAAHRILEGLGPQVELPLYNQPSDTRQYHENIKINQAMRKKLILYFKRRNHARKQWEQKFCQRYDQLMEAWEKKVERIENNPRRRAKESKVREYYEKQFPEIRKQRELQERMQSRVGQRGSGLSMSAARSEHEVSEIIDGLSEQENLEKQMRQLAVIPPMLYDADQQRIKFINMNGLMADPMKVYKDRQVMNMWSEQEKETFREKFMQHPKNFGLIASFLERKTVAECVLYYYLTKKNENYKSLVRRSYRRRGKSQQQQQQQQQQQQQQQQQPMPRSSQEEKDEKEKEKEAEKEEEKPEVENDKEDLLKEKTDDTSGEDNDEKEAVASKGRKTANSQGRRKGRITRSMANEANSEEAITPQQSAELASMELNESSRWTEEEMETAKKGLLEHGRNWSAIARMVGSKTVSQCKNFYFNYKKRQNLDEILQQHKLKMEKERNARRKKKKAPAAASEEAAFPPVVEDEEMEASGVSGNEEEMVEEAEALHASGNEVPRGECSGPATVNNSSDTESIPSPHTEAAKDTGQNGPKPPATLGADGPPPGPPTPPPEDIPAPTEPTPASEATGAPTPPPAPPSPSAPPPVVPKEEKEEETAAAPPVEEGEEQKPPAAEELAVDTGKAEEPVKSECTEEAEEGPAKGKDAEAAEATAEGALKAEKKEGGSGRATTAKSSGAPQDSDSSATCSADEVDEAEGGDKNRLLSPRPSLLTPTGDPRANASPQKPLDLKQLKQRAAAIPPIQVTKVHEPPREDAAPTKPAPPAPPPPQNLQPESDAPQQPGSSPRGKSRSPAPPADKEAEKPVFFPAFAAEAQKLPGDPPCWTSGLPFPVPPREVIKASPHAPDPSAFSYAPPGHPLPLGLHDTARPVLPRPPTISNPPPLISSAKHPSVLERQIGAISQGMSVQLHVPYSEHAKAPVGPVTMGLPLPMDPKKLAPFSGVKQEQLSPRGQAGPPESLGVPTAQEASVLRGTALGSVPGGSITKGIPSTRVPSDSAITYRGSITHGTPADVLYKGTITRIIGEDSPSRLDRGREDSLPKGHVIYEGKKGHVLSYEGGMSVTQCSKEDGRSSSGPPHETAAPKRTYDMMEGRVGRAISSASIEGLMGRAIPPERHSPHHLKEQHHIRGSITQGIPRSYVEAQEDYLRREAKLLKREGTPPPPPPSRDLTEAYKTQALGPLKLKPAHEGLVATVKEAGRSIHEIPREELRHTPELPLAPRPLKEGSITQGTPLKYDTGASTTGSKKHDVRSLIGSPGRTFPPVHPLDVMADARALERACYEESLKSRPGTASSSGGSIARGAPVIVPELGKPRQSPLTYEDHGAPFAGHLPRGSPVTTREPTPRLQEGSLSSSKASQDRKLTSTPREIAKSPHSTVPEHHPHPISPYEHLLRGVSGVDLYRSHIPLAFDPTSIPRGIPLDAAAAYYLPRHLAPNPTYPHLYPPYLIRGYPDTAALENRQTIINDYITSQQMHHNTATAMAQRADMLRGLSPRESSLALNYAAGPRGIIDLSQVPHLPVLVPPTPGTPATAMDRLAYLPTAPQPFSSRHSSSPLSPGGPTHLTKPTTTSSSERERDRDRERDRDREREKSILTSTTTVEHAPIWRPGTEQSSGSSGSSGGGGGSSSRPASHSHAHQHSPISPRTQDALQQRPSVLHNTGMKGIITAVEPSTPTVLRSTSTSSPVRPAATFPPATHCPLGGTLDGVYPTLMEPVLLPKEAPRVARPERPRADTGHAFLAKPPARSGLEPASSPSKGSEPRPLVPPVSGHATIARTPAKNLAPHHASPDPPAPPASASDPHREKTQSKPFSIQELELRSLGYHGSSYSPEGVEPVSPVSSPSLTHDKGLPKHLEELDKSHLEGELRPKQPGPVKLGGEAAHLPHLRPLPESQPSSSPLLQTAPGVKGHQRVVTLAQHISEVITQDYTRHHPQQLSAPLPAPLYSFPGASCPVLDLRRPPSDLYLPPPDHGAPARGSPHSEGGKRSPEPNKTSVLGGGEDGIEPVSPPEGMTEPGHSRSAVYPLLYRDGEQTEPSRMGSKSPGNTSQPPAFFSKLTESNSAMVKSKKQEINKKLNTHNRNEPEYSLMTYRSQAVQEHASTNMGLEAIIRKALMGKYDQWEESPPLSANAFNPLNASASLPAAMPITAADGRSDHTLTSPGGGGKAKVSGRPSSRKAKSPAPGLASGDRPPSVSSVHSEGDCNRRTPLTNRVWEDRPSSAGSTPFPYNPLIMRLQAGVMASPPPPGLPAGSGPLAGPHHAWDEEPKPLLCSQYETLSDSE

SEQ ID NO: 836636 - protein, 2563 aa, Homo sapiens
MSGSTQPVAQTWRATEPRYPPHSLSYPVQIARTHTDVGLLEYQHHSRDYASHLSPGSIIQPQRRRPSLLSEFQPGNERSQELHLRPESHSYLPELGKSEMEFIESKRPRLELLPDPLLRPSPLLATGQPAGSEDLTKDRSLTGKLEPVSPPSPPHTDPELELVPPRLSKEELIQNMDRVDREITMVEQQISKLKKKQQQLEEEAAKPPEPEKPVSPPPIESKHRSLVQIIYDENRKKAEAAHRILEGLGPQVELPLYNQPSDTRQYHENIKINQAMRKKLILYFKRRNHARKQWEQKFCQRYDQLMEAWEKKVERIENNPRRRAKESKVREYYEKQFPEIRKQRELQERMQSRVGQRGSGLSMSAARSEHEVSEIIDGLSEQENLEKQMRQLAVIPPMLYDADQQRIKFINMNGLMADPMKVYKDRQVMNMWSEQEKETFREKFMQHPKNFGLIASFLERKTVAECVLYYYLTKKNENYKSLVRRSYRRRGKSQQQQQQQQQQQQQQQQQPMPRSSQEEKDEKEKEKEAEKEEEKPEVENDKEDLLKEKTDDTSGEDNDEKEAVASKGRKTANSQGRRKGRITRSMANEANSEEAITPQQSAELASMELNESSRWTEEEMETAKKGLLEHGRNWSAIARMVGSKTVSQCKNFYFNYKKRQNLDEILQQHKLKMEKERNARRKKKKAPAAASEEAAFPPVVEDEEMEASGVSGNEEEMVEEAEALHASGNEVPRGECSGPATVNNSSDTESIPSPHTEAAKDTGQNGPKPPATLGADGPPPGPPTPPPEDIPAPTEPTPASEATGAPTPPPAPPSPSAPPPVVPKEEKEEETAAAPPVEEGEEQKPPAAEELAVDTGKAEEPVKSECTEEAEEGPAKGKDAEAAEATAEGALKAEKKEGGSGRATTAKSSGAPQDSDSSATCSADEVDEAEGGDKNRLLSPRPSLLTPTGDPRANASPQKPLDLKQLKQRAAAIPPIQVTKVHEPPREDAAPTKPAPPAPPPPQNLQPESDAPQQPGSSPRGKSRSPAPPADKEAEKPVFFPAFAAEAQKLPGDPPCWTSGLPFPVPPREVIKASPHAPDPSAFSYAPPGHPLPLGLHDTARPVLPRPPTISNPPPLISSAKHPSVLERQIGAISQGMSVQLHVPYSEHAKAPVGPVTMGLPLPMDPKKLAPFSGVKQEQLSPRGQAGPPESLGVPTAQEASVLRGTALGSVPGGSITKGIPSTRVPSDSAITYRGSITHGTPADVLYKGTITRIIGEDSPSRLDRGREDSLPKGHVIYEGKKGHVLSYEGGMSVTQCSKEDGRSSSGPPHETAAPKRTYDMMEGRVGRAISSASIEGLMGRAIPPERHSPHHLKEQHHIRGSITQGIPRSYVEAQEDYLRREAKLLKREGTPPPPPPSRDLTEAYKTQALGPLKLKPAHEGLVATVKEAGRSIHEIPREELRHTPELPLAPRPLKEGSITQGTPLKYDTGASTTGSKKHDVRSLIGSPGRTFPPVHPLDVMADARALERACYEESLKSRPGTASSSGGSIARGAPVIVPELGKPRQSPLTYEDHGAPFAGHLPRGSPVTTREPTPRLQEGSLSSSKASQDRKLTSTPREIAKSPHSTVPEHHPHPISPYEHLLRGVSGVDLYRSHIPLAFDPTSIPRGIPLDAAAAYYLPRHLAPNPTYPHLYPPYLIRGYPDTAALENRQTIINDYITSQQMHHNTATAMAQRADMLRGLSPRESSLALNYAAGPRGIIDLSQVPHLPVLVPPTPGTPATAMDRLAYLPTAPQPFSSRHSSSPLSPGGPTHLTKPTTTSSSERERDRDRERDRDREREKSILTSTTTVEHAPIWRPGTEQSSGSSGSSGGGGGSSSRPASHSHAHQHSPISPRTQDALQQRPSVLHNTGMKGIITAVEPSTPTVLRSTSTSSPVRPAATFPPATHCPLGGTLDGVYPTLMEPVLLPKEAPRVARPERPRADTGHAFLAKPPARSGLEPASSPSKGSEPRPLVPPVSGHATIARTPAKNLAPHHASPDPPAPPASASDPHREKTQSKPFSIQELELRSLGKTTLTAATFIDAIIMRQIAHDKGAREGGALANGSPRDGYHGSSYSPEGVEPVSPVSSPSLTHDKGLPKHLEELDKSHLEGELRPKQPGPVKLGGEAAHLPHLRPLPESQPSSSPLLQTAPGVKGHQRVVTLAQHISEVITQDYTRHHPQQLSAPLPAPLYSFPGASCPVLDLRRPPSDLYLPPPDHGAPARGSPHSEGGKRSPEPNKTSVLGGGEDGIEPVSPPEGMTEPGHSRSAVYPLLYRDGEQTEPSRMGSKSPGNTSQPPAFFSKLTESNSAMVKSKKQEINKKLNTHNRNEPEYNISQPGTEIFNMPAITGTGLMTYRSQAVQEHASTNMGLEAIIRKALMGKYDQWEESPPLSANAFNPLNASASLPAAMPITAADGRSDHTLTSPGGGGKAKVSGRPSSRKAKSPAPGLASGDRPPSVSSVHSEGDCNRRTPLTNRVWEDRPSSAGSTPFPYNPLIMRLQAGVMASPPPPGLPAGSGPLAGPHHAWDEEPKPLLCSQYETLSDSE

SEQ ID NO: 836637 - protein, 2075 aa, Homo sapiens
MSGSTQPVAQTWRATEPRYPPHSLSYPVQIARTHTDVGLLEYQHHSRDYASHLSPGSIIQPQRRRPSLLSEFQPGNERSQELHLRPESHSYLPELGKSEMEFIESKRPRLELLPDPLLRPSPLLATGQPAGSEDLTKDRSLTGKLEPVSPPSPPHTDPELELVPPRLSKEELIQNMDRVDREITMVEQQISKLKKKQQQLEEEAAKPPEPEKPVSPPPIESKHRSLVQIIYDENRKKAEAAHRILEGLGPQVELPLYNQPSDTRQYHENIKINQAMRKKLILYFKRRNHARKQWEQKFCQRYDQLMEAWEKKVERIENNPRRRAKESKVREYYEKQFPEIRKQRELQERMQSRVGQRGSGLSMSAARSEHEVSEIIDGLSEQENLEKQMRQLAVIPPMLYDADQQRIKFINMNGLMADPMKVYKDRQVMNMWSEQEKETFREKFMQHPKNFGLIASFLERKTVAECVLYYYLTKKNENYKSLVRRSYRRRGKSQQQQQQQQQQQQQQQQQPMPRSSQEEKDEKEKEKEAEKEEEKPEVENDKEDLLKEKTDDTSGEDNDEKEAVASKGRKTANSQGRRKGRITRSMANEANSEEAITPQQSAELASMELNESSRWTEEEMETAKKGLLEHGRNWSAIARMVGSKTVSQCKNFYFNYKKRQNLDEILQQHKLKMEKERNARRKKKKAPAAASEEAAFPPVVEDEEMEASGVSGNEEEMVEEAEALHASGNEVPRGECSGPATVNNSSDTESIPSPHTEAAKDTGQNGPKPPATLGADGPPPGPPTPPPEDIPAPTEPTPASEATGAPTPPPAPPSPSAPPPVVPKEEKEEETAAAPPVEEGEEQKPPAAEELAVDTGKAEEPVKSECTEEAEEGPAKGKDAEAAEATAEGALKAEKKEGGSGRATTAKSSGAPQDSDSSATCSADEVDEAEGGDKNRLLSPRPSLLTPTGDPRANASPQKPLDLKLKPAHEGLVATVKEAGRSIHEIPREELRHTPELPLAPRPLKEGSITQGTPLKYDTGASTTGSKKHDVRSLIGSPGRTFPPVHPLDVMADARALERACYEESLKSRPGTASSSGGSIARGAPVIVPELGKPRQSPLTYEDHGAPFAGHLPRGSPVTTREPTPRLQEGSLSSSKASQDRKLTSTPREIAKSPHSTVPEHHPHPISPYEHLLRGVSGVDLYRSHIPLAFDPTSIPRGIPLDAAAAYYLPRHLAPNPTYPHLYPPYLIRGYPDTAALENRQTIINDYITSQQMHHNTATAMAQRADMLRGLSPRESSLALNYAAGPRGIIDLSQVPHLPVLVPPTPGTPATAMDRLAYLPTAPQPFSSRHSSSPLSPGGPTHLTKPTTTSSSERERDRDRERDRDREREKSILTSTTTVEHAPIWRPGTEQSSGSSGSSGGGGGSSSRPASHSHAHQHSPISPRTQDALQQRPSVLHNTGMKGIITAVEPSTPTVLRSTSTSSPVRPAATFPPATHCPLGGTLDGVYPTLMEPVLLPKEAPRVARPERPRADTGHAFLAKPPARSGLEPASSPSKGSEPRPLVPPVSGHATIARTPAKNLAPHHASPDPPAPPASASDPHREKTQSKPFSIQELELRSLGYHGSSYSPEGVEPVSPVSSPSLTHDKGLPKHLEELDKSHLEGELRPKQPGPVKLGGEAAHLPHLRPLPESQPSSSPLLQTAPGVKGHQRVVTLAQHISEVITQDYTRHHPQQLSAPLPAPLYSFPGASCPVLDLRRPPSDLYLPPPDHGAPARGSPHSEGGKRSPEPNKTSVLGGGEDGIEPVSPPEGMTEPGHSRSAVYPLLYRDGEQTEPSRMGSKSPGNTSQPPAFFSKLTESNSAMVKSKKQEINKKLNTHNRNEPEYNISQPGTEIFNMPAITGTGLMTYRSQAVQEHASTNMGLEAIIRKALMGKYDQWEESPPLSANAFNPLNASASLPAAMPITAADGRSDHTLTSPGGGGKAKVSGRPSSRKAKSPAPGLASGDRPPSVSSVHSEGDCNRRTPLTNRVWEDRPSSAGSTPFPYNPLIMRLQAGVMASPPPPGLPAGSGPLAGPHHAWDEEPKPLLCSQYETLSDSE

SEQ ID NO: 836638 - protein, 2525 aa, Homo sapiens
MSGSTQPVAQTWRATEPRYPPHSLSYPVQIARTHTDVGLLEYQHHSRDYASHLSPGSIIQPQRRRPSLLSEFQPGNERSQELHLRPESHSYLPELGKSEMEFIESKRPRLELLPDPLLRPSPLLATGQPAGSEDLTKDRSLTGKLEPVSPPSPPHTDPELELVPPRLSKEELIQNMDRVDREITMVEQQISKLKKKQQQLEEEAAKPPEPEKPVSPPPIESKHRSLVQIIYDENRKKAEAAHRILEGLGPQVELPLYNQPSDTRQYHENIKINQAMRKKLILYFKRRNHARKQWEQKFCQRYDQLMEAWEKKVERIENNPRRRAKESKVREYYEKQFPEIRKQRELQERMQSRVGQRGSGLSMSAARSEHEVSEIIDGLSEQENLEKQMRQLAVIPPMLYDADQQRIKFINMNGLMADPMKVYKDRQVMNMWSEQEKETFREKFMQHPKNFGLIASFLERKTVAECVLYYYLTKKNENYKSLVRRSYRRRGKSQQQQQQQQQQQQQQQQQPMPRSSQEEKDEKEKEKEAEKEEEKPEVENDKEDLLKEKTDDTSGEDNDEKEAVASKGRKTANSQGRRKGRITRSMANEANSEEAITPQQSAELASMELNESSRWTEEEMETAKKGLLEHGRNWSAIARMVGSKTVSQCKNFYFNYKKRQNLDEILQQHKLKMEKERNARRKKKKAPAAASEEAAFPPVVEDEEMEASGVSGNEEEMVEEAEALHASGNEVPRGECSGPATVNNSSDTESIPSPHTEAAKDTGQNGPKPPATLGADGPPPGPPTPPPEDIPAPTEPTPASEATGAPTPPPAPPSPSAPPPVVPKEEKEEETAAAPPVEEGEEQKPPAAEELAVDTGKAEEPVKSECTEEAEEGPAKGKDAEAAEATAEGALKAEKKEGGSGRATTAKSSGAPQDSDSSATCSADEVDEAEGGDKNRLLSPRPSLLTPTGDPRANASPQKPLDLKQLKQRAAAIPPIQVTKVHEPPREDAAPTKPAPPAPPPPQNLQPESDAPQQPGSSPRGKSRSPAPPADKEAEKPVFFPAFAAEAQKLPGDPPCWTSGLPFPVPPREVIKASPHAPDPSAFSYAPPGHPLPLGLHDTARPVLPRPPTISNPPPLISSAKHPSVLERQIGAISQGMSVQLHVPYSEHAKAPVGPVTMGLPLPMDPKKLAPFSGVKQEQLSPRGQAGPPESLGVPTAQEASVLRGTALGSVPGGSITKGIPSTRVPSDSAITYRGSITHGTPADVLYKGTITRIIGEDSPSRLDRGREDSLPKGHVIYEGKKGHVLSYEGGMSVTQCSKEDGRSSSGPPHETAAPKRTYDMMEGRVGRAISSASIEGLMGRAIPPERHSPHHLKEQHHIRGSITQGIPRSYVEAQEDYLRREAKLLKREGTPPPPPPSRDLTEAYKTQALGPLKLKPAHEGLVATVKEAGRSIHEIPREELRHTPELPLAPRPLKEGSITQGTPLKYDTGASTTGSKKHDVRSLIGSPGRTFPPVHPLDVMADARALERACYEESLKSRPGTASSSGGSIARGAPVIVPELGKPRQSPLTYEDHGAPFAGHLPRGSPVTTREPTPRLQEGSLSSSKASQDRKLTSTPREIAKSPHSTVPEHHPHPISPYEHLLRGVSGVDLYRSHIPLAFDPTSIPRGIPLDAAAAYYLPRHLAPNPTYPHLYPPYLIRGYPDTAALENRQTIINDYITSQQMHHNTATAMAQRADMLRGLSPRESSLALNYAAGPRGIIDLSQVPHLPVLVPPTPGTPATAMDRLAYLPTAPQPFSSRHSSSPLSPGGPTHLTKPTTTSSSERERDRDRERDRDREREKSILTSTTTVEHAPIWRPGTEQSSGSSGSSGGGGGSSSRPASHSHAHQHSPISPRTQDALQQRPSVLHNTGMKGIITAVEPSTPTVLRSTSTSSPVRPAATFPPATHCPLGGTLDGVYPTLMEPVLLPKEAPRVARPERPRADTGHAFLAKPPARSGLEPASSPSKGSEPRPLVPPVSGHATIARTPAKNLAPHHASPDPPAPPASASDPHREKTQSKPFSIQELELRSLGYHGSSYSPEGVEPVSPVSSPSLTHDKGLPKHLEELDKSHLEGELRPKQPGPVKLGGEAAHLPHLRPLPESQPSSSPLLQTAPGVKGHQRVVTLAQHISEVITQDYTRHHPQQLSAPLPAPLYSFPGASCPVLDLRRPPSDLYLPPPDHGAPARGSPHSEGGKRSPEPNKTSVLGGGEDGIEPVSPPEGMTEPGHSRSAVYPLLYRDGEQTEPSRMGSKSPGNTSQPPAFFSKLTESNSAMVKSKKQEINKKLNTHNRNEPEYNISQPGTEIFNMPAITGTGLMTYRSQAVQEHASTNMGLEAIIRKALMGKYDQWEESPPLSANAFNPLNASASLPAAMPITAADGRSDHTLTSPGGGGKAKVSGRPSSRKAKSPAPGLASGDRPPSVSSVHSEGDCNRRTPLTNRVWEDRPSSAGSTPFPYNPLIMRLQAGVMASPPPPGLPAGSGPLAGPHHAWDEEPKPLLCSQYETLSDSE

SEQ ID NO: 836639 - protein, 880 aa, Homo sapiens
MAPSPHSTVPEHHPHPISPYEHLLRGVSGVDLYRSHIPLAFDPTSIPRGIPLDAAAAYYLPRHLAPNPTYPHLYPPYLIRGYPDTAALENRQTIINDYITSQQMHHNTATAMAQRADMLRGLSPRESSLALNYAAGPRGIIDLSQVPHLPVLVPPTPGTPATAMDRLAYLPTAPQPFSSRHSSSPLSPGGPTHLTKPTTTSSSERERDRDRERDRDREREKSILTSTTTVEHAPIWRPGTEQSSGSSGSSGGGGGSSSRPASHSHAHQHSPISPRTQDALQQRPSVLHNTGMKGIITAVEPSTPTVLRSTSTSSPVRPAATFPPATHCPLGGTLDGVYPTLMEPVLLPKEAPRVARPERPRADTGHAFLAKPPARSGLEPASSPSKGSEPRPLVPPVSGHATIARTPAKNLAPHHASPDPPAPPASASDPHREKTQSKPFSIQELELRSLGYHGSSYSPEGVEPVSPVSSPSLTHDKGLPKHLEELDKSHLEGELRPKQPGPVKLGGEAAHLPHLRPLPESQPSSSPLLQTAPGVKGHQRVVTLAQHISEVITQDYTRHHPQQLSAPLPAPLYSFPGASCPVLDLRRPPSDLYLPPPDHGAPARGSPHSEGGKRSPEPNKTSVLGGGEDGIEPVSPPEGMTEPGHSRSAVYPLLYRDGEQTEPSRMGSKSPGNTSQPPAFFSKLTESNSAMVKSKKQEINKKLNTHNRNEPEYNISQPGTEIFNMPAITGTGLMTYRSQAVQEHASTNMGLEAIIRKALMGGGGKAKVSGRPSSRKAKSPAPGLASGDRPPSVSSVHSEGDCNRRTPLTNRVWEDRPSSAGSTPFPYNPLIMRLQAGVMASPPPPGLPAGSGPLAGPHHAWDEEPKPLLCSQYETLSDSE

SEQ ID NO: 836640 - protein, 2445 aa, Homo sapiens
MSGSTQPVAQTWRATEPRYPPHSLSYPVQIARTHTDVGLLEYQHHSRDYASHLSPGSIIQPQRRRPSLLSEFQPGNERSQELHLRPESHSYLPELGKSEMEFIESKRPRLELLPDPLLRPSPLLATGQPAGSEDLTKDRSLTGKLEPVSPPSPPHTDPELELVPPRLSKEELIQNMDRVDREITMVEQQISKLKKKQQQLEEEAAKPPEPEKPVSPPPIESKHRSLVQIIYDENRKKAEAAHRILEGLGPQVELPLYNQPSDTRQYHENIKINQAMRKKLILYFKRRNHARKQWEQKFCQRYDQLMEAWEKKVERIENNPRRRAKESKVREYYEKQFPEIRKQRELQERMQSRVGQRGSGLSMSAARSEHEVSEIIDGLSEQENLEKQMRQLAVIPPMLYDADQQRIKFINMNGLMADPMKVYKDRQVMNMWSEQEKETFREKFMQHPKNFGLIASFLERKTVAECVLYYYLTKKNENYKSLVRRSYRRRGKSQQQQQQQQQQQQQQQQQPMPRSSQEEKDEKEKEKEAEKEEEKPEVENDKEDLLKEKTDDTSGEDNDEKEAVASKGRKTANSQGRRKGRITRSMANEANSEEAITPQQSAELASMELNESSRWTEEEMETAKKGLLEHGRNWSAIARMVGSKTVSQCKNFYFNYKKRQNLDEILQQHKLKMEKERNARRKKKKAPAAASEEAAFPPVVEDEEMEASGVSGNEEEMVEEAEALHASGNEVPRGECSGPATVNNSSDTESIPSPHTEAAKDTGQNGPKPPATLGADGPPPGPPTPPPEDIPAPTEPTPASEATGAPTPPPAPPSPSAPPPVVPKEEKEEETAAAPPVEEGEEQKPPAAEELAVDTGKAEEPVKSECTEEAEEGPAKGKDAEAAEATAEGALKAEKKEGGSGRATTAKSSGAPQDSDSSATCSADEVDEAEGGDKNRLLSPRPSLLTPTGDPRANASPQKPLDLKQLKQRAAAIPPIQVTKVHEPPREDAAPTKPAPPAPPPPQNLQPESDAPQQPGSSPRGKSRSPAPPADKEAEKPVFFPAFAAEAQKLPGDPPCWTSGLPFPVPPREVIKASPHAPDPSAFSYAPPGHPLPLGLHDTARPVLPRPPTISNPPPLISSAKHPSVLERQIGAISQGMSVQLHVPYSEHAKAPVGPVTMGLPLPMDPKKLAPFSGVKQEQLSPRGQAGPPESLGVPTAQEASVLRGTALGSVPGGSITKGIPSTRVPSDSAITYRGSITHGTPADVLYKGTITRIIGEDSPSRLDRGREDSLPKGHVIYEGKKGHVLSYEGGMSVTQCSKEDGRSSSGPPHETAAPKRTYDMMEGRVGRAISSASIEGLMGRAIPPERHSPHHLKEQHHIRGSITQGIPRSYVEAQEDYLRREAKLLKREGTPPPPPPSRDLTEAYKTQALGPLKLKPAHEGLVATVKEAGRSIHEIPREELRHTPELPLAPRPLKEGSITQGTPLKYDTGASTTGSKKHDVRSLIGSPGRTFPPVHPLDVMADARALERACYEESLKSRPGTASSSGGSIARGAPVIVPELGKPRQSPLTYEDHGAPFAGHLPRGSPVTTREPTPRLQEGSLSSSKASQDRKLTSTPREIAKSPHSTVPEHHPHPISPYEHLLRGVSGVDLYRSHIPLAFDPTSIPRGIPLDAAAAYYLPRHLAPNPTYPHLYPPYLIRGYPDTAALENRQTIINDYITSQQMHHNTATAMAQRADMLRGLSPRESSLALNYAAGPRGIIDLSQVPHLPVLVPPTPGTPATAMDRLAYLPTAPQPFSSRHSSSPLSPGGPTHLTKPTTTSSSERERDRDRERDRDREREKSILTSTTTVEHAPIWRPGTEQSSGSSGSSGGGGGSSSRPASHSHAHQHSPISPRTQDALQQRPSVLHNTGMKGIITAVEPSTPTVLRSTSTSSPVRPAATFPPATHCPLGGTLDGVYPTLMEPVLLPKEAPRVARPERPRADTGHAFLAKPPARSGLEPASSPSKGSEPRPLVPPVSGHATIARTPAKNLAPHHASPDPPAPPASASDPHREKTQSKPFSIQELELRSLGYHGSSYSPEGVEPVSPVSSPSLTHDKGLPKHLEELDKSHLEGELRPKQPGPVKLGGEAAHLPHLRPLPESQPSSSPLLQTAPGVKGHQRVVTLAQHISEVITQDYTRHHPQQLSAPLPAPLYSFPGASCPVLDLRRPPSDLYLPPPDHGAPARGSPHSEGGKRSPEPNKTSVLGGGEDGIEPVSPPEGMTEPGHSRSAVYPLLYRDGEQTEPSRMGSKSPGNTSQPPAFFSKLTESNSAMVKSKKQEINKKLNTHNRNEPEYNISQPGTEIFNMPAITGTGLMTYRSQAVQEHASTNMGLEAIIRKALMGGGGKAKVSGRPSSRKAKSPAPGLASGDRPPSVSSVHSEGDCNRRTPLTNRVWEDRPSSAGNSTVDEILPVLFTNPFPVPGRMLDT

SEQ ID NO: 836641 - protein, 485 aa, Homo sapiens
MNLVCAADQELETMGASEATLLNMLNISPFSFGLVIQQVFDNGSSPLSELRGELRPKQPGPVKLGGEAAHLPHLRPLPESQPSSSPLLQTAPGVKGHQRVVTLAQHISEVITQDYTRHHPQQLSAPLPAPLYSFPGASCPVLDLRRPPSDLYLPPPDHGAPARGSPHSEGGKRSPEPNKTSVLGGGEDGIEPVSPPEGMTEPGHSRSAVYPLLYRDGEQTEPSRMGSKSPGNTSQPPAFFSKLTESNSAMVKSKKQEINKKLNTHNRNEPEYNISQPGTEIFNMPAITGTGLMTYRSQAVQEHASTNMGLEAIIRKALMGKYDQWEESPPLSANAFNPLNASASLPAAMPITAADGRSDHTLTSPGGGGKAKVSGRPSSRKAKSPAPGLASGDRPPSVSSVHSEGDCNRRTPLTNRVWEDRPSSAGSTPFPYNPLIMRLQAGVMASPPPPGLPAGSGPLAGPHHAWDEEPKPLLCSQYETLSDSE

SEQ ID NO: 836642 - protein, 1646 aa, Homo sapiens
MSGSTQPVAQTWRATEPRYPPHSLSYPVQIARTHTDVGLLEYQHHSRDYASHLSPGSIIQPQRRRPSLLSEFQPGNERSQELHLRPESHSYLPELGKSEMEFIESKRPRLELLPDPLLRPSPLLATGQPAGSEDLTKDRSLTGKLEPVSPPSPPHTDPELELVPPRLSKEELIQNMDRVDREITMVEQQISKLKKKQQQLEEEAAKPPEPEKPVSPPPIESKHRSLVQIIYDENRKKAEAAHRILEGLGPQVELPLYNQPSDTRQYHENIKINQAMRKKLILYFKRRNHARKQWEQKFCQRYDQLMEAWEKKVERIENNPRRRAKESKVREYYEKQFPEIRKQRELQERMQSRVGQRGSGLSMSAARSEHEVSEIIDGLSEQENLEKQMRQLAVIPPMLYDADQQRIKFINMNGLMADPMKVYKDRQVMNMWSEQEKETFREKFMQHPKNFGLIASFLERKTVAECVLYYYLTKKNENYKSLVRRSYRRRGKSQQQQQQQQQQQQQQQQQPMPRSSQEEKDEKEKEKEAEKEEEKPEVENDKEDLLKEKTDDTSGEDNDEKEAVASKGRKTANSQGRRKGRITRSMANEANSEEAITPQQSAELASMELNESSRWTEEEMETAKKGLLEHGRNWSAIARMVGSKTVSQCKNFYFNYKKRQNLDEILQQHKLKMEKERNARRKKKKAPAAASEEAAFPPVVEDEEMEASGVSGNEEEMVEEAEALHASGNEVPRGECSGPATVNNSSDTESIPSPHTEAAKDTGQNGPKPPATLGADGPPPGPPTPPPEDIPAPTEPTPASEATGAPTPPPAPPSPSAPPPVVPKEEKEEETAAAPPVEEGEEQKPPAAEELAVDTGKAEEPVKSECTEEAEEGPAKGKDAEAAEATAEGALKAEKKEGGSGRATTAKSSGAPQDSDSSATCSADEVDEAEGGDKNRLLSPRPSLLTPTGDPRANASPQKPLDLKQLKQRAAAIPPIQVTKVHEPPREDAAPTKPAPPAPPPPQNLQPESDAPQQPGSSPRGKSRSPAPPADKEAEKPVFFPAFAAEAQKLPGDPPCWTSGLPFPVPPREVIKASPHAPDPSAFSYAPPGHPLPLGLHDTARPVLPRPPTISNPPPLISSAKHPSVLERQIGAISQGMSVQLHVPYSEHAKAPVGPVTMGLPLPMDPKKLAPFSGVKQEQLSPRGQAGPPESLGVPTAQEASVLRGTALGSVPGGSITKGIPSTRVPSDSAITYRGSITHGTPADVLYKGTITRIIGEDSPSRLDRGREDSLPKGHVIYEGKKGHVLSYEGGMSVTQCSKEDGRSSSGPPHETAAPKRTYDMMEGRVGRAISSASIEGLMGRAIPPERHSPHHLKEQHHIRGSITQGIPRSYVEAQEDYLRREAKLLKREGTPPPPPPSRDLTEAYKTQALGPLKLKPAHEGLVATVKEAGRSIHEIPREELRHTPELPLAPRPLKEGSITQGTPLKYDTGASTTGSKKHDVRSLIGSPGRTFPPVHPLDVMADARALERACYEESLKSRPGTASSSGGSIARGAPVIVPELGKPRQSPLTYEDHGAPFAGHLPRGSPVTTREPTPRLQEGSLSSSKASQDRKLTSTPREIAKSPHSTVPEHHPHPISPYEHLVSGMTDIDLTHGTAIDHWLRDFIS

SEQ ID NO: 836643 - protein, 1422 aa, Homo sapiens
MSGSTQPVAQTWRATEPRYPPHSLSYPVQIARTHTDVGLLEYQHHSRDYASHLSPGSIIQPQRRRPSLLSEFQPGNERSQELHLRPESHSYLPELGKSEMEFIESKRPRLELLPDPLLRPSPLLATGQPAGSEDLTKDRSLTGKLEPVSPPSPPHTDPELELVPPRLSKEELIQNMDRVDREITMVEQQISKLKKKQQQLEEEAAKPPEPEKPVSPPPIESKHRSLVQIIYDENRKKAEAAHRILEGLGPQVELPLYNQPSDTRQYHENIKINQAMRKKLILYFKRRNHARKQWEQKFCQRYDQLMEAWEKKVERIENNPRRRAKESKVREYYEKQFPEIRKQRELQERMQSRVGQRGSGLSMSAARSEHEVSEIIDGLSEQENLEKQMRQLAVIPPMLYDADQQRIKFINMNGLMADPMKVYKDRQVMNMWSEQEKETFREKFMQHPKNFGLIASFLERKTVAECVLYYYLTKKNENYKSLVRRSYRRRGKSQQQQQQQQQQQQQQQQQPMPRSSQEEKDEKEKEKEAEKEEEKPEVENDKEDLLKEKTDDTSGEDNDEKEAVASKGRKTANSQGRRKGRITRSMANEANSEEAITPQQSAELASMELNESSRWTEEEMETAKKGLLEHGRNWSAIARMVGSKTVSQCKNFYFNYKKRQNLDEILQQHKLKMEKERNARRKKKKAPAAASEEAAFPPVVEDEEMEASGVSGNEEEMVEEAEALHASGNEVPRGECSGPATVNNSSDTESIPSPHTEAAKDTGQNGPKPPATLGADGPPPGPPTPPPEDIPAPTEPTPASEATGAPTPPPAPPSPSAPPPVVPKEEKEEETAAAPPVEEGEEQKPPAAEELAVDTGKAEEPVKSECTEEAEEGPAKGKDAEAAEATAEGALKAEKKEGGSGRATTAKSSGAPQDSDSSATCSADEVDEAEGGDKNRLLSPRPSLLTPTGDPRANASPQKPLDLKQLKQRAAAIPPIQVTKVHEPPREDAAPTKPAPPAPPPPQNLQPESDAPQQPGSSPRGKSRSPAPPADKEAEKPVFFPAFAAEAQKLPGDPPCWTSGLPFPVPPREVIKASPHAPDPSAFSYAPPGHPLPLGLHDTARPVLPRPPTISNPPPLISSAKHPSVLERQIGAISQGMSVQLHVPYSEHAKAPVGPVTMGLPLPMDPKKLAPFSGVKQEQLSPRGQAGPPESLGVPTAQEASVLRGTALGSVPGGSITKGIPSTRVPSDSAITYRGSITHGTPADVLYKGTITRIIGEDSPSRLDRGREDSLPKGHVIYEGKKGHVLSYEGGMSVTQCSKEDGRSSSGPPHETAAPKRTYDMMEGRVGRAISSASIEGLMGRAIPPERHSPHHLKEQHHIRGSITQGIPRSYVEAQEDYLRREAKLLKREGTPPPPPPSRDLTEAYKTQALGPLNGGKGDPQI

SEQ ID NO: 836644 - protein, 749 aa, Homo sapiens
MSGSTQPVAQTWRATEPRYPPHSLSYPVQIARTHTDVGLLEYQHHSRDYASHLSPGSIIQPQRRRPSLLSEFQPGNERSQELHLRPESHSYLPELGKSEMEFIESKRPRLELLPDPLLRPSPLLATGQPAGSEDLTKDRSLTGKLEPVSPPSPPHTDPELELVPPRLSKEELIQNMDRVDREITMVEQQISKLKKKQQQLEEEAAKPPEPEKPVSPPPIESKHRSLVQIIYDENRKKAEAAHRILEGLGPQVELPLYNQPSDTRQYHENIKINQAMRKKLILYFKRRNHARKQWEQKFCQRYDQLMEAWEKKVERIENNPRRRAKESKVREYYEKQFPEIRKQRELQERMQSRVGQRGSGLSMSAARSEHEVSEIIDGLSEQENLEKQMRQLAVIPPMLYDADQQRIKFINMNGLMADPMKVYKDRQVMNMWSEQEKETFREKFMQHPKNFGLIASFLERKTVAECVLYYYLTKKNENYKSLVRRSYRRRGKSQQQQQQQQQQQQQQQQQPMPRSSQEEKDEKEKEKEAEKEEEKPEVENDKEDLLKEKTDDTSGEDNDEKEAVASKGRKTANSQGRRKGRITRSMANEANSEEAITPQQSAELASMELNESSRWTEEEMETAKKGLLEHGRNWSAIARMVGSKTVSQCKNFYFNYKKRQNLDEILQQHKLKMEKERNARRKKKKAPAAASEEAAFPPVVEDEEMEASGVSGNEEEMVEEAEALHASGNEVPRGECSGPGTNVAGWPGG

SEQ ID NO: 836645 - protein, 439 aa, Homo sapiens
  misc_feature (426)..(426): Xaa can be any naturally occurring amino acid
MSGSTQPVAQTWRATEPRYPPHSLSYPVQIARTHTDVGLLEYQHHSRDYASHLSPGSIIQPQRRRPSLLSEFQPGNERSQELHLRPESHSYLPELGKSEMEFIESKRPRLELLPDPLLRPSPLLATGQPAGSEDLTKDRSLTGKLEPVSPPSPPHTDPELELVPPRLSKEELIQNMDRVDREITMVEQQISKLKKKQQQLEEEAAKPPEPEKPVSPPPIESKHRSLVQIIYDENRKKAEAAHRILEGLGPQVELPLYNQPSDTRQYHENIKINQAMRKKLILYFKRRNHARKQWEQKFCQRYDQLMEAWEKKVERIENNPRRRAKESKVREYYEKQFPEIRKQRELQERMQSRVGQRGSGLSMSAARSEHEVSEIIDGLSEQENLEKQMRQLAVIPPMLYDADQQRIKFINMNGLMADPMKGGSSXSLKPAVHCNALCT

SEQ ID NO: 836646 - protein, 305 aa, Homo sapiens
MSGSTQPVAQTWRATEPRYPPHSLSYPVQIARTHTDVGLLEYQHHSRDYASHLSPGSIIQPQRRRPSLLSEFQPGNERSQELHLRPESHSYLPELGKSEMEFIESKRPRLELLPDPLLRPSPLLATGQPAGSEDLTKDRSLTGKLEPVSPPSPPHTDPELELVPPRLSKEELIQNMDRVDREITMVEQQISKLKKKQQQLEEEAAKPPEPEKPVSPPPIESKHRSLVQIIYDENRKKAEAAHRILEGLGPQVELHHVFEVHPCRAWVGPSFLFVAESYFTVGVGHVLFTHSSVGGREIVCIFGVL

SEQ ID NO: 836647 - protein, 86 aa, Homo sapiens
MTNFLRLRRGMQLVWAMAVARARAYIPSAQGTPLKYDTGASTTGSKKHDVRSLIGSPGRTFPPVHPLDVMADARALERACYEESLK

SEQ ID NO: 836648 - protein, 2508 aa, Homo sapiens
MSGSTQPVAQTWRATEPRYPPHSLSYPVQIARTHTDVGLLEYQHHSRDYASHLSPGSIIQPQRRRPSLLSEFQPGNERSQELHLRPESHSYLPELGKSEMEFIESKRPRLELLPDPLLRPSPLLATGQPAGSEDLTKDRSLTGKLEPVSPPSPPHTDPELELVPPRLSKEELIQNMDRVDREITMVEQQISKLKKKQQQLEEEAAKPPEPEKPVSPPPIESKHRSLVQIIYDENRKKAEAAHRILEGLGPQVELPLYNQPSDTRQYHENIKINQAMRKKLILYFKRRNHARKQWEQKFCQRYDQLMEAWEKKVERIENNPRRRAKESKVREYYEKQFPEIRKQRELQERMQSRVGQRGSGLSMSAARSEHEVSEIIDGLSEQENLEKQMRQLAVIPPMLYDADQQRIKFINMNGLMADPMKVYKDRQVMNMWSEQEKETFREKFMQHPKNFGLIASFLERKTVAECVLYYYLTKKNENYKSLVRRSYRRRGKSQQQQQQQQQQQQQQQQQPMPRSSQEEKDEKEKEKEAEKEEEKPEVENDKEDLLKEKTDDTSGEDNDEKEAVASKGRKTANSQGRRKGRITRSMANEANSEEAITPQQSAELASMELNESSRWTEEEMETAKKGLLEHGRNWSAIARMVGSKTVSQCKNFYFNYKKRQNLDEILQQHKLKMEKERNARRKKKKAPAAASEEAAFPPVVEDEEMEASGVSGNEEEMVEEAEATVNNSSDTESIPSPHTEAAKDTGQNGPKPPATLGADGPPPGPPTPPPEDIPAPTEPTPASEATGAPTPPPAPPSPSAPPPVVPKEEKEEETAAAPPVEEGEEQKPPAAEELAVDTGKAEEPVKSECTEEAEEGPAKGKDAEAAEATAEGALKAEKKEGGSGRATTAKSSGAPQDSDSSATCSADEVDEAEGGDKNRLLSPRPSLLTPTGDPRANASPQKPLDLKQLKQRAAAIPPIQVTKVHEPPREDAAPTKPAPPAPPPPQNLQPESDAPQQPGSSPRGKSRSPAPPADKEAEKPVFFPAFAAEAQKLPGDPPCWTSGLPFPVPPREVIKASPHAPDPSAFSYAPPGHPLPLGLHDTARPVLPRPPTISNPPPLISSAKHPSVLERQIGAISQGMSVQLHVPYSEHAKAPVGPVTMGLPLPMDPKKLAPFSGVKQEQLSPRGQAGPPESLGVPTAQEASVLRGTALGSVPGGSITKGIPSTRVPSDSAITYRGSITHGTPADVLYKGTITRIIGEDSPSRLDRGREDSLPKGHVIYEGKKGHVLSYEGGMSVTQCSKEDGRSSSGPPHETAAPKRTYDMMEGRVGRAISSASIEGLMGRAIPPERHSPHHLKEQHHIRGSITQGIPRSYVEAQEDYLRREAKLLKREGTPPPPPPSRDLTEAYKTQALGPLKLKPAHEGLVATVKEAGRSIHEIPREELRHTPELPLAPRPLKEGSITQGTPLKYDTGASTTGSKKHDVRSLIGSPGRTFPPVHPLDVMADARALERACYEESLKSRPGTASSSGGSIARGAPVIVPELGKPRQSPLTYEDHGAPFAGHLPRGSPVTTREPTPRLQEGSLSSSKASQDRKLTSTPREIAKSPHSTVPEHHPHPISPYEHLLRGVSGVDLYRSHIPLAFDPTSIPRGIPLDAAAAYYLPRHLAPNPTYPHLYPPYLIRGYPDTAALENRQTIINDYITSQQMHHNTATAMAQRADMLRGLSPRESSLALNYAAGPRGIIDLSQVPHLPVLVPPTPGTPATAMDRLAYLPTAPQPFSSRHSSSPLSPGGPTHLTKPTTTSSSERERDRDRERDRDREREKSILTSTTTVEHAPIWRPGTEQSSGSSGSSGGGGGSSSRPASHSHAHQHSPISPRTQDALQQRPSVLHNTGMKGIITAVEPSTPTVLRSTSTSSPVRPAATFPPATHCPLGGTLDGVYPTLMEPVLLPKEAPRVARPERPRADTGHAFLAKPPARSGLEPASSPSKGSEPRPLVPPVSGHATIARTPAKNLAPHHASPDPPAPPASASDPHREKTQSKPFSIQELELRSLGYHGSSYSPEGVEPVSPVSSPSLTHDKGLPKHLEELDKSHLEGELRPKQPGPVKLGGEAAHLPHLRPLPESQPSSSPLLQTAPGVKGHQRVVTLAQHISEVITQDYTRHHPQQLSAPLPAPLYSFPGASCPVLDLRRPPSDLYLPPPDHGAPARGSPHSEGGKRSPEPNKTSVLGGGEDGIEPVSPPEGMTEPGHSRSAVYPLLYRDGEQTEPSRMGSKSPGNTSQPPAFFSKLTESNSAMVKSKKQEINKKLNTHNRNEPEYNISQPGTEIFNMPAITGTGLMTYRSQAVQEHASTNMGLEAIIRKALMGKYDQWEESPPLSANAFNPLNASASLPAAMPITAADGRSDHTLTSPGGGGKAKVSGRPSSRKAKSPAPGLASGDRPPSVSSVHSEGDCNRRTPLTNRVWEDRPSSAGSTPFPYNPLIMRLQAGVMASPPPPGLPAGSGPLAGPHHAWDEEPKPLLCSQYETLSDSE

SEQ ID NO: 836649 - protein, 1540 aa, Homo sapiens
MRSPPLVVVVEEEEDSELCYHPGRLVREEGEVVLDEGSYHHNLFQMEAWDAHPDKEAFAAEAQKLPGDPPCWTSGLPFPVPPREVIKASPHAPDPSAFSYAPPGHPLPLGLHDTARPVLPRPPTISNPPPLISSAKHPSVLERQIGAISQGMSVQLHVPYSEHAKAPVGPVTMGLPLPMDPKKLAPFSGVKQEQLSPRGQAGPPESLGVPTAQEASVLRGTALGSVPGGSITKGIPSTRVPSDSAITYRGSITHGTPADVLYKGTITRIIGEDSPSRLDRGREDSLPKGHVIYEGKKGHVLSYEGGMSVTQCSKEDGRSSSGPPHETAAPKRTYDMMEGRVGRAISSASIEGLMGRAIPPERHSPHHLKEQHHIRGSITQGIPRSYVEAQEDYLRREAKLLKREGTPPPPPPSRDLTEAYKTQALGPLKLKPAHEGLVATVKEAGRSIHEIPREELRHTPELPLAPRPLKEGSITQGTPLKYDTGASTTGSKKHDVRSLIGSPGRTFPPVHPLDVMADARALERACYEESLKSRPGTASSSGGSIARGAPVIVPELGKPRQSPLTYEDHGAPFAGHLPRGSPVTTREPTPRLQEGSLSSSKASQDRKLTSTPREIAKSPHSTVPEHHPHPISPYEHLLRGVSGVDLYRSHIPLAFDPTSIPRGIPLDAAAAYYLPRHLAPNPTYPHLYPPYLIRGYPDTAALENRQTIINDYITSQQMHHNTATAMAQRADMLRGLSPRESSLALNYAAGPRGIIDLSQVPHLPVLVPPTPGTPATAMDRLAYLPTAPQPFSSRHSSSPLSPGGPTHLTKPTTTSSSERERDRDRERDRDREREKSILTSTTTVEHAPIWRPGTEQSSGSSGSSGGGGGSSSRPASHSHAHQHSPISPRTQDALQQRPSVLHNTGMKGIITAVEPSTPTVLRSTSTSSPVRPAATFPPATHCPLGGTLDGVYPTLMEPVLLPKEAPRVARPERPRADTGHAFLAKPPARSGLEPASSPSKGSEPRPLVPPVSGHATIARTPAKNLAPHHASPDPPAPPASASDPHREKTQSKPFSIQELELRSLGYHGSSYSPEGVEPVSPVSSPSLTHDKGLPKHLEELDKSHLEGELRPKQPGPVKLGGEAAHLPHLRPLPESQPSSSPLLQTAPGVKGHQRVVTLAQHISEVITQDYTRHHPQQLSAPLPAPLYSFPGASCPVLDLRRPPSDLYLPPPDHGAPARGSPHSEGGKRSPEPNKTSVLGGGEDGIEPVSPPEGMTEPGHSRSAVYPLLYRDGEQTEPSRMGSKSPGNTSQPPAFFSKLTESNSAMVKSKKQEINKKLNTHNRNEPEYNISQPGTEIFNMPAITGTGLMTYRSQAVQEHASTNMGLEAIIRKALMGKYDQWEESPPLSANAFNPLNASASLPAAMPITAADGRSDHTLTSPGGGGKAKVSGRPSSRKAKSPAPGLASGDRPPSVSSVHSEGDCNRRTPLTNRVWEDRPSSAGSTPFPYNPLIMRLQAGVMASPPPPGLPAGSGPLAGPHHAWDEEPKPLLCSQYETLSDSE

SEQ ID NO: 836650 - protein, 601 aa, Homo sapiens
MACPLGGTLDGVYPTLMEPVLLPKEAPRVARPERPRADTGHAFLAKPPARSGLEPASSPSKGSEPRPLVPPVSGHATIARTPAKNLAPHHASPDPPAPPASASDPHREKTQSKPFSIQELELRSLGYHGSSYSPEGVEPVSPVSSPSLTHDKGLPKHLEELDKSHLEGELRPKQPGPVKLGGEAAHLPHLRPLPESQPSSSPLLQTAPGVKGHQRVVTLAQHISEVITQDYTRHHPQQLSAPLPAPLYSFPGASCPVLDLRRPPSDLYLPPPDHGAPARGSPHSEGGKRSPEPNKTSVLGGGEDGIEPVSPPEGMTEPGHSRSAVYPLLYRDGEQTEPSRMGSKSPGNTSQPPAFFSKLTESNSAMVKSKKQEINKKLNTHNRNEPEYNISQPGTEIFNMPAITGTGLMTYRSQAVQEHASTNMGLEAIIRKALMGKYDQWEESPPLSANAFNPLNASASLPAAMPITAADGRSDHTLTSPGGGGKAKVSGRPSSRKAKSPAPGLASGDRPPSVSSVHSEGDCNRRTPLTNRVWEDRPSSAGSTPFPYNPLIMRLQAGVMASPPPPGLPAGSGPLAGPHHAWDEEPKPLLCSQYETLSDSE

SEQ ID NO: 836651 - protein, 2418 aa, Homo sapiens
FLEYHTGHPLLRPSPLLATGQPAGSEDLTKDRSLTGKLEPVSPPSPPHTDPELELVPPRLSKEELIQNMDRVDREITMVEQQISKLKKKQQQLEEEAAKPPEPEKPVSPPPIESKHRSLVQIIYDENRKKAEAAHRILEGLGPQVELPLYNQPSDTRQYHENIKINQAMRKKLILYFKRRNHARKQWEQKFCQRYDQLMEAWEKKVERIENNPRRRAKESKVREYYEKQFPEIRKQRELQERMQSRVGQRGSGLSMSAARSEHEVSEIIDGLSEQENLEKQMRQLAVIPPMLYDADQQRIKFINMNGLMADPMKVYKDRQVMNMWSEQEKETFREKFMQHPKNFGLIASFLERKTVAECVLYYYLTKKNENYKSLVRRSYRRRGKSQQQQQQQQQQQQQQQQQPMPRSSQEEKDEKEKEKEAEKEEEKPEVENDKEDLLKEKTDDTSGEDNDEKEAVASKGRKTANSQGRRKGRITRSMANEANSEEAITPQQSAELASMELNESSRWTEEEMETAKKGLLEHGRNWSAIARMVGSKTVSQCKNFYFNYKKRQNLDEILQQHKLKMEKERNARRKKKKAPAAASEEAAFPPVVEDEEMEASGVSGNEEEMVEEAEALHASGNEVPRGECSGPATVNNSSDTESIPSPHTEAAKDTGQNGPKPPATLGADGPPPGPPTPPPEDIPAPTEPTPASEATGAPTPPPAPPSPSAPPPVVPKEEKEEETAAAPPVEEGEEQKPPAAEELAVDTGKAEEPVKSECTEEAEEGPAKGKDAEAAEATAEGALKAEKKEGGSGRATTAKSSGAPQDSDSSATCSADEVDEAEGGDKNRLLSPRPSLLTPTGDPRANASPQKPLDLKQLKQRAAAIPPIQVTKVHEPPREDAAPTKPAPPAPPPPQNLQPESDAPQQPGSSPRGKSRSPAPPADKEAEKPVFFPAFAAEAQKLPGDPPCWTSGLPFPVPPREVIKASPHAPDPSAFSYAPPGHPLPLGLHDTARPVLPRPPTISNPPPLISSAKHPSVLERQIGAISQGMSVQLHVPYSEHAKAPVGPVTMGLPLPMDPKKLAPFSGVKQEQLSPRGQAGPPESLGVPTAQEASVLRGTALGSVPGGSITKGIPSTRVPSDSAITYRGSITHGTPADVLYKGTITRIIGEDSPSRLDRGREDSLPKGHVIYEGKKGHVLSYEGGMSVTQCSKEDGRSSSGPPHETAAPKRTYDMMEGRVGRAISSASIEGLMGRAIPPERHSPHHLKEQHHIRGSITQGIPRSYVEAQEDYLRREAKLLKREGTPPPPPPSRDLTEAYKTQALGPLKLKPAHEGLVATVKEAGRSIHEIPREELRHTPELPLAPRPLKEGSITQGTPLKYDTGASTTGSKKHDVRSLIGSPGRTFPPVHPLDVMADARALERACYEESLKSRPGTASSSGGSIARGAPVIVPELGKPRQSPLTYEDHGAPFAGHLPRGSPVTTREPTPRLQEGSLSSSKASQDRKLTSTPREIAKSPHSTVPEHHPHPISPYEHLLRGVSGVDLYRSHIPLAFDPTSIPRGIPLDAAAAYYLPRHLAPNPTYPHLYPPYLIRGYPDTAALENRQTIINDYITSQQMHHNTATAMAQRADMLRGLSPRESSLALNYAAGPRGIIDLSQVPHLPVLVPPTPGTPATAMDRLAYLPTAPQPFSSRHSSSPLSPGGPTHLTKPTTTSSSERERDRDRERDRDREREKSILTSTTTVEHAPIWRPGTEQSSGSSGSSGGGGGSSSRPASHSHAHQHSPISPRTQDALQQRPSVLHNTGMKGIITAVEPSTPTVLRSTSTSSPVRPAATFPPATHCPLGGTLDGVYPTLMEPVLLPKEAPRVARPERPRADTGHAFLAKPPARSGLEPASSPSKGSEPRPLVPPVSGHATIARTPAKNLAPHHASPDPPAPPASASDPHREKTQSKPFSIQELELRSLGYHGSSYSPEGVEPVSPVSSPSLTHDKGLPKHLEELDKSHLEGELRPKQPGPVKLGGEAAHLPHLRPLPESQPSSSPLLQTAPGVKGHQRVVTLAQHISEVITQDYTRHHPQQLSAPLPAPLYSFPGASCPVLDLRRPPSDLYLPPPDHGAPARGSPHSEGGKRSPEPNKTSVLGGGEDGIEPVSPPEGMTEPGHSRSAVYPLLYRDGEQTEPSRMGSKSPGNTSQPPAFFSKLTESNSAMVKSKKQEINKKLNTHNRNEPEYNISQPGTEIFNMPAITGTGLMTYRSQAVQEHASTNMGLEAIIRKALMGKYDQWEESPPLSANAFNPLNASASLPAAMPITAADGRSDHTLTSPGGGGKAKVSGRPSSRKAKSPAPGLASGDRPPSVSSVHSEGDCNRRTPLTNRVWEDRPSSAGSTPFPYNPLIMRLQAGVMASPPPPGLPAGSGPLAGPHHAWDEEPKPLLCSQYETLSDSE

SEQ ID NO: 836652 - protein, 2364 aa, Homo sapiens
RVLCSYKREELIQNMDRVDREITMVEQQISKLKKKQQQLEEEAAKPPEPEKPVSPPPIESKHRSLVQIIYDENRKKAEAAHRILEGLGPQVELPLYNQPSDTRQYHENIKINQAMRKKLILYFKRRNHARKQWEQKFCQRYDQLMEAWEKKVERIENNPRRRAKESKVREYYEKQFPEIRKQRELQERMQSRVGQRGSGLSMSAARSEHEVSEIIDGLSEQENLEKQMRQLAVIPPMLYDADQQRIKFINMNGLMADPMKVYKDRQVMNMWSEQEKETFREKFMQHPKNFGLIASFLERKTVAECVLYYYLTKKNENYKSLVRRSYRRRGKSQQQQQQQQQQQQQQQQQPMPRSSQEEKDEKEKEKEAEKEEEKPEVENDKEDLLKEKTDDTSGEDNDEKEAVASKGRKTANSQGRRKGRITRSMANEANSEEAITPQQSAELASMELNESSRWTEEEMETAKKGLLEHGRNWSAIARMVGSKTVSQCKNFYFNYKKRQNLDEILQQHKLKMEKERNARRKKKKAPAAASEEAAFPPVVEDEEMEASGVSGNEEEMVEEAEALHASGNEVPRGECSGPATVNNSSDTESIPSPHTEAAKDTGQNGPKPPATLGADGPPPGPPTPPPEDIPAPTEPTPASEATGAPTPPPAPPSPSAPPPVVPKEEKEEETAAAPPVEEGEEQKPPAAEELAVDTGKAEEPVKSECTEEAEEGPAKGKDAEAAEATAEGALKAEKKEGGSGRATTAKSSGAPQDSDSSATCSADEVDEAEGGDKNRLLSPRPSLLTPTGDPRANASPQKPLDLKQLKQRAAAIPPIQVTKVHEPPREDAAPTKPAPPAPPPPQNLQPESDAPQQPGSSPRGKSRSPAPPADKEAEKPVFFPAFAAEAQKLPGDPPCWTSGLPFPVPPREVIKASPHAPDPSAFSYAPPGHPLPLGLHDTARPVLPRPPTISNPPPLISSAKHPSVLERQIGAISQGMSVQLHVPYSEHAKAPVGPVTMGLPLPMDPKKLAPFSGVKQEQLSPRGQAGPPESLGVPTAQEASVLRGTALGSVPGGSITKGIPSTRVPSDSAITYRGSITHGTPADVLYKGTITRIIGEDSPSRLDRGREDSLPKGHVIYEGKKGHVLSYEGGMSVTQCSKEDGRSSSGPPHETAAPKRTYDMMEGRVGRAISSASIEGLMGRAIPPERHSPHHLKEQHHIRGSITQGIPRSYVEAQEDYLRREAKLLKREGTPPPPPPSRDLTEAYKTQALGPLKLKPAHEGLVATVKEAGRSIHEIPREELRHTPELPLAPRPLKEGSITQGTPLKYDTGASTTGSKKHDVRSLIGSPGRTFPPVHPLDVMADARALERACYEESLKSRPGTASSSGGSIARGAPVIVPELGKPRQSPLTYEDHGAPFAGHLPRGSPVTTREPTPRLQEGSLSSSKASQDRKLTSTPREIAKSPHSTVPEHHPHPISPYEHLLRGVSGVDLYRSHIPLAFDPTSIPRGIPLDAAAAYYLPRHLAPNPTYPHLYPPYLIRGYPDTAALENRQTIINDYITSQQMHHNTATAMAQRADMLRGLSPRESSLALNYAAGPRGIIDLSQVPHLPVLVPPTPGTPATAMDRLAYLPTAPQPFSSRHSSSPLSPGGPTHLTKPTTTSSSERERDRDRERDRDREREKSILTSTTTVEHAPIWRPGTEQSSGSSGSSGGGGGSSSRPASHSHAHQHSPISPRTQDALQQRPSVLHNTGMKGIITAVEPSTPTVLRSTSTSSPVRPAATFPPATHCPLGGTLDGVYPTLMEPVLLPKEAPRVARPERPRADTGHAFLAKPPARSGLEPASSPSKGSEPRPLVPPVSGHATIARTPAKNLAPHHASPDPPAPPASASDPHREKTQSKPFSIQELELRSLGYHGSSYSPEGVEPVSPVSSPSLTHDKGLPKHLEELDKSHLEGELRPKQPGPVKLGGEAAHLPHLRPLPESQPSSSPLLQTAPGVKGHQRVVTLAQHISEVITQDYTRHHPQQLSAPLPAPLYSFPGASCPVLDLRRPPSDLYLPPPDHGAPARGSPHSEGGKRSPEPNKTSVLGGGEDGIEPVSPPEGMTEPGHSRSAVYPLLYRDGEQTEPSRMGSKSPGNTSQPPAFFSKLTESNSAMVKSKKQEINKKLNTHNRNEPEYNISQPGTEIFNMPAITGTGLMTYRSQAVQEHASTNMGLEAIIRKALMGKYDQWEESPPLSANAFNPLNASASLPAAMPITAADGRSDHTLTSPGGGGKAKVSGRPSSRKAKSPAPGLASGDRPPSVSSVHSEGDCNRRTPLTNRVWEDRPSSAGSTPFPYNPLIMRLQAGVMASPPPPGLPAGSGPLAGPHHAWDEEPKPLLCSQYETLSDSE

SEQ ID NO: 836653 - protein, 2296 aa, Homo sapiens
QRTNNQTKTQENREGPGIKVKRVKGPLYNQPSDTRQYHENIKINQAMRKKLILYFKRRNHARKQWEQKFCQRYDQLMEAWEKKVERIENNPRRRAKESKVREYYEKQFPEIRKQRELQERMQSRVGQRGSGLSMSAARSEHEVSEIIDGLSEQENLEKQMRQLAVIPPMLYDADQQRIKFINMNGLMADPMKVYKDRQVMNMWSEQEKETFREKFMQHPKNFGLIASFLERKTVAECVLYYYLTKKNENYKSLVRRSYRRRGKSQQQQQQQQQQQQQQQQQPMPRSSQEEKDEKEKEKEAEKEEEKPEVENDKEDLLKEKTDDTSGEDNDEKEAVASKGRKTANSQGRRKGRITRSMANEANSEEAITPQQSAELASMELNESSRWTEEEMETAKKGLLEHGRNWSAIARMVGSKTVSQCKNFYFNYKKRQNLDEILQQHKLKMEKERNARRKKKKAPAAASEEAAFPPVVEDEEMEASGVSGNEEEMVEEAEALHASGNEVPRGECSGPATVNNSSDTESIPSPHTEAAKDTGQNGPKPPATLGADGPPPGPPTPPPEDIPAPTEPTPASEATGAPTPPPAPPSPSAPPPVVPKEEKEEETAAAPPVEEGEEQKPPAAEELAVDTGKAEEPVKSECTEEAEEGPAKGKDAEAAEATAEGALKAEKKEGGSGRATTAKSSGAPQDSDSSATCSADEVDEAEGGDKNRLLSPRPSLLTPTGDPRANASPQKPLDLKQLKQRAAAIPPIQVTKVHEPPREDAAPTKPAPPAPPPPQNLQPESDAPQQPGSSPRGKSRSPAPPADKEAEKPVFFPAFAAEAQKLPGDPPCWTSGLPFPVPPREVIKASPHAPDPSAFSYAPPGHPLPLGLHDTARPVLPRPPTISNPPPLISSAKHPSVLERQIGAISQGMSVQLHVPYSEHAKAPVGPVTMGLPLPMDPKKLAPFSGVKQEQLSPRGQAGPPESLGVPTAQEASVLRGTALGSVPGGSITKGIPSTRVPSDSAITYRGSITHGTPADVLYKGTITRIIGEDSPSRLDRGREDSLPKGHVIYEGKKGHVLSYEGGMSVTQCSKEDGRSSSGPPHETAAPKRTYDMMEGRVGRAISSASIEGLMGRAIPPERHSPHHLKEQHHIRGSITQGIPRSYVEAQEDYLRREAKLLKREGTPPPPPPSRDLTEAYKTQALGPLKLKPAHEGLVATVKEAGRSIHEIPREELRHTPELPLAPRPLKEGSITQGTPLKYDTGASTTGSKKHDVRSLIGSPGRTFPPVHPLDVMADARALERACYEESLKSRPGTASSSGGSIARGAPVIVPELGKPRQSPLTYEDHGAPFAGHLPRGSPVTTREPTPRLQEGSLSSSKASQDRKLTSTPREIAKSPHSTVPEHHPHPISPYEHLLRGVSGVDLYRSHIPLAFDPTSIPRGIPLDAAAAYYLPRHLAPNPTYPHLYPPYLIRGYPDTAALENRQTIINDYITSQQMHHNTATAMAQRADMLRGLSPRESSLALNYAAGPRGIIDLSQVPHLPVLVPPTPGTPATAMDRLAYLPTAPQPFSSRHSSSPLSPGGPTHLTKPTTTSSSERERDRDRERDRDREREKSILTSTTTVEHAPIWRPGTEQSSGSSGSSGGGGGSSSRPASHSHAHQHSPISPRTQDALQQRPSVLHNTGMKGIITAVEPSTPTVLRSTSTSSPVRPAATFPPATHCPLGGTLDGVYPTLMEPVLLPKEAPRVARPERPRADTGHAFLAKPPARSGLEPASSPSKGSEPRPLVPPVSGHATIARTPAKNLAPHHASPDPPAPPASASDPHREKTQSKPFSIQELELRSLGYHGSSYSPEGVEPVSPVSSPSLTHDKGLPKHLEELDKSHLEGELRPKQPGPVKLGGEAAHLPHLRPLPESQPSSSPLLQTAPGVKGHQRVVTLAQHISEVITQDYTRHHPQQLSAPLPAPLYSFPGASCPVLDLRRPPSDLYLPPPDHGAPARGSPHSEGGKRSPEPNKTSVLGGGEDGIEPVSPPEGMTEPGHSRSAVYPLLYRDGEQTEPSRMGSKSPGNTSQPPAFFSKLTESNSAMVKSKKQEINKKLNTHNRNEPEYNISQPGTEIFNMPAITGTGLMTYRSQAVQEHASTNMGLEAIIRKALMGKYDQWEESPPLSANAFNPLNASASLPAAMPITAADGRSDHTLTSPGGGGKAKVSGRPSSRKAKSPAPGLASGDRPPSVSSVHSEGDCNRRTPLTNRVWEDRPSSAGSTPFPYNPLIMRLQAGVMASPPPPGLPAGSGPLAGPHHAWDEEPKPLLCSQYETLSDSE

SEQ ID NO: 836654 - protein, 2450 aa, Homo sapiens
MSGSTQPVAQTWRATEPRYPPHSLSYPVQIARTHTDVGLLEYQHHSRDYASHLSPGSIIQPQRRRPSLLSEFQPGNERSQELHLRPESHSYLPELGKSEMEFIESKRPRLELLPDPLLRPSPLLATGQPAGSEDLTKDRSLTGKLEPVSPPSPPHTDPELELVPPRLSKEELIQNMDRVDREITMVEQQISKLKKKQQQLEEEAAKPPEPEKPVSPPPIESKHRSLVQIIYDENRKKAEAAHRILEGLGPQVELPLYNQPSDTRQYHENIKINQAMRKKLILYFKRRNHARKQWEQKFCQRYDQLMEAWEKKVERIENNPRRRAKESKVREYYEKQFPEIRKQRELQERMQSRVGQRGSGLSMSAARSEHEVSEIIDGLSEQENLEKQMRQLAVIPPMLYDADQQRIKFINMNGLMADPMKVYKDRQVMNMWSEQEKETFREKFMQHPKNFGLIASFLERKTVAECVLYYYLTKKNENYKSLVRRSYRRRGKSQQQQQQQQQQQQQQQQQPMPRSSQEEKDEKEKEKEAEKEEEKPEVENDKEDLLKEKTDDTSGEDNDEKEAVASKGRKTANSQGRRKGRITRSMANEANSEEAITPQQSAELASMELNESSRWTEEEMETAKKGLLEHGRNWSAIARMVGSKTVSQCKNFYFNYKKRQNLDEILQQHKLKMEKERNARRKKKKAPAAASEEAAFPPVVEDEEMEASGVSGNEEEMVEEAEALHASGNEVPRGECSGPATVNNSSDTESIPSPHTEAAKDTGQNGPKPPATLGADGPPPGPPTPPPEDIPAPTEPTPASEATGAPTPPPAPPSPSAPPPVVPKEEKEEETAAAPPVEEGEEQKPPAAEELAVDTGKAEEPVKSECTEEAEEGPAKGKDAEAAEATAEGALKAEKKEGGSGRATTAKSSGAPQDSDSSATCSADEVDEAEGGDKNRLLSPRPSLLTPTGDPRANASPQKPLDLKQLKQRAAAIPPIQVTKVHEPPREDAAPTKPAPPAPPPPQNLQPESDAPQQPGSSPRGKSRSPAPPADKEAEKPVFFPAFAAEAQKLPGDPPCWTSGLPFPVPPREVIKASPHAPDPSAFSYAPPGHPLPLGLHDTARPVLPRPPTISNPPPLISSAKHPSVLERQIGAISQGMSVQLHVPYSEHAKAPVGPVTMGLPLPMDPKKLAPFSGVKQEQLSPRGQAGPPESLGVPTAQEASVLRGTALGSVPGGSITKGIPSTRVPSDSAITYRGSITHGTPADVLYKGTITRIIGEDSPSRLDRGREDSLPKGHVIYEGKKGHVLSYEGGMSVTQCSKEDGRSSSGPPHETAAPKRTYDMMEGRVGRAISSASIEGLMGRAIPPERHSPHHLKEQHHIRGSITQGIPRSYVEAQEDYLRREAKLLKREGTPPPPPPSRDLTEAYKTQALGPLKLKPAHEGLVATVKEAGRSIHEIPREELRHTPELPLAPRPLKEGSITQGTPLKYDTGASTTGSKKHDVRSLIGSPGRTFPPVHPLDVMADARALERACYEESLKSRPGTASSSGGSIARGAPVIVPELGKPRQSPLTYEDHGAPFAGHLPRGSPVTTREPTPRLQEGSLSSSKASQDRKLTSTPREIAKSPHSTVPEHHPHPISPYEHLLRGVSGVDLYRSHIPLAFDPTSIPRGIPLDAAAAYYLPRHLAPNPTYPHLYPPYLIRGYPDTAALENRQTIINDYITSQQMHHNTATAMAQRADMLRGLSPRESSLALNYAAGPRGIIDLSQVPHLPVLVPPTPGTPATAMDRLAYLPTAPQPFSSRHSSSPLSPGGPTHLTKPTTTSSSERERDRDRERDRDREREKSILTSTTTVEHAPIWRPGTEQSSGSSGSSGGGGGSSSRPASHSHAHQHSPISPRTQDALQQRPSVLHNTGMKGIITAVEPSTPTVLRSTSTSSPVRPAATFPPATHCPLGGTLDGVYPTLMEPVLLPKEAPRVARPERPRADTGHAFLAKPPARSGLEPASSPSKGSEPRPLVPPVSGHATIARTPAKNLAPHHASPDPPAPPASASDPHREKTQSKPFSIQELELRSLGYHGSSYSPEGVEPVSPVSSPSLTHDKGLPKHLEELDKSHLEGELRPKQPGPVKLGGEAAHLPHLRPLPESQPSSSPLLQTAPGVKGHQRVVTLAQHISEVITQDYTRHHPQQLSAPLPAPLYSFPGASCPVLDLRRPPSDLYLPPPDHGAPARGSPHSEGGKRSPEPNKTSVLGGGEDGIEPVSPPEGMTEPGHSRSAVYPLLYRDGEQTEPSRMGSKSPGNTSQPPAFFSKLTESNSAMVKSKKQEINKKLNTHNRNEPEYNISQPGTEIFNMPAITGTGGGGKAKVSGRPSSRKAKSPAPGLASGDRPPSVSSVHSEGDCNRRTPLTNRVWEDRPSSAGSTPFPYNPLIMRLQAGVMASPPPPGLPAGSGPLAGPHHAWDEEPKPLLCSQYETLSDSE

SEQ ID NO: 836655 - protein, 2280 aa, Homo sapiens
MSGSTQPVAQTWRATEPRYPPHSLSYPVQIARTHTDVGLLEYQHHSRDYASHLSPGSIIQPQRRRPSLLSEFQPGNERSQELHLRPESHSYLPELGKSEMEFIESKRPRLELLPDPLLRPSPLLATGQPAGSEDLTKDRSLTGKLEPVSPPSPPHTDPELELVPPRLSKEELIQNMDRVDREITMVEQQISKLKKKQQQLEEEAAKPPEPEKPVSPPPIESKHRSLVQIIYDENRKKAEAAHRILEGLGPQVELPLYNQPSDTRQYHENIKINQAMRKKLILYFKRRNHARKQWEQKFCQRYDQLMEAWEKKVERIENNPRRRAKESKVREYYEKQFPEIRKQRELQERMQSRVGQRGSGLSMSAARSEHEVSEIIDGLSEQENLEKQMRQLAVIPPMLYDADQQRIKFINMNGLMADPMKVYKDRQVMNMWSEQEKETFREKFMQHPKNFGLIASFLERKTVAECVLYYYLTKKNENYKSLVRRSYRRRGKSQQQQQQQQQQQQQQQQQPMPRSSQEEKDEKEKEKEAEKEEEKPEVENDKEDLLKEKTDDTSGEDNDEKEAVASKGRKTANSQGRRKGRITRSMANEANSEEAITPQQSAELASMELNESSRWTEEEMETAKKGLLEHGRNWSAIARMVGSKTVSQCKNFYFNYKKRQNLDEILQQHKLKMEKERNARRKKKKAPAAASEEAAFPPVVEDEEMEASGVSGNEEEMVEEAEALHASGNEVPRGECSGPATVNNSSDTESIPSPHTEAAKDTGQNGPKPPATLGADGPPPGPPTPPPEDIPAPTEPTPASEATGAPTPPPAPPSPSAPPPVVPKEEKEEETAAAPPVEEGEEQKPPAAEELAVDTGKAEEPVKSECTEEAEEGPAKGKDAEAAEATAEGALKAEKKEGGSGRATTAKSSGAPQDSDSSATCSADEVDEAEGGDKNRLLSPRPSLLTPTGDPRANASPQKPLDLKQLKQRAAAIPPIQVTKVHEPPREDAAPTKPAPPAPPPPQNLQPESDAPQQPGSSPRGKSRSPAPPADKEAEKPVFFPAFAAEAQKLPGDPPCWTSGLPFPVPPREVIKASPHAPDPSAFSYAPPGHPLPLGLHDTARPVLPRPPTISNPPPLISSAKHPSVLERQIGAISQGMSVQLHVPYSEHAKAPVGPVTMGLPLPMDPKKLAPFSGVKQEQLSPRGQAGPPESLGVPTAQEASVLRGTALGSVPGGSITKGIPSTRVPSDSAITYRGSITHGTPADVLYKGTITRIIGEDSPSRLDRGREDSLPKGHVIYEGKKGHVLSYEGGMSVTQCSKEDGRSSSGPPHETAAPKRTYDMMEGRVGRAISSASIEGLMGRAIPPERHSPHHLKEQHHIRGSITQGIPRSYVEAQEDYLRREAKLLKREGTPPPPPPSRDLTEAYKTQALGPLKLKPAHEGLVATVKEAGRSIHEIPREELRHTPELPLAPRPLKEGSITQGTPLKYDTGASTTGSKKHDVRSLIGSPGRTFPPVHPLDVMADARALERACYEESLKSRPGTASSSGGSIARGAPVIVPELGKPRQSPLTYEDHGAPFAGHLPRGSPVTTREPTPRLQEGSLSSSKASQDRKLTSTPREIAKSPHSTVPEHHPHPISPYEHLLRGVSGVDLYRSHIPLAFDPTSIPRGIPLDAAAAYYLPRHLAPNPTYPHLYPPYLIRGYPDTAALENRQTIINDYITSQQMHHNTATAMAQRADMLRGLSPRESSLALNYAAGPRGIIDLSQVPHLPVLVPPTPGTPATAMDRLAYLPTAPQPFSSRHSSSPLSPGGPTHLTKPTTTSSSERERDRDRERDRDREREKSILTSTTTVEHAPIWRPGTEQSSGSSGSSGGGGGSSSRPASHSHAHQHSPISPRTQDALQQRPSVLHNTGMKGIITAVEPSTPTVLRSTSTSSPVRPAATFPPATHCPLGGTLDGVYPTLMEPVLLPKEAPRVARPERPRADTGHAFLAKPPARSGLEPASSPSKGSEPRPLVPPVSGHATIARTPAKNLAPHHASPDPPAPPASASDPHREKTQSKPFSIQELELRSLGYHGSSYSPEGVEPVSPVSSPSLTHDKGLPKHLEELDKSHLEGELRPKQPGPVKLGGEAAHLPHLRPLPESQPSSSPLLQTAPGVKGHQRVVTLAQHISEVITQDYTRHHPQQLSAPLPAPLYSFPGASCPVLDLRRPPSDLYLPPPDHGAPALCRPYSGDVYLVLGKGGEGAGEGARQACGSHTQAARAARDPKQDDHAPPRHCLPRMHLEPKSKLSSQPPRPPSASHPA

SEQ ID NO: 836656 - protein, 2525 aa, Homo sapiens; identical to SEQ ID NO: 836638

SEQ ID NO: 836657 - protein, 2354 aa, Homo sapiens
MSGSTQPVAQTWRATEPRYPPHSLSYPVQIARTHTDVGLLEYQHHSRDYASHLSPGSIIQPQRRRPSLLSEFQPGNERSQELHLRPESHSYLPELGKSEMEFIESKRPRLELLPDPLLRPSPLLATGQPAGSEDLTKDRSLTGKLEPVSPPSPPHTDPELELVPPRLSKEELIQNMDRVDREITMVEQQISKLKKKQQQLEEEAAKPPEPEKPVSPPPIESKHRSLVQIIYDENRKKAEAAHRILEGLGPQVELPLYNQPSDTRQYHENIKINQAMRKKLILYFKRRNHARKQWEQKFCQRYDQLMEAWEKKVERIENNPRRRAKESKVREYYEKQFPEIRKQRELQERMQSRVGQRGSGLSMSAARSEHEVSEIIDGLSEQENLEKQMRQLAVIPPMLYDADQQRIKFINMNGLMADPMKVYKDRQVMNMWSEQEKETFREKFMQHPKNFGLIASFLERKTVAECVLYYYLTKKNENYKSLVRRSYRRRGKSQQQQQQQQQQQQQQQQQPMPRSSQEEKDEKEKEKEAEKEEEKPEVENDKEDLLKEKTDDTSGEDNDEKEAVASKGRKTANSQGRRKGRITRSMANEANSEEAITPQQSAELASMELNESSRWTEEEMETAKKGLLEHGRNWSAIARMVGSKTVSQCKNFYFNYKKRQNLDEILQQHKLKMEKERNARRKKKKAPAAASEEAAFPPVVEDEEMEASGVSGNEEEMVEEAEALHASGNEVPRGECSGPATVNNSSDTESIPSPHTEAAKDTGQNGPKPPATLGADGPPPGPPTPPPEDIPAPTEPTPASEATGAPTPPPAPPSPSAPPPVVPKEEKEEETAAAPPVEEGEEQKPPAAEELAVDTGKAEEPVKSECTEEAEEGPAKGKDAEAAEATAEGALKAEKKEGGSGRATTAKSSGAPQDSDSSATCSADEVDEAEGGDKNRLLSPRPSLLTPTGDPRANASPQKPLDLKQLKQRAAAIPPIQVTKVHEPPREDAAPTKPAPPAPPPPQNLQPESDAPQQPGSSPRGKSRSPAPPADKEAEKPVFFPAFAAEAQKLPGDPPCWTSGLPFPVPPREVIKASPHAPDPSAFSYAPPGHPLPLGLHDTARPVLPRPPTISNPPPLISSAKHPSVLERQIGAISQGMSVQLHVPYSEHAKAPVGPVTMGLPLPMDPKKLAPFSGVKQEQLSPRGQAGPPESLGVPTAQEASVLRGTALGSVPGGSITKGIPSTRVPSDSAITYRGSITHGTPADVLYKGTITRIIGEDSPSRLDRGREDSLPKGHVIYEGKKGHVLSYEGGMSVTQCSKEDGRSSSGPPHETAAPKRTYDMMEGRVGRAISSASIEGLMGRAIPPERHSPHHLKEQHHIRGSITQGIPRSYVEAQEDYLRREAKLLKREGTPPPPPPSRDLTEAYKTQALGPLKLKPAHEGLVATVKEAGRSIHEIPREELRHTPELPLAPRPLKEGSITQGTPLKYDTGASTTGSKKHDVRSLIGSPGRTFPPVHPLDVMADARALERACYEESLKSRPGTASSSGGSIARGAPVIVPELGKPRQSPLTYEDHGAPFAGHLPRGSPVTTREPTPRLQEGSLSSSKASQDRKLTSTPREIAKSPHSTVPEHHPHPISPYEHLLRGVSGVDLYRSHIPLAFDPTSIPRGIPLDAAAAYYLPRHLAPNPTYPHLYPPYLIRGYPDTAALENRQTIINDYITSQQMHHNTATAMAQRADMLRGLSPRESSLALNYAAGPRGIIDLSQVPHLPVLVPPTPGTPATAMDRLAYLPTAPQPFSSRHSSSPLSPGGPTHLTKPTTTSSSERERDRDRERDRDREREKSILTSTTTVEHAPIWRPGTEQSSGSSGSSGGGGGSSSRPASHSHAHQHSPISPRTQDALQQRPSVLHNTGMKGIITAVEPSTPTVLRSTSTSSPVRPAATFPPATHCPLGGTLDGVYPTLMEPVLLPKEAPRVARPERPRADTGHAFLAKPPARSGLEPASSPSKGSEPRPLVPPVSGHATIARTPAKNLAPHHASPDPPAPPASASDPHREKTQSKPFSIQELELRSLGYHGSSYSPEGVEPVSPVSSPSLTHDKGLPKHLEELDKSHLEGELRPKQPGPVKLGGEAAHLPHLRPLPESQPSSSPLLQTAPGVKGHQRVVTLAQHISEVITQDYTRHHPQQLSAPLPAPLYSFPGASCPVLDLRRPPSDLYLPPPDHGAPARGSPHSEGGKRSPEPNKTSVLGGGEDGIEPVSPPEGMTEPGHSRSAVYPLLYRDGEQTEPSRMGSKSPGNTSQPPAFFSKLTESNSAMVKSKKQEINKKLNTHNRNEPEYNISQPGTEIFNMPAITGTVLVHKKKFSRLQSLPLNLCQTSPL

SEQ ID NO: 836658 - protein, 1922 aa, Homo sapiens
MSGSTQPVAQTWRATEPRYPPHSLSYPVQIARTHTDVGLLEYQHHSRDYASHLSPGSIIQPQRRRPSLLSEFQPGNERSQELHLRPESHSYLPELGKSEMEFIESKRPRLELLPDPLLRPSPLLATGQPAGSEDLTKDRSLTGKLEPVSPPSPPHTDPELELVPPRLSKEELIQNMDRVDREITMVEQQISKLKKKQQQLEEEAAKPPEPEKPVSPPPIESKHRSLVQIIYDENRKKAEAAHRILEGLGPQVELPLYNQPSDTRQYHENIKINQAMRKKLILYFKRRNHARKQWEQKFCQRYDQLMEAWEKKVERIENNPRRRAKESKVREYYEKQFPEIRKQRELQERMQSRVGQRGSGLSMSAARSEHEVSEIIDGLSEQENLEKQMRQLAVIPPMLYDADQQRIKFINMNGLMADPMKVYKDRQVMNMWSEQEKETFREKFMQHPKNFGLIASFLERKTVAECVLYYYLTKKNENYKSLVRRSYRRRGKSQQQQQQQQQQQQQQQQQPMPRSSQEEKDEKEKEKEAEKEEEKPEVENDKEDLLKEKTDDTSGEDNDEKEAVASKGRKTANSQGRRKGRITRSMANEANSEEAITPQQSAELASMELNESSRWTEEEMETAKKGLLEHGRNWSAIARMVGSKTVSQCKNFYFNYKKRQNLDEILQQHKLKMEKERNARRKKKKAPAAASEEAAFPPVVEDEEMEASGVSGNEEEMVEEAEALHASGNEVPRGECSGPATVNNSSDTESIPSPHTEAAKDTGQNGPKPPATLGADGPPPGPPTPPPEDIPAPTEPTPASEATGAPTPPPAPPSPSAPPPVVPKEEKEEETAAAPPVEEGEEQKPPAAEELAVDTGKAEEPVKSECTEEAEEGPAKGKDAEAAEATAEGALKAEKKEGGSGRATTAKSSGAPQDSDSSATCSADEVDEAEGGDKNRLLSPRPSLLTPTGDPRANASPQKPLDLKQLKQRAAAIPPIQVTKVHEPPREDAAPTKPAPPAPPPPQNLQPESDAPQQPGSSPRGKSRSPAPPADKEAEKPVFFPAFAAEAQKLPGDPPCWTSGLPFPVPPREVIKASPHAPDPSAFSYAPPGHPLPLGLHDTARPVLPRPPTISNPPPLISSAKHPSVLERQIGAISQGMSVQLHVPYSEHAKAPVGPVTMGLPLPMDPKKLAPFSGVKQEQLSPRGQAGPPESLGVPTAQEASVLRGTALGSVPGGSITKGIPSTRVPSDSAITYRGSITHGTPADVLYKGTITRIIGEDSPSRLDRGREDSLPKGHVIYEGKKGHVLSYEGGMSVTQCSKEDGRSSSGPPHETAAPKRTYDMMEGRVGRAISSASIEGLMGRAIPPERHSPHHLKEQHHIRGSITQGIPRSYVEAQEDYLRREAKLLKREGTPPPPPPSRDLTEAYKTQALGPLKLKPAHEGLVATVKEAGRSIHEIPREELRHTPELPLAPRPLKEGSITQGTPLKYDTGASTTGSKKHDVRSLIGSPGRTFPPVHPLDVMADARALERACYEESLKSRPGTASSSGGSIARGAPVIVPELGKPRQSPLTYEDHGAPFAGHLPRGSPVTTREPTPRLQEGSLSSSKASQDRKLTSTPREIAKSPHSTVPEHHPHPISPYEHLLRGVSGVDLYRSHIPLAFDPTSIPRGIPLDAAAAYYLPRHLAPNPTYPHLYPPYLIRGYPDTAALENRQTIINDYITSQQMHHNTATAMAQRADMLRGLSPRESSLALNYAAGPRGIIDLSQVPHLPVLVPPTPGTPATAMDRLAYLPTAPQPFSSRHSSSPLSPGGPTHLTKPTTTSSSERERDRDRERDRDREREKSILTSTTTVEHAPIWRPGTEQSSGSSGSSGGGGGSSSRPASHSHAHQHSPISPRTQDALQQRPSVLHNTGMKGIITAVEPSTPTVLRSTINLLPVPAADPLT

SEQ ID NO: 836659 - protein, 1588 aa, Homo sapiens
MSGSTQPVAQTWRATEPRYPPHSLSYPVQIARTHTDVGLLEYQHHSRDYASHLSPGSIIQPQRRRPSLLSEFQPGNERSQELHLRPESHSYLPELGKSEMEFIESKRPRLELLPDPLLRPSPLLATGQPAGSEDLTKDRSLTGKLEPVSPPSPPHTDPELELVPPRLSKEELIQNMDRVDREITMVEQQISKLKKKQQQLEEEAAKPPEPEKPVSPPPIESKHRSLVQIIYDENRKKAEAAHRILEGLGPQVELPLYNQPSDTRQYHENIKINQAMRKKLILYFKRRNHARKQWEQKFCQRYDQLMEAWEKKVERIENNPRRRAKESKVREYYEKQFPEIRKQRELQERMQSRVGQRGSGLSMSAARSEHEVSEIIDGLSEQENLEKQMRQLAVIPPMLYDADQQRIKFINMNGLMADPMKVYKDRQVMNMWSEQEKETFREKFMQHPKNFGLIASFLERKTVAECVLYYYLTKKNENYKSLVRRSYRRRGKSQQQQQQQQQQQQQQQQQPMPRSSQEEKDEKEKEKEAEKEEEKPEVENDKEDLLKEKTDDTSGEDNDEKEAVASKGRKTANSQGRRKGRITRSMANEANSEEAITPQQSAELASMELNESSRWTEEEMETAKKGLLEHGRNWSAIARMVGSKTVSQCKNFYFNYKKRQNLDEILQQHKLKMEKERNARRKKKKAPAAASEEAAFPPVVEDEEMEASGVSGNEEEMVEEAEALHASGNEVPRGECSGPATVNNSSDTESIPSPHTEAAKDTGQNGPKPPATLGADGPPPGPPTPPPEDIPAPTEPTPASEATGAPTPPPAPPSPSAPPPVVPKEEKEEETAAAPPVEEGEEQKPPAAEELAVDTGKAEEPVKSECTEEAEEGPAKGKDAEAAEATAEGALKAEKKEGGSGRATTAKSSGAPQDSDSSATCSADEVDEAEGGDKNRLLSPRPSLLTPTGDPRANASPQKPLDLKQLKQRAAAIPPIQVTKVHEPPREDAAPTKPAPPAPPPPQNLQPESDAPQQPGSSPRGKSRSPAPPADKEAEKPVFFPAFAAEAQKLPGDPPCWTSGLPFPVPPREVIKASPHAPDPSAFSYAPPGHPLPLGLHDTARPVLPRPPTISNPPPLISSAKHPSVLERQIGAISQGMSVQLHVPYSEHAKAPVGPVTMGLPLPMDPKKLAPFSGVKQEQLSPRGQAGPPESLGVPTAQEASVLRGTALGSVPGGSITKGIPSTRVPSDSAITYRGSITHGTPADVLYKGTITRIIGEDSPSRLDRGREDSLPKGHVIYEGKKGHVLSYEGGMSVTQCSKEDGRSSSGPPHETAAPKRTYDMMEGRVGRAISSASIEGLMGRAIPPERHSPHHLKEQHHIRGSITQGIPRSYVEAQEDYLRREAKLLKREGTPPPPPPSRDLTEAYKTQALGPLKLKPAHEGLVATVKEAGRSIHEIPREELRHTPELPLAPRPLKEGSITQGTPLKYDTGASTTGSKKHDVRSLIGSPGRTFPPVHPLDVMADARALERACYEESLKSRPGTASSSGGSIARGAPVIVPELGKPRQSPLTYEDHGAPFAGHLPRGSPVTTREPTPRLQEVHLLGSRHS

SEQ ID NO: 836660 - protein, 1358 aa, Homo sapiens
MSGSTQPVAQTWRATEPRYPPHSLSYPVQIARTHTDVGLLEYQHHSRDYASHLSPGSIIQPQRRRPSLLSEFQPGNERSQELHLRPESHSYLPELGKSEMEFIESKRPRLELLPDPLLRPSPLLATGQPAGSEDLTKDRSLTGKLEPVSPPSPPHTDPELELVPPRLSKEELIQNMDRVDREITMVEQQISKLKKKQQQLEEEAAKPPEPEKPVSPPPIESKHRSLVQIIYDENRKKAEAAHRILEGLGPQVELPLYNQPSDTRQYHENIKINQAMRKKLILYFKRRNHARKQWEQKFCQRYDQLMEAWEKKVERIENNPRRRAKESKVREYYEKQFPEIRKQRELQERMQSRVGQRGSGLSMSAARSEHEVSEIIDGLSEQENLEKQMRQLAVIPPMLYDADQQRIKFINMNGLMADPMKVYKDRQVMNMWSEQEKETFREKFMQHPKNFGLIASFLERKTVAECVLYYYLTKKNENYKSLVRRSYRRRGKSQQQQQQQQQQQQQQQQQPMPRSSQEEKDEKEKEKEAEKEEEKPEVENDKEDLLKEKTDDTSGEDNDEKEAVASKGRKTANSQGRRKGRITRSMANEANSEEAITPQQSAELASMELNESSRWTEEEMETAKKGLLEHGRNWSAIARMVGSKTVSQCKNFYFNYKKRQNLDEILQQHKLKMEKERNARRKKKKAPAAASEEAAFPPVVEDEEMEASGVSGNEEEMVEEAEALHASGNEVPRGECSGPATVNNSSDTESIPSPHTEAAKDTGQNGPKPPATLGADGPPPGPPTPPPEDIPAPTEPTPASEATGAPTPPPAPPSPSAPPPVVPKEEKEEETAAAPPVEEGEEQKPPAAEELAVDTGKAEEPVKSECTEEAEEGPAKGKDAEAAEATAEGALKAEKKEGGSGRATTAKSSGAPQDSDSSATCSADEVDEAEGGDKNRLLSPRPSLLTPTGDPRANASPQKPLDLKQLKQRAAAIPPIQVTKVHEPPREDAAPTKPAPPAPPPPQNLQPESDAPQQPGSSPRGKSRSPAPPADKEAEKPVFFPAFAAEAQKLPGDPPCWTSGLPFPVPPREVIKASPHAPDPSAFSYAPPGHPLPLGLHDTARPVLPRPPTISNPPPLISSAKHPSVLERQIGAISQGMSVQLHVPYSEHAKAPVGPVTMGLPLPMDPKKLAPFSGVKQEQLSPRGQAGPPESLGVPTAQEASVLRGTALGSVPGGSITKGIPSTRVPSDSAITYRGSITHGTPADVLYKGTITRIIGEDSPSRLDRGREDSLPKGHVIYEGKKGHVLSYEGGMSVTQCSKEDGRSSSGPPHETAAPKRTYDMMEGRVGRAISSASIEGLMGRAIPPERHSPHHLKEPHV

SEQ ID NO: 836661 - protein, 406 aa, Homo sapiens
MSGSTQPVAQTWRATEPRYPPHSLSYPVQIARTHTDVGLLEYQHHSRDYASHLSPGSIIQPQRRRPSLLSEFQPGNERSQELHLRPESHSYLPELGKSEMEFIESKRPRLELLPDPLLRPSPLLATGQPAGSEDLTKDRSLTGKLEPVSPPSPPHTDPELELVPPRLSKEELIQNMDRVDREITMVEQQISKLKKKQQQLEEEAAKPPEPEKPVSPPPIESKHRSLVQIIYDENRKKAEAAHRILEGLGPQVELPLYNQPSDTRQYHENIKINQAMRKKLILYFKRRNHARKQWEQKFCQRYDQLMEAWEKKVERIENNPRRRAKESKVREYYEKQFPEIRKQRELQERMQSRVGQRGSGLSMSAARSEHEVSEIIDGLSEQEVSPGPDSGLSSFSLASPVRVQRP

SEQ ID NO: 836662 - protein, 104 aa, Homo sapiens
MGSKSPGNTSQPPAFFSKLTESNSAMVKSKKQEINKKLNTHNRNEPEYSKGPAGSRGSMGPQVGGWPAWAAGAAQWQKPTVHLRKLSGPADHLPPGPLPHIWGA

SEQ ID NO: 836663 - protein, 88 aa, Homo sapiens
PWARCLTLHPPPALGYHGSSYSPEGVEPVSPVSSPSLTHDKGLPKHLEELDKSHLEGELRPKQPGTPHPVPRPPKPCTVRTLKAPSCR

SEQ ID NO: 836664 - protein, 108 aa, Homo sapiens
MVSVVGEFKSCTILFSDVVTFTNICTACEPIQIVNVLNSMYSKFDRLTSVHAVYKVETIGDAYMVVGGVPVPIGNHAQRVANFALGMRISAKEVTNPVTGEPIQVESN

SEQ ID NO: 836665 - protein, 515 aa, Homo sapiens
MHHRFVWREEQMGKCFSITTRIEVVCATLYQALQAAFLKMKEKYLNVSACPVKKSHWDVVRSIVMFGKGHLMNTFEPIYPERLWIEEKTFCNAFPFHIVFDESLQVKQARVNIQKYVPGLQTQNIQLDEYFSIIHPQVTFNIFSIRRFINSQFVLKTRREMMPVAWQSRTTLKLQGQMIWMESMWCMVYLCSPKLRSLQELEELNMHLSDIAPNDTTRDLILLNQQRLAEIELSNQLERKKEELQVLSKHLAIEKKKTETLLYAMLPKHVANQLREGKKVAAGEFKSCTILFSDVVTFTNICTACEPIQIVNVLNSMYSKFDRLTSVHAVYKVETIGDAYMVVGGVPVPIGNHAQRVANFALGMRISAKEVTNPVTGEPIQLRVGIHTGPVLADVVGDKMPRYCLFGDTVNTASRMESHGLPNKVHLSPTAYRALKNQGFKIIERGEIEVKGKGRMTTYFLIQNLNATEDEIMGRSKTPVDHKGSTQKASLPTTKLQGSVQPSCPEHSSLASWLL

SEQ ID NO: 836666 - protein, 693 aa, Homo sapiens
MYGFINTCLQSLVIEKFGEETWEKLKTSAEVQDAFMTYTMYDDVITIKLIQEACNILGVSMEAILKLFGEYFAILKMSGYDRMLRTLGGNLMEFIENLDALHSYLALSYQEMNAPSFRVERGADGKMFLHYYSDRSGLCHIVPGIIEAVAKDFFDIDVIMDILDMNEEVERTGKKEHVVFLIVQKAHRKMRKTKPKRLQDSQGMERDQEALQAAFLKMKEKYLNVSACPVKKSHWDVVRSIVMFGKGHLMNTFEPIYPERLWIEEKTFCNAFPFHIVFDESLQVKQARVNIQKYVPGLQTQNIQLDEYFSIIHPQVTFNIFSIRRFINSQFVLKTRREMMPVAWQSRTTLKLQGQMIWMESMWCMVYLCSPKLRSLQELEELNMHLSDIAPNDTTRDLILLNQQRLAEIELSNQLERKKEELQVLSKHLAIEKKKTETLLYAMLPKHVANQLREGKKVAAGEFKSCTILFSDVVTFTNICTACEPIQIVNVLNSMYSKFDRLTSVHAVYKVETIGDAYMVVGGVPVPIGNHAQRVANFALGMRISAKEVTNPVTGEPIQLRVGIHTGPVLADVVGDKMPRYCLFGDTVNTASRMESHGLPNKVHLSPTAYRALKNQGFKIIERGEIEVKGKGRMTTYFLIQNLNATEDEIMGRSKTPVDHKGSTQKASLPTTKLQGSVQPSCPEHSSLASWLL

SEQ ID NO: 836667 - protein, 766 aa, Homo sapiens
ARRAGAEEAREEGQRGSWKMADEAALALQPGGSPSAAGADREAASSPAGEPLRKRPRRDGPGLERSPGEPGGAAPEREVPAAARGCPGAAAAALWREAEAEAAAAGGEQEAQATAAAGEGDNGPGLQGPSREPPLADNLYDEDDDDEGEEEEEAAAAAIGYRDNLLFGDEIITNGFHSCESDEEDRASHASSSDWTPRPRIGPYTFVQQHLMIGTDPRTILKDLLPETIPPPELDDMTLWQIVINILSEPPKRKKRKDINTIEDAVKLLQECKKIIVLTGAGVSVSCGIPDFRSRDGIYARLAVDFPDLPDPQAMFDIEYFRKDPRPFFKFAKEIYPGQFQPSLCHKFIALSDKEGKLLRNYTQNIDTLEQVAGIQRIIQCHGSFATASCLICKYKVDCEAVRGDIFNQVVPRCPRCPADEPLAIMKPEIVFFGENLPEQFHRAMKYDKDEVDLLIVIGSSLKVRPVALIPSSIPHEVPQILINREPLPHLHFDVELLGDCDVIINELCHRLGGEYAKLCCNPVKLSEITEKPPRTQKELAYLSELPPTPLHVSEDSSSPERTSPPDSSVIVTLLDQAAKSNDDLDVSESKGCMEEKPQEVQTSRNVESIAEQMENPDLKNVGSSTGEKNERTSVAGTVRKCWPNRVAKEQISRRLDGNQYLFLPPNRYIFHGAEVYSDSEDDVLSSSSCGSNSDSGTCQSPSLEEPMEDESEIEEFYNGLEDEPDVPERAGGAGFGTDGDDQEAINEAISVKQEVTDMNYPSNKS

SEQ ID NO: 836668 - protein, 766 aa, Homo sapiens; identical to SEQ ID NO: 836667

SEQ ID NO: 836669 - protein, 383 aa, Homo sapiens
ARRAGAEEAREEGQRGSWKMADEAALALQPGGSPSAAGADREAASSPAGEPLRKRPRRDGPGLERSPGEPGGAAPEREVPAAARGCPGAAAAALWREAEAEAAAAGGEQEAQATAAAGEGDNGPGLQGPSREPPLADNLYDEDDDDEGEEEEEAAAAAIGYRDNLLFGDEIITNGFHSCESDEEDRASHASSSDWTPRPRIGPYTFVQQHLMIGTDPRTILKDLLPETIPPPELDDMTLWQIVINILSEPPKRKKRKDINTIEDAVKLLQECKKIIVLTGAGVSVSCGIPDFRSRDGIYARLAVDFPDLPDPQAMFDIEYFRKDPRPFFKFAKEIYPGQFQPSLCHKFIALSDKEGKLLRNYTQNIDTLEQVAGIQRIIQCHG

SEQ ID NO: 836670 - protein, 766 aa, Homo sapiens; identical to SEQ ID NO: 836667

SEQ ID NO: 836671 - protein, 1015 aa, Homo sapiens
PVLSFRDFGQLAVELLDQSYKQDEQLAMKLLTYELKNWSNATCLQLAVAAKHRDFIAHTCSQMLLTDMWMGRLRMRKNSGLKVILGILLPPSILSLEFKNKDDMPYMSQAQEIHLQEKEAEEPEKPTKEKEEEDMELTAMLGRNNGESSRKKDEEEVQSKHRLIPLGRKIYEFYNAPIVKFWFYTLAYIGYLMLFNYIVLVKMERWPSTQEWIVISYIFTLGIEKMREILMSEPGKLLQKVKVWLQEYWNVTDLIAILLFSVGMILRLQDQPFRSDGRVIYCVNIIYWYIRLLDIFGVNKYLGPYVMMIGKMMIDMMYFVIIMLVVLMSFGVARQAILFPNEEPSWKLAKNIFYMPYWMIYGEVFADQIDPPCGQNETREDGKIIQLPPCKTGAWIVPAIMACYLLVANILLVNLLIAVFNNTFFEVKSISNQVWKFQRYQLIMTFHERPVLPPPLIIFSHMTMIFQHLCCRWRKHESDPDERDYGLKLFITDDELKKVHDFEEQCIEEYFREKDDRFNSSNDERIRVTSERVENMSMRLEEVNEREHSMKASLQTVDIRLAQLEDLIGRMATALERLTGLERAESNKIRSRTSSDCTDAAYIVRQSSFNSQEGNTFKLQESIDPAGEETMSPTSPTLMPRMRSHSFYSVNMKDKGGIEKLESIFKERSLSLHRATSSHSVAKEPKAPAAPANTLAIVPDSRRPSSCIDIYVSAMDELHCDIDPLDNSVNILGLGEPSFSTPVPSTAPSSSAYATLAPTDRPPSRSIDFEDITSMDTRSFSSDYTHLPECQNPWDSEPPMYHTIERSKSSRYLATTPFLLEEAPIVKSHSFMFSPSRSYYANFGVPVKTAEYTSITDCIDTRCVNAPQAIADRAAFPGGLGDKVEDLTCCHPEREAELSHPSSDSEENEAKGRRATIAISSQEGDNSERTLSNNITVPKIERANSYSAEEPSAPYAHTRKSFSISDKLDRQRNTASLRNPFQRSKSSKPEGRGDSLSMRRLSRTSAFQSFESKHN

SEQ ID NO: 836672 - protein, 245 aa, Homo sapiens
MLGRNNGESSRKKDEEEVQSKHRLIPLGRKIYEFYNAPIVKFWFYTLAYIGYLMLFNYIVLVKMERWPSTQEWIVISYIFTLGIEKMREILMSEPGKLLQKVKVWLQEYWNVTDLIAILLFSVGMILRLQDQPFRSDGRVIYCVNIIYWYIRLLDIFGVNKYLGPYVMMIGKMMIDMMYFVIIMLVVLMSFGVARQAILFPNEEPSWKLAKNIFYMPYWMIYGEVFADQIDRKQVYDSHTPKSGI

SEQ ID NO: 836673 - protein, 110 aa, Homo sapiens
MLGLLGLNSQSTVLCLLTAGVYRIPDALQLYRVSEDGTLAVHPGMDRNLLYFHPGNRKDERGNGFYKRKRKRKTVVKFYLWMEGTGRCLGCKLSRKLFSLTLPQLLLCSS

SEQ ID NO: 836674 - protein, 950 aa, Homo sapiens
  misc_feature (928)..(928): Xaa can be any naturally occurring amino acid
MLGRNNGESSRKKDEEEVQSKHRLIPLGRKIYEFYNAPIVKFWFYTLAYIGYLMLFNYIVLVKMERWPSTQEWIVISYIFTLGIEKMREILMSEPGKLLQKVKVWLQEYWNVTDLIAILLFSVGMILRLQDQPFRSDGRVIYCVNIIYWYIRLLDIFGVNKYLGPYVMMIGKMMIDMMYFVIIMLVVLMSFGVARQAILFPNEEPSWKLAKNIFYMPYWMIYGEVFADQIDPPCGQNETREDGKIIQLPPCKTGAWIVPAIMACYLLVANILLVNLLIAVFNNTFFEVKSISNQVWKFQRYQLIMTFHERPVLPPPLIIFSHMTMIFQHLCCRWRKHESDPDERDYGLKLFITDDELKKVHDFEEQCIEEYFREKDDRFNSSNDERIRVTSERVENMSMRLEEVNEREHSMKASLQTVDIRLAQLEDLIGRMATALERLTGLERAESNKIRSRTSSDCTDAAYIVRQSSFNSQEGNTFKLQESIDPAGEETMSPTSPTLMPRMRSHSFYSVNMKDKGGIEKLESIFKERSLSLHRATSSHSVAKEPKAPAAPANTLAIVPDSRRPSSCIDIYVSAMDELHCDIDPLDNSVNILGLGEPSFSTPVPSTAPSSSAYATLAPTDRPPSRSIDFEDITSMDTRSFSSDYTHLPECQNPWDSEPPMYHTIERSKSSRYLATTPFLLEEAPIVKSHSFMFSPSRSYYANFGVPVKTAEYTSITDCIDTRCVNAPQAIADRAAFPGGLGDKVEDLTCCHPEREAELSHPSSDSEENEAKGRRATIAISSQEGDNSERTLSNNITVPKIERANSYSAEEPSAPYAHTRKSFSISDKLDRQRNTASLRNPFQRSKSSKPEGRGDSLSMRRLSRTSAFQRNPALSSLTKQRHAFGSAELKVNFWPTIQKAFRLDTCRSKGFIGCYTCLARRRIRRGKXSYRWICLRRLPAKPSDAGNQGA

SEQ ID NO: 836675 - protein, 108 aa, Homo sapiens
MLGRNNGESSRKKDEEEVQSKHRLIPLGRKIYEFYNAPIVKFWFYTLAYIGYLMLFNYIVLVKMERWPSTQEWIVISYIFTLGIEKMREVTAFIKENVRERQWLSSIC

SEQ ID NO: 836676 - protein, 88 aa, Homo sapiens
ISNSRPRRHGCENTTEGGRGCCKGSSLRHTAVAMVKLSKEAKQRLQQLFKGSQFAIRWGFIPLVIYLGFKRGADPGMPEPTVLSLLWG

SEQ ID NO: 836677 - protein, 81 aa, Homo sapiens
MIEAHVDVKTTDGYCFRLFCVGFTKKRNNQIRKTSYAQHQQVRQIRKKMMEIMTREVQTNDLKEVVNEIDSQHGRCVLWLG

SEQ ID NO: 836678 - protein, 136 aa, Homo sapiens
EWLKDSWCRFAFSGRIPRSQPFPMADPEELQVSSPPPPPPSSPSSSDASAASSPGGPVSLGWPVPSRSSGPTVDQLEEVELQIGDAAFSLTKLLEATSAVSAQVEELAFKCTENARFLKTWRDLLKEGYDSLKPDD

SEQ ID NO: 836679 - protein, 136 aa, Homo sapiens; identical to SEQ ID NO: 836678

SEQ ID NO: 836680 - protein, 136 aa, Homo sapiens; identical to SEQ ID NO: 836678

SEQ ID NO: 836681 - protein, 136 aa, Homo sapiens; identical to SEQ ID NO: 836678

SEQ ID NO: 836682 - protein, 92 aa, Homo sapiens
AAAGAYYYKFAAASSGCCKGSSLRHTAVAMVKLSKEAKQRLQQLFKGSQFAIRWGFIPLVIYLAYFGDKGLFGLLDLEAISGQHGRCVLWLG

SEQ ID NO: 836683 - protein, 136 aa, Homo sapiens; identical to SEQ ID NO: 836678

SEQ ID NO: 836684 - protein, 88 aa, Homo sapiens; identical to SEQ ID NO: 836676

SEQ ID NO: 836685 - protein, 88 aa, Homo sapiens; identical to SEQ ID NO: 836676

SEQ ID NO: 836686 - protein, 136 aa, Homo sapiens; identical to SEQ ID NO: 836678

SEQ ID NO: 836687 - protein, 136 aa, Homo sapiens; identical to SEQ ID NO: 836678

SEQ ID NO: 836688 - protein, 136 aa, Homo sapiens; identical to SEQ ID NO: 836678

SEQ ID NO: 836689 - protein, 136 aa, Homo sapiens; identical to SEQ ID NO: 836678

SEQ ID NO: 836690 - protein, 55 aa, Homo sapiens
MVKLSKEAKQRLQQLFKGSQFAIRWGFIPLVIYLGFKRGADPGMPEPTVLSLLWG

SEQ ID NO: 836691 - protein, 1433 aa, Homo sapiens [sequence omitted]

SEQ ID NO: 836692 - protein, 1433 aa, Homo sapiens [sequence omitted]

SEQ ID NO: 836693 - protein, 94 aa, Homo sapiens
RHHRGNQIKTSKYTVLSFVPKNIFEQLHRFANLYFVGIAVLNFIPVVNAFQPEVSMIPICVILAVTAIKDAWEDLRRYKSDKVINNRECLIYSR

SEQ ID NO: 836694 - protein, 501 aa, Homo sapiens
MKKEGRKRWKRKEDKKRVVVSNLLFEGWSHKENPNRHHRGNQIKTSKYTVLSFVPKNIFEQLHRFANLYFVGIAVLNFIPVVNAFQPEVSMIPICVILAVTAIKDAWEDLRRYKSDKVINNRECLIYSRKEQTYVQKCWKDVRVGDFIQMKCNEIVPADILLLFSSDPNGICHLETASLDGETNLKQRRVVKGFSQQEVQFEPELFHNTIVCEKPNNHLNKFKGYMEHPDQTRTGFGCESLLLRGCTIRNTEMAVGIVIYAGHETKAMLNNSGPRYKRSKIERRMNIDIFFCIGILILMCLIGAVGHSIWNGTFEEHPPFDVPDANGSFLPSALGGFYMFLTMIILLQVLIPISLYVSIELVKLGQVFFLSNDLDLYDEETDLSIQCRALNIAEDLGQIQYIFSDKTGTLTENKMVFRRCTIMGSEYSHQENGIEAPKGSIPLSKRKYPALLRNEEIKDILLALLEAVWHFHKLLPVSLWSSLSQIRAVPITCKLSFVYKG

SEQ ID NO: 836695 - protein, 1366 aa, Homo sapiens
MKKEGRKRWKRKEDKKRVVVSNLLFEGWSHKENPNRHHRGNQIKTSKYTVLSFVPKNIFEQLHRFANLYFVGIAVLNFIPVVNAFQPEVSMIPICVILAVTAIKDAWEDLRRYKSDKVINNRECLIYSRKEQTYVQKCWKDVRVGDFIQMKCNEIVPADILLLFSSDPNGICHLETASLDGETNLKQRRVVKGFSQQEVQFEPELFHNTIVCEKPNNHLNKFKGYMEHPDQTRTGFGCESLLLRGCTIRNTEMAVGIVIYAGHETKAMLNNSGPRYKRSKIERRMNIDIFFCIGILILMCLIGAVGHSIWNGTFEEHPPFDVPDANGSFLPSALGGFYMFLTMIILLQVLIPISLYVSIELVKLGQVFFLSNDLDLYDEETDLSIQCRALNIAEDLGQIQYIFSDKTGTLTENKMVFRRCTIMGSEYSHQENAKRLETPKELDSDGEEWTQYQCLSFSARWAQDPATMRSQKGAQPLRRSQSARVPIQGHYRQRSMGHRESSQPPVAFSSSIEKDVTPDKNLLTKVRDAALWLETLSDSRPAKASLSTTSSIADFFLALTICNSVMVSTTTEPRQRVTIKPSSKALGTSLEKIQQLFQKLKLLSLSQSFSSTAPSDTDLGESLGANVATTDSDERDDASVCSGGDSTDDGGYRSSMWDQGDILESGSGTSLEEALEAPATDLARPEFCYEAESPDEAALVHAAHAYSFTLVSRTPEQVTVRLPQGTCLTFSLLCTLGFDSVRKRMSVVVRHPLTGEIVVYTKGADSVIMDLLEDPACVPDINMEKKLRKIRARTQKHLDLYARDGLRTLCIAKKVVSEEDFRRWASFRREAEASLDNRDELLMETAQHLENQLTLLGATGIEDRLQEGVPDTIATLREAGIQLWVLTGDKQETAVNIAHSCRLLNQTDTVYTINTENQETCESILNCALEELKQFRELQKPDRKLFGFRLPSKTPSITSEAVVPEAGLVIDGKTLNAIFQGKLEKKFLELTQYCRSVLCCRSTPLQKSMIVKLVRDKLRVMTLSIGDGANDVSMIQAADIGIGISGQEGMQAVMSSDFAITRFKHLKKLLLVHGHWCYSRLARMVVYYLYKNVCYNLSTFWISMVDAFYQSLICFFIPYLAYKGSDIDVFTFGTPINTISLTTILLHQAMEMKTWTIFHGVVLLGSFLMYFLVSLLYNATCVICNSPTNPYWVMEGQLSNPTFYLVCFLTPVVALLPRYFFLSLQGTCGKSLISKAQKIDKLPPDKRNLEIQSWRSRQRPAPVPEVARPTHHPVSSITGQDFSASTPKSSNPPKRKHVEESVLHEQRCGTECMRDDSCSGDSSAQLSSGEHLLGPNRIMAYSRGQTDMCRCSKRSSHRRSQSSLTI

SEQ ID NO: 836696 - protein, 939 aa, Homo sapiens
MKKEGRKRWKRKEDKKRVVVSNLLFEGWSHKENPNRHHRGNQIKTSKYTVLSFVPKNIFEQLHRFANLYFVGIAVLNFIPVVNAFQPEVSMIPICVILAVTAIKDAWEDLRRYKSDKVINNRECLIYSRKEQTYVQKCWKDVRVGDFIQMKCNEIVPADILLLFSSDPNGICHLETASLDGETNLKQRRVVKGFSQQEVQFEPELFHNTIVCEKPNNHLNKFKGYMEHPDQTRTGFGCESLLLRGCTIRNTEMAVGIVIYAGHETKAMLNNSGPRYKRSKIERRMNIDIFFCIGILILMCLIGAVGHSIWNGTFEEHPPFDVPDANGSFLPSALGGFYMFLTMIILLQVLIPISLYVSIELVKLGQVFFLSNDLDLYDEETDLSIQCRALNIAEDLGQIQYIFSDKTGTLTENKMVFRRCTIMGSEYSHQENAKRLETPKELDSDGEEWTQYQCLSFSARWAQDPATMRSQKGAQPLRRSQSARVPIQGHYRQRSMGHRESSQPPVAFSSSIEKDVTPDKNLLTKVRDAALWLETLSDSRPAKASLSTTSSIADFFLALTICNSVMVSTTTEPRQRVTIKPSSKALGTSLEKIQQLFQKLKLLSLSQSFSSTAPSDTDLGESLGANVATTDSDERDDASVCSGGDSTDDGGYRSSMWDQGDILESGSGTSLEEALEAPATDLARPEFCYEAESPDEAALVHAAHAYSFTLVSRTPEQVTVRLPQGTCLTFSLLCTLGFDSVRKRMSVVVRHPLTGEIVVYTKGADSVIMDLLEDPACVPDINMEKKLRKIRARTQKHLDLYARDGLRTLCIAKKVVSEEDFRRWASFRREAEASLDNRDELLMETAQHLENQLTLLGATGIEDRLQEGVPDTIATLREAGIQLWVLTGDKQETAVNIAHSCRLLNQTDTVYTINTENQGEVSVFTIQIAEGKVPPHLLG

SEQ ID NO: 836697 - protein, 1272 aa, Homo sapiens
MVAAAAATEARLRRRTAATAALAGRSGGPHWDWDVTRAGRPGLGAGLRLPRLLSPPLRPRLLLLLLLLSPPLLLLLLPCEAEAAAAAAAVSGSAAAEAKECDRPCVNGGRCNPGTGQCVCPAGWVGEQCQHCGGRFRLTGSSGFVTDGPGNYKYKTKCTWLIEGQPNRIMRLRFNHFATECSWDHLYVYDGDSIYAPLVAAFSGLIVPERDGNETVPEVVATSGYALLHFFSDAAYNLTGFNITYSFDMCPNNCSGRGECKISNSSDTVECECSENWKGEACDIPHCTDNCGFPHRGICNSSDVRGCSCFSDWQGPGCSVPVPANQSFWTREEYSNLKLPRASHKAVVNGNIMWVVGGYMFNHSDYNMVLAYDLASREWLPLNRSVNNVVVRYGHSLALYKDKIYMYGGKIDSTGNVTNELRVFHIHNESWVLLTPKAKEQYAVVGHSAHIVTLKNGRVVMLVIFGHCPLYGYISNVQEYDLDKNTWSILHTQGALVQGGYGHSSVYDHRTRALYVHGGYKAFSANKYRLADDLYRYDVDTQMWTILKDSRFFRYLHTAVIVSGTMLVFGGNTHNDTSMSHGAKCFSSDFMAYDIACDRWSVLPRPDLHHDVNRFGHSAVLHNSTMYVFGGFNSLLLSDILVFTSEQCDAHRSEAACLAAGPGIRCVWNTGSSQCISWALATDEQEEKLKSECFSKRTLDHDRCDQHTDCYSCTANTNDCHWCNDHCVPRNHSCSEGQISIFRYENCPKDNPMYYCNKKTSCRSCALDQNCQWEPRNQECIALPENICGIGWHLVGNSCLKITTAKENYDNAKLFCRNHNALLASLTTQKKVEFVLKQLRIMQSSQSMSKLTLTPWVGLRKINVSYWCWEDMSPFTNSLLQWMPSEPSDAGFCGILSEPSTRGLKAATCINPLNGSVCERPANHSAKQCRTPCALRTACGDCTSGSSECMWCSNMKQCVDSNAYVASFPFGQCMEWYTMSTCPPENCSGYCTCSHCLEQPGCGWCTDPSNTGKGKCIEGSYKGPVKMPSQAPTGNFYPQPLLNSSMCLEDSRYNWSFIHCPACQCNGHSKCINQSICEKCENLTTGKHCETCISGFYGDPTNGGKCQPCKCNGHASLCNTNTGKCFCTTKGVKGDECQLCEVENRYQGNPLRGTCYYTLLIDYQFTFSLSQEDDRYYTAINFVATPDEQNRDLDMFINASKNFNLNITWAASFSAGTQAGEEMPVVSKTNIKEYKDSFSNEKFDFRNHPNITFFVYVSNFTWPIKIQVQTEQ

SEQ ID NO: 836698 - protein, 1355 aa, Homo sapiens
MVAAAAATEARLRRRTAATAALAGRSGGPHCVNGGRCNPGTGQCVCPAGWVGEQCQHCGGRFRLTGSSGFVTDGPGNYKYKTKCTWLIEGQPNRIMRLRFNHFATECSWDHLYVYDGDSIYAPLVAAFSGLIVPERDGNETVPEVVATSGYALLHFFSDAAYNLTGFNITYSFDMCPNNCSGRGECKISNSSDTVECECSENWKGEACDIPHCTDNCGFPHRGICNSSDVRGCSCFSDWQGPGCSVPVPANQSFWTREEYSNLKLPRASHKAVVNGNIMWVVGGYMFNHSDYNMVLAYDLASREWLPLNRSVNNVVVRYGHSLALYKDKIYMYGGKIDSTGNVTNELRVFHIHNESWVLLTPKAKEQYAVVGHSAHIVTLKNGRVVMLVIFGHCPLYGYISNVQEYDLDKNTWSILHTQGALVQGGYGHSSVYDHRTRALYVHGGYKAFSANKYRLADDLYRYDVDTQMWTILKDSRFFRYLHTAVIVSGTMLVFGGNTHNDTSMSHGAKCFSSDFMAYDIACDRWSVLPRPDLHHDVNRFGHSAVLHNSTMYVFGGFNSLLLSDILVFTSEQCDAHRSEAACLAAGPGIRCVWNTGSSQCISWALATDEQEEKLKSECFSKRTLDHDRCDQHTDCYSCTANTNDCHWCNDHCVPRNHSCSEGQISIFRYENCPKDNPMYYCNKKTSCRSCALDQNCQWEPRNQECIALPENICGIGWHLVGNSCLKITTAKENYDNAKLFCRNHNALLASLTTQKKVEFVLKQLRIMQSSQSMSKLTLTPWVGLRKINVSYWCWEDMSPFTNSLLQWMPSEPSDAGFCGILSEPSTRGLKAATCINPLNGSVCERPANHSAKQCRTPCALRTACGDCTSGSSECMWCSNMKQCVDSNAYVASFPFGQCMEWYTMSTCPPENCSGYCTCSHCLEQPGCGWCTDPSNTGKGKCIEGSYKGPVKMPSQAPTGNFYPQPLLNSSMCLEDSRYNWSFIHCPACQCNGHSKCINQSICEKCENLTTGKHCETCISGFYGDPTNGGKCQPCKCNGHASLCNTNTGKCFCTTKGVKGDECQLCEVENRYQGNPLRGTCYYTLLIDYQFTFSLSQEDDRYYTAINFVATPDEQNRDLDMFINASKNFNLNITWAASFSAGTQAGEEMPVVSKTNIKEYKDSFSNEKFDFRNHPNITFFVYVSNFTWPIKIQIAFSQHSNFMDLVQFFVTFFSCFLSLLLVAAVVWKIKQSCWASRRREQLLREMQQMASRPFASVNVALETDEEPPDLIGGSIKTVPKPIALEPCFGNKAAVLSVFVRLPRGLGGIPPPGQSGLAVASALVDISQQMPIVYKEKSGAVRNRKQQPPAQPGTCI

SEQ ID NO: 836699 - protein, 271 aa, Homo sapiens
ELIPVWVASSVVCSQVCLWPAINLVATPDEQNRDLDMFINASKNFNLNITWAASFSAGTQAGEEMPVVSKTNIKEYKDSFSNEKFDFRNHPNITFFVYVSNFTWPIKIQIAFSQHSNFMDLVQFFVTFFSCFLSLLLVAAVVWKIKQSCWASRRREQLLREMQQMASRPFASVNVALETDEEPPDLIGGSIKTVPKPIALEPCFGNKAAVLSVFVRLPRGLGGIPPPGQSGLAVASALVDISQQMPIVYKEKSGAVRNRKQQPPAQPGTCI

SEQ ID NO: 836700 - protein, 124 aa, Homo sapiens
LGSMVAHDETGGLLPIKRTIRVLDVNNQSFREQEEPSNKRVRPLARVTSLANLISPVRNGAVRRFGQTIQSFTLRGDHRSPASAQKFSRRPLGIVLLQGRSSLFVQRTSFPRPKKSLPHVSPMP

SEQ ID NO: 836701 - protein, 612 aa, Homo sapiens
MVAAAAATEARLRRRTAATAALAGRSGGPHWDWDVTRAGRPGLGAGLRLPRLLSPPLRPRLLLLLLLLSPPLLLLLLPCEAEAAAAAAAVSGSAAAEAKECDRPCVNGGRCNPGTGQCVCPAGWVGEQCQHCGGRFRLTGSSGFVTDGPGNYKYKTKCTWLIEGQPNRIMRLRFNHFATECSWDHLYVYDGDSIYAPLVAAFSGLIVPERDGNETVPEVVATSGYALLHFFSDAAYNLTGFNITYSFDMCPNNCSGRGECKISNSSDTVECECSENWKGEACDIPHCTDNCGFPHRGICNSSDVRGCSCFSDWQGPGCSVPVPANQSFWTREEYSNLKLPRASHKAVVNGNIMWVVGGYMFNHSDYNMVLAYDLASREWLPLNRSVNNVVVRYGHSLALYKDKIYMYGGKIDSTGNVTNELRVFHIHNESWVLLTPKAKEQYAVVGHSAHIVTLKNGRVVMLVIFGHCPLYGYISNVQEYDLDKNTWSILHTQGALVQGGYGHSSVYDHRTRALYVHGGYKAFSANKYRLADDLYRYDVDTQMWTILKDSRFFRYLHTAVIVSGTMLVFGGNTHNDTSMSHGAKCFSSDFMAYDIGKFPKTIFSSGIFLPIL

SEQ ID NO: 836702 - protein, 1198 aa, Homo sapiens
MVAAAAATEARLRRRTAATAALAGRSGGPHCVNGGRCNPGTGQCVCPAGWVGEQCQHCGGRFRLTGSSGFVTDGPGNYKYKTKCTWLIEGQPNRIMRLRFNHFATECSWDHLYVYDGDSIYAPLVAAFSGLIVPERDGNETVPEVVATSGYALLHFFSDAAYNLTGFNITYSFDMCPNNCSGRGECKISNSSDTVECECSENWKGEACDIPHCTDNCGFPHRGICNSSDVRGCSCFSDWQGPGCSVPVPANQSFWTREEYSNLKLPRASHKAVVNGNIMWVVGGYMFNHSDYNMVLAYDLASREWLPLNRSVNNVVVRYGHSLALYKDKIYMYGGKIDSTGNVTNELRVFHIHNESWVLLTPKAKEQYAVVGHSAHIVTLKNGRVVMLVIFGHCPLYGYISNVQEYDLDKNTWSILHTQGALVQGGYGHSSVYDHRTRALYVHGGYKAFSANKYRLADDLYRYDVDTQMWTILKDSRFFRYLHTAVIVSGTMLVFGGNTHNDTSMSHGAKCFSSDFMAYDIACDRWSVLPRPDLHHDVNRFGHSAVLHNSTMYVFGGFNSLLLSDILVFTSEQCDAHRSEAACLAAGPGIRCVWNTGSSQCISWALATDEQEEKLKSECFSKRTLDHDRCDQHTDCYSCTANTNDCHWCNDHCVPRNHSCSEGQISIFRYENCPKDNPMYYCNKKTSCRSCALDQNCQWEPRNQECIALPENICGIGWHLVGNSCLKITTAKENYDNAKLFCRNHNALLASLTTQKKVEFVLKQLRIMQSSQSMSKLTLTPWVGLRKINVSYWCWEDMSPFTNSLLQWMPSEPSDAGFCGILSEPSTRGLKAATCINPLNGSVCERPANHSAKQCRTPCALRTACGDCTSGSSECMWCSNMKQCVDSNAYVASFPFGQCMEWYTMSTCPPENCSGYCTCSHCLEQPGCGWCTDPSNTGKGKCIEGSYKGPVKMPSQAPTGNFYPQPLLNSSMCLEDSRYNWSFIHCPACQCNGHSKCINQSICEKCENLTTGKHCETCISGFYGDPTNGGKCQPCKCNGHASLCNTNTGKCFCTTKGVKGDECQLCEVENRYQGNPLRGTCYYTLLIDYQFTFSLSQEDDRYYTAINFVATPDEQNRDLDMFINASKNFNLNITWAASFSAGTQAGEEMPVVSKTNIKEYKDSFSNEKFDFRNHPNITFFVYVSNFTWPIKIQVQTEQ

SEQ ID NO: 836703 - protein, 1215 aa, Homo sapiens
MVAAAAATEARLRRRTAATAALAGRSGGPHCVNGGRCNPGTGQCVCPAGWVGEQCQHCGGRFRLTGSSGFVTDGPGNYKYKTKCTWLIEGQPNRIMRLRFNHFATECSWDHLYVYDGDSIYAPLVAAFSGLIVPERDGNETVPEVVATSGYALLHFFSDAAYNLTGFNITYSFDMCPNNCSGRGECKISNSSDTVECECSENWKGEACDIPHCTDNCGFPHRGICNSSDVRGCSCFSDWQGPGCSVPVPANQSFWTREEYSNLKLPRASHKAVVNGNIMWVVGGYMFNHSDYNMVLAYDLASREWLPLNRSVNNVVVRYGHSLALYKDKIYMYGGKIDSTGNVTNELRVFHIHNESWVLLTPKAKEQYAVVGHSAHIVTLKNGRVVMLVIFGHCPLYGYISNVQEYDLDKNTWSILHTQGALVQGGYGHSSVYDHRTRALYVHGGYKAFSANKYRLADDLYRYDVDTQMWTILKDSRFFRYLHTAVIVSGTMLVFGGNTHNDTSMSHGAKCFSSDFMAYDIACDRWSVLPRPDLHHDVNRFGHSAVLHNSTMYVFGGFNSLLLSDILVFTSEQCDAHRSEAACLAAGPGIRCVWNTGSSQCISWALATDEQEEKLKSECFSKRTLDHDRCDQHTDCYSCTANTNDCHWCNDHCVPRNHSCSEGQISIFRYENCPKDNPMYYCNKKTSCRSCALDQNCQWEPRNQECIALPENICGIGWHLVGNSCLKITTAKENYDNAKLFCRNHNALLASLTTQKKVEFVLKQLRIMQSSQSMSKLTLTPWVGLRKINVSYWCWEDMSPFTNSLLQWMPSEPSDAGFCGILSEPSTRGLKAATCINPLNGSVCERPANHSAKQCRTPCALRTACGDCTSGSSECMWCSNMKQCVDSNAYVASFPFGQCMEWYTMSTCPPENCSGYCTCSHCLEQPGCGWCTDPSNTGKGKCIEGSYKGPVKMPSQAPTGNFYPQPLLNSSMCLEDSRYNWSFIHCPACQCNGHSKCINQSICEKCENLTTGKHCETCISGFYGDPTNGGKCQPCKCNGHASLCNTNTGKCFCTTKGVKGDECQLCEVENRYQGNPLRGTCYYTLLIDYQFTFSLSQEDDRYYTAINFVATPDEQNRDLDMFINASKNFNLNITWAASFSAGTQAGEEMPVVSKTNIKEYKDSFSNEKFDFRNHPNITFFVYVSNFTWPIKIQIAFSQHSNFMDLVQFFVTFFRP

SEQ ID NO: 836704 - protein, 940 aa, Homo sapiens
MGSGPIDPKELLKGLDSFLNRDGEVKSVDGISKIFSLMKEARKMVSRCTYLNILLQTRSPEILVKFIDVGGYKLLNNWLTYSKTTNNIPLLQQILLTLQHLPLTVDHLKQNNTAKLVKQLSKSSEDEELRKLASVLVSDWMAVIRSQSSTQPAEKDKKKRKDEGKSRTTLPERPLTEVKAETRAEEAPEKKREKPKSLRTTAPSHAKFRSTGLELETPSLVPVKKNASTVVVSDKYNLKPIPLKRQSNVAAPGDATPPAEKKYKPLNTTPNATKEIKVKIIPPQPMEGLGFLDALNSAPVPGIKIKKKKKVLSPTAAKPSPFEGKTSTEPSTAKPSSPEPAPPSEAMDADRPGTPVPPVEVPELMDTASLEPGALDAKPVESPGDPNQLTRKGRKRKSVTWPEEGKLREYFYFELDETERVNVNKIKDFGEAAKREILSDRHAFETARRLSHDNMEEKVPWVCPRPLVLPSPLVTPGSNSQERYIQAEREKGILQELFLNKESPHEPDPEPYEPIPPKLIPLDEECSMDETPYVETLEPGGSGGSPDGAGGSKLPPVLANLMGSMGAGKGPQGPGGGGINVQEILTSIMGSPNSHPSEELLKQPDYSDKIKQMLVPHGLLGPGPIANGFPPGGPGGPKGMQHFPPGPGGPMPGPHGGPGGPVGPRLLGPPPPPRGGDPFWDGPGDPMRGGPMRGGPGPGPGPYHRGRGGRGGNEPPPPPPPFRGARGGRSGGGPPNGRGGPGGGMVGGGGHRPHEGPGGGMGNSSGHRPHEGPGGGMGSGHRPHEGPGGSMGGGGGHRPHEGPGGGISGGSGHRPHEGPGGGMGAGGGHRPHEGPGGSMGGSGGHRPHEGPGHGGPHGHRPHDVPGHRGHDHRGPPPHEHRGHDGPGHGGGGHRGHDGGHSHGGDMSNRPVCRHFMMKGNCRYENNCAFYHPGVNGPPLP

SEQ ID NO: 836705 - protein, 940 aa, Homo sapiens; identical to SEQ ID NO: 836704

SEQ ID NO: 836706 - protein, 974 aa, Homo sapiens
MGSGPIDPKELLKGLDSFLNRDGEVKSVDGISKIFSLMKEARKMVSRCTYLNILLQTRSPEILVKFIDVGGYKLLNNWLTYSKTTNNIPLLQQILLTLQHLPLTVDHLKQNNTAKLVKQLSKSSEDEELRKLASVLVSDWMAVIRSQSSTQPAEKDKKKRKDEGKSRTTLPERPLTEVKAETRAEEAPEKKREKPKSLRTTAPSHAKFRSTGLELETPSLVPVKKNASTVVVSDKYNLKPIPLKRQRYGPYSQALNGVDLWTQGSRRGGVGDVDDSSSSDSNVAAPGDATPPAEKKYKPLNTTPNATKEIKVKIIPPQPMEGLGFLDALNSAPVPGIKIKKKKKVLSPTAAKPSPFEGKTSTEPSTAKPSSPEPAPPSEAMDADRPGTPVPPVEVPELMDTASLEPGALDAKPVESPGDPNQLTRKGRKRKSVTWPEEGKLREYFYFELDETERVNVNKIKDFGEAAKREILSDRHAFETARRLSHDNMEEKVPWVCPRPLVLPSPLVTPGSNSQERYIQAEREKGILQELFLNKESPHEPDPEPYEPIPPKLIPLDEECSMDETPYVETLEPGGSGGSPDGAGGSKLPPVLANLMGSMGAGKGPQGPGGGGINVQEILTSIMGSPNSHPSEELLKQPDYSDKIKQMLVPHGLLGPGPIANGFPPGGPGGPKGMQHFPPGPGGPMPGPHGGPGGPVGPRLLGPPPPPRGGDPFWDGPGDPMRGGPMRGGPGPGPGPYHRGRGGRGGNEPPPPPPPFRGARGGRSGGGPPNGRGGPGGGMVGGGGHRPHEGPGGGMGNSSGHRPHEGPGGGMGSGHRPHEGPGGSMGGGGGHRPHEGPGGGISGGSGHRPHEGPGGGMGAGGGHRPHEGPGGSMGGSGGHRPHEGPGHGGPHGHRPHDVPGHRGHDHRGPPPHEHRGHDGPGHGGGGHRGHDGGHSHGGDMSNRPVCRHFMMKGNCRYENNCAFYHPGVNGPPLP

SEQ ID NO: 836707 - protein, 655 aa, Homo sapiens
MEGLGFLDALNSAPVPGIKIKKKKKVLSPTAAKPSPFEGKTSTEPSTAKPSSPEPAPPSEAMDADRPGTPVPPVEVPELMDTASLEPGALDAKPVESPGDPNQLTRKGRKRKSVTWPEEGKLREYFYFELDETERVNVNKIKDFGEAAKREILSDRHAFETARRLSHDNMEEKVPWVCPRPLVLPSPLVTPGSNSQERYIQAEREKGILQELFLNKESPHEPDPEPYEPIPPKLIPLDEECSMDETPYVETLEPGGSGGSPDGAGGSKLPPVLANLMGSMGAGKGPQGPGGGGINVQEILTSIMGSPNSHPSEELLKQPDYSDKIKQMLVPHGLLGPGPIANGFPPGGPGGPKGMQHFPPGPGGPMPGPHGGPGGPVGPRLLGPPPPPRGGDPFWDGPGDPMRGGPMRGGPGPGPGPYHRGRGGRGGNEPPPPPPPFRGARGGRSGGGPPNGRGGPGGGMVGGGGHRPHEGPGGGMGNSSGHRPHEGPGGGMGSGHRPHEGPGGSMGGGGGHRPHEGPGGGISGGSGHRPHEGPGGGMGAGGGHRPHEGPGGSMGGSGGHRPHEGPGHGGPHGHRPHDVPGHRGHDHRGPPPHEHRGHDGPGHGGGGHRGHDGGHSHGGDMSNRPVCRHFMMKGNCRYENNCAFYHPGVNGPPLP

SEQ ID NO: 836708 - protein, 655 aa, Homo sapiens; identical to SEQ ID NO: 836707

SEQ ID NO: 836709 - protein, 655 aa, Homo sapiens; identical to SEQ ID NO: 836707

SEQ ID NO: 836710 - protein, 119 aa, Homo sapiens
PPFLRQAFDGDMATAPLMPPPALAEEWVPVVDIAPTKALAEAWVEVVDIVPMKALDTGGPMATGLMMSLVTEAMTIEGRHLMSTVAMMVLATGEGATEGTMEATAMEETCQTALSADIS

SEQ ID NO: 836711 - protein, 76 aa, Homo sapiens
YTAKVLYTSHYLEKGGPMATGLMMSLVTEAMTIEGRHLMSTVAMMVLATGEGATEGTMEATAMEETCQTALSADIS

SEQ ID NO: 836712 - protein, 181 aa, Homo sapiens
MGSGPIDPKELLKGLDSFLNRDGEVKSVDGISKIFSLMKEARKMVSRCTYLNILLQTRSPEILVKFIDVGGYKLLNNWLTYSKTTNNIPLLQQILLTLQHLPLTVDHLKQNNTAKLVKQLSKSSEDEELRKLASVLVSDWMAVIRSQSSTQPAGKLLSPLSWELFLSYGMWPLGAASLLHL

SEQ ID NO: 836713 - protein, 235 aa, Homo sapiens [sequence omitted]

SEQ ID NO: 836714 - protein, 940 aa, Homo sapiens; identical to SEQ ID NO: 836704

SEQ ID NO: 836715 - protein, 655 aa, Homo sapiens; identical to SEQ ID NO: 836707

SEQ ID NO: 836716 - protein, 800 aa, Homo sapiens
MAVIRSQSSTQPAEKDKKKRKDEGKSRTTLPERPLTEVKAETRAEEAPEKKREKPKSLRTTAPSHAKFRSTGLELETPSLVPVKKNASTVVVSDKYNLKPIPLKRQSNVAAPGDATPPAEKKYKPLNTTPNATKEIKVKIIPPQPMEGLGFLDALNSAPVPGIKIKKKKKVLSPTAAKPSPFEGKTSTEPSTAKPSSPEPAPPSEAMDADRPGTPVPPVEVPELMDTASLEPGALDAKPVESPGDPNQLTRKGRKRKSVTWPEEGKLREYFYFELDETERVNVNKIKDFGEAAKREILSDRHAFETARRLSHDNMEEKVPWVCPRPLVLPSPLVTPGSNSQERYIQAEREKGILQELFLNKESPHEPDPEPYEPIPPKLIPLDEECSMDETPYVETLEPGGSGGSPDGAGGSKLPPVLANLMGSMGAGKGPQGPGGGGINVQEILTSIMGSPNSHPSEELLKQPDYSDKIKQMLVPHGLLGPGPIANGFPPGGPGGPKGMQHFPPGPGGPMPGPHGGPGGPVGPRLLGPPPPPRGGDPFWDGPGDPMRGGPMRGGPGPGPGPYHRGRGGRGGNEPPPPPPPFRGARGGRSGGGPPNGRGGPGGGMVGGGGHRPHEGPGGGMGNSSGHRPHEGPGGGMGSGHRPHEGPGGSMGGGGGHRPHEGPGGGISGGSGHRPHEGPGGGMGAGGGHRPHEGPGGSMGGSGGHRPHEGPGHGGPHGHRPHDVPGHRGHDHRGPPPHEHRGHDGPGHGGGGHRGHDGGHSHGGDMSNRPVCRHFMMKGNCRYENNCAFYHPGVNGPPLP

SEQ ID NO: 836717 - protein, 712 aa, Homo sapiens
  misc_feature (609)..(610): Xaa can be any naturally occurring amino acid
  misc_feature (674)..(674): Xaa can be any naturally occurring amino acid
MGSGPIDPKELLKGLDSFLNRDGEVKSVDGISKIFSLMKEARKMVSRCTYLNILLQTRSPEILVKFIDVGGYKLLNNWLTYSKTTNNIPLLQQILLTLQHLPLTVDHLKQNNTAKLVKQLSKSSEDEELRKLASVLVSDWMAVIRSQSSTQPAEKDKKKRKDEGKSRTTLPERPLTEVKAETRAEEAPEKKREKPKSLRTTAPSHAKFRSTGLELETPSLVPVKKNASTVVVSDKYNLKPIPLKRQSNVAAPGDATPPAEKKYKPLNTTPNATKEIKVKIIPPQPMEGLGFLDALNSAPVPGIKIKKKKKVLSPTAAKPSPFEGKTSTEPSTAKPSSPEPAPPSEAMDADRPGTPVPPVEVPELMDTASLEPGALDAKPVESPGDPNQLTRKGRKRKSVTWPEEGKLREYFYFELDETERVNVNKIKDFGEAAKREILSDRHAFETARRLSHDNMEEKVPWVCPRPLVLPSPLVTPGSNSQERYIQAEREKGILQELFLNKESPHEPDPEPYEPIPPKLIPLDEECSMDETPYVETLEPGGSGGSPDGAGGSKLPPVLANLMGSMGAGKGPQGPGGGGINVQEILTSIMGSPNSHPSEELLKQPDYSDXXAIAVVNLPLVLVRQHFICLGHLLKFLLSKLFIIWVFVWVPLESLAPIRLLDVISGRTERNVWDXVVGSHGNWSVVRRASLGLLRQESRPPAAHRPCPHREPS

SEQ ID NO: 836718 - protein, 344 aa, Homo sapiens
MGSGPIDPKELLKGLDSFLNRDGEVKSVDGISKIFSLMKEARKMVSRCTYLNILLQTRSPEILVKFIDVGGYKLLNNWLTYSKTTNNIPLLQQILLTLQHLPLTVDHLKQNNTAKLVKQLSKSSEDEELRKLASVLVSDWMAVIRSQSSTQPAEKDKKKRKDEGKSRTTLPERPLTEVKAETRAEEAPEKKREKPKSLRTTAPSHAKFRSTGLELETPSLVPVKKNASTVVVSDKYNLKPIPLKRQSNVAAPGDATPPAEKKYKPLNTTPNATKEIKVKIIPPQPMEGLGFLDALNSAPVPGIKIKKKKKVLSPTAAKPSPFEGKTSTEPSTAKPVSVQLKWHL

SEQ ID NO: 836719 - protein, 122 aa, Homo sapiens
  misc_feature (16)..(16): Xaa can be any naturally occurring amino acid
  misc_feature (18)..(18): Xaa can be any naturally occurring amino acid
  misc_feature (21)..(21): Xaa can be any naturally occurring amino acid
EREREREREREREREXEXERXRERGDENPFPVLPLMLENLKLVILANTPTLLLRVPTCTQNSDTGSAALKKSSQLSSLFLMGWGDAERGIVYPTALRGLNQLDLSSGTHIIPTPPPAWAHHS

SEQ ID NO: 836720 - protein, 1048 aa, Homo sapiens
MAFPPRRRLRLGPRGLPLLLSGLLLPLCRAFNLDVDSPAEYSGPEGSYFGFAVDFFVPSASSRMFLLVGAPKANTTQPGIVEGGQVLKCDWSSTRRCQPIEFDATGNRDYAKDDPLEFKSHQWFGASVRSKQDKILACAPLYHWRTEMKQEREPVGTCFLQDGTKTVEYAPCRSQDIDADGQGFCQGGFSIDFTKADRVLLGGPGSFYWQGQLISDQVAEIVSKYDPNVYSIKYNNQLATRTAQAIFDDSYLGYSVAVGDFNGDGIDDFVSGVPRAARTLGMVYIYDGKNMSSLYNFTGEQMAAYFGFSVAATDINGDDYADVFIGAPLFMDRGSDGKLQEVGQVSVSLQRASGDFQTTKLNGFEVFARFGSAIAPLGDLDQDGFNDIAIAAPYGGEDKKGIVYIFNGRSTGLNAVPSQILEGQWAARSMPPSFGYSMKGATDIDKNGYPDLIVGAFGVDRAILYRARPVITVNAGLEVYPSILNQDNKTCSLPGTALKVSCFNVRFCLKADGKGVLPRKLNFQVELLLDKLKQKGAIRRALFLYSRSPSHSKNMTISRGGLMQCEELIAYLRDESEFRDKLTPITIFMEYRLDYRTAADTTGLQPILNQFTPANISRQAHILLDCGEDNVCKPKLEVSVDSDQKKIYIGDDNPLTLIVKAQNQGEGAYEAELIVSIPLQADFIGVVRNNEALARLSCAFKTENQTRQVVCDLGNPMKAGTQLLAGLRFSVHQQSEMDTSVKFDLQIQSSNLFDKVSPVVSHKVDLAVLAAVEIRGVSSPDHIFLPIPNWEHKENPETEEDVGPVVQHIYELRNNGPSSFSKAMLHLQWPYKYNNNTLLYILHYDIDGPMNCTSDMEINPLRIKISSLQTTEKNDTVAGQGERDHLITKRDLALSEGDIHTLGCGVAQCLKIVCQVGRLDRGKSAILYVKSLLWTETFMNKENQNHSYSLKSSASFNVIEFPYKNLPIEDITNSTLVTTNVTWGIQPAPMPVPVWVIILAVLAGLLLLAVLVFVMYRMGFFKRVRPPQEEQEREQLQPHENGEGNSET

SEQ ID NO: 836721 - protein, 1048 aa, Homo sapiens; identical to SEQ ID NO: 836720

SEQ ID NO: 836722 - protein, 1048 aa, Homo sapiens; identical to SEQ ID NO: 836720

SEQ ID NO: 836723 - protein, 312 aa, Homo sapiens
MDTSVKFDLQIQSSNLFDKVSPVVSHKVDLAVLAAVEIRGVSSPDHIFLPIPNWEHKENPETEEDVGPVVQHIYELRNNGPSSFSKAMLHLQWPYKYNNNTLLYILHYDIDGPMNCTSDMEINPLRIKISSLQTTEKNDTVAGQGERDHLITKRDLALSEGDIHTLGCGVAQCLKIVCQVGRLDRGKSAILYVKSLLWTETFMNKENQNHSYSLKSSASFNVIEFPYKNLPIEDITNSTLVTTNVTWGIQPAPMPVPVWVIILAVLAGLLLLAVLVFVMYRMGFFKRVRPPQEEQEREQLQPHENGEGNSET

SEQ ID NO: 836724 - protein, 1048 aa, Homo sapiens; identical to SEQ ID NO: 836720

SEQ ID NO: 836725 - protein, 193 aa, Homo sapiens
MAFPPRRRLRLGPRGLPLLLSGLLLPLCRAFNLDVDSPAEYSGPEGSYFGFAVDFFVPSASSRMFLLVGAPKANTTQPGIVEGGQVLKCDWSSTRRCQPIEFDATGNRDYAKDDPLEFKSHQWFGASVRSKQDKILACAPLYHWRTEMKQEREPVGTCFLQDGTKTVEYAPCRSRMYRILYQLLRRGVGSLVC

SEQ ID NO: 836726 - protein, 284 aa, Homo sapiens
MAFPPRRRLRLGPRGLPLLLSGLLLPLCRAFNLDVDSPAEYSGPEGSYFGFAVDFFVPSASSRMFLLVGAPKANTTQPGIVEGGQVLKCDWSSTRRCQPIEFDATGNRDYAKDDPLEFKSHQWFGASVRSKQDKILACAPLYHWRTEMKQEREPVGTCFLQDGTKTVEYAPCRSQDIDADGQGFCQGGFSIDFTKADRVLLGGPGSFYWQGQLISDQVAEIVSKYDPNVYSIKYNNQLATRTAQAIFDDSYLGYSVAVGDFNGDGIDDFVSGVPRAARTLGMSY

SEQ ID NO: 836727 - protein, 1048 aa, Homo sapiens; identical to SEQ ID NO: 836720

SEQ ID NO: 836728 - protein, 750 aa, Homo sapiens
MIAAFFGLPVSAIDINGHDYVHVLLRSASRSMVSVTREASREEVGQVSVSLQRASGDFQTTKLNGFEVFARFGSAIAPLGDLDQDGFNDIAIAAPYGGEDKKGIVYIFNGRSTGLNAVPSQILEGQWAARSMPPSFGYSMKGATDIDKNGYPDLIVGAFGVDRAILYRARPVITVNAGLEVYPSILNQDNKTCSLPGTALKVSCFNVRFCLKADGKGVLPRKLNFQVELLLDKLKQKGAIRRALFLYSRSPSHSKNMTISRGGLMQCEELIAYLRDESEFRDKLTPITIFMEYRLDYRTAADTTGLQPILNQFTPANISRQAHILLDCGEDNVCKPKLEVSVDSDQKKIYIGDDNPLTLIVKAQNQGEGAYEAELIVSIPLQADFIGVVRNNEALARLSCAFKTENQTRQVVCDLGNPMKAGTQLLAGLRFSVHQQSEMDTSVKFDLQIQSSNLFDKVSPVVSHKVDLAVLAAVEIRGVSSPDHIFLPIPNWEHKENPETEEDVGPVVQHIYELRNNGPSSFSKAMLHLQWPYKYNNNTLLYILHYDIDGPMNCTSDMEINPLRIKISSLQTTEKNDTVAGQGERDHLITKRDLALSEGDIHTLGCGVAQCLKIVCQVGRLDRGKSAILYVKSLLWTETFMNKENQNHSYSLKSSASFNVIEFPYKNLPIEDITNSTLVTTNVTWGIQPAPMPVPVWVIILAVLAGLLLLAVLVFVMYRMGFFKRVRPPQEEQEREQLQPHENGEGNSET

SEQ ID NO: 836729 - protein, 312 aa, Homo sapiens; identical to SEQ ID NO: 836723

SEQ ID NO: 836730 - protein, 815 aa, Homo sapiens
MAFPPRRRLRLGPRGLPLLLSGLLLPLCRAFNLDVDSPAEYSGPEGSYFGFAVDFFVPSASSRMFLLVGAPKANTTQPGIVEGGQVLKCDWSSTRRCQPIEFDATGNRDYAKDDPLEFKSHQWFGASVRSKQDKILACAPLYHWRTEMKQEREPVGTCFLQDGTKTVEYAPCRSQDIDADGQGFCQGGFSIDFTKADRVLLGGPGSFYWQGQLISDQVAEIVSKYDPNVYSIKYNNQLATRTAQAIFDDSYLGYSVAVGDFNGDGIDDFVSGVPRAARTLGMVYIYDGKNMSSLYNFTGEQMAAYFGFSVAATDINGDDYADVFIGAPLFMDRGSDGKLQEVGQVSVSLQRASGDFQTTKLNGFEVFARFGSAIAPLGDLDQDGFNDIAIAAPYGGEDKKGIVYIFNGRSTGLNAVPSQILEGQWAARSMPPSFGYSMKGATDIDKNGYPDLIVGAFGVDRAILYRARPVITVNAGLEVYPSILNQDNKTCSLPGTALKVSCFNVRFCLKADGKGVLPRKLNFQVELLLDKLKQKGAIRRALFLYSRSPSHSKNMTISRGGLMQCEELIAYLRDESEFRDKLTPITIFMEYRLDYRTAADTTGLQPILNQFTPANISRQAHILLDCGEDNVCKPKLEVSVDSDQKKIYIGDDNPLTLIVKAQNQGEGAYEAELIVSIPLQADFIGVVRNNEALARLSCAFKTENQTRQVVCDLGNPMKAGTQLLAGLRFSVHQQSEMDTSVKFDLQIQSSNLFDKVSPVVSHKVDLAVLAAVEIRGVSSPDHIFLPIPNWEHKENPETEEDVGPVVQHIYEVCSC

SEQ ID NO: 836731 - protein, 289 aa, Homo sapiens
MAFPPRRRLRLGPRGLPLLLSGLLLPLCRAFNLDVDSPAEYSGPEGSYFGFAVDFFVPSASSRMFLLVGAPKANTTQPGIVEGGQVLKCDWSSTRRCQPIEFDATGNRDYAKDDPLEFKSHQWFGASVRSKQDKILACAPLYHWRTEMKQEREPVGTCFLQDGTKTVEYAPCRSQDIDADGQGFCQGGFSIDFTKADRVLLGGPGSFYWQGQLISDQVAEIVSKYDPNVYSIKYNNQLATRTAQAIFDDSYLGYSVAVGDFNGDGIDDFVSGVPRAARTLGMVGQLKGI

SEQ ID NO: 836732 - protein, 797 aa, Homo sapiens
MTLISAAREYEIEFIYAISPGLDITFSNPKEVSTLKRKLDQVSQFGCRSFALLFDDIDHNMCAADKEVFSSFAHAQVSITNEIYQYLGEPETFLFCPTEYCGTFCYPNVSQSPYLRTVGEKLLPGIEVLWTGPKVVSKEIPVESIEEVSKIIKRAPVIWDNIHANDYDQKRLFLGPYKGRSTELIPRLKGVLTNPNCEFEANYVAIHTLATWYKSNMNGVRKDVVMTDSEDSTVSIQIKLENEGSDEDIETDVLYSPQMALKLALTEWLQEFGVPHQYSSRQVAHSGAKASVVDGTPLVAAPSLNATTVVTTVYQEPIMSQGAALSGEPTTLTKEEEKKQPDEEPMDMVVEKQEETDHKNDNQILSEIVEAKMAEELKPMDTDKESIAESKSPEMSMQEDCISDIAPMQTDEQTNKEQFVPGPNEKPLYTAEPVTLEDLQLLADLFYLPYEHGPKGAQMLREFQWLRANSSVVSVNCKGKDSEKIEEWRSRAAKFEEMCGLVMGMFTRLSNCANRTILYDMYSYVWDIKSIMSMVKSFVQWLGCRSHSSAQFLIGDQEPWAFRGGLAGEFQRLLPIDGANDLFFQPPPLTPTSKVYTIRPYFPKDEASVYKICREMYDDGVGLPFQSQPDLIGDKLVGGLLSLSLDYCFVLEDEDGICGYALGTVDVTPFIKKCKISWIPFMQEKYTKPNGDKELSEAEKIMLSFHEEQEVLPETFLANFPSLIKMDIHKKVTDPSVAKSMMACLLSSLKANGSRGAFCEVRPDDKRILEFYSKLGCFEIAKMEGFPKDVVILGRSL

SEQ ID NO: 836733 - protein, 1028 aa, Homo sapiens
SASAVRINRKRAVEAAAEGELGAWRGNSGRPKIIGRAAEAENEDRTLGRLLPGNERSQPRSPLMLLAPQLKAEAAADKGLAPVPPPFSSGHSGPCEKEGEGQRGRGRSRRGAHLELKPSPGLRAGAPTDRGRGGPAEVAAAGGRRMVQKESQATLEERESELSSNPAASAGASLEPPAAPAPGEDNPAGAGGAAVAGAAGGARRFLCGVVEGFYGRPWVMEQRKELFRRLQKWELNTYLYAPKDDYKHRMFWREMYSVEEAEQLMTLISAAREYEIEFIYAISPGLDITFSNPKEVSTLKRKLDQVSQFGCRSFALLFDDIDHNMCAADKEVFSSFAHAQVSITNEIYQYLGEPETFLFCPTGPKVVSKEIPVESIEEVSKIIKRAPVIWDNIHANDYDQKRLFLGPYKGRSTELIPRLKGVLTNPNCEFEANYVAIHTLATWYKSNMNGVRKDVVMTDSEDSTVSIQIKLENEGSDEDIETDVLYSPQMALKLALTEWLQEFGVPHQYSSRQVAHSGAKASVVDGTPLVAAPSLNATTVVTTVYQEPIMSQGAALSGEPTTLTKEEEKKQPDEEPMDMVVEKQEETDHKNDNQILSEIVEAKMAEELKPMDTDKESIAESKSPEMSMQEDCISDIAPMQTDEQTNKEQFVPGPNEKPLYTAEPVTLEDLQLLADLFYLPYEHGPKGAQMLREFQWLRANSSVVSVNCKGKDSEKIEEWRSRAAKFEEMCGLVMGMFTRLSNCANRTILYDMYSYVWDIKSIMSMVKSFVQWLGCRSHSSAQFLIGDQEPWAFRGGLAGEFQRLLPIDGANDLFFQPPPLTPTSKVYTIRPYFPKDEASVYKICREMYDDGVGLPFQSQPDLIGDKLVGGLLSLSLDYCFVLEDEDGICGYALGTVDVTPFIKKCKISWIPFMQEKYTKPNGDKELSEAEKIMLSFHEEQEVLPETFLANFPSLIKMDIHKKVTDPSVAKSMMACLLSSLKANGSRGAFCEVRPDDKRILEFYSKLGCFEIAKMEGFPKDVVILGRSL

SEQ ID NO: 836734 - protein, 745 aa, Homo sapiens
FGAYKYVFNSHFWSLLKSSFAHAQVSITNEIYQYLGEPETFLFCPTEYCGTFCYPNVSQSPYLRTVGEKLLPGIEVLWTGPKVVSKEIPVESIEEVSKIIKRAPVIWDNIHANDYDQKRLFLGPYKGRSTELIPRLKGVLTNPNCEFEANYVAIHTLATWYKSNMNGVRKDVVMTDSEDSTVSIQIKLENEGSDEDIETDVLYSPQMALKLALTEWLQEFGVPHQYSSRQVAHSGAKASVVDGTPLVAAPSLNATTVVTTVYQEPIMSQGAALSGEPTTLTKEEEKKQPDEEPMDMVVEKQEETDHKNDNQILSEIVEAKMAEELKPMDTDKESIAESKSPEMSMQEDCISDIAPMQTDEQTNKEQFVPGPNEKPLYTAEPVTLEDLQLLADLFYLPYEHGPKGAQMLREFQWLRANSSVVSVNCKGKDSEKIEEWRSRAAKFEEMCGLVMGMFTRLSNCANRTILYDMYSYVWDIKSIMSMVKSFVQWLGCRSHSSAQFLIGDQEPWAFRGGLAGEFQRLLPIDGANDLFFQPPPLTPTSKVYTIRPYFPKDEASVYKICREMYDDGVGLPFQSQPDLIGDKLVGGLLSLSLDYCFVLEDEDGICGYALGTVDVTPFIKKCKISWIPFMQEKYTKPNGDKELSEAEKIMLSFHEEQEVLPETFLANFPSLIKMDIHKKVTDPSVAKSMMACLLSSLKANGSRGAFCEVRPDDKRILEFYSKLGCFEIAKMEGFPKDVVILGRSL

SEQ ID NO: 836735 - protein, 581 aa, Homo sapiens
MNGVRKDVVMTDSEDSTVSIQIKLENEGSDEDIETDVLYSPQMALKLALTEWLQEFGVPHQYSSRQVAHSGAKASVVDGTPLVAAPSLNATTVVTTVYQEPIMSQGAALSGEPTTLTKEEEKKQPDEEPMDMVVEKQEETDHKNDNQILSEIVEAKMAEELKPMDTDKESIAESKSPEMSMQEDCISDIAPMQTDEQTNKEQFVPGPNEKPLYTAEPVTLEDLQLLADLFYLPYEHGPKGAQMLREFQWLRANSSVVSVNCKGKDSEKIEEWRSRAAKFEEMCGLVMGMFTRLSNCANRTILYDMYSYVWDIKSIMSMVKSFVQWLGCRSHSSAQFLIGDQEPWAFRGGLAGEFQRLLPIDGANDLFFQPPPLTPTSKVYTIRPYFPKDEASVYKICREMYDDGVGLPFQSQPDLIGDKLVGGLLSLSLDYCFVLEDEDGICGYALGTVDVTPFIKKCKISWIPFMQEKYTKPNGDKELSEAEKIMLSFHEEQEVLPETFLANFPSLIKMDIHKKVTDPSVAKSMMACLLSSLKANGSRGAFCEVRPDDKRILEFYSKLGCFEIAKMEGFPKDVVILGRSL

SEQ ID NO: 836736 - protein, 1061 aa, Homo sapiens
SASAVRINRKRAVEAAAEGELGAWRGNSGRPKIIGRAAEAENEDRTLGRLLPGNERSQPRSPLMLLAPQLKAEAAADKGLAPVPPPFSSGHSGPCEKEGEGQRGRGRSRRGAHLELKPSPGLRAGAPTDRGRGGPAEVAAAGGRRMVQKESQATLEERESELSSNPAASAGASLEPPAAPAPGEDNPAGAGGAAVAGAAGGARRFLCGVVEGFYGRPWVMEQRKELFRRLQKWELNTYLYAPKDDYKHRMFWREMYSVEEAEQLMTLISAAREYEIEFIYAISPGLDITFSNPKEVSTLKRKLDQVSQFGCRSFALLFDDIDHNMCAADKEVFSSFAHAQVSITNEIYQYLGEPETFLFCPTEYCGTFCYPNVSQSPYLRTVGEKLLPGIEVLWTGPKVVSKEIPVESIEEVSKIIKRAPVIWDNIHANDYDQKRLFLGPYKGRSTELIPRLKGVLTNPNCEFEANYVAIHTLATWYKSNMNGVRKDVVMTDSEDSTVSIQIKLENEGSDEDIETDVLYSPQMALKLALTEWLQEFGVPHQYSSRQVAHSGAKASVVDGTPLVAAPSLNATTVVTTVYQEPIMSQGAALSGEPTTLTKEEEKKQPDEEPMDMVVEKQEETDHKNDNQILSEIVEAKMAEELKPMDTDKESIAESKSPEMSMQEDCISDIAPMQTDEQTNKEQFVPGPNEKPLYTAEPVTLEDLQLLADLFYLPYEHGPKGAQMLREFQWLRANSSVVSVNCKGKDSEKIEEWRSRAAKFEEMCGLVMGMFTRLSNCANRTILYDMYSYVWDIKSIMSMVKSFVQWLGCRSHSSAQFLIGDQEPWAFRGGLAGEFQRLLPIDGANDLFFQPPPLTPTSKVYTIRPYFPKDEASVYKICREMYDDGVGLPFQSQPDLIGDKLVGGLLSLSLDYCFVLEDEDGICGYALGTVDVTPFIKKCKISWIPFMQEKYTKPNGDKELSEAEKIMLSFHEEQEVLPETFLANFPSLIKMDIHKKVTDPSVAKSMMACLLSSLKANGSRGAFCEVRPDDKRILEFYSKLGCFEIAKMEGFPKDVVILGRSL

SEQ ID NO: 836737 - protein, 1061 aa, Homo sapiens; identical to SEQ ID NO: 836736

SEQ ID NO: 836738 - protein, 1061 aa, Homo sapiens; identical to SEQ ID NO: 836736

SEQ ID NO: 836739 - protein, 822 aa, Homo sapiens
SASAVRINRKRAVEAAAEGELGAWRGNSGRPKIIGRAAEAENEDRTLGRLLPGNERSQPRSPLMLLAPQLKAEAAADKGLAPVPPPFSSGHSGPCEKEGEGQRGRGRSRRGAHLELKPSPGLRAGAPTDRGRGGPAEVAAAGGRRMVQKESQATLEERESELSSNPAASAGASLEPPAAPAPGEDNPAGAGGAAVAGAAGGARRFLCGVVEGFYGRPWVMEQRKELFRRLQKWELNTYLYAPKDDYKHRMFWREMYSVEEAEQLMTLISAAREYEIEFIYAISPGLDITFSNPKEVSTLKRKLDQVSQFGCRSFALLFDDIDHNMCAADKEVFSSFAHAQVSITNEIYQYLGEPETFLFCPTEYCGTFCYPNVSQSPYLRTVGEKLLPGIEVLWTGPKVVSKEIPVESIEEVSKIIKRAPVIWDNIHANDYDQKRLFLGPYKGRSTELIPRLKGVLTNPNCEFEANYVAIHTLATWYKSNMNGVRKDVVMTDSEDSTVSIQIKLENEGSDEDIETDVLYSPQMALKLALTEWLQEFGVPHQYSSRQVAHSGAKASVVDGTPLVAAPSLNATTVVTTVYQEPIMSQGAALSGEPTTLTKEEEKKQPDEEPMDMVVEKQEETDHKNDNQILSEIVEAKMAEELKPMDTDKESIAESKSPEMSMQEDCISDIAPMQTDEQTNKEQFVPGPNEKPLYTAEPVTLEDLQLLADLFYLPYEHGPKGAQMLREFQWLRANSSVVSVNCKGKDSEKIEEWRSRAAKFEEMCGLVMGMFTRLSNCANRTILYDMYSYVWDIKSIMSMVKSFVQWLGRCTRNNLFSSNILSL

SEQ ID NO: 836740 - protein, 1061 aa, Homo sapiens; identical to SEQ ID NO: 836736

SEQ ID NO: 836741 - protein, 1182 aa, Homo sapiens
SASAVRINRKRAVEAAAEGELGAWRGNSGRPKIIGRAAEAENEDRTLGRLLPGNERSQPRSPLMLLAPQLKAEAAADKGLAPVPPPFSSGHSGPCEKEGEGQRGRGRSRRGAHLELKPSPGLRAGAPTDRGRGGPAEVAAAGGRRMVQKESQATLEERESELSSNPAASAGASLEPPAAPAPGEDNPAGAGGAAVAGAAGGARRFLCGVVEGFYGRPWVMEQRKELFRRLQKWELNTYLYAPKDDYKHRMFWREMYSVEEAEQLMTLISAAREYEIEFIYAISPGLDITFSNPKEVSTLKRKLDQVSQFGCRSFALLFDDIDHNMCAADKEVFSSFAHAQVSITNEIYQYLGEPETFLFCPTEYCGTFCYPNVSQSPYLRTVGEKLLPGIEVLWTGPKVVSKEIPVESIEEVSKIIKRAPVIWDNIHANDYDQKRLFLGPYKGRSTELIPRLKGVLTNPNCEFEANYVAIHTLATWYKSNMNGVRKDVVMTDSEDSTVSIQIKLENEGSDEDIETDVLYSPQMALKLALTEWLQEFGVPHQYSSRQVAHSGAKASVVDGTPLVAAPSLNATTVVTTVYQEPIMSQGAALSGEPTTLTKEEEKKQPDEEPMDMVVEKQEETDHKNDNQILSEIVEAKMAEELKPMDTDKESIAESKSPEMSMQEDCISDIAPMQTDEQTNKEQFVPGPNEKPLYTAEPVTLEDLQLLADLFYLPYEHGPKGAQMLREFQWLRANSSVVSVNCKGKDSEKIEEWRSRAAKFEEMCGLVMGMFTRLSNCANRTILYDMYSYVWDIKSIMSMVKSFVQWLGCRSHSSAQFLIGDQEPWAFRGGLAGEFQRLLPIDGANDLFFQPPPLTPTSKVYTIRPYFPKDEASVYKICREMYDDGVGLPFQSQPDLIGDKLVGGLLSLSLDYCFVLEDEDGICGYALGTVDVTPFIKKCKISWIPFMQEKYTKPNGDKELSEAEKIMLSFHEEQEVLPETFLANFPSLIKMDIHKKVTDPSVAKSMMACLLSSLKANGSRGALCRSETSMTTPDTSGNFYTPQLRHGLTQTSPHNTAPRDFSHTGTVASYLRSGSPVHHSRTRTNWLKPRSPNQLLPFKPWPTLCSDNLGSNTIQRAPPVFPNLTPGNIPSCPPPVYAHPLARYRPPPEVSTILPTNNITGCSASPCRQMTHDTATSGKTSQS

SEQ ID NO: 836742 - protein, 586 aa, Homo sapiens
SASAVRINRKRAVEAAAEGELGAWRGNSGRPKIIGRAAEAENEDRTLGRLLPGNERSQPRSPLMLLAPQLKAEAAADKGLAPVPPPFSSGHSGPCEKEGEGQRGRGRSRRGAHLELKPSPGLRAGAPTDRGRGGPAEVAAAGGRRMVQKESQATLEERESELSSNPAASAGASLEPPAAPAPGEDNPAGAGGAAVAGAAGGARRFLCGVVEGFYGRPWVMEQRKELFRRLQKWELNTYLYAPKDDYKHRMFWREMYSVEEAEQLMTLISAAREYEIEFIYAISPGLDITFSNPKEVSTLKRKLDQVSQFGCRSFALLFDDIDHNMCAADKEVFSSFAHAQVSITNEIYQYLGEPETFLFCPTEYCGTFCYPNVSQSPYLRTVGEKLLPGIEVLWTGPKVVSKEIPVESIEEVSKIIKRAPVIWDNIHANDYDQKRLFLGPYKGRSTELIPRLKGVLTNPNCEFEANYVAIHTLATWYKSNMNGVRKDVVMTDSEDSTVSIQIKLENEGSDEDIETDVLYSPQMALKLALTEWLQEFGVPHQYSSRASATVELSSGTDGLFIADLLMPTSTTVSGHIAGTDGHILQK

SEQ ID NO: 836743 - protein, 284 aa, Homo sapiens
SASAVRINRKRAVEAAAEGELGAWRGNSGRPKIIGRAAEAENEDRTLGRLLPGNERSQPRSPLMLLAPQLKAEAAADKGLAPVPPPFSSGHSGPCEKEGEGQRGRGRSRRGAHLELKPSPGLRAGAPTDRGRGGPAEVAAAGGRRMVQKESQATLEERESELSSNPAASAGASLEPPAAPAPGEDNPAGAGGAAVAGAAGGARRFLCGVVEGFYGRPWVMEQRKELFRRLQKWELNTYLYAPKDDYKHRMFWREMYSVEEAGWSAVVRSRLTANLALPSSRDSA

SEQ ID NO: 836744 - protein, 1061 aa, Homo sapiens; identical to SEQ ID NO: 836736

SEQ ID NO: 836745 - protein, 838 aa, Homo sapiens
SASAVRINRKRAVEAAAEGELGAWRGNSGRPKIIGRAAEAENEDRTLGRLLPGNERSQPRSPLMLLAPQLKAEAAADKGLAPVPPPFSSGHSGPCEKEGEGQRGRGRSRRGAHLELKPSPGLRAGAPTDRGRGGPAEVAAAGGRRMVQKESQATLEERESELSSNPAASAGASLEPPAAPAPGEDNPAGAGGAAVAGAAGGARRFLCGVVEGFYGRPWVMEQRKELFRRLQKWELNTYLYAPKDDYKHRMFWREMYSVEEAEQLMTLISAAREYEIEFIYAISPGLDITFSNPKEVSTLKRKLDQVSQFGCRSFALLFDDIDHNMCAADKEVFSSFAHAQVSITNEIYQYLGEPETFLFCPTEYCGTFCYPNVSQSPYLRTVGEKLLPGIEVLWTGPKVVSKEIPVESIEEVSKIIKRAPVIWDNIHANDYDQKRLFLGPYKGRSTELIPRLKGVLTNPNCEFEANYVAIHTLATWYKSNMNGVRKDVVMTDSEDSTVSIQIKLENEGSDEDIETDVLYSPQMALKLALTEWLQEFGVPHQYSSRQVAHSGAKASVVDGTPLVAAPSLNATTVVTTVYQEPIMSQGAALSGEPTTLTKEEEKKQPDEEPMDMVVEKQEETDHKNDNQILSEIVEAKMAEELKPMDTDKESIAESKSPEMSMQEDCISDIAPMQTDEQTNKEQFVPGPNEKPLYTAEPVTLEDLQLLADLFYLPYEHGPKGAQMLREFQWLRANSSVVSVNCKGKDSEKIEEWRSRAAKFEEMCGLVMGMFTRLSNCANRTILYDMYSYVWDIKSIMSMVKSFVQWLGCRSHSSAQFLIGDQEPWAFRGGLAGEFQVSI

SEQ ID NO: 836746 - protein, 737 aa, Homo sapiens
MCAADKEVFSSFAHAQVSITNEIYQYLGEPETFLFCPTEYCGTFCYPNVSQSPYLRTVGEKLLPGIEVLWTGPKVVSKEIPVESIEEVSKIIKRAPVIWDNIHANDYDQKRLFLGPYKGRSTELIPRLKGVLTNPNCEFEANYVAIHTLATWYKSNMNGVRKDVVMTDSEDSTVSIQIKLENEGSDEDIETDVLYSPQMALKLALTEWLQEFGVPHQYSSRQVAHSGAKASVVDGTPLVAAPSLNATTVVTTVYQEPIMSQGAALSGEPTTLTKEEEKKQPDEEPMDMVVEKQEETDHKNDNQILSEIVEAKMAEELKPMDTDKESIAESKSPEMSMQEDCISDIAPMQTDEQTNKEQFVPGPNEKPLYTAEPVTLEDLQLLADLFYLPYEHGPKGAQMLREFQWLRANSSVVSVNCKGKDSEKIEEWRSRAAKFEEMCGLVMGMFTRLSNCANRTILYDMYSYVWDIKSIMSMVKSFVQWLGCRSHSSAQFLIGDQEPWAFRGGLAGEFQRLLPIDGANDLFFQPPPLTPTSKVYTIRPYFPKDEASVYKICREMYDDGVGLPFQSQPDLIGDKLVGGLLSLSLDYCFVLEDEDGICGYALGTVDVTPFIKKCKISWIPFMQEKYTKPNGDKELSEAEKIMLSFHEEQEVLPETFLANFPSLIKMDIHKKVTDPSVAKSMMACLLSSLKANGSRGAFCEVRPDDKRILEFYSKLGCFEIAKMEGFPKDVVILGRSL

SEQ ID NO: 836747 - protein, 906 aa, Homo sapiens
SASAVRINRKRAVEAAAEGELGAWRGNSGRPKIIGRAAEAENEDRTLGRLLPGNERSQPRSPLMLLAPQLKAEAAADKGLAPVPPPFSSGHSGPCEKEGEGQRGRGRSRRGAHLELKPSPGLRAGAPTDRGRGGPAEVAAAGGRRMVQKESQATLEERESELSSNPAASAGASLEPPAAPAPGEDNPAGAGGAAVAGAAGGARRFLCGVVEGFYGRPWVMEQRKELFRRLQKWELNTYLYAPKDDYKHRMFWREMYSVEEAEQLMTLISAAREYEIEFIYAISPGLDITFSNPKEVSTLKRKLDQVSQFGCRSFALLFDDIDHNMCAADKEVFSSFAHAQVSITNEIYQYLGEPETFLFCPTEYCGTFCYPNVSQSPYLRTVGEKLLPGIEVLWTGPKVVSKEIPVESIEEVSKIIKRAPVIWDNIHANDYDQKRLFLGPYKGRSTELIPRLKGVLTNPNCEFEANYVAIHTLATWYKSNMNGVRKDVVMTDSEDSTVSIQIKLENEGSDEDIETDVLYSPQMALKLALTEWLQEFGVPHQYSSRQVAHSGAKASVVDGTPLVAAPSLNATTVVTTVYQEPIMSQGAALSGEPTTLTKEEEKKQPDEEPMDMVVEKQEETDHKNDNQILSEIVEAKMAEELKPMDTDKESIAESKSPEMSMQEDCISDIAPMQTDEQTNKEQFVPGPNEKPLYTAEPVTLEDLQLLADLFYLPYEHGPKGAQMLREFQWLRANSSVVSVNCKGKDSEKIEEWRSRAAKFEEMCGLVMGMFTRLSNCANRTILYDMYSYVWDIKSIMSMVKSFVQWLGCRSHSSAQFLIGDQEPWAFRGGLAGEFQRLLPIDGANDLFFQPPPLTPTSKVYTIRPYFPKDEASVYKICREMYDDGVGLPFQSQPDLIGDKYVISIWI

SEQ ID NO: 836748 - protein, 105 aa, Homo sapiens
CKRGSSGRSYSVKRAVHACYRVTMRAARLSVADSDNTKENAMPSVAKSMMACLLSSLKANGSRGAFCEVRPDDKRILEFYSKLGCFEIAKMEGFPKDVVILGRSL

SEQ ID NO: 836749 - protein, 1061 aa, Homo sapiens; identical to SEQ ID NO: 836736

SEQ ID NO: 836750 - protein, 1061 aa, Homo sapiens; identical to SEQ ID NO: 836736

SEQ ID NO: 836751 - protein, 822 aa, Homo sapiens; identical to SEQ ID NO: 836739

SEQ ID NO: 836752 - protein, 1039 aa, Homo sapiens
SASAVRINRKRAVEAAAEGELGAWRGNSGRPKIIGRAAEAENEDRTLGRLLPGNERSQPRSPLMLLAPQLKAEAAADKGLAPVPPPFSSGHSGPCEKEGEGQRGRGRSRRGAHLELKPSPGLRAGAPTDRGRGGPAEVAAAGGRRMVQKESQATLEERESELSSNPAASAGASLEPPAAPAPGEDNPAGAGGAAVAGAAGGARRFLCGVVEGFYGRPWVMEQRKELFRRLQKWELNTYLYAPKDDYKHRMFWREMYSVEEAEQLMTLISAAREYEIEFIYAISPGLDITFSNPKEVSTLKRKLDQVSQFGCRSFALLFDDIDHNMCAADKEVFSSFAHAQVSITNEIYQYLGEPETFLFCPTEYCGTFCYPNVSQSPYLRTVGEKLLPGIEVLWTGPKVVSKEIPVESIEEVSKIIKRAPVIWDNIHANDYDQKRLFLGPYKGRSTELIPRLKGVLTNPNCEFEANYVAIHTLATWYKSNMNGVRKDVVMTDSEDSTVSIQIKLENEGSDEDIETDVLYSPQMALKLALTEWLQEFGVPHQYSSRQVAHSGAKASVVDGTPLVAAPSLNATTVVTTVYQEPIMSQGAALSGEPTTLTKEEEKKQPDEEPMDMVVEKQEETDHKNDNQILSEIVEAKMAEELKPMDTDKESIAESKSPEMSMQEDCISDIAPMQTDEQTNKEQFVPGPNEKPLYTAEPVTLEDLQLLADLFYLPYEHGPKGAQMLREFQWLRANSSVVSVNCKGKDSEKIEEWRSRAAKFEEMCGLVMGMFTRLSNCANRTILYDMYSYVWDIKSIMSMVKSFVQWLGCRSHSSAQFLIGDQEPWAFRGGLAGEFQRLLPIDGANDLFFQPPPLTPTSKVYTIRPYFPKDEASVYKICREMYDDGVGLPFQSQPDLIGDKLVGGLLSLSLDYCFVLEDEDGICGYALGTVDVTPFIKKCKISWIPFMQEKYTKPNGDKELSEAEKIMLSFHEEQEVLPETFLANFPSLIKMDIHKKVTDPSVAKSMMACLLSSLKANGEYIFVELVVFGQDRERTIYFWI

SEQ ID NO: 836753 - protein, 838 aa, Homo sapiens; identical to SEQ ID NO: 836745

SEQ ID NO: 836754 - protein, 512 aa, Homo sapiens
SASAVRINRKRAVEAAAEGELGAWRGNSGRPKIIGRAAEAENEDRTLGRLLPGNERSQPRSPLMLLAPQLKAEAAADKGLAPVPPPFSSGHSGPCEKEGEGQRGRGRSRRGAHLELKPSPGLRAGAPTDRGRGGPAEVAAAGGRRMVQKESQATLEERESELSSNPAASAGASLEPPAAPAPGEDNPAGAGGAAVAGAAGGARRFLCGVVEGFYGRPWVMEQRKELFRRLQKWELNTYLYAPKDDYKHRMFWREMYSVEEAEQLMTLISAAREYEIEFIYAISPGLDITFSNPKEVSTLKRKLDQVSQFGCRSFALLFDDIDHNMCAADKEVFSSFAHAQVSITNEIYQYLGEPETFLFCPTEYCGTFCYPNVSQSPYLRTVGEKLLPGIEVLWTGPKVVSKEIPVESIEEVSKIIKRAPVIWDNIHANDYDQKRLFLGPYKGRSTELIPRLKGVLTNPNCEFEANYVAIHTLATWYKSNMNGVRKDVVMTDSEDSAVDTQIMLIAVSSSKA

SEQ ID NO: 836755 - protein, 636 aa, Homo sapiens
MEGRGPYRIYDPGGSVPSGEASAAFERLVKENSRLKEKMQGIKMLGELLEESQMEATRLRQKAEELVKDNELLPPPSPSLGSFDPLAELTGKDSNVTASPTAPACPSDKPAPVQKPPSSGTSSEFEVVTPEEQNSPESSSHANAMALGPLPREDGNLMLHLQRLETTLSVCAEEPDHGQLFTHLGRMALEFNRLASKVHKNEQRTSILQTLCEQLRKENEALKAKLDKGLEQRDQAAERLREENLELKKLLMSNGNKEGASGRPGSPKMEGTGKKAVAGQQQASVTAGKVPEVVALGAAEKKVKMLEQQRSELLEVNKQWDQHFRSMKQQYEQKITELRQKLADLQKQVTDLEAEREQKQRDFDRKLLLAKSKIEMEETDKEQLTAEAKELRQKVKYLQDQLSPLTRQREYQEKEIQRLNKALEEALSIQTPPSSPPTAFGSPEGAGALLRKQELVTQNELLKQQVKIFEEDFQRERSDRERMNEEKEELKKQVEKLQAQVTLSNAQLKAFKDEEKAREALRQQKRKAKASGERYHVEPHPEHLCGAYPYAYPPMPAMVPHHGFEDWSQIRYPPPPMAMEHPPPLPNSRLFHLPEYTWRLPCGGVRNPNQSSQVMDPPTARPTEPESPKNDREGPQ

SEQ ID NO: 836756 - protein, 635 aa, Homo sapiens
MEGRGPYRIYDPGGSVPSGEASAAFERLVKENSRLKEKMQGIKMLGELLEESQMEATRLRQKAEELVKDNELLPPPSPSLGSFDPLAELTGKDSNVTASPTAPACPSDKPAPVQKPPSSGTSSEFEVVTPEEQNSPESSSHANAMALGPLPREDGNLMLHLQRLETTLSVCAEEPDHGQLFTHLGRMALEFNRLASKVHKNEQRTSILQTLCEQLRKENEALKAKLDKGLEQRDQAAERLREENLELKKLLMSNGNKEGASGRPGSPKMEGTGKKAVAGQQQASVTAGKVPEVVALGAAEKKVKMLEQQRSELLEVNKQWDQHFRSMKQQYEQKITELRQKLADLQKQVTDLEAEREQKQRDFDRKLLLAKSKIEMEETDKEQLTAEAKELRQKVKYLQDQLSPLTRQREYQEKEIQRLNKALEEALSIQTPPSSPPTAFGSPEGAGALLRKQELVTQNELLKQQVKIFEEDFQRERSDRERMNEEKEELKKQVEKLQAQVTLSNAQLKAFKDEEKAREALRQQKRKAKASGERYHVEPHPEHLCGAYPYAYPPMPAMVPHHGFEDWSQIRYPPPPMAMEHPPPLPNSRLFHLPEYTWRLPCGGVRNPNQSSQVMDPPTARPTEPEPADLRLPRN

SEQ ID NO: 836757 - protein, 583 aa, Homo sapiens
MEATRLRQKAEELVKDNELLPPPSPSLGSFDPLAELTGKDSNVTASPTAPACPSDKPAPVQKPPSSGTSSEFEVVTPEEQNSPESSSHANAMALGPLPREDGNLMLHLQRLETTLSVCAEEPDHGQLFTHLGRMALEFNRLASKVHKNEQRTSILQTLCEQLRKENEALKAKLDKGLEQRDQAAERLREENLELKKLLMSNGNKEGASGRPGSPKMEGTGKKAVAGQQQASVTAGKVPEVVALGAAEKKVKMLEQQRSELLEVNKQWDQHFRSMKQQYEQKITELRQKLADLQKQVTDLEAEREQKQRDFDRKLLLAKSKIEMEETDKEQLTAEAKELRQKVKYLQDQLSPLTRQREYQEKEIQRLNKALEEALSIQTPPSSPPTAFGSPEGAGALLRKQELVTQNELLKQQVKIFEEDFQRERSDRERMNEEKEELKKQVEKLQAQVTLSNAQLKAFKDEEKAREALRQQKRKAKASGERYHVEPHPEHLCGAYPYAYPPMPAMVPHHGFEDWSQIRYPPPPMAMEHPPPLPNSRLFHLPEYTWRLPCGGVRNPNQSSQVMDPPTARPTEPESPKNDREGPQ

SEQ ID NO: 836758 - protein, 636 aa, Homo sapiens; identical to SEQ ID NO: 836755

SEQ ID NO: 836759 - protein, 546 aa, Homo sapiens
MEGRGPYRIYDPGGSVPSGEASAAFERLVKENSRLKEKMQGIKMLGELLEESQMEATRLRQKAEELVKDNELLPPPSPSLGSFDPLAELTGKDSNVTASPTAPACPSDKPAPVQKPPSSTLCEQLRKENEALKAKLDKGLEQRDQAAERLREENLELKKLLMSNGNKEGASGRPGSPKMEGTGKKAVAGQQQASVTAGKVPEVVALGAAEKKVKMLEQQRSELLEVNKQWDQHFRSMKQQYEQKITELRQKLADLQKQVTDLEAEREQKQRDFDRKLLLAKSKIEMEETDKEQLTAEAKELRQKVKYLQDQLSPLTRQREYQEKEIQRLNKALEEALSIQTPPSSPPTAFGSPEGAGALLRKQELVTQNELLKQQVKIFEEDFQRERSDRERMNEEKEELKKQVEKLQAQVTLSNAQLKAFKDEEKAREALRQQKRKAKASGERYHVEPHPEHLCGAYPYAYPPMPAMVPHHGFEDWSQIRYPPPPMAMEHPPPLPNSRLFHLPEYTWRLPCGGVRNPNQSSQVMDPPTARPTEPESPKNDREGPQ

SEQ ID NO: 836760 - protein, 366 aa, Homo sapiens
MEGRGPYRIYDPGGSVPSGEASAAFERLVKKKVKMLEQQRSELLEVNKQWDQHFRSMKQQYEQKITELRQKLADLQKQVTDLEAEREQKQRDFDRKLLLAKSKIEMEETDKEQLTAEAKELRQKVKYLQDQLSPLTRQREYQEKEIQRLNKALEEALSIQTPPSSPPTAFGSPEGAGALLRKQELVTQNELLKQQVKIFEEDFQRERSDRERMNEEKEELKKQVEKLQAQVTLSNAQLKAFKDEEKAREALRQQKRKAKASGERYHVEPHPEHLCGAYPYAYPPMPAMVPHHGFEDWSQIRYPPPPMAMEHPPPLPNSRLFHLPEYTWRLPCGGVRNPNQSSQVMDPPTARPTEPESPKNDREGPQ

SEQ ID NO: 836761 - protein, 636 aa, Homo sapiens; identical to SEQ ID NO: 836755

SEQ ID NO: 836762 - protein, 634 aa, Homo sapiens
MEGRGPYRIYDPGGSVPSGEASAAFERLVKENSRLKEKMQGIKMLGELLEESQMEATRLRQKAEELVKDNELLPPPSPSLGSFDPLAELTGKDSNVTASPTAPACPSDKPAPVQKPPSSGTSSEFEVVTPEEQNSPESSSHANAMALGPLPREDGNLMLHLQRLETTLSVCAEEPDHGQLFTHLGRMALEFNRLASKVHKNEQRTSILQTLCEQLRKENEALKAKLDKGLEQRDQAAERLREENLELKKLLMSNGNKEGASGRPGSPKMEGTGKKAVAGQQQASVTAGKVPEVVALGAAEKKVKMLEQQRSELLEVNKQWDQHFRSMKQQYEQKITELRQKLADLQKQVTDLEAEREQKQRDFDRKLLLAKSKIEMEETDKEQLTAEAKELRQKVKYLQDQLSPLTRQREYQEKEIQRLNKALEEALSIQTPPSSPPTAFGSPEGAGALLRKQELVTQNELLKQQVKIFEEDFQRERSDRERMNEEKEELKKQVEKLQAQVTLSNAQLKAFKDEEKAREALRQQKRKAKASGERYHVEPHPEHLCGAYPYAYPPMPAMVPHHGFEDWSQIRYPPPPMAMEHPPPLPNSRLFHLQPRPPRGASLKLPGPEVQTLDPIAGGLWCQKPRLGWLSIPG

SEQ ID NO: 836763 - protein, 203 aa, Homo sapiens
MTGQVEGRVVVGRGALLRKQELVTQNELLKQQVKIFEEDFQRERSDRERMNEEKEELKKQVEKLQAQVTLSNAQLKAFKDEEKAREALRQQKRKAKASGERYHVEPHPEHLCGAYPYAYPPMPAMVPHHGFEDWSQIRYPPPPMAMEHPPPLPNSRLFHLPEYTWRLPCGGVRNPNQSSQVMDPPTARPTEPESPKNDREGPQ

SEQ ID NO: 836764 - protein, 182 aa, Homo sapiens
MEGRGPYRIYDPGGSVPSGEASAAFERLVKENSRLKEKMQGIKMLGELLEESQMEATRLRQKAREALRQQKRKAKASGERYHVEPHPEHLCGAYPYAYPPMPAMVPHHGFEDWSQIRYPPPPMAMEHPPPLPNSRLFHLPEYTWRLPCGGVRNPNQSSQVMDPPTARPTEPESPKNDREGPQ

SEQ ID NO: 836765 - protein, 548 aa, Homo sapiens [sequence omitted]

SEQ ID NO: 836766 - protein, 301 aa, Homo sapiens
MEGRGPYRIYDPGGSVPSGEASAAFERLVKENSRLKEKMQGIKMLGELLEESQMEATRLRQKAEELVKDNELLPPPSPSLGSFDPLAELTGKDSNVTASPTAPACPSDKPAPVQKPPSSGTSSEFEVVTPEEQNSPESSSHANAMALGPLPREDGNLMLHLQRLETTLSVCAEEPDHGQLFTHLGRMALEFNRLASKVHKNEQRTSILQTLCEQLRKENEALKAKLDKGLEQRDQAAERLREENLELKKLLMSNGNKEGASGRPGSPKMEGTGKKAVAGQQQKPSQMGEGHASHVRRGAPA

SEQ ID NO: 836767 - protein, 245 aa, Homo sapiens
MEGRGPYRIYDPGGSVPSGEASAAFERLVKENSRLKEKMQGIKMLGELLEESQMEATRLRQKAEELVKDNELLPPPSPSLGSFDPLAELTGKDSNVTASPTAPACPSDKPAPVQKPPSSGTSSEFEVVTPEEQNSPESSSHANAMALGPLPREDGNLMLHLQRLETTLSVCAEEPDHGQLFTHLGRMALEFNRLASKVHKNEQRTSILQTLCEQLRKENEALKAKLDKGLEQRDQAAERLREADL

SEQ ID NO: 836768 - protein, 280 aa, Homo sapiens
VSRGAFIGTAAPGAHTLVFSCPSPGELLEESQMEATRLRQKAEELVKDNELLPPPSPSLGSFDPLAELTGKDSNVTASPTAPACPSDKPAPVQKPPSSGTSSEFEVVTPEEQNSPESSSHANAMALGPLPREDGNLMLHLQRLETTLSVCAEEPDHGQLFTHLGRMALEFNRLASKVHKNEQRTSILQTLCEQLRKENEALKAKLDKGLEQRDQAAERLREENLELKKLLMSNGNKEGASGRPGSPKMEGTGKKAVAGQQQKPSQMGEGHASHVRRGAPA

SEQ ID NO: 836769 - protein, 148 aa, Homo sapiens
MEGRGPYRIYDPGGSVPSGEASAAFERLVKENSRLKEKMQGIKMLGELLEESQMEATRLRQKAEELVKDNELLPPPSPSLGSFDPLAELTGKDSNVTASPTAPACPSDKPAPVQKPPSSVSFIWSHGWRLPGWTSSPTDRYKNMKKEG

SEQ ID NO: 836770 - protein, 636 aa, Homo sapiens; identical to SEQ ID NO: 836755

SEQ ID NO: 836771 - protein, 108 aa, Homo sapiens
MLRGVTFTVAGLPNSAAFSRFQQRASVTAGKVPEVVALGAAEKKVKMLEQQRSELLEVNKQWDQHFRSMKQQYEQKISELCQNLPCMQKHGDDWVFVLDLSAGEPGLT

SEQ ID NO: 836772 - protein, 615 aa, Homo sapiens
VSRGAFIGTAAPGAHTLVFSCPSPGELLEESQMEATRLRQKAEELVKDNELLPPPSPSLGSFDPLAELTGKDSNVTASPTAPACPSDKPAPVQKPPSSGTSSEFEVVTPEEQNSPESSSHANAMALGPLPREDGNLMLHLQRLETTLSVCAEEPDHGQLFTHLGRMALEFNRLASKVHKNEQRTSILQTLCEQLRKENEALKAKLDKGLEQRDQAAERLREENLELKKLLMSNGNKEGASGRPGSPKMEGTGKKAVAGQQQASVTAGKVPEVVALGAAEKKVKMLEQQRSELLEVNKQWDQHFRSMKQQYEQKITELRQKLADLQKQVTDLEAEREQKQRDFDRKLLLAKSKIEMEETDKEQLTAEAKELRQKVKYLQDQLSPLTRQREYQEKEIQRLNKALEEALSIQTPPSSPPTAFGSPEGAGALLRKQELVTQNELLKQQVKIFEEDFQRERSDRERMNEEKEELKKQVEKLQAQVTLSNAQLKAFKDEEKAREALRQQKRKAKASGERYHVEPHPEHLCGAYPYAYPPMPAMVPHHGFEDWSQIRYPPPPMAMEHPPPLPNSRLFHLPEYTWRLPCGGVRNPNQSSQVMDPPTARPTEPESPKNDREGPQ

SEQ ID NO: 836773 - protein, 636 aa, Homo sapiens; identical to SEQ ID NO: 836755

SEQ ID NO: 836774 - protein, 335 aa, Homo sapiens
  misc_feature (17)..(17): Xaa can be any naturally occurring amino acid
VLRSSCSYDVPPSTLRXVLYILASHTPLCLCTQITELRQKLADLQKQVTDLEAEREQKQRDFDRKLLLAKSKIEMEETDKEQLTAEAKELRQKVKYLQDQLSPLTRQREYQEKEIQRLNKALEEALSIQTPPSSPPTAFGSPEGAGALLRKQELVTQNELLKQQVKIFEEDFQRERSDRERMNEEKEELKKQVEKLQAQVTLSNAQLKAFKDEEKAREALRQQKRKAKASGERYHVEPHPEHLCGAYPYAYPPMPAMVPHHGFEDWSQIRYPPPPMAMEHPPPLPNSRLFHLPEYTWRLPCGGVRNPNQSSQVMDPPTARPTEPESPKNDREGPQ

SEQ ID NO: 836775 - protein, 269 aa, Homo sapiens
DAWVAHASMEETDKEQLTAEAKELRQKVKYLQDQLSPLTRQREYQEKEIQRLNKALEEALSIQTPPSSPPTAFGSPEGAGALLRKQELVTQNELLKQQVKIFEEDFQRERSDRERMNEEKEELKKQVEKLQAQVTLSNAQLKAFKDEEKAREALRQQKRKAKASGERYHVEPHPEHLCGAYPYAYPPMPAMVPHHGFEDWSQIRYPPPPMAMEHPPPLPNSRLFHLPEYTWRLPCGGVRNPNQSSQVMDPPTARPTEPESPKNDREGPQ

SEQ ID NO: 836776 - protein, 634 aa, Homo sapiens
MEGRGPYRIYDPGGSVPSGEASAAFERLVKENSRLKEKMQGIKMLGELLEESQMEATRLRQKAEELVKDNELLPPPSPSLGSFDPLAELTGKDSNVTASPTAPACPSDKPAPVQKPPSSGTSSEFEVVTPEEQNSPESSSHANAMALGPLPREDGNLMLHLQRLETTLSVCAEEPDHGQLFTHLGRMALEFNRLASKVHKNEQRTSILQTLCEQLRKENEALKAKLDKGLEQRDQAAERLREENLELKKLLMSNGNKEGASGRPGSPKMEGTGKKAVAGQQQASVTAGKVPEVVALGAAEKKVKMLEQQRSELLEVNKQWDQHFRSMKQQYEQKITELRQKLADLQKQVTDLEAEREQKQRDFDRKLLLAKSKIEMEETDKEQLTAEAKELRQKVKYLQDQLSPLTRQREYQEKEIQRLNKALEEALSIQTPPSSPPTAFGSPEGAGALLRKQELVTQNELLKQQVKIFEEDFQRERSDRERMNEEKEELKKQVEKLQAQVTLSNAQLKAFKDEEKAREALRQQKRKAKASGERYHVEPHPEHLCGAYPYAYPPMPAMVPHHGFEDWSQIRYPGSDGARREWLPDKLEGLMPLSLLSGDAQAEPKLGPPLNPHFMAPEATLIQESLCPLGFNGL

SEQ ID NO: 836777 - protein, 273 aa, Homo sapiens
PAFTAHVAAFCAHVLAFRAHVPAFRVHVPAFHAHVPAFHAHVLAFCAHVPAFRAHVPAFRAHVLAFHAHVPAFRAHVPAFCAHVTTFHACVPSLPCPCSLPCSYIQPSMPMYPDFCTHVAAFHDHIPAFGTQPASLQRANILFRGDEMGVLCSLLQAKARRQPFLQASGERYHVEPHPEHLCGAYPYAYPPMPAMVPHHGFEDWSQIRYPPPPMAMEHPPPLPNSRLFHLPEYTWRLPCGGVRNPNQSSQVMDPPTARPTEPESPKNDREGPQ

SEQ ID NO: 836778 - protein, 526 aa, Homo sapiens
MEGRGPYRIYDPGGSVPSGEASAAFERLVKENSRLKEKMQGIKMLGELLEESQMEATRLRQKAEELVKDNELLPPPSPSLGSFDPLAELTGKDSNVTASPTAPACPSDKPAPVQKPPSSGTSSEFEVVTPEEQNSPESSSHANAMALGPLPREDGNLMLHLQRLETTLSVCAEEPDHGQLFTHLGRMALEFNRLASKVHKNEQRTSILQTLCEQLRKENEALKAKLDKGLEQRDQAAERLREENLELKKLLMSNGNKEGASGRPGSPKMEGTGKKAVAGQQQASVTAGKVPEVVALGAAEKKVKMLEQQRSELLEVNKQWDQHFRSMKQQYEQKITELRQKLADLQKQVTDLEAEREQKQRDFDRKLLLAKSKIEMEETDKEQLTAEAKELRQKVKYLQDQLSPLTRQREYQEKEIQRLNKALEEALSIQTPPSSPPTAFGSPEGAGALLRKQELVTQNELLKQQVKIFEEDFQRERSDRERMNEEKEELKKQVEKLQAQVTLSNAQKPSQMGEGHASHVRRGAPA

SEQ ID NO: 836779 - protein, 114 aa, Homo sapiens
IGRVACQSPGTFPGVGRPGQAPGTSSSSARVPCPRPGALGVLRGAGALPGPLPRPWIRGWTQQAGRCVPKLPVLGQAGTTAGAELPSWKGEDRTGSTTLGAACPQERHPQLLSA

SEQ ID NO: 836780 - protein, 148 aa, Homo sapiens; identical to SEQ ID NO: 836769

SEQ ID NO: 836781 - protein, 114 aa, Homo sapiens; identical to SEQ ID NO: 836779

SEQ ID NO: 836782 - protein, 69 aa, Homo sapiens
PLIARVDRLIWLAERVPSSLTAPCASLPKLPLGRRGRPSPIEEDRSSVKGIRVLRSPARTSKQALKVHL

SEQ ID NO: 836783 - protein, 323 aa, Homo sapiens
MKPSSQPVISLDPLPCILHQIGSPPTLRLPKTLNSSSVILTERHPLQTNAAFIYSPCGSLGNTRIISEEYIKWLTGYCKAYFYGLRVKLLEPVPVSVTRCSFRVNENTHNLQIHAGDILKFLKKKKPEDAFCVVGITMIDLYPRDSWNFVFGQASLTDGVGIFSFARYGSDFYSMHYKGKVKKLKKTSSSDYSIFDNYYIPEITSVLLLRSCKTLTHEIGHIFGLRHCQWLACLMQGSNHLEEADRRPLNLCPICLHKLQCAVGFSIVERYKALVRWIDDESSDTPGATPEHSHEDNGNLPKPVEAFKEWKEWIIKCLAVLQK

SEQ ID NO: 836784 - protein, 323 aa, Homo sapiens; identical to SEQ ID NO: 836783

SEQ ID NO: 836785 - protein, 323 aa, Homo sapiens; identical to SEQ ID NO: 836783

SEQ ID NO: 836786 - protein, 323 aa, Homo sapiens; identical to SEQ ID NO: 836783

SEQ ID NO: 836787 - protein, 323 aa, Homo sapiens; identical to SEQ ID NO: 836783

SEQ ID NO: 836788 - protein, 323 aa, Homo sapiens; identical to SEQ ID NO: 836783

SEQ ID NO: 836789 - protein, 323 aa, Homo sapiens; identical to SEQ ID NO: 836783

SEQ ID NO: 836790 - protein, 148 aa, Homo sapiens
MKPSSQPVISLDPLPCILHQIGSPPTLRLPKTLNSSSVILTERHPLQTNAAFIYSPCGSLGNTRIISEEYIKWLTGYCKAYFYGLRVKLLEPVPVSVTRCSFRVNENTHNLQIHAGDILKFLKKKKPEDAFCVVGITMIDLYPENIFK

SEQ ID NO: 836791 - protein, 265 aa, Homo sapiens
MKPSSQPVISLDPLPCILHQIGSPPTLRLPKTLNSSSVILTERHPLQTNAAFIYSPCGDILKFLKKKKPEDAFCVVGITMIDLYPRDSWNFVFGQASLTDGVGIFSFARYGSDFYSMHYKGKVKKLKKTSSSDYSIFDNYYIPEITSVLLLRSCKTLTHEIGHIFGLRHCQWLACLMQGSNHLEEADRRPLNLCPICLHKLQCAVGFSIVERYKALVRWIDDESSDTPGATPEHSHEDNGNLPKPVEAFKEWKEWIIKCLAVLQK

SEQ ID NO: 836792 - protein, 103 aa, Homo sapiens
MQIIRHSEQTLKTALISKNPVLVSQYEKLDAGEQRLMNEAFQPASDLFGPITLHSPSDWITSHPEAPQDFEQFFSDPYRSHGQHKTTVTHKPGNPQATVTQKY

SEQ ID NO: 836793 - protein, 161 aa, Homo sapiens
MPLKPAACRGRSHTGDPSDAGASVALENRAAEPPRAQARNRRLRGWTAGACSPLATLYSGRGGSRPLNSSSAPAQAAARSGAWHGWVVSWAGPTGRARRSGAARGVRGVAPVGVAWRSAKGRGAHAREGCRGWVVSRPVGSGRFAGAVRAGPGPLGRVAGS

SEQ ID NO: 836794 - protein, 69 aa, Homo sapiens; identical to SEQ ID NO: 836782

SEQ ID NO: 836795 - protein, 323 aa, Homo sapiens; identical to SEQ ID NO: 836783

SEQ ID NO: 836796 - protein, 323 aa, Homo sapiens; identical to SEQ ID NO: 836783

SEQ ID NO: 836797 - protein, 323 aa, Homo sapiens; identical to SEQ ID NO: 836783

SEQ ID NO: 836798 - protein, 323 aa, Homo sapiens; identical to SEQ ID NO: 836783

SEQ ID NO: 836799 - protein, 186 aa, Homo sapiens [sequence omitted]

SEQ ID NO: 836800 - protein, 397 aa, Homo sapiens
MGACLPRSRCRNNYGTSAKKINKEEAASSVVRRTPAALVLRGSEKTLECWVDNGWKSEVKRFQAKPCGSPFGSPLTLCNFFAFKSGDHLVLSRVYGVPPKGTFEDEVLRDDSLYRRDTDLQIKQQFIYSPCGSLGNTRIISEEYIKWLTGYCKAYFYGLRVKLLEPVPVSVTRCSFRVNENTHNLQIHAGDILKFLKKKKPEDAFCVVGITMIDLYPRDSWNFVFGQASLTDGVGIFSFARYGSDFYSMHYKGKVKKLKKTSSSDYSIFDNYYIPEITSVLLLRSCKTLTHEIGHIFGLRHCQWLACLMQGSNHLEEADRRPLNLCPICLHKLQCAVGFSIVERYKALVRWIDDESSDTPGATPEHSHEDNGNLPKPVEAFKEWKEWIIKCLAVLQK

SEQ ID NO: 836801 - protein, 186 aa, Homo sapiens [sequence omitted]

SEQ ID NO: 836802 - protein, 108 aa, Homo sapiens
SSSRRKPPLVPQAPAPGWKGRGGGAVNKVVYDDHGSQEEEDGDVEETQESEDNEEHEMEEDEADSDYLEELEDDDDASYCTESSFRSHSTYSSTPGTHPAQLLQTPSP

SEQ ID NO: 836803 - protein, 468 aa, Homo sapiens
MESAAALHFSRPASLLLLLLSLCALVSAQFIVVGPTDPILATVGENTTLRCHLSPEKNAEDMEVRWFRSQFSPAVFVYKGGRERTEEQMEEYRGRTTFVSKDISRGSVALVIHNITAQENGTYRCYFQEGRSYDEAILHLVVAGLGSKPLISMRGHEDGGIRLECISRGWYPKPLTVWRDPYGGVAPALKEVSMPDADGLFMVTTAVIIRDKSVRNMSCSINNTLLGQKKESVIFIPGYFLPSGLPIAVCIYWINKLQKEKKILSGEKEFERETREIALKELEKERVQKEEELQVKEKLQEELRWRRTFLHAVDVVLDPDTAHPDLFLSEDRRSVRRCPFRHLGESVPDNPERFDSQPCVLGRESFASGKHYWEVEVENVIEWTVGVCRDSVERKGEVLLIPQNGFWTLEMHKGQYRAVSSPDRILPLKESLCRVGVFLDYEAGDVSFYNMRDRSHIYTCPRSAFSRA

SEQ ID NO: 836804 - protein, 530 aa, Homo sapiens
MESAAALHFSRPASLLLLLLSLCALVSAQFIVVGPTDPILATVGENTTLRCHLSPEKNAEDMEVRWFRSQFSPAVFVYKGGRERTEEQMEEYRGRTTFVSKDISRGSVALVIHNITAQENGTYRCYFQEGRSYDEAILHLVVAGLGSKPLISMRGHEDGGIRLECISRGWYPKPLTVWRDPYGGVAPALKEVSMPDADGLFMVTTAVIIRDKSVRNMSCSINNTLLGQKKESVIFIPESFMPSVSPCAVALPIIVVILMIPIAVCIYWINKLQKEKKILSGEKEFERETREIALKELEKERVQKEEELQVKEEDNFKQAIAMAEEPFLHAVDVVLDPDTAHPDLFLSEDRRSVRRCPFRHLGESVPDNPERFDSQPCVLGRESFASGKHYWEVEVENVIEWTVGVCRDSVERKGEVLLIPQNGFWTLEMHKGQYRAVSSPDRILPLKESLCRVGVFLDYEAGDVSFYNMRDRSHIYTCPRSAFSVPVRPFFRLGCEDSPIFICPALTGANGVTVPEEGLTLHRVGTHQSL

SEQ ID NO: 836805 - protein, 604 aa, Homo sapiens
WKPRRPDFVSCISKHGDLGEREEQFFLLFWEGLRLVVPVPLGRLERRGTTGESSRTSGEKKKQRLILEAQFIVVGPTDPILATVGENTTLRCHLSPEKNAEDMEVRWFRSQFSPAVFVYKGGRERTEEQMEEYRGRTTFVSKDISRGSVALVIHNITAQENGTYRCYFQEGRSYDEAILHLVVAELLEAEVTEKSSQKQKVKSKTCLFEVGVDTPISRLGSKPLISMRGHEDGGIRLECISRGWYPKPLTVWRDPYGGVAPALKEVSMPDADGLFMVTTAVIIRDKSVRNMSCSINNTLLGQKKESVIFIPESFMPSVSPCAVALPIIVVILMIPIAVCIYWINKLQKEKKILSGEKEFERETREIALKELEKERVQKEEELQVKEEDNFKQAIAMAEEPFLHAVDVVLDPDTAHPDLFLSEDRRSVRRCPFRHLGESVPDNPERFDSQPCVLGRESFASGKHYWEVEVENVIEWTVGVCRDSVERKGEVLLIPQNGFWTLEMHKGQYRAVSSPDRILPLKESLCRVGVFLDYEAGDVSFYNMRDRSHIYTCPRSAFSVPVRPFFRLGCEDSPIFICPALTGANGVTVPEEGLTLHRVGTHQSL

SEQ ID NO: 836806 - protein, 563 aa, Homo sapiens
MESAAALHFSRPASLLLLLLSLCALVSAQFIVVGPTDPILATVGENTTLRCHLSPEKNAEDMEVRWFRSQFSPAVFVYKGGRERTEEQMEEYRGRTTFVSKDISRGSVALVIHNITAQENGTYRCYFQEGRSYDEAILHLVVAELLEAEVTEKSSQKQKVKSKTCLFEVGVDTPISRLGSKPLISMRGHEDGGIRLECISRGWYPKPLTVWRDPYGGVAPALKEVSMPDADGLFMVTTAVIIRDKSVRNMSCSINNTLLGQKKESVIFIPESFMPSVSPCAVALPIIVVILMIPIAVCIYWINKLQKEKKILSGEKEFERETREIALKELEKERVQKEEELQVKEEDNFKQAIAMAEEPFLHAVDVVLDPDTAHPDLFLSEDRRSVRRCPFRHLGESVPDNPERFDSQPCVLGRESFASGKHYWEVEVENVIEWTVGVCRDSVERKGEVLLIPQNGFWTLEMHKGQYRAVSSPDRILPLKESLCRVGVFLDYEAGDVSFYNMRDRSHIYTCPRSAFSVPVRPFFRLGCEDSPIFICPALTGANGVTVPEEGLTLHRVGTHQSL

SEQ ID NO: 836807 - protein, 527 aa, Homo sapiens
MESAAALHFSRPASLLLLLLSLCALVSAQFIVVGPTDPILATVGENTTLRCHLSPEKNAEDMEVRWFRSQFSPAVFVYKGGRERTEEQMEEYRGRTTFVSKDISRGSVALVIHNITAQENGTYRCYFQEGRSYDEAILHLVVAGLGSKPLISMRGHEDGGIRLECISRGWYPKPLTVWRDPYGGVAPALKEVSMPDADGLFMVTTAVIIRDKSVRNMSCSINNTLLGQKKESVIFIPESFMPSVSPCAVALPIIVVILMIPIAVCIYWINKLQKEKKILSGEKEFERETREIALKELEKERVQKEEELQVKEKLQEELRWRRTFLHAVDVVLDPDTAHPDLFLSEDRRSVRRCPFRHLGESVPDNPERFDSQPCVLGRESFASGKHYWEVEVENVIEWTVGVCRDSVERKGEVLLIPQNGFWTLEMHKGQYRAVSSPDRILPLKESLCRVGVFLDYEAGDVSFYNMRDRSHIYTCPRSAFSVPVRPFFRLGCEDSPIFICPALTGANGVTVPEEGLTLHRVGTHQSL

SEQ ID NO: 836808 - protein, 563 aa, Homo sapiens; identical to SEQ ID NO: 836806

SEQ ID NO: 836809 - protein, 284 aa, Homo sapiens
WKPRRPDFVSCISKHGDLGEREEQFFLLFWEGLRLVVPVPLGRLERRGTTGESSRTSGEKKKQRLILEGLLSLPALGAHGISCCPALLPASLPPPPPPQPVCTGLSVRRCPFRHLGESVPDNPERFDSQPCVLGRESFASGKHYWEVEVENVIEWTVGVCRDSVERKGEVLLIPQNGFWTLEMHKGQYRAVSSPDRILPLKESLCRVGVFLDYEAGDVSFYNMRDRSHIYTCPRSAFSVPVRPFFRLGCEDSPIFICPALTGANGVTVPEEGLTLHRVGTHQSL

SEQ ID NO: 836810 - protein, 263 aa, Homo sapiens
MALASVLERPLPVNQRGFFGLGGRADLLDLGPGSLSDGLSLAAPGWGVPEEPGIEMLHGTTTLAFKFRHGVIVAADSRATAGAYIASQTVKKVIEINPYLLGTMAGGAADCSFWERLLARQCRIYELRNKERISVAAASKLLANMVYQYKGMGLSMGTMICGWDKRGPGLYYVDSEGNRISGATFSVGSGSVYAYGVMDRGYSYDLEVEQAYDLARRAIYQATYRDAYSGGAVNLYHVREDGWIRVSSDNVADLHEKYSGSTP

SEQ ID NO: 836811 - protein, 263 aa, Homo sapiens; identical to SEQ ID NO: 836810

SEQ ID NO: 836812 - protein, 263 aa, Homo sapiens; identical to SEQ ID NO: 836810

SEQ ID NO: 836813 - protein, 263 aa, Homo sapiens; identical to SEQ ID NO: 836810

SEQ ID NO: 836814 - protein, 160 aa, Homo sapiens
MAGGAADCSFWERLLARQCRIYELRNKERISVAAASKLLANMVYQYKGMGLSMGTMICGWDKRGPGLYYVDSEGNRISGATFSVGSGSVYAYGVMDRGYSYDLEVEQAYDLARRAIYQATYRDAYSGGAVNLYHVREDGWIRVSSDNVADLHEKYSGSTP

SEQ ID NO: 836815 - protein, 238 aa, Homo sapiens
MALASVLERPLPVNQRGFFGLGGRADLLDLGPGSLSDGLSLAAPGWGVPEEPGIEMLHGTTTLAFKFRHGVIVAADSRATAGAADCSFWERLLARQCRIYELRNKERISVAAASKLLANMVYQYKGMGLSMGTMICGWDKRGPGLYYVDSEGNRISGATFSVGSGSVYAYGVMDRGYSYDLEVEQAYDLARRAIYQATYRDAYSGGAVNLYHVREDGWIRVSSDNVADLHEKYSGSTP

SEQ ID NO: 836816 - protein, 291 aa, Homo sapiens
MALASVLERPLPVNQRGFFGLGGRADLLDLGPGSLSDGLSLAAPGWGVPEEPGIEMLHGTTTLAFKFRHGVIVAADSRATAGAYIASQTVKKVIEINPYLLGTMAGGAADCSFWERLLARQCRIYELRNKERISVAAASKLLANMVYQYKGMGLSMGTMICGWDKRGPVSEVLCLKPKSFGMYLFCGCAERIGNMAGLYYVDSEGNRISGATFSVGSGSVYAYGVMDRGYSYDLEVEQAYDLARRAIYQATYRDAYSGGAVNLYHVREDGWIRVSSDNVADLHEKYSGSTP

SEQ ID NO: 836817 - protein, 110 aa, Homo sapiens [sequence omitted]

SEQ ID NO: 836818 - protein, 263 aa, Homo sapiens; identical to SEQ ID NO: 836810

SEQ ID NO: 836819 - protein, 263 aa, Homo sapiens; identical to SEQ ID NO: 836810

SEQ ID NO: 836820 - protein, 160 aa, Homo sapiens; identical to SEQ ID NO: 836814

SEQ ID NO: 836821 - protein, 160 aa, Homo sapiens; identical to SEQ ID NO: 836814

SEQ ID NO: 836822 - protein, 118 aa, Homo sapiens
MAYELDIKGVIFFFFLLTSSPFPGLYYVDSEGNRISGATFSVGSGSVYAYGVMDRGYSYDLEVEQAYDLARRAIYQATYRDAYSGGAVNLYHVREDGWIRVSSDNVADLHEKYSGSTP

SEQ ID NO: 836823 - protein, 110 aa, Homo sapiens [sequence omitted]

SEQ ID NO: 836824 - protein, 117 aa, Homo sapiens
GEKERGMACLYPSHVAIHQVLGEWEPVQGGKSSENDKWTMSDPGAEAPTCSRAASGVDKEQQGRLRPGVLGSTVSSHSLGHQNLSKDKTQCLWQQRARGIMCFRRKKGLYPMETVYS

SEQ ID NO: 836825 - protein, 200 aa, Homo sapiens
EPRWLNRNSSSLQLPVRPTQKILLWSRIKDLAHQFTQVQRDMFTLEDTLLGYLADDLTWCGEFNTSKINYQSCPDWRKDCSNNPVSVFWKTVSRRFAEAACDVVHVMLNGSRSKIFDKNSTFGSVEVHNLQPEKVQTLEAWVIHGGREDSRDLCQDPTIKELESIISKRNIQFSCKNIYRPDKFLQCVKNPEDSSCTSEI

SEQ ID NO: 836826 - protein, 300 aa, Homo sapiens
MANCEFSPVSGDKPCCRLSRRAQLCLGVSILVLILVVVLAVVVPRWRQQWSGPGTTKRFPETVLARCVKYTEIHPEMRHVDCQSVWDAFKGAFISKHPCNITEEDYQPLMKLGTQTVPCNKILLWSRIKDLAHQFTQVQRDMFTLEDTLLGYLADDLTWCGEFNTSKINYQSCPDWRKDCSNNPVSVFWKTVSRRFAEAACDVVHVMLNGSRSKIFDKNSTFGSVEVHNLQPEKVQTLEAWVIHGGREDSRDLCQDPTIKELESIISKRNIQFSCKNIYRPDKFLQCVKNPEDSSCTSEI

SEQ ID NO: 836827 - protein, 122 aa, Homo sapiens
MANCEFSPVSGDKPCCRLSRRAQLCLGVSILVLILVVVLAVVVPRWRQQWSGPGTTKRFPETVLARCVKYTEIHPEMRHVDCQSVWDAFKGAFISKHPCNITEEDYQPLMKLGTQTVPCNKK

SEQ ID NO: 836828 - protein, 280 aa, Homo sapiens
MANCEFSPVSGDKPCCRLSRRAQLCLGVSILVLILVVVLAVVVPRWRQQWSGPGTTKRFPETVLARCVKYTEIHPEMRHVDCQSVWDAFKGAFISKHPCNITEEDYQPLMKLGTQTVPCNKILLWSRIKDLAHQFTQVQRDMFTLEDTLLGYLADDLTWCGEFNTSKINYQSCPDWRKDCSNNPVSVFWKTVSRRFAEAACDVVHVMLNGSRSKIFDKNSTFGSVEVHNLQPEKVQTLEAWVIHGGREDSRDLCQDPTIKELESIISKRNIQFSCKNIYR

SEQ ID NO: 836829 - protein, 300 aa, Homo sapiens; identical to SEQ ID NO: 836826

SEQ ID NO: 836830 - protein, 294 aa, Homo sapiens
MANCEFSPVSGDKPCCRLSRRAQLCLGVSILVLILVVVLAVVVPRWRQQWSGPGTTKRFPETVLARCVKYTEIHPEMRHVDCQSVWDAFKGAFISKHPCNITEEDYQPLMKLGTQTVPCNKILLWSRIKDLAHQFTQVQRDMFTLEDTLLGYLADDLTWCEINYQSCPDWRKDCSNNPVSVFWKTVSRRFAEAACDVVHVMLNGSRSKIFDKNSTFGSVEVHNLQPEKVQTLEAWVIHGGREDSRDLCQDPTIKELESIISKRNIQFSCKNIYRPDKFLQCVKNPEDSSCTSEI

SEQ ID NO: 836831 - protein, 122 aa, Homo sapiens
MSRMQIVRYSEQTLKIAVISKNPVLVSQYEKVDAGEQRLMNEAFQPASDLFGPCILHQIGSPPTLRPPKTLNSSSVILTERYPLQTNAVFIYGPLDLYEAPELSVKNILNGSRATVKHISIA

SEQ ID NO: 836832 - protein, 177 aa, Homo sapiens
VERDEDVEGRTWRKPRGLAMGRRMSRVSGVEACWVRAVRRCCQSWAGQPGRRGGRQSRSVERDEDVGGTDVAEAAGTAGAECLWGAREAFPEAPGGRRGEARVPGEALLHPQPEPGLCLHGPEPTVRVAVGNQLGWPTSPGWPEMFWFWDHSVPGLQPTTVTILCAPCPSSPAASLD

SEQ ID NO: 836833 - protein, 204 aa, Homo sapiens
RGVARAGREWGGAQRACAMERRVARREGAWRQWAWRSAKRRGAHAREGCRGARVSGVEACWVRAVRRCCQSWAGQPGRRGGRQSRSVERDEDVGGTDVAEAAGTAGAECLWGAREAFPEAPGGRRGEARVPGEALLHPQPEPGLCLHGPEPTVRVAVGNQLGWPTSPGWPEMFWFWDHSVPGLQPTTVTILCAPCPSSPAASLD

SEQ ID NO: 836834 - protein, 204 aa, Homo sapiens; identical to SEQ ID NO: 836833

SEQ ID NO: 836835 - protein, 204 aa, Homo sapiens; identical to SEQ ID NO: 836833

SEQ ID NO: 836836 - protein, 204 aa, Homo sapiens; identical to SEQ ID NO: 836833

SEQ ID NO: 836837 - protein, 204 aa, Homo sapiens; identical to SEQ ID NO: 836833

SEQ ID NO: 836838 - protein, 204 aa, Homo sapiens; identical to SEQ ID NO: 836833

SEQ ID NO: 836839 - protein, 204 aa, Homo sapiens; identical to SEQ ID NO: 836833

SEQ ID NO: 836840 - protein, 204 aa, Homo sapiens; identical to SEQ ID NO: 836833

SEQ ID NO: 836841 - protein, 119 aa, Homo sapiens [sequence omitted]

SEQ ID NO: 836842 - protein, 204 aa, Homo sapiens; identical to SEQ ID NO: 836833

SEQ ID NO: 836843 - protein, 119 aa, Homo sapiens [sequence omitted]

SEQ ID NO: 836844 - protein, 119 aa, Homo sapiens [sequence omitted]

SEQ ID NO: 836845 - protein, 204 aa, Homo sapiens; identical to SEQ ID NO: 836833

SEQ ID NO: 836846 - protein, 68 aa, Homo sapiens
RGVARAGREWGGAQRACAMERRVARREGAWRQWAWRSAKRRGAHAREGCRGLVVEHLTLFKRKDENST

SEQ ID NO: 836847 - protein, 204 aa, Homo sapiens; identical to SEQ ID NO: 836833

SEQ ID NO: 836848 - protein, 204 aa, Homo sapiens; identical to SEQ ID NO: 836833

SEQ ID NO: 836849 - protein, 1170 aa, Homo sapiens
MGLAWGLGVLFLMHVCGTNRIPESGGDNSVFDIFELTGAARKGSGRRLVKGPDPSSPAFRIEDANLIPPVPDDKFQDLVDAVRAEKGFLLLASLRQMKKTRGTLLALERKDHSGQVFSVVSNGKAGTLDLSLTVQGKQHVVSVEEALLATGQWKSITLFVQEDRAQLYIDCEKMENAELDVPIQSVFTRDLASIARLRIAKGGVNDNFQGVLQNVRFVFGTTPEDILRNKGCSSSTSVLLTLDNNVVNGSSPAIRTNYIGHKTKDLQAICGISCDELSSMVLELRGLRTIVTTLQDSIRKVTEENKELANELRRPPLCYHNGVQYRNNEEWTVDSCTECHCQNSVTICKKVSCPIMPCSNATVPDGECCPRCWPSDSADDGWSPWSEWTSCSTSCGNGIQQRGRSCDSLNNRCEGSSVQTRTCHIQECDKRFKQDGGWSHWSPWSSCSVTCGDGVITRIRLCNSPSPQMNGKPCEGEARETKACKKDACPINGGWGPWSPWDICSVTCGGGVQKRSRLCNNPTPQFGGKDCVGDVTENQICNKQDCPIDGCLSNPCFAGVKCTSYPDGSWKCGACPPGYSGNGIQCTDVDECKEVPDACFNHNGEHRCENTDPGYNCLPCPPRFTGSQPFGQGVEHATANKQVCKPRNPCTDGTHDCNKNAKCNYLGHYSDPMYRCECKPGYAGNGIICGEDTDLDGWPNENLVCVANATYHCKKDNCPNLPNSGQEDYDKDGIGDACDDDDDNDKIPDDRDNCPFHYNPAQYDYDRDDVGDRCDNCPYNHNPDQADTDNNGEGDACAADIDGDGILNERDNCQYVYNVDQRDTDMDGVGDQCDNCPLEHNPDQLDSDSDRIGDTCDNNQDIDEDGHQNNLDNCPYVPNANQADHDKDGKGDACDHDDDNDGIPDDKDNCRLVPNPDQKDSDGDGRGDACKDDFDHDSVPDIDDICPENVDISETDFRRFQMIPLDPKGTSQNDPNWVVRHQGKELVQTVNCDPGLAVGYDEFNAVDFSGTFFINTERDDDYAGFVFGYQSSSRFYVVMWKQVTQSYWDTNPTRAQGYSGLSVKVVNSTTGPGEHLRNALWHTGNTPGQVRTLWHDPRHIGWKDFTAYRWRLSHRPKTGFIRVVMYEGKKIMADSGPIYDKTYAGGRLGLFVFSQEMVFFSDLKYECRDP

SEQ ID NO: 836850 - protein, 1170 aa, Homo sapiens; identical to SEQ ID NO: 836849

SEQ ID NO: 836851 - protein, 1407 aa, Homo sapiens
MGLAWGLGVLFLMHVCGTNRIPESGGDNSVFDIFELTGAARKGSGRRLVKGPDPSSPAFRIEDANLIPPVPDDKFQDLVDAVRAEKGFLLLASLRQMKKTRGTLLALERKDHSGQVFSVVSNGKAGTLDLSLTVQGKQHVVSVEEALLATGQWKSITLFVQEDRAQLYIDCEKMENAELDVPIQSVFTRDLASIARLRIAKGGVNDNFQGVLQNVRFVFGTTPEDILRNKGCSSSTSVLLTLDNNVVNGSSPAIRTNYIGHKTKDLQAICGISCDELSSMVLELRGLRTIVTTLQDSIRKVTEENKELANELRRPPLCYHNGVQYRNNEEWTVDSCTECHCQNSVTICKKVSCPIMPCSNATVPDGECCPRCWPSDSADDGWSPWSEWTSCSTSCGNGIQQRGRSCDSLNNRCEGSSVQTRTCHIQECDKRFKQDGGWSHWSPWSSCSVTCGDGVITRIRLCNSPSPQMNGKPCEGEARETKACKKDACPINGGWGPWSPWDICSVTCGGGVQKRSRLCNNPTPQFGGKDCVGDVTENQICNKQDCPIGEPLQPRMKRPRSFALLLNAAVSIRGDSSLVSPERFDCSKMQVDNIIPTSYRFPIPYNILHCVEVPSMAVWQLRPTIYCDCLSLLVSDGCLSNPCFAGVKCTSYPDGSWKCGACPPGYSGNGIQCTDVDECKEVPDACFNHNGEHRCENTDPGYNCLPCPPRFTGSQPFGQGVEHATANKQVQSTRRVNQRTGELSLTKITGSGRNVISTLHQKKKGEEMNVRSSFRNVIRKSMVNPAGEKQSSIFKNAALEYVVSRWTCKRLGAEQNSRKINIKQSLLIASGRMGRDRGNPHSSKWSLCLLRDDRDLDSCFHDISGFSKALCNSSMVYPQVCKPRNPCTDGTHDCNKNAKCNYLGHYSDPMYRCECKPGYAGNGIICGEDTDLDGWPNENLVCVANATYHCKKDNCPNLPNSGQEDYDKDGIGDACDDDDDNDKIPDDRDNCPFHYNPAQYDYDRDDVGDRCDNCPYNHNPDQADTDNNGEGDACAADIDGDGILNERDNCQYVYNVDQRDTDMDGVGDQCDNCPLEHNPDQLDSDSDRIGDTCDNNQDIDEDGHQNNLDNCPYVPNANQADHDKDGKGDACDHDDDNDGIPDDKDNCRLVPNPDQKDSDGDGRGDACKDDFDHDSVPDIDDICPENVDISETDFRRFQMIPLDPKGTSQNDPNWVVRHQGKELVQTVNCDPGLAVGYDEFNAVDFSGTFFINTERDDDYAGFVFGYQSSSRFYVVMWKQVTQSYWDTNPTRAQGYSGLSVKVVNSTTGPGEHLRNALWHTGNTPGQVRTLWHDPRHIGWKDFTAYRWRLSHRPKTGFIRVVMYEGKKIMADSGPIYDKTYAGGRLGLFVFSQEMVFFSDLKYECRDP

SEQ ID NO: 836852 - protein, 1170 aa, Homo sapiens; identical to SEQ ID NO: 836849

SEQ ID NO: 836853 - protein, 1152 aa, Homo sapiens
MGLAWGLGVLFLMHVCGTNRIPESGGDNSVFDIFELTGAARKGSGRRLVKGPDPSSPAFRIEDANLIPPVPDDKFQDLVDAVRAEKGFLLLASLRQMKKTRGTLLALERKDHSGQVFSVVSNGKAGTLDLSLTVQGKQHVVSVEEALLATGQWKSITLFVQEDRAQLYIDCEKMENAELDVPIQSVFTRDLASIARLRIAKGGVNDNFQGVLQNVRFVFGTTPEDILRNKGCSSSTSVLLTLDNNVVNGSSPAIRTNYIGHKTKDLQAICGISCDELSSMVLELRGLRTIVTTLQDSIRKVTEENKELANELRRPPLCYHNGVQYRNNEEWTVDSCTECHCQNSVTICKKVSCPIMPCSNATVPDGECCPRCWPSDSADDGWSPWSEWTSCSTSCGNGIQQRGRSCDSLNNRCEGSSVQTRTCHIQECDKRFKQDGGWSHWSPWSSCSVTCGDGVITRIRLCNSPSPQMNGKPCEGEARETKACKKDACPINGGWGPWSPWDICSVTCGGGVQKRSRLCNNPTPQFGGKDCVGDVTENQICNKQDCPIDGCLSNPCFAGVKCTSYPDGSWKCGACPPGYSGNGIQCTDVDECKEVPDACFNHNGEHRCENTDPGYNCLPCPPRFTGSQPFGQGVEHATANKQVCKPRNPCTDGTHDCNKNAKCNYLGHYSDPMYRCECKPGYAGNGIICGEDTDLDGWPNENLVCVANATYHCKKDNCPNLPNSGQEDYDKDGIGDACDDDDDNDKIPDDRDNCPFHYNPAQYDYDRDDVGDRCDNCPYNHNPDQADTDNNGEGDACAADIDGDGILNERDNCQYVYNVDQRDTDMDGVGDQCDNCPLEHNPDQLDSDSDRIGDTCDNNQDIDEDGHQNNLDNCPYVPNANQADHDKDGKGDACDHDDDNDGIPDDKDNCRLVPNPDQKDSDGDGRGDACKDDFDHDSVPDIDDICPENVDISETDFRRFQMIPLDPKGTSQNWLWALLPGYDEFNAVDFSGTFFINTERDDDYAGFVFGYQSSSRFYVVMWKQVTQSYWDTNPTRAQGYSGLSVKVVNSTTGPGEHLRNALWHTGNTPGQVRTLWHDPRHIGWKDFTAYRWRLSHRPKTGFIRVVMYEGKKIMADSGPIYDKTYAGGRLGLFVFSQEMVFFSDLKYECRDP

SEQ ID NO: 836854 - protein, 1102 aa, Homo sapiens
MGLAWGLGVLFLMHVCGTNRIPESGGDNSVFDIFELTGAARKGSGRRLVKGPDPSSPAFRIEDANLIPPVPDDKFQDLVDAVRAEKGFLLLASLRQMKKTRGTLLALERKDHSGQVFSVVSNGKAGTLDLSLTVQGKQHVVSVEEALLATGQWKSITLFVQEDRAQLYIDCEKMENAELDVPIQSVFTRDLASIARLRIAKGGVNDNFQGVLQNVRFVFGTTPEDILRNKGCSSSTSVLLTLDNNVVNGSSPAIRTNYIGHKTKDLQAICGISCDELSSMVLELRGLRTIVTTLQDSIRKVTEENKELANELRRPPLCYHNGVQYRNNEEWTVDSCTECHCQNSVTICKKVSCPIMPCSNATVPDGECCPRCWPSDSADDGWSPWSEWTSCSTSCGNGIQQRGRSCDSLNNRCEGSSVQTRTCHIQECDKRFKQDGGWSHWSPWSSCSVTCGDGVITRIRLCNSPSPQMNGKPCEGEARETKACKKDACPINGGWGPWSPWDICSVTCGGGVQKRSRLCNNPTPQFGGKDCVGDVTENQICNKQDCPIDGCLSNPCFAGVKCTSYPDGSWKCGACPPGYSGNGIQCTDVDECKEVPDACFNHNGEHRCENTDPGYNCLPCPPRFTGSQPFGQGVEHATANKQVCKPRNPCTDGTHDCNKNAKCNYLGHYSDPMYRCECKPGYAGNGIICGEDTDLDGWPNENLVCVANATYHCKKDNCPNLPNSGQEDYDKDGIGDACDDDDDNDKIPDDRDNCPFHYNPAQYDYDRDDVGDRCDNCPYNHNPDQADTDNNGEGDACAADIDGDGILNERDNCQYVYNVDQRDTDMDGVGDQCDNCPLEHNPDQLDSDSDRIGDTCDNNQDIDEDGHQNNLDNCPYVPNANQADHDKDGKGDACDHDDDNDGIPDDKDNCRLVPNPDQKDSDGDGRGDACKDDFDHDSVPDIDDICPENVDISETDFRRFQMIPLDPKGTSQNDPNWVVRHQGKELVQTVNCDPGLAVGYDEFNAVDFSGTFFINTERDDDYAGFVFGYQSSSRFYVVMWKQVTQSYWDTNPTRAQGYSGLSVKVVNSTTGPGEHLRNALWHTGNTPGQKQSPGTERELMGA

SEQ ID NO: 836855 - protein, 1170 aa, Homo sapiens; identical to SEQ ID NO: 836849

SEQ ID NO: 836856 - protein, 533 aa, Homo sapiens [sequence omitted]

SEQ ID NO: 836857 - protein, 427 aa, Homo sapiens
MRDKFQIQDNCPFHYNPAQYDYDRDDVGDRCDNCPYNHNPDQADTDNNGEGDACAADIDGDGILNERDNCQYVYNVDQRDTDMDGVGDQCDNCPLEHNPDQLDSDSDRIGDTCDNNQDIDEDGHQNNLDNCPYVPNANQADHDKDGKGDACDHDDDNDGIPDDKDNCRLVPNPDQKDSDGDGRGDACKDDFDHDSVPDIDDICPENVDISETDFRRFQMIPLDPKGTSQNDPNWVVRHQGKELVQTVNCDPGLAVGYDEFNAVDFSGTFFINTERDDDYAGFVFGYQSSSRFYVVMWKQVTQSYWDTNPTRAQGYSGLSVKVVNSTTGPGEHLRNALWHTGNTPGQVRTLWHDPRHIGWKDFTAYRWRLSHRPKTGFIRVVMYEGKKIMADSGPIYDKTYAGGRLGLFVFSQEMVFFSDLKYECRDP

SEQ ID NO: 836858 - protein, 227 aa, Homo sapiens
EDPRHLAPIRSDQYYDLHLGLDLIVFAFLMGEDASCCHQGKELVQTVNCDPGLAVGYDEFNAVDFSGTFFINTERDDDYAGFVFGYQSSSRFYVVMWKQVTQSYWDTNPTRAQGYSGLSVKVVNSTTGPGEHLRNALWHTGNTPGQVRTLWHDPRHIGWKDFTAYRWRLSHRPKTGFIRVVMYEGKKIMADSGPIYDKTYAGGRLGLFVFSQEMVFFSDLKYECRDP

SEQ ID NO: 836859 - protein, 115 aa, Homo sapiens
MNKTSSKHINNCFGFLLKKHLLASVGKVPIPLCLCHRAGCYCEAISEQWTQKHFQACQRREDSLELANKTTLTSSFRNTGSRGQSTKGRAHTRDDCMKKIWRNCYMFGTKSFSGD

SEQ ID NO: 836860 - protein, 855 aa, Homo sapiens
MGLAWGLGVLFLMHVCGTNRIPESGGDNSVFDIFELTGAARKGSGRRLVKGPDPSSPAFRIEDANLIPPVPDDKFQDLVDAVRAEKGFLLLASLRQMKKTRGTLLALERKDHSGQVFSVVSNGKAGTLDLSLTVQGKQHVVSVEEALLATGQWKSITLFVQEDRAQLYIDCEKMENAELDVPIQSVFTRDLASIARLRIAKGGVNDNFQGVLQNVRFVFGTTPEDILRNKGCSSSTSVLLTLDNNVVNGSSPAIRTNYIGHKTKDLQAICGISCDELSSMVLELRGLRTIVTTLQDSIRKVTEENKELANELRRPPLCYHNGVQYRNNEEWTVDSCTECHCQNSVTICKKVSCPIMPCSNATVPDGECCPRCWPSDSADDGWSPWSEWTSCSTSCGNGIQQRGRSCDSLNNRCEGSSVQTRTCHIQECDKRFKQDGGWSHWSPWSSCSVTCGDGVITRIRLCNSPSPQMNGKPCEGEARETKACKKDACPINGGWGPWSPWDICSVTCGGGVQKRSRLCNNPTPQFGGKDCVGDVTENQICNKQDCPIDGCLSNPCFAGVKCTSYPDGSWKCGACPPGYSGNGIQCTDVDECKEVPDACFNHNGEHRCENTDPGYNCLPCPPRFTGSQPFGQGVEHATANKQVCKPRNPCTDGTHDCNKNAKCNYLGHYSDPMYRCECKPGYAGNGIICGEDTDLDGWPNENLVCVANATYHCKKDNCPNLPNSGQEDYDKDGIGDACDDDDDNDKIPDDRDNCPFHYNPAQYDYDRDDVGDRCDNCPYNHNPDQADTDNNGEGDACAADIDGDGILNERDNCQYVYNVDQRDTDMDGVGDQCDNCPLEHNPDQVGGWTPFRVFQ

SEQ ID NO: 836861 - protein, 539 aa, Homo sapiens
MGLAWGLGVLFLMHVCGTNRIPESGGDNSVFDIFELTGAARKGSGRRLVKGPDPSSPAFRIEDANLIPPVPDDKFQDLVDAVRAEKGFLLLASLRQMKKTRGTLLALERKDHSGQVFSVVSNGKAGTLDLSLTVQGKQHVVSVEEALLATGQWKSITLFVQEDRAQLYIDCEKMENAELDVPIQSVFTRDLASIARLRIAKGGVNDNFQGVLQNVRFVFGTTPEDILRNKGCSSSTSVLLTLDNNVVNGSSPAIRTNYIGHKTKDLQAICGISCDELSSMVLELRGLRTIVTTLQDSIRKVTEENKELANELRRPPLCYHNGVQYRNNEEWTVDSCTECHCQNSVTICKKVSCPIMPCSNATVPDGECCPRCWPSDSADDGWSPWSEWTSCSTSCGNGIQQRGRSCDSLNNRCEGSSVQTRTCHIQECDKRFKQDGGWSHWSPWSSCSVTCGDGVITRIRLCNSPSPQMNGKPCEGEARETKACKKDACPINGGWGPWSPWDICSVTCGGGVQKRSRLCNNPTPQFGGKDCVGDAQNLW

SEQ ID NO: 836862 - protein, 214 aa, Homo sapiens [sequence omitted]

SEQ ID NO: 836863 - protein, 235 aa, Homo sapiens
MGLAWGLGVLFLMHVCGTNRIPESGGDNSVFDIFELTGAARKGSGRRLVKGPDPSSPAFRIEDANLIPPVPDDKFQDLVDAVRAEKGFLLLASLRQMKKTRGTLLALERKDHSGQVFSVVSNGKAGTLDLSLTVQGKQHVVSVEEALLATGQWKSITLFVQEDRAQLYIDCEKMENAELDVPIQSVFTRDLASIARLRIAKGGVNDNFQGVLQNVRFVFGTTPEDILRNKGCSSS

SEQ ID NO: 836864 - protein, 123 aa, Homo sapiens
YLHPSHQMKRLLPLRTQEAGCKSIYLKFSFCFLPATSVLLTLDNNVVNGSSPAIRTNYIGHKTKDLQAICGISCDELSSMVLELRGLRTIVTTLQDSIRKVVSGLCTQPVSMNPGRFIADGPK

SEQ ID NO: 836865 - protein, 1170 aa, Homo sapiens; identical to SEQ ID NO: 836849

SEQ ID NO: 836866 - protein, 1170 aa, Homo sapiens; identical to SEQ ID NO: 836849

SEQ ID NO: 836867 - protein, 1320 aa, Homo sapiens
MGLAWGLGVLFLMHVCGTNRIPESGGDNSVFDIFELTGAARKGSGRRLVKGPDPSSPAFRIEDANLIPPVPDDKFQDLVDAVRAEKGFLLLASLRQMKKTRGTLLALERKDHSGQVFSVVSNGKAGTLDLSLTVQGKQHVVSVEEALLATGQWKSITLFVQEDRAQLYIDCEKMENAELDVPIQSVFTRDLASIARLRIAKGGVNDNFQGVLQNVRFVFGTTPEDILRNKGCSSSTSVLLTLDNNVVNGSSPAIRTNYIGHKTKDLQAICGISCDELSSMVLELRGLRTIVTTLQDSIRKVTEENKELANELRRPPLCYHNGVQYRNNEEWTVDSCTECHCQNSVTICKKVSCPIMPCSNATVPDGECCPRCWPSDSADDGWSPWSEWTSCSTSCGNGIQQRGRSCDSLNNRCEGSSVQTRTCHIQECDKRFKQDGGWSHWSPWSSCSVTCGDGVITRIRLCNSPSPQMNGKPCEGEARETKACKKDACPINGGWGPWSPWDICSVTCGGGVQKRSRLCNNPTPQFGGKDCVGDVTENQICNKQDCPIDGCLSNPCFAGVKCTSYPDGSWKCGACPPGYSGNGIQCTDVDECKEVPDACFNHNGEHRCENTDPGYNCLPCPPRFTGSQPFGQGVEHATANKQVQSTRRVNQRTGELSLTKITGSGRNVISTLHQKKKGEEMNVRSSFRNVIRKSMVNPAGEKQSSIFKNAALEEVVSRWTCKRLGAEQNSRKINIKQSLLIASGRMGRDRGNPHSSKWSLCLLRDDRDLDSCFHDISGFSKALCNSSMVYPQVCKPRNPCTDGTHDCNKNAKCNYLGHYSDPMYRCECKPGYAGNGIICGEDTDLDGWPNENLVCVANATYHCKKDNCPNLPNSGQEDYDKDGIGDACDDDDDNDKIPDDRDNCPFHYNPAQYDYDRDDVGDRCDNCPYNHNPDQADTDNNGEGDACAADIDGDGILNERDNCQYVYNVDQRDTDMDGVGDQCDNCPLEHNPDQLDSDSDRIGDTCDNNQDIDEDGHQNNLDNCPYVPNANQADHDKDGKGDACDHDDDNDGIPDDKDNCRLVPNPDQKDSDGDGRGDACKDDFDHDSVPDIDDICPENVDISETDFRRFQMIPLDPKGTSQNDPNWVVRHQGKELVQTVNCDPGLAVGYDEFNAVDFSGTFFINTERDDDYAGFVFGYQSSSRFYVVMWKQVTQSYWDTNPTRAQGYSGLSVKVVNSTTGPGEHLRNALWHTGNTPGQVRTLWHDPRHIGWKDFTAYRWRLSHRPKTGFIRVVMYEGKKIMADSGPIYDKTYAGGRLGLFVFSQEMVFFSDLKYECRDP

SEQ ID NO: 836868 - protein, 1510 aa, Homo sapiens
MGLAWGLGVLFLMHVCGTNRIPESGGDNSVFDIFELTGAARKGSGRRLVKGPDPSSPAFRIEDANLIPPVPDDKFQDLVDAVRAEKGFLLLASLRQMKKTRGTLLALERKDHSGQVFSVVSNGKAGTLDLSLTVQGKQHVVSVEEALLATGQWKSITLFVQEDRAQLYIDCEKMENAELDVPIQSVFTRDLASIARLRIAKGGVNDNFQGVLQNVRFVFGTTPEDILRNKGCSSSTSVLLTLDNNVVNGSSPAIRTNYIGHKTKDLQAICGISCDELSSMVLELRGLRTIVTTLQDSIRKVTEENKELANELRRPPLCYHNGVQYRNNEEWTVDSCTECHCQNSVTICKKVSCPIMPCSNATVPDGECCPRCWPSDSADDGWSPWSEWTSCSTSCGNGIQQRGRSCDSLNNRCEGSSVQTRTCHIQECDKRFKQDGGWSHWSPWSSCSVTCGDGVITRIRLCNSPSPQMNGKPCEGEARETKACKKDACPSKCEVRCKGEHGQQLCPAGCLASAACSSVGHRAGRLPTRETNRSKVLQAQQLLLMKNKLTLFPSILSMCQRSRGFLNGLRRVYDKGGDLKVDLNLLPVVHLLTVNGGWGPWSPWDICSVTCGGGVQKRSRLCNNPTPQFGGKDCVGDVTENQICNKQDCPIGGATQPRMKRPRSFALLLNAAVSIRGDSSLVSPERFDCSKMQVDNIIPTSYRFPIPYNILHCVEVPSMAVWQLRPTIYCDCLSLLVSDGCLSNPCFAGVKCTSYPDGSWKCGACPPGYSGNGIQCTDVDECKEVPDACFNHNGEHRCENTDPGYNCLPCPPRFTGSQPFGQGVEHATANKQVQSTRRVNQRTGELSLTKITGSGRNVIYTLHQKKKGEEMNVRSSFRNVIRKSMVNPAGEKQSSIFKNAALEEVVSRWTCKRLGAEQNSRKINIKQSLLIASGRMGRDRGNPHSSKWSLCLLRDDRDLDSCFHDISGFSKALCNSSMVYPQVCKPRNPCTDGTHDCNKNAKCNYLGHYSDPMYRCECKPGYAGNGIICGEDTDLDGWPNENLVCVANATYHCKKDNCPNLPNSGQEDYDKDGIGDACDDDDDNDKIPDDRDNCPFHYNPAQYDYDRDDVGDRCDNCPYNHNPDQADTDNNGEGDACAADIDGDGILNERDNCQYVYNVDQRDTDMDGVGDQCDNCPLEHNPDQLDSDSDRIGDTCDNNQDIDEDGHQNNLDNCPYVPNANQADHDKDGKGDACDHDDDNDGIPDDKDNCRLVPNPDQKDSDGDGRGDACKDDFDHDSVPDIDDICPENVDISETDFRRFQMIPLDPKGTSQNDPNWVVRHQGKELVQTVNCDPGLAVGYDEFNAVDFSGTFFINTERDDDYAGFVFGYQSSSRFYVVMWKQVTQSYWDTNPTRAQGYSGLSVKVVNSTTGPGEHLRNALWHTGNTPGQVRTLWHDPRHIGWKDFTAYRWRLSHRPKTGFIRVVMYEGKKIMADSGPIYDKTYAGGRLGLFVFSQEMVFFSDLKYECRDP

SEQ ID NO: 836869 - protein, 1102 aa, Homo sapiens; identical to SEQ ID NO: 836854

SEQ ID NO: 836870 - protein, 1114 aa, Homo sapiens
MGLAWGLGVLFLMHVCGTNRIPESGGDNSVFDIFELTGAARKGSGRRLVKGPDPSSPAFRIEDANLIPPVPDDKFQDLVDAVRAEKGFLLLASLRQMKKTRGTLLALERKDHSGQVFSVVSNGKAGTLDLSLTVQGKQHVVSVEEALLATGQWKSITLFVQEDRAQLYIDCEKMENAELDVPIQSVFTRDLASIARLRIAKGGVNDNFQGVLQNVRFVFGTTPEDILRNKGCSSSTSVLLTLDNNVVNGSSPAIRTNYIGHKTKDLQAICGISCDELSSMVLELRGLRTIVTTLQDSIRKVTEENKELANELRRPPLCYHNGVQYRNNEEWTVDSCTECHCQNSVTICKKVSCPIMPCSNATVPDGECCPRCWPSDSADDGWSPWSEWTSCSTSCGNGIQQRGRSCDSLNNRCEGSSVQTRTCHIQECDKRFKQDGGWSHWSPWSSCSVTCGDGVITRIRLCNSPSPQMNGKPCEGEARETKACKKDACPINGGWGPWSPWDICSVTCGGGVQKRSRLCNNPTPQFGGKDCVGDVTENQICNKQDCPIDGCLSNPCFAGVKCTSYPDGSWKCGACPPGYSGNGIQCTDVDECKEVPDACFNHNGEHRCENTDPGYNCLPCPPRFTGSQPFGQGVEHATANKQVCKPRNPCTDGTHDCNKNAKCNYLGHYSDPMYRCECKPGYAGNGIICGEDTDLDGWPNENLVCVANATYHCKKDNCPNLPNSGQEDYDKDGIGDACDDDDDNDKIPDDRDNCPFHYNPAQYDYDRDDVGDRCDNCPYNHNPDQADTDNNGEGDACAADIDGDGILNERDNCQYVYNVDQRDTDMDGVGDQCDNCPLEHNPDQLDSDSDRIGDTCDNNQDIDEDGHQNNLDNCPYVPNANQADHDKDGKGDACDHDDDNDGIPDDKDNCRLVPNPDQKDSDGDGRGDACKDDFDHDSVPDIDDICPENVDISETDFRRFQMIPLDPKGTSQNDPNWVVRHQGKELVQTVNCDPGLAVGYDEFNAVDFSGTFFINTERDDDYAGFVFGYQSSSRFYVVMWKQVTQSYWDTNPTRAQGYSGLSVKVVNSTTGPGEHLRNALWHTGNTPGQLKELCFNLSFSFSFRCAPCGMTLVT

SEQ ID NO: 836871 - protein, 1170 aa, Homo sapiens; identical to SEQ ID NO: 836849

SEQ ID NO: 836872 - protein, 758 aa, Homo sapiens
EFPPVRWPCPVPMAPVTTRFKQDGGWSHWSPWSSCSVTCGDGVITRIRLCNSPSPQMNGKPCEGEARETKACKKDACPINGGWGPWSPWDICSVTCGGGVQKRSRLCNNPTPQFGGKDCVGDVTENQICNKQDCPIDGCLSNPCFAGVKCTSYPDGSWKCGACPPGYSGNGIQCTDVDECKEVPDACFNHNGEHRCENTDPGYNCLPCPPRFTGSQPFGQGVEHATANKQVCKPRNPCTDGTHDCNKNAKCNYLGHYSDPMYRCECKPGYAGNGIICGEDTDLDGWPNENLVCVANATYHCKKDNCPNLPNSGQEDYDKDGIGDACDDDDDNDKIPDDRDNCPFHYNPAQYDYDRDDVGDRCDNCPYNHNPDQADTDNNGEGDACAADIDGDGILNERDNCQYVYNVDQRDTDMDGVGDQCDNCPLEHNPDQLDSDSDRIGDTCDNNQDIDEDGHQNNLDNCPYVPNANQADHDKDGKGDACDHDDDNDGIPDDKDNCRLVPNPDQKDSDGDGRGDACKDDFDHDSVPDIDDICPENVDISETDFRRFQMIPLDPKGTSQNDPNWVVRHQGKELVQTVNCDPGLAVGYDEFNAVDFSGTFFINTERDDDYAGFVFGYQSSSRFYVVMWKQVTQSYWDTNPTRAQGYSGLSVKVVNSTTGPGEHLRNALWHTGNTPGQVRTLWHDPRHIGWKDFTAYRWRLSHRPKTGFIRVVMYEGKKIMADSGPIYDKTYAGGRLGLFVFSQEMVFFSDLKYECRDP

SEQ ID NO: 836873 - protein, 1170 aa, Homo sapiens; identical to SEQ ID NO: 836849

SEQ ID NO: 836874 - protein, 1041 aa, Homo sapiens
MGLAWGLGVLFLMHVCGTNRIPESGGDNSVFDIFELTGAARKGSGRRLVKGPDPSSPAFRIEDANLIPPVPDDKFQDLVDAVRAEKGFLLLASLRQMKKTRGTLLALERKDHSGQVFSVVSNGKAGTLDLSLTVQGKQHVVSVEEALLATGQWKSITLFVQEDRAQLYIDCEKMENAELDVPIQSVFTRDLASIARLRIAKGGVNDNFQGVLQNVRFVFGTTPEDILRNKGCSSSTSVLLTLDNNVVNGSSPAIRTNYIGHKTKDLQAICGISCDELSSMVLELRGLRTIVTTLQDSIRKVTEENKELANELRRPPLCYHNGVQYRNNEEWTVDSCTECHCQNSVTICKKVSCPIMPCSNATVPDGECCPRCWPSDSADDGWSPWSEWTSCSTSCGNGIQQRGRSCDSLNNRCEGSSVQTRTCHIQECDKRFKQDGGWSHWSPWSSCSVTCGDGVITRIRLCNSPSPQMNGKPCEGEARETKACKKDACPINGGWGPWSPWDICSVTCGGGVQKRSRLCNNPTPQFGGKDCVGDVTENQICNKQDCPIDGCLSNPCFAGVKCTSYPDGSWKCGACPPGYSGNGIQCTDVDECKEVPDACFNHNGEHRCENTDPGYNCLPCPPRFTGSQPFGQGVEHATANKQVCKPRNPCTDGTHDCNKNAKCNYLGHYSDPMYRCECKPGYAGNGIICGEDTDLDGWPNENLVCVANATYHCKKDNCPNLPNSGQEDYDKDGIGDACDDDDDNDKIPDDRDNCPFHYNPAQYDYDRDDVGDRCDNCPYNHNPDQADTDNNGEGDACAADIDGDGILNERDNCQYVYNVDQRDTDMDGVGDQCDNCPLEHNPDQLDSDSDRIGDTCDNNQDIDEDGHQNNLDNCPYVPNANQADHDKDGKGDACDHDDDNDGIPDDKDNCRLVPNPDQKDSDGDGRGDACKDDFDHDSVPDIDDICPENVDISETDFRRFQMIPLDPKGTSQNDPNWVVRHQGKELVQTVNCDPGLAVGYDEFNAVDFSGTFFINGEERDMKIGVYTYTIILERYNGRTVR

SEQ ID NO: 836875 - protein, 685 aa, Homo sapiens
MGLAWGLGVLFLMHVCGTNRIPESGGDNSVFDIFELTGAARKGSGRRLVKGPDPSSPAFRIEDANLIPPVPDDKFQDLVDAVRAEKGFLLLASLRQMKKTRGTLLALERKDHSGQVFSVVSNGKAGTLDLSLTVQGKQHVVSVEEALLATGQWKSITLFVQEDRAQLYIDCEKMENAELDVPIQSVFTRDLASIARLRIAKGGVNDNFQGVLQNVRFVFGTTPEDILRNKGCSSSTSVLLTLDNNVVNGSSPAIRTNYIGHKTKDLQAICGISCDELSSMVLELRGLRTIVTTLQDSIRKVTEENKELANELRRPPLCYHNGVQYRNNEEWTVDSCTECHCQNSVTICKKVSCPIMPCSNATVPDGECCPRCWPSDSADDGWSPWSEWTSCSTSCGNGIQQRGRSCDSLNNRCEGSSVQTRTCHIQECDKRFKQDGGWSHWSPWSSCSVTCGDGVITRIRLCNSPSPQMNGKPCEGEARETKACKKDACPINGGWGPWSPWDICSVTCGGGVQKRSRLCNNPTPQFGGKDCVGDVTENQICNKQDCPIDGCLSNPCFAGVKCTSYPDGSWKCGACPPGYSGNGIQCTDVDECKEVPDACFNHNGEHRCENTDPGYNCLPCPPRFTGSQPFGQGVEHATANKQVQSTRRVNQRTGELSLTKITGSGRNVISYPSPKKKGRGDECTV

SEQ ID NO: 836876 - protein, 459 aa, Homo sapiens
MGLAWGLGVLFLMHVCGTNRIPESGGDNSVFDIFELTGAARKGSGRRLVKGPDPSSPAFRIEDANLIPPVPDDKFQDLVDAVRAEKGFLLLASLRQMKKTRGTLLALERKDHSGQVFSVVSNGKAGTLDLSLTVQGKQHVVSVEEALLATGQWKSITLFVQEDRAQLYIDCEKMENAELDVPIQSVFTRDLASIARLRIAKGGVNDNFQGVLQNVRFVFGTTPEDILRNKGCSSSTSVLLTLDNNVVNGSSPAIRTNYIGHKTKDLQAICGISCDELSSMVLELRGLRTIVTTLQDSIRKVTEENKELANELRRPPLCYHNGVQYRNNEEWTVDSCTECHCQNSVTICKKVSCPIMPCSNATVPDGECCPRCWPSDSADDGWSPWSEWTSCSTSCGNGIQQRGRSCDSLNNRCEGSSVQTRTCHIQECDKRCKHLSLSGTWRTDLSLLSSPRAAPQHVY

SEQ ID NO: 836877 - protein, 34 aa, Homo sapiens
MLSSLFPSHSLALQNSVTICKKVSCPIMPCSNAT

SEQ ID NO: 836878 - protein, 111 aa, Homo sapiens
MTQLHSDPGIYSPLSVVARSFHPNPLSPPLRTQPPTAGPSLESSLCVLSCLTESGGDNSVFDIFELTGAARKGSGRRLVKGPDPSSPAFRIEDANLIPPVPDDKFQDLVDA

SEQ ID NO: 836879 - protein, 131 aa, Homo sapiens
MPALEPGRRHACSRAQQARPGSPSTVPGGQAPVYEMAMARGATPRREGQRYPCWCKELQKLALLFRAHHDHCPLSARVAGTSWEVAEEPFAGAMRAEGVRAPPGARQANTSHSPTPDTSSSPQGPGNHEPW

SEQ ID NO: 836880 - protein, 41 aa, Homo sapiens
MRELHDNGTSYRLRRLGECAVLGEGVCWQSQGEVEEAVRRK

SEQ ID NO: 836881 - protein, 115 aa, Homo sapiens
MYRDVLSNLTASTLLPLQSIILKAARIMVLQYKYKLDYVIACFILFHNFPYLGLNLNSSPEAPMYPFESMLHHSCPRFRHRLPPFGSFNRPSSFLPKGLELTFLNATIFCSQFFM

SEQ ID NO: 836882 - protein, 351 aa, Homo sapiens
MAADDDNGDGTSLFDVFSASPLKNNDEGSLDIYAGLDSAVSDSASKSCVPSRNCLDLYEEILTEEGTAKEATYNDLQVEYGKCQLQMKELMKKFKEIQTQNFSLINENQSLKKNISALIKTARVEINRKDEEISNLHQRLSEFPHFRNNHKTARTFDTVKTKDLKSRSPHLDDCSKTDHRAKSDVSKDVHHSTSLPNLEKEGKPHSDKRSTSHLPTSVEKHCTNGVWSRSHYQVGEGSSNEDSRRGRKDIRHSQFNRGTERVRKDLSTGCGDGEPRILEASQRLQGHPEKYGKGEPKTESKSSKFKSNSDSDYKGERINSSWEKETPGERSHSRVDSQSDKKLERQSERSQ

SEQ ID NO: 836883 - protein, 190 aa, Homo sapiens
MAADDDNGDGTSLFDVFSASPLKNNDEGSLDIYAGLDSAVSDSASKSCVPSRNCLDLYEEILTEEGTAKEATYNDLQVEYGKCQLQMKELMKKFKEIQTQNFSLINENQSLKKNISALIKTARVEINRKDEEISNLHQRNDDREILLECQKRGPSFKTFAYLAAKLDKNPNQVSERFQQLMKLFEKSKCR

SEQ ID NO: 836884 - protein, 1269 aa, Homo sapiens
MDVLQTDVSQNFGLELDTKRNDNSDYCGISEGMEMKVALSTTVSETTESILQPSIEEADILPIMLSEDNNPKFEPSVIVTPLVESKSCHLEPCLPKETLDSSLQQTELMDHRMATGETNSVYHDDDNSVLSIDLNHLRPIPEAISPLNSPVRPVAKVLRNESPPQVPVYNNSHKDVFLPNSAHSTSKSQSDLNKENQKPIYKSDKCTEADTCKNSPLDELEEGEIRSDSETSKPQESFEKNSKRRVSADVRKSKTIPRRGKSTVCLDKDSRKTHVRIHQTNNKWNKRPDKSSRSSKTEKKDKVMSTSSLEKIVPIIAVPSSEQEIMHMLRMIRKHVRKNYMKFKAKFSLIQFHRIIESAILSFTSLIKHLNLHKISKSVTTLQKNLCDIIESKLKQVKKNGIVDRLFEQQLPDMKKKLWKFVDDQLDYLFAKLKKILVCDSKSFGRDSDEGKLEKTSKQNAQYSNSQKRSVDNSNRELLKEKLSKSEDPVHYKSLVGCKKSEENYQDQNNSSINTVKHDIKKNFNICFDNIKNSQSEERSLEVHCPSTPKSEKNEGSSIEDAQTSQHATLKPERSFEILTEQQASSLTFNLVSDAQMGEIFKSLLQGSDLLDSSVNCTEKSEWELKTPEKQLLETLKCESIPACTTEELVSGVASPCPKMISDDNWSLLSSEKGPSLSSGLSLPVHPDVLDESCMFEVSTNLPLSKDNVCSVEKSKPCVSSILLEDLAVSLTVPSPLKSDGHLSFLKPDMSSSSTPEEVISAHFSEDALLEEEDASEQDIHLALESDNSSSKSSCSSSWTSRSVAPGFQYHPNLPMHAVIMEKSNDHFIVKIRRATPSTSSGLKQSMMPDELLTSLPRHGKEADEGPEKEYISCQNTVFKSVEELENSNKNVDGSKSTHEEQSSMIQTQVPDIYEFLKDASDKMGHSDEVADECFKLHQVWETKVPESIEELPSMEEISHSVGEHLPNTYVDLTKDPVTETKNLGEFIEVTVLHIDQLGCSGGNLNQSAQILDNSLQADTVGAFIDLTQDASSEAKSEGNHPALAVEDLGCGVIQVDEDNCKEEKAQVANRPLKCIVEETYIDLTTESPSSCEVKKDELKSEPGSNCDNSELPGTLHNSHKKRRNISDLNHPHKKQRKETDLTNKEKTKKPTQDSCENTEAHQKKASKKKAPPVTKDPSSLKATPGIKDSSAALATSTSLSAKNVIKKKGEIIILWTRNDDREILLECQKRGPSFKTFAYLAAKLDKNPNQVSERFQQLMKLFEKSKCR

SEQ ID NO: 836885 - protein, 519 aa, Homo sapiens
MAADDDNGDGTSLFDVFSASPLKNNDEGSLDIYAGLDSAVSDSASKSCVPSRNCLDLYEEILTEEGTAKEATYNDLQVEYGKCQLQMKELMKKFKEIQTQNFSLINENQSLKKNISALIKTARVEINRKDEEISNLHQRLSEFPHFRNNHKTARTFDTVKTKDLKSRSPHLDDCSKTDHRAKSDVSKDVHHSTSLPNLEKEGKPHSDKRSTSHLPTSVEKHCTNGVWSRSHYQVGEGSSNEDSRRGRKDIRHSQFNRGTERVRKDLSTGCGDGEPRILEASQRLQGHPEKYGKGEPKTESKSSKFKSNSDSDYKGERINSSWEKETPGERSHSRVDSQSDKKLERQSERSQNINRKEVKSQDKEERKVDQKPKSVVKDQDHWRRSERASLPHSKNEITFSHNSSKYHLEERRGWEDCKRDKSVNSHSFQDGRCPSSLSNSRTHKNIDSKEVDAMHQWENTPLKAERHRTEDKRKREQESKEENRHIRNEKRVPTEHLQKTNKETKKTTTDLKKQNEPKT

SEQ ID NO: 836886 - protein, 1269 aa, Homo sapiens; identical to SEQ ID NO: 836884

SEQ ID NO: 836887 - protein, 1269 aa, Homo sapiens; identical to SEQ ID NO: 836884

SEQ ID NO: 836888 - protein, 92 aa, Homo sapiens
SRFRIHTRNLMSEGKTGRDCPLRAQEESPEAAVAKPSPAGAWGSGQGVSGAQGPHGEDMYVSAAVGGGDPWKEIVLLGSDGRKVEGRTVRRS

SEQ ID NO: 836889 - protein, 481 aa, Homo sapiens
AVCGETDEEAGESGGEGIFRERDEFVIRAEDIPSLKLALQTGREPPPIWRVQKALLQKFTPEIKDGQRQFCATSNYLGYFGDAKNRYQRLYVKFLENVNKKDYVRVCARKPWHRPPVPVRRSGQAKNPVSAGGSSAPPPKAPAPPPKPETPEKTTSEKPPEQTPETAMPEPPAPEKPSLLRPVEKEKEKEKVTRGERPLRGERATSGRQTRPERSLATGQPATSRLPKARPTKVKAEPPPKKRKKWLKEAGGNATAGGGPPGSSSDSESSPGAPSEDERAVPGRLLKTRAMREMYRSYVEMLVSTALDPDMIQALEDTHDELYLPPMRKIDGLLNEHKKKVLKRLSLSPALQDALHTFPQLQVEQSGEGSPEEGAVRLRPAGEPYNRKTLSKLKRSVVRAQEFKVELEKSGYYTLYHSLHHYKYHTFLRCRDQTLAIEGGAEDLGQEEVVQQCMRNQPWLEQLFDSFSDLLAQAQAHSRCG

SEQ ID NO: 836890 - protein, 405 aa, Homo sapiens
AVCGETDEEAGESGGEGIFRERDEFVIRAEDIPSLKLALQTGREPPPIWRVQKALLQKFTPEIKDGQRQFCATSNYLGYFGDAKNRYQRLYVKFLENVNKKDYVRVCARKPWHRPPVPVRRSGQAKNPVSAGGSSAPPPKAPAPPPKPETPEKTTSEKPPEQTPETAMPEPPAPEKPSLLRPVEKEKEKEKVTRGERPLRGERATSGRQTRPERSLATGQPATSRLPKARPTKVKAEPPPKKRKKWLKEAGGNATAGGGPPGSSSDSESSPGAPSEDERAVPGRLLKTRAMREMYRSYVEMLVSTALDPDMIQALEDTHDELYLPPMRKIDGLLNEHKKKVLKRLSLSPALQVPGGLGRGCLGPRVHMEKTCTCRPLLAGVILGRRSSFWAQMGEKLRAGLSGDL

SEQ ID NO: 836891 - protein, 308 aa, Homo sapiens
AVCGETDEEAGESGGEGIFRERDEFVIRAEDIPSLKLALQTGREPPPIWRVQKALLQKFTPEIKDGQRQFCATSNYLGYFGDAKNRYQRLYVKFLENVNKKDYVRVCARKPWHRPPVPVRRSGQAKNPVSAGGSSAPPPKAPAPPPKPETPEKTTSEKPPEQTPETAMPEPPAPEKPSLLRPVEKEKEKEKQTRPERSLATGQPATSRLPKARPTKVKAEPPPKKRKKWLKEAGGNATAGGGPPGSSSDSESSPGAPSEDERAVPGRLLKTRAMREMYRSYVEMLVSTALDPDMIQALEDTHGELRPG

SEQ ID NO: 836892 - protein, 481 aa, Homo sapiens; identical to SEQ ID NO: 836889

SEQ ID NO: 836893 - protein, 128 aa, Homo sapiens
VPVWLCMTVYDPETLEAELVPGLRTAVLLRVQALQEESRYLRAVLANETGLARLLSRLSGVGLRLTTSLFRDSPAGDHDYALPVGKQKQDLLEEDDSAGGVCLHVDKDKVSVEFCSACARKASSSLKM

SEQ ID NO: 836894 - protein, 354 aa, Homo sapiens
MRHSLTKLLAASGSNSPTRSESPEPAATCSLPSDLTRAAAGEEETAAAGSPGRKQQFGDEGELEAGRGSRGGVAVRAPSPEEMEEEAIASLPGEETEDMDFLSGLELADLLDPRQPDWHLDPGLSSPGPLSSSGGGSDSGGLWRGDDDDEAAAAEMQRFSDLLQRLLNGIGGCSSSSDSGSAEKRRRKSPGGGGGGGSGNDNNQAATKSPRKAAAAAARLNRLKKKEYVMGLESRVRGLAAENQELRAENRELGKRVQALQEESRYLRAVLANETGLARLLSRLSGVGLRLTTSLFRDSPAGDHDYALPVGKQKQDLLEEDDSAGGVCLHVDKDKVSVEFCSACARKASSSLKM

SEQ ID NO: 836895 - protein, 358 aa, Homo sapiens
MRHSLTKLLAASGSNSPTRSESPEPAATCSLPSDLTRAAAGEEETAAAGSPGRKQQFGDEGELEAGRGSRGGVAVRAPSPEEMEEEAIASLPGEETEDMDFLSGLELADLLDPRQPDWHLDPGLSSPGPLSSSGGGSDSGGLWRGDDDDEAAAAEMQRFSDLLQRLLNGIGGCSSSSDSGSAEKRRRKSPGGGGGGGSGNDNNQAATKSPRKAAAAAARLNRLKKKEYVMGLESRVRGLAAENQELRAENRELGKRVQALQEESRYLRAVLANETGLARLLSRLSGVGLRLTTSLFRDSPAGDHDYALPVGKQKQDLLEEDDSAGGVCLHVDKDKVSVEFCSACARKASSSLKIFFFR

SEQ ID NO: 836896 - protein, 266 aa, Homo sapiens
MYYSKLIKSIQFLTILSVFSACEARQQPDWHLDPGLSSPGPLSSSGGGSDSGGLWRGDDDDEAAAAEMQRFSDLLQRLLNGIGGCSSSSDSGSAEKRRRKSPGGGGGGGSGNDNNQAATKSPRKAAAAAARLNRLKKKEYVMGLESRVRGLAAENQELRAENRELGKRVQALQEESRYLRAVLANETGLARLLSRLSGVGLRLTTSLFRDSPAGDHDYALPVGKQKQDLLEEDDSAGGVCLHVDKDKVSVEFCSACARKASSSLKM

SEQ ID NO: 836897 - protein, 354 aa, Homo sapiens; identical to SEQ ID NO: 836894

SEQ ID NO: 836898 - protein, 354 aa, Homo sapiens; identical to SEQ ID NO: 836894

SEQ ID NO: 836899 - protein, 354 aa, Homo sapiens; identical to SEQ ID NO: 836894

SEQ ID NO: 836900 - protein, 354 aa, Homo sapiens; identical to SEQ ID NO: 836894

SEQ ID NO: 836901 - protein, 354 aa, Homo sapiens; identical to SEQ ID NO: 836894

SEQ ID NO: 836902 - protein, 354 aa, Homo sapiens; identical to SEQ ID NO: 836894

SEQ ID NO: 836903 - protein, 354 aa, Homo sapiens; identical to SEQ ID NO: 836894

SEQ ID NO: 836904 - protein, 354 aa, Homo sapiens; identical to SEQ ID NO: 836894

SEQ ID NO: 836905 - protein, 118 aa, Homo sapiens
IAARRIKYSGIELTREVKGLFKENYKPLLQELREDTSRWENIPCSWIERINITKMTILPKTIYRFNAISIKSLTFFTELEKTILKFIWNQKRARIARTFLSKKNKAGGITLPNFKLYY

SEQ ID NO: 836906 - protein, 336 aa, Homo sapiens
PRVPGPRRLVMSPQLDTKSPSAHAGLPATGGGGAAPSTGAQKCERQRRGRDCSCASGLPAASPRAADPRPLASAPLPGSGPRMRTPPALGSQGSEVTGPTFADGELIPREPGFFPEDEEEAMTLAPPEGPQELYTDSPMESTQSLEGSVGSPAEKDGGLGGLFLPEDKSLVHTPSMTTSDLSTHSTTSLISNEEQFEDYGEGDDVDCAPSSPCPDDETRTNVYSDLGSSVSSSAGQTPRKMRHVYNSELLDVYCSQCCKKINLLNDLEARLKNLKANSPNRKISSTAFGRQLMHSSNFSSSNGSTEDLFRDSIDSCDNDITEKVSSWKTGDETECM

SEQ ID NO: 836907 - protein, 36 aa, Homo sapiens
MGPQPLRALSLPPEEALSMVPGARPQACLEATTSGV

SEQ ID NO: 836908 - protein, 36 aa, Homo sapiens; identical to SEQ ID NO: 836907

SEQ ID NO: 836909 - protein, 36 aa, Homo sapiens; identical to SEQ ID NO: 836907

SEQ ID NO: 836910 - protein, 83 aa, Homo sapiens
RNTHKTKNTNKELAQVTSPACESDEAEAGLWPGPTFNSIPISLCICWISWLLFNLLLGISFMLHIMGLHWSDPGLWSHPHWED

SEQ ID NO: 836911 - protein, 617 aa, Homo sapiens
PRVPGPRRLVMSPQLDTKSPSAHAGLPATGGGGAAPSTGAQKCERQRRGRDCSCASGLPAASPRAADPRPLASAPLPGSGPRMRTPPALGSQGSEVTGPTFADGELIPREPGFFPEDEEEAMTLAPPEGPQELYTDSPMESTQSLEGSVGSPAEKDGGLGGLFLPEDKSLVHTPSMTTSDLSTHSTTSLISNEEQFEDYGEGDDVDCAPSSPCPDDETRTNVYSDLGSSVSSSAGQTPRKMRHVYNSELLDVYCSQCCKKINLLNDLEARLKNLKANSPNRKISSTAFGRQLMHSSNFSSSNGSTEDLFRDSIDSCDNDITEKVSFLEKKVTELENDSLTNGDLKSKLKQENTQLVHRVHELEEMVKDQETTAEQALEEEARRHREAYGKLEREKATEVELLNARVQQLEEENTELRTTVTRLKSQTEKLDEERQRMSDRLEDTSLRLKDEMDLYKRMMDKLRQNRLEFQKEREATQELIEDLRKELEHLQMYKLDCERPGRGRSASSGLGEFNARAREVELEHEVKRLKQENYKLRDQNDDLNGQILSLSLYEAKNLFAAQTKAQSLAAEIDTASRDELMEALKEQEEINFRLRQYMDKIILAILDHNPSILEIKH

SEQ ID NO: 836912 - protein, 36 aa, Homo sapiens; identical to SEQ ID NO: 836907

SEQ ID NO: 836913 - protein, 617 aa, Homo sapiens; identical to SEQ ID NO: 836911

SEQ ID NO: 836914 - protein, 663 aa, Homo sapiens
PRVPGPRRLVMSPQLDTKSPSAHAGLPATGGGGAAPSTGAQKCERQRRGRDCSCASGLPAASPRAADPRPLASAPLPGSGPRMRTPPALGSQGSEVTGPTFADGELIPREPGFFPEDEEEAMTLAPPEGPQELYTDSPMESTQSLEGSVGSPAEKDGGLGGLFLPEDKSLVHTPSMTTSDLSTHSTTSLISNEEQFEDYGEGDDVDCAPSSPCPDDETRTNVYSDLGSSVSSSAGQTPRKMRHVYNSELLDVYCSQCCKKINLLNDLEARLKNLKANSPNRKISSTAFGRQLMHSSNFSSSNGSTEDLFRDSIDSCDNDITEKVSFLEKKVTELENDSLTNGDLKSKLKQENTQLVHRVHELEEMVKDQETTAEQALEEEARRHREAYGKLEREKATEVELLNARVQQLEEENTELRTTVTRLKSQTEKLDEERQRMSDRLEDTSLRLKDEMDLYKRMMDKLRQNRLEFQKEREATQELIEDLRKELEHLQMYKLDCERPGRGRSASSGLGEFNARAREVELEHEVKRLKQENYKLRDQNDDLNGQILSLSLYEATNGSPEGAGGDQLPAEAVHGQDYPRHPGPQSLHPRDQTLRHGAGCRAALGPWDQGQTLPKDAGLSRASHSHCKCLSGHHALRVPVYMWGGCAHERGVSGRGCGQHPHG

SEQ ID NO: 836915 - protein, 621 aa, Homo sapiens
MHHHAQLIFLFFVETGSHCVASLELLTSSDPPTSACQSTGITGMSHHAWPGHISNGEILKILMIRLNPQTFWFDCCGCSPGMGFFKELLRKFQFNCVSYLGFLFVFIVFAKPGNPTEYGLAVTYLKFRGVWGWGEGFCSRLRFYMALSCPCVQLEATQNELTRSELRVHYLLENEVPSGSASPCALRGFKKLLVKMFFSFSFELARVYPRLFYFKLVEFFANCHREIPFHDFISDLLKHEQARHGGYTPVILALGRQWQADHLSSGVLNQPGQHSDTLSLPKVKKKKKKAQEPARGPKTVELSFGCALESPGEICKLLLSGLNPQRFGLNWCGVWSRHRDVLRPPQVMICSPRLRLPCPARSLARGRGNWSKWLLGLSSPWLNDSELSCWEGSFSCVEWSWPAGWEARCLQELVDPAVLTSLEVSRPEWVGRTLAWCPWNQWVACVGIYWLQAHLKEQVEQSQQGTDRWGCPPESSRRNSCHLFAIAEQEDILSLWVLLLVCFLTGLIKGVPARSLLAKPASSHTPDTPGASPLVLVFRGVGGGARGQKRGFLVPMRDLAEASRGQQGQVKLGRNEALCVLLCVVGFNALANLNLKTNSRPGTVAHTCNPSTLGGQGRWIA

SEQ ID NO: 836916 - protein, 617 aa, Homo sapiens; identical to SEQ ID NO: 836911

SEQ ID NO: 836917 - protein, 116 aa, Homo sapiens
GRDPDGFLRVERVAALGLRFGQGEEVEKLVKYLDPNDLGRINFKDFCRGVFAMKGCEELLKDVLSVESAGTLPCAPEIPDCVEQRPGLAMLPRMVSNSWPQASLPAGPPKALGLQS

SEQ ID NO: 836918 - protein, 504 aa, Homo sapiens
PRVPGPRRLVMSPQLDTKSPSAHAGLPATGGGGAAPSTGAQKCERQRRGRDCSCASGLPAASPRAADPRPLASAPLPGSGPRMRTPPALGSQGSEVTGPTFADGELIPREPGFFPEDEEEAMTLAPPEGPQELYTDSPMESTQSLEGSVGSPAEKDGGLGGLFLPEDKSLVHTPSMTTSDLSTHSTTSLISNEEQFEDYGEGDDVDCAPSSPCPDDETRTNVYSDLGSSVSSSAGQTPRKMRHVYNSELLDVYCSQCCKKINLLNDLEARLKNLKANSPNRKISSTAFGRQLMHSSNFSSSNGSTEDLFRDSIDSCDNDITEKVSFLEKKVTELENDSLTNGDLKSKLKQENTQLVHRVHELEEMVKDQETTAEQALEEEARRHREAYGKLEREKATEVELLNARVQQLEEENTELRTTVTRLKSQTEKLDEERQRMSDRLEDTSLRLKDEMDLYKRMMGARLGIFVPSGSPLRVRISPFTFPVFSTCSRFSVFTFRFSRDDLL

SEQ ID NO: 836919 - protein, 36 aa, Homo sapiens; identical to SEQ ID NO: 836907

SEQ ID NO: 836920 - protein, 36 aa, Homo sapiens; identical to SEQ ID NO: 836907

SEQ ID NO: 836921 - protein, 36 aa, Homo sapiens; identical to SEQ ID NO: 836907

SEQ ID NO: 836922 - protein, 776 aa, Homo sapiens
MNPEEQIVTWLISLGVLESPKKTICDPEEFLKSSLKNGVVLCKLINRLMPGSVEKFCLDPQTEADCINNINDFLKGCATLQVEIFDPDDLYSGVNFSKVLSTLLAVNKATEDQLSERPCGRSSSLSAANTSQTNPQGAVSSTVSGLQRQSKTVEMTENGSHQLIVKARFNFKQTNEDELSVCKGDIIYVTRVEEGGWWEGTLNGRTGWFPSNYVREIKSSERPLSPKAVKGFETAPLTKNYYTVVLQNILDTEKEYAKELQSLLVTYLRPLQSNNNLSTVEVTSLLGNFEEVCTFQQTLCQALEECSKFPENQHKVGGCLLSLMPHFKSMYLAYCANHPSAVNVLTQHSDELEQFMENQGASSPGILILTTNLSKPFMRLEKYVTLLQELERHMEDTHPDHQDILKAIVAFKTLMGQCQDLRKRKQLELQILSEPIQAWEGEDIKNLGNVIFMSQVMVQYGACEEKEERYLMLFSNVLIMLSASPRMSGFIYQGKIPIAGTVVTRLDEIEGNDCTFEITGNTVERIVVHCNNNQDFQEWLEQLNRLIRGPASCSSLSKTSSSSCSAHSSFSSTGQPRGPLEPPQIIKPWSLSCLRPAPPLRPSAALGYKERMSYILKESSKSPKTMKKFLHKRKTERKPSEEEYVIRKSTAALEEDAQILKVIEAYCTSANFQQGHGSSTRKDSIPQVLLPEEEKLIIEETRSNGQTIMEEKSLVDTVYALKDEVRELKQENKRMKQCLEEELKSRRDLEKLVRRLLKQTDECIRGESSSKTSILP

SEQ ID NO: 836923 - protein, 622 aa, Homo sapiens
MTENGSHQLIVKARFNFKQTNEDELSVCKGDIIYVTRVEEGGWWEGTLNGRTGWFPSNYVREIKSSERPLSPKAVKGFETAPLTKNYYTVVLQNILDTEKEYAKELQSLLVTYLRPLQSNNNLSTVEVTSLLGNFEEVCTFQQTLCQALEECSKFPENQHKVGGCLLSLMPHFKSMYLAYCANHPSAVNVLTQHSDELEQFMENQGASSPGILILTTNLSKPFMRLEKYVTLLQELERHMEDTHPDHQDILKAIVAFKTLMGQCQDLRKRKQLELQILSEPIQAWEGEDIKNLGNVIFMSQVMVQYGACEEKEERYLMLFSNVLIMLSASPRMSGFIYQGKIPIAGTVVTRLDEIEGNDCTFEITGNTVERIVVHCNNNQDFQEWLEQLNRLIRGPASCSSLSKTSSSSCSAHSSFSSTGQPRGPLEPPQIIKPWSLSCLRPAPPLRPSAALGYKERMSYILKESSKSPKTMKKFLHKRKTERKPSEEEYVIRKSTAALEEDAQILKVIEAYCTSANFQQGHGSSTRKDSIPQVLLPEEEKLIIEETRSNGQTIMEEKSLVDTVYALKDEVRELKQENKRMKQCLEEELKSRRDLEKLVRRLLKQTDECIRGESSSKTSILP

SEQ ID NO: 836924 - protein, 776 aa, Homo sapiens; identical to SEQ ID NO: 836922

SEQ ID NO: 836925 - protein, 68 aa, Homo sapiens
VSPWWRPRSGQGPSSGWVDLFPQPWHRLARPLAGPVTREGERLPGGGGGAAGVREQLEDRRAAAEPDI

SEQ ID NO: 836926 - protein, 67 aa, Homo sapiens
TENGSHQLIVKARFNFKQTNEDELSVCKGDIIYVTRVEEGGWWEGTLNGRTGWFPSNYVREIKSSGK

SEQ ID NO: 836927 - protein, 776 aa, Homo sapiens; identical to SEQ ID NO: 836922

SEQ ID NO: 836928 - protein, 267 aa, Homo sapiens
MNPEEQIVTWLISLGVLESPKKTICDPEEFLKSSLKNGVVLCKLINRLMPGSVEKFCLDPQTEADCINNINDFLKGCATLQVEIFDPDDLYSGVNFSKVLSTLLAVNKATEDQLSERPCGRSSSLSAANTSQTNPQGAVSSTVSGLQRQSKTVEMTENGSHQLIVKARFNFKQTNEDELSVCKGDIIYVTRVEEGGWWEGTLNGRTGWFPSNYVREIKSSGWSQTPGLQRSSCPGLPKCWDYRDGVPLLLLGLECNGAISAHHNLCL

SEQ ID NO: 836929 - protein, 276 aa, Homo sapiens
MNPEEQIVTWLISLGVLESPKKTICDPEEFLKSSLKNGVVLCKLINRLMPGSVEKFCLDPQTEADCINNINDFLKGCATLQVEIFDPDDLYSGVNFSKVLSTLLAVNKATEDQLSERPCGRSSSLSAANTSQTNPQGAVSSTVSGLQRQSKTVEMTENGSHQLIVKARFNFKQTNEDELSVCKGDIIYVTRVEEGGWWEGTLNGRTGWFPSNYVREIKSSERPLSPKAVKGFETAPLTKNYYTVVLQNILDTEKEYAKELQSLLVTYLRPLQSNNK

SEQ ID NO: 836930 - protein, 79 aa, Homo sapiens
FFTRCRALRSHTGVPQDTRPPAENLVLSLGSWYSKGPNTGAVTAIHALRRPSAQIIFRSVNIGLRIFCGFLHLHFCALS

SEQ ID NO: 836931 - protein, 408 aa, Homo sapiens
MATHSAQKPHQCMYCDKMFHRKDHLRNHLQTHDPNKEALHCSECGKNYNTKLGYRRHLAMHAASSGDLSCKVCLQTFESTQALLEHLKAHSRRVAGGAKEKKHPCDHCDRRFYTRKDVRRHLVVHTGRKDFLCQYCAQRFGRKDHLTRHVKKSHSQELLKIKTEPVDMLGLLSCSSTVSVKEELSPVLCMASRDVMGTKAFPGMLPMGMYGAHIPTMPSTGVPHSLVHNTLPMGMSYPLESSPISSPAQLPPKYQLGSTSYLPDKLPKVEVDSFLAELPGSLSLSSAEPQPASPQPAAAAALLDEALLAKSPANLSEALCAANVDFSHLLGFLPLNLPPCNPPGATGGLVMGYSQAEAQPLLTTLQAQPQDSPGAGGPLNFGPLHSLPPVFTSGLSSTTLPRFHQAFQ

SEQ ID NO: 836932 - protein, 496 aa, Homo sapiens
MTTFFTSVPPWIQDAKQEEEVGWKLVPRPRGREAESQVKCQCEISGTPFSNGEKLRPHSLPQPEQRPYSCPQLHCGKAFASKYKLYRHMATHSAQKPHQCMYCDKMFHRKDHLRNHLQTHDPNKEALHCSECGKNYNTKLGYRRHLAMHAASSGDLSCKVCLQTFESTQALLEHLKAHSRRVAGGAKEKKHPCDHCDRRFYTRKDVRRHLVVHTGRKDFLCQYCAQRFGRKDHLTRHVKKSHSQELLKIKTEPVDMLGLLSCSSTVSVKEELSPVLCMASRDVMGTKAFPGMLPMGMYGAHIPTMPSTGVPHSLVHNTLPMGMSYPLESSPISSPAQLPPKYQLGSTSYLPDKLPKVEVDSFLAELPGSLSLSSAEPQPASPQPAAAAALLDEALLAKSPANLSEALCAANVDFSHLLGFLPLNLPPCNPPGATGGLVMGYSQAEAQPLLTTLQAQPQDSPGAGGPLNFGPLHSLPPVFTSGLSSTTLPRFHQAFQ

SEQ ID NO: 836933 - protein, 564 aa, Homo sapiens
QWPDRRHYRGLRGPGGARARPGPQRGAPSAVKRLFSESCVGGCDRAESLCGADGEAFSITWPFAISLAMTTFFTSVPPWIQDAKQEEEVGWKLVPRPRGREAESQVKCQCEISGTPFSNGEKLRPHSLPQPEQRPYSCPQLHCGKAFASKYKLYRHMATHSAQKPHQCMYCDKMFHRKDHLRNHLQTHDPNKEALHCSECGKNYNTKLGYRRHLAMHAASSGDLSCKVCLQTFESTQALLEHLKAHSRRVAGGAKEKKHPCDHCDRRFYTRKDVRRHLVVHTGRKDFLCQYCAQRFGRKDHLTRHVKKSHSQELLKIKTEPVDMLGLLSCSSTVSVKEELSPVLCMASRDVMGTKAFPGMLPMGMYGAHIPTMPSTGVPHSLVHNTLPMGMSYPLESSPISSPAQLPPKYQLGSTSYLPDKLPKVEVDSFLAELPGSLSLSSAEPQPASPQPAAAAALLDEALLAKSPANLSEALCAANVDFSHLLGFLPLNLPPCNPPGATGGLVMGYSQAEAQPLLTTLQAQPQDSPGAGGPLNFGPLHSLPPVFTSGLSSTTLPRFHQAFQ

SEQ ID NO: 836934 - protein, 564 aa, Homo sapiens; identical to SEQ ID NO: 836933

SEQ ID NO: 836935 - protein, 408 aa, Homo sapiens; identical to SEQ ID NO: 836931

SEQ ID NO: 836936 - protein, 564 aa, Homo sapiens; identical to SEQ ID NO: 836933

SEQ ID NO: 836937 - protein, 106 aa, Homo sapiens
HACPHNIISFDTTPRRPPLWRQGRNGKKSEQHQRLSELLSWTVNPSHPLKKCPARRTVNNPGDSDLQLDLRWDITPRTPEEPQERKSQGKPLPRPYQTQNKIPFSY

SEQ ID NO: 836938 - protein, 723 aa, Homo sapiens
ARGALQIVSCCVSFFDRHSCQLQSQIDFSPSMFYFRGCGRWVAVSFTKQQFPLARLSSDSAAPRTPHFDVIVIGGGHAGTEAATAAARCGSRTLLLTHRVDTIGQMSCNPSFGGIGKGHLMREVDALDGLCSRICDQSGVHYKVLNRRKGPAVWGLRAQIDRKLYKQNMQKEILNTPLLTVQEGAVEDLILTEPEPEHTGKCRVSGVVLVDGSTVYAESVILTTGTFLRGMIVIGLETHPAGRLGDQPSIGLAQTLEKLGFVVGRLKTGTPPRIAKESINFSILNKHIPDNPSIPFSFTNETVWIKPEDQLPCYLTHTNPRVDEIVLKNLHLNSHVKETTRGPRYCPSIESKVLRFPNRLHQVWLEPEGMDSDLIYPQGLSMTLPAELQEKMITCIRGLEKAKVIQPGYGVQYDYLDPRQITPSLETHLVQRLFFAGQINGTTGYEEAAAQGVIAGINASLRVSRKPPFVVSRTEGYIGVLIDDLTTLGTSEPYRMFTSRVEFRLSLRPDNADSRLTLRGYKDAGCVSQQRYERACWMKSSLEEGISVLKSIEFLSSKWKKLIPEASISTSRSLPVRALDVLKYEEVDMDSLAKAVPEPLKKYTKCRELAERLKIEATYESVLFHQLQEIKGVQQDEALQLPKDLDYLTIRDVSLSHEVREKLHFSRPQTIGAASRIPGVTPAAIINLLRFVKTTQRRQSAMNESSKTDQYLCDADRLQEREL

SEQ ID NO: 836939 - protein, 762 aa, Homo sapiens
ARGALQIVSCCVSFFDRHSCQLQSQIDFSPSMFYFRGCGRWVAVSFTKQQFPLARLSSDSAAPRTPHFDVIVIGGGHAGTEAATAAARCGSRTLLLTHRVDTIGQMSCNPSFGGIGKGHLMREVDALDGLCSRICDQSGVHYKVLNRRKGPAVWGLRAQIDRKLYKQNMQKEILNTPLLTVQEGAVEDLILTEPEPEHTGKCRVSGVVLVDGSTVYAESVILTTGTFLRGMIVIGLETHPAGRLGDQPSIGLAQTLEKLGFVVGRLKTGTPPRIAKESINFSILNKHIPDNPSIPFSFTNETVWIKPEDQLPCYLTHTNPRVDEIVLKNLHLNSHVKETTRGPRYCPSIESKVLRFPNRLHQVWLEPEGMDSDLIYPQGLSMTLPAELQEKMITCIRGLEKAKVIQPGYGVQYDYLDPRQITPSLETHLVQRLFFAGQINGTTGYEEAAAQSVALLPGWSAVIMISQLQAILLPQPSLVAGTAGMHHNTQGVIAGINASLRVSRKPPFVVSRTEGYIGVLIDDLTTLGTSEPYRMFTSRVEFRLSLRPDNADSRLTLRGYKDAGCVSQQRYERACWMKSSLEEGISVLKSIEFLSSKWKKLIPEASISTSRSLPVRALDVLKYEEVDMDSLAKAVPEPLKKYTKCRELAERLKIEATYESVLFHQLQEIKGVQQDEALQLPKDLDYLTIRDVSLSHEVREKLHFSRPQTIGAASRIPGVTPAAIINLLRFVKTTQRRQSAMNESSKTDQYLCDADRLQEREL

SEQ ID NO: 836940 - protein, 656 aa, Homo sapiens
GTRRPADCLLLRQMSCNPSFGGIGKGHLMREVDALDGLCSRICDQSGVHYKVLNRRKGPAVWGLRAQIDRKLYKQNMQKEILNTPLLTVQEGAVEDLILTEPEPEHTGKCRVSGVVLVDGSTVYAESVILTTGTFLRGMIVIGLETHPAGRLGDQPSIGLAQTLEKLGFVVGRLKTGTPPRIAKESINFSILNKHIPDNPSIPFSFTNETVWIKPEDQLPCYLTHTNPRVDEIVLKNLHLNSHVKETTRGPRYCPSIESKVLRFPNRLHQVWLEPEGMDSDLIYPQGLSMTLPAELQEKMITCIRGLEKAKVIQPDGVLLLLPRMECNGAISAHHNLPLPGYGVQYDYLDPRQITPSLETHLVQRLFFAGQINGTTGYEEAAAQGVIAGINASLRVSRKPPFVVSRTEGYIGVLIDDLTTLGTSEPYRMFTSRVEFRLSLRPDNADSRLTLRGYKDAGCVSQQRYERACWMKSSLEEGISVLKSIEFLSSKWKKLIPEASISTSRSLPVRALDVLKYEEVDMDSLAKAVPEPLKKYTKCRELAERLKIEATYESVLFHQLQEIKGVQQDEALQLPKDLDYLTIRDVSLSHEVREKLHFSRPQTIGAASRIPGVTPAAIINLLRFVKTTQRRQSAMNESSKTDQYLCDADRLQEREL

SEQ ID NO: 836941 - protein, 643 aa, Homo sapiens
MSCNPSFGGIGKGHLMREVDALDGLCSRICDQSGVHYKVLNRRKGPAVWGLRAQIDRKLYKQNMQKEILNTPLLTVQEGAVEDLILTEPEPEHTGKCRVSGVVLVDGSTVYAESVILTTGTFLRGMIVIGLETHPAGRLGDQPSIGLAQTLEKLGFVVGRLKTGTPPRIAKESINFSILNKHIPDNPSIPFSFTNETVWIKPEDQLPCYLTHTNPRVDEIVLKNLHLNSHVKETTRGPRYCPSIESKVLRFPNRLHQVWLEPEGMDSDLIYPQGLSMTLPAELQEKMITCIRGLEKAKVIQPDGVLLLLPRMECNGAISAHHNLPLPGYGVQYDYLDPRQITPSLETHLVQRLFFAGQINGTTGYEEAAAQGVIAGINASLRVSRKPPFVVSRTEGYIGVLIDDLTTLGTSEPYRMFTSRVEFRLSLRPDNADSRLTLRGYKDAGCVSQQRYERACWMKSSLEEGISVLKSIEFLSSKWKKLIPEASISTSRSLPVRALDVLKYEEVDMDSLAKAVPEPLKKYTKCRELAERLKIEATYESVLFHQLQEIKGVQQDEALQLPKDLDYLTIRDVSLSHEVREKLHFSRPQTIGAASRIPGVTPAAIINLLRFVKTTQRRQSAMNESSKTDQYLCDADRLQEREL

SEQ ID NO: 836942 - protein, 174 aa, Homo sapiens
GSIGYGSLSGEYIVEEASISTSRSLPVRALDVLKYEEVDMDSLAKAVPEPLKKYTKCRELAERLKIEATYESVLFHQLQEIKGVQQDEALQLPKDLDYLTIRDVSLSHEVREKLHFSRPQTIGAASRIPGVTPAAIINLLRFVKTTQRRQSAMNESSKTDQYLCDADRLQEREL

SEQ ID NO: 836943 - protein, 596 aa, Homo sapiens
ARGALQIVSCCVSFFDRHSCQLQSQIDFSPSMFYFRGCGRWVAVSFTKQQFPLARLSSDSAAPRTPHFDVIVIGGGHAGTEAATAAARCGSRTLLLTHRVDTIGQMSCNPSFGGIGKGHLMREVDALDGLCSRICDQSGVHYKVLNRRKGPAVWGLRAQIDRKLYKQNMQKEILNTPLLTVQEGAVEDLILTEPEPEHTGKCRVSGVVLVDGSTVYAESVILTTGTFLRGMIVIGLETHPAGRLGDQPSIGLAQTLEKLGFVVGRLKTGTPPRIAKESINFSILNKHIPDNPSIPFSFTNETVWIKPEDQLPCYLTHTNPRVDEIVLKNLHLNSHVKETTRGPRYCPSIESKVLRFPNRLHQVWLEPEGMDSDLIYPQGLSMTLPAELQEKMITCIRGLEKAKVIQPGYGVQYDYLDPRQITPSLETHLVQRLFFAGQINGTTGYEEAAAQGVIAGINASLRVSRKPPFVVSRTEGYIGVLIDDLTTLGTSEPYRMFTSRVEFRLSLRPDNADSRLTLRGYKDAGCVSQQRYERACWMKSSLEEGISVLKSIEFLSSKWKKLIPEASISTSRSLPVRRGGRHLNPSYLGGRGRRIV

SEQ ID NO: 836944 - protein, 656 aa, Homo sapiens; identical to SEQ ID NO: 836940

SEQ ID NO: 836945 - protein, 596 aa, Homo sapiens; identical to SEQ ID NO: 836943

SEQ ID NO: 836946 - protein, 620 aa, Homo sapiens
ARGALQIVSCCVSFFDRHSCQLQSQIDFSPSMFYFRGCGRWVAVSFTKQQFPLARLSSDSAAPRTPHFDVIVIGGGHAGTEAATAAARCGSRTLLLTHRVDTIGQMSCNPSFGGIGKGHLMREVDALDGLCSRICDQSGVHYKVLNRRKGPAVWGLRAQIDRKLYKQNMQKEILNTPLLTVQEGAVEDLILTEPEPEHTGKCRVSGVVLVDGSTVYAESVILTTGTFLRGMIVIGLETHPAGRLGDQPSIGLAQTLEKLGFVVGRLKTGTPPRIAKESINFSILNKHIPDNPSIPFSFTNETVWIKPEDQLPCYLTHTNPRVDEIVLKNLHLNSHVKETTRGPRYCPSIESKVLRFPNRLHQVWLEPEGMDSDLIYPQGLSMTLPAELQEKMITCIRGLEKAKVIQPGYGVQYDYLDPRQITPSLETHLVQRLFFAGQINGTTGYEEAAAQGVIAGINASLRVSRKPPFVVSRTEGYIGVLIDDLTTLGTSEPYRMFTSRVEFRLSLRPDNADSRLTLRGYKDAGCVSQQRYERACWMKSSLEEGISVLKSIEFLSSKWKKLIPEASISTSRSLPVRALDVLKYEEVDMDSLAKAVPEPLKKYTKCRELAERLKIEDRGC

SEQ ID NO: 836947 - protein, 215 aa, Homo sapiens
ARGALQIVSCCVSFFDRHSCQLQSQIDFSPSMFYFRGCGRWVAVSFTKQQFPLARLSSDSAAPRTPHFDVIVIGGGHAGTEAATAAARCGSRTLLLTHRVDTIGQMSCNPSFGGIGKGHLMREVDALDGLCSRICDQSGVHYKVLNRRKGPAVWGLRAQIDRKLYKQNMQKEILNTPLLTVQEGAVEDLILTEPEPEHTGKCRVSGVVLGWSAVA

SEQ ID NO: 836948 - protein, 196 aa, Homo sapiens
MVGGLKRKHSDLEEEEERWEWSPAGLQSYQQALLRISLDKVQRSLGPRAPSLRRHVLIHNTLQQLQAALRLAPAPALPPEPLFLGEEDFSLSATIGSILRELDTSMDGTEPPQNPVTPLGLQNEVPPQPDPVFLEALSSRYLGDSGLDDFFLDIDTSAVEKEPARAPPEPPHNLFCAPGSWEWNELDHIMEIILGS

SEQ ID NO: 836949 - protein, 196 aa, Homo sapiens; identical to SEQ ID NO: 836948

SEQ ID NO: 836950 - protein, 196 aa, Homo sapiens; identical to SEQ ID NO: 836948

SEQ ID NO: 836951 - protein, 196 aa, Homo sapiens; identical to SEQ ID NO: 836948

SEQ ID NO: 836952 - protein, 196 aa, Homo sapiens; identical to SEQ ID NO: 836948

SEQ ID NO: 836953 - protein, 196 aa, Homo sapiens; identical to SEQ ID NO: 836948

SEQ ID NO: 836954 - protein, 132 aa, Homo sapiens
MEAVRMNWKERLWERQRDENKPGLALPCAHTGELCAPGCVSWYMRLSEGSWGALLAQRLRGRPRKPFFALVRVCCIFPSPGNGTQFFFFLCKIISITIGCAHENAFCFHRNVFSHSVLILISVKLSKHITKF

SEQ ID NO: 836955 - protein, 294 aa, Homo sapiens
MFTCFPKCLGFSPPVNVTVSPRSEESHTTTVSGGNGSVFQAGPQLQALANLEARRGSIGAALSSRDVSGLPVYAQSGEPRRLTQAQVAAFPGENALEHSSDQDTWDSLRSPGFCSPLSSGGGAESLPPGGPGHAEAGHLGKVCDFHLNHQQPSPTSVLPTEVAAPPLEKILSVDSVAVDCAYRTVPKPGPQPGPHGSLLTEGCLRSLSGDLNRFPCGMEVHSGQRELESVVAVGEAMAFEISNGSHELLSQGQKQIFIQTSDGLILSPPGTIVSQEEDIVTVTDAEGRACGWAR

SEQ ID NO: 836956 - protein, 202 aa, Homo sapiens
TRVRVPASAAMADAEPEAGGGSEDGGGGGGPAPPGQSGSVARVAPLGPEQLRQVLEQVTKAQPPPPPPPFVLRDAARRLRDAGQQAALQRGRGTEPPRLPRLLPPQVRRREGRGETEARRGPTPRGGVAACPGRPVSARVKTQGVPRLSFLGTAFGPHLSPPWHFHPRSLTLGAVAHAGPCAWNALVPSLPSQPCWGLLRAP

SEQ ID NO: 836957 - protein, 736 aa, Homo sapiens
MLLPTTIQPQTARKSQLPRGNSCLVGLHIASPQLLRVQPLVRTEPQSCFLSDLCQPPAQGFVQRPLPALQVVPAKRVPAPKAPDEQGSMLTPLSASDPLAVTSLSSSSAHPFISNLHTRHTEKLKKSLKVKTRSGRVSRPPKYKAKDYKFIKTEDLADGHLSDSDDYSELCVEEDEDQRERHALFDLSSCSLRPKSFKCQTCEKSYIGKGGLARHFKLNPGHGQLDPEMVLSEKASGSTLRGCTEERTLSLTSLGLSMPADPCEGGARSCLVTESARGGLQFLQQCDREDLVELALPQLAQVVTVYEFLLMKVEKDHLAKPFFPAIYKEFEELHKMVKKMCQDYLSSSGLCSQETLEINNDKVAESLGITEFLRKKEIHPDNLGPKHLSRDMDGEQLEGASSEKREREAAEEGLASVKRPRREALSNDTTESLAANSRGREKPRPLHALAAGFSPPVNVTVSPRSEESHTTTVSGGNGSVFQAGPQLQALANLEARRGSIGAALSSRDVSGLPVYAQSGEPRRLTQAQVAAFPGENALEHSSDQDTWDSLRSPGFCSPLSSGGGAESLPPGGPGHAEAGHLGKVCDFHLNHQQPSPTSVLPTEVAAPPLEKILSVDSVAVDCAYRTVPKPGPQPGPHGSLLTEGCLRSLSGDLNRFPCGMEVHSGQRELESVVAVGEAMAFEISNGSHELLSQGQKQIFIQTSDGLILSPPGTIVSQEEDIVTVTDAEGRACGWAR

SEQ ID NO: 836958 - protein, 426 aa, Homo sapiens
MKVEKDHLAKPFFPAIYKEFEELHKMVKKMCQDYLSSSGLCSQETLEINNDKVAESLGITEFLRKKEIHPDNLGPKHLSRDMDGEQLEGASSEKREREAAEEGLASVKRPRREALSNDTTESLAANSRGREKPRPLHALAAGFSPPVNVTVSPRSEESHTTTVSGGNGSVFQAGPQLQALANLEARRGSIGAALSSRDVSGLPVYAQSGEPRRLTQAQVAAFPGENALEHSSDQDTWDSLRSPGFCSPLSSGGGAESLPPGGPGHAEAGHLGKVCDFHLNHQQPSPTSVLPTEVAAPPLEKILSVDSVAVDCAYRTVPKPGPQPGPHGSLLTEGCLRSLSGDLNRFPCGMEVHSGQRELESVVAVGEAMAFEISNGSHELLSQGQKQIFIQTSDGLILSPPGTIVSQEEDIVTVTDAEGRACGWAR

SEQ ID NO: 836959 - protein, 677 aa, Homo sapiens
TRVRVPASAAMADAEPEAGGGSEDGGGGGGPAPPGQSGSVARVAPLGPEQLRQVLEQVTKAQPPPPPPPFVLRDAARRLRDAGQQAALQRGRGTEPPRLPRLLPPQQLEAICVKVTSGETKGQERPMLLPTTIQPQTARKSQLPRGNSCLVGLHIASPQLLRVQPLVRTEPQSCFLSDLCQPPAQGFVQRPLPALQVVPAKRVPAPKAPDEQGSMLTPLSASDPLAVTSLSSSSAHPFISNLHTRHTEKLKKSLKVKTRSGRVSRPPKYKAKDYKFIKTEDLADGHLSDSDDYSELCVEEDEDQRERHALFDLSSCSLRPKSFKCQTCEKSYIGKGGLARHFKLNPGHGQLDPEMVLSEKASGSTLRGCTEERTLSLTSLGLSMPADPCEGGARSCLVTESARGGLQNGQSVDVEETLPSEPENGALLRSERYQGPRRRACSETLAESRTAVLQQRRAAQLPGGPAAAGEQRASPSKARLKEFLQQCDREDLVELALPQLAQVVTVYEFLLMKVEKDHLAKPFFPAIYKEFEELHKMVKKMCQDYLSSSGLCSQETLEINNDKVAESLGITEFLRKKEIHPDNLGPKHLSRDMDGEQLEGASSEKREREAAEEGLASVKRPRREALSNDTTESLAANSRGREKPRPLHALAAGTIVSQEEDIVTVTDAEGRACGWAR

SEQ ID NO: 836960 - protein, 862 aa, Homo sapiens
TRVRVPASAAMADAEPEAGGGSEDGGGGGGPAPPGQSGSVARVAPLGPEQLRQVLEQVTKAQPPPPPPPFVLRDAARRLRDAGQQAALQRGRGTEPPRLPRLLPPQQLEAICVKVTSGETKGQERPMLLPTTIQPQTARKSQLPRGNSCLVGLHIASPQLLRVQPLVRTEPQSCFLSDLCQPPAQGFVQRPLPALQVVPAKRVPAPKAPDEQGSMLTPLSASDPLAVTSLSSSSAHPFISNLHTRHTEKLKKSLKVKTRSGRVSRPPKYKAKDYKFIKTEDLADGHLSDSDDYSELCVEEDEDQRERHALFDLSSCSLRPKSFKCQTCEKSYIGKGGLARHFKLNPGHGQLDPEMVLSEKASGSTLRGCTEERTLSLTSLGLSMPADPCEGGARSCLVTESARGGLQFLQQCDREDLVELALPQLAQVVTVYEFLLMKVEKDHLAKPFFPAIYKEFEELHKMVKKMCQDYLSSSGLCSQETLEINNDKVAESLGITEFLRKKEIHPDNLGPKHLSRDMDGEQLEGASSEKREREAAEEGLASVKRPRREALSNDTTESLAANSRGREKPRPLHALAAGFSPPVNVTVSPRSEESHTTTVSGGNGSVFQAGPQLQALANLEARRGSIGAALSSRDVSGLPVYAQSGEPRRLTQAQVAAFPGENALEHSSDQDTWDSLRSPGFCSPLSSGGGAESLPPGGPGHAEAGHLGKVCDFHLNHQQPSPTSVLPTEVAAPPLEKILSVDSVAVDCAYRTVPKPGPQPGPHGSLLTEGCLRSLSGDLNRFPCGMEVHSGQRELESVVAVGEAMAFEISNGSHELLSQGQKQIFIQTSDGLILSPPGTIVSQEEDIVTVTDAEGRACGWAR

SEQ ID NO: 836961 - protein, 937 aa, Homo sapiens
TRVRVPASAAMADAEPEAGGGSEDGGGGGGPAPPGQSGSVARVAPLGPEQLRQVLEQVTKAQPPPPPPPFVLRDAARRLRDAGQQAALQRGRGTEPPRLPRLLPPQQLEAICVKVTSGETKGQERPMLLPTTIQPQTARKSQLPRGNSCLVGLHIASPQLLRVQPLVRTEPQSCFLSDLCQPPAQGFVQRPLPALQVVPAKRVPAPKAPDEQGSMLTPLSASDPLAVTSLSSSSAHPFISNLHTRHTEKLKKSLKVKTRSGRVSRPPKYKAKDYKFIKTEDLADGHLSDSDDYSELCVEEDEDQRERHALFDLSSCSLRPKSFKCQTCEKSYIGKGGLARHFKLNPGHGQLDPEMVLSEKASGSTLRGCTEERTLSLTSLGLSMPADPCEGGARSCLVTESARGGLQNGQSVDVEETLPSEPENGALLRSERYQGPRRRACSETLAESRTAVLQQRRAAQLPGGPAAAGEQRASPSKARLKEFLQQCDREDLVELALPQLAQVVTVYEFLLMKVEKDHLAKPFFPAIYKEFEELHKMVKKMCQDYLSSSGLCSQETLEINNDKVAESLGITEFLRKKEIHPDNLGPKHLSRDMDGEQLEGASSEKREREAAEEGLASVKRPRREALSNDTTESLAANSRGREKPRPLHALAAGFSPPVNVTVSPRSEESHTTTVSGGNGSVFQAGPQLQALANLEARRGSIGAALSSRDVSGLPVYAQSGEPRRLTQAQVAAFPGENALEHSSDQDTWDSLRSPGFCSPLSSGGGAESLPPGGPGHAEAGHLGKVCDFHLNHQQPSPTSVLPTEVAAPPLEKILSVDSVAVDCAYRTVPKPGPQPGPHGSLLTEGCLRSLSGDLNRFPCGMEVHSGQRELESVVAVGEAMAFEISNGSHELLSQGQKQIFIQTSDGLILSPPGTIVSQEEDIVTVTDAEGRACGWAR

SEQ ID NO: 836962 - protein, 677 aa, Homo sapiens; identical to SEQ ID NO: 836959

SEQ ID NO: 836963 - protein, 488 aa, Homo sapiens
MDERNRQVTFTKRKFGLMKKAYELSVLCDCEIALIIFNSSNKLFQYASTDMDKVLLKYTEYNEPHESRTNSDIVEALNKKEHRGCDSPDPDTSYVLTPHTEEKYKKINEEFDNMMRNHKIAPGLPPQNFSMSVTVPVTSPNALSYTNPGSSLVSPSLAASSTLTDSSMLSPPQTTLHRNVSPGAPQRPPSTGNAGGMLSTTDLTVPNGAGSSPVGNGFVNSRASPNLIGATGANSLGKVMPTKSPPPPGGGNLGMNSRKPDLRVVIPPSSKGMMPPLNTQRISSSQATQPLATPVVSVTTPSLPPQGLVYSAMPTAYNTDYSLTSADLSALQGFNSPGMLSLGQVSAWQQHHLGQAALSSLVAGGQLSQGSNLSINTNQNISIKSEPISPPRDRMTPSGFQQQQQQQQQQQPPPPPQPQPQPPQPQPRQEMGRSPVDSLSSSSSSYDGSDREDPRGDFHSPIVLGRPPNTEDRESPSVKRMRMDAWVT

SEQ ID NO: 836964 - protein, 496 aa, Homo sapiens
MDERNRQVTFTKRKFGLMKKAYELSVLCDCEIALIIFNSSNKLFQYASTDMDKVLLKYTEYNEPHESRTNSDIVEALNKKEHRGCDSPDPDTSYVLTPHTEEKYKKINEEFDNMMRNHKIAPGLPPQNFSMSVTVPVTSPNALSYTNPGSSLVSPSLAASSTLTDSSMLSPPQTTLHRNVSPGAPQRPPSTGNAGGMLSTTDLTVPNGAGSSPVGNGFVNSRASPNLIGATGANSLGKVMPTKSPPPPGGGNLGMNSRKPDLRVVIPPSSKGMMPPLSEEEELELNTQRISSSQATQPLATPVVSVTTPSLPPQGLVYSAMPTAYNTDYSLTSADLSALQGFNSPGMLSLGQVSAWQQHHLGQAALSSLVAGGQLSQGSNLSINTNQNISIKSEPISPPRDRMTPSGFQQQQQQQQQQQPPPPPQPQPQPPQPQPRQEMGRSPVDSLSSSSSSYDGSDREDPRGDFHSPIVLGRPPNTEDRESPSVKRMRMDAWVT

SEQ ID NO: 836965 - protein, 496 aa, Homo sapiens; identical to SEQ ID NO: 836964

SEQ ID NO: 836966 - protein, 486 aa, Homo sapiens
MDERNRQVTFTKRKFGLMKKAYELSVLCDCEIALIIFNSSNKLFQYASTDMDKVLLKYTEYNEPHESRTNSDIVETLRKKGLNGCESPDADDYFEHSPLSEDRFSKLNEDSDFIFKRGPPGLPPQNFSMSVTVPVTSPNALSYTNPGSSLVSPSLAASSTLTDSSMLSPPQTTLHRNVSPGAPQRPPSTGNAGGMLSTTDLTVPNGAGSSPVGNGFVNSRASPNLIGATGANSLGKVMPTKSPPPPGGGNLGMNSRKPDLRVVIPPSSKGMMPPLNTQRISSSQATQPLATPVVSVTTPSLPPQGLVYSAMPTAYNTDYSLTSADLSALQGFNSPGMLSLGQVSAWQQHHLGQAALSSLVAGGQLSQGSNLSINTNQNISIKSEPISPPRDRMTPSGFQQQQQQQQQQQPPPPPQPQPQPPQPQPRQEMGRSPVDSLSSSSSSYDGSDREDPRGDFHSPIVLGRPPNTEDRESPSVKRMRMDAWVT

SEQ ID NO: 836967 - protein, 496 aa, Homo sapiens; identical to SEQ ID NO: 836964

SEQ ID NO: 836968 - protein, 537 aa, Homo sapiens
MDERNRQVTFTKRKFGLMKKAYELSVLCDCEIALIIFNSSNKLFQYASTDMDKVLLKYTEYNEPHESRTNSDIVETLRKKGLNGCESPDADDYFEHSPLSEDRFSKLNEDSDFIFKRGPVKYFYFTSTFYLLILFVNFIIYAALNKKEHRGCDSPDPDTSYVLTPHTEEKYKKINEEFDNMMRNHKIAPGLPPQNFSMSVTVPVTSPNALSYTNPGSSLVSPSLAASSTLTDSSMLSPPQTTLHRNVSPGAPQRPPSTGNAGGMLSTTDLTVPNGAGSSPVGNGFVNSRASPNLIGATGANSLGKVMPTKSPPPPGGGNLGMNSRKPDLRVVIPPSSKGMMPPLNTQRISSSQATQPLATPVVSVTTPSLPPQGLVYSAMPTAYNTDYSLTSADLSALQGFNSPGMLSLGQVSAWQQHHLGQAALSSLVAGGQLSQGSNLSINTNPSGFQQQQQQQQQQQPPPPPQPQPQPPQPQPRQEMGRSPVDSLSSSSSSYDGSDREDPRGDFHSPIVLGRPPNTEDRESPSVKRMRMDAWVT

SEQ ID NO: 836969 - protein, 158 aa, Homo sapiens
MPTAYNTDYSLTSADLSALQGFNSPGMLSLGQVSAWQQHHLGQAALSSLVAGGQLSQGSNLSINTNPSGFQQQQQQQQQQQPPPPPQPQPQPPQPQPRQEMGRSPVDSLSSSSSSYDGSDREDPRGDFHSPIVLGRPPNTEDRESPSVKRMRMDAWVT

SEQ ID NO: 836970 - protein, 555 aa, Homo sapiens
MDERNRQVTFTKRKFGLMKKAYELSVLCDCEIALIIFNSSNKLFQYASTDMDKVLLKYTEYNEPHESRTNSDIVETLRKKGLNGCESPDADDYFEHSPLSEDRFSKLNEDSDFIFKRGPVKYFYFTSTFYLLILFVNFIIYAALNKKEHRGCDSPDPDTSYVLTPHTEEKYKKINEEFDNMMRNHKIAPGLPPQNFSMSVTVPVTSPNALSYTNPGSSLVSPSLAASSTLTDSSMLSPPQTTLHRNVSPGAPQRPPSTGNAGGMLSTTDLTVPNGAGSSPVGNGFVNSRASPNLIGATGANSLGKVMPTKSPPPPGGGNLGMNSRKPDLRVVIPPSSKGMMPPLNTQRISSSQATQPLATPVVSVTTPSLPPQGLVYSAMPTAYNTDYSLTSADLSALQGFNSPGMLSLGQVSAWQQHHLGQAALSSLVAGGQLSQGSNLSINTNQNISIKSEPISPPRDRMTPSGFQQQQQQQQQQQPPPPPQPQPQPPQPQPRQEMGRSPVDSLSSSSSSYDGSDREDPRGDFHSPIVLGRPPNTEDRESPSVKRMRMDAWVT

SEQ ID NO: 836971 - protein, 131 aa, Homo sapiens
MDERNRQVTFTKRKFGLMKKAYELSVLCDCEIALIIFNSSNKLFQYASTDMDKVLLKYTEYNEPHESRTNSDIVETLRKKGLNGCESPDADDYFEHSPLSEDRFSKLNEDSDFIFKRGPVSTFTLPLLFIC

SEQ ID NO: 836972 - protein, 67 aa, Homo sapiens
APVWGSVRGCPGESRAERGGSGRREALVAGPGCGVCAPASCSGDTELHFVKKEQEFSARIISKCTFC

SEQ ID NO: 836973 - protein, 496 aa, Homo sapiens; identical to SEQ ID NO: 836964

SEQ ID NO: 836974 - protein, 488 aa, Homo sapiens; identical to SEQ ID NO: 836963

SEQ ID NO: 836975 - protein, 496 aa, Homo sapiens; identical to SEQ ID NO: 836964

SEQ ID NO: 836976 - protein, 496 aa, Homo sapiens; identical to SEQ ID NO: 836964

SEQ ID NO: 836977 - protein, 117 aa, Homo sapiens
ESLSELLHGLRVEIHMKITKCNYDAILLFFGSGTCSYYVGITFLIIFDPERSRSKNQDKTAKQKVCLFLAKRKRREGVLTSQGRERRSLIPGRCWEQGLQKTCAFAVRTFCRDTPGS

SEQ ID NO: 836978 - protein, 244 aa, Homo sapiens
MDVATGQEVAIKQMNLQQQPKKELIINEILVMRENKNPNIVNYLDSYLVGDELWVVMEYLAGGSLTDVVTETCMDEGQIAAVCRECLQALEFLHSNQVIHRDIKSDNILLGMDGSVKLTDFGFCAQITPEQSKRSTMVGTPYWMAPEVVTRKAYGPKVDIWSLGIMAIEMIEGEPPYLNENPLRALYLIATNGTPELQNPEKLSAIFRDFLNRCLEMDVEKRGSAKELLQIITASFPETGQTVI

SEQ ID NO: 836979 - protein, 131 aa, Homo sapiens
FTHTPDVSSVWKMQSVMKGRKNILPAVALLQSTKWEEAMNINVLGDNIMLSPTPVIAPRPEHTKSVYTRSVIEPLPVTPTRDVATSPISPTENNTTPPDALTRNTEKQKKKPKMSDEEILEKLRSIVSVGR

SEQ ID NO: 836980 - protein, 258 aa, Homo sapiens
MDVATGQEVAIKQMNLQQQPKKELIINEILVMRENKNPNIVNYLDSYLVGDELWVVMEYLAGGSLTDVVTETCMDEGQIAAVCRECLQALEFLHSNQVIHRDIKSDNILLGMDGSVKLTDFGFCAQITPEQSKRSTMVGTPYWMAPEVVTRKAYGPKVDIWSLGIMAIEMIEGEPPYLNENPLRALYLIATNGTPELQNPEKLSAIFRDFLNRCLEMDVEKRGSAKELLQHQFLKIAKPLSSLTPLIAAAKEATKNNH

SEQ ID NO: 836981 - protein, 266 aa, Homo sapiens
MDVATGQEVAIKQMNLQQQPKKELIINEILVMRENKNPNIVNYLDSYLVGDELWVVMEYLAGGSLTDVVTETCMDEGQIAAVCRECLQALEFLHSNQVIHRDIKSDNILLGMDGSVKLTDFGFCAQITPEQSKRSTMVGTPYWMAPEVVTRKAYGPKVDIWSLGIMAIEMIEGEPPYLNENPLRALYLIATNGTPELQNPEKLSAIFRDFLNRCLEMDVEKRGSAKELLQVRKLRFQVFSNFSMIAASIPEDCQAPLQPHSTDCCS

SEQ ID NO: 836982 - protein, 266 aa, Homo sapiens; identical to SEQ ID NO: 836981

SEQ ID NO: 836983 - protein, 258 aa, Homo sapiens; identical to SEQ ID NO: 836980

SEQ ID NO: 836984 - protein, 258 aa, Homo sapiens; identical to SEQ ID NO: 836980

SEQ ID NO: 836985 - protein, 258 aa, Homo sapiens; identical to SEQ ID NO: 836980

SEQ ID NO: 836986 - protein, 258 aa, Homo sapiens; identical to SEQ ID NO: 836980

SEQ ID NO: 836987 - protein, 258 aa, Homo sapiens; identical to SEQ ID NO: 836980

SEQ ID NO: 836988 - protein, 202 aa, Homo sapiens
MDVATGQEVAIKQMNLQQQPKKELIINEILVMRENKNPNIVNYLDSYLVGDELWVVMEYLAGGSLTDVVTETCMDEGQIAAVCRECLQALEFLHSNQVIHRDIKSDNILLGMDGSVKLTDFGFCAQITPEQSKRSTMVGTPYWMAPEVVTRKAYGPKVDIWSLGIMAIEMIEGEPPYLNENPLRRLLVPLHLAHPNIGGIPP

SEQ ID NO: 836989 - protein, 206 aa, Homo sapiens
MSNNGLDIQDKPPAPPMRNTSTMIGAGSKDAGTLNHGSKPLPPNPEEKKKKDRFYRSILPGDKTNKKKEKERPEISLPSDFEHTIHVGFDAVTGEFTGMPEQWARLLQTSNITKSEQKKNPQAVLDVLEFYNSKKTSNSQKYMSFTDKSAEDYNSSNALNVKAVSETPAVPPVSEDEDDDDDDVIPNTSDCSTPRAHKICIHTVCD

SEQ ID NO: 836990 - protein, 206 aa, Homo sapiens; identical to SEQ ID NO: 836989

SEQ ID NO: 836991 - protein, 161 aa, Homo sapiens
MSNNGLDIQDKPPAPPMRNTSTMIGAGSKDAGTLNHGSKPLPPNPEEKKKKDRFYRSILPGDKTNKKKEKERPEISLPSDFEHTIHVGFDAVTGEFTGMPEQWARLLQTSNITKSEQKKNPQAVLDVLEFYNSKKTSNSQKYMSFTGMRTASRAVSARDGF

SEQ ID NO: 836992 - protein, 258 aa, Homo sapiens; identical to SEQ ID NO: 836980

SEQ ID NO: 836993 - protein, 90 aa, Homo sapiens
MLSPTPVIAPRPEHTKSVYTRSVIEPLPVTPTRDVATSPISPTENNTTPPDALTRNTEKQKKKPKMSDEEILEKLRSIVSVGRYVRGPKS

SEQ ID NO: 836994 - protein, 266 aa, Homo sapiens; identical to SEQ ID NO: 836981

SEQ ID NO: 836995 - protein, 266 aa, Homo sapiens; identical to SEQ ID NO: 836981

SEQ ID NO: 836996 - protein, 266 aa, Homo sapiens; identical to SEQ ID NO: 836981

SEQ ID NO: 836997 - protein, 258 aa, Homo sapiens; identical to SEQ ID NO: 836980

SEQ ID NO: 836998 - protein, 258 aa, Homo sapiens; identical to SEQ ID NO: 836980

SEQ ID NO: 836999 - protein, 258 aa, Homo sapiens; identical to SEQ ID NO: 836980

SEQ ID NO: 837000 - protein, 258 aa, Homo sapiens; identical to SEQ ID NO: 836980

SEQ ID NO: 837001 - protein, 258 aa, Homo sapiens; identical to SEQ ID NO: 836980

SEQ ID NO: 837002 - protein, 206 aa, Homo sapiens; identical to SEQ ID NO: 836989

SEQ ID NO: 837003 - protein, 206 aa, Homo sapiens; identical to SEQ ID NO: 836989

SEQ ID NO: 837004 - protein, 113 aa, Homo sapiens
ESASVLHLGSWRLSCQEPSPAESSGAGGAGALWVPGWAGRGAALRRKQSPEMPGLAFPTRLVAIQKLKLASVVALKCRSRNVDAHVVSIVEGSTRGCDNAEEGTFDLARQWQS

SEQ ID NO: 837005 - protein, 615 aa, Homo sapiens
MENFELINKSIANPTQVKERMEVCENHQHWHTVVKEACLTQGMTLYSYGMLLPCGVDQFHGTEYVCCPQTKIIGSVSKEEEEEDEEEEEEEDEEEDYDVYKSEFPTEADLEDFTEAAVDEDDEDEEEGEEVVEDRDYYYDTFKGDDYNEENPTEPGSDGTMSDKEITHDVKAVCSQEAMTGPCRAVMPRWYFDLSKGKCVRFIYGGCGGNRNNFESEDYCMAVCKAMIPPTPLPTNDVDVYFETSADDNEHARFQKAKEQLEIRHRNRMDRVKKEWEEAELQAKNLPKAERQTLIQHFQAMVKALEKEAASEKQQLVETHLARVEAMLNDRRRMALENYLAALQSDPPRPHRILQALRRYVRAENKDRLHTIRHYQHVLAVDPEKAAQMKSQVMTHLHVIEERRNQSLSLLYKVPYVAQEIQEEIDELLQEQRADMDQFTASISETPVDVRVSSEESEEIPPFHPFHPFPALPENEGSGVGEQDGGLIGAEEKVINSKNKVDENMVIDETLDVKEMIFNAERVGGLEEERESVGPLREDFSLSSSALIGLLVIAVAIATVIVISLVMLRKRQYGTISHGIVEVDPMLTPEERHLNKMQNHGYENPTYKYLEQMQI

SEQ ID NO: 837006 - protein, 539 aa, Homo sapiens
MEVCENHQHWHTVVKEACLTQGMTLYSYGMLLPCGVDQFHGTEYVCCPQTKIIGSVSKEEEEEDEEEEEEEDEEEDYDVYKSEFPTEADLEDFTEAAVDEDDEDEEEGEEVVEDRDYYYDTFKGDDYNEENPTEPGSDGTMSDKEITHDVKVPPTPLPTNDVDVYFETSADDNEHARFQKAKEQLEIRHRNRMDRVKKEWEEAELQAKNLPKAERQTLIQHFQAMVKALEKEAASEKQQLVETHLARVEAMLNDRRRMALENYLAALQSDPPRPHRILQALRRYVRAENKDRLHTIRHYQHVLAVDPEKAAQMKSQVMTHLHVIEERRNQSLSLLYKVPYVAQEIQEEIDELLQEQRADMDQFTASISETPVDVRVSSEESEEIPPFHPFHPFPALPENEGSGVGEQDGGLIGAEEKVINSKNKVDENMVIDETLDVKEMIFNAERVGGLEEERESVGPLREDFSLSSSALIGLLVIAVAIATVIVISLVMLRKRQYGTISHGIVEVDPMLTPEERHLNKMQNHGYENPTYKYLEQMQI

SEQ ID NO: 837007 - protein, 664 aa, Homo sapiens
MENFELINKSIANPTQVKERMEVCENHQHWHTVVKEACLTQGMTLYSYGMLLPCGVDQFHGTEYVCCPQTKIIGSVSKEEEEEDEEEEEEEDEEEDYDVYKSEFPTEADLEDFTEAAVDEDDEDEEEGEEVVEDPGNKYDTSLHIRKDKLSEFPTEADLEDFTEAAVDEDDEDEEEGEEVVEDRDYYYDTFKGDDYNEENPTEPGSDGTMSDKEITHDVKAVCSQEAMTGPCRAVMPRWYFDLSKGKCVRFIYGGCGGNRNNFESEDYCMAVCKAMIPPTPLPTNDVDVYFETSADDNEHARFQKAKEQLEIRHRNRMDRVKKEWEEAELQAKNLPKAERQTLIQHFQAMVKALEKEAASEKQQLVETHLARVEAMLNDRRRMALENYLAALQSDPPRPHRILQALRRYVRAENKDRLHTIRHYQHVLAVDPEKAAQMKSQVMTHLHVIEERRNQSLSLLYKVPYVAQEIQEEIDELLQEQRADMDQFTASISETPVDVRVSSEESEEIPPFHPFHPFPALPENEGSGVGEQDGGLIGAEEKVINSKNKVDENMVIDETLDVKEMIFNAERVGGLEEERESVGPLREDFSLSSSALIGLLVIAVAIATVIVISLVMLRKRQYGTISHGIVEVDPMLTPEERHLNKMQNHGYENPTYKYLEQMQI

SEQ ID NO: 837008 - protein, 571 aa, Homo sapiens
MENFELINKSIANPTQVKERMEVCENHQHWHTVVKEACLTQGMTLYSYGMLLPCGVDQFHGTEYVCCPQTKIIGSVSKEEEEEDEEEEEEEDEEEDYDVYKSEFPTEADLEDFTEAAVDEDDEDEEEGEEVVEDRDYYYDTFKGDDYNEENPTEPGSDGTMSDKEITHDVKVPPTPLPTNDVDVYFETSADDNEHARFQKAKEQLEIRHRNRMDRVKKEWEEAELQAKNLPKAERQTLIQHFQAMVKALEKEAASEKQQLVETHLARVEAMLNDRRRMALENYLAALQSDPPRPHRILQALRRYVRAENKDRLHTIRHYQHVLAVDPEKAAQMKSQVMTHLHVIEERRNQSLSLLYKVPYVAQEIQEEIDELLQEQRADMDQFTASISETPVDVRVSSEESEEIPPFHPFHPFPALPENEDTQPELYHPMKKGSGVGEQDGGLIGAEEKVINSKNKVDENMVIDETLDVKEMIFNAERVGGLEEERESVGPLREDFSLSSSALIGLLVIAVAIATVIVISLVMLRKRQYGTISHGIVEVDPMLTPEERHLNKMQNHGYENPTYKYLEQMQI

SEQ ID NO: 837009 - protein, 567 aa, Homo sapiens
MEVCENHQHWHTVVKEACLTQGMTLYSYGMLLPCGVDQFHGTEYVCCPQTKIIGSVSKEEEEEDEEEEEEEDEEEDYDVYKSEFPTEADLEDFTEAAVDEDDEDEEEGEEVVEDRDYYYDTFKGDDYNEENPTEPGSDGTMSDKEITHDVKVPPTPLPTNDVDVYFETSADDNEHARFQKAKEQLEIRHRNRMDRVKKEWEEAELQAKNLPKAERQTLIQHFQAMVKALEKEAASEKQQLVETHLARVEAMLNDRRRMALENYLAALQSDPPRPHRILQALRRYVRAENKDRLHTIRHYQHVLAVDPEKAAQMKSQVMTHLHVIEERRNQSLSLLYKVPYVAQEIQEEIDELLQEQRADMDQFTASISETPVDVRVSSEESEEIPPFHPFHPFPALPENEDTQPELYHPMKKAHVISLPELSVSRDPPGSGVGEQDGGLIGAEEKVINSKNKVDENMVIDETLDVKEMIFNAERVGGLEEERESVGPLREDFSLSSSALIGLLVIAVAIATVIVISLVMLRKRQYGTISHGIVEVDPMLTPEERHLNKMQNHGYENPTYKYLEQMQI

SEQ ID NO: 837010 - protein, 442 aa, Homo sapiens
MENFELINKSIANPTQVKERMEVCENHQHWHTVVKEACLTQGMTLYSYGMLLPCGVDQFHGTEYVCCPQTKIIGSVSKEEEEEDEEEEEEEDEEEDYDVYKSEFPTEADLEDFTEAAVDEDDEDEEEGEEVVEDRDYYYDTFKGDDYNEENPTEPGSDGTMSDKEITHDVKVPPTPLPTNDVDVYFETSADDNEHARFQKAKEQLEIRHRNRMDRVKKEWEEAELQAKNLPKAERQTLIQHFQAMVKALEKEAASEKQQLVETHLARVEAMLNDRRRMALENYLAALQSDPPRPHRILQALRRYVRAENKDRLHTIRHYQHVLAVDPEKAAQMKSQVMTHLHVIEERRNQSLSLLYKVPYVAQEIQEEIDELLQEQRADMDQFTASISETPVDVRVSSEESEEIPPFHPFHPFPALPENEGSGVGEQDGGLIGAEEKVINSH

SEQ ID NO: 837011 - protein, 508 aa, Homo sapiens
MENFELINKSIANPTQVKERMEVCENHQHWHTVVKEACLTQGMTLYSYGMLLPCGVDQFHGTEYVCCPQTKIIGSVSKEEEEEDEEEEEEEDEEEDYDVYKSEFPTEADLEDFTEAAVDEDDEDEEEGEEVVEDRDYYYDTFKGDDYNEENPTEPGSDGTMSDKEITHDVKVPPTPLPTNDVDVYFETSADDNEHARFQKAKEQLEIRHRNRMDRVKKEWEEAELQAKNLPKAERQTLIQHFQAMVKALEKEAASEKQQLVETHLARVEAMLNDRRRMALENYLAALQSDPPRPHRILQALRRYVRAENKDRLHTIRHYQHVLAVDPEKAAQMKSQVMTHLHVIEERRNQSLSLLYKVPYVAQEIQEEIGSGVGEQDGGLIGAEEKVINSKNKVDENMVIDETLDVKEMIFNAERVGGLEEERESVGPLREDFSLSSSALIGLLVIAVAIATVIVISLVMLRKRQYGTISHGIVEVDPMLTPEERHLNKMQNHGYENPTYKYLEQMQI

SEQ ID NO: 837012 - protein, 482 aa, Homo sapiens
MENFELINKSIANPTQVKERMEVCENHQHWHTVVKEACLTQGMTLYSYGMLLPCGVDQFHGTEYVCCPQTKIIGSVSKEEEEEDEEEEEEEDEEEDYDVYKSEFPTEADLEDFTEAAVDEDDEDEEEGEEVVEDRDYYYDTFKGDDYNEENPTEPGSDGTMSDKEITHDVKVPPTPLPTNDVDVYFETSADDNEHARFQKAKEQLEIRHRNRMDRVKKEWEEAELQAKNLPKAERQTLIQHFQAMVKALEKEAASEKQQLVETHLARVEAMLNDRRRMALENYLAALQSDPPRPHRILQALRRYVRAENKDRLHTIRHYQHVLAVDPEKAAQMKSQVMTHLHVIEERRNQSLSLLYKVPYVAQEIQEEIDELLQEQRADMDQFTASISETPVDVRVSSEESEEIPPFHPFHPFPALPENEGSGVGEQDGGLIGAEEKVINSKNKVDENMVDPMLTPEERHLNKMQNHGYENPTYKYLEQMQI

SEQ ID NO: 837013 - protein, 615 aa, Homo sapiens; identical to SEQ ID NO: 837005

SEQ ID NO: 837014 - protein, 615 aa, Homo sapiens; identical to SEQ ID NO: 837005

SEQ ID NO: 837015 - protein, 615 aa, Homo sapiens; identical to SEQ ID NO: 837005

SEQ ID NO: 837016 - protein, 615 aa, Homo sapiens; identical to SEQ ID NO: 837005

SEQ ID NO: 837017 - protein, 518 aa, Homo sapiens
MENFELINKSIANPTQVKERMEVCENHQHWHTVVKEACLTQGMTLYSYGMLLPCGVDQFHGTEYVCCPQTKIIGSVSKEEEEEDEEEEEEEDEEEDYDVYKSEFPTEADLEDFTEAAVDEDDEDEEEGEEVVEDRDYYYDTFKGDDYNEENPTEPGSDGTMSDKEITHDVKVPPTPLPTNDVDVYFETSADDNEHARFQKAKEQLEIRHRNRMDRVKKEWEEAELQAKNLPKAERQTLIQHFQAMVKALEKEAASEKQQLVETHLARVEAMLNDRRRMALENYLAALQSDPPRPHRILQALRRYVRAENKDRLHTIRHYQHVLAVDPEKAAQMKSQVMTHLHVIEERRNQSLSLLYKVPYVAQEIQEEIDELLQEQRADMDQFTASISETPVDVRVSSEESEEIPPFHPFHPFPALPENEDTQPELYHPMKKGSGVGEQDGGLIGAEEKVINSKNKVDENMCRLLLSGLSPKALTLGLYFVPSPPPPPVTGLVTFTQRRPHQGRRPLAQERTRGGLFV

SEQ ID NO: 837018 - protein, 484 aa, Homo sapiens
MENFELINKSIANPTQVKERMEVCENHQHWHTVVKEACLTQGMTLYSYGMLLPCGVDQFHGTEYVCCPQTKIIGSVSKEEEEEDEEEEEEEDEEEDYDVYKSEFPTEADLEDFTEAAVDEDDEDEEEGEEVVEDRDYYYDTFKGDDYNEENPTEPGSDGTMSDKEITHDVKAVCSQEAMTGPCRAVMPRWYFDLSKGKCVRFIYGGCGGNRNNFESEDYCMAVCKAMIPPTPLPTNDVDVYFETSADDNEHARFQKAKEQLEIRHRNRMDRVKKEWEEAELQAKNLPKAERQTLIQHFQAMVKALEKEAASEKQQLVETHLARVEAMLNDRRRMALENYLAALQSDPPRPHRILQALRRYVRAENKDRLHTIRHYQHVLAVDPEKAAQMKSQVMTHLHVIEERRNQSLSLLYKVPYVAQEIQEEIDELLQEQRADMDPRPLLCPLTSTPSCHRPCDIHSEKTTPRKAAAGPGENTGRFVCVKGK

SEQ ID NO: 837019 - protein, 424 aa, Homo sapiens
MENFELINKSIANPTQVKERMEVCENHQHWHTVVKEACLTQGMTLYSYGMLLPCGVDQFHGTEYVCCPQTKIIGSVSKEEEEEDEEEEEEEDEEEDYDVYKSEFPTEADLEDFTEAAVDEDDEDEEEGEEVVEDRDYYYDTFKGDDYNEENPTEPGSDGTMSDKEITHDVKAVCSQEAMTGPCRAVMPRWYFDLSKGKCVRFIYGGCGGNRNNFESEDYCMAVCKAMIPPTPLPTNDVDVYFETSADDNEHARFQKAKEQLEIRHRNRMDRVKKEWEEAELQAKNLPKAERQTLIQHFQAMVKALEKEAASEKQQLVETHLARVEAMLNDRRRMALENYLAALQSDPPRPHRILQALRRYVRAENKDRLHTIRHYQHVLAVDPEKAAQMKSQPPVTGLVTFTQRRPHQGRRPLAQERTRGGLFV

SEQ ID NO: 837020 - protein, 615 aa, Homo sapiens; identical to SEQ ID NO: 837005

SEQ ID NO: 837021 - protein, 538 aa, Homo sapiens
MENFELINKSIANPTQVKERMEVCENHQHWHTVVKEACLTQGMTLYSYGMLLPCGVDQFHGTEYVCCPQTKIIGSVSKEEEEEDEEEEEEEDEEEDYDVYKSEFPTEADLEDFTEAAVDEDDEDEEEGEEVVEDRDYYYDTFKGDDYNEENPTEPGSDGTMSDKEITHDVKVPPTPLPTNDVDVYFETSADDNEHARFQKAKEQLEIRHRNRMDRVKKEWEEAELQAKNLPKAERQTLIQHFQAMVKALEKEAASEKQQLVETHLARVEAMLNDRRRMALENYLAALQSDPPRPHRILQALRRYVRAENKDRLHTIRHYQHVLAVDPEKAAQMKSQVMTHLHVIEERRNQSLSLLYKVPYVAQEIQEEIDELLQEQRADMDQFTASISETPVDVRVSSEESEEIPPFHPFHPFPALPENEDTQPELYHPMKKGSGVGEQDGGLIGAEEKVINSKNKVDENMVIDETLDVKEMIFNAERVGGLEEERESVGPLREDFSLSSSALIGLLVIAVAIATVIVISLVMLRKRQYGTISHGIVE

SEQ ID NO: 837022 - protein, 462 aa, Homo sapiens
MENFELINKSIANPTQVKERMEVCENHQHWHTVVKEACLTQGMTLYSYGMLLPCGVDQFHGTEYVCCPQTKIIGSVSKEEEEEDEEEEEEEDEEEDYDVYKSEFPTEADLEDFTEAAVDEDDEDEEEGEEVVEDRDYYYDTFKGDDYNEENPTEPGSDGTMSDKEITHDVKVPPTPLPTNDVDVYFETSADDNEHARFQKAKEQLEIRHRNRMDRVKKEWEEAELQAKNLPKAERQTLIQHFQAMVKALEKEAASEKQQLVETHLARVEAMLNDRRRMALENYLAALQSDPPRPHRILQALRRYVRAENKDRLHTIRHYQHVLAVDPEKAAQMKSQVMTHLHVIEERRNQSLSLLYKVPYVAQEIQEEIDELLQEQRADMDQFTASISETPVDVRVSSEESEEIPPFHPFHPFPALPENEGSGVGEQDGGLIGAEEKVINSKNKVDENMVSLFFLLPNTLYF

SEQ ID NO: 837023 - protein, 432 aa, Homo sapiens
MENFELINKSIANPTQVKERMEVCENHQHWHTVVKEACLTQGMTLYSYGMLLPCGVDQFHGTEYVCCPQTKIIGSVSKEEEEEDEEEEEEEDEEEDYDVYKSEFPTEADLEDFTEAAVDEDDEDEEEGEEVVEDRDYYYDTFKGDDYNEENPTEPGSDGTMSDKEITHDVKVPPTPLPTNDVDVYFETSADDNEHARFQKAKEQLEIRHRNRMDRVKKEWEEAELQAKNLPKAERQTLIQHFQAMVKALEKEAASEKQQLVETHLARVEAMLNDRRRMALENYLAALQSDPPRPHRILQALRRYVRAENKDRLHTIRHYQHVLAVDPEKAAQMKSQVMTHLHVIEERRNQSLSLLYKVPYVAQEIQEEIDELLQEQRADMDQFTASISETPVDVRVSSEESEEIPPFHPFHPFPALPENEDTQPERALHVTK

SEQ ID NO: 837024 - protein, 432 aa, Homo sapiens
MENFELINKSIANPTQVKERMEVCENHQHWHTVVKEACLTQGMTLYSYGMLLPCGVDQFHGTEYVCCPQTKIIGSVSKEEEEEDEEEEEEEDEEEDYDVYKSEFPTEADLEDFTEAAVDEDDEDEEEGEEVVEDRDYYYDTFKGDDYNEENPTEPGSDGTMSDKEITHDVKVPPTPLPTNDVDVYFETSADDNEHARFQKAKEQLEIRHRNRMDRVKKEWEEAELQAKNLPKAERQTLIQHFQAMVKALEKEAASEKQQLVETHLARVEAMLNDRRRMALENYLAALQSDPPRPHRILQALRRYVRAENKDRLHTIRHYQHVLAVDPEKAAQMKSQVMTHLHVIEERRNQSLSLLYKVPYVAQEIQEEIDELLQEQRADMDQFTASISETPVDVRVSSEESEEIPPFHPFHPFPALPENEDLECRAEKRQVV

SEQ ID NO: 837025 - protein, 352 aa, Homo sapiens
MENFELINKSIANPTQVKERMEVCENHQHWHTVVKEACLTQGMTLYSYGMLLPCGVDQFHGTEYVCCPQTKIIGSVSKEEEEEDEEEEEEEDEEEDYDVYKSEFPTEADLEDFTEAAVDEDDEDEEEGEEVVEDRDYYYDTFKGDDYNEENPTEPGSDGTMSDKEITHDVKVPPTPLPTNDVDVYFETSADDNEHARFQKAKEQLEIRHRNRMDRVKKEWEEAELQAKNLPKAERQTLIQHFQAMVKALEKEAASEKQQLVETHLARVEHIFKKLIHNIVHVYGVHVIFCYMHRICNDQVRVFRVSITSSIYHIYMLGTFQVLSSSYFEICNTLLLTIVTLLCYKTLELISF

SEQ ID NO: 837026 - protein, 179 aa, Homo sapiens
MENFELINKSIANPTQVKERMEVCENHQHWHTVVKEACLTQGMTLYSYGMLLPCGVDQFHGTEYVCCPQTKIIGSVSKEEEEEDEEEEEEEDEEEDYDVYKSEFPTEADLEDFTEAAVDEDDEDEEEGEEVVEDRDYYYDTFKGDDYNEENPTEPGSDVPHPSDVLIPVTFLIPVTSKS

SEQ ID NO: 837027 - protein, 668 aa, Homo sapiens
MENFELINKSIANPTQVKERMEVCENHQHWHTVVKEACLTQGMTLYSYGMLLPCGVDQFHGTEYVCCPQTKIIGSVSKEEEEEDEEEEEEEDEEEDYDVYKSEFPTEADLEDFTEAAVDEDDEDEEEGEEVVEDRDYYYDTFKGDDYNEENPTEPGSDGTMSDKEITHDVKAVCSQEAMTGPCRAVMPRWYFDLSKGKCVRFIYGGCGGNRNNFESEDYCMAVCKAMRTEGVFRKKHFGPLSSPLWSQGGWKQPVFAVPFFQSSNVNQRLRLQRSGLYSTVPPTPLPTNDVDVYFETSADDNEHARFQKAKEQLEIRHRNRMDRVKKEWEEAELQAKNLPKAERQTLIQHFQAMVKALEKEAASEKQQLVETHLARVEAMLNDRRRMALENYLAALQSDPPRPHRILQALRRYVRAENKDRLHTIRHYQHVLAVDPEKAAQMKSQVMTHLHVIEERRNQSLSLLYKVPYVAQEIQEEIDELLQEQRADMDQFTASISETPVDVRVSSEESEEIPPFHPFHPFPALPENEGSGVGEQDGGLIGAEEKVINSKNKVDENMVIDETLDVKEMIFNAERVGGLEEERESVGPLREDFSLSSSALIGLLVIAVAIATVIVISLVMLRKRQYGTISHGIVEVDPMLTPEERHLNKMQNHGYENPTYKYLEQMQI

SEQ ID NO: 837028 - protein, 615 aa, Homo sapiens; identical to SEQ ID NO: 837005

SEQ ID NO: 837029 - protein, 615 aa, Homo sapiens; identical to SEQ ID NO: 837005

SEQ ID NO: 837030 - protein, 615 aa, Homo sapiens; identical to SEQ ID NO: 837005

SEQ ID NO: 837031 - protein, 505 aa, Homo sapiens
MENFELINKSIANPTQVKERMEVCENHQHWHTVVKEACLTQGMTLYSYGMLLPCGVDQFHGTEYVCCPQTKIIGSVSKEEEEEDEEEEEEEDEEEDYDVYKSEFPTEADLEDFTEAAVDEDDEDEEEGEEVVEDRDYYYDTFKGDDYNEENPTEPGSDGTMSDKEITHDVKVPPTPLPTNDVDVYFETSADDNEHARFQKAKEQLEIRHRNRMDRVKKEWEEAELQAKNLPKAERQTLIQHFQAMVKALEKEAASEKQQLVETHLARVEAMLNDRRRMALENYLAALQSDPPRPHRILQALRRYVRAENKDRLHTIRHYQHVLAVDPEKAAQMKSQVMTHLHVIEERRNQSLSLLYKVPYVAQEIQEEIDELLQEQRADMDQFTASISETPVDVRVSSEESEEIPPFHPFHPFPALPENEGSGVGEQDGGLIGAEEKVINSKNKVDENMVIDETLDVKEMIFNTWSRCRFRWQGARQPWRRDAGGPEDPTIPIDCQAAAAARGCV

SEQ ID NO: 837032 - protein, 615 aa, Homo sapiens; identical to SEQ ID NO: 837005

SEQ ID NO: 837033 - protein, 615 aa, Homo sapiens; identical to SEQ ID NO: 837005

SEQ ID NO: 837034 - protein, 506 aa, Homo sapiens
MENFELINKSIANPTQVKERMEVCENHQHWHTVVKEACLTQGMTLYSYGMLLPCGVDQFHGTEYVCCPQTKIIGSVSKEEEEEDEEEEEEEDEEEDYDVYKSEFPTEADLEDFTEAAVDEDDEDEEEGEEVVEDRDYYYDTFKGDDYNEENPTEPGSDGTMSDKEITHDVKVPPTPLPTNDVDVYFETSADDNEHARFQKAKEQLEIRHRNRMDRVKKEWEEAELQAKNLPKAERQTLIQHFQAMVKALEKEAASEKQQLVETHLARVEAMLNDRRRMALENYLAALQSDPPRPHRILQALRRYVRAENKDRLHTIRHYQHVLAVDPEKAAQMKSQVMTHLHVIEERRNQSLSLLYKVPYVAQEIQEEIDELLQEQRADMDQFTASISETPVDVRVSSEESEEIPPFHPFHPFPALPENEGSGVGEQDGGLIGAEEKVINSKNKVDENMCRLLLSGLSPKALTLGLYFVPSPPPPPVTGLVTFTQRRPHQGRRPLAQERTRGGLFV

SEQ ID NO: 837035 - protein, 373 aa, Homo sapiens
MEVCENHQHWHTVVKEACLTQGMTLYSYGMLLPCGVDQFHGTEYVCCPQTKIIGSVSKEEEEEDEEEEEEEDEEEDYDVYKSEFPTEADLEDFTEAAVDEDDEDEEEGEEVVEDRDYYYDTFKGDDYNEENPTEPGSDGTMSDKEITHDVKVPPTPLPTNDVDVYFETSADDNEHARFQKAKEQLEIRHRNRMDRVKKEWEEAELQAKNLPKAERQTLIQHFQAMVKALEKEAASEKQQLVETHLARVEAMLNDRRRMALENYLAALQSDPPRPHRILQALRRYVRAENKDRLHTIRHYQHVLAVDPEKAAQMKSQCRLLLSGLSPKALTLGLYFVPSPPPPPVTGLVTFTQRRPHQGRRPLAQERTRGGLFV

SEQ ID NO: 837036 - protein, 506 aa, Homo sapiens
MEVCENHQHWHTVVKEACLTQGMTLYSYGMLLPCGVDQFHGTEYVCCPQTKIIGSVSKEEEEEDEEEEEEEDEEEDYDVYKSEFPTEADLEDFTEAAVDEDDEDEEEGEEVVEDRDYYYDTFKGDDYNEENPTEPGSDGTMSDKEITHDVKVPPTPLPTNDVDVYFETSADDNEHARFQKAKEQLEIRHRNRMDRVKKEWEEAELQAKNLPKAERQTLIQHFQAMVKALEKEAASEKQQLVETHLARVEAMLNDRRRMALENYLAALQSDPPRPHRILQALRRYVRAENKDRLHTIRHYQHVLAVDPEKAAQMKSQVMTHLHVIEERRNQSLSLLYKVPYVAQEIQEEIDELLQEQRADMDQFTASISETPVDVRVSSEESEEIPPFHPFHPFPALPENEGSGVGEQDGGLIGAEEKVINSKNKVDENMVIDETLDVKEMIFNAERVGGLEEERESVGPLREDFSLSSSALIGLLVIAVAIATVIVISLVMLRKRQYGTISHGIVE

SEQ ID NO: 837037 - protein, 575 aa, Homo sapiens
  misc_feature (552)..(552): Xaa can be any naturally occurring amino acid
  misc_feature (565)..(565): Xaa can be any naturally occurring amino acid
MENFELINKSIANPTQVKERMEVCENHQHWHTVVKEACLTQGMTLYSYGMLLPCGVDQFHGTEYVCCPQTKIIGSVSKEEEEEDEEEEEEEDEEEDYDVYKSEFPTEADLEDFTEAAVDEDDEDEEEGEEVVEDRDYYYDTFKGDDYNEENPTEPGSDGTMSDKEITHDVKVPPTPLPTNDVDVYFETSADDNEHARFQKAKEQLEIRHRNRMDRVKKEWEEAELQAKNLPKAERQTLIQHFQAMVKALEKEAASEKQQLVETHLARVEAMLNDRRRMALENYLAALQSDPPRPHRILQALRRYVRAENKDRLHTIRHYQHVLAVDPEKAAQMKSQVMTHLHVIEERRNQSLSLLYKVPYVAQEIQEEIDELLQEQRADMDQFTASISETPVDVRVSSEESEEIPPFHPFHPFPALPENEDTQPELYHPMKKGSGVGEQDGGLIGAEEKVINSKNKVDENMVIDETLDVKEMIFNAERVGGLEEERESVGPLREDFSLSSSALIGLLVIAVAIATVIVISLVMLRKRQYGTISHGIVEVGSNCSPQEEGSTXTKMEGPIGVFEEXPTHKITLEGK

SEQ ID NO: 837038 - protein, 529 aa, Homo sapiens
MENFELINKSIANPTQVKERMEVCENHQHWHTVVKEACLTQGMTLYSYGMLLPCGVDQFHGTEYVCCPQTKIIGSVSKEEEEEDEEEEEEEDEEEDYDVYKSEFPTEADLEDFTEAAVDEDDEDEEEGEEVVEDRDYYYDTFKGDDYNEENPTEPGSDGTMSDKEITHDVKVPPTPLPTNDVDVYFETSADDNEHARFQKAKEQLEIRHRNRMDRVKKEWEEAELQAKNLPKAERQTLIQHFQAMVKALEKEAASEKQQLVETHLARVEAMLNDRRRMALENYLAALQSDPPRPHRILQALRRYVRAENKDRLHTIRHYQHVLAVDPEKAAQMKSQVMTHLHVIEERRNQSLSLLYKVPYVAQEIQEEIDELLQEQRADMDQFTASISETPVDVRVSSEESEEIPPFHPFHPFPALPENEDTQPELYHPMKKGSGVGEQDGGLIGAEEKVINSKNKVDENMIDETLPTNDVDVYFETSADDNEHARFQKAKEQLEIRHRNRMDRVKKEWEEAELQAKNLPKADEVADEG

SEQ ID NO: 837039 - protein, 440 aa, Homo sapiens
MENFELINKSIANPTQVKERMEVCENHQHWHTVVKEACLTQGMTLYSYGMLLPCGVDQFHGTEYVCCPQTKIIGSVSKEEEEEDEEEEEEEDEEEDYDVYKSEFPTEADLEDFTEAAVDEDDEDEEEGEEVVEDRDYYYDTFKGDDYNEENPTEPGSDGTMSDKEITHDVKVPPTPLPTNDVDVYFETSADDNEHARFQKAKEQLEIRHRNRMDRVKKEWEEAELQAKNLPKAERQTLIQHFQAMVKALEKEAASEKQQLVETHLARVEAMLNDRRRMALENYLAALQSDPPRPHRILQALRRYVRAENKDRLHTIRHYQHVLAVDPEKAAQMKSQVMTHLHVIEERRNQSLSLLYKVPYVAQEIQEEIACFLSPALSSSDELLQEQRADMDQFTASISETPVDVRVSSEESEEIPPFHPFHPFPALPENEGVYGRRCHF

SEQ ID NO: 837040 - protein, 223 aa, Homo sapiens
MENFELINKSIANPTQVKERMEVCENHQHWHTVVKEACLTQGMTLYSYGMLLPCGVDQFHGTEYVCCPQTKIIGSVSKEEEEEDEEEEEEEDEEEDYDVYKSEFPTEADLEDFTEAAVDEDDEDEEEGEEVVEDRDYYYDTFKGDDYNEENPTEPGSDGTMSDKEITHDVKAVCSQEAMTGPCRAVMPRWYFDLSKGKCVRFIYGGCSRWMTSVTQETAMSHI

SEQ ID NO: 837041 - protein, 718 aa, Homo sapiens
RCGSGIVKLLISIRAVRAGGGRRRACGFQPSTRALSVQTSQALGRRRAMAETKIIYHMDEEETPYLVKLPVAPERVTLADFKNVLSNRPVHAYKFFFKSMDQDFGVVKEEIFDDNAKLPCFNGRVVSWLVLAEGAHSDAGSQGTDSHTDLPPPLERTGGIGDSRPPSFHPNVASSRDGMDNETGTESMVSHRRERARRRNREEAARTNGHPRGDRRRDVGLPPDSASTALSSELESSSFVDSDEDGSTSRLSSSTEQSTSSRLIRKHKRRRRKQRLRQADRASSFSSITDSTMSLNIVTVTLNMERHHFLGISIVGQSNDRGDGGIYIGSIMKGGAVAADGRIEPGDMLLQVNDVNFENMSNDDAVRVLREIVSQTGPISLTVAKCWDPTPRSYFTVPRADPVRPIDPAAWLSHTAALTGALPRYELEEAPLTVKSDMSAVVRVMQLPDSGLEIRDRMWLKITIANAVIGADVVDWLYTHVEGFKERREARKYASSLLKHGFLRHTVNKITFSEQCYYVFGDLCSNLATLNLNSGSSGTSDQDTLAPLPHPAAPWPLGQGYPYQYPGPPPCFPPAYQDPGFSYGSGSTGSQQSEGSKSSGSTRSSRRAPGREKERRAAGAGGSGSESDHTAPSGVGSSWRERPAGQLSRGSSPRSQASATAPGLPPPHPTTKAYTVVGGPPGGPPVRELAAVPPELTGSRQSFQKAMGNPCEFFVDIM

SEQ ID NO: 837042 - protein, 718 aa, Homo sapiens; identical to SEQ ID NO: 837041

SEQ ID NO: 837043 - protein, 744 aa, Homo sapiens
RCGSGIVKLLISIRAVRAGGGRRRACGFQPSTRALSVQTSQALGRRRAMAETKIIYHMDEEETPYLVKLPVAPERVTLADFKNVLSNRPVHAYKFFFKSMDQDFGVVKEEIFDDNAKLPCFNGRVVSWLVLAEGAHSDAGSQGTDSHTDLPPPLERTGGIGDSRPPSFHPNVASSRDGMDNETGTESMVSHRRERARRRNREEAARTNGHPRGDRRRDVGLPPDSASTALSSELESSSFVDSDEDGSTSRLSSSTEQSTSSRLIRKHKRRRRKQRLRQADRASSFSSITDSTMSLNIVTVTLNMERHHFLGISIVGQSNDRGDGGIYIGSIMKGGAVAADGRIEPGDMLLQVNDVNFENMSNDDAVRVLREIVSQTGPISLTVAKCWDPTPRSYFTVPRADPVRPIDPAAWLSHTAALTGALPRYDGTSPCSSAVTRTSSSSLTSSVPGAPQLEEAPLTVKSDMSAVVRVMQLPDSGLEIRDRMWLKITIANAVIGADVVDWLYTHVEGFKERREARKYASSLLKHGFLRHTVNKITFSEQCYYVFGDLCSNLATLNLNSGSSGTSDQDTLAPLPHPAAPWPLGQGYPYQYPGPPPCFPPAYQDPGFSYGSGSTGSQQSEGSKSSGSTRSSRRAPGREKERRAAGAGGSGSESDHTAPSGVGSSWRERPAGQLSRGSSPRSQASATAPGLPPPHPTTKAYTVVGGPPGGPPVRELAAVPPELTGSRQSFQKAMGNPCEFFVDIM

SEQ ID NO: 837044 - protein, 687 aa, Homo sapiens
RCGSGIVKLLISIRAVRAGGGRRRACGFQPSTRALSVQTSQALGRRRAMAETKIIYHMDEEETPYLVKLPVAPERVTLADFKNVLSNRPVHAYKFFFKSMDQDFGVVKEEIFDDNAKLPCFNGRVVSWLVLAEGAHSDAGSQGTDSHTDLPPPLERTGGIGDSRPPSFHPNVASSRDGMDNETGTESMVSHRRERARRRNREEAARTNGHPRGDRRRDVGLPPDSASTALSSELESSSFVDSDEDGSTSRLSSSTEQSTSSRLIRKHKRRRRKQRLRQADRASSFSSITDSTMSLNIVTVTLNMERHHFLGISIVGQSNDRGDGGIYIGSIMKGGAVAADGRIEPGDMLLQVNDVNFENMSNDDAVRVLREIVSQTGPISLTVAKCWDPTPRSYFTVPRADPVRPIDPAAWLSHTAALTGALPRYELEEAPLTVKSDMSAVVRVMQLPDSGLEIRDRMWLKITIANAVIGADVVDWLYTHVEGFKERREARKYASSLLKHGFLRHTVNKITFSEQCYYVFGDLCSMAPVGLRIRTRWPRCPTRLPPGLWVRATPTSTRDPHPASRLPTRTRALAMAAAAPGVSRVKGAKAVGPPGAAAGPRAVRRSVGRRELGAVAVNRITRHRVGWGAAGESVRPASSAVAAAHAVRPRLPPRGSPRPTPRPRPIQWWGGHPGDPLSGSWLPSPRN

SEQ ID NO: 837045 - protein, 592 aa, Homo sapiens
RCGSGIVKLLISIRAVRAGGGRRRACGFQPSTRALSVQTSQALGRRRAMAETKIIYHMDEEETPYLVKLPVAPERVTLADFKNVLSNRPVHAYKFFFKSMDQDFGVVKEEIFDDNAKLPCFNGRVVSWLVLAEGAHSDAGSQGTDSHTDLPPPLERTGGIGDSRPPSFHPNVASSRDGMDNETGTESMVSHRRERARRRNREEAARTNGHPRGDRRRDVGLPPDSASTALSSELESSSFVDSDEDGSTSRLSSSTEQSTSSRLIRKHKRRRRKQRLRQADRASSFSSITDSTMSLNIVTVTLNMERHHFLGISIVGQSNDRGDGGIYIGSIMKGGAVAADGRIEPGDMLLQVNDVNFENMSNDDAVRVLREIVSQTGPISLTVAKCWDPTPRSYFTVPRADPVRPIDPAAWLSHTAALTGALPRYDGTSPCSSAVTRTSSSSLTSSVPGAPQLEEAPLTVKSDMSAVVRVMQLPDSGLEIRDRMWLKITIANAVIGADVVDWLYTHVEGFKERREARKYASSLLKHGFLRHTQGAPMCTAATGREVLGRWAVRWPVLGECTHCAHTSRPSWLLWPPRVCAVDTVSKSQRLDG

SEQ ID NO: 837046 - protein, 440 aa, Homo sapiens
RCGSGIVKLLISIRAVRAGGGRRRACGFQPSTRALSVQTSQALGRRRAMAETKIIYHMDEEETPYLVKLPVAPERVTLADFKNVLSNRPVHAYKFFFKSMDQDFGVVKEEIFDDNAKLPCFNGRVVSWLVLAEGAHSDAGSQGTDSHTDLPPPLERTGGIGDSRPPSFHPNVASSRDGMDNETGTESMVSHRRERARRRNREEAARTNGHPRGDRRRDVGLPPDSASTALSSELESSSFVDSDEDGSTSRLSSSTEQSTSSRLIRKHKRRRRKQRLRQADRASSFSSITDSTMSLNIVTVTLNMERHHFLGISIVGQSNDRGDGGIYIGSIMKGGAVAADGRIEPGDMLLQVNDVNFENMSNDDAVRVLREIVSQTGPISLTVAKCWDPTPRSYFTVPRADTVRWPNTVRWPNTVRWPNTVRWVGPTHRVSQDGLYLLTS

SEQ ID NO: 837047 - protein, 718 aa, Homo sapiens; identical to SEQ ID NO: 837041

SEQ ID NO: 837048 - protein, 800 aa, Homo sapiens
RCGSGIVKLLISIRAVRAGGGRRRACGFQPSTRALSVQTSQALGRRRAMAETKIIYHMDEEETPYLVKLPVAPERVTLADFKNVLSNRPVHAYKFFFKSMDQDFGVVKEEIFDDNAKLPCFNGRVVSWLVLAEGAHSDAGSQGTDSHTDLPPPLERTGGIGDSRPPSFHPNVASSRDGMDNETGTESMVSHRRERARRRNREEGTVVMSAQLWTPSLPGTPMSHVPTTAVPVPQPVAVLGWRHRPSEPTVELPAPRPTGMQHCPGSPKPMTSGRPCISSQPAAPTAARTNGHPRGDRRRDVGLPPDSASTALSSELESSSFVDSDEDGSTSRLSSSTEQSTSSRLIRKHKRRRRKQRLRQADRASSFSSITDSTMSLNIVTVTLNMERHHFLGISIVGQSNDRGDGGIYIGSIMKGGAVAADGRIEPGDMLLQVNDVNFENMSNDDAVRVLREIVSQTGPISLTVAKCWDPTPRSYFTVPRADPVRPIDPAAWLSHTAALTGALPRYELEEAPLTVKSDMSAVVRVMQLPDSGLEIRDRMWLKITIANAVIGADVVDWLYTHVEGFKERREARKYASSLLKHGFLRHTVNKITFSEQCYYVFGDLCSNLATLNLNSGSSGTSDQDTLAPLPHPAAPWPLGQGYPYQYPGPPPCFPPAYQDPGFSYGSGSTGSQQSEGSKSSGSTRSSRRAPGREKERRAAGAGGSGSESDHTAPSGVGSSWRERPAGQLSRGSSPRSQASATAPGLPPPHPTTKAYTVVGGPPGGPPVRELAAVPPELTGSRQSFQKAMGNPCEFFVDIM

SEQ ID NO: 837049 - protein, 430 aa, Homo sapiens
LGAGAGAWPRLMALPAERHHFLGISIVGQSNDRGDGGIYIGSIMKGGAVAADGRIEPGDMLLQVNDVNFENMSNDDAVRVLREIVSQTGPISLTVAKCWDPTPRSYFTVPRADPVRPIDPAAWLSHTAALTGALPRYELEEAPLTVKSDMSAVVRVMQLPDSGLEIRDRMWLKITIANAVIGADVVDWLYTHVEGFKERREARKYASSLLKHGFLRHTVNKITFSEQCYYVFGDLCSNLATLNLNSGSSGTSDQDTLAPLPHPAAPWPLGQGYPYQYPGPPPCFPPAYQDPGFSYGSGSTGSQQSEGSKSSGSTRSSRRAPGREKERRAAGAGGSGSESDHTAPSGVGSSWRERPAGQLSRGSSPRSQASATAPGLPPPHPTTKAYTVVGGPPGGPPVRELAAVPPELTGSRQSFQKAMGNPCEFFVDIM

SEQ ID NO: 837050 - protein, 435 aa, Homo sapiens
RCGSGIVKLLISIRAVRAGGGRRRACGFQPSTRALSVQTSQALGRRRAMAETKIIYHMDEEETPYLVKLPVAPERVTLADFKNVLSNRPVHAYKFFFKSMDQDFGVVKEEIFDDNAKLPCFNGRVVSWLVLAEGAHSDAGSQGTDSHTDLPPPLERTGGIGDSRPPSFHPNVASSRDGMDNETGTESMVSHRRERARRRNREEAARTNGHPRGDRRRDVGLPPDSASTALSSELESSSFVDSDEDGSTSRLSSSTEQSTSSRLIRKHKRRRRKQRLRQADRASSFSSITDSTMSLNIVTVTLNMERHHFLGISIVGQSNDRGDGGIYIGSIMKGGAVAADGRIEPGDMLLQVNDVNFENMSNDDAVRVLREIVSQTGPISLTVAKCWDPTPRSYFTVPRADPVRPIDPAAWLSHTAALTGALPRYGTCNPSYSGG

SEQ ID NO: 837051 - protein, 309 aa, Homo sapiens
APGRALSARAPRRRRAMAETKIIYHMDEEETPYLVKLPVAPERVTLADFKNVLSNRPVHAYKFFFKSMDQDFGVVKEEIFDDNAKLPCFNGRVVSWLVLAEGAHSDAGSQGTDSHTDLPPPLERTGGIGDSRPPSFHPNVASSRDGMDNETGTESMVSHRRERARRRNREEAARTNGHPRGDRRRDVGLPPDSASTALSSELESSSFVDSDEDGSTSRLSSSTEQSTSSRLIRKHKRRRRKQRLRQADRQGAPMCTAATGREVLGRWAVRWPVLGECTHCAHTSRPSWLLWPPRVCAVDTVSKSQRLDG

SEQ ID NO: 837052 - protein, 1559 aa, Homo sapiens
VAAAQGRSEGCGGVGYAHTLHLLPFAGSSVVLARARRTDRWTSGLVEMATLSLTVNSGDPPLGALLAVEHVKDDVSISVEEGKENILHVSENVIFTDVNSILRYLARVATTAGLYGSNLMEHTEIDHWLEFSATKLSSCDSFTSTINELNHCLSLRTYLVGNSLSLADLCVWATLKGNAAWQEQLKQKKAPVHVKRWFGFLEAQQAFQSVGTKWDVSTTKARVAPEKKQDVGKFVELPGAEMGKVTVRFPPEASGYLHIGHAKAALLNQHYQVNFKGKLIMRFDDTNPEKEKEDFEKVILEDVAMLHIKPDQFTYTSDHFETIMKYAEKLIQEGKAYVDDTPAEQMKAEREQRIESKHRKNPIEKNLQMWEEMKKGSQFGQSCCLRAKIDMSSNNGCMRDPTLYRCKIQPHPRTGNKYNVYPTYDFACPIVDSIEGVTHALRTTEYHDRDEQFYWIIEALGIRKPYIWEYSRLNLNNTVLSKRKLTWFVNEGLVDGWDDPRFPTVRGVLRRGMTVEGLKQFIAAQGSSRSVVNMEWDKIWAFNKKVIDPVAPRYVALLKKEVIPVNVPEAQEEMKEVAKHPKNPEVGLKPVWYSPKVFIEGADAETFSEGEMVTFINWGNLNITKIHKNADGKIISLDAKLNLENKDYKKTTKVTWLAETTHALPIPVICVTYEHLITKPVLGKDEDFKQYVNKNSKHEELMLGDPCLKDLKKGDIIQLQRRGFFICDQPYEPVSPYSCKEAPCVLIYIPDGHTKEMPTSGSKEKTKVEATKNETSAPFKERPTPSLNNNCTTSEDSLVLYNRVAVQGDVVRELKAKKAPKEDVDAAVKQLLSLKAEYKEKTGQEYKPGNPPAEIGQNISSNSSASILESKSLYDEVAAQGEVVRKLKAEKSPKAKINEAVECLLSLKAQYKEKTGKEYIPGQPPLSQSSDSSPTRNSEPAGLETPEAKVLFDKVASQGEVVRKLKTEKAPKDQVDIAVQELLQLKAQYKSLIGVEYKPVSATGAEDKDKKKKEKENKSEKQNKPQKQNDGQRKDPSKNQGGGLSSSGAGEGQGPKKQTRLGLEAKKEENLADWYSQVITKSEMIEYHDISGCYILRPWAYAIWEAIKDFFDAEIKKLGVENCYFPMFVSQSALEKEKTHVADFAPEVAWVTRSGKTELAEPIAIRPTSETVMYPAYAKWVQSHRDLPIKLNQWCNVVRWEFKHPQPFLRTREFLWQEGHSAFATMEEAAEEVLQILDLYAQVYEELLAIPVVKGRKTEKEKFAGGDYTTTIEAFISASGRAIQGGTSHHLGQNFSKMFEIVFEDPKIPGEKQFAYQNSWGLTTRTIGVMTMVHGDNMGLVLPPRVACVQVVIIPCGITNALSEEDKEALIAKCNDYRRRLLSVNIRVRADLRDNYSPGWKFNHWELKGVPIRLEVGPRDMKSCQFVAVRRDTGEKLTVAENEAETKLQAILEDIQVTLFTRASEDLKTHMVVANTMEDFQKILDSGKIVQIPFCGEIDCEDWIKKTTARDQDLEPGAPSMGAKSLCIPFKPLCELQPGAKCVCGKNPAKYYTLFGRSY

SEQ ID NO: 837053 - protein, 1318 aa, Homo sapiens
MGKVTVRFPPEASGYLHIGHAKAALLNQHYQVNFKGKLIMRFDDTNPEKEKEDFEKVILEDVAMLHIKPDQFTYTSDHFETIMKYAEKLIQEGKAYVDDTPAEQMKAEREQRIESKHRKNPIEKNLQMWEEMKKGSQFGQSCCLRAKIDMSSNNGCMRDPTLYRCKIQPHPRTGNKYNVYPTYDFACPIVDSIEGVTHALRTTEYHDRDEQFYWIIEALGIRKPYIWEYSRLNLNNTVLSKRKLTWFVNEGLVDGWDDPRFPTVRGVLRRGMTVEGLKQFIAAQGSSRSVVNMEWDKIWAFNKKVIDPVAPRYVALLKKEVIPVNVPEAQEEMKEVAKHPKNPEVGLKPVWYSPKVFIEGADAETFSEGEMVTFINWGNLNITKIHKNADGKIISLDAKLNLENKDYKKTTKVTWLAETTHALPIPVICVTYEHLITKPVLGKDEDFKQYVNKNSKHEELMLGDPCLKDLKKGDIIQLQRRGFFICDQPYEPVSPYSCKEAPCVLIYIPDGHTKEMPTSGSKEKTKVEATKNETSAPFKERPTPSLNNNCTTSEDSLVLYNRVAVQGDVVRELKAKKAPKEDVDAAVKQLLSLKAEYKEKTGQEYKPGNPPAEIGQNISSNSSASILESKSLYDEVAAQGEVVRKLKAEKSPKAKINEAVECLLSLKAQYKEKTGKEYIPGQPPLSQSSDSSPTRNSEPAGLETPEAKVLFDKVASQGEVVRKLKTEKAPKDQVDIAVQELLQLKAQYKSLIGVEYKPVSATGAEDKDKKKKEKENKSEKQNKPQKQNDGQRKDPSKNQGGGLSSSGAGEGQGPKKQTRLGLEAKKEENLADWYSQVITKSEMIEYHDISGCYILRPWAYAIWEAIKDFFDAEIKKLGVENCYFPMFVSQSALEKEKTHVADFAPEVAWVTRSGKTELAEPIAIRPTSETVMYPAYAKWVQSHRDLPIKLNQWCNVVRWEFKHPQPFLRTREFLWQEGHSAFATMEEAAEEVLQILDLYAQVYEELLAIPVVKGRKTEKEKFAGGDYTTTIEAFISASGRAIQGGTSHHLGQNFSKMFEIVFEDPKIPGEKQFAYQNSWGLTTRTIGVMTMVHGDNMGLVLPPRVACVQVVIIPCGITNALSEEDKEALIAKCNDYRRRLLSVNIRVRADLRDNYSPGWKFNHWELKGVPIRLEVGPRDMKSCQFVAVRRDTGEKLTVAENEAETKLQAILEDIQVTLFTRASEDLKTHMVVANTMEDFQKILDSGKIVQIPFCGEIDCEDWIKKTTARDQDLEPGAPSMGAKSLCIPFKPLCELQPGAKCVCGKNPAKYYTLFGRSY

SEQ ID NO: 837054 - protein, 1559 aa, Homo sapiens; identical to SEQ ID NO: 837052

SEQ ID NO: 837055 - protein, 972 aa, Homo sapiens
RLVEAGVNRPRIEGADAETFSEGEMVTFINWGNLNITKIHKNADGKIISLDAKLNLENKDYKKTTKVTWLAETTHALPIPVICVTYEHLITKPVLGKDEDFKQYVNKNSKHEELMLGDPCLKDLKKGDIIQLQRRGFFICDQPYEPVSPYSCKEAPCVLIYIPDGHTKEMPTSGSKEKTKVEATKNETSAPFKERPTPSLNNNCTTSEDSLVLYNRVAVQGDVVRELKAKKAPKEDVDAAVKQLLSLKAEYKEKTGQEYKPGNPPAEIGQNISSNSSASILESKSLYDEVAAQGEVVRKLKAEKSPKAKINEAVECLLSLKAQYKEKTGKEYIPGQPPLSQSSDSSPTRNSEPAGLETPEAKVLFDKVASQGEVVRKLKTEKAPKDQVDIAVQELLQLKAQYKSLIGVEYKPVSATGAEDKDKKKKEKENKSEKQNKPQKQNDGQRKDPSKNQGGGLSSSGAGEGQGPKKQTRLGLEAKKEENLADWYSQVITKSEMIEYHDISGCYILRPWAYAIWEAIKDFFDAEIKKLGVENCYFPMFVSQSALEKEKTHVADFAPEVAWVTRSGKTELAEPIAIRPTSETVMYPAYAKWVQSHRDLPIKLNQWCNVVRWEFKHPQPFLRTREFLWQEGHSAFATMEEAAEEVLQILDLYAQVYEELLAIPVVKGRKTEKEKFAGGDYTTTIEAFISASGRAIQGGTSHHLGQNFSKMFEIVFEDPKIPGEKQFAYQNSWGLTTRTIGVMTMVHGDNMGLVLPPRVACVQVVIIPCGITNALSEEDKEALIAKCNDYRRRLLSVNIRVRADLRDNYSPGWKFNHWELKGVPIRLEVGPRDMKSCQFVAVRRDTGEKLTVAENEAETKLQAILEDIQVTLFTRASEDLKTHMVVANTMEDFQKILDSGKIVQIPFCGEIDCEDWIKKTTARDQDLEPGAPSMGAKSLCIPFKPLCELQPGAKCVCGKNPAKYYTLFGRSY

SEQ ID NO: 837056 - protein, 1510 aa, Homo sapiens
VAAAQGRSEGCGGVGYAHTLHLLPFAGSSVVLARARRTDRWTSGLVEMATLSLTVNSGDPPLGALLAVEHVKDDVSISVEEGKENILHVSENVIFTDVNSILRYLARVATTAGLYGSNLMEHTEIDHWLEFSATKLSSCDSFTSTINELNHCLSLRTYLVGNSLSLADLCVWATLKGNAAWQEQLKQKKAPVHVKRWFGFLEAQQAFQSVGTKWDVSTTKARVAPEKKQDVGKFVELPGAEMGKVTVRFPPEASGYLHIGHAKAALLNQHYQVNFKGKLIMRFDDTNPEKEKEDFEKVILEDVAMLHIKPDQFTYTSDHFETIMKYAEKLIQEGKAYVDDTPAEQMKAEREQRIESKHRKNPIEKNLQMWEEMKKGSQFGQSCCLRAKIDMSSNNGCMRDPTLYRCKIQPHPRTGNKYNVYPTYDFACPIVDSIEGVTHALRTTEYHDRDEQFYWIIEALGIRKPYIWEYSRLNLNNTVLSKRKLTWFVNEGLVDGWDDPRFPTVRGVLRRGMTVEGLKQFIAAQGSSRSVVNMEWDKIWAFNKKVIDPVAPRYVALLKKEVIPVNVPEAQEEMKEVAKHPKNPEVGLKPVWYSPKVFIEGADAETFSEGEMVTFINWGNLNITKIHKNADGKIISLDAKLNLENKDYKKTTKVTWLAETTHALPIPVICVTYEHLITKPVLGKDEDFKQYVNKNSKHEELMLGDPCLKDLKKGDIIQLQRRGFFICDQPYEPVSPYSCKEAPCVLIYIPDGHTKEMPTSGSKEKTKVEATKNETSAPFKERPTPSLNNNCTTSEDSLVLYNRVAVQGDVVRELKAKKAPKEDVDAAVKQLLSLKAEYKEKTGQEYKPGNPPAEIGQNISSNSSASILESKSLYDEVAAQGEVVRKLKAEKSPKAKINEAVECLLSLKAQYKEKTGKEYIPGQPPLSQSSDSSPTRNSEPAGLETPEAKVLFDKVASQGEVVRKLKTEKAPKDQVDIAVQELLQLKAQYKSLIGVEYKPVSATGAEDKDKKKKEKENKSEKQNKPQKQNDGQRKDPSKNQGGGLSSSGAGEGQGPKKQTRLGLEAKKEENLADWYSQVITKSEMIEYHDISGCYILRPWAYAIWEAIKDFFDAEIKKLGVENCYFPMFVSQSALEKEKTHVADFAPEVAWVTRSGKTELAEPIAIRPTSETVMYPAYAKWVQSHRDLPIKLNQWCNVVRWEFKHPQPFLRTREFLWQEGHSAFATMEEAAEEVLQILDLYAQVYEELLAIPVVKGRKTEKEKFAGGDYTTTIEAFISASGRAIQGGTSHHLGQNFSKMFEIVFEDPKIPGEKQFAYQNSWGLTTRTIGVMTMVHGDNMGLVLPPRVACVQVVIIPCGITNALSEEDKEALIAKCNDYRRRLLSVNIRVRADLRDNYSPGWKFNHWELKGVPIRLEVGPRDMKSCQFVAVRRDTGEKLTVAENEAETKLQAILEDIQVTLFTRASEDLKTHMVVANTMEDFQKILDSGKIVQIPFCGEIDCEDWIKKTTAR

SEQ ID NO: 837057 - protein, 1413 aa, Homo sapiens
VAAAQGRSEGCGGVGYAHTLHLLPFAGSSVVLARARRTDRWTSGLVEMATLSLTVNSGDPPLGALLAVEHVKDDVSISVEEGKENILHVSENVIFTDVNSILRYLARVATTAGLYGSNLMEHTEIDHWLEFSATKLSSCDSFTSTINELNHCLSLRTYLVGNSLSLADLCVWATLKGNAAWQEQLKQKKAPVHVKRWFGFLEAQQAFQSVGTKWDVSTTKARVAPEKKQDVGKFVELPGAEMGKVTVRFPPEASGYLHIGHAKAALLNQHYQVNFKGKLIMRFDDTNPEKEKEDFEKVILEDVAMLHIKPDQFTYTSDHFETIMKYAEKLIQEGKAYVDDTPAEQMKAEREQRIESKHRKNPIEKNLQMWEEMKKGSQFGQSCCLRAKIDMSSNNGCMRDPTLYRCKIQPHPRTGNKYNVYPTYDFACPIVDSIEGVTHALRTTEYHDRDEQFYWIIEALGIRKPYIWEYSRLNLNNTVLSKRKLTWFVNEGLVDGWDDPRFPTVRGVLRRGMTVEGLKQFIAAQGSSRSVVNMEWDKIWAFNKKVIDPVAPRYVALLKKEVIPVNVPEAQEEMKEVAKHPKNPEVGLKPVWYSPKVFIEGADAETFSEGEMVTFINWGNLNITKIHKNADGKIISLDAKLNLENKDYKKTTKVTWLAETTHALPIPVICVTYEHLITKPVLGKDEDFKQYVNKNSKHEELMLGDPCLKDLKKGDIIQLQRRGFFICDQPYEPVSPYSCKEAPCVLIYIPDGHTKEMPTSGSKEKTKVEATKNETSAPFKERPTPSLNNNCTTSEDSLVLYNRVAVQGDVVRELKAKKAPKEDVDAAVKQLLSLKAEYKEKTGQEYKPGNPPAEIGQNISSNSSASILESKSLYDEVAAQGEVVRKLKAEKSPKAKINEAVECLLSLKAQYKEKTGKEYIPGQPPLSQSSDSSPTRNSEPAGLETPEAKVLFDKVASQGEVVRKLKTEKAPKDQVDIAVQELLQLKAQYKSLIGVEYKPVSATGAEDKDKKKKEKENKSEKQNKPQKQNDGQRKDPSKNQGGGLSSSGAGEGQGPKKQTRLGLEAKKEENLADWYSQVITKSEMIEYHDISGCYILRPWAYAIWEAIKDFFDAEIKKLGVENCYFPMFVSQSALEKEKTHVADFAPEVAWVTRSGKTELAEPIAIRPTSETVMYPAYAKWVQSHRDLPIKLNQWCNVVRWEFKHPQPFLRTREFLWQEGHSAFATMEEAAEEVLQILDLYAQVYEELLAIPVVKGRKTEKEKFAGGDYTTTIEAFISASGRAIQGGTSHHLGQNFSKMFEIVFEDPKIPGEKQFAYQNSWGLTTRTIGVMTMVHGDNMGLVLPPRVACVQVVIIPCGITNALSEEDKEALIAKCNDYRRRLLSVNIRVRADLRDNYSPGWKFNHWELKGVPID

SEQ ID NO: 837058 - protein, 478 aa, Homo sapiens
GLVRSEVLGCGCYILRPWAYAIWEAIKDFFDAEIKKLGVENCYFPMFVSQSALEKEKTHVADFAPEVAWVTRSGKTELAEPIAIRPTSETVMYPAYAKWVQSHRDLPIKLNQWCNVVRWEFKHPQPFLRTREFLWQEGHSAFATMEEAAEEVLQILDLYAQVYEELLAIPVVKGRKTEKEKFAGGDYTTTIEAFISASGRAIQGGTSHHLGQNFSKMFEIVFEDPKIPGEKQFAYQNSWGLTTRTIGVMTMVHGDNMGLVLPPRVACVQVVIIPCGITNALSEEDKEALIAKCNDYRRRLLSVNIRVRADLRDNYSPGWKFNHWELKGVPIRLEVGPRDMKSCQFVAVRRDTGEKLTVAENEAETKLQAILEDIQVTLFTRASEDLKTHMVVANTMEDFQKILDSGKIVQIPFCGEIDCEDWIKKTTARDQDLEPGAPSMGAKSLCIPFKPLCELQPGAKCVCGKNPAKYYTLFGRSY

SEQ ID NO: 837059 - protein, 1215 aa, Homo sapiens
  misc_feature (1210)..(1210): Xaa can be any naturally occurring amino acid
VAAAQGRSEGCGGVGYAHTLHLLPFAGSSVVLARARRTDRWTSGLVEMATLSLTVNSGDPPLGALLAVEHVKDDVSISVEEGKENILHVSENVIFTDVNSILRYLARVATTAGLYGSNLMEHTEIDHWLEFSATKLSSCDSFTSTINELNHCLSLRTYLVGNSLSLADLCVWATLKGNAAWQEQLKQKKAPVHVKRWFGFLEAQQAFQSVGTKWDVSTTKARVAPEKKQDVGKFVELPGAEMGKVTVRFPPEASGYLHIGHAKAALLNQHYQVNFKGKLIMRFDDTNPEKEKEDFEKVILEDVAMLHIKPDQFTYTSDHFETIMKYAEKLIQEGKAYVDDTPAEQMKAEREQRIESKHRKNPIEKNLQMWEEMKKGSQFGQSCCLRAKIDMSSNNGCMRDPTLYRCKIQPHPRTGNKYNVYPTYDFACPIVDSIEGVTHALRTTEYHDRDEQFYWIIEALGIRKPYIWEYSRLNLNNTVLSKRKLTWFVNEGLVDGWDDPRFPTVRGVLRRGMTVEGLKQFIAAQGSSRSVVNMEWDKIWAFNKKVIDPVAPRYVALLKKEVIPVNVPEAQEEMKEVAKHPKNPEVGLKPVWYSPKVFIEGADAETFSEGEMVTFINWGNLNITKIHKNADGKIISLDAKLNLENKDYKKTTKVTWLAETTHALPIPVICVTYEHLITKPVLGKDEDFKQYVNKNSKHEELMLGDPCLKDLKKGDIIQLQRRGFFICDQPYEPVSPYSCKEAPCVLIYIPDGHTKEMPTSGSKEKTKVEATKNETSAPFKERPTPSLNNNCTTSEDSLVLYNRVAVQGDVVRELKAKKAPKEDVDAAVKQLLSLKAEYKEKTGQEYKPGNPPAEIGQNISSNSSASILESKSLYDEVAAQGEVVRKLKAEKSPKAKINEAVECLLSLKAQYKEKTGKEYIPGQPPLSQSSDSSPTRNSEPAGLETPEAKVLFDKVASQGEVVRKLKTEKAPKDQVDIAVQELLQLKAQYKSLIGVEYKPVSATGAEDKDKKKKEKENKSEKQNKPQKQNDGQRKDPSKNQGGGLSSSGAGEGQGPKKQTRLGLEAKKEENLADWYSQVITKSEMIEYHDISGCYILRPWAYAIWEAIKDFFDAEIKKLGVENCYFPMFVSQSSDSSPTRNSEPAGLETPEAKVLFDKVASQGEVVRKLKTEKAPKDQVDIAVQELLQLKAQYKSLIGVEYKPVSATGAEXKDKKK

SEQ ID NO: 837060 - protein, 428 aa, Homo sapiens
VAAAQGRSEGCGGVGYAHTLHLLPFAGSSVVLARARRTDRWTSGLVEMATLSLTVNSGDPPLGALLAVEHVKDDVSISVEEGKENILHVSENVIFTDVNSILRYLARVATTAGLYGSNLMEHTEIDHWLEFSATKLSSCDSFTSTINELNHCLSLRTYLVGNSLSLADLCVWATLKGNAAWQEQLKQKKAPVHVKRWFGFLEAQQAFQSVGTKWDVSTTKARVAPEKKQDVGKFVELPGAEMGKVTVRFPPEASGYLHIGHAKAALLNQHYQVNFKGKLIMRFDDTNPEKEKEDFEKVILEDVAMLHIKPDQFTYTSDHFETIMKYAEKLIQEGKAYVDDTPAEQMKAEREQRIESKHRKNPIEKNLQMWEEMKKGSQFGQSCCLRAKIDMSSNNGCMRDPTLYRCKIQPHPRTGNKYNGLPHHNGFL

SEQ ID NO: 837061 - protein, 72 aa, Homo sapiens
DSARGREEVLQILDLYAQVYEELLAIPVVKGRKTEKEKFAGGDYTTTIEAFISASGRAIQGGTSHHLGQRLQ

SEQ ID NO: 837062 - protein, 1522 aa, Homo sapiens [sequence omitted]

SEQ ID NO: 837063 - protein, 1559 aa, Homo sapiens; identical to SEQ ID NO: 837052

SEQ ID NO: 837064 - protein, 954 aa, Homo sapiens
AARHFFLCIFVMLRLPQFIKIHKNADGKIISLDAKLNLENKDYKKTTKVTWLAETTHALPIPVICVTYEHLITKPVLGKDEDFKQYVNKNSKHEELMLGDPCLKDLKKGDIIQLQRRGFFICDQPYEPVSPYSCKEAPCVLIYIPDGHTKEMPTSGSKEKTKVEATKNETSAPFKERPTPSLNNNCTTSEDSLVLYNRVAVQGDVVRELKAKKAPKEDVDAAVKQLLSLKAEYKEKTGQEYKPGNPPAEIGQNISSNSSASILESKSLYDEVAAQGEVVRKLKAEKSPKAKINEAVECLLSLKAQYKEKTGKEYIPGQPPLSQSSDSSPTRNSEPAGLETPEAKVLFDKVASQGEVVRKLKTEKAPKDQVDIAVQELLQLKAQYKSLIGVEYKPVSATGAEDKDKKKKEKENKSEKQNKPQKQNDGQRKDPSKNQGGGLSSSGAGEGQGPKKQTRLGLEAKKEENLADWYSQVITKSEMIEYHDISGCYILRPWAYAIWEAIKDFFDAEIKKLGVENCYFPMFVSQSALEKEKTHVADFAPEVAWVTRSGKTELAEPIAIRPTSETVMYPAYAKWVQSHRDLPIKLNQWCNVVRWEFKHPQPFLRTREFLWQEGHSAFATMEEAAEEVLQILDLYAQVYEELLAIPVVKGRKTEKEKFAGGDYTTTIEAFISASGRAIQGGTSHHLGQNFSKMFEIVFEDPKIPGEKQFAYQNSWGLTTRTIGVMTMVHGDNMGLVLPPRVACVQVVIIPCGITNALSEEDKEALIAKCNDYRRRLLSVNIRVRADLRDNYSPGWKFNHWELKGVPIRLEVGPRDMKSCQFVAVRRDTGEKLTVAENEAETKLQAILEDIQVTLFTRASEDLKTHMVVANTMEDFQKILDSGKIVQIPFCGEIDCEDWIKKTTARDQDLEPGAPSMGAKSLCIPFKPLCELQPGAKCVCGKNPAKYYTLFGRSY

SEQ ID NO: 837065 - protein, 606 aa, Homo sapiens
LATLPLLPPRELKTEKAPKDQVDIAVQELLQLKAQYKSLIGVEYKPVSATGAEDKDKKKKEKENKSEKQNKPQKQNDGQRKDPSKNQGGGLSSSGAGEGQGPKKQTRLGLEAKKEENLADWYSQVITKSEMIEYHDISGCYILRPWAYAIWEAIKDFFDAEIKKLGVENCYFPMFVSQSALEKEKTHVADFAPEVAWVTRSGKTELAEPIAIRPTSETVMYPAYAKWVQSHRDLPIKLNQWCNVVRWEFKHPQPFLRTREFLWQEGHSAFATMEEAAEEVLQILDLYAQVYEELLAIPVVKGRKTEKEKFAGGDYTTTIEAFISASGRAIQGGTSHHLGQNFSKMFEIVFEDPKIPGEKQFAYQNSWGLTTRTIGVMTMVHGDNMGLVLPPRVACVQVVIIPCGITNALSEEDKEALIAKCNDYRRRLLSVNIRVRADLRDNYSPGWKFNHWELKGVPIRLEVGPRDMKSCQFVAVRRDTGEKLTVAENEAETKLQAILEDIQVTLFTRASEDLKTHMVVANTMEDFQKILDSGKIVQIPFCGEIDCEDWIKKTTARDQDLEPGAPSMGAKSLCIPFKPLCELQPGAKCVCGKNPAKYYTLFGRSY

SEQ ID NO: 837066 - protein, 476 aa, Homo sapiens [sequence omitted]

SEQ ID NO: 837067 - protein, 1006 aa, Homo sapiens
  misc_feature (984)..(984): Xaa can be any naturally occurring amino acid
VAAAQGRSEGCGGVGYAHTLHLLPFAGSSVVLARARRTDRWTSGLVEMATLSLTVNSGDPPLGALLAVEHVKDDVSISVEEGKENILHVSENVIFTDVNSILRYLARVATTAGLYGSNLMEHTEIDHWLEFSATKLSSCDSFTSTINELNHCLSLRTYLVGNSLSLADLCVWATLKGNAAWQEQLKQKKAPVHVKRWFGFLEAQQAFQSVGTKWDVSTTKARVAPEKKQDVGKFVELPGAEMGKVTVRFPPEASGYLHIGHAKAALLNQHYQVNFKGKLIMRFDDTNPEKEKEDFEKVILEDVAMLHIKPDQFTYTSDHFETIMKYAEKLIQEGKAYVDDTPAEQMKAEREQRIESKHRKNPIEKNLQMWEEMKKGSQFGQSCCLRAKIDMSSNNGCMRDPTLYRCKIQPHPRTGNKYNVYPTYDFACPIVDSIEGVTHALRTTEYHDRDEQFYWIIEALGIRKPYIWEYSRLNLNNTVLSKRKLTWFVNEGLVDGWDDPRFPTVRGVLRRGMTVEGLKQFIAAQGSSRSVVNMEWDKIWAFNKKVIDPVAPRYVALLKKEVIPVNVPEAQEEMKEVAKHPKNPEVGLKPVWYSPKVFIEGADAETFSEGEMVTFINWGNLNITKIHKNADGKIISLDAKLNLENKDYKKTTKVTWLAETTHALPIPVICVTYEHLITKPVLGKDEDFKQYVNKNSKHEELMLGDPCLKDLKKGDIIQLQRRGFFICDQPYEPVSPYSCKEAPCVLIYIPDGHTKEMPTSGSKEKTKVEATKNETSAPFKERPTPSLNNNCTTSEDSLVLYNRVAVQGDVVRELKAKKAPKEDVDAAVKQLLSLKAEYKEKTGQEYKPGNPPAEIGQNISSNSSASILESKSLYDEVAAQGEVVRKLKAEKSPKAKINEAVECLLSLKAQYKEKTGKEYIPGQPPLSQSSDSSPTRNSEPAGLETPEAKVLFDKVASQGEVVRKLKTEKAPKDQVDIAVQELLXLGDHVFSMCTCNIFPSYLKVKS

SEQ ID NO: 837068 - protein, 594 aa, Homo sapiens
MAPIGLKAVVGEKIMHDVIKKVKKKGEWKVLVVDQLSMRMLSSCCKMTDIMTEGITIVEDINKRREPLPSLEAVYLITPSEKSVHSLISDFKDPPTAKYRAAHVFFTDSCPDALFNELVKSRAAKVIKTLTEINIAFLPYESQVYSLDSADSFQSFYSPHKAQMKNPILERLAEQIATLCATLKEYPAVRYRGEYKDNALLAQLIQDKLDAYKADDPTMGEGPDKARSQLLILDRGFDPSSPVLHELTFQAMSYDLLPIENDVYKYETSGIGEARVKEVLLDEDDDLWIALRHKHIAEVSQEVTRSLKDFSSSKRMNTGEKTTMRDLSQMLKKMPQYQKELSKYSTHLHLAEDCMKHYQGTVDKLCRVEQDLAMGTDAEGEKIKDPMRAIVPILLDANVSTYDKIRIILLYIFLKNGITEENLNKLIQHAQIPPEDSEIITNMAHLGVPIVTDSTLRRRSKPERKERISEQTYQLSRWTPIIKDIMEDTIEDKLDTKHYPYISTRSSASFSTTAVSARYGHWHKNKAPGEYRSGPRLIIFILGGVSLNEMRCAYEVTQANGKWEVLIGSTHILTPQKLLDTLKKLNKTDEEISS

SEQ ID NO: 837069 - protein, 193 aa, Homo sapiens
MAPIGLKAVVGEKIMHDVIKKVKKKGEWKVLVVDQLSMRMLSSCCKMTDIMTEGITIVEDINKRREPLPSLEAVYLITPSEKSVHSLISDFKDPPTAKYRAAHVFFTDSCPDALFNELVKSRAAKVIKTLTEINIAFLPYESQVYSLDSADSFQSFYSPHKAQMKNPILERLAEQIATLCATLKEYPAVRYRG

SEQ ID NO: 837070 - protein, 198 aa, Homo sapiens
MAPIGLKAVVGESKWSRDPSSRRGLRLPRSPARPLPAAPRPPSGLPALRPGPEAPGPWGPVIQAPPAREEGFAPEYCTITSTCSATATRQDSNSAQEAQDTRRKANATVPKRAGAKSGGSDTKAISSTPVDRFKRRTDSCDLTDRLWALPPRVSIRGTIVLGTTEHTHGVTNEARTRLSATSPDEHTLSARTPEVSGD

SEQ ID NO: 837071 - protein, 594 aa, Homo sapiens; identical to SEQ ID NO: 837068

SEQ ID NO: 837072 - protein, 603 aa, Homo sapiens [sequence omitted]

SEQ ID NO: 837073 - protein, 316 aa, Homo sapiens
MAPIGLKAVVGEKIMHDVIKKVKKKGEWKVLVVDQLSMRMLSSCCKMTDIMTEGITIVEDINKRREPLPSLEAVYLITPSEKSVHSLISDFKDPPTAKYRAAHVFFTDSCPDALFNELVKSRAAKVIKTLTEINIAFLPYESQVYSLDSADSFQSFYSPHKAQMKNPILERLAEQIATLCATLKEYPAVRYRGEYKDNALLAQLIQDKLDAYKADDPTMGEGPDKARSQLLILDRGFDPSSPVLHELTFQAMSYDLLPIENDVYKYETSGIGEARVKEVLLDEDDDLWIALRHKHIAEVSQKVRQSLYNFSYHYRV

SEQ ID NO: 837074 - protein, 603 aa, Homo sapiens [sequence omitted]

SEQ ID NO: 837075 - protein, 153 aa, Homo sapiens
ATRSGVQEVTRSLKDFSSSKRMNTGEKTTMRDLSQMLKKMPQYQKELSKYSTHLHLAEDCMKHYQGTVDKLCRVEQDLAMGTDAEGEKIKDPMRAIVPILLDANVSTYDKIRIILLYIFLKNGITEGNLNNPFPPTVPRLLPGIKEHASGSYL

SEQ ID NO: 837076 - protein, 594 aa, Homo sapiens; identical to SEQ ID NO: 837068

SEQ ID NO: 837077 - protein, 534 aa, Homo sapiens
MAPIGLKAVVGEKIMHDVIKKVKKKGEWKVLVVDQLSMRMLSSCCKMTDIMTEGITIVEDINKRREPLPSLEAVYLITPSEKSVHSLISDFKDPPTAKYRAAHVFFTDSCPDALFNELVKSRAAKVIKTLTEINIAFLPYESQVYSLDSADSFQSFYSPHKAQMKNPILERLAEQIATLCATLKEYPAVRYRGEYKDNALLAQLIQDKLDAYKADDPTMGEGPDKARSQLLILDRGFDPSSPVLHELTFQAMSYDLLPIENDVYKYETSGIGEARVKEVLLDEDDDLWIALRHKHIAEVSQEVTRSLKDFSSSKRMNTGEKTTMRDLSQMLKKMPQYQKELSKYSTHLHLAEDCMKHYQGTVDKLCRVEQDLAMGTDAEGEKIKDPMRAIVPILLDANVSTYDKIRIILLYIFLKNGITEENLNKLIQHAQIPPEDSEIITNMAHLGVPIVTDSTLRRRSKPERKERISEQTYQLSRWTPIIKDIMEDTIEDKLDTKHYPYISTRSSASFSTTAVRIHTHPHPTETAGHTEETE

SEQ ID NO: 837078 - protein, 66 aa, Homo sapiens
PSPRVSRSLARLRGGELRLAQRAHLRRRRGPQASRDEEIGATSASLSEPAPRPLCSLHCGVLFSRL

SEQ ID NO: 837079 - protein, 872 aa, Homo sapiens
MHHTASSPQCTDEEPEAQRSEVAFLRSHSMKVMSQDLNLGSWALEPDCTAFCHTVLPSVTGWHLQGTFTQGPESAEAVSQDARHGVAWASSGFHRSLTVLRVEHAQPPAHCSLSAQISGVPVPKACPFFKTELKSPWKAPVKLPETGFLGMQAEGDPPWPTPRSPAEAPTRRKRLTTARSAESESWDHLVLQGDPRLPRTGERDRPHSDSSWGLCTGFSLGGVACYIAVPQRKGPAFSGMFSVLTPLCAPPLLLYKQLGDSKEQLRLGAVTHTRNPGTLGGRGGQGQEFKTSLANMVKPCLYKKYKINQTLWHVPVIPATQEADTGELLEPGGGGCSELRLCHCTPAWATERDSVSKKKKKKREKKKEQLTALGGCEWPPLKVFEKRPDAAVARPVLRGLVLPGTQAGWMAQLFLLQANAVLPLSHEIKVKRQIRLPAPLYPPERNDSRSFQIPQDLREKGWEEGQQHFAGKAADAFPAPVQLEGLEAGQTTLASPEVGPWRPKRLSGVCLLSALLPDPCKTNGTFLLQKHHLPSLLAVILFPVIILTGASFAHLFVALFVSHLLLKLPLGAGMRMQRDARYLLSHFSVEKTEARAERSQLRSCDSDPVLSALEAPCIMPTRVIPLGWTISGYEASEAGVEIVVLKSFIARLPHSSVSPGKGQAAVHRDLSVPEPHSDEEALEKHLIETFNFSGRAAEAVWKISGELTSVWAPGPGVRGPARCAFSGKQRACPGLPAPAPGGLCSLQLPSARFASSWQMPSDCPRASARVGLSCYDREAQGVLLREPKGTARSCMFYVHLPQPHPPWPTPQAPDHGHSRRGMEEKVVELSTENPEDRAHSFQAGKGTSLKNLDNQNYHSTFSFPARPSELRP

SEQ ID NO: 837080 - protein, 872 aa, Homo sapiens; identical to SEQ ID NO: 837079

SEQ ID NO: 837081 - protein, 124 aa, Homo sapiens
PSAPCGLRTLAAQPDPRQLCRRLTRSGSGSSEDSSAGCSDTMDLSFMAAQLPMMGGAFMDSPNEDFSTEYSLFNSSANVHAAANGQGQPEDPPRSSNDAVLLWIAIIATLGNIVVVGVVYAFTF

SEQ ID NO: 837082 - protein, 124 aa, Homo sapiens; identical to SEQ ID NO: 837081

SEQ ID NO: 837083 - protein, 872 aa, Homo sapiens; identical to SEQ ID NO: 837079

SEQ ID NO: 837084 - protein, 1379 aa, Homo sapiens [sequence omitted]

SEQ ID NO: 837085 - protein, 1379 aa, Homo sapiens [sequence omitted]

SEQ ID NO: 837086 - protein, 1379 aa, Homo sapiens [sequence omitted]

SEQ ID NO: 837087 - protein, 449 aa, Homo sapiens
MPGAPETAPGDGAGASRQRKLEALIRDPRSPINVESLLDGLNSLVLDLDFPALRKNKNIDNFLNRYEKIVKKIRGLQMKAEDYDVVKVIGRGAFGEVQLVRHKASQKVYAMKLLSKFEMIKRSDSAFFWEERDIMAFANSPWVVQLFYAFQDDRYLYMVMEYMPGGDLVNLMSNYDVPEKWAKFYTAEVVLALDAIHSMGLIHRDVKPDNMLLDKHGHLKLADFGTCMKMDETGMVHCDTAVGTPDYISPEVLKSQGGDGFYGRECDWWSVGVFLYEMLVGDTPFYADSLVGTYSKIMDHKNSLCFPEDAEISKHAKNLICAFLTDREVRLGRNGVEEIRQHPFFKNDQWHWDNIRETAAPVVPELSSDIDSSNFDDIEDDKGDVETFPIPKAFVGNQLPFIGFTYYRENLLLSDSPSCRENDSIQSRKNEESQGKSRGMLMLSDILKN

SEQ ID NO: 837088 - protein, 1379 aa, Homo sapiens [sequence omitted]

SEQ ID NO: 837089 - protein, 1379 aa, Homo sapiens [sequence omitted]

SEQ ID NO: 837090 - protein, 1379 aa, Homo sapiens [sequence omitted]

SEQ ID NO: 837091 - protein, 245 aa, Homo sapiens [sequence omitted]

SEQ ID NO: 837092 - protein, 234 aa, Homo sapiens
PTRPSLCSQAKPDPAAEGQVKQPPEPHKDLLAGEEGAAPGSQASTESSAHPPTAAPASPSGPGKALGVSLNATSGKSQSQSSATPSSGSQGQLPSGSGCGSRLSGRAQGQRRAQGSSHWSRQHTQPPGTSSSPSQSALPSSGPLQPPNVTSSPVSPMVQSPSSSNIPTQPPSKSSGKPEDAAPKTSGQRQKESSKQPASSASVPELVPCHSGTSLEYTSESTTEITCSWPHHRP

SEQ ID NO: 837093 - protein, 494 aa, Homo sapiens
LPAGSGQRRPWRRAMRRGRRGRPLLLCPPCPPIGPSGGPGADTGAGPEHRGSGCGKAVRVQRGGCPGPRASSSSQPRARRGHGRPEAARGALPGAKEPGHRSAGGAGGQDRGGEAVSGCRSRHSAKPVSAVRLRSVSAVQSHRICVPRICLNQSYREPKQGRRHCVAHLLGGVRPVWAGRVLQRSTPVLVPFLLRGQVRLPVVLHGSQALERGSHAVSARRASAVPKAPRGRRQNHERPQRASPGRGGRNNQERQAKPDPAAEGQVKQPPEPHKDLLAGEEGAAPGSQASTESSAHPPTAAPASPSGPGKALGVSLNATSGKSQSQSSATPSSGSQGQLPSGSGCGSRLSGRAQGQRRAQGSSHWSRQHTQPPGTSSSPSQSALPSSGPLQPPNVTSSPVSPMVQSPSSSNIPTQPPSKSSGKPEDAAPKTSGQRQKESSKQPASSASVPELVPCHSGTSLEYTSESTTEITCSWPHHRPPCLQHYWCLKHLAC

SEQ ID NO: 837094 - protein, 111 aa, Homo sapiens
QRHQRVFVNIPFFFFLFLVIPRLCHLSLSAFYLESMVGWSSSRSKTLTLASFSFLQPCPTWAPLTAPSLLGSMRLCPVTTSPRGPCCPASVVLLCPFSWPGQGWQDQLPPL

SEQ ID NO: 837095 - protein, 412 aa, Homo sapiens
GRATCGGGGGLGRVGAALPLRPRPPLPASPARPLLPAARQSQAPALGRPRARRPGTSVAAHADRCPPPPPQAALAAALGPAEAGMLEKLEFEDEAVEDSESGVYMRFMRSHKCYDIVPTSSKLVVFDTTLQVKKAFFALVANGVRAAPLWESKKQSFVGMLTITDFINILHRYYKSPMVQIYELEEHKIETWRELYLQETFKPLVNISPDASLFDAVYSLIKNKIHRLPVIDPISGNALYILTHKRILKFLQLFMSDMPKPAFMKQNLDELGIGTYHNIAFIHPDTPIIKALNIFVERRISALPVVDESGKVVDIYSKFDVINLAAEKTYNNLDITVTQALQHRSQYFEGVVKCNKLEILETIVDRIVRAEVHRLVVVNEADSIVGIISLSDILQALILTPAGAKQKETETE

SEQ ID NO: 837096 - protein, 599 aa, Homo sapiens
RLQSEGSGRGREGGDRTPEEFRRINFWLELWEALVMDTKKKKDVSSPGGSGGKKNASQKRRSLRVHIPDLSSFAMPLLDGDLEGSGKHSSRKVDSPFGPGSPSKGFFSRGPQPRPSSPMSAPVRPKTSPGSPKTVFPFSYQESPPRSPRRMSFSGIFRSSSKESSPNSNPATSPGGIRFFSRSRKTSGLSSSPSTPTQVTKQHTFPLESYKHEPERLENRIYASSSPPDTGQRFCPSSFQSPTRPPLASPTHYAPSKAAALAAALGPAEAGMLEKLEFEDEAVEDSESGVYMRFMRSHKCYDIVPTSSKLVVFDTTLQVKKAFFALVANGVRAAPLWESKKQSFVGMLTITDFINILHRYYKSPMVQIYELEEHKIETWRELYLQETFKPLVNISPDASLFDAVYSLIKNKIHRLPVIDPISGNALYILTHKRILKFLQLFMSDMPKPAFMKQNLDELGIGTYHNIAFIHPDTPIIKALNIFVERRISALPVVDESGKVVDIYSKFDVINLAAEKTYNNLDITVTQALQHRSQYFEGVVKCNKLEILETIVDRIVRAEVHRLVVVNEADSIVGIISLSDILQALILTPAGAKQKETETE

SEQ ID NO: 837097 - protein, 328 aa, Homo sapiens
MLEKLEFEDEAVEDSESGVYMRFMRSHKCYDIVPTSSKLVVFDTTLQVKKAFFALVANGVRAAPLWESKKQSFVGMLTITDFINILHRYYKSPMVQIYELEEHKIETWRELYLQETFKPLVNISPDASLFDAVYSLIKNKIHRLPVIDPISGNALYILTHKRILKFLQLFMSDMPKPAFMKQNLDELGIGTYHNIAFIHPDTPIIKALNIFVERRISALPVVDESGKVVDIYSKFDVINLAAEKTYNNLDITVTQALQHRSQYFEGVVKCNKLEILETIVDRIVRAEVHRLVVVNEADSIVGIISLSDILQALILTPAGAKQKETETE

SEQ ID NO: 837098 - protein, 282 aa, Homo sapiens
GRATCGGGGGLGRVGAALPLRPRPPLPASPARPLLPAARQSQAPALGRPRARRPGTSVAAHADRCPPPPPQAALAAALGPAEAGMLEKLEFEDEAVEDSESGVYMRFMRSHKCYDIVPTSSKLVVFDTTLQVKKAFFALVANGVRAAPLWESKKQSFVGMLTITDFINILHRYYKSPMVQIYELEEHKIETWRELYLQETFKPLVNISPDASLFDAVYSLIKNKIHRLPVIDPISGNALYILTHKRILKFLQLFMSDMPKPAFMKQNLDELGIGAISKSLLN

SEQ ID NO: 837099 - protein, 203 aa, Homo sapiens
GRATCGGGGGLGRVGAALPLRPRPPLPASPARPLLPAARQSQAPALGRPRARRPGTSVAAHADRCPPPPPQAALAAALGPAEAGMLEKLEFEDEAVEDSESGVYMRFMRSHKCYDIVPTSSKLVVFDTTLQVKKAFFALVANGVRAAPLWESKKQSFVGMLTITDFINILHRYYKSPMVQIYELEEHKIETWRGKHYWMFKIF

SEQ ID NO: 837100 - protein, 289 aa, Homo sapiens
RIELGTLQVKKAFFALVANGVRAAPLWESKKQSFVGMLTITDFINILHRYYKSPMVQIYELEEHKIETWRELYLQETFKPLVNISPDASLFDAVYSLIKNKIHRLPVIDPISGNALYILTHKRILKFLQLFMSDMPKPAFMKQNLDELGIGTYHNIAFIHPDTPIIKALNIFVERRISALPVVDESGKVVDIYSKFDVINLAAEKTYNNLDITVTQALQHRSQYFEGVVKCNKLEILETIVDRIVRAEVHRLVVVNEADSIVGIISLSDILQALILTPAGAKQKETETE

SEQ ID NO: 837101 - protein, 412 aa, Homo sapiens; identical to SEQ ID NO: 837095

SEQ ID NO: 837102 - protein, 491 aa, Homo sapiens
MSLVAYASSDESEPDEAEPEPEEEEAVAPTSGPALGGLFASLPAPKGPALLPPPPQMLAPAFPPPLLLPPPTGDPRLQPPPPLPFGLGGFPPPPGVSPAEAAGVGEGLGLGLPSPRGPGLNLPPPIGGAGPPLGLPKPKKRKEPVKIAAPELHKGDSDSEEDEPTKKKTILQGSSEGTGLSALLPQPKNLTVKETNRLLLPHAFSRKPSDGSPDTKPSRLASKTKTSSLAPVVGTTTTTPSPSAIKAAAKSAALQVTKQITQEEDDSDEEVAPENFFSLPEKAEPPGVEPYPYPIPTVPEELPPGTEPEPAFQDDAANAPLEFKMAAGSSGAPWMPKPGDDYSYNQFSTYGDANAAGAYYQDYYSGGYYPAQDPALVPPQEIAPDASFIDDEAFKRLQGKRNRGREEINFVEIKGDDQLSGAQQWMTKSLTEEKTMKSFSKKKGEQPTGQQRRKHQITYLIHQAKERELELKNTWSENKLSRRQTQAKYGF

SEQ ID NO: 837103 - protein, 113 aa, Homo sapiens
MSLVAYASSDESEPDEAEPEPEEEEAVAPTSGPALGGLFASLPAPKGPALLPPPPQMLAPAFPPAFVLPSGYIYIITGTEFSFAHSPYMFKGLTNPGKFYCVLYLLLVKAFYF

SEQ ID NO: 837104 - protein, 491 aa, Homo sapiens; identical to SEQ ID NO: 837102

SEQ ID NO: 837105 - protein, 491 aa, Homo sapiens; identical to SEQ ID NO: 837102

SEQ ID NO: 837106 - protein, 523 aa, Homo sapiens
MSLVAYASSDESEPDEAEPEPEEEEAVAPTSGPALGGLFASLPAPKGPALLPPPPQMLAPAFPPPLLLPPPTGDPRLQPPPPLPFGLGGFPPPPGVSPAEAAGVGEGLGLGLPSPRGPGLNLPPPIGGAGPPLGLPKPKKRKEPVKIAAPELHKGDSDSEEDEPTKKKTILQGSSEGTGLSALLPQPKNLTVKETNRLLLPHAFSRKPSDGSPDTKPSRLASKTKTSSLAPVVGTTTTTPSPSAIKAAAKSAALQVTKQITQEEDDSDEEVAPENFFSLPEKAEPPGVEPYPYPIPTVPEELPPGTEPEPAFQDDAANAPLEFKMAAGSSGAPWMPKPGDDYSYNQFSTYGDANAAGAYYQGLQQHLGHSPLRGIMRFLNSKSGKRTCFVPSFDYYSGGYYPAQDPALVPPQEIAPDASFIDDEAFKRLQGKRNRGREEINFVEIKGDDQLSGAQQWMTKSLTEEKTMKSFSKKKGEQPTGQQRRKHQITYLIHQAKERELELKNTWSENKLSRRQTQAKYGF

SEQ ID NO: 837107 - protein, 320 aa, Homo sapiens
MSLVAYASSDESEPDEAEPEPEEEEAVAPTSGPALGGLFASLPAPKGPALLPPPPQMLAPAFPPPLLLPPPTGDPRLQPPPPLPFGLGGFPPPPGVSPAEAAGVGEGLGLGLPSPRGPGLNLPPPIGGAGPPLGLPKPKKRKEPVKIAAPELHKGDSDSEEDEPTKKKTILQGSSEGTGLSALLPQPKNLTVKETNRLLLPHAFSRKPSDGSPDTKPSRLASKTKTSSLAPVVGTTTTTPSPSAIKAAAKSAALQVTKQITQEEDDSDEEVAPENFFSLPEKAEPPGVEPYPYPIPTVPEELPPGTEPRERRNQLCGDQR

SEQ ID NO: 837108 - protein, 491 aa, Homo sapiens; identical to SEQ ID NO: 837102

SEQ ID NO: 837109 - protein, 345 aa, Homo sapiens
MGSDGEFPSQSDSEEDEPTKKKTILQGSSEGTGLSALLPQPKNLTVKETNRLLLPHAFSRKPSDGSPDTKPSRLASKTKTSSLAPVVGTTTTTPSPSAIKAAAKSAALQVTKQITQEEDDSDEEVAPENFFSLPEKAEPPGVEPYPYPIPTVPEELPPGTEPEPAFQDDAANAPLEFKMAAGSSGAPWMPKPGDDYSYNQFSTYGDANAAGAYYQDYYSGGYYPAQDPALVPPQEIAPDASFIDDEAFKRLQGKRNRGREEINFVEIKGDDQLSGAQQWMTKSLTEEKTMKSFSKKKGEQPTGQQRRKHQITYLIHQAKERELELKNTWSENKLSRRQTQAKYGF

SEQ ID NO: 837110 - protein, 444 aa, Homo sapiens
MSLVAYASSDESEPDEAEPEPEEEEAVAPTSGPALGGLFASLPAPKGPALLPPPPQMLAPAFPPPLLLPPPTGDPRLQPPPPLPFGLGGFPPPPGVSPAEAAGVGEGLGLGLPSPRGPGLNLPPPIGGAGPPLGLPKPKKRKEPVKIAAPELHKGDSDSEEDEPTKKKTILQGSSEGTGLSALLPQPKNLTVKETNRLLLPHAFSRKPSDGSPDTKPSRLASKTKTSSLAPVVGTTTTTPSPSAIKAAAKSAALQVTKQITQEEDDSDEEVAPENFFSLPEKAEPPGVEPYPYPIPTVPEELPPGTEPEPAFQDDAANAPLEFKMAAGSSGAPWMPKPGDDYSYNQFSTYGDANAAGAYYQDYYSGGYYPAQDPALVPPQEIAPDASFIDDEAFKRLQGKRNRGREEINFVEIKGDDQSFTSGTPAALSPGSLSPRTQPSPLRE

SEQ ID NO: 837111 - protein, 349 aa, Homo sapiens
MSLVAYASSDESEPDEAEPEPEEEEAVAPTSGPALGGLFASLPAPKGPALLPPPPQMLAPAFPPPLLLPPPTGDPRLQPPPPLPFGLGGFPPPPGVSPAEAAGVGEGLGLGLPSPRGPGLNLPPPIGGAGPPLGLPKPKKRKEPVKIAAPELHKGDSDSEEDEPTKKKTILQGSSEGTGLSALLPQPKNLTVKETNRLLLPHAFSRKPSDGSPDTKPSRLASKTKTSSLAPVVGTTTTTPSPSAIKAAAKSAALQVTKQITQEEDDSDEEVAPENFFSLPEKAEPPGVEPYPYPIPTVPEELPPGTEPEPAFQDDAANAPLEFKMKLRRMNRFTVAELKQLVARPDVVK

SEQ ID NO: 837112 - protein, 211 aa, Homo sapiens
  misc_feature (37)..(37): Xaa can be any naturally occurring amino acid
  misc_feature (43)..(43): Xaa can be any naturally occurring amino acid
  misc_feature (60)..(60): Xaa can be any naturally occurring amino acid
  misc_feature (64)..(64): Xaa can be any naturally occurring amino acid
  misc_feature (67)..(67): Xaa can be any naturally occurring amino acid
  misc_feature (72)..(72): Xaa can be any naturally occurring amino acid
  misc_feature (79)..(81): Xaa can be any naturally occurring amino acid
  misc_feature (88)..(91): Xaa can be any naturally occurring amino acid
  misc_feature (93)..(93): Xaa can be any naturally occurring amino acid
  misc_feature (96)..(97): Xaa can be any naturally occurring amino acid
  misc_feature (102)..(103): Xaa can be any naturally occurring amino acid
  misc_feature (110)..(111): Xaa can be any naturally occurring amino acid
  misc_feature (116)..(116): Xaa can be any naturally occurring amino acid
  misc_feature (118)..(118): Xaa can be any naturally occurring amino acid
  misc_feature (124)..(125): Xaa can be any naturally occurring amino acid
  misc_feature (127)..(127): Xaa can be any naturally occurring amino acid
  misc_feature (130)..(130): Xaa can be any naturally occurring amino acid
  misc_feature (134)..(135): Xaa can be any naturally occurring amino acid
  misc_feature (150)..(150): Xaa can be any naturally occurring amino acid
  misc_feature (152)..(152): Xaa can be any naturally occurring amino acid
  misc_feature (160)..(160): Xaa can be any naturally occurring amino acid
  misc_feature (181)..(181): Xaa can be any naturally occurring amino acid
  misc_feature (198)..(198): Xaa can be any naturally occurring amino acid
MSLVAYASSDESEPDEAEPPARAGKQAARVGSLTILXPRLFRXALLSPFFFPRRPQRGSXPFVXPSXPPLQXCLGAQPXXXPPACFAXXXXPXRVXXPRAFXXFSFSPLXXLFGLXGXAFSPPXXSXERXSPAXXKARRGQFGAAGALGXLXGLPPSPPXGPPGPFKFLPPLPNLGRVAGXPPRLGGLFPKAPKAKQXKSSPRCKAFAGPP

SEQ ID NO: 837113 - protein, 112 aa, Homo sapiens
MSLVAYASSDESEPDEAEPEPEEEEAVAPTSGPALGGLFASLPAPKGPALLPPPPQMLAPAFPPPLLLPPPTGDPRLQPPPPLPLWEGGLTSYCSNELGLNLWDIGECIGPV

SEQ ID NO: 837114 - protein, 241 aa, Homo sapiens
MSLVAYASSDESEPDEAEPEPEEEEAVAPTSGPALGGLFASLPAPKGPALLPPPPQMLAPAFPPLSAATRRNASRSMHHLMLYNKSRVIEDRLLALRTPPHTHPTHTTTTRKAPATPHHTTMRNPSRAGGRAATPSHHPTAESQPCRHPPAAVPPPPRLPATRTPPPPPLRQQPPSHPHHNPPASEAAPTPPHRRRRAREKTDIPAEPCTRLARREPPPPPPADATPTPAHPHPNAAPATP

SEQ ID NO: 837115 - protein, 399 aa, Homo sapiens
MSLVAYASSDESEPDEAEPEPEEEEAVAPTSGPALGGLFASLPAPKGPALLPPPPQMLAPAFPPPLLLPPPTGDPRLQPPPPLPFGLGGFPPPPGVSPAEAAGVGEGLGLGLPSPRGPGLNLPPPIGGAGPPLGLPKPKKRKEPVKIAAPELHKGDSDSEEDEPTKKKTILQGSSEGTGLSALLPQPKNLTVKETNRLLLPHAFSRKPSDGSPDTKPSRLASKTKTSSLAPVVGTTTTTPSPSAIKAAAKSAALQVTKQITQEEDDSDEEVAPENFFSLPEKAEPPGVEPYPYPIPTVPEELPPGTEPEPAFQDDAANAPLEFKMAAGSSGAPWMPKPGDDYSYNQFSTYGDANAAGAYYQGLQQHLGHSPLRGIMRFLNSKSGKRTCFVPSFVSFIVS

SEQ ID NO: 837116 - protein, 167 aa, Homo sapiens
MAAGSSGAPWMPKPGDDYSYNQFSTYGDANAAGAYYQDYYSGGYYPAQDPALVPPQEIAPDASFIDDEAFKRLQGKRNRGREEINFVEIKGDDQLSGAQQWMTKSLTEEKTMKSFSKKKGEQPTGQQRRKHQITYLIHQAKERELELKNTWSENKLSRRQTQAKYGF

SEQ ID NO: 837117 - protein, 472 aa, Homo sapiens
MSLVAYASSDESEPDEAEPEPEEEEAVAPTSGPALGGLFASLPAPKGPALLPPPPQMLAPAFPPPLLLPPPTGDPRLQPPPPLPFGLGGFPPPPGVSPAEAAGVGEGLGLGLPSPRGPGLNLPPPIGGAGPPLGLPKPKKRKEPVKIAAPELHKGDSDSEEDEPTKKKTILQGSSEGTGLSALLPQPKNLTVKETNRLLLPHAFSRKPSDGSPDTKPSRLASKTKTSSLAPVVGTTTTTPSPSAIKAAAKSAALQVTKQITQEEDDSDEEVAPENFFSLPEKAEPPGVEPYPYPIPTVPEELPPGTEPEPAFQDDAANAPLEFKMAAGSSGAPWMPKPGDDYSYNQFSTYGDANAAGAYYQDYYSGGYYPAQDPALVPPQEIAPDASFIDDEAFKRLQGKRNRGREEINFVEIKGDDQLSGAQQWMTKSLTEEKTMKSFSKKKGEQPTGQQRRKHQITYLIHQIFDRFFLTS

SEQ ID NO: 837118 - protein, 435 aa, Homo sapiens
MSLVAYASSDESEPDEAEPEPEEEEAVAPTSGPALGGLFASLPAPKGPALLPPPPQMLAPAFPPPLLLPPPTGDPRLQPPPPLPFGLGGFPPPPGVSPAEAAGVGEGLGLGLPSPRGPGLNLPPPIGGAGPPLGLPKPKKRKEPVKIAAPELHKGDSDSEEDEPTKKKTILQGSSEGTGLSALLPQPKNLTVKETNRLLLPHAFSRKPSDGSPDTKPSRLASKTKTSSLAPVVGTTTTTPSPSAIKAAAKSAALQVTKQITQEEDDSDEEVAPENFFSLPEKAEPPGVEPYPYPIPTVPEELPPGTEPEPAFQDDAANAPLEFKMAAGSSGAPWMPKPGDDYSYNQFSTYGDANAAGAYYQDYYSGGYYPAQDPALVPPQEIAPDASFIDDEAFKRLQGKRNRGREEINFVEIKGDDQLSPGSLSPRTQPSPLRE

SEQ ID NO: 837119 - protein, 241 aa, Homo sapiens
MSLVAYASSDESEPDEAEPEPEEEEAVAPTSGPALGGLFASLPAPKGPALLPPPPQMLAPAFPPPLLLPPPTGDPRLQPPPPLPFGLGGFPPPPGVSPAEAAGVGEGLGLGLPSPRGPGLNLPPPIGGAGPPLGLPKPKKRKEPVKIAAPELHKGDSDSEEDEPTKKKTILQGSSEGTGLSALLPQPKNLTVKETNRLLLPHAFSRKPSDGSPAKPRISFPKDPALASARMNIFDRFFLTS

SEQ ID NO: 837120 - protein, 167 aa, Homo sapiens
STKLISSLPWMPKPGDDYSYNQFSTYGDANAAGAYYQDYYSGGYYPAQDPALVPPQEIAPDASFIDDEAFKRLQGKRNRGREEINFVEIKGDDQLSGAQQWMTKSLTEEKTMKSFSKKKGEQPTGQQRRKHQITYLIHQAKERELELKNTWSENKLSRRQTQAKYGF

SEQ ID NO: 837121 - protein, 60 aa, Homo sapiens
PARSEGVRWGGLLEPRRLLEGEQDQLRLNRMQPHPSHSPVGREPWEEKPNLSFPQASGAL

SEQ ID NO: 837122 - protein, 49 aa, Homo sapiens
MGKGEQEKPGGTAWQASALTRKFISTGMRVRNSSMSQDHSPHQWTLLEL

SEQ ID NO: 837123 - protein, 164 aa, Homo sapiens
MIWRRAALAGTRLVWSRSGSAGWLDRAAGAAGAAAAAASGMESNTSSSLENLATAPVNQIQETISDNCVVIFSKTSCSYCTMAKKLFHDMNVNYKVVELDLLEYGNQFQDALYKMTGERTVPRIFVNGTFIGGATDTHRLHKEGKLLPLVHQCYLKKSKRKEFQ

SEQ ID NO: 837124 - protein, 164 aa, Homo sapiens; identical to SEQ ID NO: 837123

SEQ ID NO: 837125 - protein, 164 aa, Homo sapiens; identical to SEQ ID NO: 837123

SEQ ID NO: 837126 - protein, 164 aa, Homo sapiens; identical to SEQ ID NO: 837123

SEQ ID NO: 837127 - protein, 165 aa, Homo sapiens
MNPRDKQVSRFSPLKDVYTWVALAGIQRSGSPGRTRSAARRMESNTSSSLENLATAPVNQIQETISDNCVVIFSKTSCSYCTMAKKLFHDMNVNYKVVELDLLEYGNQFQDALYKMTGERTVPRIFVNGTFIGGATDTHRLHKEGKLLPLVHQCYLKKSKRKEFQ

SEQ ID NO: 837128 - protein, 125 aa, Homo sapiens
  misc_feature (9)..(9): Xaa can be any naturally occurring amino acid
  misc_feature (13)..(13): Xaa can be any naturally occurring amino acid
LLFIANILXCRTXATAPVNQIQETISDNCVVIFSKTSCSYCTMAKKLFHDMNVNYKVVELDLLEYGNQFQDALYKMTGERTVPRIFVNGTFIGGATDTHRLHKEGKLLPLVHQCYLKKSKRKEFQ

SEQ ID NO: 837129 - protein, 143 aa, Homo sapiens
  misc_feature (17)..(17): Xaa can be any naturally occurring amino acid
  misc_feature (19)..(19): Xaa can be any naturally occurring amino acid
TDKLIIIIIINKKYSQXAXMESNTSSSLENLATAPVNQIQETISDNCVVIFSKTSCSYCTMAKKLFHDMNVNYKVVELDLLEYGNQFQDALYKMTGERTVPRIFVNGTFIGGATDTHRLHKEGKLLPLVHQCYLKKSKRKEFQ

SEQ ID NO: 837130 - protein, 580 aa, Homo sapiens
NPSSIPVCRRQAIDGFISAWVNNRLSVSRPDLCIFSSLVQSESGCANIVSAAPCQAEPQQYEVQFGRLRNFLTDSDSQHSHEVMPLLYPLFVYLHLNLVQNSPKSTVESFYSRFHGMFLQNASQKDVIEQLQTTQTIQDILSNFKLRAFLDNKYVVRLQEDSYNYLIRYLQSDNNTALCKVLTLHIHLDVQPAKRTDYQLYASGSSSRSENNGLEPPDMPSPILQNEAALEVLQESIKRVKDGPPSLTTICFYAFYNTEQLLNTAEISPDSKLLAAGFDNSCIKLWSLRSKKLKSEPHQVDVSRIHLACDILEEEDDEDDNAGTEMKILRGHCGPVYSTRFLADSSGLLSCSEDMSIRYWDLGSFTNTVLYQGHAYPVWDLDISPYSLYFASGSHDRTARLWSFDRTYPLRIYAGHLADVDCVKFHPNSNYLATGSTDKTVRLWSAQQGNSVRLFTGHRGPVLSLAFSPNGKYLASAGEDQRLKLWDLASGTLYKELRGHTDNITSLTFSPDSGLIASASMDNSVRVWDIRNTYCSAPADGSSSELVGVYTGQMSNVLSVQFMACNLLLVTGITQENQEH

SEQ ID NO: 837131 - protein, 189 aa, Homo sapiens
MKRVRTEQIQMAVSCYLKRRQYVDSDGPLKQGLRLSQTAEEMAANLTVQSESGCANIVSAAPCQAEPQQYEVQFGRLRNFLTDSDSQHSHEVMPLLYPLFVYLHLNLVQNSPKSTVESFYSRFHGMFLQNASQKDVIEQLQTTQTIQDILSNFKLRAFLDNKYVVRLQEDSYNYLIRYLQSDNNTALSG

SEQ ID NO: 837132 - protein, 100 aa, Homo sapiens
QAPDVSVILSLPPLKVMKRVRTEQIQMAVSCYLKRRQYVDSDGPLKQGLRLSQTAEEMAANLTGNGGGSSGGVSLEQENSRQYPCGITSPLLKTVPERAD

SEQ ID NO: 837133 - protein, 589 aa, Homo sapiens
MKRVRTEQIQMAVSCYLKRRQYVDSDGPLKQGLRLSQTAEEMAANLTVQSESGCANIVSAAPCQAEPQQYEVQFGRLRNFLTDSDSQHSHEVMPLLYPLFVYLHLNLVQNSPKSTVESFYSRFHGMFLQNASQKDVIEQLQTTQTIQDILSNFKLRAFLDNKYVVRLQEDSYNYLIRYLQSDNNTALCKVLTLHIHLDVQPAKRTDYQLYASGSSSRSENNGLEPPDMPSPILQNEAALEVLQESIKRVKDGPPSLTTICFYAFYNTEQLLNTAEISPDSKLLAAGFDNSCIKLWSLRSKKLKSEPHQVDVSRIHLACDILEEEDDEDDNAGTEMKILRGHCGPVYSTRFLADSSGLLSCSEDMSIRYWDLGSFTNTVLYQGHAYPVWDLDISPYSLYFASGSHDRTARLWSFDRTYPLRIYAGHLADVDCVKFHPNSNYLATGSTDKTVRLWSAQQGNSVRLFTGHRGPVLSLAFSPNGKYLASAGEDQRLKLWDLASGTLYKELRGHTDNITSLTFSPDSGLIASASMDNSVRVWDIRNTYCSAPADGSSSELVGVYTGQMSNVLSVQFMACNLLLVTGITQENQEH

SEQ ID NO: 837134 - protein, 203 aa, Homo sapiens
MKRVRTEQIQMAVSCYLKRRQYVDSDGPLKQGLRLSQTAEEMAANLTVQSESGCANIVSAAPCQAEPQQYEVQFGRLRNFLTDSDSQHSHEVMPLLYPLFVYLHLNLVQNSPKSTVESFYSRFHGMFLQNASQKDVIEQLQTTQTIQDILSNFKLRAFLDNKYVVRLQEDSYNYLIRYLQSDNNTALCKVLTLHIHLDSWHWF

SEQ ID NO: 837135 - protein, 68 aa, Homo sapiens
PFREQRQGPGLGSLEGGGLEPLEVRTLAPPLVTGYKDKGNQICANRGGVCGVTRLGLAMQGPYVIWAL

SEQ ID NO: 837136 - protein, 501 aa, Homo sapiens
RIQRPLNSSKGTMPLRDETLREVWASDSGHEEESLSPEAPRRPKQRPAPAQRLRKKRTEAPESPCPTGSKPRKPGEEEEEEEDEEDEEEEAEEKKEKILLPPKKPLREKSSADLKERRAKAQGPRGDLGSPDPPPKPLRVRNKEAPAGEGTKMRKTKKKGSGEADKDPSGSPASARKSPAAMFLVGEGSPDKKALKKKGTPKGARKEEEEEEEAATVIKNSNQKGKAKGKGKKKAKEERAPSPPVEVDEPREFVLRPAPQGRTVRCRLTRDKKGMDRGMYPSYFLHLDTEKKVFLLAGRKRKRSKTANYLISIDPTNLSRGGENFIGKLRSNLLGNRFTVFDNGQNPQRGYSTNVASLRQELAAVIYETNVLGFRGPRRMTVIIPGMSAENERVPIRPRNASDGLLVRWQNKTLESLIELHNKPPVWNDDSGSYTLNFQGRVTQASVKNFQIVHADDPDYIVLQFGRVAEDAFTLDYRYPLCALQAFAIALSSFDGKLACE

SEQ ID NO: 837137 - protein, 554 aa, Homo sapiens
RIQRPLNSSKGTMPLRDETLREVWASDSGHEEESLSPEAPRRPKQRPAPAQRLRKKRTEAPESPCPTGSKPRKPGAGRTGRPREEPSPDPAQARAPQTVYARFLRDPEAKKRDPRETFLVARAPDAEDEEEEEEEDEEDEEEEAEEKKEKILLPPKKPLREKSSADLKERRAKAQGPRGDLGSPDPPPKPLRVRNKEAPAGEGTKMRKTKKKGSGEADKDPSGSPASARKSPAAMFLVGEGSPDKKALKKKGTPKGARKEEEEEEEAATVIKNSNQKGKAKGKGKKKAKEERAPSPPVEVDEPREFVLRPAPQGRTVRCRLTRDKKGMDRGMYPSYFLHLDTEKKVFLLAGRKRKRSKTANYLISIDPTNLSRGGENFIGKLRSNLLGNRFTVFDNGQNPQRGYSTNVASLRQELAAVIYETNVLGFRGPRRMTVIIPGMSAENERVPIRPRNASDGLLVRWQNKTLESLIELHNKPPVWNDDSGSYTLNFQGRVTQASVKNFQIVHADDPDYIVLQFGRVAEDAFTLDYRYPLCALQAFAIALSSFDGKLACE

SEQ ID NO: 837138 - protein, 542 aa, Homo sapiens
MPLRDETLREVWASDSGHEEESLSPEAPRRPKQRPAPAQRLRKKRTEAPESPCPTGSKPRKPGAGRTGRPREEPSPDPAQARAPQTVYARFLRDPEAKKRDPRETFLVARAPDAEDEEEEEEEDEEDEEEEAEEKKEKILLPPKKPLREKSSADLKERRAKAQGPRGDLGSPDPPPKPLRVRNKEAPAGEGTKMRKTKKKGSGEADKDPSGSPASARKSPAAMFLVGEGSPDKKALKKKGTPKGARKEEEEEEEAATVIKNSNQKGKAKGKGKKKAKEERAPSPPVEVDEPREFVLRPAPQGRTVRCRLTRDKKGMDRGMYPSYFLHLDTEKKVFLLAGRKRKRSKTANYLISIDPTNLSRGGENFIGKLRSNLLGNRFTVFDNGQNPQRGYSTNVASLRQELAAVIYETNVLGFRGPRRMTVIIPGMSAENERVPIRPRNASDGLLVRWQNKTLESLIELHNKPPVWNDDSGSYTLNFQGRVTQASVKNFQIVHADDPDYIVLQFGRVAEDAFTLDYRYPLCALQAFAIALSSFDGKLACE

SEQ ID NO: 837139 - protein, 101 aa, Homo sapiens
SLVVVGSIQVRHGCWKHFANQGEEFTALFPPPRSGTPKGARKEEEEEEEAATVIKNSNQKGKAKGKGKKVGAQRGRGLRSLQGAEAGAWTWEPRGWGLGAT

SEQ ID NO: 837140 - protein, 865 aa, Homo sapiens
ADNASKLAAMLNTCSFQKPEQLQQQKSVFEICPSPAENNIQGTTKLASGEEFCSGSSSNLQAPGGSSERYLKQNEMNGAYFKQSSVFTKDSFSATTTPPPPSQLLLSPPPPLPQVPQLPSEGKSTLNGGVLEEHHHYPNQSNTTLLREVKIEGKPEAPPSQSPNPSTHVCSPSPMLSERPQNNCVNRNDIQTAGTMTVPLCSEKTRPMSEHLKHNPPIFGSSGELQDNCQQLMRNKEQEILKGRDKEQTRDLVPPTQHYLKPGWIELKAPRFHQAESHLKRNEASLPSILQYQPNLSNQMTSKQYTGNSNMPGGLPRQAYTQKTTQLEHKSQMYQVEMNQGQSQGTVDQHLQFQKPSHQVHFSKTDHLPKAHVQSLCGTRFHFQQRADSQTEKLMSPVLKQHLNQQASETEPFSNSHLLQHKPHKQAAQTQPSQSSHLPQNQQQQQKLQIKNKEEILQTFPHPQSNNDQQREGSFFGQTKVEECFHGENQYSKSSEFETHNVQMGLEEVQNINRRNSPYSQTMKSSACKIQVSCSNNTHLVSENKEQTTHPELFAGNKTQNLHHMQYFPNNVIPKQDLLHRCFQEQEQKSQQASVLQGYKNRNQDMSGQQAAQLAQQRYLIHNHANVFPVPDQGGSHTQTPPQKDTQKHAALRWHLLQKQEQQQTQQPQTESCHSQMHRPIKVEPGCKPHACMHTAPPENKTWKKVTKQENPPASCDNVQQKSIIETMEQHLKQFHAKSLFDHKALTLKSQKQVKVEMSGPVTVLTRQTTAAELDSHTPALEQQTTSSEKTPTKRTAASVLNNFIESPSKLLDTPIKNLLDTPVKTQYDFPSCRCVGKCQKCTETHGVYPELANLSSDMGFSFFF

SEQ ID NO: 837141 - protein, 145 aa, Homo sapiens
  misc_feature (7)..(7): Xaa can be any naturally occurring amino acid
  misc_feature (40)..(40): Xaa can be any naturally occurring amino acid
MLEWLQXVVRTFSLLIPARYVFDASAGLSFTPQYYIPLTXAVCHLSILVNSISRHANFTLSAITVKTKLPPPITNVPPHLSPSLPCYSRFQAKLNLSAPMSLFPTAPVAYGRPPSYSHYSGSPSGRHLYFIFYPPAVTTARARSR

SEQ ID NO: 837142 - protein, 400 aa, Homo sapiens
MNGQLDLSGKLIIKAQLGEDIRRIPIHNEDITYDELVLMMQRVFRGKLLSNDEVTIKYKDEDGDLITIFDSSDLSFAIQCSRILKLTLFVNGQPRPLESSQVKYLRRELIELRNKVNRLLDSLEPPGEPGPSTNIPENDTVDGREEKSASDSSGKQSTQVMAASMSAFDPLKNQDEINKNVMSAFGLTDDQVSGPPSAPAEDRSGTPDSIASSSSAAHPPGVQPQQPPYTGAQTQAGQIEGQMYQQYQQQAGYGAQQPQAPPQQPQQYGIQYSASYSQQTGPQQPQQFQGYGQQPTSQAPAPAFSGQPQQLPAQPPQQYQASNYPAQTYTAQTSQPTNYTVAPASQPGMAPSQPGAYQPRPGFTSLPGSTMTPPPSGPNPYARNRPPFGQGYTQPGPGYR

SEQ ID NO: 837143 - protein, 400 aa, Homo sapiens; identical to SEQ ID NO: 837142

SEQ ID NO: 837144 - protein, 400 aa, Homo sapiens; identical to SEQ ID NO: 837142

SEQ ID NO: 837145 - protein, 400 aa, Homo sapiens; identical to SEQ ID NO: 837142

SEQ ID NO: 837146 - protein, 400 aa, Homo sapiens; identical to SEQ ID NO: 837142

SEQ ID NO: 837147 - protein, 400 aa, Homo sapiens; identical to SEQ ID NO: 837142

SEQ ID NO: 837148 - protein, 373 aa, Homo sapiens
MNGQLDLSGKLIIKAQLGEDIRRIPIHNEDITYDELVLMMQRVFRGKLLSNDEVTIKYKDEDGDLITIFDSSDLSFAIQCSRILKLTLFVNGQPRPLESSQVKYLRRELIELRNKVNRLLDSLEPPGEPGPSTNIPENDTVDGREEKSASDSSGKQSTQVMAASMSGPPSAPAEDRSGTPDSIASSSSAAHPPGVQPQQPPYTGAQTQAGQIEGQMYQQYQQQAGYGAQQPQAPPQQPQQYGIQYSASYSQQTGPQQPQQFQGYGQQPTSQAPAPAFSGQPQQLPAQPPQQYQASNYPAQTYTAQTSQPTNYTVAPASQPGMAPSQPGAYQPRPGFTSLPGSTMTPPPSGPNPYARNRPPFGQGYTQPGPGYR

SEQ ID NO: 837149 - protein, 158 aa, Homo sapiens
MYQQYQQQAGYGAQQPQAPPQQPQQYGIQYSASYSQQTGPQQPQQFQGYGQQPTSQAPAPAFSGQPQQLPAQPPQQYQASNYPAQTYTAQTSQPTNYTVAPASQPGMAPSQPGAYQPRPGFTSLPGSTMTPPPSGPNPYARNRPPFGQGYTQPGPGYR

SEQ ID NO: 837150 - protein, 386 aa, Homo sapiens
MNGQLDLSGKLIIKAQLGEDIRRIPIHNEDITYDELVLMMQRVFRGKLLSNDEVTIKYKDEDGDLITIFDSSDLSFAIQCSRILKLTLFVNGQPRPLESSQVKYLRRELIELRNKVNRLLDSLEPPGEPGPSTNIPENDTVDGREEKSASDSSGKQSTQVMAASMSAFDPLKNQDEINKNVMSAFGLTDDQVSGPPSAPAEDRSGTPDSIASSSSAAHPPGVQPQQPPYTGAQTQAGQIEGQMYQQYQQQAGYGAQQPQAPPQQPQQYGIQYSASYSQQTGPQQPQQFQGYGQQPTSQAPAPAFSGQPQQLPAQPPQQYQASNYPAQTYTAQTSQPTNYTVAPASQPGMLGLPQVDLTSLRGYLRLLCSLHQGLLKMAVCRLSKRW

SEQ ID NO: 837151 - protein, 261 aa, Homo sapiens
MNGQLDLSGKLIIKAQLGEDIRRIPIHNEDITYDELVLMMQRVFRGKLLSNDEVTIKYKDEDGDLITIFDSSDLSFAIQCSRILKLTLFVNGQPRPLESSQVKYLRRELIELRNKVNRLLDSLEPPGEPGPSTNIPENDTVDGREEKSASDSSGKQSTQVMAASMSAFDPLKNQDEINKNVMSAFGLTDDQVSGPPSAPAEDRSGTPDSIASSSSAAHPPGVQPQQPPYTGAQTQAGQIDQQFSTGRYGASKRAHFRLKVV

SEQ ID NO: 837152 - protein, 105 aa, Homo sapiens
LDIPLIRLQAIVSRLDLNNLSSSRDMASNQLPRHQLLPFLVSLNNCLLSRHSSTRRAIILHKLTLPKLLSLLIILWLLPLNLEWLQANLGPINQDQVLLHFLEVP

SEQ ID NO: 837153 - protein, 74 aa, Homo sapiens
  misc_feature (5)..(6): Xaa can be any naturally occurring amino acid
  misc_feature (14)..(14): Xaa can be any naturally occurring amino acid
PPPPXXGGVGLWRXLSLFDSAGPPSAPAEDRSGTPDSIASSSSAAHPPGVQPQQPPYTGAQTQAGQIEGKIEFR

SEQ ID NO: 837154 - protein, 400 aa, Homo sapiens; identical to SEQ ID NO: 837142

SEQ ID NO: 837155 - protein, 400 aa, Homo sapiens; identical to SEQ ID NO: 837142

SEQ ID NO: 837156 - protein, 400 aa, Homo sapiens; identical to SEQ ID NO: 837142

SEQ ID NO: 837157 - protein, 400 aa, Homo sapiens; identical to SEQ ID NO: 837142

SEQ ID NO: 837158 - protein, 400 aa, Homo sapiens; identical to SEQ ID NO: 837142

SEQ ID NO: 837159 - protein, 400 aa, Homo sapiens; identical to SEQ ID NO: 837142

SEQ ID NO: 837160 - protein, 400 aa, Homo sapiens; identical to SEQ ID NO: 837142

SEQ ID NO: 837161 - protein, 224 aa, Homo sapiens
  misc_feature (14)..(14): Xaa can be any naturally occurring amino acid
RRGESNLKGVKNKXENLGPPSAPAEDRSGTPDSIASSSSAAHPPGVQPQQPPYTGAQTQAGQIEGQMYQQYQQQAGYGAQQPQAPPQQPQQYGIQYSASYSQQTGPQQPQQFQGYGQQPTSQAPAPAFSGQPQQLPAQPPQQYQASNYPAQTYTAQTSQPTNYTVAPASQPGMAPSQPGAYQPRPGFTSLPGSTMTPPPSGPNPYARNRPPFGQGYTQPGPGYR

SEQ ID NO: 837162 - protein, 220 aa, Homo sapiens
RTPLRITTEEVARGPPSAPAEDRSGTPDSIASSSSAAHPPGVQPQQPPYTGAQTQAGQIEGQMYQQYQQQAGYGAQQPQAPPQQPQQYGIQYSASYSQQTGPQQPQQFQGYGQQPTSQAPAPAFSGQPQQLPAQPPQQYQASNYPAQTYTAQTSQPTNYTVAPASQPGMAPSQPGAYQPRPGFTSLPGSTMTPPPSGPNPYARNRPPFGQGYTQPGPGYR

SEQ ID NO: 837163 - protein, 194 aa, Homo sapiens
PPPPYTNSPTHRLRGTPGHPVLLQKIVQEHPTALLPPPQQLTHQAFSHSSHHIQELRLKQVRLKVRCTNSTSNRPAMVHSSRRLHLSSLNSMVFSIQQAIVSRLDLNNLSSSRDMASNQLPRHQLLPFLVSLNNCLLSRHSSTRRAIILHKLTLPKLLSLLIILWLLPLNLEWLQANLGPINQDQVLLHFLEVP

SEQ ID NO: 837164 - protein, 158 aa, Homo sapiens; identical to SEQ ID NO: 837149

SEQ ID NO: 837165 - protein, 195 aa, Homo sapiens
PHTLHTTTRSTRPLSRALGHPVLLQKIVQEHPTALLPPPQQLTHQAFSHSSHHIQELRLKQVRLKVRCTNSTSNRPAMVHSSRRLHLSSLNSMVFSIQQAIVSRLDLNNLSSSRDMASNQLPRHQLLPFLVSLNNCLLSRHSSTRRAIILHKLTLPKLLSLLIILWLLPLNLEWLQANLGPINQDQVLLHFLEVP

SEQ ID NO: 837166 - protein, 187 aa, Homo sapiens [sequence omitted]

SEQ ID NO: 837167 - protein, 228 aa, Homo sapiens
MNGQLDLSGKLIIKAQLGEDIRRIPIHNEDITYDELVLMMQRVFRGKLLSNDEVTIKYKDEDGDLITIFDSSDLSFAIQCSRILKLTLFVNGQPRPLESSQVKYLRRELIELRNKVNRLLDSLEPPGEPGPSTNIPENDTVDGREEKSASDSSGKQSTQVMAASMSAFDPLKNQDEINKNVMSAFGLTDDQVSGPPSAPAEDRSGTPDSIASSSSAASTVWYSVFSKL

SEQ ID NO: 837168 - protein, 138 aa, Homo sapiens
RTEEDKKLEVKEGNAGGDGVATSKEISNSCSVGWYGLVTEEYQVLETYTGQSEQRSRCTVPSEERVQELSTLYRSLSVKEREEGLGKHGVFLLTENSACGGGKKSVGGRQGGNLPQREEERADLGVYVEKVLSPCSGG

SEQ ID NO: 837169 - protein, 404 aa, Homo sapiens
MPSSSDTALGGGGGLSWAEKRLEERRKRRRFLSPQQPPLLLPLLQPQLLQPPPPPPPLLFLAAPGTAAAAAAAAAASSSCFSPGPPLEVKRLARGKRRAGGRQKRRRGPRAGQEAEKRRVFSLPQPQQDGGGGASSGGGVTPLVEYEDVSSQSEQGLLLGGASAATAATAAGGTGGSGGSPASSSGTQRRGEGSERRPRRDRRSSSGRSKERHREHRRRDGQRGGSEASKSRSRHSHSGEERAEVAKSGSSSSSGGRRKSASATSSSSSSRKDRDSKAHRSRTKSSKEPPSAYKEPPKAYREDKTEPKAYRRRRSLSPLGGRDDSPVSHRASQSLRSRKSPSPAGGGSSPYSRRLPRSPSPYSRRRSPSYSRHSSYERGGDVSPSPYSSSSWRRSRSPYSPVLR

SEQ ID NO: 837170 - protein, 966 aa, Homo sapiens
MPSSSDTALGGGGGLSWAEKRLEERRKRRRFLSPQQPPLLLPLLQPQLLQPPPPPPPLLFLAAPGTAAAAAAAAAASSSCFSPGPPLEVKRLARGKRRAGGRQKRRRGPRAGQEAEKRRVFSLPQPQQDGGGGASSGGGVTPLVEYEDVSSQSEQGLLLGGASAATAATAAGGTGGSGGSPASSSGTQRRGEGSERRPRRDRRSSSGRSKERHREHRRRDGQRGGSEASKSRSRHSHSGEERAEVAKSGSSSSSGGRRKSASATSSSSSSRKDRDSKAHRSRTKSSKEPPSAYKEPPKAYREDKTEPKAYRRRRSLSPLGGRDDSPVSHRASQSLRSRKSPSPAGGGSSPYSRRLPRSPSPYSRRRSPSYSRHSSYERGGDVSPSPYSSSSWRRSRSPYSPVLRRSGKSRSRSPYSSRHSRSRSRHRLSRSRSRHSSISPSTLTLKSSLAAELNKNKKARAAEAARAAEAAKAAEATKAAEAAAKAAKASNTSTPTKGNTETSASASQTNHVKDVKKIKIEHAPSPSSGGTLKNDKAKTKPPLQVTKVENNLIVDKATKKAVIVGKESKSAATKEESVSLKEKTKPLTPSIGAKEKEQHVALVTSTLPPLPLPPMLPEDKEADSLRGNISVKAVKKEVEKKLRCLLADLPLPPELPGGDDLSKSPEEKKTATQLHSKRRPKICGPRYGETKEKDIDWGKRCVDKFDIIGIIGEGTYGQVYKARDKDTGEMVALKKVRLDNEKEGFPITAIREIKILRQLTHQSIINMKEIVTDKEDALDFKKDKGAFYLVFEYMDHDLMGLLESGLVHFNENHIKSFMRQLMEGLDYCHKKNFLHRDIKCSNILLNNRGQIKLADFGLARLYSSEESRPYTNKVITLWYRPPELLLGEERYTPAIDVWSCGCILGELFTKKPIFQANQELAQLELISRICGSPCPAVWPDVIKLPYFNTMKPKKQYRRKLREEFVL

SEQ ID NO: 837171 - protein, 1452 aa, Homo sapiens
MPSSSDTALGGGGGLSWAEKRLEERRKRRRFLSPQQPPLLLPLLQPQLLQPPPPPPPLLFLAAPGTAAAAAAAAAASSSCFSPGPPLEVKRLARGKRRAGGRQKRRRGPRAGQEAEKRRVFSLPQPQQDGGGGASSGGGVTPLVEYEDVSSQSEQGLLLGGASAATAATAAGGTGGSGGSPASSSGTQRRGEGSERRPRRDRRSSSGRSKERHREHRRRDGQRGGSEASKSRSRHSHSGEERAEVAKSGSSSSSGGRRKSASATSSSSSSRKDRDSKAHRSRTKSSKEPPSAYKEPPKAYREDKTEPKAYRRRRSLSPLGGRDDSPVSHRASQSLRSRKSPSPAGGGSSPYSRRLPRSPSPYSRRRSPSYSRHSSYERGGDVSPSPYSSSSWRRSRSPYSPVLRRSGKSRSRSPYSSRHSRSRSRHRLSRSRSRHSSISPSTLTLKSSLAAELNKNKKARAAEAARAAEAAKAAEATKAAEAAAKAAKASNTSTPTKGNTETSASASQTNHVKDVKKIKIEHAPSPSSGGTLKNDKAKTKPPLQVTKVENNLIVDKATKKAVIVGKESKSAATKEESVSLKEKTKPLTPSIGAKEKEQHVALVTSTLPPLPLPPMLPEDKEADSLRGNISVKAVKKEVEKKLRCLLADLPLPPELPGGDDLSKSPEEKKTATQLHSKRRPKICGPRYGETKEKDIDWGKRCVDKFDIIGIIGEGTYGQVYKARDKDTGEMVALKKVRLDNEKEGFPITAIREIKILRQLTHQSIINMKEIVTDKEDALDFKKDKGAFYLVFEYMDHDLMGLLESGLVHFNENHIKSFMRQLMEGLDYCHKKNFLHRDIKCSNILLNNRGQIKLADFGLARLYSSEESRPYTNKVITLWYRPPELLLGEERYTPAIDVWSCGCILGELFTKKPIFQANQELAQLELISRICGSPCPAVWPDVIKLPYFNTMKPKKQYRRKLREEFVFIPAAALDLFDYMLALDPSKRCTAEQALQCEFLRDVEPSKMPPPDLPLWQDCHELWSKKRRRQKQMGMTDDVSTIKAPRKDLSLGLDDSRTNTPQGVLPSSQLKSQGSSNVAPGEKQTDPSTPQQESSKPLGGIQPSSQTIQPKVETDAAQAAVQSAFAVLLTQLIKAQQSKQKDVLLEERENGSGHEASLQLRPPPEPSTPVSGQDDLIQHQDMRILELTPEPDRPRILPPDQRPPEPPEPPPVTEEDLDYRTENQHVPTTSSSLTDPHAGVKAALLQLLAQHQPQDDPKREGGIDYQAGDTYVSTSDYKDNFGSSSFSSAPYVSNDGLGSSSAPPLERRSFIGNSDIQSLDNYSTASSHSGGPPQPSAFSESFPSSVAGYGDIYLNAGPMLFSGDKDHRFEYSHGPIAVLANSSDPSTGPESTHPLPAKMHNYNYGGNLQENPSGPSLMHGQTWTSPAQGPGYSQGYRGHISTSTGRGRGRGLPY

SEQ ID NO: 837172 - protein, 1222 aa, Homo sapiens
MPSSSDTALGGGGGLSWAEKRLEERRKRRRFLSPQQPPLLLPLLQPQLLQPPPPPPPLLFLAAPGTAAAAAAAAAASSSCFSPGPPLEVKRLARGKRRAGGRQKRRRGPRAGQEAEKRRVFSLPQPQQDGGGGASSGGGVTPLVEYEDVSSQSEQGLLLGGASAATAATAAGGTGGSGGSPASSSGTQRRGEGSERRPRRDRRSSSGRSKERHREHRRRDGQRGGSEASKSRSRHSHSGEERAEVAKSGSSSSSGGRRKSASATSSSSSSRKDRDSKAHRSRTKSSKEPPSAYKEPPKAYREDKTEPKAYRRRRSLSPLGGRDDSPVSHRASQSLRSRKSPSPAGGGSSPYSRRLPRSPSPYSRRRSPSYSRHSSYERGGDVSPSPYSSSSWRRSRSPYSPVLRRSGKSRSRSPYSSRHSRSRSRHRLSRSRSRHSSISPSTLTLKSSLAAELNKNKKARAAEAARAAEAAKAAEATKAAEAAAKAAKASNTSTPTKGNTETSASASQTNHVKDVKKIKIEHAPSPSSGGTLKNDKAKTKPPLQVTKVENNLIVDKATKKAVIVGKESKSAATKEESVSLKEKTKPLTPSIGAKEKEQHVALVTSTLPPLPLPPMLPEDKEADSLRGNISVKAVKKEVEKKLRCLLADLPLPPELPGGDDLSKSPEEKKTATQLHSKRRPKICGPRYGETKEKDIDWGKRCVDKFDIIGIIGEGTYGQVYKARDKDTGEMVALKKVRLDNEKEGFPITAIREIKILRQLTHQSIINMKEIVTDKEDALDFKKDKGAFYLVFEYMDHDLMGLLESGLVHFNENHIKSFMRQLMEGLDYCHKKNFLHRDIKCSNILLNNRGQIKLADFGLARLYSSEESRPYTNKVITLWYRPPELLLGEERYTPAIDVWSCGCILGELFTKKPIFQANQELAQLELISRICGSPCPAVWPDVIKLPYFNTMKPKKQYRRKLREEFVFIPAAALDLFDYMLALDPSKRCTAEQALQCEFLRDVEPSKMPPPDLPLWQDCHELWSKKRRRQKQMGMTDDVSTIKAPRKDLSLGLDDSRTNTPQGVLPSSQLKSQGSSNVAPGEKQTDPSTPQQESSKPLGGIQPSSQTIQPKVETDAAQAAVQSAFAVLLTQLIKAQQSKQKDVLLEERENGSGHEASLQLRPPPEPSTPVSGQDDLIQHQDMRILELTPEPDRPRILPPDQRPPEPPEPPPVTEEDLDYLERLF

SEQ ID NO: 837173 - protein, 1465 aa, Homo sapiens
MPSSSDTALGGGGGLSWAEKRLEERRKRRRFLSPQQPPLLLPLLQPQLLQPPPPPPPLLFLAAPGTAAAAAAAAAASSSCFSPGPPLEVKRLARGKRRAGGRQKRRRGPRAGQEAEKRRVFSLPQPQQDGGGGASSGGGVTPLVEYEDVSSQSEQGLLLGGASAATAATAAGGTGGSGGSPASSSGTQRRGEGSERRPRRDRRSSSGRSKERHREHRRRDGQRGGSEASKSRSRHSHSGEERAEVAKSGSSSSSGGRRKSASATSSSSSSRKDRDSKAHRSRTKSSKEPPSAYKEPPKAYREDKTEPKAYRRRRSLSPLGGRDDSPVSHRASQSLRSRKSPSPAGGGSSPYSRRLPRSPSPYSRRRSPSYSRHSSYERGGDVSPSPYSSSSWRRSRSPYSPVLRRSGKSRSRSPYSSRHSRSRSRHRLSRSRSRHSSISPSTLTLKSSLAAELNKNKKARAAEAARAAEAAKAAEATKAAEAAAKAAKASNTSTPTKGNTETSASASQTNHVKDVKKIKIEHAPSPSSGGTLKNDKAKTKPPLQVTKVENNLIVDKATKKAVIVGKESKSAATKEESVSLKEKTKPLTPSIGAKEKEQHVALVTSTLPPLPLPPMLPEDKEADSLRGNISVKAVKKEVEKKLRCLLADLPLPPELPGGDDLSKSPEEKKTATQLHSKRRPKICGPRYGETKEKDIDWGKRCVDKFDIIGIIGEGTYGQVYKARDKDTGEMVALKKVRLDNEKEGFPITAIREIKILRQLTHQSIINMKEIVTDKEDALDFKKDKGAFYLVFEYMDHDLMGLLESGLVHFNENHIKSFMRQLMEGLDYCHKKNFLHRDIKCSNILLNNRGQIKLADFGLARLYSSEESRPYTNKVITLWYRPPELLLGEERYTPAIDVWSCGCILGELFTKKPIFQANQELAQLELISRICGSPCPAVWPDVIKLPYFNTMKPKKQYRRKLREEFVFIPAAALDLFDYMLALDPSKRCTAEQALQCEFLRDVEPSKMPPPDLPLWQDCHELWSKKRRRQKQMGMTDDVSTIKAPRKDLSLGLDDSRTNTPQGVLPSSQLKSQGSSNVAPGEKQTDPSTPQQESSKPLGGIQPSSQTIQPKVETDAAQAAVQSAFAVLLTQLIKAQQSKQKDVLLEERENGSGHEASLQLRPPPEPSTPVSGQDDLIQHQDMRILELTPEPDRPRILPPDQRPPEPPEPPPVTEEDLDYRTENQHVPTTSSSLTDPHAGVKAALLQLLAQHQPQDDPKREGGIDYQAGDTYVSTSDYKDNFGSSSFSSAPYVSNDGLGSSSAPPLERRSFIGNSDIQSLDNYSTASSHSGGPPQPSAFSESFPSSVAGYGDIYLNAGPMLFSGDKDHRFEYSHGPIAVLANSSDPSTGPESTHPLPAKMHNYNYGGNLQENPSGPSLMHGQTWTSPAQGPGYSQGYRRIAVNAGSKGCSELRSRHCTPAWATDLDSI

SEQ ID NO: 837174 - protein, 1397 aa, Homo sapiens
MPSSSDTALGGGGGLSWAEKRLEERRKRRRFLSPQQPPLLLPLLQPQLLQPPPPPPPLLFLAAPGTAAAAAAAAAASSSCFSPGPPLEVKRLARGKRRAGGRQKRRRGPRAGQEAEKRRVFSLPQPQQDGGGGASSGGGVTPLVEYEDVSSQSEQGLLLGGASAATAATAAGGTGGSGGSPASSSGTQRRGEGSERRPRRDRRSSSGRSKERHREHRRRDGQRGGSEASKSRSRHSHSGEERAEVAKSGSSSSSGGRRKSASATSSSSSSRKDRDSKAHRSRTKSSKEPPSAYKEPPKAYREDKTEPKAYRRRRSLSPLGGRDDSPVSHRASQSLRSRKSPSPAGGGSSPYSRRLPRSPSPYSRRRSPSYSRHSSYERGGDVSPSPYSSSSWRRSRSPYSPVLRRSGKSRSRSPYSSRHSRSRSRHRLSRSRSRHSSISPSTLTLKSSLAAELNKNKKARAAEAARAAEAAKAAEATKAAEAAAKAAKASNTSTPTKGNTETSASASQTNHVKDVKKIKIEHAPSPSSGGTLKNDKAKTKPPLQVTKVENNLIVDKATKKAVIVGKESKSAATKEESVSLKEKTKPLTPSIGAKEKEQHVALVTSTLPPLPLPPMLPEDKEADSLRGNISVKAVKKEVEKKLRCLLADLPLPPELPGGDDLSKSPEEKKTATQLHSKRRPKICGPRYGETKEKDIDWGKRCVDKFDIIGIIGEGTYGQVYKARDKDTGEMVALKKVRLDNEKEGFPITAIREIKILRQLTHQSIINMKEIVTDKEDALDFKKDKGAFYLVFEYMDHDLMGLLESGLVHFNENHIKSFMRQLMEGLDYCHKKNFLHRDIKCSNILLNNRGQIKLADFGLARLYSSEESRPYTNKVITLWYRPPELLLGEERYTPAIDVWSCGCILGELFTKKPIFQANQELAQLELISRICGSPCPAVWPDVIKLPYFNTMKPKKQYRRKLREEFVFIPAAALDLFDYMLALDPSKRCTAEQALQCEFLRDVEPSKMPPPDLPLWQDCHELWSKKRRRQKQMGMTDDVSTIKAPRKDLSLGLDDSRTNTPQGVLPSSQLKSQGSSNVAPGEKQTDPSTPQQESSKPLGGIQPSSQTIQPKVETDAAQAAVQSAFAVLLTQLIKAQQSKQKDVLLEERENGSGHEASLQLRPPPEPSTPVSGQDDLIQHQDMRILELTPEPDRPRILPPDQRPPEPPEPPPVTEEDLDYRTENQHVPTTSSSLTDPHAGVKAALLQLLAQHQPQDDPKREGGIDYQAGDTYVSTSDYKDNFGSSSFSSAPYVSNDGLGSSSAPPLERRSFIGNSDIQSLDNYSTASSHSGGPPQPSAFSESFPSSVAGYGDIYLNAGPMLFSGDKDHRFEYSHGPIAVLARNLPGAKKPPWPGAIYYGT

SEQ ID NO: 837175 - protein, 246 aa, Homo sapiens
MYSSYQSHHCCESQGLQAIWKTVIQGCPQHPPGSSQPGGVGSAVIQAQRQVLRGIDYQAGDTYVSTSDYKDNFGSSSFSSAPYVSNDGLGSSSAPPLERRSFIGNSDIQSLDNYSTASSHSGGPPQPSAFSESFPSSVAGYGDIYLNAGPMLFSGDKDHRFEYSHGPIAVLANSSDPSTGPESTHPLPAKMHNYNYGGNLQENPSGPSLMHGQTWTSPAQGPGYSQGYRGHISTSTGRGRGRGLPY

SEQ ID NO: 837176 - protein, 938 aa, Homo sapiens
MPSSSDTALGGGGGLSWAEKRLEERRKRRRFLSPQQPPLLLPLLQPQLLQPPPPPPPLLFLAAPGTAAAAAAAAAASSSCFSPGPPLEVKRLARGKRRAGGRQKRRRGPRAGQEAEKRRVFSLPQPQQDGGGGASSGGGVTPLVEYEDVSSQSEQGLLLGGASAATAATAAGGTGGSGGSPASSSGTQRRGEGSERRPRRDRRSSSGRSKERHREHRRRDGQRGGSEASKSRSRHSHSGEERAEVAKSGSSSSSGGRRKSASATSSSSSSRKDRDSKAHRSRTKSSKEPPSAYKEPPKAYREDKTEPKAYRRRRSLSPLGGRDDSPVSHRASQSLRSRKSPSPAGGGSSPYSRRLPRSPSPYSRRRSPSYSRHSSYERGGDVSPSPYSSSSWRRSRSPYSPVLRRSGKSRSRSPYSSRHSRSRSRHRLSRSRSRHSSISPSTLTLKSSLAAELNKNKKARAAEAARAAEAAKAAEATKAAEAAAKAAKASNTSTPTKGNTETSASASQTNHVKDVKKIKIEHAPSPSSGGTLKNDKAKTKPPLQVTKVENNLIVDKATKKAVIVGKESKSAATKEESVSLKEKTKPLTPSIGAKEKEQHVALVTSTLPPLPLPPMLPEDKEADSLRGNISVKAVKKEVEKKLRCLLADLPLPPELPGGDDLSKSPEEKKTATQLHSKRRPKICGPRYGETKEKDIDWGKRCVDKFDIIGIIGEGTYGQVYKARDKDTGEMVALKKVRLDNEKEGFPITAIREIKILRQLTHQSIINMKEIVTDKEDALDFKKDKGAFYLVFEYMDHDLMGLLESGLVHFNENHIKSFMRQLMEGLDYCHKKNFLHRDIKCSNILLNNRGQIKLADFGLARLYSSEESRPYTNKVITLWYRPPELLLGEERYTPAIDVWSCGCILGELFTKKPIFQANQELAQLELIRHEENEVSDKQI

SEQ ID NO: 837177 - protein, 691 aa, Homo sapiens
MPSSSDTALGGGGGLSWAEKRLEERRKRRRFLSPQQPPLLLPLLQPQLLQPPPPPPPLLFLAAPGTAAAAAAAAAASSSCFSPGPPLEVKRLARGKRRAGGRQKRRRGPRAGQEAEKRRVFSLPQPQQDGGGGASSGGGVTPLVEYEDVSSQSEQGLLLGGASAATAATAAGGTGGSGGSPASSSGTQRRGEGSERRPRRDRRSSSGRSKERHREHRRRDGQRGGSEASKSRSRHSHSGEERAEVAKSGSSSSSGGRRKSASATSSSSSSRKDRDSKAHRSRTKSSKEPPSAYKEPPKAYREDKTEPKAYRRRRSLSPLGGRDDSPVSHRASQSLRSRKSPSPAGGGSSPYSRRLPRSPSPYSRRRSPSYSRHSSYERGGDVSPSPYSSSSWRRSRSPYSPVLRRSGKSRSRSPYSSRHSRSRSRHRLSRSRSRHSSISPSTLTLKSSLAAELNKNKKARAAEAARAAEAAKAAEATKAAEAAAKAAKASNTSTPTKGNTETSASASQTNHVKDVKKIKIEHAPSPSSGGTLKNDKAKTKPPLQVTKVENNLIVDKATKKAVIVGKESKSAATKEESVSLKEKTKPLTPSIGAKEKEQHVALVTSTLPPLPLPPMLPEDKEADSLRGNISVKAVKKEVEKKLRCLLADLPLPPELPGGDDLSKSPEEKKTATQLHSKRRPKYVLAFYLLLN

SEQ ID NO: 837178 - protein, 1452 aa, Homo sapiens; identical to SEQ ID NO: 837171

SEQ ID NO: 837179 - protein, 1512 aa, Homo sapiens
MPSSSDTALGGGGGLSWAEKRLEERRKRRRFLSPQQPPLLLPLLQPQLLQPPPPPPPLLFLAAPGTAAAAAAAAAASSSCFSPGPPLEVKRLARGKRRAGGRQKRRRGPRAGQEAEKRRVFSLPQPQQDGGGGASSGGGVTPLVEYEDVSSQSEQGLLLGGASAATAATAAGGTGGSGGSPASSSGTQRRGEGSERRPRRDRRSSSGRSKERHREHRRRDGQRGGSEASKSRSRHSHSGEERAEVAKSGSSSSSGGRRKSASATSSSSSSRKDRDSKAHRSRTKSSKEPPSAYKEPPKAYREDKTEPKAYRRRRSLSPLGGRDDSPVSHRASQSLRSRKSPSPAGGGSSPYSRRLPRSPSPYSRRRSPSYSRHSSYERGGDVSPSPYSSSSWRRSRSPYSPVLRRSGKSRSRSPYSSRHSRSRSRHRLSRSRSRHSSISPSTLTLKSSLAAELNKNKKARAAEAARAAEAAKAAEATKAAEAAAKAAKASNTSTPTKGNTETSASASQTNHVKDVKKIKIEHAPSPSSGGTLKNDKAKTKPPLQVTKVENNLIVDKATKKAVIVGKESKSAATKEESVSLKEKTKPLTPSIGAKEKEQHVALVTSTLPPLPLPPMLPEDKEADSLRGNISVKAVKKEVEKKLRCLLADLPLPPELPGGDDLSKSPEEKKTATQLHSKRRPKICGPRYGETKEKDIDWGKRCVDKFDIIGIIGEGTYGQVYKARDKDTGEMVALKKVRLDNEKEGFPITAIREIKILRQLTHQSIINMKEIVTDKEDALDFKKDKGAFYLVFEYMDHDLMGLLESGLVHFNENHIKSFMRQLMEGLDYCHKKNFLHRDIKCSNILLNNRGQIKLADFGLARLYSSEESRPYTNKVITLWYRPPELLLGEERYTPAIDVWSCGCILGELFTKKPIFQANQELAQLELISRICGSPCPAVWPDVIKLPYFNTMKPKKQYRRKLREEFVFIPAAALDLFDYMLALDPSKRCTAEQALQCEFLRDVEPSKMPPPDLPLWQDCHELWSKKRRRQKQMGMTDDVSTIKAPRKDLSLGLDDSRTNTPQGVLPSSQLKSQGSSNVAPVKTGPGQHLNHSELAILLNLLQSKTSVNMADFVQVLNIKVNSETQQQLNKINLPAGILATGEKQTDPSTPQQESSKPLGGIQPSSQTIQPKVETDAAQAAVQSAFAVLLTQLIKAQQSKQKDVLLEERENGSGHEASLQLRPPPEPSTPVSGQDDLIQHQDMRILELTPEPDRPRILPPDQRPPEPPEPPPVTEEDLDYRTENQHVPTTSSSLTDPHAGVKAALLQLLAQHQPQDDPKREGGIDYQAGDTYVSTSDYKDNFGSSSFSSAPYVSNDGLGSSSAPPLERRSFIGNSDIQSLDNYSTASSHSGGPPQPSAFSESFPSSVAGYGDIYLNAGPMLFSGDKDHRFEYSHGPIAVLANSSDPSTGPESTHPLPAKMHNYNYGGNLQENPSGPSLMHGQTWTSPAQGPGYSQGYRGHISTSTGRGRGRGLPY

SEQ ID NO: 837180 - protein, 1434 aa, Homo sapiens
MPSSSDTALGGGGGLSWAEKRLEERRKRRRFLSPQQPPLLLPLLQPQLLQPPPPPPPLLFLAAPGTAAAAAAAAAASSSCFSPGPPLEVKRLARGKRRAGGRQKRRRGPRAGQEAEKRRVFSLPQPQQDGGGGASSGGGVTPLVEYEDVSSQSEQGLLLGGASAATAATAAGGTGGSGGSPASSSGTQRRGEGSERRPRRDRRSSSGRSKERHREHRRRDGQRGGSEASKSRSRHSHSGEERAEVAKSGSSSSSGGRRKSASATSSSSSSRKDRDSKAHRSRTKSSKEPPSAYKEPPKAYREDKTEPKAYRRRRSLSPLGGRDDSPVSHRASQSLRSRKSPSPAGGGSSPYSRRLPRSPSPYSRRRSPSYSRHSSYERGGDVSPSPYSSSSWRRSRSPYSPVLRRSGKSRSRSPYSSRHSRSRSRHRLSRSRSRHSSISPSTLTLKSSLAAELNKNKKARAAEAARAAEAAKAAEATKAAEAAAKAAKASNTSTPTKGNTETSASASQTNHVKDVKKIKIEHAPSPSSGGTLKNDKAKTKPPLQVTKVENNLIVDKATKKAVIVGKESKSAATKEESVSLKEKTKPLTPSIGAKEKEQHVALVTSTLPPLPLPPMLPEDKEADSLRGNISVKAVKKEVEKKLRCLLADLPLPPELPGGDDLSKSPEEKKTATQLHSKRRPKICGPRYGETKEKDIDWGKRCVDKFDIIGIIGEGTYGQVYKARDKDTGEMVALKKVRLDNEKEGFPITAIREIKILRQLTHQSIINMKEIVTDKEDALDFKKDKGAFYLVFEYMDHDLMGLLESGLVHFNENHIKSFMRQLMEGLDYCHKKNFLHRDIKCSNILLNNRGQIKLADFGLARLYSSEESRPYTNKVITLWYRPPELLLGEERYTPAIDVWSCGCILGELFTKKPIFQANQELAQLELISRICGSPCPAVWPDVIKLPYFNTMKPKKQYRRKLREEFVFIPAAALDLFDYMLALDPSKRCTAEQALQCEFLRDVEPSKMPPPDLPLWQDCHELWSKKRRRQKQMGMTDDVSTIKAPRKDLSLGLDDSRTNTPQGVLPSSQLKSQGSSNVAPGEKQTDPSTPQQESSKPLGGIQPSSQTIQPKVETDAAQAAVQSAFAVLLTQLIKAQQSKQKDVLLEERENGSGHEASLQLRPPPEPSTPVSGQDDLIQHQDMRILELTPEPDRPRILPPDQRPPEPPEPPPVTEEDLDYRTENQHVPTTSSSLTDPHAGVKAALLQLLAQHQPQDDPKREGGIDYQAGDTYVSTSDYKDNFGSSSFSSAPYVSNDGLGSSSAPPLERRSFIGNSDIQSLDNYSTASSHSGGPPQPSAFSESFPSSVAGYGDIYLNAGPMLFSGDKDHRFEYSHGPIAVLANSSDPSTGPESTHPLPAKMHNYNYGGNLQERPGYSQGYRGHISTSTGRGRGRGLPY

SEQ ID NO: 837181 - protein, 1452 aa, Homo sapiens; identical to SEQ ID NO: 837171

SEQ ID NO: 837182 - protein, 1452 aa, Homo sapiens; identical to SEQ ID NO: 837171

SEQ ID NO: 837183 - protein, 475 aa, Homo sapiens [sequence omitted]

SEQ ID NO: 837184 - protein, 867 aa, Homo sapiens
MPSSSDTALGGGGGLSWAEKRLEERRKRRRFLSPQQPPLLLPLLQPQLLQPPPPPPPLLFLAAPGTAAAAAAAAAASSSCFSPGPPLEVKRLARGKRRAGGRQKRRRGPRAGQEAEKRRVFSLPQPQQDGGGGASSGGGVTPLVEYEDVSSQSEQGLLLGGASAATAATAAGGTGGSGGSPASSSGTQRRGEGSERRPRRDRRSSSGRSKERHREHRRRDGQRGGSEASKSRSRHSHSGEERAEVAKSGSSSSSGGRRKSASATSSSSSSRKDRDSKAHRSRTKSSKEPPSAYKEPPKAYREDKTEPKAYRRRRSLSPLGGRDDSPVSHRASQSLRSRKSPSPAGGGSSPYSRRLPRSPSPYSRRRSPSYSRHSSYERGGDVSPSPYSSSSWRRSRSPYSPVLRRSGKSRSRSPYSSRHSRSRSRHRLSRSRSRHSSISPSTLTLKSSLAAELNKNKKARAAEAARAAEAAKAAEATKAAEAAAKAAKASNTSTPTKGNTETSASASQTNHVKDVKKIKIEHAPSPSSGGTLKNDKAKTKPPLQVTKVENNLIVDKATKKAVIVGKESKSAATKEESVSLKEKTKPLTPSIGAKEKEQHVALVTSTLPPLPLPPMLPEDKEADSLRGNISVKAVKKEVEKKLRCLLADLPLPPELPGGDDLSKSPEEKKTATQLHSKRRPKICGPRYGETKEKDIDWGKRCVDKFDIIGIIGEGTYGQVYKARDKDTGEMVALKKVRLDNEKEGFPITAIREIKILRQLTHQSIINMKEIVTDKEDALDFKKDKGAFYLVFEYMDHDLMGLLESGLVHFNENHIKSFMRQLMEGLDYCHKKNFLHRDIKCSNILLNNRGQIKLADFGLARLYSSEER

SEQ ID NO: 837185 - protein, 70 aa, Homo sapiens
LPLWQDCHELWSKKRRRQKQMGMTDDVSTIKAPRKDLSLGLDDSRTNTPQGVLPSSQLKSQGSSNVAPGQ

SEQ ID NO: 837186 - protein, 113 aa, Homo sapiens
GENGYTAAESKAHPGGEAGGGHLCCSRRGACLSASLLLLLATVAALIALVTILGLPSCTPGAQACITLTNRTGFLCHDQRSCIPASGVCDGVRTCTHGEDEDESLCREYPLGA

SEQ ID NO: 837187 - protein, 80 aa, Homo sapiens
SLTSNTFKHPLSAKYQSPFELLAERSELTVSEQSVDMSEVHNIRKLFKINQMCLLIEESGRQMGNGWAWVSESVVVLTAT

SEQ ID NO: 837188 - protein, 379 aa, Homo sapiens
ARGRVLVLAAPAPRPAPPGRGAAASFGRAGPGMLHTTQLYQHVPETRWPIVYSPRYNITFMGLEKLHPFDAGKWGKVINFLKEEKLLSDSMLVEAREASEEDLLVVHTRRYLNELKWSFAVATITEIPPVIFLPNFLVQRKVLRPLRTQTGGTIMAGKLAVERGWAINVGGGFHHCSSDRGGGFCAYADITLAIKFLFERVEGISRATIIDLDAHQGNGHERDFMDDKRVYIMDVYNRHIYPGDRFAKQAIRRKVELEWGTEDDEYLDKVERNIKKSLQEHLPDVVVYNAGTDILEGDRLGGLSISPAGIVKRDELVFRMVRGRRVPILMVTSGGYQKRTARIIADSILNLFGLGLIGPESPSVSAQNSDTPLLPPAVP

SEQ ID NO: 837189 - protein, 379 aa, Homo sapiens; identical to SEQ ID NO: 837188

SEQ ID NO: 837190 - protein, 279 aa, Homo sapiens
ARGRVLVLAAPAPRPAPPGRGAAASFGRAGPGMLHTTQLYQHVPETRWPIVYSPRYNITFMGLEKLHPFDAGKWGKVINFLKEEKLLSDSMLVEAREASEEDLLVVHTRRYLNELKGNGHERDFMDDKRVYIMDVYNRHIYPGDRFAKQAIRRKVELEWGTEDDEYLDKVERNIKKSLQEHLPDVVVYNAGTDILEGDRLGGLSISPAGIVKRDELVFRMVRGRRVPILMVTSGGYQKRTARIIADSILNLFGLGLIGPESPSVSAQNSDTPLLPPAVP

SEQ ID NO: 837191 - protein, 728 aa, Homo sapiens
ARGRVLGWPHPRPAPPRPVAELRPALGGPAPGCECRGARAGVGSQGSRWAGALGRGRGRPGGRARLHTTQLYQHVPETRWPIVYSPRYNITFMGLEKLHPFDAGKWGKVINFLKEEKLLSDSMLVEAREASEEDLLVVHTRRYLNELKWSFAVATITEIPPVIFLPNFLVQRKVLRPLRTQTGGTIMAGKLAVERGWAINVGGGFHHCSSDRGGGFCAYADITLAIKFLFERVEGISRATIIDLDAHQVSALQGLDSSGDLPPPVPESSRGRRVSLLMSPRLSRLLSSVSRATNAGSVFVTLSRTAGPPHCSRGSSLPPPDCPHMRLFLKPTLMGLLSCAELCCGSPLLMNNLGHCPLPRAAEHWPPAPQADAHTHGLARAPGVTMLRTRRLGSKVSKQRVTSSSGPLMRPVPLVRQGGDPVGSGRHPPAPLLLWLCASWGPALGSCDPELLSQVTCGQSFTVCFFTSLIPTSPTTDLRGWQSGISSSDREPKSTGLAQAHARRCRGLVLRLNPSSALNSHETCCPREQAVLPWQMGSFLRGGWVAEPQPCLGHLPESGYCDLPKGNGHERDFMDDKRVYIMDVYNRHIYPGDRFAKQAIRRKVELEWGTEDDEYLDKVERNIKKSLQEHLPDVVVYNAGTDILEGDRLGGLSISPAGIVKRDELVFRMVRGRRVPILMVTSGGYQKRTARIIADSILNLFGLGLIGPESPSVSAQNSDTPLLPPAVP

SEQ ID NO: 837192 - protein, 213 aa, Homo sapiens
ARGRVLVLAAPAPRPAPPGRGAAASFGRAGPGMLHTTQLYQHVPETRWPIVYSPRYNITFMGLEKLHPFDAGKWGKVINFLKEAIRRKVELEWGTEDDEYLDKVERNIKKSLQEHLPDVVVYNAGTDILEGDRLGGLSISPAGIVKRDELVFRMVRGRRVPILMVTSGGYQKRTARIIADSILNLFGLGLIGPESPSVSAQNSDTPLLPPAVP

SEQ ID NO: 837193 - protein, 81 aa, Homo sapiens
RISILAWREKKKKRNRQRALGGTVASTGLTKVPGPQSFSMPRGPRWARPLACSSALLMGTFRDLQEVGGGASTPASRQLWP

SEQ ID NO: 837194 - protein, 386 aa, Homo sapiens
ARGRVLGWPHPRPAPPRPVAELRPALGGPAPGCECRGARAGVGSQGSRWAGALGRGRGRPGGRARLHTTQLYQHVPETRWPIVYSPRYNITFMGLEKLHPFDAGKWGKVINFLKEEKLLSDSMLVEAREASEEDLLVVHTRRYLNELKWSFAVATITEIPPVIFLPNFLVQRKVLRPLRTQTGGTIMAGKLAVERGWAINVGGGFHHCSSDRGGGFCAYADITLAIKFLFERVEGISRATIIDLDAHQVSALQGLDSSGDLPPPVPESSRGRRVSLLMSPRLSRLLSSVSRATNAGSVFVTLSRTAGPPHCSRGSSLPPPDCPHMRLFLKPTLMGLLSCAELCCGSPLLMNNLGHCPLPRAAEHWPPAPQADAHTHGLARAPGVTI

SEQ ID NO: 837195 - protein, 81 aa, Homo sapiens
PESPSSSPEQGIVKRDELVFRMVRGRRVPILMVTSGGYQKRTARIIADSILNLFGLGLIGPESPSVSAQNSDTPLLPPAVP

SEQ ID NO: 837196 - protein, 126 aa, Homo sapiens
MPSTLLRLHLKGQVLTTGGRGLEQRTRAWQSRNGTRSTGKFDFAPSLTTEETSARKVPAASDRRVVLIGIIQKFLILSFGRMATLKQILNAFKKKKSCGFLFFFFFFFGRELLISCYFFLSPFVVI

SEQ ID NO: 837197 - protein, 411 aa, Homo sapiens
ARGRVLGWPHPRPAPPRPVAELRPALGGPAPGCECRGARAGVGSQGSRWAGALGRGRGRPGGRARLHTTQLYQHVPETRWPIVYSPRYNITFMGLEKLHPFDAGKWGKVINFLKEEKLLSDSMLVEAREASEEDLLVVHTRRYLNELKWSFAVATITEIPPVIFLPNFLVQRKVLRPLRTQTGGTIMAGKLAVERGWAINVGGGFHHCSSDRGGGFCAYADITLAIKFLFERVEGISRATIIDLDAHQGNGHERDFMDDKRVYIMDVYNRHIYPGDRFAKQAIRRKVELEWGTEDDEYLDKVERNIKKSLQEHLPDVVVYNAGTDILEGDRLGGLSISPAGIVKRDELVFRMVRGRRVPILMVTSGGYQKRTARIIADSILNLFGLGLIGPESPSVSAQNSDTPLLPPAVP

SEQ ID NO: 837198 - protein, 379 aa, Homo sapiens; identical to SEQ ID NO: 837188

SEQ ID NO: 837199 - protein, 407 aa, Homo sapiens
ARGRVLVLAAPAPRPAPPGRGAAASFGRAGPGMLHTTQLYQHVPETRWPIVYSPRYNITFMGLEKLHPFDAGKWGKVINFLKEEKLLSDSMLVEAREASEEDLLVVHTRRYLNELKWSFAVATITEIPPVIFLPNFLVQRKVLRPLRTQTGGTIMAGKLAVERGWAINVGGGFHHCSSDRGGGFCAYADITLAIKFLFERVEGISRATIIDLDAHQGNGHERDFMDDKRVYIMDVYNRHIYPGDRFAKQAIRRKVELEWGTEDDEYLDKVERNIKKSLQEHLPDVVVYNAGTDILEGDRLGGLSISPAGIVKRDELVFRMVRGRRVPILMVTSGGYQKRTARIIADSILNLFGLGLIGPESPSVSAQNSDTPRRVEHPVGWSTPSGGAPRRVEHPVGWSTPSGGAGI

SEQ ID NO: 837200 - protein, 197 aa, Homo sapiens
MPPAGLRRAAPLTAIALLVLGAPLVLAGEDCLWYLDRNGSWHPGFNCEFFTFCCGTCYHRYCCRDLTLLITERQQKHCLAFSPKTIAGIASAVILFVAVVATTICCFLCSCCYLYRRRQQLQSPFEGQEIPMTGIPVQPVYPYPQDPKAGPAPPQPGFMYPPSGPAPQYPLYPAGPPVYNPAAPPPYMPPQPSYPGA

SEQ ID NO: 837201 - protein, 449 aa, Homo sapiens
PGRGRVQDTARLPWPQCPTARSAHGGSDGRNHRGAGDRGSRAVLCWVRGTQLQRLGGRRWWVDSWALRGAAPAGLARAGRLVPPPEEAEEEPEPGRGLGPAAAPAGRLGPAVPSLGGPTPAAPSPHHATRGAPPGRAAHRNRSVGAGGSPGYRGWGEMRQEWDGGGGRGGTDPRGLGSGLLRDPPAATGALGVAGSSRSGKRELQDAGPWEADPGVQGQLQAEASGALGLRPSGWRQGATLSVREPSGWGPPGEWGRARLGMNWPGGHWAPPIPARVLAGEDCLWYLDRNGSWHPGFNCEFFTFCCGTCYHRYCCRDLTLLITERQQKHCLAFSPKTIAGIASAVILFVAVVATTICCFLCSCCYLYRRRQQLQSPFEGQEIPMTGIPVQPVYPYPQDPKAGPAPPQPGFMYPPSGPAPQYPLYPAGPPVYNPAAPPPYMPPQPSYPGA

SEQ ID NO: 837202 - protein, 174 aa, Homo sapiens
MPPAGLRRAAPLTAIALLVLGAPLVLAGEDCLWYLDRNGSWHPGFNCEFFTFCCGTCYHRYCCRDLTLLITERQQKHCLAFSPKTIAGIASAVILFVAVVATTICCFLCSCCYLYRRRQQLQSPFEGQEIPMTGIPVQPVYPYPQDPKAGPAPPQPSPGPYWGQSPREVEQELN

SEQ ID NO: 837203 - protein, 228 aa, Homo sapiens
PGRGRVQDTARLPWPQCPTARSAHGGSDGRNHRGAGDRGSRAVLCWVRGTQLQRLVLAGEDCLWYLDRNGSWHPGFNCEFFTFCCGTCYHRYCCRDLTLLITERQQKHCLAFSPKTIAGIASAVILFVAVVATTICCFLCSCCYLYRRRQQLQSPFEGQEIPMTGIPVQPVYPYPQDPKAGPAPPQPGFMYPPSGPAPQYPLYPAGPPVYNPAAPPPYMPPQPSYPGA

SEQ ID NO: 837204 - protein, 197 aa, Homo sapiens; identical to SEQ ID NO: 837200

SEQ ID NO: 837205 - protein, 189 aa, Homo sapiens
METSAPRAGSQVVATTARHSAAYRADPLRVSSRDKLTEMAASSQGNFEGNFESLDLAEFAKKQPWWRKLFGQESGPSAEKYSVATQLFIGGVTGWCTGFIFQKVGKLAATAVGGGFFLLQLANHTGYIKVDWQRVEKDMKKAKEQLKIRKSNQIPTEVRSKAEEVVSFVKKNVLVTGGFFGGFLLGMAS

SEQ ID NO: 837206 - protein, 189 aa, Homo sapiens; identical to SEQ ID NO: 837205

SEQ ID NO: 837207 - protein, 161 aa, Homo sapiens
LTTTTTKFAAAQTSSQGNFEGNFESLDLAEFAKKQPWWRKLFGQESGPSAEKYSVATQLFIGGVTGWCTGFIFQKVGKLAATAVGGGFFLLQLANHTGYIKVDWQRVEKDMKKAKEQLKIRKSNQIPTEVRSKAEEVVSFVKKNVLVTGGFFGGFLLGMAS

SEQ ID NO: 837208 - protein, 189 aa, Homo sapiens; identical to SEQ ID NO: 837205

SEQ ID NO: 837209 - protein, 189 aa, Homo sapiens; identical to SEQ ID NO: 837205

SEQ ID NO: 837210 - protein, 189 aa, Homo sapiens; identical to SEQ ID NO: 837205

SEQ ID NO: 837211 - protein, 161 aa, Homo sapiens; identical to SEQ ID NO: 837207

SEQ ID NO: 837212 - protein, 120 aa, Homo sapiens
METSAPRAGSQVVATTARHSAAYRADPLRVSSRDKLTLRNLLRSSHGGVSCSGRNLDLQQKSIAWQPSCSLEVSLDGAQVSYSRRLESWLQQLWEVDFFSFSLQTILGTSKLTGNEWRRT

SEQ ID NO: 837213 - protein, 219 aa, Homo sapiens
ASRDRAPRGVQAARGRGGRSGIAPGSAAPRVRPRSRACLGPNHPGVSSPVELTQPSGAAPGAEARRHSVPVLGSGNFEGNFESLDLAEFAKKQPWWRKLFGQESGPSAEKYSVATQLFIGGVTGWCTGFIFQKVGKLAATAVGGGFFLLQLANHTGYIKVDWQRVEKDMKKAKEQLKIRKSNQIPTEVRSKAEEVVSFVKKNVLVTGGFFGGFLLGMAS

SEQ ID NO: 837214 - protein, 173 aa, Homo sapiens
METSAPRAGSQVVATTARHSAAYRADPLRVSSRDKLTEMAASSQGNFEGNFESLDLAEFAKKQPWWRKLFGQESGPSAECTGFIFQKVGKLAATAVGGGFFLLQLANHTGYIKVDWQRVEKDMKKAKEQLKIRKSNQIPTEVRSKAEEVVSFVKKNVLVTGGFFGGFLLGMAS

SEQ ID NO: 837215 - protein, 751 aa, Homo sapiens
MPALGWAVAAILMLQTAMAEPSPGTLPRKAGVFSDLSNQELKAVHSFLWSKKELRLQPSSTTTMAKNTVFLIEMLLPKKYHVLRFLDKGERHPVREARAVIFFGDQEHPNVTEFAVGPLPGPCYMRALSPRPGYQSSWASRPISTAEYALLYHTLQEATKPLHQFFLNTTGFSFQDCHDRCLAFTDVAPRGVASGQRRSWLIIQRYVEGYFLHPTGLELLVDHGSTDAGHWAVEQVWYNGKFYGSPEELARKYADGEVDVVVLEDPLPGGKGHDSTEEPPLFSSHKPRGDFPSPIHVSGPRLVQPHGPRFRLEGNAVLYGGWSFAFRLRSSSGLQVLNVHFGGERIAYEVSVQEAVALYGGHTPAGMQTKYLDVGWGLGSVTHELAPGIDCPETATFLDTFHYYDADDPVHYPRALCLFEMPTGVPLRRHFNSNFKGGFNFYAGLKGQVLVLRTTSTVYNYDYIWDFIFYPNGVMEAKMHATGYVHATFYTPEGLRHGTRLHTHLIGNIHTHLVHYRVDLDVAGTKNSFQTLQMKLENITNPWSPRHRVVQPTLEQTQYSWERQAAFRFKRKLPKYLLFTSPQENPWGHKRSYRLQIHSMADQVLPPGWQEEQAITWARYPLAVTKYRESELCSSSIYHQNDPWHPPVVFEQFLHNNENIENEDLVAWVTVGFLHIPHSEDIPNTATPGNSVGFLLRPFNFFPEDPSLASRDTVIVWPRDNGPNYVQRWIPEDRDCSMPPPFSYNGTYRPV

SEQ ID NO: 837216 - protein, 277 aa, Homo sapiens
MEAKMHATGYVHATFYTPEGLRHGTRLHTHLIGNIHTHLVHYRVDLDVAGTKNSFQTLQMKLENITNPWSPRHRVVQPTLEQTQYSWERQAAFRFKRKLPKYLLFTSPQENPWGHKRSYRLQIHSMADQVLPPGWQEEQAITWARYPLAVTKYRESELCSSSIYHQNDPWHPPVVFEQFLHNNENIENEDLVAWVTVGFLHIPHSEDIPNTATPGNSVGFLLRPFNFFPEDPSLASRDTVIVWPRDNGPNYVQRWIPEDRDCSMPPPFSYNGTYRPV

SEQ ID NO: 837217 - protein, 770 aa, Homo sapiens [sequence omitted]

SEQ ID NO: 837218 - protein, 751 aa, Homo sapiens; identical to SEQ ID NO: 837215

SEQ ID NO: 837219 - protein, 412 aa, Homo sapiens
MPGLHRCGPPGCGFWPAPLYGGHTPAGMQTKYLDVGWGLGSVTHELAPGIDCPETATFLDTFHYYDADDPVHYPRALCLFEMPTGVPLRRHFNSNFKGGFNFYAGLKGQVLVLRTTSTVYNYDYIWDFIFYPNGVMEAKMHATGYVHATFYTPEGLRHGTRLHTHLIGNIHTHLVHYRVDLDVAGTKNSFQTLQMKLENITNPWSPRHRVVQPTLEQTQYSWERQAAFRFKRKLPKYLLFTSPQENPWGHKRSYRLQIHSMADQVLPPGWQEEQAITWARYPLAVTKYRESELCSSSIYHQNDPWHPPVVFEQFLHNNENIENEDLVAWVTVGFLHIPHSEDIPNTATPGNSVGFLLRPFNFFPEDPSLASRDTVIVWPRDNGPNYVQRWIPEDRDCSMPPPFSYNGTYRPV

SEQ ID NO: 837220 - protein, 797 aa, Homo sapiens
MPALGWAVAAILMLQTAMAEPSPGTLPRKAGVFSDLSNQELKAVHSFLWSKKELRLQPSSTTTMAKNTVFLIEMLLPKKYHVLRFLDKGERHPVREARAVIFFGDQEHPNVTEFAVGPLPGPCYMRALSPRPGYQSSWASRPISTAEYALLYHTLQEATKPLHQFFLNTTGFSFQDCHDRCLAFTDVAPRGVASGQRRSWLIIQRYVEGYFLHPTGLELLVDHGSTDAGHWAVEQVWYNGKFYGSPEELARKYADGEVDVVVLEDPLPGGKGHDSTEEPPLFSSHKPRGDFPSPIHVSGPRLVQPHGPRFRLEGNAVLYGGWSFAFRLRSSSGLQVLNVHFGGERIAYEVSVQEAVALYGGHTPAGMQTKYLDVGWGLGSVTHELAPGIDCPETATFLDTFHYYDADDPVHYPRALCLFEMPTGVPLRRHFNSNFKGGFNFYAGLKGQVLVLRTTSTVYNYDYIWDFIFYPNGVMEAKMHATGYVHATFYTPEGLRHGTRLHTHLIGNIHTHLVHYRVDLDVAGTKNSFQTLQMKLENITNPWSPRHRVVQPTLEQTQYSWERQAAFRFKRKLPKYLLFTSPQENPWGHKRSYRLQIHSMADQVLPPGWQEEQAITWASGLRKRRRRGWSCCLTVAEAEETPNESGLVCWAQELTPVIPALWEAKYPLAVTKYRESELCSSSIYHQNDPWHPPVVFEQFLHNNENIENEDLVAWVTVGFLHIPHSEDIPNTATPGNSVGFLLRPFNFFPEDPSLASRDTVIVWPRDNGPNYVQRWIPEDRDCSMPPPFSYNGTYRPV

SEQ ID NO: 837221 - protein, 695 aa, Homo sapiens
MPALGWAVAAILMLQTAMAEPSPGTLPRKAGVFSDLSNQELKAVHSFLWSKKELRLQPSSTTTMAKNTVFLIEMLLPKKYHVLRFLDKGERHPVREARAVIFFGDQEHPNVTEFAVGPLPGPCYMRALSPRPGYQSSWASRPISTAEYALLYHTLQEATKPLHQFFLNTTGFSFQDCHDRCLAFTDVAPRGVASGQRRSWLIIQRYVEGYFLHPTGLELLVDHGSTDAGHWAVEQVWYNGKFYGSPEELARKYADGEVDVVVLEDPLPGGKGHDSTEEPPLFSSHKPRGDFPSPIHVSGPRLVQPHGPRFRLEGNAVLYGGWSFAFRLRSSSGLQVLNVHFGGERIAYEVSVQEAVALYGGHTPAGMQTKYLDVGWGLGSVTHELAPGIDCPETATFLDTFHYYDADDPVHYPRALCLFEMPTGVPLRRHFNSNFKGGFNFYAGLKGQVLVLRTTSTVYNYDYIWDFIFYPNGVMEAKMHATGYVHATFYTPEGLRHGTRLHTHLIGNIHTHLVHYRVDLDVAGTKNSFQTLQMKLENITNPWSPRHRVVQPTLEQTQYSWERQAAFRFKRKLPKYLLFTSPQENPWGHKRSYRLQIHSMADQVLPPGWQEEQAITWARYPLAVTKYRESELCSSSIYHQNDPWHPPVVFEQFLHNNENIENEDLVAWVTVGFLHIPHSEDIPNTATPQSLALCA

SEQ ID NO: 837222 - protein, 619 aa, Homo sapiens [sequence omitted]

SEQ ID NO: 837223 - protein, 151 aa, Homo sapiens
YLVTARGYLAQVMACSSCQPGGSTWSAMESELCSSSIYHQNDPWHPPVVFEQFLHNNENIENEDLVAWVTVGFLHIPHSEDIPNTATPGNSVGFLLRPFNFFPEDPSLASRDTVIVWPRDNGPNYVQRWIPEDRDCSMPPPFSYNGTYRPV

SEQ ID NO: 837224 - protein, 108 aa, Homo sapiens
MPALGWAVAAILMLQTAMAEPSPGTLPRKAGVFSDLSNQRHCDRVASGQRPQLRPALDPCPQGSSGKTPKTSRTKEAKSKKKGRAQEHSRTETKTTTRETKARKTTEE

SEQ ID NO: 837225 - protein, 751 aa, Homo sapiens; identical to SEQ ID NO: 837215

SEQ ID NO: 837226 - protein, 751 aa, Homo sapiens; identical to SEQ ID NO: 837215

SEQ ID NO: 837227 - protein, 751 aa, Homo sapiens; identical to SEQ ID NO: 837215

SEQ ID NO: 837228 - protein, 515 aa, Homo sapiens
MPALGWAVAAILMLQTAMAEPSPGTLPRKAGVFSDLSNQELKAVHSFLWSKKELRLQPSSTTTMAKNTVFLIEMLLPKKYHVLRFLDKGERHPVREARAVIFFGDQEHPNVTEFAVGPLPGPCYMRALSPRPGYQSSWASRPISTAEYALLYHTLQEATKPLHQFFLNTTGFSFQDCHDRCLAFTDVAPRGVASGQRRSWLIIQRYVEGYFLHPTGLELLVDHGSTDAGHWAVEQVWYNGKFYGSPEELARKYADGEVDVVVLEDPLPGGKGHDSTEEPPLFSSHKPRGDFPSPIHVSGPRLVQPHGPRFRLEGNAVLYGGWSFAFRLRSSSGLQVLNVHFGGERIAYEVSVQEAVALYGGHTPAGMQTKYLDVGWGLGSVTHELAPGIDCPETATFLDTFHYYDADDPVHYPRALCLFEMPTGVPLRRHFNSNFKGGFNFYAGLKGQVLVLRTTSTVYNYDYIWDFIFYPNGVMEAKMHATGYVHATFYTPEGLRHGTRLHTHLIGNIHTHLVH

SEQ ID NO: 837229 - protein, 727 aa, Homo sapiens [sequence omitted]

SEQ ID NO: 837230 - protein, 621 aa, Homo sapiens
MPALGWAVAAILMLQTAMAEPSPGTLPRKAGVFSDLSNQELKAVHSFLWSKKELRLQPSSTTTMAKNTVFLIEMLLPKKYHVLRFLDKGERHPVREARAVIFFGDQEHPNVTEFAVGPLPGPCYMRALSPRPGYQSSWASRPISTAEYALLYHTLQEATKPLHQFFLNTTGFSFQDCHDRCLAFTDVAPRGVASGQRRSWLIIQRYVEGYFLHPTGLELLVDHGSTDAGHWAVEQVWYNGKFYGSPEELARKYADGEVDVVVLEDPLPGGKGHDSTEEPPLFSSHKPRGDFPSPIHVSGPRLVQPHGPRFRLEGNAVLYGGWSFAFRLRSSSGLQVLNVHFGGERIAYEVSVQEAVALYGGHTPAGMQTKYLDVGWGLGSVTHELAPGIDCPETATFLDTFHYYDADDPVHYPRALCLFEMPTGVPLRRHFNSNFKGGFNFYAGLKGQVLVLRTTSTVYNYDYIWDFIFYPNGVMEAKMHATGYVHATFYTPEGLRHGTRLHTHLIGNIHTHLVHYRVDLDVAGTKNSFQTLQMKLENITNPWSPRHRVVQPTLEQTQYSWERQAAFRFKRKLPKYLLFTSPQENPWGHKRSYRLQIHSMPQRRVAQLKNVKEDTGHHKEQ

SEQ ID NO: 837231 - protein, 143 aa, Homo sapiens
  misc_feature (105)..(106): Xaa can be any naturally occurring amino acid
  misc_feature (110)..(110): Xaa can be any naturally occurring amino acid
  misc_feature (112)..(112): Xaa can be any naturally occurring amino acid
MPALGWAVAAILMLQTAMAEPSPGTLPRKAGVFSDLSNQELKAVHSFLWSKKELRLQPSSTTTMAKNTVFLIEMLLPKKYHVLRFLDKGERHPVREARAVIFFFXXSAGXLXSFCFFGVGLWDCRLSEFGGLEIRLGGIDVMG

SEQ ID NO: 837232 - protein, 273 aa, Homo sapiens
MRAAGVGLVDCHCHLSAPDFDRDLDDVLEKAKKANVVALVAVAEHSGEFEKIMQLSERYNGFVLPCLGVHPVQGLPPEDQRSVTLKDLDVALPIIENYKDRLLAIGEVGLDFSPRFAGTGEQKEEQRQVLIRQIQLAKRLNLPVNVHSRSAGRPTINLLQEQGAEKVLLHAFDGRPSVAMEGVRAGYFFSIPPSIIRSGQQKLVKQLPLTSICLETDSPALGPEKQVRNEPWNISISAEYIAQVKGISVEEVIEVTTQNALKLFPKLRHLLQK

SEQ ID NO: 837233 - protein, 281 aa, Homo sapiens
MRAAGVGLVDCHCHLSAPDFDRDLDDVLEKAKKANVVALVAVAEHSGEFEKIMQLSERYNGFVLPCLGVHPVQGLPPEDQRSVTLKDLDVALPIIENYKDRLLAIGEVGLDFSPRFAGTGEQKEEQRQVLIRQIQLAKRLNLPVNVHSRSAGRPTINLLQEQGAEKVLLHAFDGRPSVAMEGVRAGYFFSIPPSIIRSGQLLSLFSKKQKLVKQLPLTSICLETDSPALGPEKQVRNEPWNISISAEYIAQVKGISVEEVIEVTTQNALKLFPKLRHLLQK

SEQ ID NO: 837234 - protein, 191 aa, Homo sapiens
MRAAGVGLVDCHCHLSAPDFDRDLDDVLEKAKKANVVALVAVAEHSGEFEKIMQLSERYNGFVLPCLGVHPVQGLPPEDQRSVTLKDLDVALPIIENYKDRLLAIGEVGLDFSPRFAGTGEQKEEQRQVLIRQIQLAKRLNLPVNVHSRSAGRPTINLLQEQAETCETIAFNFYMLRNRFTCTRTRKTGTE

SEQ ID NO: 837235 - protein, 270 aa, Homo sapiens
SSQELTLKAEKTRSHPSKGDLDDVLEKAKKANVVALVAVAEHSGEFEKIMQLSERYNGFVLPCLGVHPVQGLPPEDQRSVTLKDLDVALPIIENYKDRLLAIGEVGLDFSPRFAGTGEQKEEQRQVLIRQIQLAKRLNLPVNVHSRSAGRPTINLLQEQGAEKVLLHAFDGRPSVAMEGVRAGYFFSIPPSIIRSGQQKLVKQLPLTSICLETDSPALGPEKQVRNEPWNISISAEYIAQVKGISVEEVIEVTTQNALKLFPKLRHLLQK

SEQ ID NO: 837236 - protein, 822 aa, Homo sapiens
MGFGSDLKNSHEAVLKLQDWELRLLETVKKFMALRIKSDKEYASTLQNLCNQVDKESTVQMNYVSNVSKSWLLMIQQTEQLSRIMKTHAEDLNSGPLHRLTMMIKDKQQVKKSYIGVHQQIEAEMIKVTKTELEKLKCSYRQLIKEMNSAKEKYKEALAKGKETEKAKERYDKATMKLHMLHNQYVLALKGAQLHQNQYYDITLPLLLDSLQKMQEEMIKALKGIFDEYSQITSLVTEEIVNVHKEIQMSVEQIDPSTEYNNFIDVHRTTAAKEQEIEFDTSLLEENENLQANEIMWNNLTAESLQVMLKTLAEELMQTQQMLLNKEEAVLELEKRIEESSETCEKKSDIVLLLSQKQALEELKQSVQQLRCTEAKFSAQKELLEQKVQENDGKEPPPVVNYEEDARSVTSMERKERLSKFESIRHSIAGIIRSPKSAVGSSALSDMISISEKPLAEQDWYHGAIPRIEAQELLKKQGDFLVRESHGKPGEYVLSVYSDGQRRHFIIQYVDNMYRFEGTGFSNIPQLIDHHYTTKQVITKKSGVVLLNPIPKDKKWILSHEDVILGELLGKGNFGEVYKGTLKDKTSVAVKTCKEDLPQELKIKFLQEAKILKQYDHPNIVKLIGVCTQRQPVYIIMELVSGGDFLTFLRRKKDELKLKQLVKFSLDAAAGMLYLESKNCIHRDLAARNCLVGENNVLKISDFGMSRQEDGGVYSSSGLKQIPIKWTAPEALNYGRYSSESDVWSFGILLWETFSLGVCPYPGMTNQQAREQVERGYRMSAPQHCPEDISKIMMKCWDYKPENRPKFSELQKELTIIKRKLT

SEQ ID NO: 837237 - protein, 822 aa, Homo sapiens; identical to SEQ ID NO: 837236

SEQ ID NO: 837238 - protein, 132 aa, Homo sapiens [sequence omitted]

SEQ ID NO: 837239 - protein, 333 aa, Homo sapiens
  misc_feature (315)..(315): Xaa can be any naturally occurring amino acid
MRAPARGTGCCGRSGGRWLAGAAQPRCLWAGGAGQRFMVPGGTMKSLKKDSRLRITPTRLLEASENVKEKKRAKGPEQPTPTIQEEPEPVSNVLQGDDILALAIKKEDLKEQHIPRLTEKEDKRVITQKFIIRKLKPMDPRRKVCHLVARPANPDEATKPLDYSGTPSLSPGFTVFQLMGPGDSFDGSDQILPHHILGSLQDFKRIALARGNTQLAERIPTSPCLMTLISAEGESKQKAPKEEKRPPWAPPPQHNFLKNWQRNTALRKKQQEALSEHLKKAGSGHCSMAKPGRTYRTRPRTDRGHPIALPHIKPXGERKQRGETSGVRGARRR

SEQ ID NO: 837240 - protein, 1019 aa, Homo sapiens
MRAPARGTGCCGRSGGRWLAGAAQPRCLWAGGAGQRFMVPGGTMKSLKKDSRLRITPTRLLEASENVKEPRLVLNSWAQAICLPWPPKILQLLIHSLACHCPWEKKRAKGPEQPTPTIQEEPEPVSNVLQGDDILALAIKKEDLKEQHIPRLTEKEDKRVITQKFIIRKLKPMDPRRKVCHLVARPANPDEATKPLDYSGPGDSFDGSDQILPHHILGSLQDFKRIALARGNTQLAERIPTSPCLMTLISAEGESKQKAPKEEKRPPWAPPPQHNFLKNWQRNTALRKKQQEALSEHLKKPVSELLMHTGETYRRIQEERELIDCTLPTRRDRKSWENSGFWSRLEYLGDEMTGLVMTKTKTQRGLMEPITHIRKPHSIRVETGLPAQRDASYRYTWDRSLFLIYRRKELQRIMEELDFSQQDIDGLEVVGKGWPFSAVTVEDYTVFERSQGSSSEDTAYLGTLASSSDVSMPILGPSLLFCGKPACWIRGSNPQDKRQVGIAAHLTFETLEGEKTSSELTVVNNGTVAIWYDWRRQHQPDTFQDLKKNRMQRFYFDNREGVILPGEIKTFTFFFKSLTAGVFREFWEFRTHPTLLGGAILQVNLHAVSLTQDVFEDERKVLESKLTAHEAVTVVREVLQELLMGVLTPERTPSPVDAYLTEEDLFRHRNPPLHYEHQVVQSLHQLWRQYMTLPAKAEEARPGDKEHVSPIATEKASVNAELLPRFRSPISETQVPRPENEALRESGSQKARVGTKSPQRKSIMEEILVEESPDVDSTKSPWEPDGLPLLEWNLCLEDFRKAVMVLPDENHREDALMRLNKAALELCQKPRPLQSNLLHQMCLQLWRDVIDSLVGHSMWLRSVLGLPEKETIYLNVPEEQDQKSPPIMEVKVPVGKAGKEERKGAAQEKKQLGIKDKEDKKGAKLLGKEDRPNSKKHKAKDDKKVIKSASQDRFSLEDPTPDIILSSQEPIDPLVMGKYTQRLHSEVRGLLDTLVTDLMVLADELSPIKNVEEALRLCR

SEQ ID NO: 837241 - protein, 672 aa, Homo sapiens
MRAPARGTGCCGRSGGRWLAGAAQPRCLWAGGAGQRFMVPGGTMKSLKKDSRLRITPTRLLEASENVKEKKRAKGPEQPTPTIQEEPEPVSNVLQGDDILALAIKKEDLKEQHIPRLTEKEDKRVITQKFIIRKLKPMDPRRKVCHLVARPANPDEATKPLDYSGPGDSFDGSDQILPHHILGSLQDFKRIALARGNTQLAERIPTSPCLMTLISAEGESKQKAPKEEKRPPWAPPPQHNFLKNWQRNTALRKKQQEALSEHLKKPVSELLMHTGETYRRIQEERELIDCTLPTRRDRKSWENSGFWSRLEYLGDEMTGLVMTKTKTQRGLMEPITHIRKPHSIRVETGLPAQRDASYRYTWDRSLFLIYRRKELQRIMEELDFSQQDIDGLEVVGKGWPFSAVTVEDYTVFERSQGSSSEDTAYLGTLASSSDVSMPILGPSLLFCGKPACWIRGSNPQDKRQVGIAAHLTFETLEGEKTSSELTVVNNGTVAIWYDWRRQHQPDTFQDLKKNRMQRFYFDNREGVILPGEIKTFTFFFKSLTAGVFREFWEFRTHPTLLGGAILQVNLHAVSLTQDVFEDERKVLESKLTAHEAVTVVREVLQELLMGVLTPERTPSPVDAYLTEEDLFRHRNPPVRPSASPCPLMCALRQGSPTRRPHSGRSVGCWTPW

SEQ ID NO: 837242 - protein, 872 aa, Homo sapiens
MRAPARGTGCCGRSGGRWLAGAAQPRCLWAGGAGQRFMVPGGTMKSLKKDSRLRITPTRLLEASENVKEKKRAKGPEQPTPTIQEEPEPVSNVLQGDDILALAIKKEDLKEQHIPRLTEKEDKRVITQKFIIRKLKPMDPRRKVCHLVARPANPDEATKPLDYSGPGDSFDGSDQILPHHILGSLQDFKRIALARGNTQLAERIPTSPCLMTLISAEGESKQKAPKEEKRPPWAPPPQHNFLKNWQRNTALRKKQQEALSEHLKKPVSELLMHTGETYRRIQEERELIDCTLPTRRDRKSWENSGFWSRLEYLGDEMTGLVMTKTKTQRGLMEPITHIRKPHSIRVETGLPAQRDASYRYTWDRSLFLIYRRKELQRIMEELDFSQQDIDGLEVVGKGWPFSAVTVEDYTVFERSQGSSSEDTAYLGTLASSSDVSMPILGPSLLFCGKPACWIRGSNPQDKRQVGIAAHLTFETLEGEKTSSELTVVNNGTVAIWYDWRRQHQPDTFQDLKKNRMQRFYFDNREGVILPGEIKTFTFFFKSLTAGVFREFWEFRTHPTLLGGAILQVNLHAVSLTQDVFEDERKVLESKLTAHEAVTVVREVLQELLMGVLTPERTPSPVDAYLTEEDLFRHRNPPLHYEHQVVQSLHQLWRQYMTLPAKAEEARPGDKEHVSPIATEKASVNAELLPRFRSPISETQVPRPENEALRESGSQKARVGTKSPQRKSIMEEILVEESPDVDSTKSPWEPDGLPLLEWNLCLEDFRKAVMVLPDENHREDALMRLNKAALELCQKPRPLQSNLLHQMCLQLWRDVIDSLVGHSMWLRSVLGLPEKETIYLNVPEEQDQKSPPIMEVKVPARAAKGVVRRAVPS

SEQ ID NO: 837243 - protein, 984 aa, Homo sapiens
MRAPARGTGCCGRSGGRWLAGAAQPRCLWAGGAGQRFMVPGGTMKSLKKDSRLRITPTRLLEASENVKEKKRAKGPEQPTPTIQEEPEPVSNVLQGDDILALAIKKEDLKEQHIPRLTEKEDKRVITQKFIIRKLKPMDPRRKVCHLVARPANPDEATKPLDYSGPGDSFDGSDQILPHHILGSLQDFKRIALARGNTQLAERIPTSPCLMTLISAEGESKQKAPKEEKRPPWAPPPQHNFLKNWQRNTALRKKQQEALSEHLKKPVSELLMHTGETYRRIQEERELIDCTLPTRRDRKSWENSGFWSRLEYLGDEMTGLVMTKTKTQRGLMEPITHIRKPHSIRVETGLPAQRDASYRYTWDRSLFLIYRRKELQRIMEELDFSQQDIDGLEVVGKGWPFSAVTVEDYTVFERSQGSSSEDTAYLGTLASSSDVSMPILGPSLLFCGKPACWIRGSNPQDKRQVGIAAHLTFETLEGEKTSSELTVVNNGTVAIWYDWRRQHQPDTFQDLKKNRMQRFYFDNREGVILPGEIKTFTFFFKSLTAGVFREFWEFRTHPTLLGGAILQVNLHAVSLTQDVFEDERKVLESKLTAHEAVTVVREVLQELLMGVLTPERTPSPVDAYLTEEDLFRHRNPPLHYEHQVVQSLHQLWRQYMTLPAKAEEARPGDKEHVSPIATEKASVNAELLPRFRSPISETQVPRPENEALRESGSQKARVGTKSPQRKSIMEEILVEESPDVDSTKSPWEPDGLPLLEWNLCLEDFRKAVMVLPDENHREDALMRLNKAALELCQKPRPLQSNLLHQMCLQLWRDVIDSLVGHSMWLRSVLGLPEKETIYLNVPEEQDQKSPPIMEVKVPVGKAGKEERKGAAQEKKQLGIKDKEDKKGAKLLGKEDRPNSKKHKAKDDKKVIKSASQDRFSLEDPTPDIILSSQEPIDPLVMGKYTQRLHSEVRGLLDTLVTDLMVLADELSPIKNVEEALRLCR

SEQ ID NO: 837244 - protein, 74 aa, Homo sapiens
LQLWRDVIDSLVGHSMWLRSVLGLPEKETIYLNVPEEQGQILCNQPHLCIALLISLNGQAAVPGPVILLWWKLC

SEQ ID NO: 837245 - protein, 521 aa, Homo sapiens
MSEPKAIDPKLSTTDRVVKAVPFPPSHRLTAKEVFDNDGKPRVDILKAHLMKEGRLEESVALRIITEGASILRQEKNLLDIDAPVTVCGDIHGQFFDLMKLFEVGGSPANTRYLFLGDYVDRGYFSIECVLYLWALKILYPKTLFLLRGNHECRHLTEYFTFKQECKIKYSERVYDACMDAFDCLPLAALMNQQFLCVHGGLSPEINTLDDIRKLDRFKEPPAYGPMCDILWSDPLEDFGNEKTQEHFTHNTVRGCSYFYSYPAVCEFLQHNNLLSILRAHEAQDAGYRMYRKSQTTGFPSLITIFSAPNYLDVYNNKAAVLKYENNVMNIRQFNCSPHPYWLPNFMDVFTWSLPFVGEKVTEMLVNVLNICSDDELGSEEDGFDGATAAARKEVIRNKIRAIGKMARVFSVLREESESVLTLKGLTPTGMLPSGVLSGGKQTLQSATVEAIEADEAIKGFSPQHKITSFEEAKGLDRINERMPPRRDAMPSDANLNSINKALTSETNGTDSNGSNSSNIQ

SEQ ID NO: 837246 - protein, 511 aa, Homo sapiens
MSEPKAIDPKLSTTDRVVKAVPFPPSHRLTAKEVFDNDGKPRVDILKAHLMKEGRLEESVALRIITEGASILRQEKNLLDIDAPVTVCGDIHGQFFDLMKLFEVGGSPANTRYLFLGDYVDRGYFSIECVLYLWALKILYPKTLFLLRGNHECRHLTEYFTFKQECKIKYSERVYDACMDAFDCLPLAALMNQQFLCVHGGLSPEINTLDDIRKLDRFKEPPAYGPMCDILWSDPLEDFGNEKTQEHFTHNTVRGCSYFYSYPAVCEFLQHNNLLSILRAHEAQDAGYRMYRKSQTTGFPSLITIFSAPNYLDVYNNKAAVLKYENNVMNIRQFNCSPHPYWLPNFMDVFTWSLPFVGEKVTEMLVNVLNICSDDELGSEEDGFDGATAAARKEVIRNKIRAIGKMARVFSVLREESESVLTLKGLTPTGMLPSGVLSGGKQTLQSAIKGFSPQHKITSFEEAKGLDRINERMPPRRDAMPSDANLNSINKALTSETNGTDSNGSNSSNIQ

SEQ ID NO: 837247 - protein, 521 aa, Homo sapiens; identical to SEQ ID NO: 837245

SEQ ID NO: 837248 - protein, 480 aa, Homo sapiens
MSEPKAIDPKLSTTDRVVKAVPFPPSHRLTAKEVFDNDGKPRVDILKAHLMKEGRLEESVALRIITEGASILRQEKNLLDIDAPVTVCGDIHGQFFDLMKLFEVGGSPANTRYLFLGDYVDRGYFSIECVLYLWALKILYPKTLFLLRGNHECRHLTEYFTFKQECKIKYSERVYDACMDAFDCLPLAALMNQQFLCVHGGLSPEINTLDDIRKLDRFKEPPAYGPMCDILWSDPLEDFGNEKTQEHFTHNTVRGCSYFYSYPAVCEFLQHNNLLSILRAHEAQDAGYRMYRKSQTTGFPSLITIFSAPNYLDVYNNKAAVLKYENNVMNIRQFNCSPHPYWLPNFMDVFTWSLPFVGEKVTEMLVNVLNICSDDELGSEEDGFDGATAAARKEVIRNKIRAIGKMARVFSVLREESESVLTLKGLTPTGMMGIAAYQQLDVLASDSSLFALGARNWIQFTLSLKKRERDNKLYFGGDGD

SEQ ID NO: 837249 - protein, 521 aa, Homo sapiens; identical to SEQ ID NO: 837245

SEQ ID NO: 837250 - protein, 521 aa, Homo sapiens; identical to SEQ ID NO: 837245

SEQ ID NO: 837251 - protein, 521 aa, Homo sapiens; identical to SEQ ID NO: 837245

SEQ ID NO: 837252 - protein, 511 aa, Homo sapiens; identical to SEQ ID NO: 837246

SEQ ID NO: 837253 - protein, 722 aa, Homo sapiens
MKTLDIVNVTSDPNRCKANNFEGEEGNTCLENPALSPSLLRSYTLILYNYFCCTSQSFLDNGTTYKKKVIHLPQTRISKPNTTLCSSFTEFGTKRLKHALCLRKNNVMCEWNQSPIDGKGVRMMKGDDAFNWIKRTVLSITNLITDGSTILNFKIFLLISFVVLKINNFFFFEDGVLLVAQAGMQWRDLSSLQPPPPGFKRFSCLSLPSSWDYRRVPPRPANFVFLVEMGFHHVGQVGLELLTSSDPPASASQSAGITGVSHCGRPKKNSFYSYQTTLTSAMFKHTWTIDSVFFNSLKYIILKLQTHLFKPKFHHRHINWVSISYFGGQFQSVYYDNHLFRCNIVEDIGNFRFYTFLLGLWNEKLIGYHFQNEIGNYGYPSYRAAVNDDLNVCYITDFLFSSEAVVNVHFAMIEKLRFVNITIGTINFLKHEISMNKYKFEMIIHENPKSKYFQTIEGYTTVFLKSLFPPLKKHATNCFFSKLKLCTVVKLKICRKNCLVFLHNKNFYYSGVGDQSGQYSETLSLLKYKKKKKKKKISQAWWCAPVIPATWEAEAGELLVTWEAEVAVSRDRAIALQSGGQSKTHSQKKKKKEFLLLFPEEWFLLTCYCIIKKDLLMVQYNNLELIYVAFYSYLNAFLCHIDHMASSPTFLLIFNKPCCSTIRETFRFWMILPVEVETSSDNRKGKYKGPNIFIVEFTSKITYPYRLSSLCSTSINSDFINH

SEQ ID NO: 837254 - protein, 323 aa, Homo sapiens
MEPRVRVEGWKVPTSRCRFLLARVLGYLVVMEAVLTEELDEEEQLLRRHRKEKKELQAKIQGMKNAVPKNDKKRRKQLTEDVAKLEKEMEQKHREELEQLKLTTKENKIDSVAVNISNLVLENQPPRISKAQKRREKKAALEKEREERIAEAEIENLTGARHMESEKLAQILAARQLEIKQIPSDGHCMYKAIEDQLKEKDCALTVVALRSQTAEYMQSHVEDFLPFLTNPNTGDMYTPEEFQKYCEDIVNTAAWGGQLELRALSHILQTPIEIIQADSPPIIVGEEYSKKPLILVYMRHAYGLGEHYNSVTRLVNIVTENCS

SEQ ID NO: 837255 - protein, 323 aa, Homo sapiens; identical to SEQ ID NO: 837254

SEQ ID NO: 837256 - protein, 148 aa, Homo sapiens
GFQGLLIRVEEKVKFCCNDSLNSPPLQKESRAVSLLTSPAAGIKTVDPLPLREDSEDNIHKFAEATLPVSKIPKYPTNPPGQLPSPPHVPSYWHPSRRIQGSLRDPEFQHNDEDRLSEISARSAASSLRAFQTLARAKKRKENFWGKT

SEQ ID NO: 837257 - protein, 434 aa, Homo sapiens [sequence omitted]

SEQ ID NO: 837258 - protein, 434 aa, Homo sapiens [sequence omitted]

SEQ ID NO: 837259 - protein, 168 aa, Homo sapiens
GFQGLLIRVEEKVKFCCNDSLNSPPLQKESRAVSLLTSPAAGIKTVDPLPLREDSEDNIHKFAEATLPVSKIPKYPTNPPGQLPSPPHVPSYWHPSRRIQGSLRDPEFQHNVGKARMNNLQLPQHEAFNDEDEDRLSEISARSAASSLRAFQTLARAKKRKENFWGKT

SEQ ID NO: 837260 - protein, 714 aa, Homo sapiens
MPVRFKGLSEYQRNFLWKKSYLSESCNSSVGRKYPWAGLRSDQLGITKEPSFISKRRVPYHDPQISKSLEWNGAISESNVVASPEPEAPETPKSQEAEQKDVIQERVHSLEASRVPKRTRSHSADSRAEGASDVENNEGVTNHTPVNENVELEHSTKVLSENVDNGLDRLLRKKAGLTVVPSYNALRNSEYQRQFVWKTSKETAPAFAANQVFHNKSQFVPPFKGNSVIHETEYKRNFKGLSPVKEPKLRNDLRENRNLETVSPERKSNKIDDRLKLEAEMELKDLHQPKRKLTPWKHQRLGKVNSEYRAKFLSPAQYLYKAGAWTHVKGNMPNQVKELREKAEFYRKRVQGTHFSRDHLNQILSDSNCCWDVSSTTSSEGTVSSNIRALDLAGDPTSHKTLQKCPSTEPEEKGNIVEEQPQKNTTEKLGVSAPTIPVRRRLAWDTENTSEDVQKQPGEKEEEDDNEEEGDRKTGKQAFMGEQEKLDVHEKSKADKMKEGSDSSVSSEKGGRLPTPKLRELGGIQRTHHDLTTPAVGGAVLVSPSKMKPPAPEQRKRMTSQDCLETSKNDFTKKESRAVSLLTSPAAGIKTVDPLPLREDSEDNIHKFAEATLPVSKIPKYPTNPPGQLPSPPHVPSYWHPSRRIQGSLRDPEFQHNVGKARMNNLQLPQHEAFNDEDEDRLSEISARSAASSLRAFQTLARAKKRKENFWGKT

SEQ ID NO: 837261 - protein, 694 aa, Homo sapiens
MPVRFKGLSEYQRNFLWKKSYLSESCNSSVGRKYPWAGLRSDQLGITKEPSFISKRRVPYHDPQISKSLEWNGAISESNVVASPEPEAPETPKSQEAEQKDVIQERVHSLEASRVPKRTRSHSADSRAEGASDVENNEGVTNHTPVNENVELEHSTKVLSENVDNGLDRLLRKKAGLTVVPSYNALRNSEYQRQFVWKTSKETAPAFAANQVFHNKSQFVPPFKGNSVIHETEYKRNFKGLSPVKEPKLRNDLRENRNLETVSPERKSNKIDDRLKLEAEMELKDLHQPKRKLTPWKHQRLGKVNSEYRAKFLSPAQYLYKAGAWTHVKGNMPNQVKELREKAEFYRKRVQGTHFSRDHLNQILSDSNCCWDVSSTTSSEGTVSSNIRALDLAGDPTSHKTLQKCPSTEPEEKGNIVEEQPQKNTTEKLGVSAPTIPVRRRLAWDTENTSEDVQKQPGEKEEEDDNEEEGDRKTGKQAFMGEQEKLDVHEKSKADKMKEGSDSSVSSEKGGRLPTPKLRELGGIQRTHHDLTTPAVGGAVLVSPSKMKPPAPEQRKRMTSQDCLETSKNDFTKKESRAVSLLTSPAAGIKTVDPLPLREDSEDNIHKFAEATLPVSKIPKYPTNPPGQLPSPPHVPSYWHPSRRIQGSLRDPEFQHNDEDRLSEISARSAASSLRAFQTLARAKKRKENFWGKT

SEQ ID NO: 837262 - protein, 714 aa, Homo sapiens; identical to SEQ ID NO: 837260

SEQ ID NO: 837263 - protein, 714 aa, Homo sapiens; identical to SEQ ID NO: 837260

SEQ ID NO: 837264 - protein, 193 aa, Homo sapiens
FPRVPSRFLYLHRRLSNSPKCSLIAMGNYTGPPRHFFREQAFSRLYLYTRMIVFHHHFGTSTAGPSFYSPPPQRKPGVMPLGFSPAGQKKVDPLPLREDSEDNIHKFAEATLPVSKIPKYPTNPPGQLPSPPHVPSYWHPSRRIQGSLRDPEFQHNDEDRLSEISARSAASSLRAFQTLARAKKRKENFWGKT

SEQ ID NO: 837265 - protein, 714 aa, Homo sapiens; identical to SEQ ID NO: 837260

SEQ ID NO: 837266 - protein, 714 aa, Homo sapiens; identical to SEQ ID NO: 837260

SEQ ID NO: 837267 - protein, 228 aa, Homo sapiens
SGGDMPVRFKGLSEYQRNFLWKKSYLSESCNSSVGRKYPWAGLRSDQLGITKEPSFISKRRVPYHDPQISKSLEWNGAISESNVVASPEPEAPETPKSQEAEQKDVIQERVHSLEASRVPKRTRSHSADSRAEGASDVENNEGVTNHTPVNENVELEHSTKVLSENVDNGLDRLLRKKAGLTVVPSYNALRNSEYQRQFVWKTSKETAPAFAANQASDDHCCQMQHIY

SEQ ID NO: 837268 - protein, 714 aa, Homo sapiens; identical to SEQ ID NO: 837260

SEQ ID NO: 837269 - protein, 434 aa, Homo sapiens [sequence omitted]

SEQ ID NO: 837270 - protein, 235 aa, Homo sapiens
MGEQEKLDVHEKSKADKMKEGSDSSVSSEKGGRLPTPKLRELGGIQRTHHDLTTPAVGGAVLVSPSKMKPPAPEQRKRMTSQDCLETSKNDFTKKESRAVSLLTSPAAGIKTVDPLPLREDSEDNIHKFAEATLPVSKIPKYPTNPPGQLPSPPHVPSYWHPSRRIQGSLRDPEFQHNVGKARMNNLQLPQHEAFNDEDEDRLSEISARSAASSLRAFQTLARAKKRKENFWGKT

SEQ ID NO: 837271 - protein, 222 aa, Homo sapiens [sequence omitted]

SEQ ID NO: 837272 - protein, 714 aa, Homo sapiens; identical to SEQ ID NO: 837260

SEQ ID NO: 837273 - protein, 714 aa, Homo sapiens; identical to SEQ ID NO: 837260

SEQ ID NO: 837274 - protein, 714 aa, Homo sapiens; identical to SEQ ID NO: 837260

SEQ ID NO: 837275 - protein, 714 aa, Homo sapiens; identical to SEQ ID NO: 837260

SEQ ID NO: 837276 - protein, 718 aa, Homo sapiens
MPVRFKGLSEYQRNFLWKKSYLSESCNSSVGRKYPWAGLRSDQLGITKEPSFISKRRVPYHDPQISKSLEWNGAISESNVVASPEPEAPETPKSQEAEQKDVIQERVHSLEASRVPKRTRSHSADSRAEGASDVENNEGVTNHTPVNENVELEHSTKVLSENVDNGLDRLLRKKAGLTVVPSYNALRNSEYQRQFVWKTSKETAPAFAANQVFHNKSQFVPPFKGNSVIHETEYKRNFKGLSPVKEPKLRNDLRENRNLETVSPERKSNKIDDRLKLEAEMELKDLHQPKRKLTPWKHQRLGKVNSEYRAKFLSPAQYLYKAGAWTHVKGNMPNQVKELREKAEFYRKRVQGTHFSRDHLNQILSDSNCCWDVSSTTSSEGTVSSNIRALDLAGDPTSHKTLQKCPSTEPEEKGNIVEEQPQKNTTEKLGVSAPTIPVRRRLAWDTENTSEDVQKQPGEKEEEDDNEEEGDRKTGKQAFMGEQEKLDVHEKSKADKMKEGSDSSVSSEKGGRLPTPKLRELGGIQRTHHDLTTPAVGGAVLVSPSKMKPPAPEQRKRMTSQDCLETSKNDFTKKESRAVSLLTSPAAGIKTVDPLPLREDSEDNIHKFAEATLPVSKIPKYPTNPPGQLPSPPHVPSYWHPSRRIQGSLRDPEFQHNVGKARMNNLQLPQHEAFNDEDEDRLSEISARSAASSLRAFQTLARAKKRKEMRKLRFTETE

SEQ ID NO: 837277 - protein, 306 aa, Homo sapiens
EGDASGIQTSGACRARSGGGRDRGCTGRGCGADARAGAAMVKISFQPAVAGIKGDKADKASASAPAPASATEILLTPAREEQPPQHRSKRGSSVGGVCYLSMGMVVLLMGLVFASVYIYRYFFLAQLARDNFFRCGVLYEDSLSSQVRTQMELEEDVKIYLDENYERINVPVPQFGGGDPADIIHDFQRGLTAYHDISLDKCYVIELNTTIVLPPRNFWELLMNVKRGTYLPQTYIIQEEMVVTEHVSDKEALGSFIYHLCNGKDTYRLRRRATRRRINKRGAKNCNAIRHFENTFVVETLICGVV

SEQ ID NO: 837278 - protein, 306 aa, Homo sapiens; identical to SEQ ID NO: 837277

SEQ ID NO: 837279 - protein, 306 aa, Homo sapiens; identical to SEQ ID NO: 837277

SEQ ID NO: 837280 - protein, 306 aa, Homo sapiens; identical to SEQ ID NO: 837277

SEQ ID NO: 837281 - protein, 250 aa, Homo sapiens
GWYRSGDVKDPGLGTEILLTPAREEQPPQHRSKRGSSVGGVCYLSMGMVVLLMGLVFASVYIYRYFFLAQLARDNFFRCGVLYEDSLSSQVRTQMELEEDVKIYLDENYERINVPVPQFGGGDPADIIHDFQRGLTAYHDISLDKCYVIELNTTIVLPPRNFWELLMNVKRGTYLPQTYIIQEEMVVTEHVSDKEALGSFIYHLCNGKDTYRLRRRATRRRINKRGAKNCNAIRHFENTFVVETLICGVV

SEQ ID NO: 837282 - protein, 259 aa, Homo sapiens
EGDASGIQTSGACRARSGGGRDRGCTGRGCGADARAGAAMVKISFQPAVAGIKGDKADKASASAPAPASATEILLTPARLARDNFFRCGVLYEDSLSSQVRTQMELEEDVKIYLDENYERINVPVPQFGGGDPADIIHDFQRGLTAYHDISLDKCYVIELNTTIVLPPRNFWELLMNVKRGTYLPQTYIIQEEMVVTEHVSDKEALGSFIYHLCNGKDTYRLRRRATRRRINKRGAKNCNAIRHFENTFVVETLICGVV

SEQ ID NO: 837283 - protein, 283 aa, Homo sapiens
  misc_feature (13)..(13): Xaa can be any naturally occurring amino acid
  misc_feature (24)..(24): Xaa can be any naturally occurring amino acid
  misc_feature (31)..(31): Xaa can be any naturally occurring amino acid
  misc_feature (73)..(73): Xaa can be any naturally occurring amino acid
PHTLPPAPPPPAXSLNITFHPPLXPINPHNXHNPSPSPPPPPSATHILLTPPTHHHPPQHPSNTPTSLPPLSXLSIPIVLLLIPLLFPSLYIYTYFFFHTSPHLARDNFFRCGVLYEDSLSSQVRTQMELEEDVKIYLDENYERINVPVPQFGGGDPADIIHDFQRGLTAYHDISLDKCYVIELNTTIVLPPRNFWELLMNVKRGTYLPQTYIIQEEMVVTEHVSDKEALGSFIYHLCNGKDTYRLRRRATRRRINKRGAKNCNAIRHFENTFVVETLICGVV

SEQ ID NO: 837284 - protein, 75 aa, Homo sapiens
EEVDKKEVVEAVTIVETPPMVVVGIVGYVETPRGLLCAVPEEGSPQSRQWDGRLRNGAGKVTAQSRPRGTSRGFC

SEQ ID NO: 837285 - protein, 176 aa, Homo sapiens
EGDASGIQTSGACRARSGGGRDRGCTGRGCGADARAGAAMVKISFQPAVAGIKGDKADKASASAPAPASATEILLTPAREEQPPQHRSKRGSSVGGVCYLSMGMVVLLMGLVFASVYIYRYFFLAQLARDNFFRCGVLYEDSLSSQVRTQMELEEDVKIYSLLSHVHGGRAVGSAE

SEQ ID NO: 837286 - protein, 92 aa, Homo sapiens
RKPEGPTHCGGHLVLQRGTYLPQTYIIQEEMVVTEHVSDKEALGSFIYHLCNGKDTYRLRRRATRRREWLASPTVAPVPCPRPQLSSRLAQL

SEQ ID NO: 837287 - protein, 306 aa, Homo sapiens; identical to SEQ ID NO: 837277

SEQ ID NO: 837288 - protein, 306 aa, Homo sapiens; identical to SEQ ID NO: 837277

SEQ ID NO: 837289 - protein, 203 aa, Homo sapiens
MVVLLMGLVFASVYIYRYFFLAQLARDNFFRCGVLYEDSLSSQVRTQMELEEDVKIYLDENYERINVPVPQFGGGDPADIIHDFQRGLTAYHDISLDKCYVIELNTTIVLPPRNFWELLMNVKRGTYLPQTYIIQEEMVVTEHVSDKEALGSFIYHLCNGKDTYRLRRRATRRRINKRGAKNCNAIRHFENTFVVETLICGVV

SEQ ID NO: 837290 - protein, 269 aa, Homo sapiens
EGDASGIQTSGACRARSGGGRDRGCTGRGCGADARAGAAMVKISFQPAVAGIKGDKADKASASAPAPASATEILLTPAREEQPPQHRSKRGSSVGGVCYLSMGMVVLLMGLVFASVYIYRYFFLAQLARDNFFRCGVLYEDSLSSQVRTQMELEEDVKIYLDENYERINVPVPQFGGGDPADIIHDFQRRGTYLPQTYIIQEEMVVTEHVSDKEALGSFIYHLCNGKDTYRLRRRATRRRINKRGAKNCNAIRHFENTFVVETLICGVV

SEQ ID NO: 837291 - protein, 306 aa, Homo sapiens; identical to SEQ ID NO: 837277

SEQ ID NO: 837292 - protein, 166 aa, Homo sapiens
MSLHSSPTLPTSLYQSCDLSVGGPSLLTWVWRRERRCCKVFSVSHCLEAGPAKAWAHSCTGSPRGRTGWGSRACEALGKGMGLWGRGGMGFRSICTIRKVLRSFFLEGTLSSLSLFLDLGLELRMGRCAQGGTHQSTREGGYLGVSQGLCQCLQPTSRSLEFGEWG

SEQ ID NO: 837293 - protein, 211 aa, Homo sapiens
EGDASGIQTSGACRARSGGGRDRGCTGRGCGADARAGAAMVKISFQPAVAGIKGDKADKASASAPAPASATEILLTPAREEQPPQHRSKRGSSVGGVCYLSMGMVVLLMGLVFASVYIYRYFFLAQLARDNFFRCGVLYEDSLSSQVRTQMELEEDVKIYLDENYERINVPVPQFGGGDPADIIHDFQRRGLTAYHDMALSFPSLPKLPHV

SEQ ID NO: 837294 - protein, 1531 aa, Homo sapiens
MSTDSNSLAREFLTDVNRLCNAVVQRVEAREEEEEETHMATLGQYLVHGRGFLLLTKLNSIIDQALTCREELLTLLLSLLPLVWKIPVQEEKATDFNLPLSADIILTKEKNSSSQRSTQEKLHLEGSALSSQVSAKVNVFRKSRRQRKITHRYSVRDARKTQLSTSDSEANSDEKGIAMNKHRRPHLLHHFLTSFPKQDHPKAKLDRLATKEQTPPDAMALENSREIIPRQGSNTDILSEPAALSVISNMNNSPFDLCHVLLSLLEKVCKFDVTLNHNSPLAASVVPTLTEFLAGFGDCCSLSDNLESRVVSAGWTEEPVALIQRMLFRTVLHLLSVDVSTAEMMPENLRKNLTELLRAALKIRICLEKQPDPFAPRQKKTLQEVQEDFVFSKYRHRALLLPELLEGVLQILICCLQSAASNPFYFSQAMDLVQEFIQHHGFNLFETAVLQMEWLVLRDGVPPEASEHLKALINSVMKIMSTVKKVKSEQLHHSMCTRKRHRRCEYSHFMHHHRDLSGLLVSAFKNQVSKNPFEETADGDVYYPERCCCIAVCAHQCLRLLQQASLSSTCVQILSGVHNIGICCCMDPKSVIIPLLHAFKLPALKNFQQHILNILNKLILDQLGGAEISPKIKKAACNICTVDSDQLAQLEETLQGNLCDAELSSSLSSPSYRFQGILPSSGSEDLLWKWDALKAYQNFVFEEDRLHSIQIANHICNLIQKGNIVVQWKLYNYIFNPVLQRGVELAHHCQHLSVTSAQSHVCSHHNQCLPQDVLQIYVKTLPILLKSRVIRDLFLSCNGVSQIIELNCLNGIRSHSLKAFETLIISLGEQQKDASVPDIDGIDIEQKELSSVHVGTSFHHQQAYSDSPQSLSKFYAGLKEAYPKRRKTVNQDVHINTINLFLCVAFLCVSKEAESDRESANDSEDTSGYDSTASEPLSHMLPCISLESLVLPSPEHMHQAADIWSMCRWIYMLSSVFQKQFYRLGGFRVCHKLIFMIIQKLFRSHKEEQGKKEGDTSVNENQDLNRISQPKRTMKEDLLSLAIKSDPIPSELGSLKKSADSLGKLELQHISSINVEEVSATEAAPEEAKLFTSQESETSLQSIRLLEALLAICLHGARTSQQKMELELPNQNLSVESILFEMRDHLSQSKVIETQLAKPLFDALLRVALGNYSADFEHNDAMTEKSHQSAEELSSQPGDFSEEAEDSQCCSFKLLVEEEGYEADSESNPEDGETQDDGVDLKSETEGFSASSSPNDLLENLTQGEIIYPEICMLELNLLSASKAKLDVLAHVFESFLKIIRQKEKNVFLLMQQGTVKNLLGGFLSILTQDDSDFQACQRVLVDLLVSLMSSRTCSEELTLLLRIFLEKSPCTKILLLGILKIIESDTTMSPSQYLTFPLLHAPNLSNGVSSQKYPGILNSKAMGLLRRARVSRSKKEADRESFPHRLLSSWHIAPVHLPLLGQNCWPHLSEGFSVSLWFNVECIHEAESTTEKGKKIKKRNKSLILPDSSFDGTGMMTGLSDLYTKIVFRL

SEQ ID NO: 837295 - protein, 3729 aa, Homo sapiens
MSTDSNSLAREFLTDVNRLCNAVVQRVEAREEEEEETHMATLGQYLVHGRGFLLLTKLNSIIDQALTCREELLTLLLSLLPLVWKIPVQEEKATDFNLPLSADIILTKEKNSSSQRSTQEKLHLEGSALSSQVSAKVNVFRKSRRQRKITHRYSVRDARKTQLSTSDSEANSDEKGIAMNKHRRPHLLHHFLTSFPKQDHPKAKLDRLATKEQTPPDAMALENSREIIPRQGSNTDILSEPAALSVISNMNNSPFDLCHVLLSLLEKVCKFDVTLNHNSPLAASVVPTLTEFLAGFGDCCSLSDNLESRVVSAGWTEEPVALIQRMLFRTVLHLLSVDVSTAEMMPENLRKNLTELLRAALKIRICLEKQPDPFAPRQKKTLQEVQEDFVFSKYRHRALLLPELLEGVLQILICCLQSAASNPFYFSQAMDLVQEFIQHHGFNLFETAVLQMEWLVLRDGVPPEASEHLKALINSVMKIMSTVKKVKSEQLHHSMCTRKRHRRCEYSHFMHHHRDLSGLLVSAFKNQVSKNPFEETADGDVYYPERCCCIAVCAHQCLRLLQQASLSSTCVQILSGVHNIGICCCMDPKSVIIPLLHAFKLPALKNFQQHILNILNKLILDQLGGAEISPKIKKAACNICTVDSDQLAQLEETLQGNLCDAELSSSLSSPSYRFQGILPSSGSEDLLWKWDALKAYQNFVFEEDRLHSIQIANHICNLIQKGNIVVQWKLYNYIFNPVLQRGVELAHHCQHLSVTSAQSHVCSHHNQCLPQDVLQIYVKTLPILLKSRVIRDLFLSCNGVSQIIELNCLNGIRSHSLKAFETLIISLGEQQKDASVPDIDGIDIEQKELSSVHVGTSFHHQQAYSDSPQSLSKFYAGLKEAYPKRRKTVNQDVHINTINLFLCVAFLCVSKEAESDRESANDSEDTSGYDSTASEPLSHMLPCISLESLVLPSPEHMHQAADIWSMCRWIYMLSSVFQKQFYRLGGFRVCHKLIFMIIQKLFRSHKEEQGKKEGDTSVNENQDLNRISQPKRTMKEDLLSLAIKSDPIPSELGSLKKSADSLGKLELQHISSINVEEVSATEAAPEEAKLFTSQESETSLQSIRLLEALLAICLHGARTSQQKMELELPNQNLSVESILFEMRDHLSQSKVIETQLAKPLFDALLRVALGNYSADFEHNDAMTEKSHQSAEELSSQPGDFSEEAEDSQCCSFKLLVEEEGYEADSESNPEDGETQDDGVDLKSETEGFSASSSPNDLLENLTQGEIIYPEICMLELNLLSASKAKLDVLAHVFESFLKIIRQKEKNVFLLMQQGTVKNLLGGFLSILTQDDSDFQACQRVLVDLLVSLMSSRTCSEELTLLLRIFLEKSPCTKILLLGILKIIESDTTMSPSQYLTFPLLHAPNLSNGVSSQKYPGILNSKAMGLLRRARVSRSKKEADRESFPHRLLSSWHIAPVHLPLLGQNCWPHLSEGFSVSLWFNVECIHEAESTTEKGKKIKKRNKSLILPDSSFDGTESDRPEGAEYINPGERLIEEGCIHIISLGSKALMIQVWADPHNATLIFRVCMDSNDDMKAVLLAQVESQENIFLPSKWQHLVLTYLQQPQGKRRIHGKISIWVSGQRKPDVTLDFMLPRKTSLSSDSNKTFCMIGHCLSSQEEFLQLAGKWDLGNLLLFNGAKVGSQEAFYLYACGPNHTSVMPCKYGKPVNDYSKYINKEILRCEQIRELFMTKKDVDIGLLIESLSVVYTTYCPAQYTIYEPVIRLKGQMKTQLSQRPFSSKEVQSILLEPHHLKNLQPTEYKTIQGILHEIGGTGIFVFLFARVVELSSCEETQALALRVILSLIKYNQQRVHELENCNGLSMIHQVLIKQKCIVGFYILKTLLEGCCGEDIIYMNENGEFKLDVDSNAIIQDVKLLEELLLDWKIWSKAEQGVWETLLAALEVLIRADHHQQMFNIKQLLKAQVVHHFLLTCQVLQEYKEGQLTPMPREMAKIFQEKVRSIMYLRHSSSGGRSLMSPGFMVISPSGFTASPYEGENSSNIIPQQMAAHMLRSRSLPAFPTSSLLTQSQKLTGSLGCSIDRLQNIADTYVATQSKKQNSLGSSDTLKKGKEDAFISSCESAKTVCEMEAVLSAQVSVSDVPKGVLGFPVVKADHKQLGAEPRSEDDSPGDESCPRRPDYLKGLASFQRSHSTIASLGLAFPSQNGSAAVGRWPSLVDRNTDDWENVTEDCLVPICCGLYELLSGVLLILPDVLLEDVMDKLIQADTLLVLVNHPSPAIQQGVIKLLDAYFARASKEQKDKFLKNRGFSLLANQLYLHRGTQELLECFIEMFFGRHIGLDEEFDLEDVRNMGLFQKWSVIPILGLIETSLYDNILLHNALLLLLQILNSCSKVADMLLDNGLLYVLCNTVAALNGLEKNIPMSEYKLLACDIQQLFIAVTIHACSSSGSQYFRVIEDLIVMLGYLQNSKNKRTQNMAVALQLRVLQAAMEFIRTTANHDSENLTDSLQSPSAPHHAVVQKRKSIAGPRKFPLAQTESLLMKMRSVANDELHVMMQRRMSQENPSQATETELAQRLQRLTVLAVNRIIYQEFNSDIIDILRTPENVTQSKTSVFQTEISEENIHHEQSSVFNPFQKEIFTYLVEGFKVSIGSSKASGSKQQWTKILWSCKETFRMQLGRLLVHILSPAHAAQERKQIFEIVHEPNHQEILRDCLSPSLQHGAKLVLYLSELIHNHQGELTEEELGTAELLMNALKLCGHKCIPPSASTKADLIKMIKEEQKKYETEEGVNKAAWQKTVNNNQQSLFQRLDSKSKDISKIAADITQAVSLSQGNERKKVIQHIRGMYKVDLSASRHWQELIQQLTHDRAVWYDPIYYPTSWQLDPTEGPNRERRRLQRCYLTIPNKYLLRDRQKSEDVVKPPLSYLFEDKTHSSFSSTVKDKAASESIRVNRRCISVAPSRETAGELLLGKCGMYFVEDNASDTVESSSLQGELEPASFSWTYEEIKEVHKRWWQLRDNAVEIFLTNGRTLLLAFDNTKVRDDVYHNILTNNLPNLLEYGNITALTNLWYTGQITNFEYLTHLNKHAGRSFNDLMQYPVFPFILADYVSETLDLNDLLIYRNLSKPIAVQYKEKEDRYVDTYKYLEEEYRKGAREDDPMPPVQPYHYGSHYSNSGTVLHFLVRMPPFTKMFLAYQDQSFDIPDRTFHSTNTTWRLSSFESMTDVKELIPEFFYLPEFLVNREGFDFGVRQNGERVNHVNLPPWARNDPRLFILIHRQALESDYVSQNICQWIDLVFGYKQKGKASVQAINVFHPATYFGMDVSAVEDPVQRRALETMIKTYGQTPRQLFHMAHVSRPGAKLNIEGELPAAVGLLVQFAFRETREQVKEITYPSPLSWIKGLKWGEYVGSPSAPVPVVCFSQPHGERFGSLQALPTRAICGLSRNFCLLMTYSKEQGVRSMNSTDIQWSAILSWGYADNILRLKSKQSEPPVNFIQSSQQYQVTSCAWVPDSCQLFTGSKCGVITAYTNRFTSSTPSEIEMETQIHLYGHTEEITSLFVCKPYSILISVSRDGTCIIWDLNRLCYVQSLAGHKSPVTAVSASETSGDIATVCDSAGGGSDLRLWTVNGDLVGHVHCREIICSVAFSNQPEGVSINVIAGGLENGIVRLWSTWDLKPVREITFPKSNKPIISLTFSCDGHHLYTANSDGTVIAWCRKDQQRLKQPMFYSFLSSYAAG

SEQ ID NO: 837296 - protein, 3729 aa, Homo sapiens; identical to SEQ ID NO: 837295

SEQ ID NO: 837297 - protein, 3192 aa, Homo sapiens
MSTDSNSLAREFLTDVNRLCNAVVQRVEAREEEEEETHMATLGQYLVHGRGFLLLTKLNSIIDQALTCREELLTLLLSLLPLVWKIPVQEEKATDFNLPLSADIILTKEKNSSSQRSTQEKLHLEGSALSSQVSAKVNVFRKSRRQRKITHRYSVRDARKTQLSTSDSEANSDEKGIAMNKHRRPHLLHHFLTSFPKQDHPKAKLDRLATKEQTPPDAMALENSREIIPRQGSNTDILSEPAALSVISNMNNSPFDLCHVLLSLLEKVCKFDVTLNHNSPLAASVVPTLTEFLAGFGDCCSLSDNLESRVVSAGWTEEPVALIQRMLFRTVLHLLSVDVSTAEMMPENLRKNLTELLRAALKIRICLEKQPDPFAPRQKKTLQEVQEDFVFSKYRHRALLLPELLEGVLQILICCLQSAASNPFYFSQAMDLVQEFIQHHGFNLFETAVLQMEWLVLRDGVPPEASEHLKALINSVMKIMSTVKKVKSEQLHHSMCTRKRHRRCEYSHFMHHHRDLSGLLVSAFKNQVSKNPFEETADGDVYYPERCCCIAVCAHQCLRLLQQASLSSTCVQILSGVHNIGICCCMDPKSVIIPLLHAFKLPALKNFQQHILNILNKLILDQLGGAEISPKIKKAACNICTVDSDQLAQLEETLQGNLCDAELSSSLSSPSYRFQGILPSSGSEDLLWKWDALKAYQNFVFEEDRLHSIQIANHICNLIQKGNIVVQWKLYNYIFNPVLQRGVELAHHCQHLSVTSAQSHVCSHHNQCLPQDVLQIYVKTLPILLKSRVIRDLFLSCNGVSQIIELNCLNGIRSHSLKAFETLIISLGEQQKDASVPDIDGIDIEQKELSSVHVGTSFHHQQAYSDSPQSLSKFYAGLKEAYPKRRKTVNQDVHINTINLFLCVAFLCVSKEAESDRESANDSEDTSGYDSTASEPLSHMLPCISLESLVLPSPEHMHQAADIWSMCRWIYMLSSVFQKQFYRLGGFRVCHKLIFMIIQKLFRSHKEEQGKKEGDTSVNENQDLNRISQPKRTMKEDLLSLAIKSDPIPSELGSLKKSADSLGKLELQHISSINVEEVSATEAAPEEAKLFTSQESETSLQSIRLLEALLAICLHGARTSQQKMELELPNQNLSVESILFEMRDHLSQSKVIETQLAKPLFDALLRVALGNYSADFEHNDAMTEKSHQSAEELSSQPGDFSEEAEDSQCCSFKLLVEEEGYEADSESNPEDGETQDDGVDLKSETEGFSASSSPNDLLENLTQGEIIYPEICMLELNLLSASKAKLDVLAHVFESFLKIIRQKEKNVFLLMQQGTVKNLLGGFLSILTQDDSDFQACQRVLVDLLVSLMSSRTCSEELTLLLRIFLEKSPCTKILLLGILKIIESDTTMSPSQYLTFPLLHAPNLSNGVSSQKYPGILNSKAMGLLRRARVSRSKKEADRESFPHRLLSSWHIAPVHLPLLGQNCWPHLSEGFSVSLWFNVECIHEAESTTEKGKKIKKRNKSLILPDSSFDGTESDRPEGAEYINPGERLIEEGCIHIISLGSKALMIQVWADPHNATLIFRVCMDSNDDMKAVLLAQVESQENIFLPSKWQHLVLTYLQQPQGKRRIHGKISIWVSGQRKPDVTLDFMLPRKTSLSSDSNKTFCMIGHCLSSQEEFLQLAGKWDLGNLLLFNGAKVGSQEAFYLYACGPNHTSVMPCKYGKPVNDYSKYINKEILRCEQIRELFMTKKDVDIGLLIESLSVVYTTYCPAQYTIYEPVIRLKGQMKTQLSQRPFSSKEVQSILLEPHHLKNLQPTEYKTIQGILHEIGGTGIFVFLFARVVELSSCEETQALALRVILSLIKYNQQRVHELENCNGLSMIHQVLIKQKCIVGFYILKTLLEGCCGEDIIYMNENGEFKLDVDSNAIIQDVKLLEELLLDWKIWSKAEQGVWETLLAALEVLIRADHHQQMFNIKQLLKAQVVHHFLLTCQVLQEYKEGQLTPMPREMAKIFQEKVRSIMYLRHSSSGGRSLMSPGFMVISPSGFTASPYEGENSSNIIPQQMAAHMLRSRSLPAFPTSSLLTQSQKLTGSLGCSIDRLQNIADTYVATQSKKQNSLGSSDTLKKGKEDAFISSCESAKTVCEMEAVLSAQVSVSDVPKGVLGFPVVKADHKQLGAEPRSEDDSPGDESCPRRPDYLKGLASFQRSHSTIASLGLAFPSQNGSAAVGRWPSLVDRNTDDWENVTEDCLVPICCGLYELLSGVLLILPDVLLEDVMDKLIQADTLLVLVNHPSPAIQQGVIKLLDAYFARASKEQKDKFLKNRGFSLLANQLYLHRGTQELLECFIEMFFGRHIGLDEEFDLEDVRNMGLFQKWSVIPILGLIETSLYDNILLHNALLLLLQILNSCSKVADMLLDNGLLYVLCNTVAALNGLEKNIPMSEYKLLACDIQQLFIAVTIHACSSSGSQYFRVIEDLIVMLGYLQNSKNKRTQNMAVALQLRVLQAAMEFIRTTANHDSENLTDSLQSPSAPHHAVVQKRKSIAGPRKFPLAQTESLLMKMRSVANDELHVMMQRRMSQENPSQATETELAQRLQRLTVLAVNRIIYQEFNSDIIDILRTPENVTQSKTSVFQTEISEENIHHEQSSVFNPFQKEIFTYLVEGFKVSIGSSKASGSKQQWTKILWSCKETFRMQLGRLLVHILSPAHAAQERKQIFEIVHEPNHQEILRDCLSPSLQHGAKLVLYLSELIHNHQGELTEEELGTAELLMNALKLCGHKCIPPSASTKADLIKMIKEEQKKYETEEGVNKAAWQKTVNNNQQSLFQRLDSKSKDISKIAADITQAVSLSQGNERKKVIQHIRGMYKVDLSASRHWQELIQQLTHDRAVWYDPIYYPTSWQLDPTEGPNRERRRLQRCYLTIPNKYLLRDRQKSEDVVKPPLSYLFEDKTHSSFSSTVKDKAASESIRVNRRCISVAPSRETAGELLLGKCGMYFVEDNASDTVESSSLQGELEPASFSWTYEEIKEVHKRWWQLRDNAVEIFLTNGRTLLLAFDNTKVRDDVYHNILTNNLPNLLEYGNITALTNLWYTGQITNFEYLTHLNKHAGRSFNDLMQYPVFPFILADYVSETLDLNDLLIYRNLSKPIAVQYKEKEDRYVDTYKYLEEEYRKGAREDDPMPPVQPYHYGSHYSNSGTVLHFLVRMPPFTKMFLAYQDFF

SEQ ID NO: 837298 - protein, 2716 aa, Homo sapiens
MSTDSNSLAREFLTDVNRLCNAVVQRVEAREEEEEETHMATLGQYLVHGRGFLLLTKLNSIIDQALTCREELLTLLLSLLPLVWKIPVQEEKATDFNLPLSADIILTKEKNSSSQRSTQEKLHLEGSALSSQVSAKVNVFRKSRRQRKITHRYSVRDARKTQLSTSDSEANSDEKGIAMNKHRRPHLLHHFLTSFPKQDHPKAKLDRLATKEQTPPDAMALENSREIIPRQGSNTDILSEPAALSVISNMNNSPFDLCHVLLSLLEKVCKFDVTLNHNSPLAASVVPTLTEFLAGFGDCCSLSDNLESRVVSAGWTEEPVALIQRMLFRTVLHLLSVDVSTAEMMPENLRKNLTELLRAALKIRICLEKQPDPFAPRQKKTLQEVQEDFVFSKYRHRALLLPELLEGVLQILICCLQSAASNPFYFSQAMDLVQEFIQHHGFNLFETAVLQMEWLVLRDGVPPEASEHLKALINSVMKIMSTVKKVKSEQLHHSMCTRKRHRRCEYSHFMHHHRDLSGLLVSAFKNQVSKNPFEETADGDVYYPERCCCIAVCAHQCLRLLQQASLSSTCVQILSGVHNIGICCCMDPKSVIIPLLHAFKLPALKNFQQHILNILNKLILDQLGGAEISPKIKKAACNICTVDSDQLAQLEETLQGNLCDAELSSSLSSPSYRFQGILPSSGSEDLLWKWDALKAYQNFVFEEDRLHSIQIANHICNLIQKGNIVVQWKLYNYIFNPVLQRGVELAHHCQHLSVTSAQSHVCSHHNQCLPQDVLQIYVKTLPILLKSRVIRDLFLSCNGVSQIIELNCLNGIRSHSLKAFETLIISLGEQQKDASVPDIDGIDIEQKELSSVHVGTSFHHQQAYSDSPQSLSKFYAGLKEAYPKRRKTVNQDVHINTINLFLCVAFLCVSKEAESDRESANDSEDTSGYDSTASEPLSHMLPCISLESLVLPSPEHMHQAADIWSMCRWIYMLSSVFQKQFYRLGGFRVCHKLIFMIIQKLFRSHKEEQGKKEGDTSVNENQDLNRISQPKRTMKEDLLSLAIKSDPIPSELGSLKKSADSLGKLELQHISSINVEEVSATEAAPEEAKLFTSQESETSLQSIRLLEALLAICLHGARTSQQKMELELPNQNLSVESILFEMRDHLSQSKVIETQLAKPLFDALLRVALGNYSADFEHNDAMTEKSHQSAEELSSQPGDFSEEAEDSQCCSFKLLVEEEGYEADSESNPEDGETQDDGVDLKSETEGFSASSSPNDLLENLTQGEIIYPEICMLELNLLSASKAKLDVLAHVFESFLKIIRQKEKNVFLLMQQGTVKNLLGGFLSILTQDDSDFQACQRVLVDLLVSLMSSRTCSEELTLLLRIFLEKSPCTKILLLGILKIIESDTTMSPSQYLTFPLLHAPNLSNGVSSQKYPGILNSKAMGLLRRARVSRSKKEADRESFPHRLLSSWHIAPVHLPLLGQNCWPHLSEGFSVSLWFNVECIHEAESTTEKGKKIKKRNKSLILPDSSFDGTESDRPEGAEYINPGERLIEEGCIHIISLGSKALMIQVWADPHNATLIFRVCMDSNDDMKAVLLAQVESQENIFLPSKWQHLVLTYLQQPQGKRRIHGKISIWVSGQRKPDVTLDFMLPRKTSLSSDSNKTFCMIGHCLSSQEEFLQLAGKWDLGNLLLFNGAKVGSQEAFYLYACGPNHTSVMPCKYGKPVNDYSKYINKEILRCEQIRELFMTKKDVDIGLLIESLSVVYTTYCPAQYTIYEPVIRLKGQMKTQLSQRPFSSKEVQSILLEPHHLKNLQPTEYKTIQGILHEIGGTGIFVFLFARVVELSSCEETQALALRVILSLIKYNQQRVHELENCNGLSMIHQVLIKQKCIVGFYILKTLLEGCCGEDIIYMNENGEFKLDVDSNAIIQDVKLLEELLLDWKIWSKAEQGVWETLLAALEVLIRADHHQQMFNIKQLLKAQVVHHFLLTCQVLQEYKEGQLTPMPREMAKIFQEKVRSIMYLRHSSSGGRSLMSPGFMVISPSGFTASPYEGENSSNIIPQQMAAHMLRSRSLPAFPTSSLLTQSQKLTGSLGCSIDRLQNIADTYVATQSKKQNSLGSSDTLKKGKEDAFISSCESAKTVCEMEAVLSAQVSVSDVPKGVLGFPVVKADHKQLGAEPRSEDDSPGDESCPRRPDYLKGLASFQRSHSTIASLGLAFPSQNGSAAVGRWPSLVDRNTDDWENVTEDCLVPICCGLYELLSGVLLILPDVLLEDVMDKLIQADTLLVLVNHPSPAIQQGVIKLLDAYFARASKEQKDKFLKNRGFSLLANQLYLHRGTQELLECFIEMFFGRHIGLDEEFDLEDVRNMGLFQKWSVIPILGLIETSLYDNILLHNALLLLLQILNSCSKVADMLLDNGLLYVLCNTVAALNGLEKNIPMSEYKLLACDIQQLFIAVTIHACSSSGSQYFRVIEDLIVMLGYLQNSKNKRTQNMAVALQLRVLQAAMEFIRTTANHDSENLTDSLQSPSAPHHAVVQKRKSIAGPRKFPLAQTESLLMKMRSVANDELHVMMQRRMSQENPSQATETELAQRLQRLTVLAVNRIIYQEFNSDIIDILRTPENVTQSKTSVFQTEISEENIHHEQSSVFNPFQKEIFTYLVEGFKVSIGSSKASGSKQQWTKILWSCKETFRMQLGRLLVHILSPAHAAQERKQIFEIVHEPNHQEILRDCLSPSLQAH

SEQ ID NO: 837299 - protein, 2662 aa, Homo sapiens
MSTDSNSLAREFLTDVNRLCNAVVQRVEAREEEEEETHMATLGQYLVHGRGFLLLTKLNSIIDQALTCREELLTLLLSLLPLVWKIPVQEEKATDFNLPLSADIILTKEKNSSSQRSTQEKLHLEGSALSSQVSAKVNVFRKSRRQRKITHRYSVRDARKTQLSTSDSEANSDEKGIAMNKHRRPHLLHHFLTSFPKQDHPKAKLDRLATKEQTPPDAMALENSREIIPRQGSNTDILSEPAALSVISNMNNSPFDLCHVLLSLLEKVCKFDVTLNHNSPLAASVVPTLTEFLAGFGDCCSLSDNLESRVVSAGWTEEPVALIQRMLFRTVLHLLSVDVSTAEMMPENLRKNLTELLRAALKIRICLEKQPDPFAPRQKKTLQEVQEDFVFSKYRHRALLLPELLEGVLQILICCLQSAASNPFYFSQAMDLVQEFIQHHGFNLFETAVLQMEWLVLRDGVPPEASEHLKALINSVMKIMSTVKKVKSEQLHHSMCTRKRHRRCEYSHFMHHHRDLSGLLVSAFKNQVSKNPFEETADGDVYYPERCCCIAVCAHQCLRLLQQASLSSTCVQILSGVHNIGICCCMDPKSVIIPLLHAFKLPALKNFQQHILNILNKLILDQLGGAEISPKIKKAACNICTVDSDQLAQLEETLQGNLCDAELSSSLSSPSYRFQGILPSSGSEDLLWKWDALKAYQNFVFEEDRLHSIQIANHICNLIQKGNIVVQWKLYNYIFNPVLQRGVELAHHCQHLSVTSAQSHVCSHHNQCLPQDVLQIYVKTLPILLKSRVIRDLFLSCNGVSQIIELNCLNGIRSHSLKAFETLIISLGEQQKDASVPDIDGIDIEQKELSSVHVGTSFHHQQAYSDSPQSLSKFYAGLKEAYPKRRKTVNQDVHINTINLFLCVAFLCVSKEAESDRESANDSEDTSGYDSTASEPLSHMLPCISLESLVLPSPEHMHQAADIWSMCRWIYMLSSVFQKQFYRLGGFRVCHKLIFMIIQKLFRSHKEEQGKKEGDTSVNENQDLNRISQPKRTMKEDLLSLAIKSDPIPSELGSLKKSADSLGKLELQHISSINVEEVSATEAAPEEAKLFTSQESETSLQSIRLLEALLAICLHGARTSQQKMELELPNQNLSVESILFEMRDHLSQSKVIETQLAKPLFDALLRVALGNYSADFEHNDAMTEKSHQSAEELSSQPGDFSEEAEDSQCCSFKLLVEEEGYEADSESNPEDGETQDDGVDLKSETEGFSASSSPNDLLENLTQGEIIYPEICMLELNLLSASKAKLDVLAHVFESFLKIIRQKEKNVFLLMQQGTVKNLLGGFLSILTQDDSDFQACQRVLVDLLVSLMSSRTCSEELTLLLRIFLEKSPCTKILLLGILKIIESDTTMSPSQYLTFPLLHAPNLSNGVSSQKYPGILNSKAMGLLRRARVSRSKKEADRESFPHRLLSSWHIAPVHLPLLGQNCWPHLSEGFSVSLWFNVECIHEAESTTEKGKKIKKRNKSLILPDSSFDGTESDRPEGAEYINPGERLIEEGCIHIISLGSKALMIQVWADPHNATLIFRVCMDSNDDMKAVLLAQVESQENIFLPSKWQHLVLTYLQQPQGKRRIHGKISIWVSGQRKPDVTLDFMLPRKTSLSSDSNKTFCMIGHCLSSQEEFLQLAGKWDLGNLLLFNGAKVGSQEAFYLYACGPNHTSVMPCKYGKPVNDYSKYINKEILRCEQIRELFMTKKDVDIGLLIESLSVVYTTYCPAQYTIYEPVIRLKGQMKTQLSQRPFSSKEVQSILLEPHHLKNLQPTEYKTIQGILHEIGGTGIFVFLFARVVELSSCEETQALALRVILSLIKYNQQRVHELENCNGLSMIHQVLIKQKCIVGFYILKTLLEGCCGEDIIYMNENGEFKLDVDSNAIIQDVKLLEELLLDWKIWSKAEQGVWETLLAALEVLIRADHHQQMFNIKQLLKAQVVHHFLLTCQVLQEYKEGQLTPMPREMAKIFQEKVRSIMYLRHSSSGGRSLMSPGFMVISPSGFTASPYEGENSSNIIPQQMAAHMLRSRSLPAFPTSSLLTQSQKLTGSLGCSIDRLQNIADTYVATQSKKQNSLGSSDTLKKGKEDAFISSCESAKTVCEMEAVLSAQVSVSDVPKGVLGFPVVKADHKQLGAEPRSEDDSPGDESCPRRPDYLKGLASFQRSHSTIASLGLAFPSQNGSAAVGRWPSLVDRNTDDWENVTEDCLVPICCGLYELLSGVLLILPDVLLEDVMDKLIQADTLLVLVNHPSPAIQQGVIKLLDAYFARASKEQKDKFLKNRGFSLLANQLYLHRGTQELLECFIEMFFGRHIGLDEEFDLEDVRNMGLFQKWSVIPILGLIETSLYDNILLHNALLLLLQILNSCSKVADMLLDNGLLYVLCNTVAALNGLEKNIPMSEYKLLACDIQQLFIAVTIHACSSSGSQYFRVIEDLIVMLGYLQNSKNKRTQNMAVALQLRVLQAAMEFIRTTANHDSENLTDSLQSPSAPHHAVVQKRKSIAGPRKFPLAQTESLLMKMRSVANDELHVMMQRRMSQENPSQATETELAQRLQRLTVLAVNRIIYQEFNSDIIDILRTPENVTQSKTSVFQTEISEENIHHEQSSVFNPFQKEIFTYLVEGFKVSIGSSASGSKQLDCAYFVA

SEQ ID NO: 837300 - protein, 2306 aa, Homo sapiens
MSTDSNSLAREFLTDVNRLCNAVVQRVEAREEEEEETHMATLGQYLVHGRGFLLLTKLNSIIDQALTCREELLTLLLSLLPLVWKIPVQEEKATDFNLPLSADIILTKEKNSSSQRSTQEKLHLEGSALSSQVSAKVNVFRKSRRQRKITHRYSVRDARKTQLSTSDSEANSDEKGIAMNKHRRPHLLHHFLTSFPKQDHPKAKLDRLATKEQTPPDAMALENSREIIPRQGSNTDILSEPAALSVISNMNNSPFDLCHVLLSLLEKVCKFDVTLNHNSPLAASVVPTLTEFLAGFGDCCSLSDNLESRVVSAGWTEEPVALIQRMLFRTVLHLLSVDVSTAEMMPENLRKNLTELLRAALKIRICLEKQPDPFAPRQKKTLQEVQEDFVFSKYRHRALLLPELLEGVLQILICCLQSAASNPFYFSQAMDLVQEFIQHHGFNLFETAVLQMEWLVLRDGVPPEASEHLKALINSVMKIMSTVKKVKSEQLHHSMCTRKRHRRCEYSHFMHHHRDLSGLLVSAFKNQVSKNPFEETADGDVYYPERCCCIAVCAHQCLRLLQQASLSSTCVQILSGVHNIGICCCMDPKSVIIPLLHAFKLPALKNFQQHILNILNKLILDQLGGAEISPKIKKAACNICTVDSDQLAQLEETLQGNLCDAELSSSLSSPSYRFQGILPSSGSEDLLWKWDALKAYQNFVFEEDRLHSIQIANHICNLIQKGNIVVQWKLYNYIFNPVLQRGVELAHHCQHLSVTSAQSHVCSHHNQCLPQDVLQIYVKTLPILLKSRVIRDLFLSCNGVSQIIELNCLNGIRSHSLKAFETLIISLGEQQKDASVPDIDGIDIEQKELSSVHVGTSFHHQQAYSDSPQSLSKFYAGLKEAYPKRRKTVNQDVHINTINLFLCVAFLCVSKEAESDRESANDSEDTSGYDSTASEPLSHMLPCISLESLVLPSPEHMHQAADIWSMCRWIYMLSSVFQKQFYRLGGFRVCHKLIFMIIQKLFRSHKEEQGKKEGDTSVNENQDLNRISQPKRTMKEDLLSLAIKSDPIPSELGSLKKSADSLGKLELQHISSINVEEVSATEAAPEEAKLFTSQESETSLQSIRLLEALLAICLHGARTSQQKMELELPNQNLSVESILFEMRDHLSQSKVIETQLAKPLFDALLRVALGNYSADFEHNDAMTEKSHQSAEELSSQPGDFSEEAEDSQCCSFKLLVEEEGYEADSESNPEDGETQDDGVDLKSETEGFSASSSPNDLLENLTQGEIIYPEICMLELNLLSASKAKLDVLAHVFESFLKIIRQKEKNVFLLMQQGTVKNLLGGFLSILTQDDSDFQACQRVLVDLLVSLMSSRTCSEELTLLLRIFLEKSPCTKILLLGILKIIESDTTMSPSQYLTFPLLHAPNLSNGVSSQKYPGILNSKAMGLLRRARVSRSKKEADRESFPHRLLSSWHIAPVHLPLLGQNCWPHLSEGFSVSLWFNVECIHEAESTTEKGKKIKKRNKSLILPDSSFDGTESDRPEGAEYINPGERLIEEGCIHIISLGSKALMIQVWADPHNATLIFRVCMDSNDDMKAVLLAQVESQENIFLPSKWQHLVLTYLQQPQGKRRIHGKISIWVSGQRKPDVTLDFMLPRKTSLSSDSNKTFCMIGHCLSSQEEFLQLAGKWDLGNLLLFNGAKVGSQEAFYLYACGPNHTSVMPCKYGKPVNDYSKYINKEILRCEQIRELFMTKKDVDIGLLIESLSVVYTTYCPAQYTIYEPVIRLKGQMKTQLSQRPFSSKEVQSILLEPHHLKNLQPTEYKTIQGILHEIGGTGIFVFLFARVVELSSCEETQALALRVILSLIKYNQQRVHELENCNGLSMIHQVLIKQKCIVGFYILKTLLEGCCGEDIIYMNENGEFKLDVDSNAIIQDVKLLEELLLDWKIWSKAEQGVWETLLAALEVLIRADHHQQMFNIKQLLKAQVVHHFLLTCQVLQEYKEGQLTPMPREMAKIFQEKVRSIMYLRHSSSGGRSLMSPGFMVISPSGFTASPYEGENSSNIIPQQMAAHMLRSRSLPAFPTSSLLTQSQKLTGSLGCSIDRLQNIADTYVATQSKKQNSLGSSDTLKKGKEDAFISSCESAKTVCEMEAVLSAQVSVSDVPKGVLGFPVVKADHKQLGAEPRSEDDSPGDESCPRRPDYLKGLASFQRSHSTIASLGLAFPSQNGSAAVGRWPSLVDRNTDDWENFAYSLGYEPNYNRTASAHSVTEDCLVPICCGLYELLSGVLLILPDVLLEDVMDKLIQADTLLVLVNHPSPAIQQGVIKVRANTR

SEQ ID NO: 837301 - protein, 1621 aa, Homo sapiens
MSTDSNSLAREFLTDVNRLCNAVVQRVEAREEEEEETHMATLGQYLVHGRGFLLLTKLNSIIDQALTCREELLTLLLSLLPLVWKIPVQEEKATDFNLPLSADIILTKEKNSSSQRSTQEKLHLEGSALSSQVSAKVNVFRKSRRQRKITHRYSVRDARKTQLSTSDSEANSDEKGIAMNKHRRPHLLHHFLTSFPKQDHPKAKLDRLATKEQTPPDAMALENSREIIPRQGSNTDILSEPAALSVISNMNNSPFDLCHVLLSLLEKVCKFDVTLNHNSPLAASVVPTLTEFLAGFGDCCSLSDNLESRVVSAGWTEEPVALIQRMLFRTVLHLLSVDVSTAEMMPENLRKNLTELLRAALKIRICLEKQPDPFAPRQKKTLQEVQEDFVFSKYRHRALLLPELLEGVLQILICCLQSAASNPFYFSQAMDLVQEFIQHHGFNLFETAVLQMEWLVLRDGVPPEASEHLKALINSVMKIMSTVKKVKSEQLHHSMCTRKRHRRCEYSHFMHHHRDLSGLLVSAFKNQVSKNPFEETADGDVYYPERCCCIAVCAHQCLRLLQQASLSSTCVQILSGVHNIGICCCMDPKSVIIPLLHAFKLPALKNFQQHILNILNKLILDQLGGAEISPKIKKAACNICTVDSDQLAQLEETLQGNLCDAELSSSLSSPSYRFQGILPSSGSEDLLWKWDALKAYQNFVFEEDRLHSIQIANHICNLIQKGNIVVQWKLYNYIFNPVLQRGVELAHHCQHLSVTSAQSHVCSHHNQCLPQDVLQIYVKTLPILLKSRVIRDLFLSCNGVSQIIELNCLNGIRSHSLKAFETLIISLGEQQKDASVPDIDGIDIEQKELSSVHVGTSFHHQQAYSDSPQSLSKFYAGLKEAYPKRRKTVNQDVHINTINLFLCVAFLCVSKEAESDRESANDSEDTSGYDSTASEPLSHMLPCISLESLVLPSPEHMHQAADIWSMCRWIYMLSSVFQKQFYRLGGFRVCHKLIFMIIQKLFRSHKEEQGKKEGDTSVNENQDLNRISQPKRTMKEDLLSLAIKSDPIPSELGSLKKSADSLGKLELQHISSINVEEVSATEAAPEEAKLFTSQESETSLQSIRLLEALLAICLHGARTSQQKMELELPNQNLSVESILFEMRDHLSQSKVIETQLAKPLFDALLRVALGNYSADFEHNDAMTEKSHQSAEELSSQPGDFSEEAEDSQCCSFKLLVEEEGYEADSESNPEDGETQDDGVDLKSETEGFSASSSPNDLLENLTQGEIIYPEICMLELNLLSASKAKLDVLAHVFESFLKIIRQKEKNVFLLMQQGTVKNLLGGFLSILTQDDSDFQACQRVLVDLLVSLMSSRTCSEELTLLLRIFLEKSPCTKILLLGILKIIESDTTMSPSQYLTFPLLHAPNLSNGVSSQKYPGILNSKAMGLLRRARVSRSKKEADRESFPHRLLSSWHIAPVHLPLLGQNCWPHLSEGFSVSLWFNVECIHEAESTTEKGKKIKKRNKSLILPDSSFDGTESDRPEGAEYINPGERLIEEGCIHIISLGSKALMIQVWADPHNATLIFRVCMDSNDDMKAVLLAQVESQENIFLPSKWQHLVLTYLQQPQGKRRIHGKISIWVSGQR

SEQ ID NO: 837302 - protein, 1902 aa, Homo sapiens
MSTDSNSLAREFLTDVNRLCNAVVQRVEAREEEEEETHMATLGQYLVHGRGFLLLTKLNSIIDQALTCREELLTLLLSLLPLVWKIPVQEEKATDFNLPLSADIILTKEKNSSSQRSTQEKLHLEGSALSSQVSAKVNVFRKSRRQRKITHRYSVRDARKTQLSTSDSEANSDEKGIAMNKHRRPHLLHHFLTSFPKQDHPKAKLDRLATKEQTPPDAMALENSREIIPRQGSNTDILSEPAALSVISNMNNSPFDLCHVLLSLLEKVCKFDVTLNHNSPLAASVVPTLTEFLAGFGDCCSLSDNLESRVVSAGWTEEPVALIQRMLFRTVLHLLSVDVSTAEMMPENLRKNLTELLRAALKIRICLEKQPDPFAPRQKKTLQEVQEDFVFSKYRHRALLLPELLEGVLQILICCLQSAASNPFYFSQAMDLVQEFIQHHGFNLFETAVLQMEWLVLRDGVPPEASEHLKALINSVMKIMSTVKKVKSEQLHHSMCTRKRHRRCEYSHFMHHHRDLSGLLVSAFKNQVSKNPFEETADGDVYYPERCCCIAVCAHQCLRLLQQASLSSTCVQILSGVHNIGICCCMDPKSVIIPLLHAFKLPALKNFQQHILNILNKLILDQLGGAEISPKIKKAACNICTVDSDQLAQLEETLQGNLCDAELSSSLSSPSYRFQGILPSSGSEDLLWKWDALKAYQNFVFEEDRLHSIQIANHICNLIQKGNIVVQWKLYNYIFNPVLQRGVELAHHCQHLSVTSAQSHVCSHHNQCLPQDVLQIYVKTLPILLKSRVIRDLFLSCNGVSQIIELNCLNGIRSHSLKAFETLIISLGEQQKDASVPDIDGIDIEQKELSSVHVGTSFHHQQAYSDSPQSLSKFYAGLKEAYPKRRKTVNQDVHINTINLFLCVAFLCVSKEAESDRESANDSEDTSGYDSTASEPLSHMLPCISLESLVLPSPEHMHQAADIWSMCRWIYMLSSVFQKQFYRLGGFRVCHKLIFMIIQKLFRSHKEEQGKKEGDTSVNENQDLNRISQPKRTMKEDLLSLAIKSDPIPSELGSLKKSADSLGKLELQHISSINVEEVSATEAAPEEAKLFTSQESETSLQSIRLLEALLAICLHGARTSQQKMELELPNQNLSVESILFEMRDHLSQSKVIETQLAKPLFDALLRVALGNYSADFEHNDAMTEKSHQSAEELSSQPGDFSEEAEDSQCCSFKLLVEEEGYEADSESNPEDGETQDDGVDLKSETEGFSASSSPNDLLENLTQGEIIYPEICMLELNLLSASKAKLDVLAHVFESFLKIIRQKEKNVFLLMQQGTVKNLLGGFLSILTQDDSDFQACQRVLVDLLVSLMSSRTCSEELTLLLRIFLEKSPCTKILLLGILKIIESDTTMSPSQYLTFPLLHAPNLSNGVSSQKYPGILNSKAMGLLRRARVSRSKKEADRESFPHRLLSSWHIAPVHLPLLGQNCWPHLSEGFSVSLWFNVECIHEAESTTEKGKKIKKRNKSLILPDSSFDGTESDRPEGAEYINPGERLIEEGCIHIISLGSKALMIQVWADPHNATLIFRVCMDSNDDMKAVLLAQVESQENIFLPSKWQHLVLTYLQQPQGKRRIHGKISIWVSGQRKPDVTLDFMLPRKTSLSSDSNKTFCMIGHCLSSQEEFLQLAGKWDLGNLLLFNGAKVGSQEAFYLYACGPNHTSVMPCKYGKPVNDYSKYINKEILRCEQIRELFMTKKDVDIGLLIESLSVVYTTYCPAQYTIYEPVIRLKGQMKTQLSQRPFSSKEVQSILLEPHHLKNLQPTEYKTIQGILHEIGGTGIFVFLFARVVELSSCEETQALALRVILSLIKYNQQRVHELENCNGLSMIHQVLIKQKCIVGFYILKVCLHKIYSYSFICSDTHLVIKVFQ

SEQ ID NO: 837303 - protein, 3801 aa, Homo sapiens
MSTDSNSLAREFLTDVNRLCNAVVQRVEAREEEEEETHMATLGQYLVHGRGFLLLTKLNSIIDQALTCREELLTLLLSLLPLVWKIPVQEEKATDFNLPLSADIILTKEKNSSSQRSTQEKLHLEGSALSSQVSAKVNVFRKSRRQRKITHRYSVRDARKTQLSTSDSEANSDEKGIAMNKHRRPHLLHHFLTSFPKQDHPKAKLDRLATKEQTPPDAMALENSREIIPRQGSNTDILSEPAALSVISNMNNSPFDLCHVLLSLLEKVCKFDVTLNHNSPLAASVVPTLTEFLAGFGDCCSLSDNLESRVVSAGWTEEPVALIQRMLFRTVLHLLSVDVSTAEMMPENLRKNLTELLRAALKIRICLEKQPDPFAPRQKKTLQEVQEDFVFSKYRHRALLLPELLEGVLQILICCLQSAASNPFYFSQAMDLVQEFIQHHGFNLFETAVLQMEWLVLRDGVPPEASEHLKALINSVMKIMSTVKKVKSEQLHHSMCTRKRHRRCEYSHFMHHHRDLSGLLVSAFKNQVSKNPFEETADGDVYYPERCCCIAVCAHQCLRLLQQASLSSTCVQILSGVHNIGICCCMDPKSVIIPLLHAFKLPALKNFQQHILNILNKLILDQLGGAEISPKIKKAACNICTVDSDQLAQLEETLQGNLCDAELSSSLSSPSYRFQGILPSSGSEDLLWKWDALKAYQNFVFEEDRLHSIQIANHICNLIQKGNIVVQWKLYNYIFNPVLQRGVELAHHCQHLSVTSAQSHVCSHHNQCLPQDVLQIYVKTLPILLKSRVIRDLFLSCNGVSQIIELNCLNGIRSHSLKAFETLIISLGEQQKDASVPDIDGIDIEQKELSSVHVGTSFHHQQAYSDSPQSLSKFYAGLKEAYPKRRKTVNQDVHINTINLFLCVAFLCVSKEAESDRESANDSEDTSGYDSTASEPLSHMLPCISLESLVLPSPEHMHQAADIWSMCRWIYMLSSVFQKQFYRLGGFRVCHKLIFMIIQKLFRSHKEEQGKKEGDTSVNENQDLNRISQPKRTMKEDLLSLAIKSDPIPSELGSLKKSADSLGKLELQHISSINVEEVSATEAAPEEAKLFTSQESETSLQSIRLLEALLAICLHGARTSQQKMELELPNQNLSVESILFEMRDHLSQSKVIETQLAKPLFDALLRVALGNYSADFEHNDAMTEKSHQSAEELSSQPGDFSEEAEDSQCCSFKLLVEEEGYEADSESNPEDGETQDDGVDLKSETEGFSASSSPNDLLENLTQGEIIYPEICMLELNLLSASKAKLDVLAHVFESFLKIIRQKEKNVFLLMQQGTVKNLLGGFLSILTQDDSDFQACQRVLVDLLVSLMSSRTCSEELTLLLRIFLEKSPCTKILLLGILKIIESDTTMSPSQYLTFPLLHAPNLSNGVSSQKYPGILNSKAMGLLRRARVSRSKKEADRESFPHRLLSSWHIAPVHLPLLGQNCWPHLSEGFSVSLWFNVECIHEAESTTEKGKKIKKRNKSLILPDSSFDGTESDRPEGAEYINPGERLIEEGCIHIISLGSKALMIQVWADPHNATLIFRVCMDSNDDMKAVLLAQVESQENIFLPSKWQHLVLTYLQQPQGKRRIHGKISIWVSGQRKPDVTLDFMLPRKTSLSSDSNKTFCMIGHCLSSQEEFLQLAGKWDLGNLLLFNGAKVGSQEAFYLYACGPNHTSVMPCKYGKPVNDYSKYINKEILRCEQIRELFMTKKDVDIGLLIESLSVVYTTYCPAQYTIYEPVIRLKGQMKTQLSQRPFSSKEVQSILLEPHHLKNLQPTEYKTIQGILHEIGGTGIFVFLFARVVELSSCEETQALALRVILSLIKYNQQRVHELENCNGLSMIHQVLIKQKCIVGFYILKTLLEGCCGEDIIYMNENGEFKLDVDSNAIIQDVKLLEELLLDWKIWSKAEQGVWETLLAALEVLIRADHHQQMFNIKQLLKAQVVHHFLLTCQVLQEYKEGQLTPMPREVCRSFVKIIAEVLGSPPDLELLTIIFNFLLAVHPPTNTYVCHNPTNFYFSLHIDGKIFQEKVRSIMYLRHSSSGGRSLMSPGFMVISPSGFTASPYEGENSSNIIPQQMAAHMLRSRSLPAFPTSSLLTQSQKLTGSLGCSIDRLQNIADTYVATQSKKQNSLGSSDTLKKGKEDAFISSCESAKTVCEMEAVLSAQVSVSDVPKGVLGFPVVKADHKQLGAEPRSEDDSPGDESCPRRPDYLKGLASFQRSHSTIASLGLAFPSQNGSAAVGRWPSLVDRNTDDWENFAYSLGYEPNYNRTASAHSVTEDCLVPICCGLYELLSGVLLILPDVLLEDVMDKLIQADTLLVLVNHPSPAIQQGVIKLLDAYFARASKEQKDKFLKNRGFSLLANQLYLHRGTQELLECFIEMFFGRHIGLDEEFDLEDVRNMGLFQKWSVIPILGLIETSLYDNILLHNALLLLLQILNSCSKVADMLLDNGLLYVLCNTVAALNGLEKNIPMSEYKLLACDIQQLFIAVTIHACSSSGSQYFRVIEDLIVMLGYLQNSKNKRTQNMAVALQLRVLQAAMEFIRTTANHDSENLTDSLQSPSAPHHAVVQKRKSIAGPRKFPLAQTESLLMKMRSVANDELHVMMQRRMSQENPSQATETELAQRLQRLTVLAVNRIIYQEFNSDIIDILRTPENVTQSKTSVFQTEISEENIHHEQSSVFNPFQKEIFTYLVEGFKVSIGSSKASGSKQQWTKILWSCKETFRMQLGRLLVHILSPAHAAQERKQIFEIVHEPNHQEILRDCLSPSLQHGAKLVLYLSELIHNHQGELTEEELGTAELLMNALKLCGHKCIPPSASTKADLIKMIKEEQKKYETEEGVNKAAWQKTVNNNQQSLFQRLDSKSKDISKIAADITQAVSLSQGNERKKVIQHIRGMYKVDLSASRHWQELIQQLTHDRAVWYDPIYYPTSWQLDPTEGPNRERRRLQRCYLTIPNKYLLRDRQKSEDVVKPPLSYLFEDKTHSSFSSTVKDKAASESIRVNRRCISVAPSRETAGELLLGKCGMYFVEDNASDTVESSSLQGELEPASFSWTYEEIKEVHKRWWQLRDNAVEIFLTNGRTLLLAFDNTKVRDDVYHNILTNNLPNLLEYGNITALTNLWYTGQITNFEYLTHLNKHAGRSFNDLMQYPVFPFILADYVSETLDLNDLLIYRNLSKPIAVQYKEKEDRYVDTYKYLEEEYRKGAREDDPMPPVQPYHYGSHYSNSGTVLHFLVRMPPFTKMFLAYQDQSFDIPDRTFHSTNTTWRLSSFESMTDVKELIPEFFYLPEFLVNREGFDFGVRQNGERVNHVNLPPWARNDPRLFILIHRQALESDYVSQNICQWIDLVFGYKQKGKASVQAINVFHPATYFGMDVSAVEDPVQRRALETMIKTYGQTPRQLFHMAHVSRPGAKLNIEGELPAAVGLLVQFAFRETREQVKEITYPSPLSWIKGLKWGEYVGSPSAPVPVVCFSQPHGERFGSLQALPTRAICGLSRNFCLLMTYSKEQGVRSMNSTDIQWSAILSWGYADNILRLKSKQSEPPVNFIQSSQQYQVTSCAWVPDSCQLFTGSKCGVITAYTNRFTSSTPSEIEMETQIHLYGHTEEITSLFVCKPYSILISVSRDGTCIIWDLNRLCYVQSLAGHKSPVTAVSASETSGDIATVCDSAGGGSDLRLWTVNGDLVGHVHCREIICSVAFSNQPEGVSINVIAGGLENGIVRLWSTWDLKPVREITFPKSNKPIISLTFSCDGHHLYTANSDGTVIAWCRKDQQRLKQPMFYSFLSSYAAG

SEQ ID NO: 837304 - protein, 3729 aa, Homo sapiens; identical to SEQ ID NO: 837295

SEQ ID NO: 837305 - protein, 2047 aa, Homo sapiens
MSTDSNSLAREFLTDVNRLCNAVVQRVEAREEEEEETHMATLGQYLVHGRGFLLLTKLNSIIDQALTCREELLTLLLSLLPLVWKIPVQEEKATDFNLPLSADIILTKEKNSSSQRSTQEKLHLEGSALSSQVSAKVNVFRKSRRQRKITHRYSVRDARKTQLSTSDSEANSDEKGIAMNKHRRPHLLHHFLTSFPKQDHPKAKLDRLATKEQTPPDAMALENSREIIPRQGSNTDILSEPAALSVISNMNNSPFDLCHVLLSLLEKVCKFDVTLNHNSPLAASVVPTLTEFLAGFGDCCSLSDNLESRVVSAGWTEEPVALIQRMLFRTVLHLLSVDVSTAEMMPENLRKNLTELLRAALKIRICLEKQPDPFAPRQKKTLQEVQEDFVFSKYRHRALLLPELLEGVLQILICCLQSAASNPFYFSQAMDLVQEFIQHHGFNLFETAVLQMEWLVLRDGVPPEASEHLKALINSVMKIMSTVKKVKSEQLHHSMCTRKRHRRCEYSHFMHHHRDLSGLLVSAFKNQVSKNPFEETADGDVYYPERCCCIAVCAHQCLRLLQQASLSSTCVQILSGVHNIGICCCMDPKSVIIPLLHAFKLPALKNFQQHILNILNKLILDQLGGAEISPKIKKAACNICTVDSDQLAQLEETLQGNLCDAELSSSLSSPSYRFQGILPSSGSEDLLWKWDALKAYQNFVFEEDRLHSIQIANHICNLIQKGNIVVQWKLYNYIFNPVLQRGVELAHHCQHLSVTSAQSHVCSHHNQCLPQDVLQIYVKTLPILLKSRVIRDLFLSCNGVSQIIELNCLNGIRSHSLKAFETLIISLGEQQKDASVPDIDGIDIEQKELSSVHVGTSFHHQQAYSDSPQSLSKFYAGLKEAYPKRRKTVNQDVHINTINLFLCVAFLCVSKEAESDRESANDSEDTSGYDSTASEPLSHMLPCISLESLVLPSPEHMHQAADIWSMCRWIYMLSSVFQKQFYRLGGFRVCHKLIFMIIQKLFRSHKEEQGKKEGDTSVNENQDLNRISQPKRTMKEDLLSLAIKSDPIPSELGSLKKSADSLGKLELQHISSINVEEVSATEAAPEEAKLFTSQESETSLQSIRLLEALLAICLHGARTSQQKMELELPNQNLSVESILFEMRDHLSQSKVIETQLAKPLFDALLRVALGNYSADFEHNDAMTEKSHQSAEELSSQPGDFSEEAEDSQCCSFKLLVEEEGYEADSESNPEDGETQDDGVDLKSETEGFSASSSPNDLLENLTQGEIIYPEICMLELNLLSASKAKLDVLAHVFESFLKIIRQKEKNVFLLMQQGTVKNLLGGFLSILTQDDSDFQACQRVLVDLLVSLMSSRTCSEELTLLLRIFLEKSPCTKILLLGILKIIESDTTMSPSQYLTFPLLHAPNLSNGVSSQKYPGILNSKAMGLLRRARVSRSKKEADRESFPHRLLSSWHIAPVHLPLLGQNCWPHLSEGFSVSLWFNVECIHEAESTTEKGKKIKKRNKSLILPDSSFDGTESDRPEGAEYINPGERLIEEGCIHIISLGSKALMIQVWADPHNATLIFRVCMDSNDDMKAVLLAQVESQENIFLPSKWQHLVLTYLQQPQGKRRIHGKISIWVSGQRKPDVTLDFMLPRKTSLSSDSNKTFCMIGHCLSSQEEFLQLAGKWDLGNLLLFNGAKVGSQEAFYLYACGPNHTSVMPCKYGKPVNDYSKYINKEILRCEQIRELFMTKKDVDIGLLIESLSVVYTTYCPAQYTIYEPVIRLKGQMKTQLSQRPFSSKEVQSILLEPHHLKNLQPTEYKTIQGILHEIGGTGIFVFLFARVVELSSCEETQALALRVILSLIKYNQQRVHELENCNGLSMIHQVLIKQKCIVGFYILKTLLEGCCGEDIIYMNENGEFKLDVDSNAIIQDVKLLEELLLDWKIWSKAEQGVWETLLAALEVLIRADHHQQMFNIKQLLKAQVVHHFLLTCQVLQEYKEGQLTPMPREVCRSFVKIIAEVLGSPPDLELLTIIFNFLLAVHPPTNTYVCHNPTNFYFSLHIGRYNHFC

SEQ ID NO: 837306 - protein, 1513 aa, Homo sapiens
MSTDSNSLAREFLTDVNRLCNAVVQRVEAREEEEEETHMATLGQYLVHGRGFLLLTKLNSIIDQALTCREELLTLLLSLLPLVWKIPVQEEKATDFNLPLSADIILTKEKNSSSQRSTQEKLHLEGSALSSQVSAKVNVFRKSRRQRKITHRYSVRDARKTQLSTSDSEANSDEKGIAMNKHRRPHLLHHFLTSFPKQDHPKAKLDRLATKEQTPPDAMALENSREIIPRQGSNTDILSEPAALSVISNMNNSPFDLCHVLLSLLEKVCKFDVTLNHNSPLAASVVPTLTEFLAGFGDCCSLSDNLESRVVSAGWTEEPVALIQRMLFRTVLHLLSVDVSTAEMMPENLRKNLTELLRAALKIRICLEKQPDPFAPRQKKTLQEVQEDFVFSKYRHRALLLPELLEGVLQILICCLQSAASNPFYFSQAMDLVQEFIQHHGFNLFETAVLQMEWLVLRDGVPPEASEHLKALINSVMKIMSTVKKVKSEQLHHSMCTRKRHRRCEYSHFMHHHRDLSGLLVSAFKNQVSKNPFEETADGDVYYPERCCCIAVCAHQCLRLLQQASLSSTCVQILSGVHNIGICCCMDPKSVIIPLLHAFKLPALKNFQQHILNILNKLILDQLGGAEISPKIKKAACNICTVDSDQLAQLEETLQGNLCDAELSSSLSSPSYRFQGILPSSGSEDLLWKWDALKAYQNFVFEEDRLHSIQIANHICNLIQKGNIVVQWKLYNYIFNPVLQRGVELAHHCQHLSVTSAQSHVCSHHNQCLPQDVLQIYVKTLPILLKSRVIRDLFLSCNGVSQIIELNCLNGIRSHSLKAFETLIISLGEQQKDASVPDIDGIDIEQKELSSVHVGTSFHHQQAYSDSPQSLSKFYAGLKEAYPKRRKTVNQDVHINTINLFLCVAFLCVSKEAESDRESANDSEDTSGYDSTASEPLSHMLPCISLESLVLPSPEHMHQAADIWSMCRWIYMLSSVFQKQFYRLGGFRVCHKLIFMIIQKLFRSHKEEQGKKEGDTSVNENQDLNRISQPKRTMKEDLLSLAIKSDPIPSELGSLKKSADSLGKLELQHISSINVEEVSATEAAPEEAKLFTSQESETSLQSIRLLEALLAICLHGARTSQQKMELELPNQNLSVESILFEMRDHLSQSKVIETQLAKPLFDALLRVALGNYSADFEHNDAMTEKSHQSAEELSSQPGDFSEEAEDSQCCSFKLLVEEEGYEADSESNPEDGETQDDGVDLKSETEGFSASSSPNDLLENLTQGEIIYPEICMLELNLLSASKAKLDVLAHVFESFLKIIRQKEKNVFLLMQQGTVKNLLGGFLSILTQDDSDFQACQRVLVDLLVSLMSSRTCSEELTLLLRIFLEKSPCTKILLLGILKIIESDTTMSPSQYLTFPLLHAPNLSNGVSSQKYPGILNSKAMGLLRRARVSRSKKEADRESFPHRLLSSWHIAPVHLPLLGQNCWPHLSEGFSVSLWFNVECIHEAESTTYSSPKGKGGLQGNMPEVSWGAR

SEQ ID NO: 837307 - protein, 1815 aa, Homo sapiens
DFFLFFQEYKEGQLTPMPREVCRSFVKIIAEVLGSPPDLELLTIIFNFLLAVHPPTNTYVCHNPTNFYFSLHIDGKIFQEKVRSIMYLRHSSSGGRSLMSPGFMVISPSGFTASPYEGENSSNIIPQQMAAHMLRSRSLPAFPTSSLLTQSQKLTGSLGCSIDRLQNIADTYVATQSKKQNSLGSSDTLKKGKEDAFISSCESAKTVCEMEAVLSAQVSVSDVPKGVLGFPVVKADHKQLGAEPRSEDDSPGDESCPRRPDYLKGLASFQRSHSTIASLGLAFPSQNGSAAVGRWPSLVDRNTDDWENVTEDCLVPICCGLYELLSGVLLILPDVLLEDVMDKLIQADTLLVLVNHPSPAIQQGVIKLLDAYFARASKEQKDKFLKNRGFSLLANQLYLHRGTQELLECFIEMFFGRHIGLDEEFDLEDVRNMGLFQKWSVIPILGLIETSLYDNILLHNALLLLLQILNSCSKVADMLLDNGLLYVLCNTVAALNGLEKNIPMSEYKLLACDIQQLFIAVTIHACSSSGSQYFRVIEDLIVMLGYLQNSKNKRTQNMAVALQLRVLQAAMEFIRTTANHDSENLTDSLQSPSAPHHAVVQKRKSIAGPRKFPLAQTESLLMKMRSVANDELHVMMQRRMSQENPSQATETELAQRLQRLTVLAVNRIIYQEFNSDIIDILRTPENVTQSKTSVFQTEISEENIHHEQSSVFNPFQKEIFTYLVEGFKVSIGSSKASGSKQQWTKILWSCKETFRMQLGRLLVHILSPAHAAQERKQIFEIVHEPNHQEILRDCLSPSLQHGAKLVLYLSELIHNHQGELTEEELGTAELLMNALKLCGHKCIPPSASTKADLIKMIKEEQKKYETEEGVNKAAWQKTVNNNQQSLFQRLDSKSKDISKIAADITQAVSLSQGNERKKVIQHIRGMYKVDLSASRHWQELIQQLTHDRAVWYDPIYYPTSWQLDPTEGPNRERRRLQRCYLTIPNKYLLRDRQKSEDVVKPPLSYLFEDKTHSSFSSTVKDKAASESIRVNRRCISVAPSRETAGELLLGKCGMYFVEDNASDTVESSSLQGELEPASFSWTYEEIKEVHKRWWQLRDNAVEIFLTNGRTLLLAFDNTKVRDDVYHNILTNNLPNLLEYGNITALTNLWYTGQITNFEYLTHLNKHAGRSFNDLMQYPVFPFILADYVSETLDLNDLLIYRNLSKPIAVQYKEKEDRYVDTYKYLEEEYRKGAREDDPMPPVQPYHYGSHYSNSGTVLHFLVRMPPFTKMFLAYQDQSFDIPDRTFHSTNTTWRLSSFESMTDVKELIPEFFYLPEFLVNREGFDFGVRQNGERVNHVNLPPWARNDPRLFILIHRQALESDYVSQNICQWIDLVFGYKQKGKASVQAINVFHPATYFGMDVSAVEDPVQRRALETMIKTYGQTPRQLFHMAHVSRPGAKLNIEGELPAAVGLLVQFAFRETREQVKEITYPSPLSWIKGLKWGEYVGSPSAPVPVVCFSQPHGERFGSLQALPTRAICGLSRNFCLLMTYSKEQGVRSMNSTDIQWSAILSWGYADNILRLKSKQSEPPVNFIQSSQQYQVTSCAWVPDSCQLFTGSKCGVITAYTNRFTSSTPSEIEMETQIHLYGHTEEITSLFVCKPYSILISVSRDGTCIIWDLNRLCYVQSLAGHKSPVTAVSASETSGDIATVCDSAGGGSDLRLWTVNGDLVGHVHCREIICSVAFSNQPEGVSINVIAGGLENGIVRLWSTWDLKPVREITFPKSNKPIISLTFSCDGHHLYTANSDGTVIAWCRKDQQRLKQPMFYSFLSSYAAG

SEQ ID NO: 837308 - protein, 144 aa, Homo sapiens [sequence omitted]

SEQ ID NO: 837309 - protein, 144 aa, Homo sapiens [sequence omitted]

SEQ ID NO: 837310 - protein, 307 aa, Homo sapiens
MTSIKEQAAISRLLSFLQEWDNAGKVARSHILDKFIETNQGKTAPELEQEFSQGASLFLVRLTTSLRITYMTDSCLEKLLRSIGIFLSAVSSNRYLIEFLEVGGVLTLLEILGLEKIKEEAKKESVKLLQVIANSGRTYKELICESYGVRSIAEFLAKSKSEETQEEVQVLLDSLVHGNPKYQNQVYKGLIALLPCESPKAQQLSLQTLRTAQPIIGTTHPSIVDCVLKVLGTMHLEVQYEAIELIKDLVGYDVRQALLKGLVALLIPSVKEISKLQAKILSDPSVLQLTPSLPMFLQQAAAAKAIG

SEQ ID NO: 837311 - protein, 226 aa, Homo sapiens
MSIAEELLYLRVVRGLMAAMGNTDHSNSQRLASLTLECFVQMFPLVAEHVRKCMGEELYQLFLVSAPFLPRRNETDGGSDSVMPLQTVPILERATCRVDLATSCRRDCSGVGSSTRHLPVPFPALSVRLPTRPPPATSLCQAQLQVQTALAPQPGPPCSCPQSNAEDLYMKIDSIQADILAANTVNVTKALCLHGSSYSMNTLYGSRDSAQMAYLTHFEEDVESKE

SEQ ID NO: 837312 - protein, 144 aa, Homo sapiens [sequence omitted]

SEQ ID NO: 837313 - protein, 144 aa, Homo sapiens [sequence omitted]

SEQ ID NO: 837314 - protein, 144 aa, Homo sapiens [sequence omitted]

SEQ ID NO: 837315 - protein, 144 aa, Homo sapiens [sequence omitted]

SEQ ID NO: 837316 - protein, 144 aa, Homo sapiens [sequence omitted]

SEQ ID NO: 837317 - protein, 144 aa, Homo sapiens [sequence omitted]

SEQ ID NO: 837318 - protein, 144 aa, Homo sapiens [sequence omitted]

SEQ ID NO: 837319 - protein, 144 aa, Homo sapiens [sequence omitted]

SEQ ID NO: 837320 - protein, 144 aa, Homo sapiens [sequence omitted]

SEQ ID NO: 837321 - protein, 144 aa, Homo sapiens [sequence omitted]

SEQ ID NO: 837322 - protein, 144 aa, Homo sapiens [sequence omitted]

SEQ ID NO: 837323 - protein, 127 aa, Homo sapiens
MSIAEELLYLRVVRGLMAAMGNTDHSNSQRLASLTLECFVQMFPLVAEHVRKCMGEELYQLFLSNAEDLYMKIDSIQADILAANTVNVTKALCLHGSSYSMNTLYGSRDSAQMAYLTHFEEDVESKE

SEQ ID NO: 837324 - protein, 124 aa, Homo sapiens
PPPPEPASASPEPTSPSPGTCVCLPGTRFRLPGTHFRLPKTRFCLPGTHFRLPKTRFRLPKTRFRLPGTYFRLPKTLFCLPGTGFRLPRTRFRLPGTHFRLPRVCADARPGWVCFPWWHRAALA

SEQ ID NO: 837325 - protein, 108 aa, Homo sapiens
MENFPGWSQTSKLKQSSYPTQPNNHSTYTQHQSTHSQTHTPPTPPQHHTIYPLSQHNPTHTNHPTPLPPPTTTYKPLHSHIIALLNLCLLLITVQLRAKENPYDENHK

SEQ ID NO: 837326 - protein, 113 aa, Homo sapiens
MSTTVTLSLHLWMGSPAWVTRATPSPKKELSAKPRYLPPRGGGISEVFLGPGPKRPRKARERRGRGFGQRCRHRINTVAHGNAPESGDPGSEHRRTKEARTWRAPTNKGGKPA

SEQ ID NO: 837327 - protein, 389 aa, Homo sapiens
MPLENLEEEGLPKNPDLRIAQLRFLLSLPEHRGDAAVRDELMAAVRDNNMAPYYEALCKSLDWQIDVDLLNKMKKANEDELKRLDEELEDAEKNLGESEIRDAMMAKAEYLCRIGDKEGALTAFRKTYDKTVALGHRLDIVFYLLRIGLFYMDNDLITRNTEKAKSLIEEGGDWDRRNRLKVYQGLYCVAIRDFKQAAELFLDTVSTFTSYELMDYKTFVTYTVYVSMIALERPDLREKVIKGAEILEVLHSLPAVRQYLFSLYECRYSVFFQSLAVVEQEMKKDWLFAPHYRYYVREMRIHAYSQLLESYRSLTLGYMAEAFGVGVEFIDQELSRFIAAGRLHCKIDKVNEIVETNRPDSKNWQYQETIKKGDLLLNRVQKLSRVINM

SEQ ID NO: 837328 - protein, 389 aa, Homo sapiens; identical to SEQ ID NO: 837327

SEQ ID NO: 837329 - protein, 332 aa, Homo sapiens [sequence omitted]

SEQ ID NO: 837330 - protein, 442 aa, Homo sapiens
MPLENLEEEGLPKNPDLRIAQLRFLLSLPEHRGDAAVRDELMAAVRDNNFWNRIRQEQTEDCPPSSPSRGWHCQDWPSRKPPTSIRLCFAKPIIKRHRMPSYMAPYYEALCKSLDWQIDVDLLNKMKKANEDELKRLDEELEDAEKNLGESEIRDAMMAKAEYLCRIGDKEGALTAFRKTYDKTVALGHRLDIVFYLLRIGLFYMDNDLITRNTEKAKSLIEEGGDWDRRNRLKVYQGLYCVAIRDFKQAAELFLDTVSTFTSYELMDYKTFVTYTVYVSMIALERPDLREKVIKGAEILEVLHSLPAVRQYLFSLYECRYSVFFQSLAVVEQEMKKDWLFAPHYRYYVREMRIHAYSQLLESYRSLTLGYMAEAFGVGVEFIDQELSRFIAAGRLHCKIDKVNEIVETNRPDSKNWQYQETIKKGDLLLNRVQKLSRVINM

SEQ ID NO: 837331 - protein, 340 aa, Homo sapiens
MAPYYEALCKSLDWQIDVDLLNKMKKANEDELKRLDEELEDAEKNLGESEIRDAMMAKAEYLCRIGDKEGALTAFRKTYDKTVALGHRLDIVFYLLRIGLFYMDNDLITRNTEKAKSLIEEGGDWDRRNRLKVYQGLYCVAIRDFKQAAELFLDTVSTFTSYELMDYKTFVTYTVYVSMIALERPDLREKVIKGAEILEVLHSLPAVRQYLFSLYECRYSVFFQSLAVVEQEMKKDWLFAPHYRYYVREMRIHAYSQLLESYRSLTLGYMAEAFGVGVEFIDQELSRFIAAGRLHCKIDKVNEIVETNRPDSKNWQYQETIKKGDLLLNRVQKLSRVINM

SEQ ID NO: 837332 - protein, 350 aa, Homo sapiens
MPLENLEEEDMAPYYEALCKSLDWQIDVDLLNKMKKANEDELKRLDEELEDAEKNLGESEIRDAMMAKAEYLCRIGDKEGALTAFRKTYDKTVALGHRLDIVFYLLRIGLFYMDNDLITRNTEKAKSLIEEGGDWDRRNRLKVYQGLYCVAIRDFKQAAELFLDTVSTFTSYELMDYKTFVTYTVYVSMIALERPDLREKVIKGAEILEVLHSLPAVRQYLFSLYECRYSVFFQSLAVVEQEMKKDWLFAPHYRYYVREMRIHAYSQLLESYRSLTLGYMAEAFGVGVEFIDQELSRFIAAGRLHCKIDKVNEIVETNRPDSKNWQYQETIKKGDLLLNRVQKLSRVINM

SEQ ID NO: 837333 - protein, 290 aa, Homo sapiens
MPLENLEEEGLPKNPDLRIAQLRFLLSLPEHRGDAAVRDELMAAVRDNNMAPYYEALCKSLDWQIDVDLLNKMKKANEDELKRLDEELEDAEKNLGESEIRDAMMAKAEYLCRIGDKEGALTAFRKTYDKTVALGHRLDIVFYLLRIGLFYMDNDLITRNTEKAKSLIEEGGDWDRRNRLKVYQGLYCVAIRDFKQAAELFLDTVSTFTSYELMDYKTFVTYTVYVSMIALERPDLREKVIKGAEILEVLHSLPAVRQYLFSLYECRYSVFFQSLGNCPGLLLPGDYTAK

SEQ ID NO: 837334 - protein, 134 aa, Homo sapiens
MPLENLEEEGLPKNPDLRIAQLRFLLSLPEHRGDAAVRDELMAAVRDNSEARTSAESAAKAWAVPAFRSLRGLFLMELQTPLTGSQRPGLASPALRVLLWFGDTLGDLDLPQRGLHLSVPPSPVRAAWGRIVRH

SEQ ID NO: 837335 - protein, 389 aa, Homo sapiens; identical to SEQ ID NO: 837327

SEQ ID NO: 837336 - protein, 389 aa, Homo sapiens; identical to SEQ ID NO: 837327

SEQ ID NO: 837337 - protein, 326 aa, Homo sapiens
MPLENLEEEGLPKNPDLRIAQLRFLLSLPEHRGDAAVRDELMAAVRDNNMAPYYEALCKSLDWQIDVDLLNKMKKANEDELKRLDEELEDAEKNLGESEIRDAMMAKAEYLCRIGDKEGALTAFRKTYDKTVALGHRLDIVFYLLRIGLFYMDNDLITRNTEKAKSLIEEGGDWDRRNRLKVYQGLYCVAIRDFKQAAELFLDTVSTFTSYELMDYKTFVTYTVYVSMIALERPDLREKVIKGAEILEVLHSLPAVRQYLFSLYECRYSVFFQSLAVVEQEMKKDWLFAPHYRYYVREMRIHAYSQLLESYRSLTLGYMAEAFGVY

SEQ ID NO: 837338 - protein, 351 aa, Homo sapiens
MNESNDSTNYDMAPYYEALCKSLDWQIDVDLLNKMKKANEDELKRLDEELEDAEKNLGESEIRDAMMAKAEYLCRIGDKEGALTAFRKTYDKTVALGHRLDIVFYLLRIGLFYMDNDLITRNTEKAKSLIEEGGDWDRRNRLKVYQGLYCVAIRDFKQAAELFLDTVSTFTSYELMDYKTFVTYTVYVSMIALERPDLREKVIKGAEILEVLHSLPAVRQYLFSLYECRYSVFFQSLAVVEQEMKKDWLFAPHYRYYVREMRIHAYSQLLESYRSLTLGYMAEAFGVGVEFIDQELSRFIAAGRLHCKIDKVNEIVETNRPDSKNWQYQETIKKGDLLLNRVQKLSRVINM

SEQ ID NO: 837339 - protein, 403 aa, Homo sapiens
MPLENLEEEDFWNRIRQEQTEDCPPSSPSRGWHCQDWPSRKPPTSIRLCFAKPIIKRHRMPSYMAPYYEALCKSLDWQIDVDLLNKMKKANEDELKRLDEELEDAEKNLGESEIRDAMMAKAEYLCRIGDKEGALTAFRKTYDKTVALGHRLDIVFYLLRIGLFYMDNDLITRNTEKAKSLIEEGGDWDRRNRLKVYQGLYCVAIRDFKQAAELFLDTVSTFTSYELMDYKTFVTYTVYVSMIALERPDLREKVIKGAEILEVLHSLPAVRQYLFSLYECRYSVFFQSLAVVEQEMKKDWLFAPHYRYYVREMRIHAYSQLLESYRSLTLGYMAEAFGVGVEFIDQELSRFIAAGRLHCKIDKVNEIVETNRPDSKNWQYQETIKKGDLLLNRVQKLSRVINM

SEQ ID NO: 837340 - protein, 176 aa, Homo sapiens
MPLENLEEEGLPKNPDLRIAQLRFLLSLPEHRGDAAVRDELMAAVRDNNMAPYYEALCKSLDWQIDVDLLNKMKKANEDELKRLDEELEDAEKNLGESEIRDAMMAKAEYLCRIGDKEGALTAFRKTYDKTVALGHRLDIVFYLLRIGLFYMDNDLITRNTEKAKRYFLRVGLYFL

SEQ ID NO: 837341 - protein, 792 aa, Homo sapiens
RREPARPAQPGSDRGGGERVERGEPGEGPRRRDSISRSGHRQRFASRGTGRGHRRPASLQPLACCRASPGPGALGARGLRERDPAGTRGGAAGRGTGSQPALCLGAGRQEGAMALDGIRMPDGCYADGTWELSVHVTDLNRDVTLRVTGEVHIGGVMLKLVEKLDVKKDWSDHALWWEKKRTWLLKTHWTLDKYGIQADAKLQFTPQHKLLRLQLPNMKYVKVKVNFSDRVFKAVSDICKTFNIRHPEELSLLKKPRDPTKKKKKKLDDQSEDEALELEGPLITPGSGSIYSSPGLYSKTMTPTYDAHDGSPLSPTSAWFGDSALSEGNPGILAVSQPITSPEILAKMFKPQALLDKAKINQGWLDSSRSLMEQDVKENEALLLRFKYYSFFDLNPKYDAIRINQLYEQAKWAILLEEIECTEEEMMMFAALQYHINKLSIMTSENHLNNSDKEVDEVDAALSDLEITLEGGKTSTILGDITSIPELADYIKVFKPKKLTLKGYKQYWCTFKDTSISCYKSKEESSGTPAHQMNLRGCEVTPDVNISGQKFNIKLLIPVAEGMNEIWLRCDNEKQYAHWMAACRLASKGKTMADSSYNLEVQNILSFLKMQHLNPDPQLIPEQITTDITPECLVSPRYLKKYKNKQITARILEAHQNVAQMSLIEAKMRFIQAWQSLPEFGITHFIARFQGGKKEELIGIAYNRLIRMDASTGDAIKTWRFSNMKQWNVNWEIKMVTVEFADEVRLSFICTEVDCKVVHEFIGGYIFLSTRAKDQNESLDEEMFYKLTSGWV

SEQ ID NO: 837342 - protein, 575 aa, Homo sapiens [sequence omitted]

SEQ ID NO: 837343 - protein, 799 aa, Homo sapiens
RREPARPAQPGSDRGGGERVERGEPGEGPRRRDSISRSGHRQRFASRGTGRGHRRPASLQPLACCRASPGPGALGARGLRERDPAGTRGGAAGRGTGSQPALCLGAGRQEGAMALDGIRMPDGCYADGTWELSVHVTDLNRDVTLRVTGEVHIGGVMLKLVEKLGEYASQPHVKKDWSDHALWWEKKRTWLLKTHWTLDKYGIQADAKLQFTPQHKLLRLQLPNMKYVKVKVNFSDRVFKAVSDICKTFNIRHPEELSLLKKPRDPTKKKKKKLDDQSEDEALELEGPLITPGSGSIYSSPGLYSKTMTPTYDAHDGSPLSPTSAWFGDSALSEGNPGILAVSQPITSPEILAKMFKPQALLDKAKINQGWLDSSRSLMEQDVKENEALLLRFKYYSFFDLNPKYDAIRINQLYEQAKWAILLEEIECTEEEMMMFAALQYHINKLSIMTSENHLNNSDKEVDEVDAALSDLEITLEGGKTSTILGDITSIPELADYIKVFKPKKLTLKGYKQYWCTFKDTSISCYKSKEESSGTPAHQMNLRGCEVTPDVNISGQKFNIKLLIPVAEGMNEIWLRCDNEKQYAHWMAACRLASKGKTMADSSYNLEVQNILSFLKMQHLNPDPQLIPEQITTDITPECLVSPRYLKKYKNKQITARILEAHQNVAQMSLIEAKMRFIQAWQSLPEFGITHFIARFQGGKKEELIGIAYNRLIRMDASTGDAIKTWRFSNMKQWNVNWEIKMVTVEFADEVRLSFICTEVDCKVVHEFIGGYIFLSTRAKDQNESLDEEMFYKLTSGWV

SEQ ID NO: 837344 - protein, 680 aa, Homo sapiens
MALDGIRMPDGCYADGTWELSVHVTDLNRDVTLRVTGEVHIGGVMLKLVEKLDVKKDWSDHALWWEKKRTWLLKTHWTLDKYGIQADAKLQFTPQHKLLRLQLPNMKYVKVKVNFSDRVFKAVSDICKTFNIRHPEELSLLKKPRDPTKKKKKKLDDQSEDEALELEGPLITPGSGSIYSSPGLYSKTMTPTYDAHDGSPLSPTSAWFGDSALSEGNPGILAVSQPITSPEILAKMFKPQALLDKAKINQGWLDSSRSLMEQDVKENEALLLRFKYYSFFDLNPKYDAIRINQLYEQAKWAILLEEIECTEEEMMMFAALQYHINKLSIMTSENHLNNSDKEVDEVDAALSDLEITLEGGKTSTILGDITSIPELADYIKVFKPKKLTLKGYKQYWCTFKDTSISCYKSKEESSGTPAHQMNLRGCEVTPDVNISGQKFNIKLLIPVAEGMNEIWLRCDNEKQYAHWMAACRLASKGKTMADSSYNLEVQNILSFLKMQHLNPDPQLIPEQITTDITPECLVSPRYLKKYKNKQITARILEAHQNVAQMSLIEAKMRFIQAWQSLPEFGITHFIARFQGGKKEELIGIAYNRLIRMDASTGDAIKTWRFSNMKQWNVNWEIKMVTVEFADEVRLSFICTEVDCKVVHEFIGGYIFLSTRAKDQNESLDEEMFYKLTSGWV

SEQ ID NO: 837345 - protein, 322 aa, Homo sapiens
TESRELGIKAERRKRKRRPKKLTLKGYKQYWCTFKDTSISCYKSKEESSGTPAHQMNLRGCEVTPDVNISGQKFNIKLLIPVAEGMNEIWLRCDNEKQYAHWMAACRLASKGKTMADSSYNLEVQNILSFLKMQHLNPDPQLIPEQITTDITPECLVSPRYLKKYKNKQPGYIRDLITARILEAHQNVAQMSLIEAKMRFIQAWQSLPEFGITHFIARFQGGKKEELIGIAYNRLIRMDASTGDAIKTWRFSNMKQWNVNWEIKMVTVEFADEVRLSFICTEVDCKVVHEFIGGYIFLSTRAKDQNESLDEEMFYKLTSGWV

SEQ ID NO: 837346 - protein, 554 aa, Homo sapiens
MALDGIRMPDGCYADGTWELSVHVTDLNRDVTLRVTGEVHIGGVMLKLVEKLDVKKDWSDHALWWEKKRTWLLKTHWTLDKYGIQADAKLQFTPQHKLLRLQLPNMKYVKVKVNFSDRVFKAVSDICKTFNIRHPEELSLLKKPRDPTKKKKKKLDDQSEDEALELEGPLITPGSGSIYSSPGLYSKTMTPTYDAHDGSPLSPTSAWFGDSALSEGNPGILAVSQPITSPEILAKMFKPQALLDKAKINQGWLDSSRSLMEQDVKENEALLLRFKYYSFFDLNPKYDAIRINQLYEQAKWAILLEEIECTEEEMMMFAALQYHINKLSIMTSENHLNNSDKEVDEVDAALSDLEITLEGGKTSTILGDITSIPELADYIKVFKPKKLTLKGYKQYWCTFKDTSISCYKSKEESSGTPAHQMNLRGCEVTPDVNISGQKFNIKLLIPVAEGMNEIWLRCDNEKQYAHWMAACRLASKGKTMADSSYNLEVQNILSFLKMQHLNPDPQLIPEQITTDITPECLVSPRYLKKYKNKQPGYIRDLVSSPYLPQKKKNK

SEQ ID NO: 837347 - protein, 552 aa, Homo sapiens
MALDGIRMPDGCYADGTWELSVHVTDLNRDVTLRVTGEVHIGGVMLKLVEKLDVKKDWSDHALWWEKKRTWLLKTHWTLDKYGIQADAKLQFTPQHKLLRLQLPNMKYVKVKVNFSDRVFKAVSDICKTFNIRHPEELSLLKKPRDPTKKKKKKLDDQSEDEALELEGPLITPGSGSIYSSPGLYSKTMTPTYDAHDGSPLSPTSAWFGDSALSEGNPGILAVSQPITSPEILAKMFKPQALLDKAKINQGWLDSSRSLMEQDVKENEALLLRFKYYSFFDLNPKYDAIRINQLYEQAKWAILLEEIECTEEEMMMFAALQYHINKLSIMTSENHLNNSDKEVDEVDAALSDLEITLEGGKTSTILGDITSIPELADYIKVFKPKKLTLKGYKQYWCTFKDTSISCYKSKEESSGTPAHQMNLRGCEVTPDVNISGQKFNIKLLIPVAEGMNEIWLRCDNEKQYAHWMAACRLASKGKTMADSSYNLEVQNILSFLKMQHLNPDPQLIPEQITTDITPECLVSPPFAWFKYLWIVIIGHSSSGGQTWKWLGD

SEQ ID NO: 837348 - protein, 680 aa, Homo sapiens; identical to SEQ ID NO: 837344

SEQ ID NO: 837349 - protein, 575 aa, Homo sapiens [sequence omitted]

SEQ ID NO: 837350 - protein, 687 aa, Homo sapiens
MALDGIRMPDGCYADGTWELSVHVTDLNRDVTLRVTGEVHIGGVMLKLVEKLDVKKDWSDHALWWEKKRTWLLKTHWTLDKYGIQADAKLQFTPQHKLLRLQLPNMKYVKVKVNFSDRVFKAVSDICKTFNIRHPEELSLLKKPRDPTKKKKKKLDDQSEDEALELEGPLITPGSGSIYSSPGLYSKTMTPTYDAHDGSPLSPTSAWFGDSALSEGNPGILAVSQPITSPEILAKMFKPQALLDKAKINQGWLDSSRSLMEQDVKENEALLLRFKYYSFFDLNPKYDAIRINQLYEQAKWAILLEEIECTEEEMMMFAALQYHINKLSIMTSENHLNNSDKEVDEVDAALSDLEITLEGGKTSTILGDITSIPELADYIKVFKPKKLTLKGYKQYWCTFKDTSISCYKSKEESSGTPAHQMNLRGCEVTPDVNISGQKFNIKLLIPVAEGMNEIWLRCDNEKQYAHWMAACRLASKGKTMADSSYNLEVQNILSFLKMQHLNPDPQLIPEQITTDITPECLVSPRYLKKYKNKQPGYIRDLITARILEAHQNVAQMSLIEAKMRFIQAWQSLPEFGITHFIARFQGGKKEELIGIAYNRLIRMDASTGDAIKTWRFSNMKQWNVNWEIKMVTVEFADEVRLSFICTEVDCKVVHEFIGGYIFLSTRAKDQNESLDEEMFYKLTSGWV

SEQ ID NO: 837351 - protein, 165 aa, Homo sapiens
EADLRIPKHRNLKKYKNKQITARILEAHQNVAQMSLIEAKMRFIQAWQSLPEFGITHFIARFQGGKKEELIGIAYNRLIRMDASTGDAIKTWRFSNMKQWNVNWEIKMVTVEFADEVRLSFICTEVDCKVVHEFIGGYIFLSTRAKDQNESLDEEMFYKLTSGWV

SEQ ID NO: 837352 - protein, 554 aa, Homo sapiens; identical to SEQ ID NO: 837346

SEQ ID NO: 837353 - protein, 199 aa, Homo sapiens
MALDGIRMPDGCYADGTWELSVHVTDLNRDVTLRVTGEVHIGGVMLKLVEKLDVKKDWSDHALWWEKKRTWLLKTHWTLDKYGIQADAKLQFTPQHKLLRLQLPNMKYVKVKVNFSDRVFKAVSDICKTFNIRHPEELSLLKKPRDPTKKKKKKLDDQSEDEALELEGPLITPGSGSIYSAPELYVTMTPTERARILRS

SEQ ID NO: 837354 - protein, 218 aa, Homo sapiens
MSQTAMSETYDFLFKFLVIGNAGTGKSCLLHQFIEKKFKDDSNHTIGVEFGSKIINVGGKYVKLQIWDTAGQERFRSVTRSYYRGAAGALLVYDITSRETYNALTNWLTDARMLASQNIVIILCGNKKDLDADREVTFLEASRFAQENELMFLETSALTGENVEEAFVQCARKILNKIESGELDPERMGSGIQYGDAALRQLRSPRRAQAPNAQECGC

SEQ ID NO: 837355 - protein, 218 aa, Homo sapiens; identical to SEQ ID NO: 837354

SEQ ID NO: 837356 - protein, 243 aa, Homo sapiens
MSQTAMSETYENSYRFFCLTFFALTLRNCTEPGPTLFWPLPFPPRFLPFRTTQHLFPHGLTFQSSLPTSDAAHFGFKSIINVGGKYVKLQIWDTAGQERFRSVTRSYYRGAAGALLVYDITSRETYNALTNWLTDARMLASQNIVIILCGNKKDLDADREVTFLEASRFAQENELMFLETSALTGENVEEAFVQCARKILNKIESGELDPERMGSGIQYGDAALRQLRSPRRAQAPNAQECGC

SEQ ID NO: 837357 - protein, 113 aa, Homo sapiens
MISPDARMLASQNIVIILCGNKKDLDADREVTFLEASRFAQENELMFLETSALTGENVEEAFVQCARKILNKIESGELDPERMGSGIQYGDAALRQLRSPRRAQAPNAQECGC

SEQ ID NO: 837358 - protein, 218 aa, Homo sapiens; identical to SEQ ID NO: 837354

SEQ ID NO: 837359 - protein, 125 aa, Homo sapiens
MSQTAMSETYDFLFKFLVIGNAGTGKSCLLHQFIEKKFKDDSNHTIGVEFGSKIINVGGKYVKLQIWDTAGQERFSRASVITSRDGPAFDCGYVDGKVSIAQDWRTGGLYILAELHTLSGAEEKT

SEQ ID NO: 837360 - protein, 218 aa, Homo sapiens; identical to SEQ ID NO: 837354

SEQ ID NO: 837361 - protein, 218 aa, Homo sapiens; identical to SEQ ID NO: 837354

SEQ ID NO: 837362 - protein, 121 aa, Homo sapiens
MSQTAMSETYDFLFKFLVIGNAGTGKSCLLHQFIEKKFKDDSNHTIGVEFGSKIINVGGKYVKLQIWDTAGQERFRSVTRSYYRGAAGALLVYDITRCPNASEPEHCDHPLWKQEGPGCRS

SEQ ID NO: 837363 - protein, 211 aa, Homo sapiens
MSQTAMSETYDFLFKFLVIGNAGTGKSCLLHQFIEKKFKDDSNHTIGVEFGSKIINVGGKYVKLQIWDTAGQERFRSVTRSYYRGAAGALLVYDITSRETYNALTNWLTDARMLASQNIVIILCGNKKDLDADREVTFLEASRFAQENELMFLETSALTGENVEEAFVQCARKILNKIESGVHTVAFGTQSLEPEESEVFFTTIFFYSVWK

SEQ ID NO: 837364 - protein, 139 aa, Homo sapiens
PVRTRERGVGRASRSPSPLPPRGRGRTEGGGPCACAELESGWAAAAGRPAVAVGTGRAPPSSGPPPQVLPHRDAPADRGRVQPVTRREAAPLPRCRRRPCPKPTIFCLSSWLLEMQELANLAYFISLLKKNSKMTQIIQ

SEQ ID NO: 837365 - protein, 380 aa, Homo sapiens [sequence omitted]

SEQ ID NO: 837366 - protein, 362 aa, Homo sapiens
MGTKGKVIKCKAAIAWEAGKPLCIEEVEVAPPKAHEVRIQIIATSLCHTDATVIDSKFEGLAFPVIVGHEAAGIVESIGPGVTNVKPGDKVIPLYAPLCRKCKFCLSPLTNLCGKISNLKSPASDQQLMEDKTSRFTCKGKPVYHFFGTSTFSQYTVVSDINLASTGYGAAINNAKVTPGSTCAVFGLGGVGLSAVMGCKAAGASRIIGIDINSEKFVKAKALGATDCLNPRDLHKPIQEVIIELTKGGVDFALDCAGGSETMKAALDCTTAGWGSCTFIGVAAGSKGLTVFPEELIIGRTINGTFFGGWKSVDSIPKLVTDYKNKKFNLDALVTHTLPFDKISEAFDLMNQGKSIRTILIF

SEQ ID NO: 837367 - protein, 356 aa, Homo sapiens
MGTKGKVIKCKAAIAWEAGKPLCIEEVEVAPPKAHEVRIQIIATSLCHTDATVIDSKFEGLAFPVIVGHEAAGIVESIGPGVTNVKPGDKVIPLYAPLCRKCKFCLSPLTNLCGKISNLKSPASDQQLMEDKTSRFTCKGKPVYHFFGTSTFSQYTVVSDINLASTGYGAAINNAKVTPGSTCAVFGLGGVGLSAVMGCKAAGASRIIGIDINSEKFVKAKALGATDCLNPRDLHKPIQEVIIELTKGGVDFALDCAGGSETMKAALDCTTAGWGSCTFIGVAAGSKGLTVFPEELIIGRTINGTFFGGWKSVDSIPKLVTDYKNKKFNLDALVTHTLPFDKISEAFDLMNQGKSI

SEQ ID NO: 837368 - protein, 362 aa, Homo sapiens; identical to SEQ ID NO: 837366

SEQ ID NO: 837369 - protein, 374 aa, Homo sapiens
MGTKGKVIKCKAAIAWEAGKPLCIEEVEVAPPKAHEVRIQIIATSLCHTDATVIDSKFEGLAFPVIVGHEAAGIVESIGPGVTNVKPGDKVIPLYAPLCRKCKFCLSPLTNLCGKISNLKSPASDQQLMEDKTSRFTCKGKPVYHFFGTSTFSQYTVVSDINLAKIDDDANLERVCLLGCGFSTGYGAAINNAKVTPGSTCAVFGLGGVGLSAVMGCKAAGASRIIGIDINSEKFVKAKALGATDCLNPRDLHKPIQEVIIELTKGGVDFALDCAGGSETMKAALDCTTAGWGSCTFIGVAAGSKGLTVFPEELIIGRTINGTFFGGWKSVDSIPKLVTDYKNKKFNLDALVTHTLPFDKISEAFDLMNQGKSI

SEQ ID NO: 837370 - protein, 285 aa, Homo sapiens
MGTKGKVIKCKAAIAWEAGKPLCIEEVEVAPPKAHEVRIQIIATSLCHTDATVIDSKFEGLAFPVIVGHEAAGIVESIGPGVTNVKPGDKVIPLYAPLCRKCKFCLSPLTNLCGKISNLKSPASDQQLMEDKTSRFTCKGKPVYHFFGTSTFSQYTVVSDINLAKIDDDANLERVCLLGCGFSTGYGAAINNAKVTPGSTCAVFGLGGVGLSAVMGCKAAGASRIIGIDINSEKFVKAKALGATDCLNPRDLHKPIQEVIIELTKGGVDFALDCAGGSETMVGKV

SEQ ID NO: 837371 - protein, 365 aa, Homo sapiens
SLFLFFLSFVIKCKAAIAWEAGKPLCIEEVEVAPPKAHEVRIQIIATSLCHTDATVIDSKFEGLAFPVIVGHEAAGIVESIGPGVTNVKPGDKVIPLYAPLCRKCKFCLSPLTNLCGKISNLKSPASDQQLMEDKTSRFTCKGKPVYHFFGTSTFSQYTVVSDINLASTGYGAAINNAKVTPGSTCAVFGLGGVGLSAVMGCKAAGASRIIGIDINSEKFVKAKALGATDCLNPRDLHKPIQEVIIELTKGGVDFALDCAGGSETMKAALDCTTAGWGSCTFIGVAAGSKGLTVFPEELIIGRTINGTFFGGWKSVDSIPKLVTDYKNKKFNLDALVTHTLPFDKISEAFDLMNQGKSIRTILIF

SEQ ID NO: 837372 - protein, 381 aa, Homo sapiens
MLVRGPHFELQRCKTHLFSSNYLTQVIKCKAAIAWEAGKPLCIEEVEVAPPKAHEVRIQIIATSLCHTDATVIDSKFEGLAFPVIVGHEAAGIVESIGPGVTNVKPGDKVIPLYAPLCRKCKFCLSPLTNLCGKISNLKSPASDQQLMEDKTSRFTCKGKPVYHFFGTSTFSQYTVVSDINLASTGYGAAINNAKVTPGSTCAVFGLGGVGLSAVMGCKAAGASRIIGIDINSEKFVKAKALGATDCLNPRDLHKPIQEVIIELTKGGVDFALDCAGGSETMKAALDCTTAGWGSCTFIGVAAGSKGLTVFPEELIIGRTINGTFFGGWKSVDSIPKLVTDYKNKKFNLDALVTHTLPFDKISEAFDLMNQGKSIRTILIF

SEQ ID NO: 837373 - protein, 362 aa, Homo sapiens; identical to SEQ ID NO: 837366

SEQ ID NO: 837374 - protein, 267 aa, Homo sapiens
MGTKGKVIKCKAAIAWEAGKPLCIEEVEVAPPKAHEVRIQIIATSLCHTDATVIDSKFEGLAFPVIVGHEAAGIVESIGPGVTNVKPGDKVIPLYAPLCRKCKFCLSPLTNLCGKISNLKSPASDQQLMEDKTSRFTCKGKPVYHFFGTSTFSQYTVVSDINLASTGYGAAINNAKVTPGSTCAVFGLGGVGLSAVMGCKAAGASRIIGIDINSEKFVKAKALGATDCLNPRDLHKPIQEVIIELTKGGVDFALDCAGGSETMVGKV

SEQ ID NO: 837375 - protein, 146 aa, Homo sapiens
MGTKGKVIKCKAAIAWEAGKPLCIEEVEVAPPKAHEVRIQIIATSLCHTDATVIDSKFEGLAFPVIVGHEAAGIVESIGPGVTNVKPGDKVIPLYAPLCRKCKFCLSPLTNLCGKISNLKSPASDQQLMEDKTIHCGVRYQSCQNR

SEQ ID NO: 837376 - protein, 155 aa, Homo sapiens
MGTKGKVIKCKAAIAWEAGKPLCIEEVEVAPPKAHEVRIQIIATSLCHTDATVIDSKFEGLAFPVIVGHEAAGIVESIGPGVTNVKPGDKVIPLYAPLCRKCKFCLSPLTNLCGKISNLKSPASDQQLMEDKTKSSPGLYNRRLGIMYFHWSSCW

SEQ ID NO: 837377 - protein, 150 aa, Homo sapiens
MGTKGKVIKCKAAIAWEAGKPLCIEEVEVAPPKAHEVRIQIIATSLCHTDATVIDSKFEGLAFPVIVGHEAAGIVESIGPGVTNVKPGDKVIPLYAPLCRKCKFCLSPLTNLCGKIRQVYLQRKTSLPFLWNQYILSVHCGVRYQSCQNR

SEQ ID NO: 837378 - protein, 155 aa, Homo sapiens; identical to SEQ ID NO: 837376

SEQ ID NO: 837379 - protein, 470 aa, Homo sapiens
RASKCPHPVCPLSCQHRGLIHPQSSAVGGDAMTPILTVLICLGLSLDPRTHVQAGPLPKPTLWAEPGSVITQGSPVTLRCQGSLETQEYHLYREKKTALWITRIPQELVKKGQFPILSITWEHAGRYCCIYGSHTAGLSESSDPLELVVTGAYSKPTLSALPSPVVTSGGNVTIQCDSQVAFDGFILCKEGEDEHPQCLNSHSHARGSSRAIFSVGPVSPSRRWSYRCYGYDSRAPYVWSLPSDLLGLLVPGVSKKPSLSVQPGPVVAPGEKLTFQCGSDAGYDRFVLYKEWGRDFLQRPGRQPQAGLSQANFTLGPVSRSYGGQYTCSGAYNLSSEWSAPSDPLDILITGQIRARPFLSVRPGPTVASGENVTLLCQSQGGMHTFLLTKEGAADSPLRLKSKRQSHKYQAEFPMSPVTSAHAGTYRCYGSLSSNPYLLTHPSDPLELVVSGAAETLSPPQNKSDSKAGE

SEQ ID NO: 837380 - protein, 406 aa, Homo sapiens
RASKCPHPVCPLSCQHRGLIHPQSSAVGGDAMTPILTVLICLGLSLDPRTHVQAGPLPKPTLWAEPGSVITQGSPVTLRCQGSLETQEYHLYREKKTALWITRIPQELVKKGQFPILSITWEHAGRYCCIYGSHTAGLSESSDPLELVVTGAYSKPTLSALPSPVVTSGGNVTIQCDSQVAFDGFILCVSKKPSLSVQPGPVVAPGEKLTFQCGSDAGYDRFVLYKEWGRDFLQRPGRQPQAGLSQANFTLGPVSRSYGGQYTCSGAYNLSSEWSAPSDPLDILITGQIRARPFLSVRPGPTVASGENVTLLCQSQGGMHTFLLTKEGAADSPLRLKSKRQSHKYQAEFPMSPVTSAHAGTYRCYGSLSSNPYLLTHPSDPLELVVSGAAETLSPPQNKSDSKAGE

SEQ ID NO: 837381 - protein, 163 aa, Homo sapiens
MIKCSHLRGFQAGVQKLKAELLDIAMENQTLNETLGSLSDAVVGLTYSQLESLSPEAVHGAISTLNQVSGWAKSQVIILSAKYLAHEKVLSFYNVSQMGALLAGVSTQAFCSMKRKDISQVLRSAVSQYVFRLVTCPAARYPQQDGPSGRHCPRHRGDTRGFL

SEQ ID NO: 837382 - protein, 166 aa, Homo sapiens
MLLILLSVALLAFSSAQDLDEDVSQEDVPLVISDGGDSEQFIDEERQGPPLGGQQSQPSAGDGNQNDGPQQGPPQQGGQQQQGPPPPQGKPQGPPQQGGHPPPPQGRPQGPPQQGGHPRPPRGRPQGPPQQGGHQQGPPPPPPGKPQGPPPQGGRPQGPPQGQSPQ

SEQ ID NO: 837383 - protein, 166 aa, Homo sapiens; identical to SEQ ID NO: 837382

SEQ ID NO: 837384 - protein, 117 aa, Homo sapiens
LCLVPQHRPSAGDGNQNDGPQQGPPQQGGQQQQGPPPPQGKPQGPPQQGGHPPPPQGRPQGPPQQGGHPRPPRGRPQGPPQQGGHQQGPPPPPPGKPQGPPPQGGRPQGPPQGQSPQ

SEQ ID NO: 837385 - protein, 127 aa, Homo sapiens
VGDSEDPKHDPLLVMGTRMMALSRDHPNKEASSNKVHHLLRESHKDHPNREAIPLLLKEGHKDHPNREAIPVLLEEGHKDHPNREAISKVLPHLLLESPRDHLPKGAAHKDLHRGSLLSNLGFNDRK

SEQ ID NO: 837386 - protein, 247 aa, Homo sapiens
MLLILLSVALLALSSAESSSEDVSQEESLFLISGKPEGRRPQGGNQPQRPPPPPGKPQGPPPQGGNQSQGPPPPPGKPEGRPPQGGNQSQGPPPHPGKPERPPPQGGNQSQGTPPPPGKPERPPPQGGNQSHRPPPPPGKPERPPPQGGNQSQGPPPHPGKPEGPPPQEGNKSRSARSPPGKPQGPPQQEGNKPQGPPPPGKPQGPPPAGGNPQQPQDPPAGKPQGPPPPPQGGRPPRPAQGQQPPQ

SEQ ID NO: 837387 - protein, 111 aa, Homo sapiens
MLLILLSVALLAFSSAQDLDEDVSQEDVPLVISDGGDSEQFIDEERQGPPLGGQQSQPSAGDGNQNDGPQQGPPQQGGQQQQGPPPPQGKPQGRSGGSGCSTVSRQSCQRV

SEQ ID NO: 837388 - protein, 109 aa, Homo sapiens
MRSVRDHLWEDSNLNPLLVMGTRMMALSRDHPNKEASSNKVHHLLRESHKPQGPPQQGGHPRPPRGRPQGPPQQGGHQQGPPPPPPGKPQGPPPQGGRPQGPPQGQSPQ

SEQ ID NO: 837389 - protein, 76 aa, Homo sapiens
MLLILLSVALLAFSSAQDLDEDVSQEDVPLVISDGGDSEQFIDEERQGPPLGGQQSQTLLLLASLLGWSLLRAIIL

SEQ ID NO: 837390 - protein, 127 aa, Homo sapiens; identical to SEQ ID NO: 837385

SEQ ID NO: 837391 - protein, 166 aa, Homo sapiens; identical to SEQ ID NO: 837382

SEQ ID NO: 837392 - protein, 166 aa, Homo sapiens; identical to SEQ ID NO: 837382

SEQ ID NO: 837393 - protein, 129 aa, Homo sapiens
GRIPGGDGEFLDPLLVMGTRMMALSRDHPNKEASSNKVHHLLRESHKDHPNREAIPLLLKEGHKDHPNREAIPVLLEEGHKDHPNREAISKVLPHLLLESPRDHLPKGAAHKDLHRGSLLSNLGFNDRK

SEQ ID NO: 837394 - protein, 153 aa, Homo sapiens
MLLILLSVALLAFSSAQDLDEDVSQEDVPLVISDGGDSEQFIDEERQGPPLGGQQSQPSAGDGNQNDGPQQGPPQQGGQQQQGPPPPQGKPQATRTTPTGRPSPSSSRKATRTTPTGRPSARSSPTSSWKAPGTTSPRGPPTRTSTGAVSSVI

SEQ ID NO: 837395 - protein, 126 aa, Homo sapiens
MLLILLSVALLAFSSAQDLDEDVSQEDVPLVISDGGDSEQFIDEERQGPPLGGQQSQPSAGDGNQNDGPQQGPPQQGGQQQQGGLISSSHHPLSVPRACQPQGHNPTSCSPNTHTGFVNSLRGSRT

SEQ ID NO: 837396 - protein, 163 aa, Homo sapiens
MSPVLSGIHSIYSAWVTSVNITDCKPPSISGAAHQGPTAPGRMVRILANGEIVQDDDPRVRTTTQPPRGSIPRQSFFNRGHGAPPGGPGPRQQQAGARLGAAQSPFNDLNRQLVNMGFPQWHLGNHAVEPVTSILLLFLLMMLGVRGLLLVGLVYLVSHLSQR

SEQ ID NO: 837397 - protein, 177 aa, Homo sapiens
VGGNRLEPPGVDAAEARSRACRHSIYSAWVTSVNITDCKPPSISGAAHQGPTAPGRMVRILANGEIVQDDDPRVRTTTQPPRGSIPRQSFFNRGHGAPPGGPGPRQQQAGARLGAAQSPFNDLNRQLVNMGFPQWHLGNHAVEPVTSILLLFLLMMLGVRGLLLVGLVYLVSHLSQR

SEQ ID NO: 837398 - protein, 177 aa, Homo sapiens; identical to SEQ ID NO: 837397

SEQ ID NO: 837399 - protein, 177 aa, Homo sapiens; identical to SEQ ID NO: 837397

SEQ ID NO: 837400 - protein, 121 aa, Homo sapiens
MVRILANGEIVQDDDPRVRTTTQPPRGSIPRQSFFNRGHGAPPGGPGPRQQQAGARLGAAQSPFNDLNRQLVNMGFPQWHLGNHAVEPVTSILLLFLLMMLGVRGLLLVGLVYLVSHLSQR

SEQ ID NO: 837401 - protein, 208 aa, Homo sapiens
MLGLLVALLALGLAVFALLDVWYLVRLPCAVLRARLLQPRVRDLLAEQRFPGRVLPSDLDLLLHMNNARYLREADFARVAHLTRCGVLGALRELRAHTVLAASCARHRRSLRLLEPFEVRTRLLGWDDRAFYLEARFVSLRDGFVCALLRFRQHLLGTSPERVVQHLCQRRVEPPELPADLQHWISYNEASSQLLRMESGLSDVTKDQ

SEQ ID NO: 837402 - protein, 208 aa, Homo sapiens; identical to SEQ ID NO: 837401

SEQ ID NO: 837403 - protein, 155 aa, Homo sapiens
MLGLLVALLALGLAVFALLDVWYLVRLPCAVLRARLLQPRVRDLLAEQRFPGRVLPSDLDLLLHMNNARYLREADFARVAHLTRCGVLGALRELRAHTVLAASCARHRRSLRLLEPFEVEPPELPADLQHWISYNEASSQLLRMESGLSDVTKDQ

SEQ ID NO: 837404 - protein, 208 aa, Homo sapiens; identical to SEQ ID NO: 837401

SEQ ID NO: 837405 - protein, 208 aa, Homo sapiens; identical to SEQ ID NO: 837401

SEQ ID NO: 837406 - protein, 208 aa, Homo sapiens; identical to SEQ ID NO: 837401

SEQ ID NO: 837407 - protein, 208 aa, Homo sapiens; identical to SEQ ID NO: 837401

SEQ ID NO: 837408 - protein, 204 aa, Homo sapiens
MLGLLVALLALGLAVFALLDVWYLVRLPCAVLRARLLQPRVRDLLAEQRFPGRVLPSDLDLLLHMNNARYLREADFARVAHLTRCGVLGALRELRAHTVLAASCARHRRSLRLLEPFEVRTRLLGWDDRAFYLEARFVSLRDGFVCALLRFRQHLLGTSPERVVQHLCQRRTDSHSVAQAGVQWRDLGSLQPPPSGFTPFSCFS

SEQ ID NO: 837409 - protein, 179 aa, Homo sapiens
MSTGSLSDVEDLQEVEMLECDGLKMDSNKEFVTSNESTEESSNCENGSPQKGRGGLGKRRKAPTKKSPLSGVSQEGKQVQRNAANARERARMRVLSKAFSRLKTTLPWVPPDTKLSKLDTLRLASSYIAHLRQILANDKYENGYIHPVNLTWPFMVAGKPESDLKEVVTASRLCGTTAS

SEQ ID NO: 837410 - protein, 109 aa, Homo sapiens
RLWEWGNREPVPLLQKSSGFLLTTLRRGKGCETQPDPNSSSQQEVAAPHSGGLLVSGSLCLSLTLFLAFSVSLPREHFTTTRRFVSKPEEINCTYKDSHLFNFINFYRE

SEQ ID NO: 837411 - protein, 99 aa, Homo sapiens
MWNHRVLTLEVRVWERRAPGGSGPREGDPCPQCSLSLLPPRNAPLSVPPRENTLQRRGDSFPNQRRSIVLTKIPIYLTLLTSTVNDSASLAGPSAICNY

SEQ ID NO: 837412 - protein, 179 aa, Homo sapiens; identical to SEQ ID NO: 837409

SEQ ID NO: 837413 - protein, 108 aa, Homo sapiens
RLWEWGNREPVPLLQKSSGFLLTTLRRGKGCETQPDPNSSSQQEVAAPHSGGLLVSGSLCLSLTLFLAFSVSLSLSLSLPRPLPQTCPPAPSAMWRTFKRWRCWNVTG

SEQ ID NO: 837414 - protein, 111 aa, Homo sapiens
MSTGSLSDVEDLQEVEMLECDGLKMDSNKEFVTSNESTEESSNCENGSPQKGRGGLGKRRKATPALSALCLCFPLAMLLSLSHPARTLYNDEEIRFQTRGDQLYLQRFPSI

SEQ ID NO: 837415 - protein, 457 aa, Homo sapiens
RRGHAFSGPQRGLGSRVFKSALVAAAVLTPVLGGQTGEMAAEVLPSARWQYCGAPDGSQRAVLVQFSNGKLQSPGNMRFTLYENKDSTNPRKRNQRILAAETDRLSYVGNNFGTGALKCNTLCRHFVGILNKTSGQMEVYDAELFNMQPLFSDVSVESELALESQTKTYREKMDSCIEAFGTTKQKRALNTRRMNRVGNESLNRAVAKAAETIIDTKGVTALVSDAIHNDLQDDSLYLPPCYDDAAKPEDVYKFEDLLSPAEYEALQSPSEAFRNVTSEEILKMIEENSHCTFVIEALKSLPSDVESRDRQARCIWFLDTLIKFRAHRVVKRKSALGPGVPHIINTKLLKHFTCLTYNNGRLRNLISDSMKAKITAYVIILALHIHDFQIDLTVLQRDLKLSEKRMMEIAKAMRLKISKRRVSVAAGSEEDHKLGTLSLPLPPAQTSDRLAKRRKIT

SEQ ID NO: 837416 - protein, 457 aa, Homo sapiens; identical to SEQ ID NO: 837415

SEQ ID NO: 837417 - protein, 457 aa, Homo sapiens; identical to SEQ ID NO: 837415

SEQ ID NO: 837418 - protein, 105 aa, Homo sapiens
SPLLPLFSRLRNLISDSMKAKITAYVIILALHIHDFQIDLTVLQRDLKLSEKRMMEIAKAMRLKISKRRVSVAAGSEEDHKLGTLSLPLPPAQTSDRLAKRRKIT

SEQ ID NO: 837419 - protein, 190 aa, Homo sapiens
MVQQDVQGLKAQSAGLSISQHLLSGCHGNIIPNPTTLSSRETAIIRRDLGFPRGSWASFLKRLLLSSATRNTRPAHPQHLCGDEGQSPTVPLPVLMRKGGKKTYPERLQYGHDTFKKPVLWSHDQKPECGEGQQPASEQPARRGVVNLGLVPRHDWLRAQCSTLWNVPWASVAFLSFAGRGLLPLWQLVS

SEQ ID NO: 837420 - protein, 190 aa, Homo sapiens; identical to SEQ ID NO: 837419

SEQ ID NO: 837421 - protein, 210 aa, Homo sapiens
EVGPGGRGLSVGLRSQGSSTPEHPRTCAQGSHKRFIGLSLGDSLQASGGDTSMERLWGLFQRAQQLSPRSSQTVYQRVEGPRKGHLEEEEEDGEEGAETLAHFCPMELRGPEPLGSRPRQPNLIPWAAAGRRAAPYLVLTALLIFTGAFLLGYVAFRGSCQACGDSVLVVSEDVNYEPDLDFHQGRLYWSDLQAMFLQFLGEGRLEDTIR

SEQ ID NO: 837422 - protein, 949 aa, Homo sapiens
EVGPGGRGLSVGLRSQGSSTPEHPRTCAQGGGRRGAVERLAGESTAPCALAWTRGPRLEGWTEARTVPPPLGVVRSSLGSGCLPGLIRGPPEGSHKRFIGLSLGDSLQASGGDTSMERLWGLFQRAQQLSPRSSQTVYQRVEGPRKGHLEEEEEDGEEGAETLAHFCPMELRGPEPLGSRPRQPNLIPWAAAGRRAAPYLVLTALLIFTGAFLLGYVAFRGSCQACGDSVLVVSEDVNYEPDLDFHQGRLYWSDLQAMFLQFLGEGRLEDTIRQTSLRERVAGSAGMAALTQDIRAALSRQKLDHVWTDTHYVGLQFPDPAHPNTLHWVDEAGKVGEQLPLEDPDVYCPYSAIGNVTGELVYAHYGRPEDLQDLRARGVDPVGRLLLVRVGVISFAQKVTNAQDFGAQGVLIYPEPADFSQDPPKPSLSSQQAVYGHVHLGTGDPYTPGFPSFNQTQFPPVASSGLPSIPAQPISADIASRLLRLECSGAILAHCNLHLPGSSDSSASDSRVSEDYRKLKGPVAPQEWQGSLLGSPYHLGPGPRLRLVVNNHRTSTPINNIFGCIEGRSEPDHYVVIGAQRDAWGPGAAKSAVGTAILLELVRTFSSMVSNGFRPRRSLLFISWDGGDFGSVGSTEWLEGYLSVLHLKAVVYVSLDNAVLGDDKFHAKTSPLLTSLIESVLKQVDSPNHSGQTLYEQVVFTNPSWDAEVIRPLPMDSSAYSFTAFVGVPAVEFSFMEDDQAYPFLHTKEDTYENLHKVLQGRLPAVAQAVAQLAGQLLIRLSHDRLLPLDFGRYGDVVLRHIGNLNEFSGDLKARGLTLQWVYSARGDYIRAAEKLRQEIYSSEERDERLTRMYNVRIMRVEFYFLSQYVSPADSPFRHIFMGRGDHTLGALLDHLRLLRSNSSGTPGATSSTGFQESRFRRQLALLTWTLQGAANALSGDVWNIDNNF

SEQ ID NO: 837423 - protein, 895 aa, Homo sapiens
EVGPGGRGLSVGLRSQGSSTPEHPRTCAQGGGRRGAVERLAGESTAPCALAWTRGPRLEGWTEARTVPPPLGVVRSSLGSGCLPGLIRGPPEGSHKRFIGLSLGDSLQASGGDTSMERLWGLFQRAQQLSPRSSQTVYQRVEGPRKGHLEEEEEDGEEGAETLAHFCPMELRGPEPLGSRPRQPNLIPWAAAGRRAAPYLVLTALLIFTGAFLLGYVAFRGSCQACGDSVLVVSEDVNYEPDLDFHQGRLYWSDLQAMFLQFLGEGRLEDTIRQTSLRERVAGSAGMAALTQDIRAALSRQKLDHVWTDTHYVGLQFPDPAHPNTLHWVDEAGKVGEQLPLEDPDVYCPYSAIGNVTGELVYAHYGRPEDLQDLRARGVDPVGRLLLVRVGVISFAQKVTNAQDFGAQGVLIYPEPADFSQDPPKPSLSSQQAVYGHVHLGTGDPYTPGFPSFNQTQKLKGPVAPQEWQGSLLGSPYHLGPGPRLRLVVNNHRTSTPINNIFGCIEGRSEPDHYVVIGAQRDAWGPGAAKSAVGTAILLELVRTFSSMVSNGFRPRRSLLFISWDGGDFGSVGSTEWLEGYLSVLHLKAVVYVSLDNAVLGDDKFHAKTSPLLTSLIESVLKQVDSPNHSGQTLYEQVVFTNPSWDAEVIRPLPMDSSAYSFTAFVGVPAVEFSFMEDDQAYPFLHTKEDTYENLHKVLQGRLPAVAQAVAQLAGQLLIRLSHDRLLPLDFGRYGDVVLRHIGNLNEFSGDLKARGLTLQWVYSARGDYIRAAEKLRQEIYSSEERDERLTRMYNVRIMRIPLSAQVEFYFLSQYVSPADSPFRHIFMGRGDHTLGALLDHLRLLRSNSSGTPGATSSTGFQESRFRRQLALLTWTLQGAANALSGDVWNIDNNF

SEQ ID NO: 837424 - protein, 847 aa, Homo sapiens
EVGPGGRGLSVGLRSQGSSTPEHPRTCAQGGGRRGAVERLAGESTAPCALAWTRGPRLEGWTEARTVPPPLGVVRSSLGSGCLPGLIRGPPEGSHKRFIGLSLGDSLQASGGDTSMERLWGLFQRAQQLSPRSSQTVYQRVEGPRKGHLEEEEEDGEEGAETLAHFCPMELRGPEPLGSRPRQPNLIPWAAAGRRAAPYLVLTALLIFTGAFLLGYVAFRGSCQACGDSVLVVSEDVNYEPDLDFHQGRLYWSDLQAMFLQFLGEGRLEDTIRQTSLRERVAGSAGMAALTQDIRAALSRQKLDHVWTDTHYVGLQFPDPAHPNTLHWVDEAGKVGEQLPLEDPDVYCPYSAIGNVTGELVYAHYGRPEDLQDLRARGVDPVGRLLLVRVGVISFAQKEAQRPCGPPRMAGEPPRLPYHLGPGPRLRLVVNNHRTSTPINNIFGCIEGRSEPGFRPRRSLLFISWDGGDFGSVGSTEWLEVIRGPGQVVRHWGEVGVGGSHSTLVTHPQGYLSVLHLKAVVYVSLDNAVLGDDKFHAKTSPLLTSLIESVLKQVDSPNHSGQTLYEQVVFTNPSWDAEVIRPLPMDSSAYSFTAFVGVPAVEFSFMEVRRPPPAPDTAQSFSLSASAPASTLSWQDDQAYPFLHTKEDTYENLHKVLQGRLPAVAQAVAQLAGQLLIRLSHDRLLPLDFGRYGDVVLRHIGNLNEFSGDLKARGLTLQWVYSARGDYIRAAEKLRQEIYSSEERDERLTRMYNVRIMRVEFYFLSQYVSPADSPFRHIFMGRGDHTLGALLDHLRLLRSNSSGTPGATSSTGFQESRFRRQLALLTWTLQGAANALSGDVWNIDNNF

SEQ ID NO: 837425 - protein, 858 aa, Homo sapiens
EVGPGGRGLSVGLRSQGSSTPEHPRTCAQGGGRRGAVERLAGESTAPCALAWTRGPRLEGWTEARTVPPPLGVVRSSLGSGCLPGLIRGPPEGSHKRFIGLSLGDSLQASGGDTSMERLWGLFQRAQQLSPRSSQTVYQRVEGPRKGHLEEEEEDGEEGAETLAHFCPMELRGPEPLGSRPRQPNLIPWAAAGRRAAPYLVLTALLIFTGAFLLGYVAFRGSCQACGDSVLVVSEDVNYEPDLDFHQGRLYWSDLQAMFLQFLGEGRLEDTIRQTSLRERVAGSAGMAALTQDIRAALSRQKLDHVWTDTHYVGLQFPDPAHPNTLHWVDEAGKVGEQLPLEDPDVYCPYSAIGNVTGELVYAHYGRPEDLQDLRARGVDPVGRLLLVRVGVISFAQKEAQRPCGPPRMAGEPPRLPLSPGPRATTAASGQQSQDLHPHQQHLRLHRRPLRARYYVVIGAQRDAWGPGAAKSAVGTAILLELVRTFSSMVSNGFRPRRSLLFISWDGGDFGSVGSTEWLEGYLSVLHLKAVVYVSLDNAVLGDDKFHAKTSPLLTSLIESVLKQVDSPNHSGQTLYEQVVFTNPSWDAEVIRPLPMDSSAYSFTAFVGVPAVEFSFMEVRRPPPAPDTALVLQPVCLRPSVHPVLQDDQAYPFLHTKEDTYENLHKVLQGRLPAVAQAVAQLAGQLLIRLSHDRLLPLDFGRYGDVVLRHIGNLNEFSGDLKARGLTLQWVYSARGDYIRAAEKLRQEIYSSEERDERLTRMYNVRIMRVEFYFLSQYVSPADSPFRHIFMGRGDHTLGALLDHLRLLRSNSSGTPGATSSTGFQESRFRRQLALLTWTLQGAANALSGDVWNIDNNF

SEQ ID NO: 837426 - protein, 642 aa, Homo sapiens
MDSCKQRPCHFLVSPALMNRVFFWEESSSHLPPQVTNAQDFGAQGVLIYPEPADFSQDPPKPSLSSQQAVYGHVHLGTGDPYTPGFPSFNQTQFPPVASSGLPSIPAQPISADIASRLLRLECSGAILAHCNLHLPGSSDSSASDSRVSEDYRKLKGPVAPQEWQGSLLGSPYHLGPGPRLRLVVNNHRTSTPINNIFGCIEGRSEPDHYVVIGAQRDAWGPGAAKSAVGTAILLELVRTFSSMVSNGFRPRRSLLFISWDGGDFGSVGSTEWLEVIRGPGQVVRHWGEVGVGGSHSTLVTHPQGYLSVLHLKAVVYVSLDNAVLGDDKFHAKTSPLLTSLIESVLKQVDSPNHSGQTLYEQVVFTNPSWDAEVIRPLPMDSSAYSFTAFVGVPAVEFSFMEVRRPPPAPDTALSFSLSASAPASTLSWQDDQAYPFLHTKEDTYENLHKVLQGRLPAVAQAVAQLAGQLLIRLSHDRLLPLDFGRYGDVVLRHIGNLNEFSGDLKARGLTLQWVYSARGDYIRAAEKLRQEIYSSEERDERLTRMYNVRIMRVEFYFLSQYVSPADSPFRHIFMGRGDHTLGALLDHLRLLRSNSSGTPGATSSTGFQESRFRRQLALLTWTLQGAANALSGDVWNIDNNF

SEQ ID NO: 837427 - protein, 493 aa, Homo sapiens
RARAGGARGGGRGSGRSPAPLPRAHPNTLHWVDEAGKVGEQLPLEDPDVYCPYSAIGNVTGELVYAHYGRPEDLQDLRARGVDPVGRLLLVRVGVISFAQKEAQRPCGPPRMAGEPPRLPLSPGPRARLRLVVNNHRTSTPINNIFGCIEGRSEPGFRPRRSLLFISWDGGDFGSVGSTEWLEGYLSVLHLKAVVYVSLDNAVLGDDKFHAKTSPLLTSLIESVLKQVDSPNHSGQTLYEQVVFTNPSWDAEVIRPLPMDSSAYSFTAFVGVPAVEFSFMEDDQAYPFLHTKEDTYENLHKVLQGRLPAVAQAVAQLAGQLLIRLSHDRLLPLDFGRYGDVVLRHIGNLNEFSGDLKARGLTLQWVYSARGDYIRAAEKLRQEIYSSEERDERLTRMYNVRIMRVEFYFLSQYVSPADSPFRHIFMGRGDHTLGALLDHLRLLRSNSSGTPGATSSTGFQESRFRRQLALLTWTLQGAANALSGDVWNIDNNF

SEQ ID NO: 837428 - protein, 480 aa, Homo sapiens
EVGPGGRGLSVGLRSQGSSTPEHPRTCAQGGGRRGAVERLAGESTAPCALAWTRGPRLEGWTEARTVPPPLGVVRSSLGSGCLPGLIRGPPEGSHKRFIGLSLGDSLQASGGDTSMERLWGLFQRAQQLSPRSSQTVYQRVEGPRKGHLEEEEEDGEEGAETLAHFCPMELRGPEPLGSRPRQPNLIPWAAAGRRAAPYLVLTALLIFTGAFLLGYVAFRGSCQACGDSVLVVSEDVNYEPDLDFHQGRLYWSDLQAMFLQFLGEGRLEDTIRQTSLRERVAGSAGMAALTQDIRAALSRQKLDHVWTDTHYVGLQFPDPAHPNTLHWVDEAGKVGEQLPLEDPDVYCPYSAIGNVTGELVYAHYGRPEDLQDLRARGVDPVGRLLLVRVGVISFAQKVTNAQDFGAQGVLIYPEPADFSQDPPKPSLSSQQAVYGHVHLGTGDPYTPGFPSFNQTQFPPVASSGLPSIPRPALWSLKKK

SEQ ID NO: 837429 - protein, 418 aa, Homo sapiens
EVGPGGRGLSVGLRSQGSSTPEHPRTCAQGGGRRGAVERLAGESTAPCALAWTRGPRLEGWTEARTVPPPLGVVRSSLGSGCLPGLIRGPPEGSHKRFIGLSLGDSLQASGGDTSMERLWGLFQRAQQLSPRSSQTVYQRVEGPRKGHLEEEEEDGEEGAETLAHFCPMELRGPEPLGSRPRQPNLIPWAAAGRRAAPYLVLTALLIFTGAFLLGYVAFRGSCQACGDSVLVVSEDVNYEPDLDFHQGRLYWSDLQAMFLQFLGEGRLEDTIRQTSLRERVAGSAGMAALTQDIRAALSRQKLDHVWTDTHYVGLQFPDPAHPNTLHWVDEAGKVGEQLPLEDPDVYCPYSAIGNVTGELVYAHYGRPEDLQDLRARGVDPVGRLLLVRVGVISFAQKVSVPGQREGLSPGTGGSDCQ

SEQ ID NO: 837430 - protein, 44 aa, Homo sapiens
MAGEPPRLPLSPGPRATTAASGQQSQDLHPHQQHLRLHRRPLRA

SEQ ID NO: 837431 - protein, 801 aa, Homo sapiens
MERLWGLFQRAQQLSPRSSQTVYQRVEGPRKGHLEEEEEDGEEGAETLAHFCPMELRGPEPLGSRPRQPNLIPWAAAGRRAAPYLVLTALLIFTGAFLLGYVAFRGSCQACGDSVLVVSEDVNYEPDLDFHQGRLYWSDLQAMFLQFLGEGRLEDTIRQTSLRERVAGSAGMAALTQDIRAALSRQKLDHVWTDTHYVGLQFPDPAHPNTLHWVDEAGKVGEQLPLEDPDVYCPYSAIGNVTGELVYAHYGRPEDLQDLRARGVDPVGRLLLVRVGVISFAQKVTNAQDFGAQGVLIYPEPADFSQDPPKPSLSSQQAVYGHVHLGTGDPYTPGFPSFNQTQFPPVASSGLPSIPAQPISADIASRLLRKLKGPVAPQEWQGSLLGSPYHLGPGPRLRLVVNNHRTSTPINNIFGCIEGRSEPDHYVVIGAQRDAWGPGAAKSAVGTAILLELVRTFSSMVSNGFRPRRSLLFISWDGGDFGSVGSTEWLEGYLSVLHLKAVVYVSLDNAVLGDDKFHAKTSPLLTSLIESVLKQVDSPNHSGQTLYEQVVFTNPSWDAEVIRPLPMDSSAYSFTAFVGVPAVEFSFMEDDQAYPFLHTKEDTYENLHKVLQGRLPAVAQAVAQLAGQLLIRLSHDRLLPLDFGRYGDVVLRHIGNLNEFSGDLKARGLTLQWVYSARGDYIRAAEKLRQEIYSSEERDERLTRMYNVRIMRVEFYFLSQYVSPADSPFRHIFMGRGDHTLGALLDHLRLLRSNSSGTPGATSSTGFQESRFRRQLALLTWTLQGAANALSGDVWNIDNNF

SEQ ID NO: 837432 - protein, 1006 aa, Homo sapiens
EVGPGGRGLSVGLRSQGSSTPEHPRTCAQGGGRRGAVERLAGESTAPCALAWTRGPRLEGWTEARTVPPPLGVVRSSLGSGCLPGLIRGPPEGSHKRFIGLSLGDSLQASGGDTSMERLWGLFQRAQQLSPRSSQTVYQRVEGPRKGHLEEEEEDGEEGAETLAHFCPMELRGPEPLGSRPRQPNLIPWAAAGRRAAPYLVLTALLIFTGAFLLGYVAFRGSCQACGDSVLVVSEDVNYEPDLDFHQGRLYWSDLQAMFLQFLGEGRLEDTIRQTSLRERVAGSAGMAALTQDIRAALSRQKLDHVWTDTHYVGLQFPDPAHPNTLHWVDEAGKVGEQLPLEDPDVYCPYSAIGNVTGELVYAHYGRPEDLQDLRARGVDPVGRLLLVRVGVISFAQKVTNAQDFGAQGVLIYPEPADFSQDPPKPSLSSQQAVYGHVHLGTGDPYTPGFPSFNQTQFPPVASSGLPSIPAQPISADIASRLLRLECSGAILAHCNLHLPGSSDSSASDSRVSEDYRKLKGPVAPQEWQGSLLGSPYHLGPGPRLRLVVNNHRTSTPINNIFGCIEGRSEPDHYVVIGAQRDAWGPGAAKSAVGTAILLELVRTFSSMVSNGFRPRRSLLFISWDGGDFGSVGSTEWLEVIRGPGQVVRHWGEVGVGGSHSTLVTHPQGYLSVLHLKAVVYVSLDNAVLGDDKFHAKTSPLLTSLIESVLKQVDSPNHSGQTLYEQVVFTNPSWDAEVIRPLPMDSSAYSFTAFVGVPAVEFSFMEVRRPPPAPDTALVLQPVCLRPSVHPVLEDDQAYPFLHTKEDTYENLHKVLQGRLPAVAQAVAQLAGQLLIRLSHDRLLPLDFGRYGDVVLRHIGNLNEFSGDLKARGLTLQWVYSARGDYIRAAEKLRQEIYSSEERDERLTRMYNVRIMRVEFYFLSQYVSPADSPFRHIFMGRGDHTLGALLDHLRLLRSNSSGTPGATSSTGFQESRFRRQLALLTWTLQGAANALSGDVWNIDNNF

SEQ ID NO: 837433 - protein, 676 aa, Homo sapiens
AARAGGARGGGRGSGRSPAPLPRAHPNTLHWVDEAGKVGEQLPLEDPDVYCPYSAIGNVTGELVYAHYGRPEDLQDLRARGVDPVGRLLLVRVGVISFAQKVTNAQDFGAQGVLIYPEPADFSQDPPKPSLSSQQAVYGHVHLGTGDPYTPGFPSFNQTQFPPVASSGLPSIPAQPISADIASRLLRKLKGPVAPQEWQGSLLGSPYHLGPGPRLRLVVNNHRTSTPINNIFGCIEGRSEPDHYVVIGAQRDAWGPGAAKSAVGTAILLELVRTFSSMVSNGFRPRRSLLFISWDGGDFGSVGSTEWLEVIRGPGQVVRHWGEVGVGGSHSTLVTHPQGYLSVLHLKAVVYVSLDNAVLGDDKFHAKTSPLLTSLIESVLKQVDSPNHSGQTLYEQVVFTNPSWDAEVIRPLPMDSSAYSFTAFVGVPAVEFSFMEVRRPPPAPDTALVLQPVCLRPSVHPVLEDDQAYPFLHTKEDTYENLHKVLQGRLPAVAQAVAQLAGQLLIRLSHDRLLPLDFGRYGDVVLRHIGNLNEFSGDLKARGLTLQWVYSARGDYIRAAEKLRQEIYSSEERDERLTRMYNVRIMRVEFYFLSQYVSPADSPFRHIFMGRGDHTLGALLDHLRLLRSNSSGTPGATSSTGFQESRFRRQLALLTWTLQGAANALSGDVWNIDNNF

SEQ ID NO: 837434 - protein, 505 aa, Homo sapiens
AVPRSRGHTFLLRIGLACFSFFLEAQLAALRGHPFPCRCTWELETPTHLASLPSIKPSSLQLHHQAFPASHAQPISADIASRLLRKLKGPVAPQEWQGSLLGSPYHLGPGPRLRLVVNNHRTSTPINNIFGCIEGRSEPGFRPRRSLLFISWDGGDFGSVGSTEWLEGYLSVLHLKAVVYVSLDNAVLGDDKFHAKTSPLLTSLIESVLKQVDSPNHSGQTLYEQVVFTNPSWDAEVIRPLPMDSSAYSFTAFVGVPAVEFSFMEVRRPPPAPDTALSFSLSASAPASTLSWQDDQAYPFLHTKEDTYENLHKVLQGRLPAVAQAVAQLAGQLLIRLSHDRLLPLDFGRYGDVVLRHIGNLNEFSGDLKARGLTLQWVYSARGDYIRAAEKLRQEIYSSEERDERLTRMYNVRIMRVEFYFLSQYVSPADSPFRHIFMGRGDHTLGALLDHLRLLRSNSSGTPGATSSTGFQESRFRRQLALLTWTLQGAANALSGDVWNIDNNF

SEQ ID NO: 837435 - protein, 1006 aa, Homo sapiens; identical to SEQ ID NO: 837432

SEQ ID NO: 837436 - protein, 107 aa, Homo sapiens
ARLDYIRAAGMYNVRIMRVEFYFLSQYVSPADSPFRHIFMGRGDHTLGALLDHLRLLRSNSSGTPGATSSTGFQESRFRRQLALLTWTLQGAANALSGDVWNIDNNF

SEQ ID NO: 837437 - protein, 138 aa, Homo sapiens
METVVIVAIGVLATIFLASFAALVLVCRQRYCRPRDLLQRYDSKPIVDLIGAMETQSEPSELELDDVVITNPHIEAILENEDWIEDASGLMSHCIAILKICHTLTEKLVAMTMGSGAKMKTSASVSDIIVVAKRISPR

SEQ ID NO: 837438 - protein, 226 aa, Homo sapiens
METVVIVAIGVLATIFLASFAALVLVCRQRYCRPRDLLQRYDSKPIVDLIGAMETQSEPSELELDDVVITNPHIEAILENEDWIEDASGLMSHCIAILKICHTLTEKLVAMTMGSGAKMKTSASVSDIIVVAKRISPRVDDVVKSMYPPLDPKLLDARTTALLLSVSHLVLVTRNACHLTGGLDWIDQSLSAAEEHLEVLREAALASEPDKGLPGPEGFLQEQSAI

SEQ ID NO: 837439 - protein, 226 aa, Homo sapiens; identical to SEQ ID NO: 837438

SEQ ID NO: 837440 - protein, 211 aa, Homo sapiens
  misc_feature (6)..(7): Xaa can be any naturally occurring amino acid
GTSANXXRKMVCRQRYCRPRDLLQRYDSKPIVDLIGAMETQSEPSELELDDVVITNPHIEAILENEDWIEDASGLMSHCIAILKICHTLTEKLVAMTMGSGAKMKTSASVSDIIVVAKRISPRVDDVVKSMYPPLDPKLLDARTTALLLSVSHLVLVTRNACHLTGGLDWIDQSLSAAEEHLEVLREAALASEPDKGLPGPEGFLQEQSAI

SEQ ID NO: 837441 - protein, 206 aa, Homo sapiens
METVVIVAIGVLATIFLASFAALVLVCRQRYCRPRDLLQRYDSKPIVDLIGAMETQSEPSELELDDVVITNPHIEAILENEDWIEDASGLMSHCIAILKICHTLTEKLVAMTMGSGAKMKTSASVSDIIVVAKRISPRTTALLLSVSHLVLVTRNACHLTGGLDWIDQSLSAAEEHLEVLREAALASEPDKGLPGPEGFLQEQSAI

SEQ ID NO: 837442 - protein, 226 aa, Homo sapiens; identical to SEQ ID NO: 837438

SEQ ID NO: 837443 - protein, 226 aa, Homo sapiens; identical to SEQ ID NO: 837438

SEQ ID NO: 837444 - protein, 226 aa, Homo sapiens; identical to SEQ ID NO: 837438

SEQ ID NO: 837445 - protein, 226 aa, Homo sapiens; identical to SEQ ID NO: 837438

SEQ ID NO: 837446 - protein, 156 aa, Homo sapiens
SSCNRTRLSVCRPDGPPRGREEGVLGRQARLPAAPAAGGPGGDGGAWRRGFGAGRGPGAGARGREAGFLGPRRFPACSAAGPRPRPDLTTALLLSVSHLVLVTRNACHLTGGLDWIDQSLSAAEEHLEVLREAALASEPDKGLPGPEGFLQEQSAI

SEQ ID NO: 837447 - protein, 1883 aa, Homo sapiens
RCPPRPHPPNPRARPRTVPARPRAAAPSPSGSPGAEGASPPRGRSRTGAQQQPRLAGRGRKRMAGPRPSPWARLLLAALISVSLSGTLANRCKKAPVKSCTECVRVDKDCAYCTDEMFRDRRCNTQAELLAAGCQRESIVVMESSFQITEETQIDTTLRRSQMSPQGLRVRLRPGEERHFELEVFEPLESPVDLYILMDFSNSMSDDLDNLKKMGQNLARVLSQLTSDYTIGFGKFVDKVSVPQTDMRPEKLKEPWPNSDPPFSFKNVISLTEDVDEFRNKLQGERISGNLDAPEGGFDAILQTAVCTRDIGWRPDSTHLLVFSTESAFHYEADGANVLAGIMSRNDERCHLDTTGTYTQYRTQDYPSVPTLVRLLAKHNIIPIFAVTNYSYSYYEKLHTYFPVSSLGVLQEDSSNIVELLEEAFNRIRSNLDIRALDSPRGLRTEVTSKMFQKTRTGSFHIRRGEVGIYQVQLRALEHVDGTHVCQLPEDQKGNIHLKPSFSDGLKMDAGIICDVCTCELQKEVRSARCSFNGDFVCGQCVCSEGWSGQTCNCSTGSLSDIQPCLREGEDKPCSGRGECQCGHCVCYGEGRYEGQFCEYDNFQCPRTSGFLCNDRGRCSMGQCVCEPGWTGPSCDCPLSNATCIDSNGGICNGRGHCECGRCHCHQQSLYTDTICEINYSAIHPGLCEDLRSCVQCQAWGTGEKKGRTCEECNFKVKMVDELKRAEEVVVRCSFRDEDDDCTYSYTMEGDGAPGPNSTVLVHKKKDCPPGSFWWLIPLLLLLLPLLALLLLLCWKYCACCKACLALLPCCNRGHMVGFKEDHYMLRENLMASDHLDTPMLRSGNLKGRDVVRWKVTNNMQRPGFATHAASINPTELVPYGLSLRLARLCTENLLKPDTRECAQLRQEVEENLNEVYRQISGVHKLQQTKFRQQPNAGKKQDHTIVDTVLMAPRSAKPALLKLTEKQVEQRAFHDLKVAPGYYTLTADQDARGMVEFQEGVELVDVRVPLFIRPEDDDEKQLLVEAIDVPAGTATLGRRLVNITIIKEQARDVVSFEQPEFSVSRGDQVARIPVIRRVLDGGKSQVSYRTQDGTAQGNRDYIPVEGELLFQPGEAWKELQVKLLELQEVDSLLRGRQVRRFHVQLSNPKFGAHLGQPHSTTIIIRDPDELDRSFTSQMLSSQPPPHGDLGAPQNPNAKAAGSRKIHFNWLPPSGKPMGYRVKYWIQGDSESEAHLLDSKVPSVELTNLYPYCDYEMKVCAYGAQGEGPYSSLVSCRTHQEVPSEPGRLAFNVVSSTVTQLSWAEPAETNGEITAYEVCYGLVNDDNRPIGPMKKVLVDNPKNRMLLIENLRESQPYRYTVKARNGAGWGPEREAIINLATQPKRPMSIPIIPDIPIVDAQSGEDYDSFLMYSDDVLRSPSGSQRPSVSDDTGCGWKFEPLLGEELDCGASRGGCPRSSSPRVGQQRALLRRRGPHGPPDDGGAGGKGGSLPRSATPGPPGEHLVNGRMDFAFPGSTNSLHRMTTTSAAAYGTHLSPHVPHRVLSTSSTLTRDYNSLTRSEHSHSTTLPRDYSTLTSVSSHDSRLTAGVPDTPTRLVFSALGPTSLRVSWQEPRCERPLQGYSVEYQLLNGGELHRLNIPNPAQTSVVVEDLLPNHSYVFRVRAQSQEGWGREREGVITIESQVHPQSPLCPLPGSAFTLSTPSAPGPLVFTALSPDSLQLSWERPRRPNGDIVGYLVTCEMAQGGGPATAFRVDGDSPESRLTVPGLSENVPYKFKVQARTTEGFGPEREGIITIESQDGGPFPQLGSRAGLFQHPLQSEYSSITTTHTSATEPFLVDGPTLGAQHLEAGGSLTRHVTQEFVSRTLTTSGTLSTHMDQQFFQT

SEQ ID NO: 837448 - protein, 1826 aa, Homo sapiens
RCPPRPHPPNPRARPRTVPARPRAAAPSPSGSPGAEGASPPRGRSRTGAQQQPRLAGRGRKRMAGPRPSPWARLLLAALISVSLSGTLANRCKKAPVKSCTECVRVDKDCAYCTDEMFRDRRCNTQAELLAAGCQRESIVVMESSFQITEETQIDTTLRRSQMSPQGLRVRLRPGEERHFELEVFEPLESPVDLYILMDFSNSMSDDLDNLKKMGQNLARVLSQLTSDYTIGFGKFVDKVSVPQTDMRPEKLKEPWPNSDPPFSFKNVISLTEDVDEFRNKLQGERISGNLDAPEGGFDAILQTAVCTRDIGWRPDSTHLLVFSTESAFHYEADGANVLAGIMSRNDERCHLDTTGTYTQYRTQDYPSVPTLVRLLAKHNIIPIFAVTNYSYSYYEKLHTYFPVSSLGVLQEDSSNIVELLEEAFNRIRSNLDIRALDSPRGLRTEVTSKMFQKTRTGSFHIRRGEVGIYQVQLRALEHVDGTHVCQLPEDQKGNIHLKPSFSDGLKMDAGIICDVCTCELQKEVRSARCSFNGDFVCGQCVCSEGWSGQTCNCSTGSLSDIQPCLREGEDKPCSGRGECQCGHCVCYGEGRYEGQFCEYDNFQCPRTSGFLCNDRGRCSMGQCVCEPGWTGPSCDCPLSNATCIDSNGGICNGRGHCECGRCHCHQQSLYTDTICEINYSAIHPGLCEDLRSCVQCQAWGTGEKKGRTCEECNFKVKMVDELKRAEEVVVRCSFRDEDDDCTYSYTMEGDGAPGPNSTVLVHKKKDCPPGSFWWLIPLLLLLLPLLALLLLLCWKYCACCKACLALLPCCNRGHMVGFKEDHYMLRENLMASDHLDTPMLRSGNLKGRDVVRWKVTNNMQRPGFATHAASINPTELVPYGLSLRLARLCTENLLKPDTRECAQLRQEVEENVRTQELGLAEMWLNEVYRQISGVHKLQQTKFRQQPNAGKKQDHTIVDTVLMAPRSAKPALLKLTEKQVEQRAFHDLKVAPGYYTLTADQDARGMVEFQEGVELVDVRVPLFIRPEDDDEKQLLVEAIDVPAGTATLGRRLVNITIIKEQARDVVSFEQPEFSVSRGDQVARIPVIRRVLDGGKSQVSYRTQDGTAQGNRDYIPVEGELLFQPGEAWKELQVKLLELQEVDSLLRGRQVRRFHVQLSNPKFGAHLGQPHSTTIIIRDPDELDRSFTSQMLSSQPPPHGDLGAPQNPNAKAAGSRKIHFNWLPPSGKPMGYRVKYWIQGDSESEAHLLDSKVPSVELTNLYPYCDYEMKVCAYGAQGEGPYSSLVSCRTHQEVPSEPGRLAFNVVSSTVTQLSWAEPAETNGEITAYEVCYGLVNDDNRPIGPMKKVLVDNPKNRMLLIENLRESQPYRYTVKARNGAGWGPEREAIINLATQPKRPMSIPIIPDIPIVDAQSGEDYDSFLMYSDDVLRSPSGSQRPSVSDDTEHLVNGRMDFAFPGSTNSLHRMTTTSAAAYGTHLSPHVPHRVLSTSSTLTRDYNSLTRSEHSHSTTLPRDYSTLTSVSSHDSRLTAGVPDTPTRLVFSALGPTSLRVSWQEPRCERPLQGYSVEYQLLNGGELHRLNIPNPAQTSVVVEDLLPNHSYVFRVRAQSQEGWGREREGVITIESQVHPQSPLCPLPGSAFTLSTPSAPGPLVFTALSPDSLQLSWERPRRPNGDIVGYLVTCEMAQGGGPATAFRVDGDSPESRLTVPGLSENVPYKFKVQARTTEGFGPEREGIITIESQDGGPFPQLGSRAGLFQHPLQSEYSSITTTHTSATEPFLVDGPTLGAQHLEAGGSLTRHVTQEFVSRTLTTSGTLSTHMDQQFFQT

SEQ ID NO: 837449 - protein, 1866 aa, Homo sapiens
RCPPRPHPPNPRARPRTVPARPRAAAPSPSGSPGAEGASPPRGRSRTGAQQQPRLAGRGRKRMAGPRPSPWARLLLAALISVSLSGTLANRCKKAPVKSCTECVRVDKDCAYCTDEMFRDRRCNTQAELLAAGCQRESIVVMESSFQITEETQIDTTLRRSQMSPQGLRVRLRPGEERHFELEVFEPLESPVDLYILMDFSNSMSDDLDNLKKMGQNLARVLSQLTSDYTIGFGKFVDKVSVPQTDMRPEKLKEPWPNSDPPFSFKNVISLTEDVDEFRNKLQGERISGNLDAPEGGFDAILQTAVCTRDIGWRPDSTHLLVFSTESAFHYEADGANVLAGIMSRNDERCHLDTTGTYTQYRTQDYPSVPTLVRLLAKHNIIPIFAVTNYSYSYYEKLHTYFPVSSLGVLQEDSSNIVELLEEAFNRIRSNLDIRALDSPRGLRTEVTSKMFQKTRTGSFHIRRGEVGIYQVQLRALEHVDGTHVCQLPEDQKGNIHLKPSFSDGLKMDAGIICDVCTCELQKEVRSARCSFNGDFVCGQCVCSEGWSGQTCNCSTGSLSDIQPCLREGEDKPCSGRGECQCGHCVCYGEGRYEGQFCEYDNFQCPRTSGFLCNDRGRCSMGQCVCEPGWTGPSCDCPLSNATCIDSNGGICNGRGHCECGRCHCHQQSLYTDTICEINYSAIHPGLCEDLRSCVQCQAWGTGEKKGRTCEECNFKVKMVDELKRAEEVVVRCSFRDEDDDCTYSYTMEGDGAPGPNSTVLVHKKKDCPPGSFWWLIPLLLLLLPLLALLLLLCWKYCACCKACLALLPCCNRGHMVGFKEDHYMLRENLMASDHLDTPMLRSGNLKGRDVVRWKVTNNMQRPGFATHAASINPTELVPYGLSLRLARLCTENLLKPDTRECAQLRQEVEENVRTQELGLAEMWLNEVYRQISGVHKLQQTKFRQQPNAGKKQDHTIVDTVLMAPRSAKPALLKLTEKQVEQRAFHDLKVAPGYYTLTADQDARGMVEFQEGVELVDVRVPLFIRPEDDDEKQLLVEAIDVPAGTATLGRRLVNITIIKEQARDVVSFEQPEFSVSRGDQVARIPVIRRVLDGGKSQVSYRTQDGTAQGNRTEFRSVAQLECNGTISAHRNLHLSGSSDSAASASLVAGIQDYIPVEGELLFQPGEAWKELQVKLLELQEVDSLLRGRQVRRFHVQLSNPKFGAHLGQPHSTTIIIRDPDELDRSFTSQMLSSQPPPHGDLGAPQNPNAKAAGSRKIHFNWLPPSGKPMGYRVKYWIQGDSESEAHLLDSKVPSVELTNLYPYCDYEMKVCAYGAQGEGPYSSLVSCRTHQEVPSEPGRLAFNVVSSTVTQLSWAEPAETNGEITAYEVCYGLVNDDNRPIGPMKKVLVDNPKNRMLLIENLRESQPYRYTVKARNGAGWGPEREAIINLATQPKRPMSIPIIPDIPIVDAQSGEDYDSFLMYSDDVLRSPSGSQRPSVSDDTEHLVNGRMDFAFPGSTNSLHRMTTTSAAAYGTHLSPHVPHRVLSTSSTLTRDYNSLTRSEHSHSTTLPRDYSTLTSVSSHDSRLTAGVPDTPTRLVFSALGPTSLRVSWQEPRCERPLQGYSVEYQLLNGGELHRLNIPNPAQTSVVVEDLLPNHSYVFRVRAQSQEGWGREREGVITIESQVHPQSPLCPLPGSAFTLSTPSAPGPLVFTALSPDSLQLSWERPRRPNGDIVGYLVTCEMAQGGGPATAFRVDGDSPESRLTVPGLSENVPYKFKVQARTTEGFGPEREGIITIESQDGGPFPQLGSRAGLFQHPLQSEYSSITTTHTSATEPFLVDGPTLGAQHLEAGGSLTRHVTQEFVSRTLTTSGTLSTHMDQQFFQT

SEQ ID NO: 837450 - protein, 1826 aa, Homo sapiens; identical to SEQ ID NO: 837448

SEQ ID NO: 837451 - protein, 1826 aa, Homo sapiens; identical to SEQ ID NO: 837448

SEQ ID NO: 837452 - protein, 734 aa, Homo sapiens
MTLASAPSHDPDPDPLHSQDYIPVEGELLFQPGEAWKELQVKLLELQEVDSLLRGRQVRRFHVQLSNPKFGAHLGQPHSTTIIIRDPDELDRSFTSQMLSSQPPPHGDLGAPQNPNAKAAGSRKIHFNWLPPSGKPMGYRVKYWIQGDSESEAHLLDSKVPSVELTNLYPYCDYEMKVCAYGAQGEGPYSSLVSCRTHQEVPSEPGRLAFNVVSSTVTQLSWAEPAETNGEITAYEVCYGLVNDDNRPIGPMKKVLVDNPKNRMLLIENLRESQPYRYTVKARNGAGWGPEREAIINLATQPKRPMSIPIIPDIPIVDAQSGEDYDSFLMYSDDVLRSPSGSQRPSVSDDTEHLVNGRMDFAFPGSTNSLHRMTTTSAAAYGTHLSPHVPHRVLSTSSTLTRDYNSLTRSEHSHSTTLPRDYSTLTSVSSHDSRLTAGVPDTPTRLVFSALGPTSLRVSWQEPRCERPLQGYSVEYQLLNGGELHRLNIPNPAQTSVVVEDLLPNHSYVFRVRAQSQEGWGREREGVITIESQVHPQSPLCPLPGSAFTLSTPSAPGPLVFTALSPDSLQLSWERPRRPNGDIVGYLVTCEMAQGGGPATAFRVDGDSPESRLTVPGLSENVPYKFKVQARTTEGFGPEREGIITIESQDGGPFPQLGSRAGLFQHPLQSEYSSITTTHTSATEPFLVDGPTLGAQHLEAGGSLTRHVTQEFVSRTLTTSGTLSTHMDQQFFQT

SEQ ID NO: 837453 - protein, 1762 aa, Homo sapiens
RCPPRPHPPNPRARPRTVPARPRAAAPSPSGSPGAEGASPPRGRSRTGAQQQPRLAGRGRKRMAGPRPSPWARLLLAALISVSLSGTLANRCKKAPVKSCTECVRVDKDCAYCTDEMFRDRRCNTQAELLAAGCQRESIVVMESSFQITEETQIDTTLRRSQMSPQGLRVRLRPGEERHFELEVFEPLESPVDLYILMDFSNSMSDDLDNLKKMGQNLARVLSQLTSDYTIGFGKFVDKVSVPQTDMRPEKLKEPWPNSDPPFSFKNVISLTEDVDEFRNKLQGERISGNLDAPEGGFDAILQTAVCTRDIGWRPDSTHLLVFSTESAFHYEADGANVLAGIMSRNDERCHLDTTGTYTQYRTQDYPSVPTLVRLLAKHNIIPIFAVTNYSYSYYEKLHTYFPVSSLGVLQEDSSNIVELLEEAFNRIRSNLDIRALDSPRGLRTEVTSKMFQKTRTGSFHIRRGEVGIYQVQLRALEHVDGTHVCQLPEDQKGNIHLKPSFSDGLKMDAGIICDVCTCELQKEVRSARCSFNGDFVCGQCVCSEGWSGQTCNCSTGSLSDIQPCLREGEDKPCSGRGECQCGHCVCYGEGRYEGQFCEYDNFQCPRTSGFLCNDRGRCSMGQCVCEPGWTGPSCDCPLSNATCIDSNGGICNGRGHCECGRCHCHQQSLYTDTICEINYSAIHPGLCEDLRSCVQCQAWGTGEKKGRTCEECNFKVKMVDELKRAEEVVVRCSFRDEDDDCTYSYTMEGDGAPGPNSTVLVHKKKDCPPGSFWWLIPLLLLLLPLLALLLLLCWKYCACCKACLALLPCCNRGHMVGFKEDHYMLRENLMASDHLDTPMLRSGNLKGRDVVRWKVTNNMQRPGFATHAASINPTELVPYGLSLRLARLCTENLLKPDTRECAQLRQEVEENVRTQELGLAEMWLNEVYRQISGVHKLQQTKFRQQPNAGKKQDHTIVDTVLMAPRSAKPALLKLTEKQVEQRAFHDLKVAPGYYTLTADQDARGMVEFQEGVELVDVRVPLFIRPEDDDEKQLLVEAIDVPAGTATLGRRLVNITIIKEQARDVVSFEQPEFSVSRGDQVARIPVIRRVLDGGKSQVSYRTQDGTAQGNRDYIPVEGELLFQPGEAWKELQVKLLELQEVDSLLRGRQVRRFHVQLSNPKFGAHLGQPHSTTIIIRDPDELDRSFTSQMLSSQPPPHGDLGAPQNPNAKAAGSRKIHFNWLPPSGKPMGYRVKYWIQGDSESEAHLLDSKVPSVELTNLYPYCDYEMKVCAYGAQGEGPYSSLVSCRTHQEVPSEPGRLAFNVVSSTVTQLSWAEPAETNGEITAYEVCYGLVNDDNRPIGPMKKVLVDNPKNRMLLIENLRESQPYRYTVKARNGAGWGPEREAIINLATQPKRPMSIPIIPDIPIVDAQSGEDYDSFLMYSDDVLRSPSGSQRPSVSDDTEHLVNGRMDFAFPGSTNSLHRMTTTSAAAYGTHLSPHVPHRVLSTSSTLTRDYNSLTRSEHSHSTTLPRDYSTLTSVSSHDSRLTAGVPDTPTRLVFSALGPTSLRVSWQEPRCERPLQGYSVEYQLLNGGELHRLNIPNPAQTSVVVEDLLPNHSYVFRVRAQSQEGWGREREGVITIESQVHPQSPLCPLPGSAFTLSTPSAPGPLVFTALSPDSLQLSWERPRRPNGDIVGYLVTCEMAQGGGPATAFRVDGDSPESRLTVPGLSENVPYKFKVQARTTEGFGPEREGIITIESQDGGPFPQLEQSCGLYGNGVEL

SEQ ID NO: 837454 - protein, 1645 aa, Homo sapiens
RCPPRPHPPNPRARPRTVPARPRAAAPSPSGSPGAEGASPPRGRSRTGAQQQPRLAGRGRKRMAGPRPSPWARLLLAALISVSLSGTLANRCKKAPVKSCTECVRVDKDCAYCTDEMFRDRRCNTQAELLAAGCQRESIVVMESSFQITEETQIDTTLRRSQMSPQGLRVRLRPGEERHFELEVFEPLESPVDLYILMDFSNSMSDDLDNLKKMGQNLARVLSQLTSDYTIGFGKFVDKVSVPQTDMRPEKLKEPWPNSDPPFSFKNVISLTEDVDEFRNKLQGERISGNLDAPEGGFDAILQTAVCTRDIGWRPDSTHLLVFSTESAFHYEADGANVLAGIMSRNDERCHLDTTGTYTQYRTQDYPSVPTLVRLLAKHNIIPIFAVTNYSYSYYEKLHTYFPVSSLGVLQEDSSNIVELLEEAFNRIRSNLDIRALDSPRGLRTEVTSKMFQKTRTGSFHIRRGEVGIYQVQLRALEHVDGTHVCQLPEDQKGNIHLKPSFSDGLKMDAGIICDVCTCELQKEVRSARCSFNGDFVCGQCVCSEGWSGQTCNCSTGSLSDIQPCLREGEDKPCSGRGECQCGHCVCYGEGRYEGQFCEYDNFQCPRTSGFLCNDRGRCSMGQCVCEPGWTGPSCDCPLSNATCIDSNGGICNGRGHCECGRCHCHQQSLYTDTICEINYSAIHPGLCEDLRSCVQCQAWGTGEKKGRTCEECNFKVKMVDELKRAEEVVVRCSFRDEDDDCTYSYTMEGDGAPGPNSTVLVHKKKDCPPGSFWWLIPLLLLLLPLLALLLLLCWKYCACCKACLALLPCCNRGHMVGFKEDHYMLRENLMASDHLDTPMLRSGNLKGRDVVRWKVTNNMQRPGFATHAASINPTELVPYGLSLRLARLCTENLLKPDTRECAQLRQEVEENVRTQELGLAEMWLNEVYRQISGVHKLQQTKFRQQPNAGKKQDHTIVDTVLMAPRSAKPALLKLTEKQVEQRAFHDLKVAPGYYTLTADQDARGMVEFQEGVELVDVRVPLFIRPEDDDEKQLLVEAIDVPAGTATLGRRLVNITIIKEQARDVVSFEQPEFSVSRGDQVARIPVIRRVLDGGKSQVSYRTQDGTAQGNRDYIPVEGELLFQPGEAWKELQVKLLELQEVDSLLRGRQVRRFHVQLSNPKFGAHLGQPHSTTIIIRDPDELDRSFTSQMLSSQPPPHGDLGAPQNPNAKAAGSRKIHFNWLPPSGKPMGYRVKYWIQGDSESEAHLLDSKVPSVELTNLYPYCDYEMKVCAYGAQGEGPYSSLVSCRTHQEVPSEPGRLAFNVVSSTVTQLSWAEPAETNGEITAYEVCYGLVNDDNRPIGPMKKVLVDNPKNRMLLIENLRESQPYRYTVKARNGAGWGPEREAIINLATQPKRPMSIPIIPDIPIVDAQSGEDYDSFLMYSDDVLRSPSGSQRPSVSDDTEHLVNGRMDFAFPGSTNSLHRMTTTSAAAYGTHLSPHVPHRVLSTSSTLTRDYNSLTRSEHSHSTTLPRDYSTLTSVSSHDSRLTAGVPDTPTRLVFSALGPTSLRVSWQEPRCERPLQGYSVEYQLLNGGELHRLNIPNPAQTSVVVEDLLPNHSYVFRVRAQSQEGWGREREGVITIESQVHPQSPLCPLPAHPHAQSRG

SEQ ID NO: 837455 - protein, 481 aa, Homo sapiens
RHDRSSRYRTGDAVENLRESQPYRYTVKARNGAGWGPEREAIINLATQPKRPMSIPIIPDIPIVDAQSGEDYDSFLMYSDDVLRSPSGSQRPSVSDDTEHLVNGRMDFAFPGSTNSLHRMTTTSAAAYGTHLSPHVPHRVLSTSSTLTRDYNSLTRSEHSHSTTLPRDYSTLTSVSSHDSRLTAGVPDTPTRLVFSALGPTSLRVSWQEPRCERPLQGYSVEYQLLNGGELHRLNIPNPAQTSVVVEDLLPNHSYVFRVRAQSQEGWGREREGVITIESQVHPQSPLCPLPGSAFTLSTPSAPGPLVFTALSPDSLQLSWERPRRPNGDIVGYLVTCEMAQGGGPATAFRVDGDSPESRLTVPGLSENVPYKFKVQARTTEGFGPEREGIITIESQDGGPFPQLGSRAGLFQHPLQSEYSSITTTHTSATEPFLVDGPTLGAQHLEAGGSLTRHVTQEFVSRTLTTSGTLSTHMDQQFFQT

SEQ ID NO: 837456 - protein, 1568 aa, Homo sapiens
RCPPRPHPPNPRARPRTVPARPRAAAPSPSGSPGAEGASPPRGRSRTGAQQQPRLAGRGRKRMAGPRPSPWARLLLAALISVSLSGTLANRCKKAPVKSCTECVRVDKDCAYCTDEMFRDRRCNTQAELLAAGCQRESIVVMESSFQITEETQIDTTLRRSQMSPQGLRVRLRPGEERHFELEVFEPLESPVDLYILMDFSNSMSDDLDNLKKMGQNLARVLSQLTSDYTIGFGKFVDKVSVPQTDMRPEKLKEPWPNSDPPFSFKNVISLTEDVDEFRNKLQGERISGNLDAPEGGFDAILQTAVCTRDIGWRPDSTHLLVFSTESAFHYEADGANVLAGIMSRNDERCHLDTTGTYTQYRTQDYPSVPTLVRLLAKHNIIPIFAVTNYSYSYYEKLHTYFPVSSLGVLQEDSSNIVELLEEAFNRIRSNLDIRALDSPRGLRTEVTSKMFQKTRTGSFHIRRGEVGIYQVQLRALEHVDGTHVCQLPEDQKGNIHLKPSFSDGLKMDAGIICDVCTCELQKEVRSARCSFNGDFVCGQCVCSEGWSGQTCNCSTGSLSDIQPCLREGEDKPCSGRGECQCGHCVCYGEGRYEGQFCEYDNFQCPRTSGFLCNDRGRCSMGQCVCEPGWTGPSCDCPLSNATCIDSNGGICNGRGHCECGRCHCHQQSLYTDTICEINYSAIHPGLCEDLRSCVQCQAWGTGEKKGRTCEECNFKVKMVDELKRAEEVVVRCSFRDEDDDCTYSYTMEGDGAPGPNSTVLVHKKKDCPPGSFWWLIPLLLLLLPLLALLLLLCWKYCACCKACLALLPCCNRGHMVGFKEDHYMLRENLMASDHLDTPMLRSGNLKGRDVVRWKVTNNMQRPGFATHAASINPTELVPYGLSLRLARLCTENLLKPDTRECAQLRQEVEENVRTQELGLAEMWLNEVYRQISGVHKLQQTKFRQQPNAGKKQDHTIVDTVLMAPRSAKPALLKLTEKQVEQRAFHDLKVAPGYYTLTADQDARGMVEFQEGVELVDVRVPLFIRPEDDDEKQLLVEAIDVPAGTATLGRRLVNITIIKEQARDVVSFEQPEFSVSRGDQVARIPVIRRVLDGGKSQVSYRTQDGTAQGNRDYIPVEGELLFQPGEAWKELQVKLLELQEVDSLLRGRQVRRFHVQLSNPKFGAHLGQPHSTTIIIRDPDELDRSFTSQMLSSQPPPHGDLGAPQNPNAKAAGSRKIHFNWLPPSGKPMGYRVKYWIQGDSESEAHLLDSKVPSVELTNLYPYCDYEMKVCAYGAQGEGPYSSLVSCRTHQEVPSEPGRLAFNVVSSTVTQLSWAEPAETNGEITAYEVCYGLVNDDNRPIGPMKKVLVDNPKNRMLLIENLRESQPYRYTVKARNGAGWGPEREAIINLATQPKRPMSIPIIPDIPIVDAQSGEDYDSFLMYSDDVLRSPSGSQRPSVSDDTEHLVNGRMDFAFPGSTNSLHRMTTTSAAAYGTHLSPHVPHRVLSTSSTLTRDYNSLTRSEHSHSTTLPRDYSTLTSVSSHDSRLTAGVPDTPTRLVFSALGPTSLRVSWQEPRCVGPTLGHAPYS

SEQ ID NO: 837457 - protein, 1387 aa, Homo sapiens
RCPPRPHPPNPRARPRTVPARPRAAAPSPSGSPGAEGASPPRGRSRTGAQQQPRLAGRGRKRMAGPRPSPWARLLLAALISVSLSGTLANRCKKAPVKSCTECVRVDKDCAYCTDEMFRDRRCNTQAELLAAGCQRESIVVMESSFQITEETQIDTTLRRSQMSPQGLRVRLRPGEERHFELEVFEPLESPVDLYILMDFSNSMSDDLDNLKKMGQNLARVLSQLTSDYTIGFGKFVDKVSVPQTDMRPEKLKEPWPNSDPPFSFKNVISLTEDVDEFRNKLQGERISGNLDAPEGGFDAILQTAVCTRDIGWRPDSTHLLVFSTESAFHYEADGANVLAGIMSRNDERCHLDTTGTYTQYRTQDYPSVPTLVRLLAKHNIIPIFAVTNYSYSYYEKLHTYFPVSSLGVLQEDSSNIVELLEEAFNRIRSNLDIRALDSPRGLRTEVTSKMFQKTRTGSFHIRRGEVGIYQVQLRALEHVDGTHVCQLPEDQKGNIHLKPSFSDGLKMDAGIICDVCTCELQKEVRSARCSFNGDFVCGQCVCSEGWSGQTCNCSTGSLSDIQPCLREGEDKPCSGRGECQCGHCVCYGEGRYEGQFCEYDNFQCPRTSGFLCNDRGRCSMGQCVCEPGWTGPSCDCPLSNATCIDSNGGICNGRGHCECGRCHCHQQSLYTDTICEINYSAIHPGLCEDLRSCVQCQAWGTGEKKGRTCEECNFKVKMVDELKRAEEVVVRCSFRDEDDDCTYSYTMEGDGAPGPNSTVLVHKKKDCPPGSFWWLIPLLLLLLPLLALLLLLCWKYCACCKACLALLPCCNRGHMVGFKEDHYMLRENLMASDHLDTPMLRSGNLKGRDVVRWKVTNNMQRPGFATHAASINPTELVPYGLSLRLARLCTENLLKPDTRECAQLRQEVEENVRTQELGLAEMWLNEVYRQISGVHKLQQTKFRQQPNAGKKQDHTIVDTVLMAPRSAKPALLKLTEKQVEQRAFHDLKVAPGYYTLTADQDARGMVEFQEGVELVDVRVPLFIRPETTSAAAYGTHLSPHVPHRVLSTSSTLTRDYNSLTRSEHSHSTTLPRDYSTLTSVSSHDSRLTAGVPDTPTRLVFSALGPTSLRVSWQEPRCERPLQGYSVEYQLLNGGELHRLNIPNPAQTSVVVEDLLPNHSYVFRVRAQSQEGWGREREGVITIESQVHPQSPLCPLPGSAFTLSTPSAPGPLVFTALSPDSLQLSWERPRRPNGDIVGYLVTCEMAQGGGPATAFRVDGDSPESRLTVPGLSENVPYKFKVQARTTEGFGPEREGIITIESQDGGPFPQLGSRAGLFQHPLQSEYSSITTTHTSATEPFLVDGPTLGAQHLEAGGSLTRHVTQEFVSRTLTTSGTLSTHMDQQFFQT

SEQ ID NO: 837458 - protein, 1375 aa, Homo sapiens
RCPPRPHPPNPRARPRTVPARPRAAAPSPSGSPGAEGASPPRGRSRTGAQQQPRLAGRGRKRMAGPRPSPWARLLLAALISVSLSGTLANRCKKAPVKSCTECVRVDKDCAYCTDEMFRDRRCNTQAELLAAGCQRESIVVMESSFQITEETQIDTTLRRSQMSPQGLRVRLRPGEERHFELEVFEPLESPVDLYILMDFSNSMSDDLDNLKKMGQNLARVLSQLTSDYTIGFGKFVDKVSVPQTDMRPEKLKEPWPNSDPPFSFKNVISLTEDVDEFRNKLQGERISGNLDAPEGGFDAILQTAVCTRDIGWRPDSTHLLVFSTESAFHYEADGANVLAGIMSRNDERCHLDTTGTYTQYRTQDYPSVPTLVRLLAKHNIIPIFAVTNYSYSYYEKLHTYFPVSSLGVLQEDSSNIVELLEEAFNRIRSNLDIRALDSPRGLRTEVTSKMFQKTRTGSFHIRRGEVGIYQVQLRALEHVDGTHVCQLPEDQKGNIHLKPSFSDGLKMDAGIICDVCTCELQKEVRSARCSFNGDFVCGQCVCSEGWSGQTCNCSTGSLSDIQPCLREGEDKPCSGRGECQCGHCVCYGEGRYEGQFCEYDNFQCPRTSGFLCNDRGRCSMGQCVCEPGWTGPSCDCPLSNATCIDSNGGICNGRGHCECGRCHCHQQSLYTDTICEINYSAIHPGLCEDLRSCVQCQAWGTGEKKGRTCEECNFKVKMVDELKRAEEVVVRCSFRDEDDDCTYSYTMEGDGAPGPNSTVLVHKKKDCPPGSFWWLIPLLLLLLPLLALLLLLCWKYCACCKACLALLPCCNRGHMVGFKEDHYMLRENLMASDHLDTPMLRSGNLKGRDVVRWKVTNNMQRPGFATHAASINPTELVPYGLSLRLARLCTENLLKPDTRECAQLRQEVEENLNEVYRQISGVHKLQQTKFRQQPNAGKKQDHTIVDTVLMAPRSAKPALLKLTEKQVEQRAFHDLKVAPGYYTLTADQDARGMVEFQEGVELVDVRVPLFIRPETTSAAAYGTHLSPHVPHRVLSTSSTLTRDYNSLTRSEHSHSTTLPRDYSTLTSVSSHDSRLTAGVPDTPTRLVFSALGPTSLRVSWQEPRCERPLQGYSVEYQLLNGGELHRLNIPNPAQTSVVVEDLLPNHSYVFRVRAQSQEGWGREREGVITIESQVHPQSPLCPLPGSAFTLSTPSAPGPLVFTALSPDSLQLSWERPRRPNGDIVGYLVTCEMAQGGGPATAFRVDGDSPESRLTVPGLSENVPYKFKVQARTTEGFGPEREGIITIESQDGGPFPQLGSRAGLFQHPLQSEYSSITTTHTSATEPFLVDGPTLGAQHLEAGGSLTRHVTQEFVSRTLTTSGTLSTHMDQQFFQT

SEQ ID NO: 837459 - protein, 376 aa, Homo sapiens
MDFAFPGSTNSLHRMTTTSAAAYGTHLSPHVPHRVLSTSSTLTRDYNSLTRSEHSHSTTLPRDYSTLTSVSSHDSRLTAGVPDTPTRLVFSALGPTSLRVSWQEPRCERPLQGYSVEYQLLNGGELHRLNIPNPAQTSVVVEDLLPNHSYVFRVRAQSQEGWGREREGVITIESQVHPQSPLCPLPGSAFTLSTPSAPGPLVFTALSPDSLQLSWERPRRPNGDIVGYLVTCEMAQGGGPATAFRVDGDSPESRLTVPGLSENVPYKFKVQARTTEGFGPEREGIITIESQDGGPFPQLGSRAGLFQHPLQSEYSSITTTHTSATEPFLVDGPTLGAQHLEAGGSLTRHVTQEFVSRTLTTSGTLSTHMDQQFFQT

SEQ ID NO: 837460 - protein, 380 aa, Homo sapiens
PWHRNDHDQGAAAPMGTPNPWKAPPNNQLAPPHPGRYVLNATSSTLTRDYNSLTRSEHSHSTTLPRDYSTLTSVSSHDSRLTAGVPDTPTRLVFSALGPTSLRVSWQEPRCERPLQGYSVEYQLLNGGELHRLNIPNPAQTSVVVEDLLPNHSYVFRVRAQSQEGWGREREGVITIESQVHPQSPLCPLPGSAFTLSTPSAPGPLVFTALSPDSLQLSWERPRRPNGDIVGYLVTCEMAQGGGPATAFRVDGDSPESRLTVPGLSENVPYKFKVQARTTEGFGPEREGIITIESQDGGPFPQLGSRAGLFQHPLQSEYSSITTTHTSATEPFLVDGPTLGAQHLEAGGSLTRHVTQEFVSRTLTTSGTLSTHMDQQFFQT

SEQ ID NO: 837461 - protein, 259 aa, Homo sapiens
YRRRLLCELHRLNIPNPAQTSVVVEDLLPNHSYVFRVRAQSQEGWGREREGVITIESQVHPQSPLCPLPGSAFTLSTPSAPGPLVFTALSPDSLQLSWERPRRPNGDIVGYLVTCEMAQGGGPATAFRVDGDSPESRLTVPGLSENVPYKFKVQARTTEGFGPEREGIITIESQDGGPFPQLGSRAGLFQHPLQSEYSSITTTHTSATEPFLVDGPTLGAQHLEAGGSLTRHVTQEFVSRTLTTSGTLSTHMDQQFFQT

SEQ ID NO: 837462 - protein, 424 aa, Homo sapiens
RCPPRPHPPNPRARPRTVPARPRAAAPSPSGSPGAEGASPPRGRSRTGAQQQPRLAGRGRKRMAGPRPSPWARLLLAALISVSLSGTLANRCKKAPVKSCTECVRVDKDCAYCTDEMFRDRRCNTQAELLAAGCQRESIVVMESSFQITEETQIDTTLRRSQMSPQGLRVRLRPGEERHFELEVFEPLESPVDLYILMDFSNSMSDDLDNLKKMGQNLARVLSQLTSDYTIGFGKFVDKVSVPQTDMRPEKLKEPWPNSDPPFSFKNVISLTEDVDEFRNKLQGERISGNLDAPEGGFDAILQTAVCTRDIGWRPDSTHLLVFSTESAFHYEADGANVLAGIMSRNDERCHLDTTGTYTQYRTQDYPSVPTLVRLLAKHNIIPIFAVTNYSYSYYEKLHTYFPVSSLGVLQEDSGSAPTWTSGP

SEQ ID NO: 837463 - protein, 309 aa, Homo sapiens
RCPPRPHPPNPRARPRTVPARPRAAAPSPSGSPGAEGASPPRGRSRTGAQQQPRLAGRGRKRMAGPRPSPWARLLLAALISVSLSGTLANRCKKAPVKSCTECVRVDKDCAYCTDEMFRDRRCNTQAELLAAGCQRESIVVMESSFQITEETQIDTTLRRSQMSPQGLRVRLRPGEERHFELEVFEPLESPVDLYILMDFSNSMSDDLDNLKKMGQNLARVLSQLTSDYTIGFGKFVDKVSVPQTDMRPEKLKEPWPNSDPPFSFKNVISLTEDVDEFRNKLQGERISAQLLHPCTPGGPAHPHAQSRG

SEQ ID NO: 837464 - protein, 1814 aa, Homo sapiens
RCPPRPHPPNPRARPRTVPARPRAAAPSPSGSPGAEGASPPRGRSRTGAQQQPRLAGRGRKRMAGPRPSPWARLLLAALISVSLSGTLANRCKKAPVKSCTECVRVDKDCAYCTDEMFRDRRCNTQAELLAAGCQRESIVVMESSFQITEETQIDTTLRRSQMSPQGLRVRLRPGEERHFELEVFEPLESPVDLYILMDFSNSMSDDLDNLKKMGQNLARVLSQLTSDYTIGFGKFVDKVSVPQTDMRPEKLKEPWPNSDPPFSFKNVISLTEDVDEFRNKLQGERISGNLDAPEGGFDAILQTAVCTRDIGWRPDSTHLLVFSTESAFHYEADGANVLAGIMSRNDERCHLDTTGTYTQYRTQDYPSVPTLVRLLAKHNIIPIFAVTNYSYSYYEKLHTYFPVSSLGVLQEDSSNIVELLEEAFNRIRSNLDIRALDSPRGLRTEVTSKMFQKTRTGSFHIRRGEVGIYQVQLRALEHVDGTHVCQLPEDQKGNIHLKPSFSDGLKMDAGIICDVCTCELQKEVRSARCSFNGDFVCGQCVCSEGWSGQTCNCSTGSLSDIQPCLREGEDKPCSGRGECQCGHCVCYGEGRYEGQFCEYDNFQCPRTSGFLCNDRGRCSMGQCVCEPGWTGPSCDCPLSNATCIDSNGGICNGRGHCECGRCHCHQQSLYTDTICEINYSAIHPGLCEDLRSCVQCQAWGTGEKKGRTCEECNFKVKMVDELKRAEEVVVRCSFRDEDDDCTYSYTMEGDGAPGPNSTVLVHKKKDCPPGSFWWLIPLLLLLLPLLALLLLLCWKYCACCKACLALLPCCNRGHMVGFKEDHYMLRENLMASDHLDTPMLRSGNLKGRDVVRWKVTNNMQRPGFATHAASINPTELVPYGLSLRLARLCTENLLKPDTRECAQLRQEVEENLNEVYRQISGVHKLQQTKFRQQPNAGKKQDHTIVDTVLMAPRSAKPALLKLTEKQVEQRAFHDLKVAPGYYTLTADQDARGMVEFQEGVELVDVRVPLFIRPEDDDEKQLLVEAIDVPAGTATLGRRLVNITIIKEQARDVVSFEQPEFSVSRGDQVARIPVIRRVLDGGKSQVSYRTQDGTAQGNRDYIPVEGELLFQPGEAWKELQVKLLELQEVDSLLRGRQVRRFHVQLSNPKFGAHLGQPHSTTIIIRDPDELDRSFTSQMLSSQPPPHGDLGAPQNPNAKAAGSRKIHFNWLPPSGKPMGYRVKYWIQGDSESEAHLLDSKVPSVELTNLYPYCDYEMKVCAYGAQGEGPYSSLVSCRTHQEVPSEPGRLAFNVVSSTVTQLSWAEPAETNGEITAYEVCYGLVNDDNRPIGPMKKVLVDNPKNRMLLIENLRESQPYRYTVKARNGAGWGPEREAIINLATQPKRPMSIPIIPDIPIVDAQSGEDYDSFLMYSDDVLRSPSGSQRPSVSDDTEHLVNGRMDFAFPGSTNSLHRMTTTSAAAYGTHLSPHVPHRVLSTSSTLTRDYNSLTRSEHSHSTTLPRDYSTLTSVSSHDSRLTAGVPDTPTRLVFSALGPTSLRVSWQEPRCERPLQGYSVEYQLLNGGELHRLNIPNPAQTSVVVEDLLPNHSYVFRVRAQSQEGWGREREGVITIESQVHPQSPLCPLPGSAFTLSTPSAPGPLVFTALSPDSLQLSWERPRRPNGDIVGYLVTCEMAQGGGPATAFRVDGDSPESRLTVPGLSENVPYKFKVQARTTEGFGPEREGIITIESQDGGPFPQLGSRAGLFQHPLQSEYSSITTTHTSATEPFLVDGPTLGAQHLEAGGSLTRHVTQEFVSRTLTTSGTLSTHMDQQFFQT

SEQ ID NO: 837465 - protein, 132 aa, Homo sapiens
GQTHRQAECKSRVTAISPCKATRSRERAEEVVVRCSFRDEDDDCTYSYTMEGDGAPGPNSTVLVHKKKDCPPGSFWWLIPLLLLLLPLLALLLLLCWKYCACCKACLALLPCCNRGHMVGQNISCILKSQLA

SEQ ID NO: 837466 - protein, 1867 aa, Homo sapiens
RCPPRPHPPNPRARPRTVPARPRAAAPSPSGSPGAEGASPPRGRSRTGAQQQPRLAGRGRKRMAGPRPSPWARLLLAALISVSLSGTLANRCKKAPVKSCTECVRVDKDCAYCTDEMFRDRRCNTQAELLAAGCQRESIVVMESSFQITEETQIDTTLRRSQMSPQGLRVRLRPGEERHFELEVFEPLESPVDLYILMDFSNSMSDDLDNLKKMGQNLARVLSQLTSDYTIGFGKFVDKVSVPQTDMRPEKLKEPWPNSDPPFSFKNVISLTEDVDEFRNKLQGERISGNLDAPEGGFDAILQTAVCTRDIGWRPDSTHLLVFSTESAFHYEADGANVLAGIMSRNDERCHLDTTGTYTQYRTQDYPSVPTLVRLLAKHNIIPIFAVTNYSYSYYEKLHTYFPVSSLGVLQEDSSNIVELLEEAFNRIRSNLDIRALDSPRGLRTEVTSKMFQKTRTGSFHIRRGEVGIYQVQLRALEHVDGTHVCQLPEDQKGNIHLKPSFSDGLKMDAGIICDVCTCELQKEVRSARCSFNGDFVCGQCVCSEGWSGQTCNCSTGSLSDIQPCLREGEDKPCSGRGECQCGHCVCYGEGRYEGQFCEYDNFQCPRTSGFLCNDRGRCSMGQCVCEPGWTGPSCDCPLSNATCIDSNGGICNGRGHCECGRCHCHQQSLYTDTICEINYSAIHPGLCEDLRSCVQCQAWGTGEKKGRTCEECNFKVKMVDELKRAEEVVVRCSFRDEDDDCTYSYTMEGDGAPGPNSTVLVHKKKDCPPGSFWWLIPLLLLLLPLLALLLLLCWKYCACCKACLALLPCCNRGHMVGFKEDHYMLRENLMASDHLDTPMLRSGNLKGRDVVRWKVTNNMQRPGFATHAASINPTELVPYGLSLRLARLCTENLLKPDTRECAQLRQEVEENLNEVYRQISGVHKLQQTKFRQQPNAGKKQDHTIVDTVLMAPRSAKPALLKLTEKQVEQRAFHDLKVAPGYYTLTADQDARGMVEFQEGVELVDVRVPLFIRPEDDDEKQLLVEAIDVPAGTATLGRRLVNITIIKEQARDVVSFEQPEFSVSRGDQVARIPVIRRVLDGGKSQVSYRTQDGTAQGNRDYIPVEGELLFQPGEAWKELQVKLLELQEVDSLLRGRQVRRFHVQLSNPKFGAHLGQPHSTTIIIRDPDELDRSFTSQMLSSQPPPHGDLGAPQNPNAKAAGSRKIHFNWLPPSGKPMGYRVKYWIQGDSESEAHLLDSKVPSVELTNLYPYCDYEMKVCAYGAQGEGPYSSLVSCRTHQEVPSEPGRLAFNVVSSTVTQLSWAEPAETNGEITAYEVCYGLVNDDNRPIGPMKKVLVDNPKNRMLLIENLRESQPYRYTVKARNGAGWGPEREAIINLATQPKRPMSIPIIPDIPIVDAQSGEDYDSFLMYSDDVLRSPSGSQRPSVSDDTEHLVNGRMDFAFPGSTNSLHRMTTTSAAAYGTHLSPHVPHRVLSTSSTLTRDYNSLTRSEHSHSTTLPRDYSTLTSVSSHGLPPIWEHGRSRLPLSWALGSRSRAQMKGFPPSRGPRDSIILAGRPAAPSWGPDSRLTAGVPDTPTRLVFSALGPTSLRVSWQEPRCERPLQGYSVEYQLLNGGELHRLNIPNPAQTSVVVEDLLPNHSYVFRVRAQSQEGWGREREGVITIESQVHPQSPLCPLPGSAFTLSTPSAPGPLVFTALSPDSLQLSWERPRRPNGDIVGYLVTCEMAQGGGPATAFRVDGDSPESRLTVPGLSENVPYKFKVQARTTEGFGPEREGIITIESQDGGPFPQLGSRAGLFQHPLQSEYSSITTTHTSATEPFLVDGPTLGAQHLEAGGSLTRHVTQEFVSRTLTTSGTLSTHMDQQFFQT

SEQ ID NO: 837467 - protein, 1802 aa, Homo sapiens
RCPPRPHPPNPRARPRTVPARPRAAAPSPSGSPGAEGASPPRGRSRTGAQQQPRLAGRGRKRMAGPRPSPWARLLLAALISVSLSGTLANRCKKAPVKSCTECVRVDKDCAYCTDEMFRDRRCNTQAELLAAGCQRESIVVMESSFQITEETQIDTTLRRSQMSPQGLRVRLRPGEERHFELEVFEPLESPVDLYILMDFSNSMSDDLDNLKKMGQNLARVLSQLTSDYTIGFGKFVDKVSVPQTDMRPEKLKEPWPNSDPPFSFKNVISLTEDVDEFRNKLQGERISGNLDAPEGGFDAILQTAVCTRDIGWRPDSTHLLVFSTESAFHYEADGANVLAGIMSRNDERCHLDTTGTYTQYRTQDYPSVPTLVRLLAKHNIIPIFAVTNYSYSYYEKLHTYFPGLLTGGAAGGLRIRSNLDIRALDSPRGLRTEVTSKMFQKTRTGSFHIRRGEVGIYQVQLRALEHVDGTHVCQLPEDQKGNIHLKPSFSDGLKMDAGIICDVCTCELQKEVRSARCSFNGDFVCGQCVCSEGWSGQTCNCSTGSLSDIQPCLREGEDKPCSGRGECQCGHCVCYGEGRYEGQFCEYDNFQCPRTSGFLCNDRGRCSMGQCVCEPGWTGPSCDCPLSNATCIDSNGGICNGRGHCECGRCHCHQQSLYTDTICEINYSAIHPGLCEDLRSCVQCQAWGTGEKKGRTCEECNFKVKMVDELKRAEEVVVRCSFRDEDDDCTYSYTMEGDGAPGPNSTVLVHKKKDCPPGSFWWLIPLLLLLLPLLALLLLLCWKYCACCKACLALLPCCNRGHMVGFKEDHYMLRENLMASDHLDTPMLRSGNLKGRDVVRWKVTNNMQRPGFATHAASINPTELVPYGLSLRLARLCTENLLKPDTRECAQLRQEVEENLNEVYRQISGVHKLQQTKFRQQPNAGKKQDHTIVDTVLMAPRSAKPALLKLTEKQVEQRAFHDLKVAPGYYTLTADQDARGMVEFQEGVELVDVRVPLFIRPEDDDEKQLLVEAIDVPAGTATLGRRLVNITIIKEQARDVVSFEQPEFSVSRGDQVARIPVIRRVLDGGKSQVSYRTQDGTAQGNRDYIPVEGELLFQPGEAWKELQVKLLELQEVDSLLRGRQVRRFHVQLSNPKFGAHLGQPHSTTIIIRDPDELDRSFTSQMLSSQPPPHGDLGAPQNPNAKAAGSRKIHFNWLPPSGKPMGYRVKYWIQGDSESEAHLLDSKVPSVELTNLYPYCDYEMKVCAYGAQGEGPYSSLVSCRTHQEVPSEPGRLAFNVVSSTVTQLSWAEPAETNGEITAYEVCYGLVNDDNRPIGPMKKVLVDNPKNRMLLIENLRESQPYRYTVKARNGAGWGPEREAIINLATQPKRPMSIPIIPDIPIVDAQSGEDYDSFLMYSDDVLRSPSGSQRPSVSDDTEHLVNGRMDFAFPGSTNSLHRMTTTSAAAYGTHLSPHVPHRVLSTSSTLTRDYNSLTRSEHSHSTTLPRDYSTLTSVSSHDSRLTAGVPDTPTRLVFSALGPTSLRVSWQEPRCERPLQGYSVEYQLLNGGELHRLNIPNPAQTSVVVEDLLPNHSYVFRVRAQSQEGWGREREGVITIESQVHPQSPLCPLPGSAFTLSTPSAPGPLVFTALSPDSLQLSWERPRRPNGDIVGYLVTCEMAQGGGPATAFRVDGDSPESRLTVPGLSENVPYKFKVQARTTEGFGPEREGIITIESQDGGPFPQLGSRAGLFQHPLQSEYSSITTTHTSATEPFLVDGPTLGAQHLEAGGSLTRHVTQEFVSRTLTTSGTLSTHMDQQFFQT

SEQ ID NO: 837468 - protein, 1116 aa, Homo sapiens
GQTHRQAECKSRVTAISPCKATRSRERAEEVVVRCSFRDEDDDCTYSYTMEGDGAPGPNSTVLVHKKKDCPPGSFWWLIPLLLLLLPLLALLLLLCWKYCACCKACLALLPCCNRGHMVGFKEDHYMLRENLMASDHLDTPMLRSGNLKGRDVVRWKVTNNMQRPGFATHAASINPTELVPYGLSLRLARLCTENLLKPDTRECAQLRQEVEENLNEVYRQISGVHKLQQTKFRQQPNAGKKQDHTIVDTVLMAPRSAKPALLKLTEKQVEQRAFHDLKVAPGYYTLTADQDARGMVEFQEGVELVDVRVPLFIRPEDDDEKQLLVEAIDVPAGTATLGRRLVNITIIKEQARDVVSFEQPEFSVSRGDQVARIPVIRRVLDGGKSQVSYRTQDGTAQGNRDYIPVEGELLFQPGEAWKELQVKLLELQEVDSLLRGRQVRRFHVQLSNPKFGAHLGQPHSTTIIIRDPDELDRSFTSQMLSSQPPPHGDLGAPQNPNAKAAGSRKIHFNWLPPSGKPMGYRVKYWIQGDSESEAHLLDSKVPSVELTNLYPYCDYEMKVCAYGAQGEGPYSSLVSCRTHQEVPSEPGRLAFNVVSSTVTQLSWAEPAETNGEITAYEVCYGLVNDDNRPIGPMKKVLVDNPKNRMLLIENLRESQPYRYTVKARNGAGWGPEREAIINLATQPKRPMSIPIIPDIPIVDAQSGEDYDSFLMYSDDVLRSPSGSQRPSVSDDTEHLVNGRMDFAFPGSTNSLHRMTTTSAAAYGTHLSPHVPHRVLSTSSTLTRDYNSLTRSEHSHSTTLPRDYSTLTSVSSHDSRLTAGVPDTPTRLVFSALGPTSLRVSWQEPRCERPLQGYSVEYQLLNGGELHRLNIPNPAQTSVVVEDLLPNHSYVFRVRAQSQEGWGREREGVITIESQVHPQSPLCPLPGSAFTLSTPSAPGPLVFTALSPDSLQLSWERPRRPNGDIVGYLVTCEMAQGGGPATAFRVDGDSPESRLTVPGLSENVPYKFKVQARTTEGFGPEREGIITIESQDGGPFPQLGSRAGLFQHPLQSEYSSITTTHTSATEPFLVDGPTLGAQHLEAGGSLTRHVTQEFVSRTLTTSGTLSTHMDQQFFQT

SEQ ID NO: 837469 - protein, 1730 aa, Homo sapiens
RCPPRPHPPNPRARPRTVPARPRAAAPSPSGSPGAEGASPPRGRSRTGAQQQPRLAGRGRKRMAGPRPSPWARLLLAALISVSLSGTLANRCKKAPVKSCTECVRVDKDCAYCTDEMFRDRRCNTQAELLAAGCQRESIVVMESSFQITEETQIDTTLRRSQMSPQGLRVRLRPGEERHFELEVFEPLESPVDLYILMDFSNSMSDDLDNLKKMGQNLARVLSQLTSDYTIGFGKFVDKVSVPQTDMRPEKLKEPWPNSDPPFSFKNVISLTEDVDEFRNKLQGERISGNLDAPEGGFDAILQTAVCTRDIGWRPDSTHLLVFSTESAFHYEADGANVLAGIMSRNDERCHLDTTGTYTQYRTQDYPSVPTLVRLLAKHNIIPIFAVTNYSYSYYEKLHTYFPVSSLGVLQEDSSNIVELLEEAFNRIRSNLDIRALDSPRGLRTEVTSKMFQKTRTGSFHIRRGEVGIYQVQLRALEHVDGTHVCQLPEDQKGNIHLKPSFSDGLKMDAGIICDVCTCELQKEVRSARCSFNGDFVCGQCVCSEGWSGQTCNCSTGSLSDIQPCLREGEDKPCSGRGECQCGHCVCYGEGRYEGQFCEYDNFQCPRTSGFLCNDRGRCSMGQCVCEPGWTGPSCDCPLSNATCIDSNGGICNGRGHCECGRCHCHQQSLYTDTICEINYSAIHPGLCEDLRSCVQCQAWGTGEKKGRTCEECNFKVKMVDELKRAEEVVVRCSFRDEDDDCTYSYTMEGDGAPGPNSTVLVHKKKDCPPGSFWWLIPLLLLLLPLLALLLLLCWKYCACCKACLALLPCCNRGHMVGFKEDHYMLRENLMASDHLDTPMLRSGNLKGRDVVRWKVTNNMQRPGFATHAASINPTELVPYGLSLRLARLCTENLLKPDTRECAQLRQEVEENVRTQELGLAEMWLNEVYRQISGVHKLQQTKFRQQPNAGKKQDHTIVDTVLMAPRSAKPALLKLTEKQVEQRAFHDLKVAPGYYTLTADQDARGMVEFQEGVELVDVRVPLFIRPEDDDEKQLLVEAIDVPAGTATLGRRLVNITIIKEQARDVVSFEQPEFSVSRGDQVARIPVIRRVLDGGKSQVSYRTQDGTAQGNRDYIPVEGELLFQPGEAWKELQVKLLELQEVDSLLRGRQVRRFHVQLSNPKFGAHLGQPHSTTIIIRDPDELDRSFTSQMLSSQPPPHGDLGAPQNPNAKAAGSRKIHFNWLPPSGKPMGYRVKYWIQGDSESEAHLLDSKVPSVELTNLYPYCDYEMKVCAYGAQGEGPYSSLVSCRTHQEVPSEPGRLAFNVVSSTVTQLSWAEPAETNGEITAYEVCYGLVNDDNRPIGPMKKVLVDNPKNRMLLIENLRESQPYRYTVKARNGAGWGPEREAIINLATQPKRPMSIPIIPDIPIVDAQSGEDYDSFLMYSDDVLRSPSGSQRPSVSDDTEHLVNGRMDFAFPGSTNSLHRMTTTSAAAYGTHLSPHVPHRVLSTSSTLTRDYNSLTRSEHSHSTTLPRDYSTLTSVSSHDSRLTAGVPDTPTRLVFSALGPTSLRVSWQEPRCERPLQGYSVEYQLLNGGELHRLNIPNPAQTSVVVEDLLPNHSYVFRVRAQSQEGWGREREGVITIESQVHPQSPLCPLPGSAFTLSTPSAPGPLVFTALSPDSLQLSWERPRRPNGDIVGYLVTCEMAQGGGPATAFRVDGDSPESSATPSLHPWGPSPPACTEQGLGVSWEA

SEQ ID NO: 837470 - protein, 502 aa, Homo sapiens
PSRTVISPVLEGRQGPIGPMKKVLVDNPKNRMLLIENLRESQPYRYTVKARNGAGWGPEREAIINLATQPKRPMSIPIIPDIPIVDAQSGEDYDSFLMYSDDVLRSPSGSQRPSVSDDTEHLVNGRMDFAFPGSTNSLHRMTTTSAAAYGTHLSPHVPHRVLSTSSTLTRDYNSLTRSEHSHSTTLPRDYSTLTSVSSHDSRLTAGVPDTPTRLVFSALGPTSLRVSWQEPRCERPLQGYSVEYQLLNGGELHRLNIPNPAQTSVVVEDLLPNHSYVFRVRAQSQEGWGREREGVITIESQVHPQSPLCPLPGSAFTLSTPSAPGPLVFTALSPDSLQLSWERPRRPNGDIVGYLVTCEMAQGGGPATAFRVDGDSPESRLTVPGLSENVPYKFKVQARTTEGFGPEREGIITIESQDGGPFPQLGSRAGLFQHPLQSEYSSITTTHTSATEPFLVDGPTLGAQHLEAGGSLTRHVTQEFVSRTLTTSGTLSTHMDQQFFQT

SEQ ID NO: 837471 - protein, 1287 aa, Homo sapiens
RCPPRPHPPNPRARPRTVPARPRAAAPSPSGSPGAEGASPPRGRSRTGAQQQPRLAGRGRKRMAGPRPSPWARLLLAALISVSLSGTLANRCKKAPVKSCTECVRVDKDCAYCTDEMFRDRRCNTQAELLAAGCQRESIVVMESSFQITEETQIDTTLRRSQMSPQGLRVRLRPGEERHFELEVFEPLESPVDLYILMDFSNSMSDDLDNLKKMGQNLARVLSQLTSDYTIGFGKFVDKVSVPQTDMRPEKLKEPWPNSDPPFSFKNVISLTEDVDEFRNKLQGERISGNLDAPEGGFDAILQTAVCTRDIGWRPDSTHLLVFSTESAFHYEADGANVLAGIMSRNDERCHLDTTGTYTQYRTQDYPSVPTLVRLLAKHNIIPIFAVTNYSYSYYEKLHTYFPVSSLGVLQEDSSNIVELLEEAFNRIRSNLDIRALDSPRGLRTEVTSKMFQKTRTGSFHIRRGEVGIYQVQLRALEHVDGTHVCQLPEDQKGNIHLKPSFSDGLKMDAGIICDVCTCELQKEVRSARCSFNGDFVCGQCVCSEGWSGQTCNCSTGSLSDIQPCLREGEDKPCSGRGECQCGHCVCYGEGRYEGQFCEYDNFQCPRTSGFLCNDRGRCSMGQCVCEPGWTGPSCDCPLSNATCIDSNGGICNGRGHCECGRCHCHQQSLYTDTICEINYSAIHPGLCEDLRSCVQCQAWGTGEKKGRTCEECNFKVKMVDELKRAEEVVVRCSFRDEDDDCTYSYTMEGDGAPGPNSTVLVHKKKDCPPGSFWWLIPLLLLLLPLLALLLLLCWKYCACCKACLALLPCCNRGHMVGFKEDHYMLRENLMASDHLDTPMLRSGNLKGRDVVRWKVTNNMQRPGFATHAASINPTELVPYGLSLRLARLCTENLLKPDTRECAQLRQEVEENVRTQELGLAEMWLNEVYRQISGVHKLQQTKFRQQPNAGKKQDHTIVDTVLMAPRSAKPALLKLTEKQVEQRAFHDLKVAPGYYTLTADQDARGMVEFQEGVELVDVRVPLFIRPEDDDEKQLLVEAIDVPAGTATLGRRLVNITIIKEQARDVVSFEQPEFSVSRGDQVARIPVIRRVLDGGKSQVSYRTQDGTAQGNRDYIPVEGELLFQPGEAWKELQVKLLELQEVDSLLRGRQVRRFHVQLSNPKFGAHLGQPHSTTIIIRDPDDQCCCLWHPPEPTRAPPRAKHILHPHTGLQLTDPLRTLTLDHTAQGLLHPHLRLLPRLSPDCWCARHAHPPGVLCPGAHISQSELAGAAVRAAAAGLQCGVPAAERR

SEQ ID NO: 837472 - protein, 1525 aa, Homo sapiens
RCPPRPHPPNPRARPRTVPARPRAAAPSPSGSPGAEGASPPRGRSRTGAQQQPRLAGRGRKRMAGPRPSPWARLLLAALISVSLSGTLANRCKKAPVKSCTECVRVDKDCAYCTDEMFRDRRCNTQAELLAAGCQRESIVVMESSFQITEETQIDTTLRRSQMSPQGLRVRLRPGEERHFELEVFEPLESPVDLYILMDFSNSMSDDLDNLKKMGQNLARVLSQLTSDYTIGFGKFVDKVSVPQTDMRPEKLKEPWPNSDPPFSFKNVISLTEDVDEFRNKLQGERISGNLDAPEGGFDAILQTAVCTRDIGWRPDSTHLLVFSTESAFHYEADGANVLAGIMSRNDERCHLDTTGTYTQYRTQDYPSVPTLVRLLAKHNIIPIFAVTNYSYSYYEKLHTYFPVSSLGVLQEDSSNIVELLEEAFNRIRSNLDIRALDSPRGLRTEVTSKMFQKTRTGSFHIRRGEVGIYQVQLRALEHVDGTHVCQLPEDQKGNIHLKPSFSDGLKMDAGIICDVCTCELQKEVRSARCSFNGDFVCGQCVCSEGWSGQTCNCSTGSLSDIQPCLREGEDKPCSGRGECQCGHCVCYGEGRYEGQFCEYDNFQCPRTSGFLCNDRGRCSMGQCVCEPGWTGPSCDCPLSNATCIDSNGGICNGRGHCECGRCHCHQQSLYTDTICEINYSAIHPGLCEDLRSCVQCQAWGTGEKKGRTCEECNFKVKMVDELKRAEEVVVRCSFRDEDDDCTYSYTMEGDGAPGPNSTVLVHKKKDCPPGSFWWLIPLLLLLLPLLALLLLLCWKYCACCKACLALLPCCNRGHMVGFKEDHYMLRENLMASDHLDTPMLRSGNLKGRDVVRWKVTNNMQRPGFATHAASINPTELVPYGLSLRLARLCTENLLKPDTRECAQLRQEVEENVRTQELGLAEMWLNEVYRQISGVHKLQQTKFRQQPNAGKKQDHTIVDTVLMAPRSAKPALLKLTEKQVEQRAFHDLKVAPGYYTLTADQDARGMVEFQEGVELVDVRVPLFIRPEDDDEKQLLVEAIDVPAGTATLGRRLVNITIIKEQARDVVSFEQPEFSVSRGDQVARIPVIRRVLDGGKSQVSYRTQDGTAQGNRDYIPVEGELLFQPGEAWKELQVKLLELQEVDSLLRGRQVRRFHVQLSNPKFGAHLGQPHSTTIIIRDPDELDRSFTSQMLSSQPPPHGDLGAPQNPNAKAAGSRKIHFNWLPPSGKPMGYRVKYWIQGDSESEAHLLDSKVPSVELTNLYPYCDYEMKVCAYGAQGEGPYSSLVSCRTHQEVPSEPGRLAFNVVSSTVTQLSWAEPAETNGEITAYEVCYGLVNDDNRPIGPMKKVLVDNPKNRMLLIENLRESQPYRYTVKARNGAGWGPEREAIINLATQPKRPMSIPIIPDIPIVDAQSGEDYDSFLMYSDDVLRSPSGSQRPSVSDDTEHLVNGRMDFAFPGSTNSLHRMTTTSAAAYGTHLSPHVPHRVLSTSSTLTRDYNSLTRSEHSHSTTLPRDYSTLTSVSSHGE

SEQ ID NO: 837473 - protein, 376 aa, Homo sapiens; identical to SEQ ID NO: 837459

SEQ ID NO: 837474 - protein, 433 aa, Homo sapiens
MKKVLVDNPKNRMLLIENLRESQPYRYTVKARNGAGWGPEREAIINLATQPKRPMSIPIIPDIPIVDAQSGEDYDSFLMYSDDVLRSPSGSQRPSVSDDTEHLVNGRMDFAFPGSTNSLHRMTTTSAAAYGTHLSPHVPHRVLSTSSTLTRDYNSLTRSEHSHSTTLPRDYSTLTSVSSHGELHRLNIPNPAQTSVVVEDLLPNHSYVFRVRAQSQEGWGREREGVITIESQVHPQSPLCPLPGSAFTLSTPSAPGPLVFTALSPDSLQLSWERPRRPNGDIVGYLVTCEMAQGGGPATAFRVDGDSPESRLTVPGLSENVPYKFKVQARTTEGFGPEREGIITIESQDGGPFPQLGSRAGLFQHPLQSEYSSITTTHTSATEPFLVDGPTLGAQHLEAGGSLTRHVTQEFVSRTLTTSGTLSTHMDQQFFQT

SEQ ID NO: 837475 - protein, 335 aa, Homo sapiens [sequence omitted]

SEQ ID NO: 837476 - protein, 773 aa, Homo sapiens
RCPPRPHPPNPRARPRTVPARPRAAAPSPSGSPGAEGASPPRGRSRTGAQQQPRLAGRGRKRMAGPRPSPWARLLLAALISVSLSGTLANRCKKAPVKSCTECVRVDKDCAYCTDEMFRDRRCNTQAELLAAGCQRESIVVMESSFQITEETQIDTTLRRSQMSPQGLRVRLRPGEERHFELEVFEPLESPVDLYILMDFSNSMSDDLDNLKKMGQNLARVLSQLTSDYTIGFGKFVDKVSVPQTDMRPEKLKEPWPNSDPPFSFKNVISLTEDVDEFRNKLQGERISGNLDAPEGGFDAILQTAVCTRDIGWRPDSTHLLVFSTESAFHYEADGANVLAGIMSRNDERCHLDTTGTYTQYRTQDYPSVPTLVRLLAKHNIIPIFAVTNYSYSYYEKLHTYFPVSSLGVLQEDSSNIVELLEEAFNRIRSNLDIRALDSPRGLRTEVTSKMFQKTRTGSFHIRRGEVGIYQVQLRALEHVDGTHVCQLPEDQKGNIHLKPSFSDGLKMDAGIICDVCTCELQKEVRSARCSFNGDFVCGQCVCSEGWSGQTCNCSTGSLSDIQPCLREGEDKPCSGRGECQCGHCVCYGEGRYEGQFCEYDNFQCPRTSGFLCNDRGRCSMGQCVCEPGWTGPSCDCPLSNATCIDSNGGICNGRGHCECGRCHCHQQSLYTDTICEINYSAIHPGLCEDLRSCVQCQAWGTGEKKGRTCEECNFKVKMVDELKRAEEVVVRCSFRDEDDDCTYSYTMEGDGAHGPTVLPNLTAPCPTPAMSH

SEQ ID NO: 837477 - protein, 295 aa, Homo sapiens
MPVHTLSPGAPSAPALPCRLRTRVPGYLLRGPADGGARKPSAVERLEADKAKYVKSLHVANTRQEPVQPLLSKQPLFSPETRRTVLTPSRRALPGPCRRPQLDLDILSSLIDLCDSPVSPAEASRTPGRAEGAGRPPPATPPRPPPSTSAVRRVDVRPLPASPARPCPSPGPAAASSPARPPGLQRSKSDLSERFSRAAADLERFFNFCGLDPEEARGLGVAHLARASSDIVSLAGPSAGPGSSEGGCSRRSSVTVEERARERVPYGVSVVERNARVIKWLYGLRQARESPAAEG

SEQ ID NO: 837478 - protein, 295 aa, Homo sapiens; identical to SEQ ID NO: 837477

SEQ ID NO: 837479 - protein, 295 aa, Homo sapiens; identical to SEQ ID NO: 837477

SEQ ID NO: 837480 - protein, 295 aa, Homo sapiens; identical to SEQ ID NO: 837477

SEQ ID NO: 837481 - protein, 112 aa, Homo sapiens
PHATLWALPSLVLWLHPLRSYLGFHTHSTQRKSQLTHIRFWAGPPAKVVGGHDTAPGMASSKCLSNDTASDGMMPLPTVSQALPSRLCSAASRWVYGHSKTAIPVNESACRD

SEQ ID NO: 837482 - protein, 295 aa, Homo sapiens; identical to SEQ ID NO: 837477

SEQ ID NO: 837483 - protein, 92 aa, Homo sapiens
MKVITEILDTLIGKVPVEMSPGKLFLHVASGLERLHGLHDMKVGHILVCQLRVLRHVDILLGHHDSLLKKEFINGNPVLLRHQHLCGCRVRG

SEQ ID NO: 837484 - protein, 295 aa, Homo sapiens; identical to SEQ ID NO: 837477

SEQ ID NO: 837485 - protein, 295 aa, Homo sapiens; identical to SEQ ID NO: 837477

SEQ ID NO: 837486 - protein, 108 aa, Homo sapiens
KKERKEGRKRERKEGRERKEGRKRERKEGRKERKKERKKGRGNCDLRLNDYKMTADWCPDEGVNGSDHTGGACLLHKRNIGNMECICGGRLGCLRKVHTSRTEDLGGT

SEQ ID NO: 837487 - protein, 125 aa, Homo sapiens
MAMQAAKRANIRLPPEVNRILYIRNLPYKITAEEMYDIFGKYGPIRQIRVGNTPETRGTAYVVYEDIFDAKNACDHLSGFNVCNRYLVVLYYNANRAFQKMDTKKKEEQLKLLKEKYGINTDPPK

SEQ ID NO: 837488 - protein, 125 aa, Homo sapiens; identical to SEQ ID NO: 837487

SEQ ID NO: 837489 - protein, 110 aa, Homo sapiens
MAMQAAKRANIRLPPEVNRILYIRNLPYKITAEEMGNTPETRGTAYVVYEDIFDAKNACDHLSGFNVCNRYLVVLYYNANRAFQKMDTKKKEEQLKLLKEKYGINTDPPK

SEQ ID NO: 837490 - protein, 88 aa, Homo sapiens
GLESRSGSVLPRSLFEGGCYVSASQRKTALFRCNSFRRVLDVDVLHLTRCNPRSRASSGGISVSATVTSSARQDGDASGQEGEHSTST

SEQ ID NO: 837491 - protein, 125 aa, Homo sapiens; identical to SEQ ID NO: 837487

SEQ ID NO: 837492 - protein, 125 aa, Homo sapiens; identical to SEQ ID NO: 837487

SEQ ID NO: 837493 - protein, 165 aa, Homo sapiens
GLESRSGSVLPRSLFEGGCYVSASQRKTALFRCNSFRRVLDVDVLHLTRCNPRSRASSGGISVSATVTSSARQDGDASGQEGEREYRVFCGGWENFGFDFLSGVDRSILAPPPSPERRTPEFLSCQRRHYPAPSSEICSLSHISVPTPFESSSVSTLVSVIVLPL

SEQ ID NO: 837494 - protein, 91 aa, Homo sapiens
RAAGIRHEGPIRQIRVGNTPETRGTAYVVYEDIFDAKNACDHLSGFNVCNRYLVVLYYNANRAFQKMDTKKKEEQLKLLKEKYGINTDPPK

SEQ ID NO: 837495 - protein, 93 aa, Homo sapiens
LRVRSVMTKKEKKAGALEGNTPETRGTAYVVYEDIFDAKNACDHLSGFNVCNRYLVVLYYNANRAFQKMDTKKKEEQLKLLKEKYGINTDPPK

SEQ ID NO: 837496 - protein, 88 aa, Homo sapiens; identical to SEQ ID NO: 837490

SEQ ID NO: 837497 - protein, 125 aa, Homo sapiens; identical to SEQ ID NO: 837487

SEQ ID NO: 837498 - protein, 206 aa, Homo sapiens
MLRTAGRDGLCRLSTYLEELEAVELKKFKLYLGTATELGEGKIPWGSMEKAGPLEMAQLLITHFGPEEAWRLALSTFERINRKDLWERGQREDLVRDTPPGGPSSLGNQSTCLLEVSLVTPRKDPQETYRDYVRRKFRLMEDRNARLGECVNLSHRYTRLLLVKEHSNPMQVQQQLLDTGRGHARTVGHQASPIKIETLFEPDEER

SEQ ID NO: 837499 - protein, 105 aa, Homo sapiens
MEFALVQAGVQWHDLGSPQTLPPGFKRFSCLSLLSSWDYRHAPPQLANFVFLGKTGFLHVGQAGLEFSISGDPPASAPQSAGITGVSHGAQPSFANFIKDNAKRK

SEQ ID NO: 837500 - protein, 133 aa, Homo sapiens
IGRWTAPRPRGEADTGGSSAKAKSRSKWWDSRRGRGDVKSSRGSSRCGSALALALLALRPGPGPGPAPAMEKTELIQKAKLAEQAEASYDDMATCMKAVTEQGAELSNEERNLLSVAYKNVVGGRRSALEGHL

SEQ ID NO: 837501 - protein, 133 aa, Homo sapiens; identical to SEQ ID NO: 837500

SEQ ID NO: 837502 - protein, 133 aa, Homo sapiens; identical to SEQ ID NO: 837500

SEQ ID NO: 837503 - protein, 133 aa, Homo sapiens; identical to SEQ ID NO: 837500

SEQ ID NO: 837504 - protein, 108 aa, Homo sapiens
  misc_feature (1)..(1): Xaa can be any naturally occurring amino acid
XKISLGRAGFELARSSRGSSRCGSALALALLALRPGPGPGPAPAMEKTELIQKAKLAEQAEASYDDMATCMKAVTEQGAELSNEERNLLSVAYKNVVGGRRSALEGHL

SEQ ID NO: 837505 - protein, 133 aa, Homo sapiens; identical to SEQ ID NO: 837500

SEQ ID NO: 837506 - protein, 133 aa, Homo sapiens; identical to SEQ ID NO: 837500

SEQ ID NO: 837507 - protein, 66 aa, Homo sapiens
TRVAARRREALEAPPAGPPWRVISSIEQKTDTSDKKLQLIKDYREKVESELRSICTTVLGTCWINI

SEQ ID NO: 837508 - protein, 103 aa, Homo sapiens
MVVLTFSSSLSLLFVFSHSHRVRAPGRSTNLLDKYLIANATNPESKVFYLKMKGDYFRYLAEVACGDDRKQTIDNSQGAYQEAFDITQERDATHTPNPPGACS

SEQ ID NO: 837509 - protein, 133 aa, Homo sapiens; identical to SEQ ID NO: 837500

SEQ ID NO: 837510 - protein, 133 aa, Homo sapiens; identical to SEQ ID NO: 837500

SEQ ID NO: 837511 - protein, 133 aa, Homo sapiens; identical to SEQ ID NO: 837500

SEQ ID NO: 837512 - protein, 71 aa, Homo sapiens
GWVSLCTWMPDKGWSMSAAGGRKFSVFYYEILNNPELACTLAKTAFDEAIAELDTLNEDSYKGQHPHHAVA

SEQ ID NO: 837513 - protein, 85 aa, Homo sapiens
GRVGRPTRPSTHAAADARVRTHASAFGHQTVQEKNVMRQKGLKTKSIQGVILLSFKKPFYTSPFLIPLGFPIAKKPIHVYGINCL

SEQ ID NO: 837514 - protein, 78 aa, Homo sapiens
GRVGRPTRPSTHAAADARVRTHASAHISIPYSTWISYSKETHSCVWNQLFIVFSHCSFGKTSFLDLCLSWPSWCAVLL

SEQ ID NO: 837515 - protein, 108 aa, Homo sapiens
  misc_feature (18)..(19): Xaa can be any naturally occurring amino acid
  misc_feature (87)..(87): Xaa can be any naturally occurring amino acid
EKAILVHIPVLAVRRRVXXSVKMKHIVINMSGIYSYSRLPWINDYVRLDSRAACKNTPVEESRSASEHIPNAEFMTSLSLRIYSTQXFPHIRDYEYQIHRRPGTDNCL

SEQ ID NO: 837516 - protein, 116 aa, Homo sapiens
CCCVCLFGRAAVSCRVLFLCLFCGVFFLFFFVLLWLLGVSSGLVSRVSRLLSMAFSVLSFLCLCVLVRCVCCVSGLLVGVVVSFLPFVRFSRSRLSAVLVAFDVRVCSVSYFCSLV

SEQ ID NO: 837517 - protein, 93 aa, Homo sapiens
  misc_feature (4)..(4): Xaa can be any naturally occurring amino acid
  misc_feature (12)..(12): Xaa can be any naturally occurring amino acid
GGRXKGVGEGGXFVFLEIQNLLDKYLIANATNPESKVFYLKMKGDYFRYLAEVACGDDRKQTIDNSQGAYQEAFDITQERDATHTPNPPGACS

SEQ ID NO: 837518 - protein, 133 aa, Homo sapiens; identical to SEQ ID NO: 837500

SEQ ID NO: 837519 - protein, 132 aa, Homo sapiens
WAVDRPSAPGYADTGGSSAKAKSRSKWWDSRRGRGDVKSSRGSSRCGSALALALLALRPGPGPGPAPAMEKTELIQKAKLAEQAEASYDDMATCMKAVTEQGAELSNEERNLLSVAYKNVVGGRRSALEGHL

SEQ ID NO: 837520 - protein, 170 aa, Homo sapiens
AGAAAARAPCARGLRAAPASSSRGPRPPRVPSGGGGGGEGNSSGRVCGRQKRAAGRIVRRRSLSAFCSRLAAPPLRSSRGSSRCGSALALALLALRPGPGPGPAPAMEKTELIQKAKLAEQAEASYDDMATCMKAVTEQGAELSNEERNLLSVAYKNVVGGRRSALEGHL

SEQ ID NO: 837521 - protein, 106 aa, Homo sapiens
MPLPSGTAPGGKSSRGSSRCGSALALALLALRPGPGPGPAPAMEKTELIQKAKLAEQAEASYDDMATCMKAVTEQGAELSNEERNLLSVAYKNVVGGRRSALEGHL

SEQ ID NO: 837522 - protein, 133 aa, Homo sapiens; identical to SEQ ID NO: 837500

SEQ ID NO: 837523 - protein, 133 aa, Homo sapiens; identical to SEQ ID NO: 837500

SEQ ID NO: 837524 - protein, 133 aa, Homo sapiens; identical to SEQ ID NO: 837500

SEQ ID NO: 837525 - protein, 133 aa, Homo sapiens; identical to SEQ ID NO: 837500

SEQ ID NO: 837526 - protein, 133 aa, Homo sapiens; identical to SEQ ID NO: 837500

SEQ ID NO: 837527 - protein, 133 aa, Homo sapiens; identical to SEQ ID NO: 837500

SEQ ID NO: 837528 - protein, 133 aa, Homo sapiens; identical to SEQ ID NO: 837500

SEQ ID NO: 837529 - protein, 133 aa, Homo sapiens; identical to SEQ ID NO: 837500

SEQ ID NO: 837530 - protein, 78 aa, Homo sapiens; identical to SEQ ID NO: 837514

SEQ ID NO: 837531 - protein, 108 aa, Homo sapiens
RSVPGEQAHSSPRRRPGLALPWRLGQRVSRMAPLPGAELVRRPLQLYRYLLRCCQQLPTKGIQQHYKHAVRQSFRVHSDEDNPERIQQIIKRAIEDADWIMNKYKKQN

SEQ ID NO: 837532 - protein, 108 aa, Homo sapiens; identical to SEQ ID NO: 837531

SEQ ID NO: 837533 - protein, 108 aa, Homo sapiens; identical to SEQ ID NO: 837531

SEQ ID NO: 837534 - protein, 122 aa, Homo sapiens
RSVPGEQAHSSPRRRPGLALPWRLGQRVSRMAPLPGAELVRRPLQLYRYLLRCCQQLPTKGIQQHYKHAVRQSFRVHSDEDNPERIQQIIKRAIEDADWIMNKLRMVPVEEATSQLLPSSRS

SEQ ID NO: 837535 - protein, 108 aa, Homo sapiens; identical to SEQ ID NO: 837531

SEQ ID NO: 837536 - protein, 108 aa, Homo sapiens; identical to SEQ ID NO: 837531

SEQ ID NO: 837537 - protein, 108 aa, Homo sapiens; identical to SEQ ID NO: 837531

SEQ ID NO: 837538 - protein, 494 aa, Homo sapiens
MEVVEAAAAQLETLKFNGTDFGVGEGPAAPSPGSAPVPGTQPPLQSFEGSPDAGQTVEVKPAGEQPLQPVLNAVAAGTPAPQPQPPAESPACGDCVTSPGAAEPARAPDSLETSDSDSDSDSETDSDSSSSSSSSSSSSSSSSSSCISLPPVLSDGDDDLQVEKENKNFPLKTKDELLLNELPSVEELTIILPEDIELKPLGMVSSIIEQLVIIESMTNLPPVNEETVIFKSDRQAAGKIFEIFGPVAHPFYVLRFNSSDHIESKGIKIKETMYFAPSMKDFTQYIFTEKLKQDKGSDASWKNDQEPPPEALDFSDDEKEKEAKQRKKSQIQGRKKLKSEFNEPGEDFTEVHQNWNAHSSASEHAKGYRNREFTRGFSRARYPRSCHGRPPPQHFYNSEHMVSQETSGFPSQRQNNPIMPQYPFPLPVFDMHNFPLRPPPPPPPPPVNMGWATPNMAAHPLLNLPYSLPPPPPPPPLPPPPSSGDSNSHFGPYY

SEQ ID NO: 837539 - protein, 494 aa, Homo sapiens; identical to SEQ ID NO: 837538

SEQ ID NO: 837540 - protein, 314 aa, Homo sapiens
MEVVEAAAAQLETLKFNGTDFGVGEGPAAPSPGSAPVPGTQPPLQSFEGSPDAGQTVEVKPAGEQPLQPVLNAVAAGTPAPQPQPPAESPACGDCVTSPGAAEPARAPDSLETSDSDSDSDSETDSDSSSSSSSSSSSSSSSSSSCISLPPVLSDGDDDLQVEKENKNFPLKTKDELLLNELPSVEELTIILPEDIELKPLGMVSSIIEQLVIIESMTNLPPVNEETVIFKSDRQAAGKIFEIFGPVAHPFYVLRFNSSDHIESKGIKIKETMYFAPSMKDFTQYIFTEKLKQDKGSDASWKNDQEPPPETMVD

SEQ ID NO: 837541 - protein, 181 aa, Homo sapiens [sequence omitted]

SEQ ID NO: 837542 - protein, 494 aa, Homo sapiens; identical to SEQ ID NO: 837538

SEQ ID NO: 837543 - protein, 182 aa, Homo sapiens
MADSENQGPAEPSQAAAAAEAAAEEVMAEGGAQGGDCDSAAGDPDSAAGQMAEEPQTPAENAPKPKNDFIESLPNSVKCRVLALKKLQKRCDKIEAKFDKEFQALEKKYNDIYKPLLAKIQELTGEMEGCAWTLEGEEEEEEEYEDDEEEGEDEEEEEAAAEAAAGAKHDDAHAEMPDDAKK

SEQ ID NO: 837544 - protein, 182 aa, Homo sapiens; identical to SEQ ID NO: 837543

SEQ ID NO: 837545 - protein, 131 aa, Homo sapiens
RQLMWEASQVPRKQEAGPRPTSFPRPHVTATCRIRKISLDQLGCRASAGALLDLCGFSSNMADSENQGPAEPSQAAAAAEAAAEEVMAEGGAQGGDCDSAAGDPDSAAGQMAEEPQTPAENAPKPKNEKKV

SEQ ID NO: 837546 - protein, 32 aa, Homo sapiens
LVRLDKNIVMDRAQVVPECISDSWANNQSMLK

SEQ ID NO: 837547 - protein, 701 aa, Homo sapiens
GTRISGAGAAPRRHPHLLPAAAAAEPGRSSAPSTAAPGNPERAPQAGGRARASQPSLFHLLLREGKMSESSSKSSQPLASKQEKDGTEKRGRGRPRKQPPVSPGTALVGSQKEPSEVPTPKRPRGRPKGSKNKGAAKTRKTTTTPGRKPRGRPKKLEKEEEEGISQESSEEEAVTHACRLLLTGGAASFWDWTALLRSHRPRPFPRPTITTASGRHPHLPPVPSPPHYTAHQPLQGSHGLSGEQFSPGLSSQLPPPTHAYTHALLDKANIPLSRTLHLLRPHSLGGGDIALLGFWFGGALSAPSLFPTTSLTSSSTSGSSDKVYAHQMVRTDSREQKLDAFLQPLSKPLSSQPQAIVTEDKTDISSGRARQQDEEMLELPAPAEVAAKNQSLEGDTTKGTSEMSEKRGPTSSNPRKRHREDSDVEMVEDDSRKEMTAACTPRRRIINLTSVLSLQEEINEQGHEVLREMLHNHSFVGCVNPQWALAQHQTKLYLLNTTKLSEELFYQILIYDFANFGVLRLSEPAPLFDLAMLALDSPESGWTEEDGPKEGLAEYIVEFLKKKAEMLADYFSLEIDEEGNLIGLPLLIDNYVPPLEGLPIFILRLATEVNWDEEKECFESLSKECAMFYSIRKQYISEESTLSGQQSEVPGSIPNSWKWTVEHIVYKALRSHILPPKHFTEDGNILQLANLPDLYKVFERC

SEQ ID NO: 837548 - protein, 205 aa, Homo sapiens
MLPSQGFYTTVFDLTASDSFNYHRYQEPAPLFDLAMLALDSPESGWTEEDGPKEGLAEYIVEFLKKKAEMLADYFSLEIDEEGNLIGLPLLIDNYVPPLEGLPIFILRLATEVNWDEEKECFESLSKECAMFYSIRKQYISEESTLSGQQSEVPGSIPNSWKWTVEHIVYKALRSHILPPKHFTEDGNILQLANLPDLYKVFERC

SEQ ID NO: 837549 - protein, 201 aa, Homo sapiens
VTIWVAGGGFEATGLSLEAQTQEPAPLFDLAMLALDSPESGWTEEDGPKEGLAEYIVEFLKKKAEMLADYFSLEIDEEGNLIGLPLLIDNYVPPLEGLPIFILRLATEVNWDEEKECFESLSKECAMFYSIRKQYISEESTLSGQQSEVPGSIPNSWKWTVEHIVYKALRSHILPPKHFTEDGNILQLANLPDLYKVFERC

SEQ ID NO: 837550 - protein, 398 aa, Homo sapiens
MVKSTTSLTSSSTSGSSDKVYAHQMVRTDSREQKLDAFLQPLSKPLSSQPQAIVTEDKTDISSGRARQQDEEMLELPAPAEVAAKNQSLEGDTTKGTSEMSEKRGPTSSNPRKRHREDSDVEMVEDDSRKEMTAACTPRRRIINLTSVLSLQEEINEQGHEVLREMLHNHSFVGCVNPQWALAQHQTKLYLLNTTKLSEELFYQILIYDFANFGVLRLSEPAPLFDLAMLALDSPESGWTEEDGPKEGLAEYIVEFLKKKAEMLADYFSLEIDEEGNLIGLPLLIDNYVPPLEGLPIFILRLATEVNWDEEKECFESLSKECAMFYSIRKQYISEESTLSGQQSEVPGSIPNSWKWTVEHIVYKALRSHILPPKHFTEDGNILQLANLPDLYKVFERC

SEQ ID NO: 837551 - protein, 723 aa, Homo sapiens
MSFVAGVIRRLDETVVNRIAAGEVIQRPANAIKEMIENCLDAKSTSIQVIVKEGGLKLIQIQDNGTGIRALASISHVAHVTITTKTADGKCAYRASYSDGKLKAPPKPCAGNQGTQITVEDLFYNIATRRKALKNPSEEYGKILEVVGRYSVHNAGISFSVKKQGETVADVRTLPNASTVDNIRSIFGNAVSRELIEIGCEDKTLAFKMNGYISNANYSVKKCIFLLFINHRLVESTSLRKAIETVYAAYLPKNTHPFLYLSLEISPQNVDVNVHPTKHEVHFLHEESILERVQQHIESKLLGSNSSRMYFTQTLLPGLAGPSGEMVKSTTSLTSSSTSGSSDKVYAHQMVRTDSREQKLDAFLQPLSKPLSSQPQAIVTEDKTDISSGRARQQDEEMLELPAPAEVAAKNQSLEGDTTKGTSEMSEKRGPTSSNPRKRHREDSDVEMVEDDSRKEMTAACTPRRRIINLTSVLSLQEEINEQGHEVLREMLHNHSFVGCVNPQWALAQHQTKLYLLNTTKLSEELFYQILIYDFANFGVLRLSEPAPLFDLAMLALDSPESGWTEEDGPKEGLAEYIVEFLKKKAEMLADYFSLEIDEEGNLIGLPLLIDNYVPPLEGLPIFILRLATEVNWDEEKECFESLSKECAMFYSIRKQYISEESTLSGQQSEVPGSIPNSWKWTVEHIVYKALRSHILPPKHFTEDGNILQLANLPDLYKVFERC

SEQ ID NO: 837552 - protein, 398 aa, Homo sapiens; identical to SEQ ID NO: 837550

SEQ ID NO: 837553 - protein, 756 aa, Homo sapiens
MSFVAGVIRRLDETVVNRIAAGEVIQRPANAIKEMIENCLDAKSTSIQVIVKEGGLKLIQIQDNGTGIRKEDLDIVCERFTTSKLQSFEDLASISTYGFRGEALASISHVAHVTITTKTADGKCAYRASYSDGKLKAPPKPCAGNQGTQITVEDLFYNIATRRKALKNPSEEYGKILEVVGRYSVHNAGISFSVKKQGETVADVRTLPNASTVDNIRSIFGNAVSRELIEIGCEDKTLAFKMNGYISNANYSVKKCIFLLFINHRLVESTSLRKAIETVYAAYLPKNTHPFLYLSLEISPQNVDVNVHPTKHEVHFLHEESILERVQQHIESKLLGSNSSRMYFTQTLLPGLAGPSGEMVKSTTSLTSSSTSGSSDKVYAHQMVRTDSREQKLDAFLQPLSKPLSSQPQAIVTEDKTDISSGRARQQDEEMLELPAPAEVAAKNQSLEGDTTKGTSEMSEKRGPTSSNPRKRHREDSDVEMVEDDSRKEMTAACTPRRRIINLTSVLSLQEEINEQGHEVLREMLHNHSFVGCVNPQWALAQHQTKLYLLNTTKLSEELFYQILIYDFANFGVLRLSEPAPLFDLAMLALDSPESGWTEEDGPKEGLAEYIVEFLKKKAEMLADYFSLEIDEEGNLIGLPLLIDNYVPPLEGLPIFILRLATEVNWDEEKECFESLSKECAMFYSIRKQYISEESTLSGQQSEVPGSIPNSWKWTVEHIVYKALRSHILPPKHFTEDGNILQLANLPDLYKVFERC

SEQ ID NO: 837554 - protein, 756 aa, Homo sapiens; identical to SEQ ID NO: 837553

SEQ ID NO: 837555 - protein, 711 aa, Homo sapiens
MSFVAGVIRRLDETVVNRIAAGEVIQRPANAIKEMIENCLDAKSTSIQVIVKEGGLKLIQIQDNGTGIRKEDLDIVCERFTTSKLQSFEDLASISTYGFRGEALASISHVAHVTITTKTADGKCAYRASYSDGKLKAPPKPCAGNQGTQITVEDLFYNIATRRKALKNPSEEYGKILEVVGRYSVHNAGISFSVKKQGETVADVRTLPNASTVDNIRSIFGNAVSRELIEIGCEDKTLAFKMNGYISNANYSVKKCIFLLFINHRLVESTSLRKAIETVYAAYLPKNTHPFLYLSLEISPQNVDVNVHPTKHEVHFLHEESILERVQQHIESKLLGSNSSRMYFTQTLLPGLAGPSGEMVKSTTSLTSSSTSGSSDKVYAHQMVRTDSREQKLDAFLQPLSKPLSSQPQAIVTEDKTDISSGRARQQDEEMLELPAPAEVAAKNQSLEGDTTKGTSEMSEKRGPTSSNPRKRHREDSDVEMVEDDSRKEMTAACTPRRRIINLTSVLSLQEEINEQGHEVLREMLHNHSFVGCVNPQWALAQHQTKLYLLNTTKLSEELFYQILIYDFANFGVLRLSEPAPLFDLAMLALDSPESGWTEEDGPKEGLAEYIVEFLKKKAEMLADYFSLEIDEEGNLIGLPLLIDNYVPPLEGLPIFILRLATEVNWDEEKECFESLSKECAMFYSIRKYVVDYILEPSANMPWFKGWKVTR

SEQ ID NO: 837556 - protein, 643 aa, Homo sapiens
MSFVAGVIRRLDETVVNRIAAGEVIQRPANAIKEMIENCLDAKSTSIQVIVKEGGLKLIQIQDNGTGIRKEDLDIVCERFTTSKLQSFEDLASISTYGFRGEALASISHVAHVTITTKTADGKCAYRASYSDGKLKAPPKPCAGNQGTQITVEDLFYNIATRRKALKNPSEEYGKILEVVGRYSVHNAGISFSVKKQGETVADVRTLPNASTVDNIRSIFGNAVSRELIEIGCEDKTLAFKMNGYISNANYSVKKCIFLLFINHRLVESTSLRKAIETVYAAYLPKNTHPFLYLSLEISPQNVDVNVHPTKHEVHFLHEESILERVQQHIESKLLGSNSSRMYFTQTLLPGLAGPSGEMVKSTTSLTSSSTSGSSDKVYAHQMVRTDSREQKLDAFLQPLSKPLSSQPQAIVTEDKTDISSGRARQQDEEMLELPAPAEVAAKNQSLEGDTTKGTSEMSEKRGPTSSNPRKRHREDSDVEMVEDDSRKEMTAACTPRRRIINLTSVLSLQEEINEQGHEVLREMLHNHSFVGCVNPQWALAQHQTKLYLLNTTKLSEELFYQILIYDFANFGVLRLSEPAPLFDLAMLALDSPESGWTEEDGPKEGLAEYIVEFLKKKAEMLADYFSLEIDESVNALRSLYSP

SEQ ID NO: 837557 - protein, 522 aa, Homo sapiens
MSFVAGVIRRLDETVVNRIAAGEVIQRPANAIKEMIENCLDAKSTSIQVIVKEGGLKLIQIQDNGTGIRKEDLDIVCERFTTSKLQSFEDLASISTYGFRGEALASISHVAHVTITTKTADGKCAYRASYSDGKLKAPPKPCAGNQGTQITVEDLFYNIATRRKALKNPSEEYGKILEVVGRYSVHNAGISFSVKKQGETVADVRTLPNASTVDNIRSIFGNAVSRELIEIGCEDKTLAFKMNGYISNANYSVKKCIFLLFINHRLVESTSLRKAIETVYAAYLPKNTHPFLYLSLEISPQNVDVNVHPTKHEVHFLHEESILERVQQHIESKLLGSNSSRMYFTQTLLPGLAGPSGEMVKSTTSLTSSSTSGSSDKVYAHQMVRTDSREQKLDAFLQPLSKPLSSQPQAIVTEDKTDISSGRARQQDEEMLELPAPAEVAAKNQSLEGDTTKGTSEMSEKRGPTSSNPRKKTSGKILMGKSGEDDSRKGMDWVVPPERSNSMVEFGENRGDRGRESGTPSG

SEQ ID NO: 837558 - protein, 286 aa, Homo sapiens
MSFVAGVIRRLDETVVNRIAAGEVIQRPANAIKEMIENCLDAKSTSIQVIVKEGGLKLIQIQDNGTGIRKEDLDIVCERFTTSKLQSFEDLASISTYGFRGEALASISHVAHVTITTKTADGKCAYRASYSDGKLKAPPKPCAGNQGTQITVEDLFYNIATRRKALKNPSEEYGKILEVVGRYSVHNAGISFSVKKQGETVADVRTLPNASTVDNIRSIFGNAVSRELIEIGCEDKTLAFKMNGYISNANYSVKKCIFLLFINPSLVKSLLKRLKRFGYSKKTIRS

SEQ ID NO: 837559 - protein, 235 aa, Homo sapiens
MSFVAGVIRRLDETVVNRIAAGEVIQRPANAIKEMIENCLDAKSTSIQVIVKEGGLKLIQIQDNGTGIRKEDLDIVCERFTTSKLQSFEDLASISTYGFRGEALASISHVAHVTITTKTADGKCAYRASYSDGKLKAPPKPCAGNQGTQITVEDLFYNIATRRKALKNPSEEYGKILEVVGRYSVHNAGISFSVKKQGETVADVRTLPNASTVDNIRSIFGNAVSRELFKNGCEG

SEQ ID NO: 837560 - protein, 756 aa, Homo sapiens; identical to SEQ ID NO: 837553

SEQ ID NO: 837561 - protein, 515 aa, Homo sapiens
MNGYISNANYSVKKCIFLLFINHRLVESTSLRKAIETVYAAYLPKNTHPFLYLSLEISPQNVDVNVHPTKHEVHFLHEESILERVQQHIESKLLGSNSSRMYFTQTLLPGLAGPSGEMVKSTTSLTSSSTSGSSDKVYAHQMVRTDSREQKLDAFLQPLSKPLSSQPQAIVTEDKTDISSGRARQQDEEMLELPAPAEVAAKNQSLEGDTTKGTSEMSEKRGPTSSNPRKRHREDSDVEMVEDDSRKEMTAACTPRRRIINLTSVLSLQEEINEQGHEVLREMLHNHSFVGCVNPQWALAQHQTKLYLLNTTKLSEELFYQILIYDFANFGVLRLSEPAPLFDLAMLALDSPESGWTEEDGPKEGLAEYIVEFLKKKAEMLADYFSLEIDEEGNLIGLPLLIDNYVPPLEGLPIFILRLATEVNWDEEKECFESLSKECAMFYSIRKQYISEESTLSGQQSEVPGSIPNSWKWTVEHIVYKALRSHILPPKHFTEDGNILQLANLPDLYKVFERC

SEQ ID NO: 837562 - protein, 783 aa, Homo sapiens
RLGTRLGGAGSLTSGVRPSPFPQTVCFFTALPRDLLRVVWSTESHFVTQAGVQWRDLSCLQPPPHSLDAKSTSIQVIVKEGGLKLIQIQDNGTGIRKEDLDIVCERFTTSKLQSFEDLASISTYGFRGEALASISHVAHVTITTKTADGKCAYRASYSDGKLKAPPKPCAGNQGTQITVEDLFYNIATRRKALKNPSEEYGKILEVVGRYSVHNAGISFSVKKQGETVADVRTLPNASTVDNIRSIFGNAVSRELIEIGCEDKTLAFKMNGYISNANYSVKKCIFLLFINHRLVESTSLRKAIETVYAAYLPKNTHPFLYLSLEISPQNVDVNVHPTKHEVHFLHEESILERVQQHIESKLLGSNSSRMYFTQTLLPGLAGPSGEMVKSTTSLTSSSTSGSSDKVYAHQMVRTDSREQKLDAFLQPLSKPLSSQPQAIVTEDKTDISSGRARQQDEEMLELPAPAEVAAKNQSLEGDTTKGTSEMSEKRGPTSSNPRKRHREDSDVEMVEDDSRKEMTAACTPRRRIINLTSVLSLQEEINEQGHEVLREMLHNHSFVGCVNPQWALAQHQTKLYLLNTTKLSEELFYQILIYDFANFGVLRLSEPAPLFDLAMLALDSPESGWTEEDGPKEGLAEYIVEFLKKKAEMLADYFSLEIDEEGNLIGLPLLIDNYVPPLEGLPIFILRLATEVNWDEEKECFESLSKECAMFYSIRKQYISEESTLSGQQSEVPGSIPNSWKWTVEHIVYKALRSHILPPKHFTEDGNILQLANLPDLYKVFERC

SEQ ID NO: 837563 - protein, 415 aa, Homo sapiens
MYFTQTLLPGLAGPSGEMVKSTTSLTSSSTSGSSDKVYAHQMVRTDSREQKLDAFLQPLSKPLSSQPQAIVTEDKTDISSGRARQQDEEMLELPAPAEVAAKNQSLEGDTTKGTSEMSEKRGPTSSNPRKRHREDSDVEMVEDDSRKEMTAACTPRRRIINLTSVLSLQEEINEQGHEVLREMLHNHSFVGCVNPQWALAQHQTKLYLLNTTKLSEELFYQILIYDFANFGVLRLSEPAPLFDLAMLALDSPESGWTEEDGPKEGLAEYIVEFLKKKAEMLADYFSLEIDEEGNLIGLPLLIDNYVPPLEGLPIFILRLATEVNWDEEKECFESLSKECAMFYSIRKQYISEESTLSGQQSEVPGSIPNSWKWTVEHIVYKALRSHILPPKHFTEDGNILQLANLPDLYKVFERC

SEQ ID NO: 837564 - protein, 725 aa, Homo sapiens
MSFVAGVIRRLDETVVNRIAAGEVIQRPANAIKEMIENCLDAKSTSIQVIVKEGGLKLIQIQDNGTGIRKEDLDIVCERFTTSKLQSFEDLASISTYGFRGEALASISHVAHVTITTKTADGKCAYRASYSDGKLKAPPKPCAGNQGTQITVEDLFYNIATRRKALKNPSEEYGKILEVVGRYSVHNAGISFSVKKQGETVADVRTLPNASTVDNIRSIFGNAVSRELIEIGCEDKTLAFKMNGYISNANYSVKKCIFLLFINHRLVESTSLRKAIETVYAAYLPKNTHPFLYLSLEISPQNVDVNVHPTKHEVHFLHEESILERVQQHIESKLLGSNSSRMYFTQTLLPGLAGPSGEMVKSTTSLTSSSTSGSSDKVYAHQMVRTDSREQKLDAFLQPLSKPLSSQPQAIVTEDKTDISSGRARQQDEEMLELPAPAEVAAKNQSLEGDTTKGTSEMSEKRGPTSSNPRKRHREDSDVEMVEDDSRKEMTAACTPRRRIINLTSVLSLQEEINEQGHEVLREMLHNHSFVGCVNPQWALAQHQTKLYLLNTTKLSEELFYQILIYDFANFGVLRLSEPAPLFDLAMLALDSPESGWTEEDGPKEGLAEYIVEFLKKKAEMLADYFSLEIDEVNWDEEKECFESLSKECAMFYSIRKQYISEESTLSGQQSEVPGSIPNSWKWTVEHIVYKALRSHILPPKHFTEDGNILQLANLPDLYKVFERC

SEQ ID NO: 837565 - protein, 201 aa, Homo sapiens; identical to SEQ ID NO: 837549

SEQ ID NO: 837566 - protein, 725 aa, Homo sapiens; identical to SEQ ID NO: 837564

SEQ ID NO: 837567 - protein, 646 aa, Homo sapiens
MSFVAGVIRRLDETVVNRIAAGEVIQRPANAIKEMIENCLDAKSTSIQVIVKEGGLKLIQIQDNGTGIRKEDLDIVCERFTTSKLQSFEDLASISTYGFRGEALASISHVAHVTITTKTADGKCAYRASYSDGKLKAPPKPCAGNQGTQITVEDLFYNIATRRKALKNPSEEYGKILEVVGRYSVHNAGISFSVKKQGETVADVRTLPNASTVDNIRSIFGNAVSRELIEIGCEDKTLAFKMNGYISNANYSVKKCIFLLFINHRLVESTSLRKAIETVYAAYLPKNTHPFLYLSLEISPQNVDVNVHPTKHEVHFLHEESILERVQQHIESKLLGSNSSRMYFTQTLLPGLAGPSGEMVKSTTSLTSSSTSGSSDKVYAHQMVRTDSREQKLDAFLQPLSKPLSSQPQAIVTEDKTDISSGRARQQDEEMLELPAPAEVAAKNQSLEGDTTKGTSEMSEKRGPTSSNPRKRHREDSDVEMVEDDSRKEMTAACTPRRRIINLTSVLSLQEEINEQGHEVLREMLHNHSFVGCVNPQWALAQHQTKLYLLNTTKLSEELFYQILIYDFANFGVLRLSEPAPLFDLAMLALDSPESGWTEEDGPKEGLAEYIVEFLKKKAEMLADYFSLEIDERCDSHSYTSVVFFK

SEQ ID NO: 837568 - protein, 480 aa, Homo sapiens
MSFVAGVIRRLDETVVNRIAAGEVIQRPANAIKEMIENCLDAKSTSIQVIVKEGGLKLIQIQDNGTGIRKEDLDIVCERFTTSKLQSFEDLASISTYGFRGEALASISHVAHVTITTKTADGKCAYRASYSDGKLKAPPKPCAGNQGTQITVEDLFYNIATRRKALKNPSEEYGKILEVVGRYSVHNAGISFSVKKQGETVADVRTLPNASTVDNIRSIFGNAVSRELIEIGCEDKTLAFKMNGYISNANYSVKKCIFLLFINHRLVESTSLRKAIETVYAAYLPKNTHPFLYLSLEISPQNVDVNVHPTKHEVHFLHEESILERVQQHIESKLLGSNSSRMYFTQTLLPGLAGPSGEMVKSTTSLTSSSTSGSSDKVYAHQMVRTDSREQKLDAFLQPLSKPLSSQPQAIVTEDKTDISSGRARQQDEEMLELPAPAEVAAKNQSLEGDTTKGTSEMSEKRGPTSSNPRKETFGKFLDV

SEQ ID NO: 837569 - protein, 170 aa, Homo sapiens
MSFVAGVIRRLDETVVNRIAAGEVIQRPANAIKEMIENCLDAKSTSIQVIVKEGGLKLIQIQDNGTGIRKEDLDIVCERFTTSKLQSFEDLASISTYGFRGEALASISHVAHVTITTKTADGKCAYRASYSDGKLKAPPKPCAGNQGTQITVQDLFHYIPTRSKPSTISN

SEQ ID NO: 837570 - protein, 131 aa, Homo sapiens
MLALETRASPGHTPGCVTFVLNDHSMAFTGDALLIRGCGRTDFQQGCAKTLYHSVHEKIFTLPGDCLIYPAHDYHGFTVSTVEEERTLNPRLTLSCEEFVKIMGNLNLPKPQQIDFAVPANMRCGVQTPTA

SEQ ID NO: 837571 - protein, 254 aa, Homo sapiens; identical to SEQ ID NO: 776272

SEQ ID NO: 837572 - protein, 115 aa, Homo sapiens
MKNTLSLSSLLIPFLLLNPESYPCLAKSTFPSCKGKDRNALCFKGLEKGAINFTPRGPDVLLETRIGTKQASSNGDQAQNSRWERNWEVSIWRKATRRTRTSEIPKTIHQRCNRG

SEQ ID NO: 837573 - protein, 81 aa, Homo sapiens
GLRCRRHPLGRGHVVLRALPAWPWDSDPRLPFPAPLAWPRASVSRPYSRSRLGGTGAGIGPATPSLRCAAVAAVLGYWCPV

SEQ ID NO: 837574 - protein, 513 aa, Homo sapiens
MASGSVAECLQQETTCPVCLQYFAEPMMLDCGHNICCACLARCWGTAETNVSCPQCRETFPQRHMRPNRHLANVTQLVKQLRTERPSGPGGEMGVCEKHREPLKLYCEEDQMPICVVCDRSREHRGHSVLPLEEAVEGFKEQIQNQLDHLKRVKDLKKRRRAQGEQARAELLSLTQMEREKIVWEFEQLYHSLKEHEYRLLARLEELDLAIYNSINGAITQFSCNISHLSSLIAQLEEKQQQPTRELLQDIGDTLSRAERIRIPEPWITPPDLQEKIHIFAQKCLFLTESLKQFTEKMQSDMEKIQELREAQLYSVDVTLDPDTAYPSLILSDNLRQVRYSYLQQDLPDNPERFNLFPCVLGSPCFIAGRHYWEVEVGDKAKWTIGVCEDSVCRKGGVTSAPQNGFWAVSLWYGKEYWALTSPMTALPLRTPLQRVGIFLDYDAGEVSFYNVTERCHTFTFSHATFCGPVRPYFSLSYSGGKSAAPLIICPMSGIDGFSGHVGNHGHSMETSP

SEQ ID NO: 837575 - protein, 513 aa, Homo sapiens; identical to SEQ ID NO: 837574

SEQ ID NO: 837576 - protein, 358 aa, Homo sapiens
MASGSVAECLQQETTCPVCLQYFAEPMMLDCGHNICCACLARCWGTAETNVSCPQCRETFPQRHMRPNRHLANVTQLVKQLRTERPSGPGGEMGVCEKHREPLKLYCEEDQMPICVVCDRSREHRGHSVLPLEEAVEGFKEQIQNQLDHLKRVKDLKKRRRAQGEQARAELLSLTQMEREKIVWEFEQLYHSLKEHEYRLLARLEELDLAIYNSINGAITQFSCNISHLSSLIAQLEEKQQQPTRELLQDIGDTLSRAERIRIPEPWITPPDLQEKIHIFAQKCLFLTESLKQFTEKMQSDMEKIQELREAQLYSVDVTLDPDTAYPSLILSDNLRQVRYSYLQQDLPDNPERSPSTT

SEQ ID NO: 837577 - protein, 262 aa, Homo sapiens
MFFKFRAERIRIPEPWITPPDLQEKIHIFAQKCLFLTESLKQFTEKMQSDMEKIQELREAQLYSVDVTLDPDTAYPSLILSDNLRQVRYSYLQQDLPDNPERFNLFPCVLGSPCFIAGRHYWEVEVGDKAKWTIGVCEDSVCRKGGVTSAPQNGFWAVSLWYGKEYWALTSPMTALPLRTPLQRVGIFLDYDAGEVSFYNVTERCHTFTFSHATFCGPVRPYFSLSYSGGKSAAPLIICPMSGIDGFSGHVGNHGHSMETSP

SEQ ID NO: 837578 - protein, 262 aa, Homo sapiens; identical to SEQ ID NO: 837577

SEQ ID NO: 837579 - protein, 277 aa, Homo sapiens
MTSHGYFFSFLLQDIGDTLSRAERIRIPEPWITPPDLQEKIHIFAQKCLFLTESLKQFTEKMQSDMEKIQELREAQLYSVDVTLDPDTAYPSLILSDNLRQVRYSYLQQDLPDNPERFNLFPCVLGSPCFIAGRHYWEVEVGDKAKWTIGVCEDSVCRKGGVTSAPQNGFWAVSLWYGKEYWALTSPMTALPLRTPLQRVGIFLDYDAGEVSFYNVTERCHTFTFSHATFCGPVRPYFSLSYSGGKSAAPLIICPMSGIDGFSGHVGNHGHSMETSP

SEQ ID NO: 837580 - protein, 354 aa, Homo sapiens
MASGSVAECLQQETTCPVCLQYFAEPMMLDCGHNICCACLARCWGTAETNVSCPQCRETFPQRHMRPNRHLANVTQLVKQLRTERPSGPGGEMGVCEKHREPLKLYCEEDQMPICVVCDRSREHRGHSVLPLEEAVEGFKEQIQNQLDHLKRVKDLKKRRRAQGEQARAELLSLTQMEREKIVWEFEQLYHSLKEHEYRLLARLEELDLAIYNSINGAITQFSCNISHLSSLIAQLEEKQQQPTRELLQDIGDTLSRAERIRIPEPWITPPDLQEKIHIFAQKCLFLTESLKQFTEKMQSDMEKIQELREAQLYSVDVTLDPDTAYPSLILSDNLRQVRYSYLQQDLPDNPERL

SEQ ID NO: 837581 - protein, 263 aa, Homo sapiens [sequence omitted]

SEQ ID NO: 837582 - protein, 513 aa, Homo sapiens; identical to SEQ ID NO: 837574

SEQ ID NO: 837583 - protein, 513 aa, Homo sapiens; identical to SEQ ID NO: 837574

SEQ ID NO: 837584 - protein, 537 aa, Homo sapiens
MASGSVAECLQQETTCPVCLQYFAEPMMLDCGHNICCACLARCWGTAETNVSCPQCRETFPQRHMRPNRHLANVTQLVKQLRTERPSGPGGEMGVCEKHREPLKLYCEEDQMPICVVCDRSREHRGHSVLPLEEAVEGFKEQIQNQLDHLKRVKDLKKRRRAQGEQARAELLSLTQMEREKIVWEFEQLYHSLKEHEYRLLARLEELDLAIYNSINGAITQFSCNISHLSSLIAQLEEKQQQPTRELLQDIGDTLSRAERIRIPEPWITPPDLQEKIHIFAQKCLFLTESLKQFTEKMQSDMEKIQESADSLEGGILDLGSVLSHILPVSELREAQLYSVDVTLDPDTAYPSLILSDNLRQVRYSYLQQDLPDNPERFNLFPCVLGSPCFIAGRHYWEVEVGDKAKWTIGVCEDSVCRKGGVTSAPQNGFWAVSLWYGKEYWALTSPMTALPLRTPLQRVGIFLDYDAGEVSFYNVTERCHTFTFSHATFCGPVRPYFSLSYSGGKSAAPLIICPMSGIDGFSGHVGNHGHSMETSP

SEQ ID NO: 837585 - protein, 450 aa, Homo sapiens
KSLRGSRQSVVTQLVKQLRTERPSGPGGEMGVCEKHREPLKLYCEEDQMPICVVCDRSREHRGHSVLPLEEAVEGFKEQIQNQLDHLKRVKDLKKRRRAQGEQARAELLSLTQMEREKIVWEFEQLYHSLKEHEYRLLARLEELDLAIYNSINGAITQFSCNISHLSSLIAQLEEKQQQPTRELLQDIGDTLSRAERIRIPEPWITPPDLQEKIHIFAQKCLFLTESLKQFTEKMQSDMEKIQELREAQLYSVDVTLDPDTAYPSLILSDNLRQVRYSYLQQDLPDNPERFNLFPCVLGSPCFIAGRHYWEVEVGDKAKWTIGVCEDSVCRKGGVTSAPQNGFWAVSLWYGKEYWALTSPMTALPLRTPLQRVGIFLDYDAGEVSFYNVTERCHTFTFSHATFCGPVRPYFSLSYSGGKSAAPLIICPMSGIDGFSGHVGNHGHSMETSP

SEQ ID NO: 837586 - protein, 262 aa, Homo sapiens; identical to SEQ ID NO: 837577

SEQ ID NO: 837587 - protein, 242 aa, Homo sapiens
MFFKFRAERIRIPEPWITPPDLQEKIHIFAQKCLFLTESLKQFTVDVTLDPDTAYPSLILSDNLRQVRYSYLQQDLPDNPERFNLFPCVLGSPCFIAGRHYWEVEVGDKAKWTIGVCEDSVCRKGGVTSAPQNGFWAVSLWYGKEYWALTSPMTALPLRTPLQRVGIFLDYDAGEVSFYNVTERCHTFTFSHATFCGPVRPYFSLSYSGGKSAAPLIICPMSGIDGFSGHVGNHGHSMETSP

SEQ ID NO: 837588 - protein, 173 aa, Homo sapiens
  misc_feature (30)..(30): Xaa can be any naturally occurring amino acid
HNHGFSHGVLIPIGGLLHKCLSILPRGNGXHYWEVEVGDKAKWTIGVCEDSVCRKGGVTSAPQNGFWAVSLWYGKEYWALTSPMTALPLRTPLQRVGIFLDYDAGEVSFYNVTERCHTFTFSHATFCGPVRPYFSLSYSGGKSAAPLIICPMSGIDGFSGHVGNHGHSMETSP

SEQ ID NO: 837589 - protein, 69 aa, Homo sapiens
GSTTTPTCCPATRACCCGTPTATLGLGDGSPCGCQAKAVTGALTPGHTDGHGPTWEGEQEQGCACLGPL

SEQ ID NO: 837590 - protein, 69 aa, Homo sapiens; identical to SEQ ID NO: 837589

SEQ ID NO: 837591 - protein, 400 aa, Homo sapiens
MGKNPVRPPRALPPVPSQDDIPLSRPKKKKPRTKNTPASASLEGLAQTAGRRPSEGNEPSTKELKEHPEAPVQRRQKKTRLPLELETSSTQKKSSSSSLLRNENGIDAEPAEEAVIQKPRRKTKKTQPAELQYANELGVEDEDIITDEQTTVEQQSVFTAPTGISQPVGKVFVEKSRRFQAADRSELIKTTENIDVSMDVKPSWTTRDVALTVHRAFRMIGLFSHGFLAGCAVWNIVVIYVLAGDQLSNLSNLLQQYKTLAYPFQSLLYLLLALSTISAFDRIDFAKISVAIRNFLALDPTALASFLYFTALILSLSQQMTSDRIHLYTPSSVNGSLWEAGIEEQILQPWIVVNLVVALLVGLSWLFLSYRPGMDLSEELMFSSEVEEYPDKEKEIKASS

SEQ ID NO: 837592 - protein, 74 aa, Homo sapiens
SSVTPRFPQTNHRHHLGNHGKAVIAAPRSPDFCSWAHYPQLRGPLFGRASLDWPIQVPARLSPQHPRRALRAGY

SEQ ID NO: 837593 - protein, 440 aa, Homo sapiens
PGVPQVPEAAASRGAGLGPPAVAPGQPRGESTMRTDSGARLEEGHLRPPRALPPVPSQDDIPLSRPKKKKPRTKNTPASASLEGLAQTAGRRPSEGNEPSTKELKEHPEAPVQRRQKKTRLPLELETSSTQKKSSSSSLLRNENGIDAEPAEEAVIQKPRRKTKKTQPAELQYANELGVEDEDIITDEQTTVEQQSVFTAPTGISQPVGKVFVEKSRRFQAADRSELIKTTENIDVSMDVKPSWTTRDVALTVHRAFRMIGLFSHGFLAGCAVWNIVVIYVLAGDQLSNLSNLLQQYKTLAYPFQSLLYLLLALSTISAFDRIDFAKISVAIRNFLALDPTALASFLYFTALILSLSQQMTSDRIHLYTPSSVNGSLWEAGIEEQILQPWIVVNLVVALLVGLSWLFLSYRPGMDLSEELMFSSEVEEYPDKEKEIKASS

SEQ ID NO: 837594 - protein, 400 aa, Homo sapiens; identical to SEQ ID NO: 837591

SEQ ID NO: 837595 - protein, 471 aa, Homo sapiens
PGVPQVPEAAASRGAGLGPPAVAPGQPRGESTMRTDSGARLEEGHLRPPRALPPVPSQDDIPLSRPKKKKPRTKNTPASASLEGLAQTAGRRPSEGNEPSTKELKEHPEAPVQRRQKKTRLPLENGVSGLDGRIIGVEGQELEKSGEWSIILEGKLETSSTQKKSSSSSLLRNENGIDAEPAEEAVIQKPRRKTKKTQPAELQYANELGVEDEDIITDEQTTVEQQSVFTAPTGISQPVGKVFVEKSRRFQAADRSELIKTTENIDVSMDVKPSWTTRDVALTVHRAFRMIGLFSHGFLAGCAVWNIVVIYVLAGDQLSNLSNLLQQYKTLAYPFQSLLYLLLALSTISAFDRIDFAKISVAIRNFLALDPTALASFLYFTALILSLSQQMTSDRIHLYTPSSVNGSLWEAGIEEQILQPWIVVNLVVALLVGLSWLFLSYRPGMDLSEELMFSSEVEEYPDKEKEIKASS

SEQ ID NO: 837596 - protein, 350 aa, Homo sapiens
MEPSEGNEPSTKELKEHPEAPVQRRQKKTRLPLELETSSTQKKSSSSSLLRNENGIDAEPAEEAVIQKPRRKTKKTQPAELQYANELGVEDEDIITDEQTTVEQQSVFTAPTGISQPVGKVFVEKSRRFQAADRSELIKTTENIDVSMDVKPSWTTRDVALTVHRAFRMIGLFSHGFLAGCAVWNIVVIYVLAGDQLSNLSNLLQQYKTLAYPFQSLLYLLLALSTISAFDRIDFAKISVAIRNFLALDPTALASFLYFTALILSLSQQMTSDRIHLYTPSSVNGSLWEAGIEEQILQPWIVVNLVVALLVGLSWLFLSYRPGMDLSEELMFSSEVEEYPDKEKEIKASS

SEQ ID NO: 837597 - protein, 453 aa, Homo sapiens
PGVPQVPEAAASRGAGLGPPAVAPGQPRGESTMRTDSGARLEEGHLVSGEGRVGLERWRRPPRALPPVPSQDDIPLSRPKKKKPRTKNTPASASLEGLAQTAGRRPSEGNEPSTKELKEHPEAPVQRRQKKTRLPLELETSSTQKKSSSSSLLRNENGIDAEPAEEAVIQKPRRKTKKTQPAELQYANELGVEDEDIITDEQTTVEQQSVFTAPTGISQPVGKVFVEKSRRFQAADRSELIKTTENIDVSMDVKPSWTTRDVALTVHRAFRMIGLFSHGFLAGCAVWNIVVIYVLAGDQLSNLSNLLQQYKTLAYPFQSLLYLLLALSTISAFDRIDFAKISVAIRNFLALDPTALASFLYFTALILSLSQQMTSDRIHLYTPSSVNGSLWEAGIEEQILQPWIVVNLVVALLVGLSWLFLSYRPGMDLSEELMFSSEVEEYPDKEKEIKASS

SEQ ID NO: 837598 - protein, 410 aa, Homo sapiens
  misc_feature (6)..(6): Xaa can be any naturally occurring amino acid
ATAERXSYCRMGKNPVRPPRALPPVPSQDDIPLSRPKKKKPRTKNTPASASLEGLAQTAGRRPSEGNEPSTKELKEHPEAPVQRRQKKTRLPLELETSSTQKKSSSSSLLRNENGIDAEPAEEAVIQKPRRKTKKTQPAELQYANELGVEDEDIITDEQTTVEQQSVFTAPTGISQPVGKVFVEKSRRFQAADRSELIKTTENIDVSMDVKPSWTTRDVALTVHRAFRMIGLFSHGFLAGCAVWNIVVIYVLAGDQLSNLSNLLQQYKTLAYPFQSLLYLLLALSTISAFDRIDFAKISVAIRNFLALDPTALASFLYFTALILSLSQQMTSDRIHLYTPSSVNGSLWEAGIEEQILQPWIVVNLVVALLVGLSWLFLSYRPGMDLSEELMFSSEVEEYPDKEKEIKASS

SEQ ID NO: 837599 - protein, 319 aa, Homo sapiens
MAKLETSSTQKKSSSSSLLRNENGIDAEPAEEAVIQKPRRKTKKTQPAELQYANELGVEDEDIITDEQTTVEQQSVFTAPTGISQPVGKVFVEKSRRFQAADRSELIKTTENIDVSMDVKPSWTTRDVALTVHRAFRMIGLFSHGFLAGCAVWNIVVIYVLAGDQLSNLSNLLQQYKTLAYPFQSLLYLLLALSTISAFDRIDFAKISVAIRNFLALDPTALASFLYFTALILSLSQQMTSDRIHLYTPSSVNGSLWEAGIEEQILQPWIVVNLVVALLVGLSWLFLSYRPGMDLSEELMFSSEVEEYPDKEKEIKASS

SEQ ID NO: 837600 - protein, 321 aa, Homo sapiens
MGKNPVRPPRALPPVPSQDDIPLSRPKKKKPRTKNTPASASLEGLAQTAGRRPSEGNEPSTKELKEHPEAPVQRRQKKTRLPLELETSSTQKKSSSSSLLRNENGIDAEPAEEAVIQKPRRKTKKTQPAELQYANELGVEDEDIITDEQTTVEQQSVFTAPTGISQPVGKVFVEKSRRFQAADRSELIKTTENIDVSMDVKPSWTTRDVALTVHRAFRMIGLFSHGFLAGCAVWNIVVIYVLAGDQLSNLSNLLQQYKTLAYPFQSLLYLLLALSTISAFDRIDFAKISVAIRNFLALDPTALASFWKQELRNRFSSHGLW

SEQ ID NO: 837601 - protein, 66 aa, Homo sapiens
IQSNILSTSVVDFNLATDGLGSQPDASMNPVITRFPSLSKLLNSSNLTDAPSSPWTNWLGVLKEAG

SEQ ID NO: 837602 - protein, 265 aa, Homo sapiens
MEEIGILVEKAQDEIPALSVSRPQTGLSFLGPEPEDLEDLYSRYKKLQQELEFLEVQEEYIKDEQKNLKKEFLHAQEEVKRIQSIPLVIGQFLEAVDQNTAIVGSTTGSNYYVRILSTIDRELLKPNASVALHKHSNALVDVLPPEADSSIMMLTSDQKPDVMYADIGGMDIQKQEVREAVELPLTHFELYKQIGIDPPRGVLMYGPPGCGKTMLAKAVAHHTTGCIHPGRGLGVCTESILGEGPPHGPGCVPPGQGECTWPSSS

SEQ ID NO: 837603 - protein, 286 aa, Homo sapiens
NVARYEAWLIIGRGTEAGLVTMEEIGILVEKAQDEIPALSVSRPQTGLSFLGPEPEDLEDLYSRYKKLQQELEFLEVQEEYIKDEQKNLKKEFLHAQEEVKRIQSIPLVIGQFLEAVDQNTAIVGSTTGSNYYVRILSTIDRELLKPNASVALHKHSNALVDVLPPEADSSIMMLTSDQKPDVMYADIGGMDIQKQEVREAVELPLTHFELYKQIGIDPPRGVLMYGPPGCGKTMLAKAVAHHTTGCIHPGRGLGVCTESILGEGPPHGPGCVPPGQGECTWPSSS

SEQ ID NO: 837604 - protein, 265 aa, Homo sapiens; identical to SEQ ID NO: 837602

SEQ ID NO: 837605 - protein, 276 aa, Homo sapiens
HTLVRACAENRPREIGILVEKAQDEIPALSVSRPQTGLSFLGPEPEDLEDLYSRYKKLQQELEFLEVQEEYIKDEQKNLKKEFLHAQEEVKRIQSIPLVIGQFLEAVDQNTAIVGSTTGSNYYVRILSTIDRELLKPNASVALHKHSNALVDVLPPEADSSIMMLTSDQKPDVMYADIGGMDIQKQEVREAVELPLTHFELYKQIGIDPPRGVLMYGPPGCGKTMLAKAVAHHTTGCIHPGRGLGVCTESILGEGPPHGPGCVPPGQGECTWPSSS

SEQ ID NO: 837606 - protein, 265 aa, Homo sapiens; identical to SEQ ID NO: 837602

SEQ ID NO: 837607 - protein, 265 aa, Homo sapiens; identical to SEQ ID NO: 837602

SEQ ID NO: 837608 - protein, 265 aa, Homo sapiens; identical to SEQ ID NO: 837602

SEQ ID NO: 837609 - protein, 255 aa, Homo sapiens
MVARYEAWLIIGRGTEAGLVTMEEIGILVEKAQDEIPALSVSRPQTGLSFLGPEPEDLEDLYSRYKEEVKRIQSIPLVIGQFLEAVDQNTAIVGSTTGSNYYVRILSTIDRELLKPNASVALHKHSNALVDVLPPEADSSIMMLTSDQKPDVMYADIGGMDIQKQEVREAVELPLTHFELYKQIGIDPPRGVLMYGPPGCGKTMLAKAVAHHTTGCIHPGRGLGVCTESILGEGPPHGPGCVPPGQGECTWPSSS

SEQ ID NO: 837610 - protein, 217 aa, Homo sapiens
MEEIGILVEKAQDEIPALSVSRPQTGLSFLGPEPEDLEDLYSRYKKLQQELEFLEVQEEYIKDEQKILSTIDRELLKPNASVALHKHSNALVDVLPPEADSSIMMLTSDQKPDVMYADIGGMDIQKQEVREAVELPLTHFELYKQIGIDPPRGVLMYGPPGCGKTMLAKAVAHHTTGCIHPGRGLGVCTESILGEGPPHGPGCVPPGQGECTWPSSS

SEQ ID NO: 837611 - protein, 293 aa, Homo sapiens
MEEIGILVEKAQDEIPALSVSRPQTGLSFLGPEPEDLEDLYSRYKKLQQELEFLEVQEEYIKDEQKNLKKEFLHAQEEVKRIQSIPLVIGQFLEAVDQNTAIVGSTTGSNYYVRILSTIDRELLKPNASVALHKHSNALVDVLPPEADSSIMMLTSGKGGACSWEGPMGTLRTWPGAPALLLPPDQKPDVMYADIGGMDIQKQEVREAVELPLTHFELYKQIGIDPPRGVLMYGPPGCGKTMLAKAVAHHTTGCIHPGRGLGVCTESILGEGPPHGPGCVPPGQGECTWPSSS

SEQ ID NO: 837612 - protein, 187 aa, Homo sapiens
MCSAWPRRMHLAIIFIDEIDAIATKRFDAQTGADREVQRILLELLNQMDGFDQNVNVKVIMATNRADTLDPALLRPGRLDRKIEFPLPDRRQKRLIFSTITSKMNLSEEVDLEDYVARPDKISGADINSICQESGTGGCPVKPYIVLGRLRKAIRLAHEGAHGLISVTFPLPNIGWVFPPLSNLPFF

SEQ ID NO: 837613 - protein, 135 aa, Homo sapiens
MEEIGILVEKAQDEIPALSVSRPQTGLSFLGPEPEDLEDLYSRYKKLQQELEFLEVQEEYIKDEQKNLKKEFLHAQEEVKRIQSIPLVIGQFLEAVDQNTAIVGSTTGVLRTPHSFICPLNNYFLPCARQQQTRQ

SEQ ID NO: 837614 - protein, 170 aa, Homo sapiens
  misc_feature (5)..(5): Xaa can be any naturally occurring amino acid
  misc_feature (8)..(8): Xaa can be any naturally occurring amino acid
  misc_feature (31)..(31): Xaa can be any naturally occurring amino acid
  misc_feature (39)..(39): Xaa can be any naturally occurring amino acid
VGPLXGFXPAKRSLLILKRSCSFPPKKSFLXKGPQEVEXILLDLLNEDGGFDQDFNFKVIMATNRADTLDPALLRPGRLDRKIEFPLPDRRQKRLIFSTITSKMNLSEEVDLEDYVARPDKISGADINSICQESGMLAVRENRYIVLAKDFEKAYKTVIKKDEQEHEFYK

SEQ ID NO: 837615 - protein, 265 aa, Homo sapiens; identical to SEQ ID NO: 837602

SEQ ID NO: 837616 - protein, 265 aa, Homo sapiens; identical to SEQ ID NO: 837602

SEQ ID NO: 837617 - protein, 265 aa, Homo sapiens; identical to SEQ ID NO: 837602

SEQ ID NO: 837618 - protein, 265 aa, Homo sapiens; identical to SEQ ID NO: 837602

SEQ ID NO: 837619 - protein, 265 aa, Homo sapiens; identical to SEQ ID NO: 837602

SEQ ID NO: 837620 - protein, 265 aa, Homo sapiens; identical to SEQ ID NO: 837602

SEQ ID NO: 837621 - protein, 265 aa, Homo sapiens; identical to SEQ ID NO: 837602

SEQ ID NO: 837622 - protein, 170 aa, Homo sapiens
MCSAWPRRMHLAIIFIDEIDAIATKRFDAQTGADREVQRILLELLNQMDGFDQNVNVKVIMATNRADTLDPALLRPGRLDRKIEFPLPDRRQKRLIFSTITSKMNLSEEVDLEDYVARPDKISGADINSICQESGMLAVRENRYIVLAKDFEKAYKTVIKKDEQEHEFYK

SEQ ID NO: 837623 - protein, 178 aa, Homo sapiens
RQGDGVNRTRQNQPFVGSTTGSNYYVRILSTIDRELLKPNASVALHKHSNALVDVLPPEADSSIMMLTSDQKPDVMYADIGGMDIQKQEVREAVELPLTHFELYKQIGIDPPRGVLMYGPPGCGKTMLAKAVAHHTTGCIHPGRGLGVCTESILGEGPPHGPGCVPPGQGECTWPSSS

SEQ ID NO: 837624 - protein, 786 aa, Homo sapiens
GRWRRCRRPPEEPPVAAQVAAQVAAPVALPSPPTPSDGGTKRPGLRALKKMGLTEDEDVRAMLRGSRLRKIRSRTWHKERLYRLQEDGLSVWFQRRIPRAPSQHIFFVQHIEAVREGHQSEGLRRFGGAFAPARCLTIAFKGRRKNLDLAAPTAEEAQRWVRGLTKLRARLDAMSQRERLDHWIHSYLHRADSNQDSKMSFKEIKSLLRMVNVDMNDMYAYLLFKECDHSNNDRLEGAEIEEFLRRLLKRPELEEIFHQYSGEDRVLSAPELLEFLEDQGEEGATLARAQQLIQTYELNETAKQHELMTLDGFMMYLLSPEGAALDNTHTCVFQDMNQPLAHYFISSSHNTYLTDSQIGGPSSTEAYVRAFAQGCRCVELDCWEGPGGEPVIYHGHTLTSKILFRDVVQAVRDHAFTLSPYPVILSLENHCGLEQQAAMARHLCTILGDMLVTQALDSPNPEELPSPEQLKGRVLVKGKKLPAARSEDGRALSDREEEEEDDEEEEEEVEAAAQRRLAKQISPELSALAVYCHATRLRTLHPAPNAPQPCQVSSLSERKAKKLIREAGNSFVRHNARQLTRVYPLGLRMNSANYSPQEMWNSGCQLVALNFQTPGYEMDLNAGRFLVNGQCGYVLKPACLRQPDSTFDPEYPGPPRTTLSIQVLTAQQLPKLNAEKPHSIVDPLVRIEIHGVPADCARQETDYVLNNGFNPRWGQTLQFQLRAPELALVRFVVEDYDATSPNDFVGQFTLPLSSLKQGYRHIHLLSKDGASLSPATLFIQIRIQRS

SEQ ID NO: 837625 - protein, 770 aa, Homo sapiens
GRWRRCRRPPEEPPVAAQVAAQVAAPVALPSPPTPSDGGTKRPGLRALKKMGLTEDEDVRAMLRGSRLRKIRSRTWHKERLYRLQEDGLSVWFQRRIPRAPSQHIFFVQHIEAVREGHQSEGLRRFGGAFAPARCLTIAFKGRRKNLDLAAPTAEEAQRWVRGLTKLRARLDAMSQRERLDHWIHSYLHRADSNQDSKMSFKEIKSLLRMVNVDMNDMYAYLLFKECDHSNNDRLEGAEIEEFLRRLLKRPELEEIFHQYSGEDRVLSAPELLEFLEDQGEEGATLARAQQLIQTYELNETAKQHELMTLDGFMMYLLSPEGAALDNTHTCVFQDMNQPLAHYFISSSHNTYLTDSQIGGPSSTEAYVRAFAQGCRCVELDCWEGPGGEPVIYHGHTLTSKILFRDVVQAVRDHAFTLSPYPVILSLENHCGLEQQAAMARHLCTILGDMLVTQALDSPNPEELPSPEQLKGRVLVKGKKLPAARSEDGRALSDREEEEEDDEEEEEEVEAAAQRRLAKQISPELSALAVYLPRHPPADPAPCPQRPTTLPGNSFVRHNARQLTRVYPLGLRMNSANYSPQEMWNSGCQLVALNFQTPGYEMDLNAGRFLVNGQCGYVLKPACLRQPDSTFDPEYPGPPRTTLSIQVLTAQQLPKLNAEKPHSIVDPLVRIEIHGVPADCARQETDYVLNNGFNPRWGQTLQFQLRAPELALVRFVVEDYDATSPNDFVGQFTLPLSSLKQGYRHIHLLSKDGASLSPATLFIQIRIQRS

SEQ ID NO: 837626 - protein, 786 aa, Homo sapiens; identical to SEQ ID NO: 837624

SEQ ID NO: 837627 - protein, 786 aa, Homo sapiens; identical to SEQ ID NO: 837624

SEQ ID NO: 837628 - protein, 736 aa, Homo sapiens
GRWRRCRRPPEEPPVAAQVAAQVAAPVALPSPPTPSDGGTKRPGLRALKKMGLTEDEDVRAMLRGSRLRKIRSRTWHKERLYRLQEDGLSVWFQRRIPRAPSQHIFFVQHIEAVREGHQSEGLRRFGGAFAPARCLTIAFKGRRKNLDLAAPTAEEAQRWVRGLTKLRARLDAMSQRERLDHWIHSYLHRADSNQDSKMSFKEIKSLLRMVNVDMNDMYAYLLFKECDHSNNDRLEGAEIEEFLRRLLKRPELEEIFHQYSGEDRVLSAPELLEFLEDQGEEGATLARAQQLIQTYELNETAKQHELMTLDGFMMYLLSPEGAALDNTHTCVFQDMNQPLAHYFISSSHNTYLTDSQIGGPSSTEAYVRAFAQGCRCVELDCWEGPGGEPVIYHGHTLTSKILFRDVVQAVRDHAFTLSPYPVILSLENHCGLEQQAAMARHLCTILGDMLVTQALDSPNPEELPSPEQLKGRVLVKGKKLPAARSEDGRALSDREEEEEDDEEEEEEVEAAAQRRLAKQISPELSALAVYCHATRLRTLHPAPNAPQPCQVSSLSERKAKKLIREAGNSFVRHNARQLTRVYPLGLRMNSANYSPQEMWNSGCQLVALNFQTPGYEMDLNAGRFLVNGQCGYVLKPACLRQPDSTFDPEYPGPPRTTLSIQVLTAQQLPKLNAEKPHSIVDPLVRIEIHGVPADCARQETDYVLNNGYRHIHLLSKDGASLSPATLFIQIRIQRS

SEQ ID NO: 837629 - protein, 901 aa, Homo sapiens
GRWRRCRRPPEEPPVAAQVAAQVAAPVALPSPPTPSDGGTKRPGLRALKKMGLTEDEDVRAMLRGSRLRKIRSRTWHKERLYRLQEDGLSVWFQRRIPRAPSQHIFFVQHIEAVREGHQSEGLRRFGGAFAPARCLTIAFKGRRKNLDLAAPTAEEAQRWVRGLTKLRARLDAMSQRERLDHWIHSYLHRADSNQDSKMSFKEIKSLLRMVNVDMNDMYAYLLFKECDHSNNDRLEGAEIEEFLRRLLKRPELEEIFHQYSGEDRVLSAPELLEFLEDQGEEGATLARAQQLIQTYELNETAKQHELMTLDGFMMYLLSPEGAALDNTHTCVFQDMNQPLAHYFISSSHNTYLTDSQIGGPSSTEAYVRAFAQGCRCVELDCWEGPGGEPVIYHGHTLTSKILFRDVVQAVRDHAFTLSPYPVILSLENHCGLEQQAAMARHLCTILGDMLVTQALDSPNPEELPSPEQLKGRVLVKGKKLPAARSEDGRALSDREEEEEDDEEEEEEVEAAAQRRLAKQISPELSALAVYCHATRLRTLHPAPNAPQPCQVSSLSERKAKKLIREAGNSFVRHNARQLTRVYPLGLRMNSANYSPQEMWNSGCQLVALNFQTPGYEMDLNAGRFLVNGQCGYVLKPACLRQPDSTFDPEYPGPPRTTLSIQVLTAQQLPKLNAEKPHSIVDPLVRIEIHGVPADCARQETDYVLNNGFNPRWGQTLQFQLRAPELALVRFVVEDYDATSPNDFVGQFTLPLSSLKQGYRHIHLLSKDGASLSPATLFIQIRIQRSLSSPLSSRGPSQPPSPRGAQSLHLAPTPSLAPKPSFTPGLPGLLPPAPEPELPFPSQSKKGALRHEALGKLAVGFGFYFLRQGLAPSPRLECNVAIMAHCSFELPGSSDPPISAS

SEQ ID NO: 837630 - protein, 374 aa, Homo sapiens
GRWRRCRRPPEEPPVAAQVAAQVAAPVALPSPPTPSDGGTKRPGLRALKKMGLTEDEDVRAMLRGSRLRKIRSRTWHKERLYRLQEDGLSVWFQRRIPRAPSQHIFFVQHIEAVREGHQSEGLRRFGGAFAPARCLTIAFKGRRKNLDLAAPTAEEAQRWVRGLTKLRARLDAMSQRERLDHWIHSYLHRADSNQDSKMSFKEIKSLLRMVNVDMNDMYAYLLFKECDHSNNDRLEGAEIEEFLRRLLKRPELEEIFHQYSGEDRVLSAPELLEFLEDQGEEGATLARAQQLIQTYELNETAKQHELMTLDGFMMYLLSPEGAALDNTHTCVFQDMNQPLAHYFISSSHNTYLTDSQIGGPSSTEAYVRYCSRG

SEQ ID NO: 837631 - protein, 818 aa, Homo sapiens
GRWRRCRRPPEEPPVAAQVAAQVAAPVALPSPPTPSDGGTKRPGLRALKKMGLTEDEDVRAMLRGSRLRKIRSRTWHKERLYRLQEDGLSVWFQRRIPRAPSQHIFFVQHIEAVREGHQSEGLRRFGGAFAPARCLTIAFKGRRKNLDLAAPTAEEAQRWVRGLTKLRARLDAMSQRERLDHWIHSYLHRADSNQDSKMSFKEIKSLLRMVNVDMNDMYAYLLFKECDHSNNDRLEGAEIEEFLRRLLKRPELEEIFHQYSGEDRVLSAPELLEFLEDQGEEGATLARAQQLIQTYELNETAKQHELMTLDGFMMYLLSPEGAALDNTHTCVFQDMNQPLAHYFISSSHNTYLTDSQIGGPSSTEAYVRAFAQGCRCVELDCWEGPGGEPVIYHGHTLTSKILFRDVVQAVRDHAFTLSPYPVILSLENHCGLEQQAAMARHLCTILGDMLVTQALDSPNPEELPSPEPAPHKAVVEELTDWLPQGREGLTLHPPRWPPQQLKGRVLVKGKKLPAARSEDGRALSDREEEEEDDEEEEEEVEAAAQRRLAKQISPELSALAVYCHATRLRTLHPAPNAPQPCQVSSLSERKAKKLIREAGNSFVRHNARQLTRVYPLGLRMNSANYSPQEMWNSGCQLVALNFQTPGYEMDLNAGRFLVNGQCGYVLKPACLRQPDSTFDPEYPGPPRTTLSIQVLTAQQLPKLNAEKPHSIVDPLVRIEIHGVPADCARQETDYVLNNGFNPRWGQTLQFQLRAPELALVRFVVEDYDATSPNDFVGQFTLPLSSLKQGYRHIHLLSKDGASLSPATLFIQIRIQRS

SEQ ID NO: 837632 - protein, 753 aa, Homo sapiens
GRWRRCRRPPEEPPVAAQVAAQVAAPVALPSPPTPSDGGTKRPGLRALKKMGLTEDEDVRAMLRGSRLRKIRSRTWHKERLYRLQEDGLSVWFQRRIPRAPSQHIFFVQHIEAVREGHQSEGLRRFGGAFAPARCLTIAFKGRRKNLDLAAPTAEEAQRWVRGLTKLRARLDAMSQRERLDHWIHSYLHRADSNQDSKMSFKEIKSLLRMVNVDMNDMYAYLLFKECDHSNNDRLEGAEIEEFLRRLLKRPELEEIFHQYSGEDRVLSAPELLEFLEDQGEEGATLARAQQLIQTYELNETGHEPAPCPLLHLFLPQTYLTDSQIGGPSSTEAYVRAFAQGCRCVELDCWEGPGGEPVIYHGHTLTSKILFRDVVQAVRDHAFTLSPYPVILSLENHCGLEQQAAMARHLCTILGDMLVTQALDSPNPEELPSPEQLKGRVLVKGKKLPAARSEDGRALSDREEEEEDDEEEEEEVEAAAQRRLAKQISPELSALAVYCHATRLRTLHPAPNAPQPCQVSSLSERKAKKLIREAGNSFVRHNARQLTRVYPLGLRMNSANYSPQEMWNSGCQLVALNFQTPGYEMDLNAGRFLVNGQCGYVLKPACLRQPDSTFDPEYPGPPRTTLSIQVLTAQQLPKLNAEKPHSIVDPLVRIEIHGVPADCARQETDYVLNNGFNPRWGQTLQFQLRAPELALVRFVVEDYDATSPNDFVGQFTLPLSSLKQGYRHIHLLSKDGASLSPATLFIQIRIQRS

SEQ ID NO: 837633 - protein, 219 aa, Homo sapiens
MKARGYWRGRQLTRVYPLGLRMNSANYSPQEMWNSGCQLVALNFQTPGYEMDLNAGRFLVNGQCGYVLKPACLRQPDSTFDPEYPGPPRTTLSIQVLTAQQLPKLNAEKPHSIVDPLVRIEIHGVPADCARQETDYVLNNGFNPRWGQTLQFQLRAPELALVRFVVEDYDATSPNDFVGQFTLPLSSLKQGYRHIHLLSKDGASLSPATLFIQIRIQRS

SEQ ID NO: 837634 - protein, 149 aa, Homo sapiens [sequence omitted]

SEQ ID NO: 837635 - protein, 103 aa, Homo sapiens
RLQFVPFQFYSDIARSDYAARSDYAARSDYAARSDYAARSDYAARSDYAARSDSRLIPHTSSKDSYWEKPYHCNRCGKTFYDCTDFSQHPGTFIRERVFEYHH

SEQ ID NO: 837636 - protein, 434 aa, Homo sapiens
ITQKQVSTEGDLYECDSHGPVTDALIREEKNSYKCEECGKVFKKNALLVQHERIHTQVKPYECTECGKTFSKSTHLLQHLIIHTGEKPYKCMECGKAFNRRSHLTRHQRIHSGEKPYKCSECGKAFTHRSTFVLHHRSHTGEKPFVCKECGKAFRDRPGFIRHYIIHTGEKPYECIECGKAFNRRSYLTWHQQIHTGVKPFECNECGKAFCESADLIQHYIIHTGEKPYKCMECGKAFNRRSHLKQHQRIHTGEKPYECSECGKAFTHCSTFVLHKRTHTGEKPYECKECGKAFSDRADLIRHFSIHTGEKPYECVECGKAFNRSSHLTRHQQIHTGEKPYECIQCGKAFCRSANLIRHSIIHTGEKPYECSECGKAFNRGSSLTHHQRIHTGRNPTIVTDVGRPFMTAQTSVNIQELLLGKEFLNITTEENLW

SEQ ID NO: 837637 - protein, 207 aa, Homo sapiens
MKWVWALLLLAALGSGRAERDCRVSSFRVKENFDKARFSGTWYAMAKKDPEGLFLQDNIVAEFSVDETGQMSATAKGRVRLLNNWDVCADMVGTFTDTEDPAKFKMKYWGVASFLQKGNDDHWIVDTDYDTYAVQYSCRLLNLDGTCAGQLLLRVFPGPQRPAPRSAEDCKAAAGGAVPGQAVQADRPQRLLRWQIRKKPFVAISRI

SEQ ID NO: 837638 - protein, 207 aa, Homo sapiens; identical to SEQ ID NO: 837637

SEQ ID NO: 837639 - protein, 213 aa, Homo sapiens
LFFCVLSCLLFTASCSLMLGSGRAERDCRVSSFRVKENFDKARFSGTWYAMAKKDPEGLFLQDNIVAEFSVDETGQMSATAKGRVRLLNNWDVCADMVGTFTDTEDPAKFKMKYWGVASFLQKGNDDHWIVDTDYDTYAVQYSCRLLNLDGTCAGQLLLRVFPGPQRPAPRSAEDCKAAAGGAVPGQAVQADRPQRLLRWQIRKKPFVAISRI

SEQ ID NO: 837640 - protein, 205 aa, Homo sapiens
MNYSKIPAQVDLRRQAERDCRVSSFRVKENFDKARFSGTWYAMAKKDPEGLFLQDNIVAEFSVDETGQMSATAKGRVRLLNNWDVCADMVGTFTDTEDPAKFKMKYWGVASFLQKGNDDHWIVDTDYDTYAVQYSCRLLNLDGTCAGQLLLRVFPGPQRPAPRSAEDCKAAAGGAVPGQAVQADRPQRLLRWQIRKKPFVAISRI

SEQ ID NO: 837641 - protein, 215 aa, Homo sapiens
PGLQDSARARTLRADLRAGPLSGGGFLGKMKWVWALLLLAALGSGRAERDCRVSSFRVKENFDKARFSGTWYAMAKKDPEGLFLQDNIVADNWDVCADMVGTFTDTEDPAKFKMKYWGVASFLQKGNDDHWIVDTDYDTYAVQYSCRLLNLDGTCAGQLLLRVFPGPQRPAPRSAEDCKAAAGGAVPGQAVQADRPQRLLRWQIRKKPFVAISRI

SEQ ID NO: 837642 - protein, 186 aa, Homo sapiens
MKWVWALLLLAALGSGRAERDCRVSSFRVKENFDKARFSGTWYAMAKKDPEGLFLQDNIVAEFSVDETGQMSATAKGRVRLLNNWDVCADMVGTFTDTEDPAKFKMKYWGVASFLQKGNDDHWIVDTDYDTYAVQYSCRLLNLDGTCAGQAQKIVRQRQEELCLARQYRLIVHNGYCDGRSERNLL

SEQ ID NO: 837643 - protein, 207 aa, Homo sapiens; identical to SEQ ID NO: 837637

SEQ ID NO: 837644 - protein, 207 aa, Homo sapiens; identical to SEQ ID NO: 837637

SEQ ID NO: 837645 - protein, 236 aa, Homo sapiens
PGLQDSARARTLRADLRAGPLSGGGFLGKMKWVWALLLLAALGSGRAERDCRVSSFRVKENFDKARFSGTWYAMAKKDPEGLFLQDNIVAEFSVDETGQMSATAKGRVRLLNNWDVCADMVGTFTDTEDPAKFKMKYWGVASFLQKGNDDHWIVDTDYDTYAVQYSCRLLNLDGTCAGQLLLRVFPGPQRPAPRSAEDCKAAAGGAVPGQAVQADRPQRLLRWQIRKKPFVAISRI

SEQ ID NO: 837646 - protein, 207 aa, Homo sapiens; identical to SEQ ID NO: 837637

SEQ ID NO: 837647 - protein, 137 aa, Homo sapiens
MKWVWALLLLAALGSGRAERDCRVSSFRVKENFDKARFSGTWYAMAKKDPEGLFLQDNIVAEFSVDETGQMSATAKGRVRLLNNWDVCADMVGTFTDTEDPAKFKMKYWGVASFLQKGTLRNTYNLNSVAQLCLCEL

SEQ ID NO: 837648 - protein, 135 aa, Homo sapiens
YVLTHPYVLTLSSILRFFVKSLANKTSDWLGYMRFLIIPLGSHPVAKYLGSVDSKYSSSFLDSGWRDLFSRSEPPVSEQLDVAGRVMQYVNGAATTHQLPVAEAMLTCRHKFPDEDSYQKFIPFIGVSTDSLCLA

SEQ ID NO: 837649 - protein, 985 aa, Homo sapiens
MAERGGAGGGPGGAGGGSGQRGSGVAQSPQQPPPQQQQQQPPQQPTPPKLAQATSSSSSTSAAAASSSSSSTSTSMAVAVASGSAPPGVCPVGAQCRNSPATGVHDATLYRRPCGSVAPGSLDPSVRCTEVLIQAIGPAERKPLSIAKEDKCDKKILKLSVVIGLVKARRGSKRILRSNEIVLPASGLVETELQLTFSLQYPHFLKRDANKLQIMLQRRKRYKNRTILGYKTLAVGLINMAEVMQHPNEGALVLGLHSNVKDVSVPVAEIKIYSLSSQPIDHEGIKSKLSDRSPDIDNYSEEEEESFSSEQEGSDDPLHGQDLFYEDEDLRKVKKTRRKLTSTSAITRQPNIKQKFVALLKRFKVSDEVGFGLEHVSREQIREVEEDLDELYDSLEMYNPSDSGPEMEETESILSTPKPKLKPFFEGMSQSSSQTEIGSLNSKGSLGKDTTSPMELAALEKIKSTWIKNQDDSLTETDTLEITDQDMFGDASTSLVVPEKVKTPMKSSKTDLQGSASPSKVEGVHTPRQKRSTPLKERQLSKPLSERTNSSDSERSPDLGHSTQIPRKVVYDQLNQILVSDAALPENVILVNTTDWQGQYVAELLQDQRKPVVCTCSTVEVQAVLSALLTRIQRYCNCNSSMPRPVKVAAVGGQSYLSSILRFFVKSLANKTSDWLGYMRFLIIPLGSHPVAKYLGSVDSKYSSSFLDSGWRDLFSRSEPPVSEQLDVAGRVMQYVNGAATTHQLPVAEAMLTCRHKFPDEDSYQKFIPFIGVVKVGLVEDSPSTAGDGDDSPVVSLTVPSTSPPSSSGLSRDATATPPSSPSMSSALAIVGSPNSPYGDVIGLQVDYWLGHPGERRREGDKRDASSKNTLKSVFRSVQVSRLPHSGEAQLSGTMAMTVVTKEKNKKVPTIFLSKKPREKEVDSKSQVIEGISRLICSAKQQQTMLRVSIDGVEWSDIKFFQLAAQWPTHVKHFPVGLFSGSKAT

SEQ ID NO: 837650 - protein, 976 aa, Homo sapiens
MAERGGAGGGPGGAGGGSGQRGSGVAQSPQQPPPQQQQQQPPQQPTPPKLAQATSSSSSTSAAAASSSSSSTSTSMAVAVASGSAPPGGPGPGRTPAPVQMNLYATWEVDRSSSSCVPRLFSLTLKKLVMLKEMDKDLNSVVIAVKLQGSKRILRSNEIVLPASGLVETELQLTFSLQYPHFLKRDANKLQIMLQRRKRYKNRTILGYKTLAVGLINMAEVMQHPNEGALVLGLHSNVKDVSVPVAEIKIYSLSSQPIDHEGIKSKPTIDHEGIKSKLSVSDRSPDIDNYSEEEEESFSSEQEGSDDPLHGQDLFYEDEDLRKVKKTRRKLTSTSAITRQPNIKQKFVALLKRFKVSDEVGFGLEHVSREQIREVEEDLDELYDSLEMYNPSDSGPEMEETESILSTPKPKLKPFFEGMSQSSSQTEIGSLNSKGSLGKDTTSPMELAALEKIKSTWIKNQDDSLTETDTLEITDQDMFGDASTSLVVPEKVKTPMKSSKTDLQGSASPSKVEGVHTPRQKRSTPLKERQLSKPLSERTNSSDSERSPDLGHSTQIPRKVVYDQLNQILVSDAALPENVILVNTTDWQGQYVAELLQDQRKPVVCTCSTVEVQAVLSALLTRIQRYCNCNSSMPRPVKVAAVGGQSYLSSILRFFVKSLANKTSDWLGYMRFLIIPLGSHPVAKYLGSVDSKYSSSFLDSGWRDLFSRSEPPVSEQLDVAGRVMQYVNGAATTHQLPVAEAMLTCRHKFPDEDSYQKFIPFIGVVKVGLVEDSPSTAGDGDDSPVVSLTVPSTSPPSSSGLSRDATATPPSSPSMSSALAIVGSPNSPYGDVIGLQVDYWLGHPGERRREGDKRDASSKNTLKSVFRSVQVSRLPHSGEAQLSGTMAMTVVTKEKNKKVPTIFLSKKPREKEVDSKSQVIEGISRLICSAKQQQTMLRVSIDGVEWSDIKFFQLAAQWPTHVKHFPVGLFSGSKAT

SEQ ID NO: 837651 - protein, 730 aa, Homo sapiens
MHSNVKDVSVPVAEIKIYSLSSQPIDHEGIKSKLSDRSPDIDNYSEEEEESFSSEQEGSDDPLHGQDLFYEDEDLRKVKKTRRKLTSTSAITRQPNIKQKFVALLKRFKVSDEVGFGLEHVSREQIREVEEDLDELYDSLEMYNPSDSGPEMEETESILSTPKPKLKPFFEGMSQSSSQTEIGSLNSKGSLGKDTTSPMELAALEKIKSTWIKNQDDSLTETDTLEITDQDMFGDASTSLVVPEKVKTPMKSSKTDLQGSASPSKVEGVHTPRQKRSTPLKERQLSKPLSERTNSSDSERSPDLGHSTQIPRKVVYDQLNQILVSDAALPENVILVNTTDWQGQYVAELLQDQRKPVVCTCSTVEVQAVLSALLTRIQRYCNCNSSMPRPVKVAAVGGQSYLSSILRFFVKSLANKTSDWLGYMRFLIIPLGSHPVAKYLGSVDSKYSSSFLDSGWRDLFSRSEPPVSEQLDVAGRVMQYVNGAATTHQLPVAEAMLTCRHKFPDEDSYQKFIPFIGVVKVGLVEDSPSTAGDGDDSPVVSLTVPSTSPPSSSGLSRDATATPPSSPSMSSALAIVGSPNSPYGDVIGLQVDYWLGHPGERRREGDKRDASSKNTLKSVFRSVQVSRLPHSGEAQLSGTMAMTVVTKEKNKKVPTIFLSKKPREKEVDSKSQVIEGISRLICSAKQQQTMLRVSIDGVEWSDIKFFQLAAQWPTHVKHFPVGLFSGSKAT

SEQ ID NO: 837652 - protein, 879 aa, Homo sapiens
MAERGGAGGGPGGAGGGSGQRGSGVAQSPQQPPPQQQQQQPPQQPTPPKLAQATSSSSSTSAAAASSSSSSTSTSMAVAVASGSAPPGGPGPGRTPAPVQMNLYATWEVDRSSSSCVPRLFSLTLKKLVMLKEMDKDLNSVVIAVKLQGSKRILRSNEIVLPASGLVETELQLTFSLQYPHFLKRDANKLQIMLQRRKRYKNRTILGYKTLAVGLINMAEVMQHPNEGALVLGLHSNVKDVSVPVAEIKIYSLSSQPIDHEGIKSKLSDRSPDIDNYSEEEEESFSSEQEGSDDPLHGQDLFYEDEDLRKVKKTRRKLTSTSAITRQPNIKQKFVALLKRFKVSDEVGFGLEHVSREQIREVEEDLDELYDSLEMYNPSDSGPEMEETESILSTPKPKLKPFFEGMSQSSSQTEIGSLNSKGSLGKDTTSPMELAALEKIKSTWIKNQDDSLTETDTLIPRKVVYDQLNQILVSDAALPENVILVNTTDWQGQYVAELLQDQRKPVVCTCSTVEVQAVLSALLTRIQRYCNCNSSMPRPVKVAAVGGQSYLSSILRFFVKSLANKTSDWLGYMRFLIIPLGSHPVAKYLGSVDSKYSSSFLDSGWRDLFSRSEPPVSEQLDVAGRVMQYVNGAATTHQLPVAEAMLTCRHKFPDEDSYQKFIPFIGVVKVGLVEDSPSTAGDGDDSPVVSLTVPSTSPPSSSGLSRDATATPPSSPSMSSALAIVGSPNSPYGDVIGLQVDYWLGHPGERRREGDKRDASSKNTLKSVFRSVQVSRLPHSGEAQLSGTMAMTVVTKEKNKKVPTIFLSKKPREKEVDSKSQVIEGISRLICSAKQQQTMLRVSIDGVEWSDIKFFQLAAQWPTHVKHFPVGLFSGSKAT

SEQ ID NO: 837653 - protein, 629 aa, Homo sapiens
MTLNSETPFSLQVGFGLEHVSREQIREVEEDLDELYDSLEMYNPSDSGPEMEETESILSTPKPKLKPFFEGMSQSSSQTEIGSLNSKGSLGKDTTSPMELAALEKIKSTWIKNQDDSLTETDTLEITDQDMFGDASTSLVVPEKVKTPMKSSKTDLQGSASPSKVEGVHTPRQKRSTPLKERQLSKPLSERTNSSDSERSPDLGHSTQIPRKVVYDQLNQILVSDAALPENVILVNTTDWQGQYVAELLQDQRKPVVCTCSTVEVQAVLSALLTRIQRYCNCNSSMPRPVKVAAVGGQSYLSSILRFFVKSLANKTSDWLGYMRFLIIPLGSHPVAKYLGSVDSKYSSSFLDSGWRDLFSRSEPPVSEQLDVAGRVMQYVNGAATTHQLPVAEAMLTCRHKFPDEDSYQKFIPFIGVVKVGLVEDSPSTAGDGDDSPVVSLTVPSTSPPSSSGLSRDATATPPSSPSMSSALAIVGSPNSPYGDVIGLQVDYWLGHPGERRREGDKRDASSKNTLKSVFRSVQVSRLPHSGEAQLSGTMAMTVVTKEKNKKVPTIFLSKKPREKEVDSKSQVIEGISRLICSAKQQQTMLRVSIDGVEWSDIKFFQLAAQWPTHVKHFPVGLFSGSKAT

SEQ ID NO: 837654 - protein, 345 aa, Homo sapiens
KKKKKLNAEPPVSARGLSSILRFFVKSLANKTSDWLGYMRFLIIPLGSHPVAKYLGSVDSKYSSSFLDSGWRDLFSRSEPPVSEQLDVAGRVMQYVNGAATTHQLPVAEAMLTCRHKFPDEDSYQKFIPFIGVVKVGLVEDSPSTAGDGDDSPVVSLTVPSTSPPSSSGLSRDATATPPSSPSMSSALAIVGSPNSPYGDVIGLQVDYWLGHPGERRREGDKRDASSKNTLKSVFRSVQVSRLPHSGEAQLSGTMAMTVVTKEKNKKVPTIFLSKKPREKEVDSKSQVIEGISRLICSAKQQQTMLRVSIDGVEWSDIKFFQLAAQWPTHVKHFPVGLFSGSKAT

SEQ ID NO: 837655 - protein, 963 aa, Homo sapiens
MAERGGAGGGPGGAGGGSGQRGSGVAQSPQQPPPQQQQQQPPQQPTPPKLAQATSSSSSTSAAAASSSSSSTSTSMAVAVASGSAPPGGPGPGRTPAPVQMNLYATWEVDRSSSSCVPRLFSLTLKKLVMLKEMDKDLNSVVIAVKLQGSKRILRSNEIVLPASGLVETELQLTFSLQYPHFLKRDANKLQIMLQRRKRYKNRTILGYKTLAVGLINMAEVMQHPNEGALVLGLHSNVKDVSVPVAEIKIYSLSSQPIDHEGIKSKLSDRSPDIDNYSEEEEESFSSEQEGSDDPLHGQDLFYEDEDLRKVKKTRRKLTSTSAITRQPNIKQKFVALLKRFKVSDEVGFGLEHVSREQIREVEEDLDELYDSLEMYNPSDSGPEMEETESILSTPKPKLKPFFEGMSQSSSQTEIGSLNSKGSLGKDTTSPMELAALEKIKSTWIKNQDDSLTETDTLEITDQDMFGDASTSLVVPEKVKTPMKSSKTDLQGSASPSKVEGVHTPRQKRSTPLKERQLSKPLSERTNSSDSERSPDLGHSTQIPRKVVYDQLNQILVSDAALPENVILVNTTDWQGQYVAELLQDQRKPVVCTCSTVEVQAVLSALLTRIQRYCNCNSSMPRPVKVAAVGGQSYLSSILRFFVKSLANKTSDWLGYMRFLIIPLGSHPVAKYLGSVDSKYSSSFLDSGWRDLFSRSEPPVSEQLDVAGRVMQYVNGAATTHQLPVAEAMLTCRHKFPDEDSYQKFIPFIGVVKVGLVEDSPSTAGDGDDSPVVSLTVPSTSPPSSSGLSRDATATPPSSPSMSSALAIVGSPNSPYGDVIGLQVDYWLGHPGERRREGDKRDASSKNTLKSVFRSVQVSRLPHSGEAQLSGTMAMTVVTKEKNKKVPTIFLSKKPREKEVDSKSQVIEGISRLICSAKQQQTMLRVSIDGVEWSDIKFFQLAAQWPTHVKHFPVGLFSGSKAT

SEQ ID NO: 837656 - protein, 162 aa, Homo sapiens [sequence omitted]

SEQ ID NO: 837657 - protein, 195 aa, Homo sapiens
AGRVAPAAVLRLHWSRPQGFCRAQAFSPARGSVWPRLCLLGVSPNSPYGDVIGLQVDYWLGHPGERRREGDKRDASSKNTLKSVFRSVQVSRLPHSGEAQLSGTMAMTVVTKEKNKKVPTIFLSKKPREKEVDSKSQVIEGISRLICSAKQQQTMLRVSIDGVEWSDIKFFQLAAQWPTHVKHFPVGLFSGSKAT

SEQ ID NO: 837658 - protein, 963 aa, Homo sapiens; identical to SEQ ID NO: 837655

SEQ ID NO: 837659 - protein, 963 aa, Homo sapiens; identical to SEQ ID NO: 837655

SEQ ID NO: 837660 - protein, 963 aa, Homo sapiens; identical to SEQ ID NO: 837655

SEQ ID NO: 837661 - protein, 786 aa, Homo sapiens
MAERGGAGGGPGGAGGGSGQRGSGVAQSPQQPPPQQQQQQPPQQPTPPKLAQATSSSSSTSAAAASSSSSSTSTSMAVAVASGSAPPGGPGPGRTPAPVQMNLYATWEVDRSSSSCVPRLFSLTLKKLVMLKEMDKDLNSVVIAVKLQGSKRILRSNEIVLPASGLVETELQLTFSLQYPHFLKRDANKLQIMLQRRKRYKNRTILGYKTLAVGLINMAEVMQHPNEGALVLGLHSNVKDVSVPVAEIKIYSLSSQPIDHEGIKSKLSDRSPDIDNYSEEEEESFSSEQEGSDDPLHGQDLFYEDEDLRKVKKTRRKLTSTSAITRQPNIKQKFVALLKRFKVSDEVGFGLEHVSREQIREVEEDLDELYDSLEMYNPSDSGPEMEETESILSTPKPKLKPFFEGMSQSSSQTEIGSLNSKGSLGKDTTSPMELAALEKIKSTWIKNQDDSLTETDTLEITDQDMFGDASTSLVVPEKVKTPMKSSKTDLQGSASPSKVEGVHTPRQKRSTPLKERQLSKPLSERTNSSDSERSPDLGHSTQIPRKVVYDQLNQILVSDAALPENVILVNTTDWQGQYVAELLQDQRKPVVCTCSTVEVQAVLSALLTRIQRYCNCNSSMPRPVKVAAVGGQSYLSSILRFFVKSLANKTSDWLGYMRFLIIPLGSHPVAKYLGSVDSKYSSSFLDSGWRDLFSRSEPPVSEQLDVAGRVMQYVNGAATTLQNDRALTHVNACQIEFQEVDSYQKVNTLRGVMKVGRVEDSPCTAGELIRVVTVISRYIDADIVSH

SEQ ID NO: 837662 - protein, 496 aa, Homo sapiens [sequence omitted]

SEQ ID NO: 837663 - protein, 963 aa, Homo sapiens; identical to SEQ ID NO: 837655

SEQ ID NO: 837664 - protein, 963 aa, Homo sapiens; identical to SEQ ID NO: 837655

SEQ ID NO: 837665 - protein, 963 aa, Homo sapiens; identical to SEQ ID NO: 837655

SEQ ID NO: 837666 - protein, 923 aa, Homo sapiens
MAERGGAGGGPGGAGGGSGQRGSGVAQSPQQPPPQQQQQQPPQQPTPPKLAQATSSSSSTSAAAASSSSSSTSTSMAVAVASGSAPPGGPGPGRTPAPVQMNLYATWEVDRSSSSCVPRLFSLTLKKLVMLKEMDKDLNSVVIAVKLQGSKRILRSNEIVLPASGLVETELQLTFSLQYPHFLKRDANKLQIMLQRRKRYKNRTILGYKTLAVGLINMAEVMQHPNEGALVLGLHSNVKDVSVPVAEIKIYSLSSQPIDHEGIKSKLSDRSPDIDNYSEEEEESFSSEQEGSDDPLHGQDLFYEDEDLRKVKKTRRKLTSTSAITRQPNIKQKFVALLKRFKVSDEVGFGLEHVSREQIREVEEDLDELYDSLEMYNPSDSGPEMEETESILSTPKPKLKPFFEGMSQSSSQTEIGSLNSKGSLGKDTTSPMELAALEKIKSTWIKNQDDSLTETDTLEITDQDMFGDASTSLVVPEKVKTPMKSSKTDLQGSASPSKVEGVHTPRQKRSTPLKERQLSKPLSERTNSSDSERSPDLGHSTQIPRKVVYDQLNQILVSDAALPENVILVNTTDWQGQYVAELLQDQRKPVVCTCSTVEVQAVLSALLTRIQRYCNCNSSMPRPVKVAAVGGQSYLSSILRFFVKSLANKTSDWLGYMRFLIIPLGSHPVAKYLGSVDSKYSSSFLDSGWRDLFSRSEPPVSEQLDVAGRVMQYVNGAATTHQLPVAEAMLTCRHKFPDEDSYQKFIPFIGVVKVGLVEDSPSTAGDGDDSPVVSLTVPSTSPPSSSGLSRDATATPPSSPSMSSALAIVGSPNSPYGDVIGLQVDYWLGHPGERRREGDKRDASSKNTLKSVFRSVQVSRLPHSGEAQLSGTMAMTVVTKEKNKKVPSPPLQPTPAQPLLLPAFPLLPPAPGPRRVGFAFWCP

SEQ ID NO: 837667 - protein, 843 aa, Homo sapiens
MAERGGAGGGPGGAGGGSGQRGSGVAQSPQQPPPQQQQQQPPQQPTPPKLAQATSSSSSTSAAAASSSSSSTSTSMAVAVASGSAPPGGPGPGRTPAPVQMNLYATWEVDRSSSSCVPRLFSLTLKKLVMLKEMDKDLNSVVIAVKLQGSKRILRSNEIVLPASGLVETELQLTFSLQYPHFLKRDANKLQIMLQRRKRYKNRTILGYKTLAVGLINMAEVMQHPNEGALVLGLHSNVKDVSVPVAEIKIYSLSSQPIDHEGIKSKLSDRSPDIDNYSEEEEESFSSEQEGSDDPLHGQDLFYEDEDLRKVKKTRRKLTSTSAITRQPNIKQKFVALLKRFKVSDEVGFGLEHVSREQIREVEEDLDELYDSLEMYNPSDSGPEMEETESILSTPKPKLKPFFEGMSQSSSQTEIGSLNSKGSLGKDTTSPMELAALEKIKSTWIKNQDDSLTETDTLEITDQDMFGDASTSLVVPEKVKTPMKSSKTDLQGSASPSKVEGVHTPRQKRSTPLKERQLSKPLSERTNSSDSERSPDLGHSTQIPRKVVYDQLNQILVSDAALPENVILVNTTDWQGQYVAELLQDQRKPVVCTCSTVEVQAVLSALLTRIQRYCNCNSSMPRPVKVAAVGGQSYLSSILRFFVKSLANKTSDWLGYMRFLIIPLGSHPVAKYLGSVDSKYSSSFLDSGWRDLFSRSEPPVSEQLDVAGRVMQYVNGAATTHQLPVAEAMLTCRHKFPDEDSYQKFIPFIGVVKVGLVEDSPSTAGDGDDSPVVSLTVPSTSPPPSLAPGSASHSPRSRRTLPQGRLPSPPLQPTPAQPLLLPAFPLLPPAPGPRRVGFAFWCP

SEQ ID NO: 837668 - protein, 1006 aa, Homo sapiens
MAERGGAGGGPGGAGGGSGQRGSGVAQSPQQPPPQQQQQQPPQQPTPPKLAQATSSSSSTSAAAASSSSSSTSTSMAVAVASGSAPPGGPGPGRTPAPVQMNLYATWEVDRSSSSCVPRLFSLTLKKLVMLKEMDKDLNSVVIAVKLQGSKRILRSNEIVLPASGLVETELQLTFSLQYPHFLKRDANKLQIMLQRRKRYKNRTILGYKTLAVGLINMAEVMQHPNEGALVLGLHSNVKDVSVPVAEIKIYSLSSQPIDHEGIKSKLSDRSPDIDNYSEEEEESFSSEQEGSDDPLHGQDLFYEDEDLRKVKKTRRKLTSTSAITRQPNIKQKFVALLKRFKVSDEVGFGLEHVSREQIREVEEDLDELYDSLEMYNPSDSGPEMEETESILSTPKPKLKPFFEGMSQSSSQTEIGSLNSKGSLGKDTTSPMELAALEKIKSTWIKNQDDSLTETDTLEITDQDMFGDASTSLVVPEKVKTPMKSSKTDLQGSASPSKVEGVHTPRQKRSTPLKERQLSKPLSERTNSSDSERSPDLGHSTQIPRKVVYDQLNQILVSDAALPENVILVNTTDWQGQYVAELLQDQRKPVVCTCSTVEVQAVLSALLTRIQRYCNCNSSMPRPVKVAAVGGQSYLSSILRFFVKSLANKTSDWLGYMRFLIIPLGSHPVAKYLGSVDSKYSSSFLDSGWRDLFSRSEPPVSEQLDVAGRVMQYVNGAATTHQLPVAEAMLTCRHKFPDEDSYQKFIPFIGVVKVGLVEDSPSTAGDGDDSPVVSLTVPSTSPPSSSGLSRDATATPPSSPSMSSALAIVGSPNSPYGDVIGLQVDYWLGHPGERRREGDKRDASSKNTLKSVFRSVQVSRLPHSGEAQLSGTMAMTVVTKEKNKKVPTIFLSKKPREKEVDSKSQVIEGISRLISPSLGPSLGPDPSSQPGFPPAGSFPPCHLPLTNPGSEPLIPDRPCSQEWLRTQGPSPALCTPQPGHLRPTAPLELFSCPLTPSQKFLHRTSF

SEQ ID NO: 837669 - protein, 154 aa, Homo sapiens
MGSSGVTSSSSSWQPSGPPMSSTFQWDSSVAARPPEALSPSHFPSWHCHQPHRLRAGGGQQARAQHPFPGTRVCLSLAQVPKDTATGTPSLPSPPAHPCTAPPPSRFSPSPSCSRPKACWFCLLVPIVPWTESPRPSFTRLPNSSLWYQFPSRK

SEQ ID NO: 837670 - protein, 963 aa, Homo sapiens; identical to SEQ ID NO: 837655

SEQ ID NO: 837671 - protein, 190 aa, Homo sapiens
YSRGPPRLARQHASLLVVPCDTPCALVAVFVASTLVNDAPASASQPLTQHSSAWTWRDGRQTPTTIHAVCGPSDILFHLPFISLLPPCQFFCLSLLCSSPSLGPSLGPDPSSQPGFPPAGSFPPCHLPLTNPGSEPLIPDRPCSQEWLRTQGPSPALCTPQPGHLRPTAPLELFSCPLTPSQKFLHRTSF

SEQ ID NO: 837672 - protein, 167 aa, Homo sapiens
GGGLPPISPSPGRAVLGEGLGGRGRSIINKGGSHEDSDQCTGCVTWYNQEDILFHLPFISLLPPCQFFCLSLLCSSPSLGPSLGPDPSSQPGFPPAGSFPPCHLPLTNPGSEPLIPDRPCSQEWLRTQGPSPALCTPQPGHLRPTAPLELFSCPLTPSQKFLHRTSF

SEQ ID NO: 837673 - protein, 159 aa, Homo sapiens
CFILWIGLLFPCGLLRSQKVSSGPPPGRILAPLSTAMTLPFLPSCNCNSSMPRPVKVAAVGGQSYLSSILRFFVKSLANKTSDWLGYMRFLIIPLGKDGRHQEGVGHEGSIDRCLIWNRTVGLGPRKGQSRRPRPWPGTAAPTLSHLLTNSPPLVFHLP

SEQ ID NO: 837674 - protein, 50 aa, Homo sapiens
SNGSGDVCNFLCGLWTALWVQPRRQQPSCAPDSQADREGCILHAPAWTPP

SEQ ID NO: 837675 - protein, 84 aa, Homo sapiens
PLLPRPPPRPRPAQAALASSGGPAGGRVGRMRRRSRMLLCFAFLWVLGIAYYMYSGGGSALAGGAGGGAGRKLQTLCSVLQCWS

SEQ ID NO: 837676 - protein, 558 aa, Homo sapiens
VYTNEKHWLEIIYVECGQGKVPVAPMADREDWNEIDPIKKKDLHHSNGEEKAQSMETLPPGKVRWPDFNQEAYVGGTMVRSGQDPYARNKFNQVESDKLRMDRAIPDTRHDQCQRKQWRVDLPATSVVITFHNEARSALLRTVVSVLKKSPPHLIKEIILVDDYSNDPEDGALLGKIEKVRVLRNDRREGLMRSRVRGADAAQAKVLTFLDSHCECNEHWLEPLLERVAEDRTRVVSPIIDVINMDNFQYVGASADLKGGFDWNLVFKWDYMTPEQRRSRQGNPVAPIKTPMIAGGLFVMDKFYFEELGKYDMMMDVWGGENLEISFRVWQCGGSLEIIPCSRVGHVFRKQHPYTFPGGSGTVFARNTRRAAEVWMDEYKNFYYAAVPSARNVPYGNIQSRLELRKKLSCKPFKWYLENVYPELRVPDHQDIAFGALQQGTNCLDTLGHFADGVVGVYECHNAGGNQEWALTKEKSVKHMDLCLTVVDRAPGSLIKLQGCRENDSRQKWEQIEGNSKLRHVGSNLCLDSRTAKSGGLSVEVCGPALSQQWKFTLNLQQ

SEQ ID NO: 837677 - protein, 571 aa, Homo sapiens
MRRRSRMLLCFAFLWVLGIAYYMYSGGGSALAGGAGGGAGRKEDWNEIDPIKKKDLHHSNGEEKAQSMETLPPGKVRWPDFNQEAYVGGTMVRSGQDPYARNKFNQVESDKLRMDRAIPDTRHDQCQRKQWRVDLPATSVVITFHNEARSALLRTVVSVLKKSPPHLIKEIILVDDYSNDPEDGALLGKIEKVRVLRNDRREGLMRSRVRGADAAQAKVLTFLDSHCECNEHWLEPLLERVAEDRTRVVSPIIDVINMDNFQYVGASADLKGGFDWNLVFKWDYMTPEQRRSRQGNPVAPIKTPMIAGGLFVMDKFYFEELGKYDMMMDVWGGENLEISFRVWQCGGSLEIIPCSRVGHVFRKQHPYTFPGGSGTVFARNTRRAAEVWMDEYKNFYYAAVPSARNVPYGNIQSRLELRKKLSCKPFKWYLENVYPELRVPDHQDIAFGALQQGTNCLDTLGHFADGVVGVYECHNAGGNQEWALTKEKSVKHMDLCLTVVDRAPGSLIKLQGCRENDSRQKWEQIEGNSKLRHVGSNLCLDSRTAKSGGLSVEVCGPALSQQWKFTLNLQQ

SEQ ID NO: 837678 - protein, 225 aa, Homo sapiens
  misc_feature (36)..(36): Xaa can be any naturally occurring amino acid
MSFLAPELPSISFTLLILRECISLMCMREANIPKVXHNDINTKDAYMNVRSVPYGFCRSSSSCIFPTKPFAASGRRGQSPVGPRFPSARKGGTAGTGAWGGPPFFIWGFPPPPFGEWPPEFQPSWCYCCGQLGGFLQTTGLGPGIPVGRQPESPYCASESTLRAVRICEPGAVTYFDRYHFGSFYIKFLFSKEGSEPNNTCSFTLRIQGGRQEPWGPVKPQTVMN

SEQ ID NO: 837679 - protein, 571 aa, Homo sapiens; identical to SEQ ID NO: 837677

SEQ ID NO: 837680 - protein, 571 aa, Homo sapiens; identical to SEQ ID NO: 837677

SEQ ID NO: 837681 - protein, 151 aa, Homo sapiens
YVVPRVWDIVDQRLAELRVPDHQDIAFGALQQGTNCLDTLGHFADGVVGVYECHNAGGNQEWALTKEKSVKHMDLCLTVVDRAPGSLIKLQGCRENDSRQKWEQIEGNSKLRHVGSNLCLDSRTAKSGGLSVEVCGPALSQQWKFTLNLQQ

SEQ ID NO: 837682 - protein, 128 aa, Homo sapiens [sequence omitted]

SEQ ID NO: 837683 - protein, 128 aa, Homo sapiens [sequence omitted]

SEQ ID NO: 837684 - protein, 571 aa, Homo sapiens; identical to SEQ ID NO: 837677

SEQ ID NO: 837685 - protein, 571 aa, Homo sapiens; identical to SEQ ID NO: 837677

SEQ ID NO: 837686 - protein, 544 aa, Homo sapiens
MRRRSRMLLCFAFLWVLGIAYYMYSGGGSALAGGAGGGAGRKEDWNEIDPIKKKDLHHSNGEEKAQSMETLPPGKVRWPDFNQEAYVGGTMVRSGQDPYARNKFNQVESDKLRMDRAIPDTRHDQCQRKQWRVDLPATSVVITFHNEARSALLRTVVSVLKKSPPHLIKEIILVDDYSNDPEDGALLGKIEKVRVLRNDRREGLMRSRVRGADAAQAKVLTFLDSHCECNEHWLEPLLERVAEDRTRVVSPIIDVINMDNFQYVGASADLKGGFDWNLVFKWDYMTPEQRRSRQGNPVAPIKTPMIAGGLFVMDKFYFEELGKYDMMMDVWGGENLEISFRVWQCGGSLEIIPCSRVGHVFRKQHPYTFPGGSGTVFARNTRRAAEVWMDEYKNFYYAAVPSARNVPYGNIQSRLELRKKLSCKPFKWYLENVYPELRVPDHQDIAFGALQQGTNCLDTLGHFADGVVGVYECHNAGGNQEWALTKEKSVKHMDLCLTVVDRAPGSLIKLQGCRENDSRQKWEQIEGNSKLRHVGSNLCLDSRN

SEQ ID NO: 837687 - protein, 1353 aa, Homo sapiens
MASPPHQQLLHHHSTEVSCDSSGDSNSVRVKINPKQLSSNSHPKHCKYSISSSCSSSGDSGGVPRRVGGGGRLRRQKKLPQLFERASSRWWDPKFDSVNLEEACLERCFPQTQRRFRYALFYIGFACLLWSIYFAVHMRSRLIVMVAPALCFLLVCVGFFLFTFTKLYARHYAWTSLALTLLVFALTLAAQFQVLTPVSGRGDSSNLTATARPTDTCLSQVGSFSMCIEVLFLLYTVMHLPLYLSLCLGVAYSVLFETFGYHFRDEACFPSPGAGALHWELLSRGLLHGCIHAIGVHLFVMSQVRSRSTFLKVGQSIMHGKDLEVEKALKERMIHSVMPRIIADDLMKQGDEESENSVKRHATSSPKNRKKKSSIQKAPIAFRPFKMQQIEEVSILFADIVGFTKMSANKSAHALVGLLNDLFGRFDRLCEETKCEKISTLGDCYYCVAGCPEPRADHAYCCIEMGLGMIKAIEQFCQEKKEMVNMRVGVHTGTVLCGILGMRRFKFDVWSNDVNLANLMEQLGVAGKVHISEATAKYLDDRYEMEDGKVIERLGQSVVADQLKGLKTYLISGQRAKESRCSCAEALLSGFEVIDGSQVSSGPRGQGTASSGNVSDLAQTVKTFDNLKTCPSCGITFAPKSEAGAEGGAPQNGCQDEHKNSTKASGGPNPKTQNGLLSPPQEEKLTNSQTSLCEILQEKGRWAGVSLDQSALLPLRFKNIREKTDAHFVDVIKEDSLMKDYFFKPPINQFSLNFLDQELERSYRTSYQEEVIKNSPVKTFASPTFSSLLDVFLSTTVFLTLSTTCFLKYEAATVPPPPAALAVFSAALLLEVLSLAVSIRMVFFLEDVMACTKRLLEWIAGWLPRHCIGAILVSLPALAVYSHVTSEYETNIHFPVFTGSAALIAVVHYCNFCQLSSWMRSSLATVVGAGPLLLLYVSLCPDSSVLTSPLDAVQNFSSERNPCNSSVPRDLRRPASLIGQEVVLVFFLLLLLVWFLNREFEVSYRLHYHGDVEADLHRTKIQSMRDQADWLLRNIIPYHVAEQLKVSQTYSKNHDSGGVIFASIVNFSEFYEENYEGGKECYRVLNELIGDFDELLSKPDYSSIEKIKTIGATYMAASGLNTAQAQDGSHPQEHLQILFEFAKEMMRVVDDFNNNMLWFNFKLRVGFNHGPLTAGVIGTTKLLYDIWGDTVNIASRMDTTGVECRIQVSEESYRVLSKMGYDFDYRGTVNVKGKGQMKTYLYPKCTDHRVIPQHQLSISPDIRVQVDGSIGRSPTDEIANLVPSVQYVDKTSLGSDSSTQAKDAHLSPKRPWKEPVKAEERGRFGKAIEKDDCDETGIEEANELTKLNVSKSV

SEQ ID NO: 837688 - protein, 1372 aa, Homo sapiens
MASPPHQQLLHHHSTEVSCDSSGDSNSVRVKINPKQLSSNSHPKHCKYSISSSCSSSGDSGGVPRRVGGGGRLRRQKKLPQLFERASSRWWDPKFDSVNLEEACLERCFPQTQRRFRYALFYIGFACLLWSIYFAVHMRSRLIVMVAPALCFLLVCVGFFLFTFTKLYARHYAWTSLALTLLVFALTLAAQFQVLTPVSGRGDSSNLTATARPTDTCLSQVGSFSMCIEVLFLLYTVMHLPLYLSLCLGVAYSVLFETFGYHFRDEACFPSPGAGALHWELLSRGLLHGCIHAIGVHLFVMSQVRSRSTFLKVGQSIMHGKDLEVEKALKERMIHSVMPRIIADDLMKQGDEESENSVKRHATSSPKNRKKKSSIQKAPIAFRPFKMQQIEEVSILFADIVGFTKMSANKSAHALVGLLNDLFGRFDRLCEETKCEKISTLGDCYYCVAGCPEPRADHAYCCIEMGLGMIKAIEQFCQEKKEMVNMRVGVHTGTVLCGILGMRRFKFDVWSNDVNLANLMEQLGVAGKVHISEATAKYLDDRYEMEDGKVIERLGQSVVADQLKGLKTYLISGQRAKESRCSCAEALLSGFEVIDGSQVSSGPRGQGTASSGNVSDLAQTVKTFDNLKTCPSCGITFAPKSEAGAEGGAPQNGCQDEHKNSTKVTSSWLLFLSVPLLAHPPKASGGPNPKTQNGLLSPPQEEKLTNSQTSLCEILQEKGRWAGVSLDQSALLPLRFKNIREKTDAHFVDVIKEDSLMKDYFFKPPINQFSLNFLDQELERSYRTSYQEEVIKNSPVKTFASPTFSSLLDVFLSTTVFLTLSTTCFLKYEAATVPPPPAALAVFSAALLLEVLSLAVSIRMVFFLEDVMACTKRLLEWIAGWLPRHCIGAILVSLPALAVYSHVTSEYETNIHFPVFTGSAALIAVVHYCNFCQLSSWMRSSLATVVGAGPLLLLYVSLCPDSSVLTSPLDAVQNFSSERNPCNSSVPRDLRRPASLIGQEVVLVFFLLLLLVWFLNREFEVSYRLHYHGDVEADLHRTKIQSMRDQADWLLRNIIPYHVAEQLKVSQTYSKNHDSGGVIFASIVNFSEFYEENYEGGKECYRVLNELIGDFDELLSKPDYSSIEKIKTIGATYMAASGLNTAQAQDGSHPQEHLQILFEFAKEMMRVVDDFNNNMLWFNFKLRVGFNHGPLTAGVIGTTKLLYDIWGDTVNIASRMDTTGVECRIQVSEESYRVLSKMGYDFDYRGTVNVKGKGQMKTYLYPKCTDHRVIPQHQLSISPDIRVQVDGSIGRSPTDEIANLVPSVQYVDKTSLGSDSSTQAKDAHLSPKRPWKEPVKAEERGRFGKAIEKDDCDETGIEEANELTKLNVSKSV

SEQ ID NO: 837689 - protein, 1372 aa, Homo sapiens; identical to SEQ ID NO: 837688

SEQ ID NO: 837690 - protein, 1322 aa, Homo sapiens
MASPPHQQLLHHHSTEVSCDSSGDSNSVRVKINPKQLSSNSHPKHCKYSISSSCSSSGDSGGVPRRVGGGGRLRRQKKLPQLFERASSRWWDPKFDSVNLEEACLERCFPQTQRRFRYALFYIGFACLLWSIYFAVHMRSRLIVMVAPALCFLLVCVGFFLFTFTKLYARHYAWTSLALTLLVFALTLAAQFQVLTPVSGRGDSSNLTATARPTDTCLSQVGSFSMCIEVLFLLYTVMHLPLYLSLCLGVAYSVLFETFGYHFRDEACFPSPGAGALHWELLSRGLLHGCIHAIGVHLFVMSQVRSRSTFLKVGQSIMHGKDLEVEKALKERMIHSVMPRIIADDLMKQGDEESENSVKRHATSSPKNRKKKSSIQKAPIAFRPFKMQQIEEVSILFADIVGFTKMSANKSAHALVGLLNDLFGRFDRLCEETKCEKISTLGDCYYCVAGCPEPRADHAYCCIEMGLGMIKAIEQFCQEKKEMVNMRVGVHTGTVLCGILGMRRFKFDVWSNDVNLANLMEQLGVAGKVHISEATAKYLDDRYEMEDGKVIERLGQSVVADQLKGLKTYLISGQRAKESRCSCAEALLSGFEVIDGSQVSSGPRGQGTASSGNVSDLAQTVKTFDNLKTCPSCGITFAPKSEAGAEGGAPQNGCQDEHKNSTKVTSSWLLFLSVPLLAHPPKASGGPNPKTQNGLLSPPQEEKLTNSQTSLCEILQEKGRWAGVSLDQSALLPLRFKNIREKTDAHFVDVIKEDSLMKDYFFKPPINQFSLNFLDQELERSYRTSYQEEVIKNSPVKTFASPTFSSLLDVFLSTTVFLTLSTTCFLKYEAATVPPPPAALAVFSAALLLEVLSLAVSIRMVFFLEDVMACTKRLLEWIAGWLPRHCIGAILVSLPALAVYSHVTSEYETNIHFPVFTGSAALIAVVHYCNFCQLSSWMRSSLATVVGAGPLLLLYVSLCPDSSVLTSPLDAVQNFSSERNPCNSSVPRDLRRPASLIGQEVVLVFFLLLLLVWFLNREFEVSYRLHYHGDVEADLHRTKIQSMRDQADWLLRNIIPYHVAEQLKVSQTYSKNHDSGGVIFASIVNFSEFYEENYEGGKECYRVLNELIGDFDELLSKPDYSSIEKIKTIGATYMAASGLNTAQAQDGSHPQEHLQILFEFAKEMMRVVDDFNNNMLWFNFKLRVGFNHGPLTAGVIGTTKLLYDIWGDTVNIASRMDTTGVECRIQVSEESYRVLSKMGYDFDYRGTVNVKGKGQTSASRWMAASDGLPQTRLPTWCLLSSMWTRHLWVLTAARRPRMPTCPPRDRGRSPSKPKKGVDLAKP

SEQ ID NO: 837691 - protein, 583 aa, Homo sapiens [sequence omitted]

SEQ ID NO: 837692 - protein, 114 aa, Homo sapiens
MLASPIWGGQAGIPAPSFPPALYPGPFQLPPRPPWAMLSVACAQCFPELPVGSCPITPSEQPSSWHSLPSCLSALLCFWGPLPKEPSPANPFRVHFPRTQTRHPQAPGWFVFPL

SEQ ID NO: 837693 - protein, 513 aa, Homo sapiens
MVFFLEDVMACTKRLLEWIAGWLPRHCIGAILVSLPALAVYSHVTSEYETNIHFPVFTGSAALIAVVHYCNFCQLSSWMRSSLATVVGAGPLLLLYVSLCPDSSVLTSPLDAVQNFSSERNPCNSSVPRDLRRPASLIGQEVVLVFFLLLLLVWFLNREFEVSYRLHYHGDVEADLHRTKIQSMRDQADWLLRNIIPYHVAEQLKVSQTYSKNHDSGGVIFASIVNFSEFYEENYEGGKECYRVLNELIGDFDELLSKPDYSSIEKIKTIGATYMAASGLNTAQAQDGSHPQEHLQILFEFAKEMMRVVDDFNNNMLWFNFKLRVGFNHGPLTAGVIGTTKLLYDIWGDTVNIASRMDTTGVECRIQVSEESYRVLSKMGYDFDYRGTVNVKGKGQMKTYLYPKCTDHRVIPQHQLSISPDIRVQVDGSIGRSPTDEIANLVPSVQYVDKTSLGSDSSTQAKDAHLSPKRPWKEPVKAEERGRFGKAIEKDDCDETGIEEANELTKLNVSKSV

SEQ ID NO: 837694 - protein, 1372 aa, Homo sapiens; identical to SEQ ID NO: 837688

SEQ ID NO: 837695 - protein, 181 aa, Homo sapiens
GRGAEPCGLERKNAGAERRSGSRLEEDPGRRQSLAPVGVGVETYFTVVLWTITMGIQGGSVLFGLLLVLAVFCHSGHSLQCYNCPNPTADCKTAVNCSSDFDACLITKAGLQVYNKCWKFEHCNFNDVTTRLRENELTYYCCKKDLCNFNEQLENGGTSLSEKTVLLLVTPFLAAAWSLHP

SEQ ID NO: 837696 - protein, 128 aa, Homo sapiens
MGIQGGSVLFGLLLVLAVFCHSGHSLQCYNCPNPTADCKTAVNCSSDFDACLITKAGLQVYNKCWKFEHCNFNDVTTRLRENELTYYCCKKDLCNFNEQLENGGTSLSEKTVLLLVTPFLAAAWSLHP

SEQ ID NO: 837697 - protein, 146 aa, Homo sapiens
IILLTVRSQSFQVLWTITMGIQGGSVLFGLLLVLAVFCHSGHSLQCYNCPNPTADCKTAVNCSSDFDACLITKAGLQVYNKCWKFEHCNFNDVTTRLRENELTYYCCKKDLCNFNEQLENGGTSLSEKTVLLLVTPFLAAAWSLHP

SEQ ID NO: 837698 - protein, 166 aa, Homo sapiens
GRGAEPCGLERKNAGAERRSGSRLEEDPGRRQVLWTITMGIQGGSVLFGLLLVLAVFCHSGHSLQCYNCPNPTADCKTAVNCSSDFDACLITKAGLQVYNKCWKFEHCNFNDVTTRLRENELTYYCCKKDLCNFNEQLENGGTSLSEKTVLLLVTPFLAAAWSLHP

SEQ ID NO: 837699 - protein, 128 aa, Homo sapiens; identical to SEQ ID NO: 837696

SEQ ID NO: 837700 - protein, 177 aa, Homo sapiens
  misc_feature (3)..(3): Xaa can be any naturally occurring amino acid
  misc_feature (8)..(8): Xaa can be any naturally occurring amino acid
GSXIDPLXFASGKIRHERRLEEDLGRRQSLAPVGVGVETYFTVVLWTITMGIQGGSVLFGLLLVLAVFCHSGHSLQCYNCPNPTADCKTAVNCSSDFDACLITKAGLQVYNKCWKFEHCNFNDVTTRLRENELTYYCCKKDLCNFNEQLENGGTSLSEKTVLLLVTPFLAAAWSLHP

SEQ ID NO: 837701 - protein, 86 aa, Homo sapiens
FFYSPPPGPEVVASPLVPCPSTPRLASASHPEELCELEIRIKELELLTITGDGFDSQSYTFLKALKDEKLQGLKTKQPGKKSASLS

SEQ ID NO: 837702 - protein, 166 aa, Homo sapiens; identical to SEQ ID NO: 837698

SEQ ID NO: 837703 - protein, 166 aa, Homo sapiens; identical to SEQ ID NO: 837698

SEQ ID NO: 837704 - protein, 166 aa, Homo sapiens; identical to SEQ ID NO: 837698

SEQ ID NO: 837705 - protein, 181 aa, Homo sapiens; identical to SEQ ID NO: 837695

SEQ ID NO: 837706 - protein, 166 aa, Homo sapiens; identical to SEQ ID NO: 837698

SEQ ID NO: 837707 - protein, 128 aa, Homo sapiens; identical to SEQ ID NO: 837696

SEQ ID NO: 837708 - protein, 154 aa, Homo sapiens
IRLGTRPVLIGRGEDPGRRQVLWTITMGIQGGSVLFGLLLVLAVFCHSGHSLQCYNCPNPTADCKTAVNCSSDFDACLITKAGLQVYNKCWKFEHCNFNDVTTRLRENELTYYCCKKDLCNFNEQLENGGTSLSEKTVLLLVTPFLAAAWSLHP

SEQ ID NO: 837709 - protein, 128 aa, Homo sapiens; identical to SEQ ID NO: 837696

SEQ ID NO: 837710 - protein, 128 aa, Homo sapiens; identical to SEQ ID NO: 837696

SEQ ID NO: 837711 - protein, 172 aa, Homo sapiens
GRGAEPCGLERKNAGAERRSGSRLEEDPGRRQSLAPVGVGVETYFTVVLWTITMGIQGGSVLFGLLLVLAVFCHSGHSLQCYNCPNPTADCKTAVNCSSDFDACLITKAELGYHYVAQAGRRQSSHFSLLKCWDYRCEPSHWPHCPYFNWGYKCITSVGSLSIAISTTSQPA

SEQ ID NO: 837712 - protein, 166 aa, Homo sapiens; identical to SEQ ID NO: 837698

SEQ ID NO: 837713 - protein, 177 aa, Homo sapiens; identical to SEQ ID NO: 837700
  misc_feature (3)..(3): Xaa can be any naturally occurring amino acid
  misc_feature (8)..(8): Xaa can be any naturally occurring amino acid

SEQ ID NO: 837714 - protein, 166 aa, Homo sapiens; identical to SEQ ID NO: 837698

SEQ ID NO: 837715 - protein, 86 aa, Homo sapiens
YSLEAHSIEDARFRNVPDCCGLHYVSNDEFLNGLVLGHASGTVSAANRLHVPRPFLARPLFLLFFVILEARVYSMNAVGTPFVVTV

SEQ ID NO: 837716 - protein, 144 aa, Homo sapiens
GRGAEPCGLERKNAGAERRSGSRLEEDPGRRQSLAPVGVGVETYFTVVLWTITMGIQGGSVLFGLLLVLAVFCHSGHSLQCYNCPNPTADCKTAVNCSSDFDACLITKADTHPLRGGGQDSYACSYKLRSVVFQALHGIGVTSV

SEQ ID NO: 837717 - protein, 85 aa, Homo sapiens
MGIQGGSVLFGLLLVLAVFCHSGHSLQCYNCPNPTADCKTAVNCSSDFDACLITKAGTGLQVGGGMQFTLVNPLGKHATLRGLTY

SEQ ID NO: 837718 - protein, 166 aa, Homo sapiens; identical to SEQ ID NO: 837698

SEQ ID NO: 837719 - protein, 177 aa, Homo sapiens; identical to SEQ ID NO: 837700
  misc_feature (3)..(3): Xaa can be any naturally occurring amino acid
  misc_feature (8)..(8): Xaa can be any naturally occurring amino acid

SEQ ID NO: 837720 - protein, 183 aa, Homo sapiens
GRGAEPCGLERKNAGAERRSGSRLEEDPGRRQSLAPVGVGVETYFTVVLWTITMGIQGGSVLFGLLLVLAVFCHSGHSLQCYNCPNPTADCKTAVNCSSDFDACLITKAGLQVYNKCWKFEHCNFNDVTTRLRENELTYYCCKKDLCNFNEQLENDTFLKALKDEKLQGLKTKQPGKKSASLS

SEQ ID NO: 837721 - protein, 128 aa, Homo sapiens; identical to SEQ ID NO: 837696

SEQ ID NO: 837722 - protein, 154 aa, Homo sapiens
AFINFRDPVLPWRHAKCSICVLWTITMGIQGGSVLFGLLLVLAVFCHSGHSLQCYNCPNPTADCKTAVNCSSDFDACLITKAGLQVYNKCWKFEHCNFNDVTTRLRENELTYYCCKKDLCNFNEQLENGGTSLSEKTVLLLVTPFLAAAWSLHP

SEQ ID NO: 837723 - protein, 166 aa, Homo sapiens; identical to SEQ ID NO: 837698

SEQ ID NO: 837724 - protein, 166 aa, Homo sapiens; identical to SEQ ID NO: 837698

SEQ ID NO: 837725 - protein, 177 aa, Homo sapiens; identical to SEQ ID NO: 837700
  misc_feature (3)..(3): Xaa can be any naturally occurring amino acid
  misc_feature (8)..(8): Xaa can be any naturally occurring amino acid

SEQ ID NO: 837726 - protein, 146 aa, Homo sapiens; identical to SEQ ID NO: 837697

SEQ ID NO: 837727 - protein, 128 aa, Homo sapiens; identical to SEQ ID NO: 837696

SEQ ID NO: 837728 - protein, 128 aa, Homo sapiens; identical to SEQ ID NO: 837696

SEQ ID NO: 837729 - protein, 89 aa, Homo sapiens
SRPVSSMDFDACLITTAGLQVYNKCWKFEHCNFNDVTTRLRENELTYYCCKKDLCNFNEQLENGGTSLSEKTVLLLVTPFLAAAWSLHP

SEQ ID NO: 837730 - protein, 97 aa, Homo sapiens
WVDRGLWVDRGLWVDRGLWVDRGLWVDRGLWVDRGFEHCNFNDVTTRLRENELTYYCCKKDLCNFNEQLENGGTSLSEKTVLLLVTPFLAAAWSLHP

SEQ ID NO: 837731 - protein, 166 aa, Homo sapiens; identical to SEQ ID NO: 837698

SEQ ID NO: 837732 - protein, 110 aa, Homo sapiens
  misc_feature (5)..(5): Xaa can be any naturally occurring amino acid
  misc_feature (33)..(33): Xaa can be any naturally occurring amino acid
  misc_feature (37)..(37): Xaa can be any naturally occurring amino acid
  misc_feature (45)..(45): Xaa can be any naturally occurring amino acid
  misc_feature (55)..(56): Xaa can be any naturally occurring amino acid
  misc_feature (59)..(59): Xaa can be any naturally occurring amino acid
  misc_feature (62)..(62): Xaa can be any naturally occurring amino acid
  misc_feature (66)..(66): Xaa can be any naturally occurring amino acid
  misc_feature (81)..(81): Xaa can be any naturally occurring amino acid
  misc_feature (93)..(94): Xaa can be any naturally occurring amino acid
  misc_feature (97)..(97): Xaa can be any naturally occurring amino acid
  misc_feature (99)..(99): Xaa can be any naturally occurring amino acid
GHGNXGLMQTAMGVGKSSGLGPGGDGEGGGERXWATXMTEGTLDXMDGQDEVCVXXRGXLEXQCMXGGRELEGRGTPGWGXRGIRPKGYPEEXXFVXGXGDICIQPPANS

SEQ ID NO: 837733 - protein, 168 aa, Homo sapiens
GRGAEPCGLERKNAGAERRSGSRLEEDPGRRQVLWTITMGIQGGSVLFGLLLVLAVFCHSGHSLQCYNCPNPTADCKTAVNCSSDFDACLITKAGLQVYNKCWKFEHCNFNDVTTRLRENELTYYCCKKDLCNFNEQLENDTFLKALKDEKLQGLKTKQPGKKSASLS

SEQ ID NO: 837734 - protein, 254 aa, Homo sapiens
LFPAGTMEGVEEKKKEVPAVPETLKKKRRNFAELKIKRLRKKFAQKMLRKARRKLIYEKAKHYHKEYRQMYRTEIRMARMARKAGNFYVPAEPKLAFVIRIRGINGVSPKVRKVLQLLRLRQIFNGTFVKLNKASINMLRIVEPYIAWGYPNLKSVNELIYKRGYGKINKKRIALTDNALIARSLGKYGIICMEDLIHEIYTVGKRFKEANNFLWPFKLSSPRGGMKKKTTHFVEGGDAGNREDQINRLIRRMN

SEQ ID NO: 837735 - protein, 254 aa, Homo sapiens; identical to SEQ ID NO: 837734

SEQ ID NO: 837736 - protein, 254 aa, Homo sapiens; identical to SEQ ID NO: 837734

SEQ ID NO: 837737 - protein, 150 aa, Homo sapiens
LFPAGTMEGVEEKKKEVPAVPETLKKKRRNFAELKIKRLRKKFAQKMLRKARRKLIYEKAKHYHKEYRQMYRTEIRMARMARKAGNFYVPAEPKLAFVIRIRGINGVSPKVRKVLQLLRLRQIFNGTFVKLNRARRCGESIGSTLMHLHD

SEQ ID NO: 837738 - protein, 254 aa, Homo sapiens; identical to SEQ ID NO: 837734

SEQ ID NO: 837739 - protein, 192 aa, Homo sapiens
MEGVEEKKKEVPAVPETLKKKRRNFAELKIKRLRKKFAQKMLRKARRKLIYEKAKHYHKEYRQMYRTEIRMARMARKAGNFYVPAEPKLAFVIRIRGINGVSPKVRKVLQLLRLRQIFNGTFVKLNKASINMLRIVEPYIAWGYPNLKSVNELIYKRGYGKINKKRIALTDNALIARSLGKYGARVRPYVSG

SEQ ID NO: 837740 - protein, 104 aa, Homo sapiens
LFPAGTMEGVEEKKKEVPAVPETLKKKRRNFAELKIKRLRKKFAQKMLRKARRKLIYEKAKHYHKEYRQMYRTEIRMARMARKAGNFYVPAEPKLAFVIRIITL

SEQ ID NO: 837741 - protein, 117 aa, Homo sapiens [sequence omitted]

SEQ ID NO: 837742 - protein, 466 aa, Homo sapiens
MRLRTRKASQQSNQIQTQRTARAKRKYSEVDDSLPSGGEKPSKNETGLLSSIKKFIKGSTPKEERENPSKRSRIERDIDNNLITSTPRAGEKPNKQISRVRRKSQVNGEAGSYEMTNQHVKQNGKLEDNPSSGSPPRTTLLGTIFSPVFNFFSPANKNGTSGSDSPGQAVEAEEIVKQLDMEQVDEITTSTTTSTNGAAYSNQAVQVRPSLNNGLEEAEETVNRDIPPLTAPVTPDSGYSSAHAEATYEEDWEVFDPYYFIKHVPPLTEEQLNRKPALPLKTRSTPEFSLVLDLDETLVHCSLNELEDAALTFPVLFQDVIYQVYVRLRPFFREFLERMSQMYEIILFTASKKVYADKLLNILDPKKQLVRHRLFREHCVCVQGNYIKDLNILGRDLSKTIIIDNSPQAFAYQLSNGIPIESWFMDKNDNELLKLIPFLEKLVELNEDVRPHIRDRFRLHDLLPPD

SEQ ID NO: 837743 - protein, 466 aa, Homo sapiens; identical to SEQ ID NO: 837742

SEQ ID NO: 837744 - protein, 466 aa, Homo sapiens; identical to SEQ ID NO: 837742

SEQ ID NO: 837745 - protein, 466 aa, Homo sapiens; identical to SEQ ID NO: 837742

SEQ ID NO: 837746 - protein, 466 aa, Homo sapiens; identical to SEQ ID NO: 837742

SEQ ID NO: 837747 - protein, 311 aa, Homo sapiens
MISGTSGSDSPGQAVEAEEIVKQLDMEQVDEITTSTTTSTNGAAYSNQAVQVRPSLNNGLEEAEETVNRDIPPLTAPVTPDSGYSSAHAEATYEEDWEVFDPYYFIKHVPPLTEEQLNRKPALPLKTRSTPEFSLVLDLDETLVHCSLNELEDAALTFPVLFQDVIYQVYVRLRPFFREFLERMSQMYEIILFTASKKVYADKLLNILDPKKQLVRHRLFREHCVCVQGNYIKDLNILGRDLSKTIIIDNSPQAFAYQLSNGIPIESWFMDKNDNELLKLIPFLEKLVELNEDVRPHIRDRFRLHDLLPPD

SEQ ID NO: 837748 - protein, 466 aa, Homo sapiens; identical to SEQ ID NO: 837742

SEQ ID NO: 837749 - protein, 466 aa, Homo sapiens; identical to SEQ ID NO: 837742

SEQ ID NO: 837750 - protein, 466 aa, Homo sapiens; identical to SEQ ID NO: 837742

SEQ ID NO: 837751 - protein, 171 aa, Homo sapiens
VCIGSKHLNRYSLHAAGGLSPQREITTIHGSPPVDHHHSWITTCGSPPFMDHHHVQWMSPAMLIVTHHDVDIYQHSITYVMQQRDANLDSRWQWHIMPLLLDVMNARVHRQFYTEAGVTISALAMSSQLLSALLAFHHQCCVHSSLRPMLARMLHNRWSSGPRVHGWPELH

SEQ ID NO: 837752 - protein, 101 aa, Homo sapiens
ENAVWAWYQELVFHSSDRLTDELWEAGGRLSLRVPLLWRHSWAEQDLLQTTTRETESIWFNRCPSRQAPEELAANPAMLEASSAAQPISDIIAFFSLPMVM

SEQ ID NO: 837753 - protein, 101 aa, Homo sapiens; identical to SEQ ID NO: 837752

SEQ ID NO: 837754 - protein, 101 aa, Homo sapiens; identical to SEQ ID NO: 837752

SEQ ID NO: 837755 - protein, 62 aa, Homo sapiens
MEHGLAGSANFSSSSPPSISGILSMIIIRTLRKDIANYNKEDDIVRGLGWGGMKLDGEGRRT

SEQ ID NO: 837756 - protein, 642 aa, Homo sapiens
MATAMDWLPWSLLLFSLMCETSAFYVPGVAPINFHQNDPVEIKAVKLTSSRTQLPYEYYSLPFCQPSKITYKAENLGEVLRGDRIVNTPFQVLMNSEKKCEVLCSQSNKPVTLTVEQSRLVAERITEDYYVHLIADNLPVATRLELYSNRDSDDKKKEKDVQFEHGYRLGFTDVNKIYLHNHLSFILYYHREDMEEDQEHTYRVVRFEVIPQSIRLEDLKADEKSSCTLPEGTNSSPQEIDPTKENQLYFTYSVHWEESDIKWASRWDTYLTMSDVQIHWFSIINSVVVVFFLSGILSMIIIRTLRKDIANYNKEDDIEDTMEESGWKLVHGDVFRPPQYPMILSSLLGSGIQLFCMILIVIFVAMLGMLSPSSRGALMTTACFLFMFMGVFGGFSAGRLYRTLKGHRWKKGAFCTATLYPGVVFGICFVLNCFIWGKHSSGAVPFPTMVALLCMWFGISLPLVYLGYYFGFRKQPYDNPVRTNQIPRQIPEQRWYMNRFVGILMAGILPFGAMFIELFFIFSAIWENQFYYLFGFLFLVFIILVVSCSQISIVMVYFQLCAEDYRWWWRNFLVSGGSAFYVLVYAIFYFVNKLDIVEFIPSLLYFGYTALMVLSFWLLTGTIGFYAAYMFVRKIYAAVKID

SEQ ID NO: 837757 - protein, 120 aa, Homo sapiens
MAIWENQFYYLFGFLFLVFIILVVSCSQISIVMVYFQLCAEDYRWWWRNFLVSGGSAFYVLVYAIFYFVNKLDIVEFIPSLLYFGYTALMVLSFWLLTGTIGFYAAYMFVRKIYAAVKID

SEQ ID NO: 837758 - protein, 70 aa, Homo sapiens
PRLGTRPGVNRPRAIFYFVNKLDIVEFIPSLLYFGYTALMVLSFWLLTGTIGFYAAYMFVRKIYAAVKID

SEQ ID NO: 837759 - protein, 642 aa, Homo sapiens; identical to SEQ ID NO: 837756

SEQ ID NO: 837760 - protein, 207 aa, Homo sapiens
MATAMDWLPWSLLLFSLMCETSAFYVPGVAPINFHQNDPVEIKAVKLTSSRTQLPYEYYSLPFCQPSKITYKAENLGEVLRGDRIVNTPFQVLMNSEKKCEVLCSQSNKPVTLTVEQSRLVAERITEDYYVHLIADNLPVATRLELYSNRDSDDKKKEKDVQFEHGYRLGFTDVNKIYLHNHLSFILYYHREDMEEDHYLSYPVFSF

SEQ ID NO: 837761 - protein, 123 aa, Homo sapiens
IFFTSSPQSNPGLSSEQDWLPWSLLLFSLMCETSAFYVPGVAPINFHQNDPVEIKVSVFLDFWSLCARQCVWSTMVSCSCPSCGCREERIVPVTPELCLSLSLCLWFSVPSLFLVLSVSLSLC

SEQ ID NO: 837762 - protein, 110 aa, Homo sapiens
MVSSSGMLRCLLHWESRSGLGSASRDSGQEPCGGGRECASAAQVASPSVEPRRSPPPCAAPIPGIRASWGPHGAMSTGALSHHGGSAVHVVRDLPAPRLLGLLLRLPKAA

SEQ ID NO: 837763 - protein, 625 aa, Homo sapiens
MCETSAFYVPGVAPINFHQNDPVEIKAVKLTSSRTQLPYEYYSLPFCQPSKITYKAENLGEVLRGDRIVNTPFQVLMNSEKKCEVLCSQSNKPVTLTVEQSRLVAERITEDYYVHLIADNLPVATRLELYSNRDSDDKKKEKDVQFEHGYRLGFTDVNKIYLHNHLSFILYYHREDMEEDQEHTYRVVRFEVIPQSIRLEDLKADEKSSCTLPEGTNSSPQEIDPTKENQLYFTYSVHWEESDIKWASRWDTYLTMSDVQIHWFSIINSVVVVFFLSGILSMIIIRTLRKDIANYNKEDDIEDTMEESGWKLVHGDVFRPPQYPMILSSLLGSGIQLFCMILIVIFVAMLGMLSPSSRGALMTTACFLFMFMGVFGGFSAGRLYRTLKGHRWKKGAFCTATLYPGVVFGICFVLNCFIWGKHSSGAVPFPTMVALLCMWFGISLPLVYLGYYFGFRKQPYDNPVRTNQIPRQIPEQRWYMNRFVGILMAGILPFGAMFIELFFIFSAIWENQFYYLFGFLFLVFIILVVSCSQISIVMVYFQLCAEDYRWWWRNFLVSGGSAFYVLVYAIFYFVNKLDIVEFIPSLLYFGYTALMVLSFWLLTGTIGFYAAYMFVRKIYAAVKID

SEQ ID NO: 837764 - protein, 642 aa, Homo sapiens; identical to SEQ ID NO: 837756

SEQ ID NO: 837765 - protein, 614 aa, Homo sapiens
MATAMDWLPWSLLLFSLMCETSAFYVPGVAPINFHQNDPVEIKAVKLTSSRTQLPYEYYSLPFCQPSKITYKAENLGEVLRGDRIVNTPFQVLMNSEKKCEVLCSQSNKPVTLTVEQSRLVAERITEDYYVHLIADNLPVATRLELYSNRDSDDKKKEKDVQFEHGYRLGFTDVNKIYLHNHLSFILYYHREDMEEDQEHTYRVVRFEVIPQSIRLEDLKADEKSSCTLPEGTNSSPQEIDPTKENQLYFTYSVHWEESDIKWASRWDTYLTMSDVQIHWFSIINSVVVVFFLSGILSMIIIRTLRKDIANYNKEDDIEDTMEESGWKLVHGDVFRPPQYPMILSSLLGSGIQLFCMILIVIFVAMLGMLSPSSRGALMTTACFLFMFMGVFGGFSAGRLYRTLKGHRWKKGAFCVPFPTMVALLCMWFGISLPLVYLGYYFGFRKQPYDNPVRTNQIPRQIPEQRWYMNRFVGILMAGILPFGAMFIELFFIFSAIWENQFYYLFGFLFLVFIILVVSCSQISIVMVYFQLCAEDYRWWWRNFLVSGGSAFYVLVYAIFYFVNKLDIVEFIPSLLYFGYTALMVLSFWLLTGTIGFYAAYMFVRKIYAAVKID

SEQ ID NO: 837766 - protein, 549 aa, Homo sapiens
MNSEKKCEVLCSQSNKPVTLTVEQSRLVAERITEDYYVHLIADNLPVATRLELYSNRDSDDKKKEKDVQFEHGYRLGFTDVNKIYLHNHLSFILYYHREDMEEDQEHTYRVVRFEVIPQSIRLEDLKADEKSSCTLPEGTNSSPQEIDPTKENQLYFTYSVHWEESDIKWASRWDTYLTMSDVQIHWFSIINSVVVVFFLSGILSMIIIRTLRKDIANYNKEDDIEDTMEESGWKLVHGDVFRPPQYPMILSSLLGSGIQLFCMILIVIFVAMLGMLSPSSRGALMTTACFLFMFMGVFGGFSAGRLYRTLKGHRWKKGAFCTATLYPGVVFGICFVLNCFIWGKHSSGAVPFPTMVALLCMWFGISLPLVYLGYYFGFRKQPYDNPVRTNQIPRQIPEQRWYMNRFVGILMAGILPFGAMFIELFFIFSAIWENQFYYLFGFLFLVFIILVVSCSQISIVMVYFQLCAEDYRWWWRNFLVSGGSAFYVLVYAIFYFVNKLDIVEFIPSLLYFGYTALMVLSFWLLTGTIGFYAAYMFVRKIYAAVKID

SEQ ID NO: 837767 - protein, 103 aa, Homo sapiens
QATVKLVGRGLPQDNTDLPLFPPQDYRWWWRNFLVSGGSAFYVLVYAIFYFVNKLDIVEFIPSLLYFGYTALMVLSFWLLTGTIGFYAAYMFVRKIYAAVKID

SEQ ID NO: 837768 - protein, 558 aa, Homo sapiens
MATAMDWLPWSLLLFSLMCETSAFYVPGVAPINFHQNDPVEIKAVKLTSSRTQLPYEYYSLPFCQPSKITYKAENLGEVLRGDRIVNTPFQVLMNSEKKCEVLCSQSNKPVTLTVEQSRLVAERITEDYYVHLIADNLPVATRLELYSNRDSDDKKKEKDVQFEHGYRLGFTDVNKIYLHNHLSFILYYHREDMEEDQEHTYRVVRFEVIPQSIRLEDLKADEKSSCTLPEGTNSSPQEIDPTKENQLYFTYSVHWEESDIKWASRWDTYLTMSDVQIHWFSIINSVVVVFFLSGILSMIIIRTLRKDIANYNKEDDIEDTMEESGWKLVHGDVFRPPQYPMILSSLLGSGIQLFCMILIVIFVAMLGMLSPSSRGALMTTACFLFMFMGVFGGFSAGRLYRTLKGHRWKKGAFCTATLYPGVVFGICFVLNCFIWGKHSSGAVPFPTMVALLCMWFGISLPLVYLGYYFGFRKQPYDNPVRTNQIPRQIPEQRWYMNRFVGILMAGILPFGAMFIELFFIFSAIWENQFYYLFGFLFLVFIIKHLLLSYKRPHPPRD

SEQ ID NO: 837769 - protein, 615 aa, Homo sapiens
MATAMDWLPWSLLLFSLMCETSAFYVPGVAPINFHQNDPVEIKAVKLTSSRTQLPYEYYSLPFCQPSKITYKAENLGEVLRGDRIVNTPFQVLMNSEKKCEVLCSQSNKPVTLTVEQSRLVAERITEDYYVHLIADNLPVATRLELYSNRDSDDKKKEKDVQFEHGYRLGFTDVNKIYLHNHLSFILYYHREDMEEDQEHTYRVVRFEVIPQSIRLEDLKADEKSSCTLPEGTNSSPQEIDPTKENQLYFTYSVHWEESDIKWASRWDTYLTMSDVQIHWFSIINSVVVVFFLSGILSMIIIRTLRKDIANYNKEDDIEDTMEESGWKLVHGDVFRPPQYPMILSSLLGSGIQLFCMILIVIFVAMLGMLSPSSRGALMTTACFLFMFMGVFGGFSAGRLYRTLKGHRWKKGAFCTATLYPGVVFGICFVLNCFIWGKHSSGAVPFPTMVALLCMWFGISLPLVYLGYYFGFRKQPYDNPVRTNQIPRQIPEQRWYMNRFVGILMAGILPFGAMFIELFFIFSAIWENQFYYLFGFLFLVFIILVVSCSQISIVMVYFQLCAEDYRWWWRNFLVSGGSAFYVLVYAIFYFVNKLLPFAYKRGSERWMFFLTSLIS

SEQ ID NO: 837770 - protein, 116 aa, Homo sapiens
MCETSAFYVPGVAPINFHQNDPVEIKAVKLTSSRTQLPYEYYSLPFCQPSKITYKAENLGEVLRGDRIVNTPFQVLMNSEKKCEVLCSQSNKPVTLTVEQSRLVAERITEDYYVHL

SEQ ID NO: 837771 - protein, 935 aa, Homo sapiens
FVPILNKVREFFLLFSSFLKRTVLLCCSFELGSVGRSDILPRPSALGSLAKLSSKMKRLTCFFICFFLSEVSGFEIPINGLSEFVDYEDLVELAPGKFQLVAENRRYQRSLPGESEEMMEEVDQVTLYSYKVQSTITSRMATTMIQSKVVNNSPQPQNVVFDVQIPKGAFISNFSMTVDGKTFRSSIKEKTVGRALYAQARAKGKTAGLVRSSALDMENFRTEVNVLPGAKVQFELHYQEVKWRKLGSYEHRIYLQPGRLAKHLEVDVWVIEPQGLRFLHVPDTFEGHFDGVPVISKGQQKAHVSFKPTVAQQRICPSCRETAVDGELVVLYDVKREEKAGELEVFNGYFVHFFAPDNLDPIPKNILFVIDVSGSMWGVKMKQTVEAMKTILDDLRAEDHFSVIDFNQNIRTWRNDLISATKTQVADAKRYIEKIQPSGGTNINEALLRAIFILNEANNLGLLDPNSVSLIILVSDGDPTVGELKLSKIQKNVKENIQDNISLFSLGMGFDVDYDFLKRLSNENHGIAQRIYGNQDTSSQLKKFYNQVSTPLLRNVQFNYPHTSVTDVTQNNFHNYFGGSEIVVAGKFDPAKLDQIESVITATSANTQLVLETLAQMDDLQDFLSKDKHADPDFTRKLWAYLTINQLLAERSLAPTAAAKRRITRSILQMSLDHHIVTPLTSLVIENEAGDERMLADAPPQDPSCCSGALYYGSKVVPDSTPSWANPSPTPVISMLAQGSQVLESTPPPHVMRVENDPHFIIYLPKSQKNICFNIDSEPGKILNLVSDPESGIVVNGQLVGAKKPNNGKLSTYFGKLGFYFQSEDIKIEISTETITLSHGSSTFSLSWSDTAQVTNQRVQISVKKEKVVTITLDKEMSFSVLLHRVWKKHPVNVDFLGIYIPPTNKFSPKAHGLIGQFMQEPKIHIFNERPGKDP

SEQ ID NO: 837772 - protein, 916 aa, Homo sapiens
FVPILNKVREFFLLFSSFLKRTVLLCCSFELGSVGRSDILPRPSALGSLAKLSSFEIPINGLSEFVDYEDLVELAPGKFQLVAENRRYQRSLPGESEEMMEEVDQVTLYSYKVQSTITSRMATTMIQSKVVNNSPQPQNVVFDVQIPKGAFISNFSMTVDGKTFRSSIKEKTVGRALYAQARAKGKTAGLVRSSALDMENFRTEVNVLPGAKVQFELHYQEVKWRKLGSYEHRIYLQPGRLAKHLEVDVWVIEPQGLRFLHVPDTFEGHFDGVPVISKGQQKAHVSFKPTVAQQRICPSCRETAVDGELVVLYDVKREEKAGELEVFNGYFVHFFAPDNLDPIPKNILFVIDVSGSMWGVKMKQTVEAMKTILDDLRAEDHFSVIDFNQNIRTWRNDLISATKTQVADAKRYIEKIQPSGGTNINEALLRAIFILNEANNLGLLDPNSVSLIILVSDGDPTVGELKLSKIQKNVKENIQDNISLFSLGMGFDVDYDFLKRLSNENHGIAQRIYGNQDTSSQLKKFYNQVSTPLLRNVQFNYPHTSVTDVTQNNFHNYFGGSEIVVAGKFDPAKLDQIESVITATSANTQLVLETLAQMDDLQDFLSKDKHADPDFTRKLWAYLTINQLLAERSLAPTAAAKRRITRSILQMSLDHHIVTPLTSLVIENEAGDERMLADAPPQDPSCCSGALYYGSKVVPDSTPSWANPSPTPVISMLAQGSQVLESTPPPHVMRVENDPHFIIYLPKSQKNICFNIDSEPGKILNLVSDPESGIVVNGQLVGAKKPNNGKLSTYFGKLGFYFQSEDIKIEISTETITLSHGSSTFSLSWSDTAQVTNQRVQISVKKEKVVTITLDKEMSFSVLLHRVWKKHPVNVDFLGIYIPPTNKFSPKAHGLIGQFMQEPKIHIFNERPGKDP

SEQ ID NO: 837773 - protein, 910 aa, Homo sapiens
FVPILNKVREFFLLFSSFLKRTVLLCCSFELGSVGRSDILPRPSALGSLAKLSSKMKRLTCFFICFFLSEVSGFEIPINGLSERSLPGESEEMMEEVDQVTLYSYKVQSTITSRMATTMIQSKVVNNSPQPQNVVFDVQIPKGAFISNFSMTVDGKTFRSSIKEKTVGRALYAQARAKGKTAGLVRSSALDMENFRTEVNVLPGAKVQFELHYQEVKWRKLGSYEHRIYLQPGRLAKHLEVDVWVIEPQGLRFLHVPDTFEGHFDGVPVISKGQQKAHVSFKPTVAQQRICPSCRETAVDGELVVLYDVKREEKAGELEVFNGYFVHFFAPDNLDPIPKNILFVIDVSGSMWGVKMKQTVEAMKTILDDLRAEDHFSVIDFNQNIRTWRNDLISATKTQVADAKRYIEKIQPSGGTNINEALLRAIFILNEANNLGLLDPNSVSLIILVSDGDPTVGELKLSKIQKNVKENIQDNISLFSLGMGFDVDYDFLKRLSNENHGIAQRIYGNQDTSSQLKKFYNQVSTPLLRNVQFNYPHTSVTDVTQNNFHNYFGGSEIVVAGKFDPAKLDQIESVITATSANTQLVLETLAQMDDLQDFLSKDKHADPDFTRKLWAYLTINQLLAERSLAPTAAAKRRITRSILQMSLDHHIVTPLTSLVIENEAGDERMLADAPPQDPSCCSGALYYGSKVVPDSTPSWANPSPTPVISMLAQGSQVLESTPPPHVMRVENDPHFIIYLPKSQKNICFNIDSEPGKILNLVSDPESGIVVNGQLVGAKKPNNGKLSTYFGKLGFYFQSEDIKIEISTETITLSHGSSTFSLSWSDTAQVTNQRVQISVKKEKVVTITLDKEMSFSVLLHRVWKKHPVNVDFLGIYIPPTNKFSPKAHGLIGQFMQEPKIHIFNERPGKDP

SEQ ID NO: 837774 - protein, 935 aa, Homo sapiens; identical to SEQ ID NO: 837771

SEQ ID NO: 837775 - protein, 935 aa, Homo sapiens; identical to SEQ ID NO: 837771

SEQ ID NO: 837776 - protein, 896 aa, Homo sapiens
FVPILNKVREFFLLFSSFLKRTVLLCCSFELGSVGRSDILPRPSALGSLAKLSSKMKRLTCFFICFFLSEVSGFEIPINGLSEFVDYEDLVELAPGKFQLVAENRRYQRSLPGESEEMMEEVDQVTLYSYKVQSTITSRMATTMIQSKVVNNSPQPQNVVFDVQIPKGAFISNFSMTVDGKTFRSSIKEKTVGRALYAQARAKGKTAGLVRSSALDMENFRTEVNVLPGAKVQFELHYQEVKWRKLGSYEHRIYLQPGRLAKHLEVDVWVIEPQGLRFLHVPDTFEGHFDGVPVISKGQQKAHVSFKPTVAQQRICPSCRETAVDGELVVLYDVKREEKAGELEVFNGYFVHFFAPDNLDPIPKNILFVIDVSGSMWGVKMKQTVEAMKTILDDLRAEDHFSVIDFNQNIRTWRNDLISATKTQVADAKRYIEKIQPSGGTNINEALLRAIFILNEANNLGLLDPNSVSLIILVSDGDPTVGELKLSKIQKNVKENIQDNISLFSLGMGFDVDYDFLKRLSNENHGIAQRIYGNQDTSSQLKKFYNQVSTPLLRNVQFNYPHTSVTDVTQNNFHNYFGGSEIVVAGKFDPAKLDQIESVITATSANTQLVLETLAQMDDLQDFLSKDKHADPDFTRKLWAYLTINQLLAERSLAPTAAAKRRITRSILQMSLDHHIVTPLTSLVIENEAGDERMLADAPPQDPSCCSGALYYGSKVVPDSTPSWANPSPTPVISMLAQGSQVLESTPPPHVMRVENDPHFIIYLPKSQKNICFNIDSEPGKILNLVSDPESGIVVNGQLVGAKKPNNGKLSTYFGKLGFYFQSEDIKIEISTETITLSHGSSTFSLSWSDTAQVTNQRVQISVKKVIVFGRSIPSMLTFWESTYPLQTSSHLKPTD

SEQ ID NO: 837777 - protein, 935 aa, Homo sapiens; identical to SEQ ID NO: 837771

SEQ ID NO: 837778 - protein, 167 aa, Homo sapiens
FVPILNKVREFFLLFSSFLKRTVLLCCSFELGSVGRSDILPRPSALGSLAKLSSKMKRLTCFFICFFLSEVSGFEIPINGLSEFVDYEDLVELAPGKFQLVAENRRYQRSLPGESEEMMEEVDQVTLYSYKVQSTIIIVFGRSIPSMLTFWESTYPLQTSSHLKPTD

SEQ ID NO: 837779 - protein, 211 aa, Homo sapiens
FVPILNKVREFFLLFSSFLKRTVLLCCSFELGSVGRSDILPRPSALGSLAKLSSKMKRLTCFFICFFLSEVSGFEIPINGLSEFVDYEDLVELAPGKFQLVAENRRYQRSLPGESEEMMEEVDQVTLYSYKVQSTITSRMATTMIQSKVVNNSPQPQNVVFDVQIPKGAFISNFSMTVDGKTFRSSIKEKTVGRALYAQARAKGKTAGLVR

SEQ ID NO: 837780 - protein, 917 aa, Homo sapiens
FVPILNKVREFFLLFSSFLKRTVLLCCSFELGSVGRSDILPRPSALGSLAKLSSKMKRLTCFFICFFLSEVSGFEIPINGLSEFVDYEDLVELAPGKFQLVAENRRYQRSLPGESEEMMEEVDQVTLYSYKVQSTITSRMATTMIQSKVVNNSPQPQNVVFDVQIPKGAFISNFSMTVDGKTFRSSIKEKTVGRALYAQARAKGKTAGLVRSSALDMENFRTEVNVLPGAKVQFELHYQEVKWRKLGSYEHRIYLQPGRLAKHLEVDVWVIEPQGLRFLHVPDTFEGHFDGVPVISKGQQKAHVSFKPTVAQQRICPSCRETAVDGELVVLYDVKREEKAGELEVFNGYFVHFFAPDNLDPIPKNILFVIDVSGSMWGVKMKQTVEAMKTILDDLRAEDHFSVIDFNQNIRTWRNDLISATKTQVADAKRYIEKIQPSGGTNINEALLRAIFILNEANNLGLLDPNSVSLIILVSDGDPTVGELKLSKIQKNVKENIQDNISLFSLGMGFDVDYDFLKRLSNENHGIAQRIYGNQDTSSQLKKFYNQVSTPLLRNVQFNYPHTSVTDVTQNNFHNYFGGSEIVVAGANTQLVLETLAQMDDLQDFLSKDKHADPDFTRKLWAYLTINQLLAERSLAPTAAAKRRITRSILQMSLDHHIVTPLTSLVIENEAGDERMLADAPPQDPSCCSGALYYGSKVVPDSTPSWANPSPTPVISMLAQGSQVLESTPPPHVMRVENDPHFIIYLPKSQKNICFNIDSEPGKILNLVSDPESGIVVNGQLVGAKKPNNGKLSTYFGKLGFYFQSEDIKIEISTETITLSHGSSTFSLSWSDTAQVTNQRVQISVKKEKVVTITLDKEMSFSVLLHRVWKKHPVNVDFLGIYIPPTNKFSPKAHGLIGQFMQEPKIHIFNERPGKDP

SEQ ID NO: 837781 - protein, 860 aa, Homo sapiens
FVPILNKVREFFLLFSSFLKRTVLLCCSFELGSVGRSDILPRPSALGSLAKLSSKMKRLTCFFICFFLSEVSGFEIPINGLSEFVDYEDLVELAPGKFQLVAENRRYQRSLPGESEEMMEEVDQVTLYSYKVQSTITSRMATTMIQSKVVNNSPQPQNVVFDVQIPKGAFISNFSMTVDGKTFRSSIKEKTVGRALYAQARAKGKTAGLVRSSALDMENFRTEVNVLPGAKVQFELHYQEVKWRKLGSYEHRIYLQPGRLAKHLEVDVWVIEPQGLRFLHVPDTFEGHFDGVPVISKGQQKAHVSFKPTVAQQRICPSCRETAVDGELVVLYDVKREEKAGELEVFNGYFVHFFAPDNLDPIPKNILFVIDVSGSMWGVKMKQTVEAMKTILDDLRAEDHFSVIDFNQNIRTWRNDLISATKTQVADAKRYIEKIQPSGGTNINEALLRAIFILNEANNLGLLDPNSVSLIILVSDGDPTVGELKLSKIQKNVKENIQDNISLFSLGMGFDVDYDFLKRLSNENHGIAQRIYGNQDTSSQLKKFYNQVSTPLLRNVQFNYPHTSVTDVTQNNFHNYFGGSEIVVAGKFDPAKLDQIESVITATSANTQLVLETLAQMDDLQDFLSKDKHADPDFTRKLWAYLTINQLLAERSLAPTAAAKRRITRSILQMSLDHHIVTPLTSLVIENEAGDERMLADAPPQDPSCCSGALYYGSKVVPDSTPSWANPSPTPVISMLAQGSQVLESTPPPHVMRVENDPHFIIYLPKSQKNICFNIDSEPGKILNLVSDPESGIVVNGQLVGAKKPNNGKLSTYFGKLGFYFQSEDIKIEISTETITLSHGSSTFSLSWSDTAQVTNQRQV

SEQ ID NO: 837782 - protein, 802 aa, Homo sapiens
FVPILNKVREFFLLFSSFLKRTVLLCCSFELGSVGRSDILPRPSALGSLAKLSSKMKRLTCFFICFFLSEVSGFEIPINGLSEFVDYEDLVELAPGKFQLVAENRRYQRSLPGESEEMMEEVDQVTLYSYKVQSTITSRMATTMIQSKVVNNSPQPQNVVFDVQIPKGAFISNFSMTVDGKTFRSSIKEKTVGRALYAQARAKGKTAGLVRSSALDMENFRTEVNVLPGAKVQFELHYQEVKWRKLGSYEHRIYLQPGRLAKHLEVDVWVIEPQGLRFLHVPDTFEGHFDGVPVISKGQQKAHVSFKPTVAQQRICPSCRETAVDGELVVLYDVKREEKAGELEVFNGYFVHFFAPDNLDPIPKNILFVIDVSGSMWGVKMKQTVEAMKTILDDLRAEDHFSVIDFNQNIRTWRNDLISATKTQVADAKRYIEKIQPSGGTNINEALLRAIFILNEANNLGLLDPNSVSLIILVSDGDPTVGELKLSKIQKNVKENIQDNISLFSLGMGFDVDYDFLKRLSNENHGIAQRIYGNQDTSSQLKKFYNQVSTPLLRNVQFNYPHTSVTDVTQNNFHNYFGGSEIVVAGKFDPAKLDQIESVITATSANTQLVLETLAQMDDLQDFLSKDKHADPDFTRKLWAYLTINQLLAERSLAPTAAAKRRITRSILQMSLDHHIVTPLTSLVIENEAGDERMLADAPPQDPSCCSGALYYGSKVVPDSTPSWANPSPTPVISMLAQGSQVLESTPPPHVMRVENDPHFIIYLPKSQKNICFNIDSEPGKILNLVSDPESGKIKINYICTN

SEQ ID NO: 837783 - protein, 672 aa, Homo sapiens
  misc_feature (666)..(666): Xaa can be any naturally occurring amino acid
FVPILNKVREFFLLFSSFLKRTVLLCCSFELGSVGRSDILPRPSALGSLAKLSSKMKRLTCFFICFFLSEVSGFEIPINGLSEFVDYEDLVELAPGKFQLVAENRRYQRSLPGESEEMMEEVDQVTLYSYKVQSTITSRMATTMIQSKVVNNSPQPQNVVFDVQIPKGAFISNFSMTVDGKTFRSSIKEKTVGRALYAQARAKGKTAGLVRSSALDMENFRTEVNVLPGAKVQFELHYQEVKWRKLGSYEHRIYLQPGRLAKHLEVDVWVIEPQGLRFLHVPDTFEGHFDGVPVISKGQQKAHVSFKPTVAQQRICPSCRETAVDGELVVLYDVKREEKAGELEVFNGYFVHFFAPDNLDPIPKNILFVIDVSGSMWGVKMKQTVEAMKTILDDLRAEDHFSVIDFNQNIRTWRNDLISATKTQVADAKRYIEKIQPSGGTNINEALLRAIFILNEANNLGLLDPNSVSLIILVSDGDPTVGELKLSKIQKNVKENIQDNISLFSLGMGFDVDYDFLKRLSNENHGIAQRIYGNQDTSSQLKKFYNQVSTPLLRNVQFNYPHTSVTDVTQNNFHNYFGGSEIVVAGKFDPAKLDQIESVITATSANTQLVLETLAQMDDLQDFLSKDKHADPDFTRKLWAYLTINQLLAERASVSLHFEKDADSSXRIIAPM

SEQ ID NO: 837784 - protein, 161 aa, Homo sapiens
LHQGLKKDRKNLLETRLHITGRELRSKIAETFGLQENYIKIVINKKQLQLVAGITGAHHHRCTSPCPDNFFVFVVEMRFHYVAHASLKLLGSSDPPTTASQSAGITGVSHRTQPPFCIYCWNSEKFVFAHQLFYMWRYNLYRKVRIKYFVSFSLFSCFQNK

SEQ ID NO: 837785 - protein, 625 aa, Homo sapiens
MKTNGGRCRIRALCWSRREWRGAGMAQKKYLQAKLTQFLREDRIQLWKPPYTDENKKVGLALKDLAKQYSDRLECCENEVEKVIEEIRCKAIERGTGNDNYRTTGIATIEVFLPPRLKKDRKNLLETRLHITGRELRSKIAETFGLQENYIKIVINKKQLQLGKTLEEQGVAHNVKAMVLELKQSEEDARKNFQLEEEEQNEAKLKEKQIQRTKRGLEILAKRAAETVVDPEMTPYLDIANQTGRSIRIPPSERKALMLAMGYHEKGRAFLKRKEYGIALPCLLDADKYFCECCRELLDTVDNYAVLQLDIVWCYFRLEQLECLDDAEKKLNLAQKCFKNCYGENHQRLVHIKGNCGKEKVLFLRLYLLQGIRNYHSGNDVEAYEYLNKARQLFKELYIDPSKVDNLLQLGFTAQEARLGLRACDGNVDHAATHITNRREELAQIRKEEKEKKRRRLENIRFLKGMGYSTHAAQQILLSNPQMWWLNDSNPETDNRQESPSQENIDRLVYMGFDALVAEAALRVFRGNVQLAAQTLAHNGGSLPPELPLSPEDSLSPPATSPSDSAGTSSASTDEDMETEAVNEILEDIPEHEEDYLDSTLEDEEIIIAEYLSYVENRKSATKKN

SEQ ID NO: 837786 - protein, 639 aa, Homo sapiens
MKTNGGRCRIRALCWSRREWRGAGMAQKKYLQAKLTQFLREDRIQLWKPPYTDENKKVGLALKDLAKQYSDRLECCENEVEKVIEEIRCKAIERGTGNDNYRTTGIATIEVFLPPRLKKDRKNLLETRLHITGRELRSKIAETFGLQENYIKIVINKKQLQLGKTLEEQGVAHNVKAMVLELKQSEEDARKNFQLEEEEQNEAKLKEKQIQRTKRGLEILAKRAAETVVDPEMTPYLDIANQTGRSIRIPPSERKALMLAMGYHEKGRAFLKRKEYGIALPCLLDADKYFCECCRELLDTVDNYAVLQLDIVWCYFRLEQLECLDDAEKKLNLAQKCFKNCYGENHQRLVHIKGNCGKEKVLFLRLYLLQGIRNYHSGNDVEAYEYLNKARQLFKELYIDPSKVDNLLQLGFTAQEARLGLRACDGNVDHAATHITNRREELAQIRKEEKEKKRRRLENIRFLKGMGYSTHAAQQVLHAASGNLDEALKILLSNPQMWWLNDSNPETDNRQESPSQENIDRLVYMGFDALVAEAALRVFRGNVQLAAQTLAHNGGSLPPELPLSPEDSLSPPATSPSDSAGTSSASTDEDMETEAVNEILEDIPEHEEDYLDSTLEDEEIIIAEYLSYVENRKSATKKN

SEQ ID NO: 837787 - protein, 569 aa, Homo sapiens
MKTNGGRCRIRALCWSRREWRGAGMAQKKYLQAKLTQFLREDRIQLWKPPYTDENKKVGLALKDRKNLLETRLHITGRELRSKIAETFGLQENYIKIVINKKQLQLGKTLEEQGVAHNVKAMVLELKQSEEDARKNFQLEEEEQNEAKLKEKQIQRTKRGLEILAKRAAETVVDPEMTPYLDIANQTGRSIRIPPSERKALMLAMGYHEKGRAFLKRKEYGIALPCLLDADKYFCECCRELLDTVDNYAVLQLDIVWCYFRLEQLECLDDAEKKLNLAQKCFKNCYGENHQRLVHIKGNCGKEKVLFLRLYLLQGIRNYHSGNDVEAYEYLNKARQLFKELYIDPSKVDNLLQLGFTAQEARLGLRACDGNVDHAATHITNRREELAQIRKEEKEKKRRRLENIRFLKGMGYSTHAAQQILLSNPQMWWLNDSNPETDNRQESPSQENIDRLVYMGFDALVAEAALRVFRGNVQLAAQTLAHNGGSLPPELPLSPEDSLSPPATSPSDSAGTSSASTDEDMETEAVNEILEDIPEHEEDYLDSTLEDEEIIIAEYLSYVENRKSATKKN

SEQ ID NO: 837788 - protein, 448 aa, Homo sapiens
MVLELKQSEEDARKNFQLEEEEQNEAKLKEKQIQRTKRGLEILAKRAAETVVDPEMTPYLDIANQTGRSIRIPPSERKALMLAMGYHEKGRAFLKRKEYGIALPCLLDADKYFCECCRELLDTVDNYAVLQLDIVWCYFRLEQLECLDDAEKKLNLAQKCFKNCYGENHQRLVHIKGNCGKEKVLFLRLYLLQGIRNYHSGNDVEAYEYLNKARQLFKELYIDPSKVDNLLQLGFTAQEARLGLRACDGNVDHAATHITNRREELAQIRKEEKEKKRRRLENIRFLKGMGYSTHAAQQILLSNPQMWWLNDSNPETDNRQESPSQENIDRLVYMGFDALVAEAALRVFRGNVQLAAQTLAHNGGSLPPELPLSPEDSLSPPATSPSDSAGTSSASTDEDMETEAVNEILEDIPEHEEDYLDSTLEDEEIIIAEYLSYVENRKSATKKN

SEQ ID NO: 837789 - protein, 356 aa, Homo sapiens
QHDEPGVLADVVDGQDADKYFCECCRELLDTVDNYAVLQLDIVWCYFRLEQLECLDDAEKKLNLAQKCFKNCYGENHQRLVHIKGNCGKEKVLFLRLYLLQGIRNYHSGNDVEAYEYLNKARQLFKELYIDPSKVDNLLQLGFTAQEARLGLRACDGNVDHAATHITNRREELAQIRKEEKEKKRRRLENIRFLKGMGYSTHAAQQILLSNPQMWWLNDSNPETDNRQESPSQENIDRLVYMGFDALVAEAALRVFRGNVQLAAQTLAHNGGSLPPELPLSPEDSLSPPATSPSDSAGTSSASTDEDMETEAVNEILEDIPEHEEDYLDSTLEDEEIIIAEYLSYVENRKSATKKN

SEQ ID NO: 837790 - protein, 193 aa, Homo sapiens
RVSLWLPSPESRSHSQSPAQAEPELQPERGGALSPVLLSSSASILLSNPQMWWLNDSNPETDNRQESPSQENIDRLVYMGFDALVAEAALRVFRGNVQLAAQTLAHNGGSLPPELPLSPEDSLSPPATSPSDSAGTSSASTDEDMETEAVNEILEDIPEHEEDYLDSTLEDEEIIIAEYLSYVENRKSATKKN

SEQ ID NO: 837791 - protein, 548 aa, Homo sapiens
MKTNGGRCRIRALCWSRREWRGAGMAQKKYLQAKLTQFLREDRIQLWKPPYTDENKKVGLALKDLAKQYSDRLECCENEVEKVIEEIRCKAIERGTGNDNYRTTGIATIEVFLPPRLKKDRKNLLETRLHITGRELRSKIAETFGLQENYIKIVINKKQLQLGKTLEEQGVAHNVKAMVLELKQSEEDARKNFQLEEEEQNEAKLKEKQIQRTKRGLEILAKRAAETVVDPEMTPYLDIANQTGRSIRIPPSERKALMLAMGYHEKGRAFLKRKEYGIALPCLLDADKYFCECCRELLDTVDNYAVLQLDIVWCYFRLEQLECLDDAEKKLNLAQKCFKNCYGENHQRLVHIKGNCGKEKVLFLRLYLLQGIRNYHSGNDVEAYEYLNKARQLFKELYIDPSKVDNLLQLGFTAQEARLGLRACDGNVDHAATHITNRREELAQIRKEEKEKKRRRLENIRFLKGMGYSTHAAQQVLHAASGNLDEALKVAAPSGPLALSLSSGSCPELPPWLSSILPGSLLWAAPSSGSEGQVSPGLQPRHRLREAT

SEQ ID NO: 837792 - protein, 291 aa, Homo sapiens
MKTNGGRCRIRALCWSRREWRGAGMAQKKYLQAKLTQFLREDRIQLWKPPYTDENKKVGLALKDLAKQYSDRLECCENEVEKVIEEIRCKAIERGTGNDNYRTTGIATIEVFLPPRLKKDRKNLLETRLHITGRELRSKIAETFGLQENYIKIVINKKQLQLGKTLEEQGVAHNVKAMVLELKQSEEDARKNFQLEEEEQNEAKLKEKQIQRTKRGLEILAKRAAETVVDPEMTPYLDIANQTGRSIRIPPSERKALMLAMGYHEKGRAFLKRKEYGIALPCLLDADKYFW

SEQ ID NO: 837793 - protein, 499 aa, Homo sapiens
MKTNGGRCRIRALCWSRREWRGAGMAQKKYLQAKLTQFLREDRIQLWKPPYTDENKKVGLALKDLAKQYSDRLECCENEVEKVIEEIRCKAIERGTGNDNYRTTGIATIEVFLPPRLKKDRKNLLETRLHITGRELRSKIAETFGLQENYIKIVINKKQLQLGKTLEEQGVAHNVKAMVLELKQSEEDARKNFQLEEEEQNEAKLKEKQIQRTKRGLEILAKRAAETVVDPEMTPYLDIANQTGRSIRIPPSERKALMLAMGYHEKGRAFLKRKEYGIALPCLLDADKYFCECCRELLDTVDNYAVLQLDIVWCYFRLEQLECLDDAEKKLNLAQKCFKNCYGENHQRLVHIKGNCGKEKVLFLRLYLLQGIRNYHSGNDVEAYEYLNKARQLFKELYIDPSKVDNLLQLGFTAQEARLGLRACDGNVDHAATHITNRREVPTFTCPSSLGYERTKKDNPTGVLITRNSLLLQIGKEGETCPFFFLETESHFVIQAGVQ

SEQ ID NO: 837794 - protein, 291 aa, Homo sapiens; identical to SEQ ID NO: 837792

SEQ ID NO: 837795 - protein, 625 aa, Homo sapiens; identical to SEQ ID NO: 837785

SEQ ID NO: 837796 - protein, 625 aa, Homo sapiens; identical to SEQ ID NO: 837785

SEQ ID NO: 837797 - protein, 639 aa, Homo sapiens
HGGRVSSTPASAALLGAPVPGPTGHLSWPGVERPRGGGMAQKKYLQAKLTQFLREDRIQLWKPPYTDENKKVGLALKDLAKQYSDRLECCENEVEKVIEEIRCKAIERGTGNDNYRTTGIATIEVFLPPRLKKDRKNLLETRLHITGRELRSKIAETFGLQENYIKIVINKKQLQLGKTLEEQGVAHNVKAMVLELKQSEEDARKNFQLEEEEQNEAKLKEKQIQRTKRGLEILAKRAAETVVDPEMTPYLDIANQTGRSIRIPPSERKALMLAMGYHEKGRAFLKRKEYGIALPCLLDADKYFCECCRELLDTVDNYAVLQLDIVWCYFRLEQLECLDDAEKKLNLAQKCFKNCYGENHQRLVHIKGNCGKEKVLFLRLYLLQGIRNYHSGNDVEAYEYLNKARQLFKELYIDPSKVDNLLQLGFTAQEARLGLRACDGNVDHAATHITNRREELAQIRKEEKEKKRRRLENIRFLKGMGYSTHAAQQILLSNPQMWWLNDSNPETDNRQESPSQENIDRLVYMGFDALVAEAALRVFRGNVQLAAQTLAHNGGSLPPELPLSPEDSLSPPATSPSDSAGTSSASTDEDMETEAVNEILEDIPEHEEDYLDSTLEDEEIIIAEYLSYVENRKSATKKN

SEQ ID NO: 837798 - protein, 487 aa, Homo sapiens
MRTARRFTTMILGIDLETAKQIQLGKTLEEQGVAHNVKAMVLELKQSEEDARKNFQLEEEEQNEAKLKEKQIQRTKRGLEILAKRAAETVVDPEMTPYLDIANQTGRSIRIPPSERKALMLAMGYHEKGRAFLKRKEYGIALPCLLDADKYFCECCRELLDTVDNYAVLQLDIVWCYFRLEQLECLDDAEKKLNLAQKCFKNCYGENHQRLVHIKGNCGKEKVLFLRLYLLQGIRNYHSGNDVEAYEYLNKARQLFKELYIDPSKVDNLLQLGFTAQEARLGLRACDGNVDHAATHITNRREELAQIRKEEKEKKRRRLENIRFLKGMGYSTHAAQQILLSNPQMWWLNDSNPETDNRQESPSQENIDRLVYMGFDALVAEAALRVFRGNVQLAAQTLAHNGGSLPPELPLSPEDSLSPPATSPSDSAGTSSASTDEDMETEAVNEILEDIPEHEEDYLDSTLEDEEIIIAEYLSYVENRKSATKKN

SEQ ID NO: 837799 - protein, 174 aa, Homo sapiens
MGYSTHAAQQVLHAASGNLDEALKILLSNPQMWWLNDSNPETDNRQESPSQENIDRLVYMGFDALVAEAALRVFRGNVQLAAQTLAHNGGSLPPELPLSPEDSLSPPATSPSDSAGTSSASTDEDMETEAVNEILEDIPEHEEDYLDSTLEDEEIIIAEYLSYVENRKSATKKN

SEQ ID NO: 837800 - protein, 101 aa, Homo sapiens
RVQTVLRVQTVLRVQTVPMHGLGEEASSGLAQAVPSASQVCVPNPFPSLVFYPETGRNRGPVEQGSWGRCPGQGPGKGVPTASSPAVAPSAQLACLLHPLP

SEQ ID NO: 837801 - protein, 291 aa, Homo sapiens; identical to SEQ ID NO: 837792

SEQ ID NO: 837802 - protein, 428 aa, Homo sapiens
MKTNGGRCRIRALCWSRREWRGAGMAQKKYLQAKLTQFLREDRIQLWKPPYTDENKKVGLALKDLAKQYSDRLECCENEVEKVIEEIRCKAIERGTGNDNYRTTGIATIEVFLPPRLKKDRKNLLETRLHITGRELRSKIAETFGLQENYIKIVINKKQLQLGKTLEEQGVAHNVKAMVLELKQSEEDARKNFQLEEEEQNEAKLKEKQIQRTKRGLEILAKRAAETVVDPEMTPYLDIANQTGRSIRIPPSERKALMLAMGYHEKGRAFLKRKEYGIALPCLLDADKYFCECCRELLDTVDNYAVLQLDIVWCYFRLEQLECLDDAEKKLNLAQKCFKNCYGENHQRLVHIKGNCGKEKVLFLRLYLLQGIRNYHSGNDVEAYEYLNKARQLFKELYIDPSKVDNLLQLGFTAQEASTVFGVLYSAA

SEQ ID NO: 837803 - protein, 239 aa, Homo sapiens
MKTNGGRCRIRALCWSRREWRGAGMAQKKYLQAKLTQFLREDRIQLWKPPYTDENKKVGLALKDLAKQYSDRLECCENEVEKVIEEIRCKAIERGTGNDNYRTTGIATIEVFLPPRLKKDRKNLLETRLHITGRELRSKIAETFGLQENYIKIVINKKQLQLGKTLEEQGVAHNVKAMVLELKQSEEDARKNFQLEEEEQNEAKLKEKQIQRTKRGLEILAKRAEETVGELSSGADVGR

SEQ ID NO: 837804 - protein, 563 aa, Homo sapiens
MLEEAGEVLENMLKASCLPLGFIVFLPAVLLLVAPPLPAADAAHEFTVYRMQQYDLQGQPYGTRNAVLNTEARTMAAEVLSRRCVLMRLLDFSYEQYQKALRQSAGAVVIILPRAMAAVPQDVVRQFMEIEPEMLAMETAVPVYFAVEDEALLSIYKQTQAASASQGSASAAEVLLRTATANGFQMVTSGVQSKAVSDWLIASVEGRLTGLGGEDLPTIVIVAHYDAFGVAPWLSLGADSNGSGVSVLLELARLFSRLYTYKRTHAAYNLLFFASGGGKFNYQGTKRWLEDNLDHTDSSLLQDNVAFVLCLDTVGRGSSLHLHVSKPPREGTLQHAFLRELETVAAHQFPEVRFSMVHKRINLAEDVLAWEHERFAIRRLPAFTLSHLESHRDGQRSSIMDVRSRVDSKTLTRNTRIIAEALTRVIYNLTEKGTPPDMPVFTEQMQIQQEQLDSVMDWLTNQPRAAQLVDKDSTFLSTLEHHLSRYLKDVKQHHVKADKRDPEFVFYDQLKQVMNAYRVKPAVFDLLLAVGIAAYLGMAYVAVQHFSLLYKTVQRLLVKAKTQ

SEQ ID NO: 837805 - protein, 75 aa, Homo sapiens
ALSLSLVLLRTATANGFQMVTSGVQSKAVSDWLIASVEEAVTGLGGEANMKCPQIVIAFYEERLTWHSCPEDEAQ

SEQ ID NO: 837806 - protein, 563 aa, Homo sapiens; identical to SEQ ID NO: 837804

SEQ ID NO: 837807 - protein, 570 aa, Homo sapiens
MLEEAGEVLENMLKASCLPLGFIVFLPAVLLLVAPPLPAADAAHEFTVYRMQQYDLQGQPYGTRNAVLNTEARTMAAEVLSRRCVLMRLLDFSYEQYQKALRQSAGAVVIILPRAMAAVPQDVVRQFMEIEPEMLAMETAVPVYFAVEDEALLSIYKQTQAASASQGSASAAEVLLRTATANGFQMVTSGVQSKAVSDWLIASVEGRLTGLGGEDLPTIVIVAHYDAFGVAPWLSLGADSNGSGVSVLLELARLFSRLYTYKRTHAAYNLLFFASGGGKFNYQGTKRWLEDNLDHTDSSLLQDNVAFVLCLDTVGRGSSLHLHVSKPPREGTLQHAFLRELETVAAHQFPEVRFSMVHKRINLAEDVLAWEHERFAIRRLPAFTLSHLESHRDGQRSSIMDVRSRVDSKTLTRNTRIIAEALTRVIYNLTEKGTPPDMPVFTEQMQIQQEQLDSVMDWLTNQPRAAQLVDKDSTFLSTLEHHLSRYLKDVKQHHVKADKRDPEFVFYDQLKQVMNAYRVKPAVFDLLLAVGIAAYLGMAYVAVQVSSAQAQHFSLLYKTVQRLLVKAKTQ

SEQ ID NO: 837808 - protein, 563 aa, Homo sapiens; identical to SEQ ID NO: 837804

SEQ ID NO: 837809 - protein, 563 aa, Homo sapiens; identical to SEQ ID NO: 837804

SEQ ID NO: 837810 - protein, 619 aa, Homo sapiens
MLEEAGEVLENMLKASCLPLGFIVFLPAVLLLVAPPLPAADAAHEFTVYRMQQYDLQGQPYGTRNAVLNTEARTMAAEVLSRRCVLMRLLDFSYEQYQKALRQSAGAVVIILPRAMAAVPQDVVRQFMEIEPEMLAMETAVPVYFAVEDEALLSIYKQTQAASASQGSASAAEVLLRTATANGFQMVTSGVQSKAVSDWLIASVEGRLTGLGGEDLPTIVIVAHYDAFGVAPWLSLGADSNGSGVSVLLELARLFSRLYTYKRTHAAYNLLFFASGGGKFNYQGTKRWLEDNLDHTDSSLLQDNVAFVLCLDTVGRGSSLHLHVSKPPREGTLQHAFLRELETVAAHQFPEVRFSMVHKRINLAEDVLAWEHERFAIRRLPAFTLSHLESHRDGQRSSIMDVRSRVDSKTLTRNTRIIAEALTRVIYNLTEKGTPPDMPVFTEQMQIQQEQLDSVMDWLTNQPRAAQLVDKDSTFLSTLEHHLSRYLKDVKQHHVKADKRDPEFVFYDQLKQVMNAYRVKPAVFDLLLAVGIAAYLGMAYVAVQHFSLLYKTVQRLAQGPITTGLWALVLRLWDPGSCHLVTMREFGECLHASQQAPVWVPRGQHFGGSFLPSFLDRSS

SEQ ID NO: 837811 - protein, 563 aa, Homo sapiens; identical to SEQ ID NO: 837804

SEQ ID NO: 837812 - protein, 563 aa, Homo sapiens; identical to SEQ ID NO: 837804

SEQ ID NO: 837813 - protein, 563 aa, Homo sapiens; identical to SEQ ID NO: 837804

SEQ ID NO: 837814 - protein, 563 aa, Homo sapiens; identical to SEQ ID NO: 837804

SEQ ID NO: 837815 - protein, 767 aa, Homo sapiens
SSQRLGSQSAPRPCGARPCSRVEPPPPPPPPQLQPPRQARPRRAMSDYSTGGPPPGPPPPAGGGGGAGGAGGGPPPGPPGAGDRGGGGPCGGGPGGGSAGGPSQPPGGGGPGIRKDAFADAVQRARQIAAKIGGDAATTVNNSTPDFGFGGQKRQLEDGDQPESKKLASQGDSISSQLGPIHPPPRTSMTEEYRVPDGMVGLIIGRGGEQINKIQQDSGCKVQISPDSGGLPERSVSLTGAPESVQKAKMMLDDIVSRGRGGPPGQFHDNANGGQNGTVQEIMIPAGKAGLVIGKGGETIKQLQERAGVKMILIQDGSQNTNVDKPLRIIGDPYKVQQACEMVMDILRERDQGGFGDRNEYGSRIGGGIDVPVPRHSVGVVIGRSGEMIKKIQNDAGVRIQFKQDDGTGPEKIAHIMGPPDRCEHAARIINDLLQSLRSGPPGPPGGPGMPPGGRGRGRGQGNWGPPGGEMTFSIPTHKCGLVIGRGGENVKAINQQTGAFVEISRQLPPNGDPNFKLFIIRGSPQQIDHAKQLIEEKIEGPLCPVGPGPGGPGPAGPMGPFNPGPFNQGPPGAPPHAGGPPPHQYPPQGWGNTYPQWQPPAPHDPSKAAAAAADPNAAWAAYYSHYYQQPPGPVPGPAPAPAAPPAQGEPPQPPPTGQSDYTKAWEEYYKKIGQQPQQPGAPPQQDYTKAWEEYYKKQAQVATGGGPGAPPGSQPDYSAAWAEYYRQQAAYYGQTPGPGGPQPPPTQQGQQQRRLNESNECELLHL

SEQ ID NO: 837816 - protein, 169 aa, Homo sapiens
SSQRLGSQSAPRPCGARPCSRVEPPPPPPPPQLQPPRQARPRRAMSDYSTGGPPPGPPPPAGGGGGAGGAGGKKKKKKKKKKRGWAACGPLEKVFKTISVGGGGGPPVEVYGAHRLVPKTRGAPKREKSRGGQGHHGGAGDFLSPPIKKTRRGGGPPRRGVSRQPNPPR

SEQ ID NO: 837817 - protein, 589 aa, Homo sapiens
NTARYEAWVKAKMMLDDIVSRGRGGPPGQFHDNANGGQNGTVQEIMIPAGKAGLVIGKGGETIKQLQERAGVKMILIQDGSQNTNVDKPLRIIGDPYKVQQACEMVMDILRERDQGGFGDRNEYGSRIGGGIDVPVPRHSVGVVIGRSGEMIKKIQNDAGVRIQFKQDDGTGPEKIAHIMGPPDRCEHAARIINDLLQSLRVGGPGLLKGLAGPPGECKTRPASRVHHPPPPLVLQSGPPGPPGGPGMPPGGRGRGRGQGNWGPPGGEMTFSIPTHKCGLVIGRGGENVKAINQQTGAFVEISRQLPPNGDPNFKLFIIRGSPQQIDHAKQLIEEKIEGPLCPVGPGPGGPGPAGPMGPFNPGPFNQGPPGAPPHAGGPPPHQYPPQGWGNTYPQWQPPAPHDPSKAAAAAADPNAAWAAYYSHYYQQPPGPVPGPAPAPAAPPAQGEPPQPPPTGQSDYTKAWEEYYKKIGQQPQQPGAPPQQDYTKAWEEYYKKQAQVATGGGPGAPPGSQPDYSAAWAEYYRQQAAYYGQTPGPGGPQPPPTQQGQQQASGNCHPPPPPFSFQPPATVHPALVGSAGNPFPCGVCP

SEQ ID NO: 837818 - protein, 589 aa, Homo sapiens; identical to SEQ ID NO: 837817

SEQ ID NO: 837819 - protein, 589 aa, Homo sapiens; identical to SEQ ID NO: 837817

SEQ ID NO: 837820 - protein, 775 aa, Homo sapiens
NTARYEAWVKAKMMLDDIVSRGRGGPPGQFHDNANGGQNGTVQEIMIPAGKAGLVIGKGGETIKQLQERAGVKMILIQDGSQNTNVDKPLRIIGDPYKVQQACEMVMDILRERDQGGFGDRNEYGSRIGGGIDVPVPRHSVGVVIGRSGEMIKKIQNDAGVRIQFKQDDGTGPEKIAHIMGPPDRCEHAARIINDLLQSLRVGGPGLLKGLAGPPGECKTRPASRVHHPPPPLVLQSGPPGPPGGPGMPPGGRGRGRGQGNWGPPGGEMTFSIPTHKCGLVIGRGGENVKAINQQTGAFVEISRQLPPNGDPNFKLFIIRGSPQQIDHAKQLIEEKIEVGWGGLWGFGLTARIPAHLPWLLSFLLGSSLPSWTRPRWPRPCWPNGALQSWALQPGATRGSPTVSILCLLGFEAGGFTELARRIADPISLSLEVQAGGLIQPIFVDTINRPSPVYLVEHVPFSIPLCTCKFRGFFHVLKLTLRVLQSCFLSRPFPGAPLSLVVWVSGASPLKNIPTPGGPARPPPHHCSSIPFFSPAVPGGPLLTSTHPRAGAIPTPSGSRLLLMTQVSDGPPGGGQALFCPPVSPEVSPAGKAAAAAADPNAAWAAYYSHYYQQPPGPVPGPAPAPAAPPAQGEPPQPPPTGQSDYTKAWEEYYKKIGQQPQQPGAPPQQDYTKAWEEYYKKQAQVATGGGPGAPPGSQPDYSAAWAEYYRQQAAYYGQTPGPGGPQPPPTQQGQQQASGNCHPPPPPFSFQPPATVHPALVGSAGNPFPCGVCP

SEQ ID NO: 837821 - protein, 589 aa, Homo sapiens; identical to SEQ ID NO: 837817

SEQ ID NO: 837822 - protein, 589 aa, Homo sapiens; identical to SEQ ID NO: 837817

SEQ ID NO: 837823 - protein, 589 aa, Homo sapiens; identical to SEQ ID NO: 837817

SEQ ID NO: 837824 - protein, 589 aa, Homo sapiens; identical to SEQ ID NO: 837817

SEQ ID NO: 837825 - protein, 589 aa, Homo sapiens; identical to SEQ ID NO: 837817

SEQ ID NO: 837826 - protein, 589 aa, Homo sapiens; identical to SEQ ID NO: 837817

SEQ ID NO: 837827 - protein, 589 aa, Homo sapiens; identical to SEQ ID NO: 837817

SEQ ID NO: 837828 - protein, 589 aa, Homo sapiens; identical to SEQ ID NO: 837817

SEQ ID NO: 837829 - protein, 479 aa, Homo sapiens
NTARYEAWVKAKMMLDDIVSRGRGGPPGQFHDNANGGQNGTVQEIMIPAGKAGLVIGKGGETIKQLQERAGVKMILIQDGSQNTNVDKPLRIIGDPYKVQQACEMVMDILRERDQGGFGDRNEYGSRIGGGIDVPVPRHSVGVVIGRSGEMIKKIQNDAGVRIQFKQDDGTGPEKIAHIMGPPDRCEHAARIINDLLQSLRVGGPGLLKGLAGPPGECKTRPASRVHHPPPPLVLQSGPPGPPGGPGMPPGGRGRGRGQGNWGPPGGEMTFSIPTHKCGLVIGRGGENVKAINQQTGAFVEISRQLPPNGDPNFKLFIIRGSPQQIDHAKQLIEEKIEGPLCPVGPGPGGPGPAGPMGPFNPGPFNQGPPGAPPHAGGPPPHQYPPQGWGNTYPQWQPPAPHDPSKAAAAAADPNAAWAAYYSHYYQQPPGPVPGPAPAPAAPPAQGEPPQPPPTGQSDYTKAWEEYYKKIVCQKKKKT

SEQ ID NO: 837830 - protein, 107 aa, Homo sapiens
MPGGRGPPSRAEGLYSPLHIRAKGSVCPQPSPISVPSLGERDIVGVGGTVLPLQSGKWMGTCLGLSTWAKWGRRAWGLALGCFGGLKAWSVSLGERREGLPPPCIEA

SEQ ID NO: 837831 - protein, 396 aa, Homo sapiens
DCIKLSKGDVEGFNLRVRVLINLQLISNRDSDRQTDITTLRAQSGPPGPPGGPGMPPGGRGRGRGQGNWGPPGGEMTFSIPTHKCGLVIGRGGENVKAINQQTGAFVEISRQLPPNGDPNFKLFIIRGSPQQIDHAKQLIEEKIEGPLCPVGPGPGGPGPAGPMGPFNPGPFNQGPPGAPPHAGGPPPHQYPPQGWGNTYPQWQPPAPHDPSKAAAAAADPNAAWAAYYSHYYQQPPGPVPGPAPAPAAPPAQGEPPQPPPTGQSDYTKAWEEYYKKIGQQPQQPGAPPQQDYTKAWEEYYKKQAQVATGGGPGAPPGSQPDYSAAWAEYYRQQAAYYGQTPGPGGPQPPPTQQGQQQASGNCHPPPPPFSFQPPATVHPALVGSAGNPFPCGVCP

SEQ ID NO: 837832 - protein, 589 aa, Homo sapiens; identical to SEQ ID NO: 837817

SEQ ID NO: 837833 - protein, 472 aa, Homo sapiens
NTARYEAWVKAKMMLDDIVSRGRGGPPGQFHDNANGGQNGTVQEIMIPAGKAGLVIGKGGETIKQLQERAGVKMILIQDGSQNTNVDKPLRIIGDPYKVQQACEMVMDILRERDQGGFGDRNEYGSRIGGGIDVPVPRHSVGVVIGRSGEMIKKIQNDAGVRIQFKQDDGTGPEKIAHIMGPPDRCEHAARIINDLLQSLRVGGPGLLKGLAGPPGECKTRPASRVHHPPPPLVLQSGPPGPPGGPGMPPGGRGRGRGQGNWGPPGGEMTFSIPTHKCGLVIGRGGENVKAINQQTGAFVEISRQLPPNGDPNFKLFIIRGSPQQIDHAKQLIEEKIEGPLCPVGPGPGGPGPAGPMGPFNPGPFNQGPPGAPPHAGGPPPHQYPPQGWGNTYPQWQPPAPHDPSKAAAAAADPNAAWAAYYSHYYQQPPGPVPGPAPAPAAPPAQGEPPQPLPRRAQPPMRSRLPVSRACL

SEQ ID NO: 837834 - protein, 589 aa, Homo sapiens; identical to SEQ ID NO: 837817

SEQ ID NO: 837835 - protein, 589 aa, Homo sapiens; identical to SEQ ID NO: 837817

SEQ ID NO: 837836 - protein, 589 aa, Homo sapiens; identical to SEQ ID NO: 837817

SEQ ID NO: 837837 - protein, 565 aa, Homo sapiens
NTARYEAWVKAKMMLDDIVSRGRGGPPGQFHDNANGGQNGTVQEIMIPAGKAGLVIGKGGETIKQLQERAGVKMILIQDGSQNTNVDKPLRIIGDPYKVQQACEMVMDILRERDQGGFGDRNEYGSRIGGGIDVPVPRHSVGVVIGRSGEMIKKIQNDAGVRIQFKQDDGTGPEKIAHIMGPPDRCEHAARIINDLLQSLRVGGPGLLKGLAGPPGECKTRPASRVHHPPPPLVLQSGPPGPPGGPGMPPGGRGRGRGQGNWGPPGGEMTFSIPTHKCGLVIGRGGENVKAINQQTGAFVEISRQLPPNGDPNFKLFIIRGSPQQIDHAKQLIEEKIEGPLCPVGPGPGGPGPAGPMGPFNPGPFNQGPPGAPPHAGGPPPHQYPPQGWGNTYPQWQPPAPHDPSKAAAAAADPNAAWAAYYSHYYQQPPGPVPGPAPAPAAPPAQGEPPQPPPTGQSDYTKAWEEYYKKIGQQPQQPGAPPQQDYTKAWEEYYKKQAQVATGGGPGAPPGSQPDYSAAWAEYYRQQAAYYGQTPGPGGPQPPPTQQGQQQRRLNESNECELLHL

SEQ ID NO: 837838 - protein, 526 aa, Homo sapiens
NTARYEAWVKAKMMLDDIVSRGRGGPPGQFHDNANGGQNGTVQEIMIPAGKAGLVIGKGGETIKQLQERAGVKMILIQDGSQNTNVDKPLRIIGDPYKVQQACEMVMDILRERDQGGFGDRNEYGSRIGGGIDVPVPRHSVGVVIGRSGEMIKKIQNDAGVRIQFKQDDGTGPEKIAHIMGPPDRCEHAARIINDLLQSLRVGGPGLLKGLAGPPGECKTRPASRVHHPPPPLVLQSGPPGPPGGPGMPPGGRGRGRGQGNWGPPGGEMTFSIPTHKCGLVIGRGGENVKAINQQTGAFVEISRQLPPNGDPNFKLFIIRGSPQQIDHAKQLIEEKIEGPLCPVGPGPGGPGPAGPMGPFNPGPFNQGPPGAPPHAGGPPPHQYPPQGWGNTYPQWQPPAPHDPSKAAAAAADPNAAWAAYYSHYYQQPPGPVPGPAPAPAAPPAQGEPPQPPPTGQSDYTKAWEEYYKKIGSQPDYSAAWAEYYRQQAAYYGQTPGPGGPQPPPTQQGQQQRRLNESNECELLHL

SEQ ID NO: 837839 - protein, 589 aa, Homo sapiens; identical to SEQ ID NO: 837817

SEQ ID NO: 837840 - protein, 589 aa, Homo sapiens; identical to SEQ ID NO: 837817

SEQ ID NO: 837841 - protein, 535 aa, Homo sapiens
NTARYEAWVKAKMMLDDIVSRGRGGPPGQFHDNANGGQNGTVQEIMIPAGKAGLVIGKGGETIKQLQERAGVKMILIQDGSQNTNVDKPLRIIGDPYKVQQACEMVMDILRERDQGGFGDRNEYGSRIGGGIDVPVPRHSVGVVIGRSGEMIKKIQNDAGVRIQFKQDDGTGPEKIAHIMGPPDRCEHAARIINDLLQSLRVGGPGLLKGLAGPPGECKTRPASRVHHPPPPLVLQSGPPGPPGGPGMPPGGRGRGRGQGNWGPPGGEMTFSIPTHKCGLVIGRGGENVKAINQQTGAFVEISRQLPPNGDPNFKLFIIRGSPQQIDHAKQLIEEKIEGPLCPVGPGPGGPGPAGPMGPFNPGPFNQGPPGAPPHAGGPPPHQYPPQGWGNTYPQWQPPAPHDPSKAAAAAADPNAAWAAYYSHYYQQPPGPVPGPAPAPAAPPAQGEPPQPPPTGQSDYTKAWEEYYKKIALPPAAKPPLLSLPPWLSSRGPARPPSQDWSVVFSSVQEEIETENKMRTTKKIVWQFLLFIARF

SEQ ID NO: 837842 - protein, 81 aa, Homo sapiens
RPSCRPPARLSPRRRCVLGALQVLLTLPLLFLGLSLLWTVLLDPGAVSAWLWSLTSETTLRRLRYTLSPLLELRANGLLPT

SEQ ID NO: 837843 - protein, 417 aa, Homo sapiens
PIVTPASRRLGPRGGRHLGSVSTAMAATQELLLQLQKDNRDGRQRKQELEKLMRGLEAESESLNQRLQDLSERERSLLRRRSQAAQPLQGEAREAARERAERVRRRLEEAERHKEDLVRKSPGMGLDPGWGGAGRAEGGPGWGEVGPAERSAPPQDPVRRSSTAGSCRSSGRSCRVRYVQEMGGPVSWFLSEVLPLSSPLLPPVPVSPDTRSSRSPVNPALTSPAPELFYYGGELQSQKSTEQQLAAQLVTLQNELELAETKCALQEEKLQQDALQTAEAWAIFQEQTVVLQVRPHSDAKVPPASPPPDLGRCDGQLRGVQYSTESLMEEMARADRETRLFGGPRALAIRRCVLGALQVLLTLPLLFLGLSLLWTVLLDPGAVSAWLWSLTSETTLRRLRYTLSPLLELRANGLLPT

SEQ ID NO: 837844 - protein, 486 aa, Homo sapiens
PIVTPASRRLGPRGGRHLGSVSTAMAATQELLLQLQKDNRDGRQRKQELEKLMRGLEAESESLNQRLQDLSERERSLLRRRSQAAQPLQGEAREAARERAERVRRRLEEAERHKEDLVRKSPGMGLDPGWGGAGRAEGGRGGVSRTGGEVGTAPGPRPQEQHSRQLQEQWEELSSQLFYYGGELQSQKSTEQQLAAQLVTLQNELELAETKCALQEEKLQQDALQTAEAWAIFQEQTVVLQVRPHSDAKVPPASPPPDLGRYSLPTHRQDASPRPQSALSPAPGGAGEGDGGCGGAGRLAEWPGTVRELGLRARRGTVGPGLGSHLHACPRRCDGQLRGVQYSTESLMEEMARADRVSACAGPGGVGWSGTTLPVPPAVPPPPPPGNRAGAAGAEVAGCGPLSPQETRLFGGPRALAIRRCVLGALQVLLTLPLLFLGLSLLWTVLLDPGAVSAWLWSLTSETTLRRLRYTLSPLLELRANGLLPT

SEQ ID NO: 837845 - protein, 415 aa, Homo sapiens
PIVTPASRRLGPRGGRHLGSVSTAMAATQELLLQLQKDNRDGRQRKQELEKLMRGLEAESESLNQRLQDLSERERSLLRRRSQAAQPLQGEAREAARERAERVRRRLEEAERHKEDLVRKSPGMGLDPGWGGAGRAEGGRGGVSRTGGEVGTAPGPRPQEQHSRQLQEQWEELSSQLFYYGGELQSQKSTEQQLAAQLVTLQNELELAETKCALQEEKLQQDALQTAEAWAIFQEQTVVLQVRPHSDAKVPPASPPPDLGRCDGQLRGVQYSTESLMEEMARADRVSACAGPGGVGWSGTTLPVPPAVPPPPPPGNRAGAAGAEVAGCGPLSPQETRLFGGPRALAIRRCVLGALQVLLTLPLLFLGLSLLWTVLLDPGAVSAWLWSLTSETTLRRLRYTLSPLLELRANGLLPT

SEQ ID NO: 837846 - protein, 208 aa, Homo sapiens
PIVTPASRRLGPRGGRHLGSVSTAMAATQELLLQLQKDNRDGRQRKQELEKLMRGLEAESESLNQRLQDLSERERSLLRRRSQAAQPLQGEAREAARERAERVRRRLEEAERHKEDLVRKSPGMGLDPGWGGAGRAEGGPGWGEVGPAERSAPPQDPVRRSSTAGSCRSSGRSCRVRYVQEMGGPVSWFLSEVLPLSSPLLPPRPCLP

SEQ ID NO: 837847 - protein, 388 aa, Homo sapiens
PIVTPASRRLGPRGGRHLGSVSTAMAATQELLLQLQKDNRDGRQRKQELEKLMRGLEAESESLNQRLQDLSERERSLLRRRSQAAQPLQGEAREAARERAERVRRRLEEAERHKEDLEQHSRQLQEQWEELSSQKPGKPRPYKPRPKLFYYGGELQSQKSTEQQLAAQLVTLQNELELAETKCALQEEKLQQDALQTAEAWAIFQEQTVVLQEVQVKVMEAAEELDAWQSGRELCDGQLRGVQYSTESLMEEMARADRVSACAGPGGVGWSGTTLPVPPAVPPPPPPGNRAGAAGAEVAGCGPLSPQETRLFGGPRALAIRRCVLGALQVLLTLPLLFLGLSLLWTVLLDPGAVSAWLWSLTSETTLRRLRYTLSPLLELRANGLLPT

SEQ ID NO: 837848 - protein, 208 aa, Homo sapiens; identical to SEQ ID NO: 837846

SEQ ID NO: 837849 - protein, 168 aa, Homo sapiens
VLLKNELELAETKCALQEEKLQQDALQTAEAWAIFQEQTVVLQVRPHSDAKVPPASPPPDLGRCDGQLRGVQYSTESLMEEMARADRETRLFGGPRALAIRRCVLGALQVLLTLPLLFLGLSLLWTVLLDPGAVSAWLWSLTSETTLRRLRYTLSPLLELRANGLLPT

SEQ ID NO: 837850 - protein, 366 aa, Homo sapiens
PIVTPASRRLGPRGGRHLGSVSTAMAATQELLLQLQKDNRDGRQRKQELEKLMRGLEAESESLNQRLQDLSERERSLLRRRSQAAQPLQGEAREAARERAERVRRRLEEAERHKEDLVRKSPGMGLDPGWGGAGRAEGGRGGVSRTGGEVGTAPGPRPQEQHSRQLQEQWEELSSQLFYYGGELQSQKSTEQQLAAQLVTLQNELELAETKCALQEEKLQQDALQTAEAWAIFQEQTVVLQVRPHSDAKVPPASPPPDLGRCDGQLRGVQYSTESLMEEMARADRETRLFGGPRALAIRRCVLGALQVLLTLPLLFLGLSLLWTVLLDPGAVSAWLWSLTSETTLRRLRYTLSPLLELRANGLLPT

SEQ ID NO: 837851 - protein, 346 aa, Homo sapiens
PIVTPASRRLGPRGGRHLGSVSTAMAATQELLLQLQKDNRDGRQRKQELEKLMRGLEAESESLNQRLQDLSERERSLLRRRSQAAQPLQGEAREAARERAERVRRRLEEAERHKEDLVRKSPGMGLDPGWGGAGRAEGGRGGVSRTGGEVGTAPGPRPQEQHSRQLQEQWEELSSQLFYYGGELQSQKSTEQQLAAQLVTLQNELELAETKCALQEEKLQQDALQTAEAWAIFQEQTVVLQVRPHSDAKVPPASPPPDLGRCDGQLRGVQYSTESLMEEMARADRAVRAGRAAGAADAAAPLPGAVAALDGAVGPRRRLRVALEPHLGDDAAPPALHAVPAAGAAR

SEQ ID NO: 837852 - protein, 368 aa, Homo sapiens
PIVTPASRRLGPRGGRHLGSVSTAMAATQELLLQLQKDNRDGRQRKQELEKLMRGLEAESESLNQRLQDLSERERSLLRRRSQAAQPLQGEAREAARERAERVRRRLEEAERHKEDLVRKSPGMGLDPGWGGAGRAEGGRGGVSRTGGEVGTAPGPRPQEQHSRQLQEQWEELSSQLFYYGGELQSQKSTEQQLAAQLVTLQNELELAETKCALQEEKLQQDALQTAEAWAIFQEQTVVLQEVQVKVMEAAEELDAWQSGRELCDGQLRGVQYSTESLMEEMARADRETRLFGGPRALAIRRCVLGALQVLLTLPLLFLGLSLLWTVLLDPGAVSAWLWSLTSETTLRRLRYTLSPLLELRANGLLPT

SEQ ID NO: 837853 - protein, 476 aa, Homo sapiens
PIVTPASRRLGPRGGRHLGSVSTAMAATQELLLQLQKDNRDGRQRKQELEKLMRGLEAESESLNQRLQDLSERERSLLRRRSQAAQPLQGEAREAARERAERVRRRLEEAERHKEDLVRKSPGMGLDPGWGGAGRAEGGPGWGEVGPAERSAPPQDPVRRSSTAGSCRSSGRSCRVRYVQEMGGPVSWFLSEVLPLSSPLLPPVPVSPDTRSSRSPVNPALTSPAPELFYYGGELQSQKSTEQQLAAQLVTLQNELELAETKCALQEEKLQQDALQTAEAWAIFQEQTVVLQVRPHSDAKEVQVKVMEAAEELDAWQSGRELCDGQLRGVQYSTESLMEEMARADRVSACAGPGGVGWSGTTLPVPPAVPPPPPPGNRAGAAGAEVAGCGPLSPQETRLFGGPRALAIRRCVLGALQVLLTLPLLFLGLSLLWTVLLDPGAVSAWLWSLTSETTLRRLRYTLSPLLELRANGLLPT

SEQ ID NO: 837854 - protein, 208 aa, Homo sapiens; identical to SEQ ID NO: 837846

SEQ ID NO: 837855 - protein, 107 aa, Homo sapiens
LFLHLLPCHLGHSPRLYIPLQGRHLHHQQHNFPNKCSLHFLLHLLLTSPSSSPLSELGELHYLRGELHDACVSGLSFFFSSPAAQCGCLSPARQISPVERLHAARNE

SEQ ID NO: 837856 - protein, 352 aa, Homo sapiens
LTGAPVGLGNPSSLGVGQQSAPNLSTVSQIDPSSIERAYAALGLPYQVNQMPTQPQVQAKNQQNQQPGQSPQGMRPMSNMSASPMGVNGGVGVQTPSLLSDSMLHSAINSQNPMMSENASVPSLGPMPTAAQPSTTGIRKQWHEDITQDLRNHLVHKLVQAIFPTPDPAALKDRRMENLVAYARKVEGDMYESANNRAEYYHLLAEKIYKIQKELEEKRRTRLQKQNMLPNAAGMVPVSMNPGPNMGQPQPGMTSNGPLPDPSMIRGSVPNQMMPRITPQSGLNQFGQMSMAQPPIVPRQTPPLQHHGQLAQPGALNPVSLTSLVISLAFTWYFENPVCSYFINSHSHLNRP

SEQ ID NO: 837857 - protein, 391 aa, Homo sapiens
LTGAPVGLGNPSSLGVGQQSAPNLSTVSQIDPSSIERAYAALGLPYQVNQMPTQPQVQAKNQQNQQPGQSPQGMRPMSNMSASPMGVNGGVGVQTPSLLSDSMLHSAINSQNPMMSENASVPSLGPMPTAAQPSTTGIRKQWHEDITQDLRNHLVHKLVQAIFPTPDPAALKDRRMENLVAYARKVEGDMYESANNRAEYYHLLAEKIYKIQKELEEKRRTRLQKQNMLPNAAGMVPVSMNPGPNMGQPQPGMTSSLNQFGQMSMAQPPIVPRQTPPLQHHGQLAQPGALNPPMGYGPRMQQPSNQGQFLPQTQFPSQGMNVTNIPLAPSSGQAPVSQAQMSSSSCPVNSPIMPPGSQGSHIHCPQLPQPALHQNSPSPVPSRTPTPHHTP

SEQ ID NO: 837858 - protein, 101 aa, Homo sapiens
MSSSSCPVNSPIMPPGSQGSHIHCPQLPQPALHQNSPSPVPSRTPTPHHTPPSIGAQQPPATTIPAPVPTPPAMPPGPQSQALHPPPRQTPTPPTTQLPQQ

SEQ ID NO: 837859 - protein, 417 aa, Homo sapiens
LTGAPVGLGNPSSLGVGQQSAPNLSTVSQIDPSSIERAYAALGLPYQVNQMPTQPQVQAKNQQNQQPGQSPQGMRPMSNMSASPMGVNGGVGVQTPSLLSDSMLHSAINSQNPMMSENASVPSLGPMPTAAQPSTTGIRKQWHEDITQDLRNHLVHKLVQAIFPTPDPAALKDRRMENLVAYARKVEGDMYESANNRAEYYHLLAEKIYKIQKELEEKRRTRLQKQNMLPNAAGMVPVSMNPGPNMGQPQPGMTSNGPLPDPSMIRGSVPNQMMPRITPQSGLNQFGQMSMAQPPIVPRQTPPLQHHGQLAQPGALNPPMGYGPRMQQPSNQGQFLPQTQFPSQGMNVTNIPLAPSSGQAPVSQAQMSSSSCPVNSPIMPPGSQGSHIHCPQLPQPALHQNSPSPVPSRTPTPHHTP

SEQ ID NO: 837860 - protein, 226 aa, Homo sapiens
MREMGQVERSTRRGGKIYKIQKELEEKRRTRLQKQNMLPNAAGMVPVSMNPGPNMGQPQPGMTSNGPLPDPSMIRGSVPNQMMPRITPQSGLNQFGQMSMAQPPIVPRQTPPLQHHGQLAQPGALNPPMGYGPRMQQPSNQGQFLPQTQFPSQGMNVTNIPLAPSSGQAPVSQAQMSSSSCPVNSPIMPPGSQGSHIHCPQLPQPALHQNSPSPVPSRTPTPHHTP

SEQ ID NO: 837861 - protein, 819 aa, Homo sapiens
LPFSFSSRTPRSKPRIETKLGSMEPAPARSPRPQQDPARPQEPTMPPPETPSEGRQPSPSPSPTERAPASEEEFQFLRCQQCQAEAKCPKLLPCLHTLCSGCLEASGMQCPICQAPWPLGADTPALDNVFFESLQRRLSVYRQIVDAQAVCTRCKESADFWCFECEQLLCAKCFEAHQWFLKHEARPLAELRNQSVREFLDGTRKTNNIFCSNPNHRTPTLTSIYCRGCSKPLCCSCALLDSSHSELKCDISAEIQQRQEELDAMTQALQEQDSAFGAVHAQMHAAVGQLGRARAETEELIRERVRQVVAHVRAQERELLEAVDARYQRDYEEMASRLGRLDAVLQRIRTGSALVQRMKCYASDQEVLDMHGFLRQALCRLRQEEPQSLQAAVRTDGFDEFKVRLQDLSSCITQGKAIETQSSSSEEIVPSPPSPPPLPRIYKPCFVCQDKSSGYHYGVSACEGCKGFFRRSIQKNMVYTCHRDKNCIINKVTRNRCQYCRLQKCFEVGMSKESVRNDRNKKKKEVPKPECSESYTLTPEVGELIEKVRKAHQETFPALCQLGKYTTNNSSEQRVSLDIDLWDKFSELSTKCIIKTVEFAKQLPGFTTLTIADQITLLKAACLDILILRICTRYTPEQDTMTFSDGLTLNRTQMHNAGFGPLTDLVFAFANQLLPLEMDDAETGLLSAICLICGDRQDLEQPDRVDMLQEPLLEALKVYVRKRRPSRPHMFPKMLMKITDLRSISAKGAERVITLKMEIPGSMPPLIQEMLENSEGLDTLSGQPGGGGRDGGGLAPPPGSCSPSLSPSSNRSSPATHSP

SEQ ID NO: 837862 - protein, 182 aa, Homo sapiens
SPAAPGLAGAEPRGIPTPTRNPRHGESLEKPRIPGWEEEVLVDPQPRADPAPGLRTWGAAVLCLGRHETLDGSPLEVKPLSSRAPPGFPGRADGPPLPAHTTSLLFTGTGGAAGGLRRGDFRAGGAPCPGHQSGRGDVSSPPAALLGWRRRLSDGGGAQDFPARTSCVPASQSAVVGGGSGR

SEQ ID NO: 837863 - protein, 462 aa, Homo sapiens
MASNSSSCPTPGGGHLNGYPVPPYAFFFPPMLGGLSPPGALTTLQHQLPVSGYSTPSPATIETQSSSSEEIVPSPPSPPPLPRIYKPCFVCQDKSSGYHYGVSACEGCKGFFRRSIQKNMVYTCHRDKNCIINKVTRNRCQYCRLQKCFEVGMSKESVRNDRNKKKKEVPKPECSESYTLTPEVGELIEKVRKAHQETFPALCQLGKYTTNNSSEQRVSLDIDLWDKFSELSTKCIIKTVEFAKQLPGFTTLTIADQITLLKAACLDILILRICTRYTPEQDTMTFSDGLTLNRTQMHNAGFGPLTDLVFAFANQLLPLEMDDAETGLLSAICLICGDRQDLEQPDRVDMLQEPLLEALKVYVRKRRPSRPHMFPKMLMKITDLRSISAKGAERVITLKMEIPGSMPPLIQEMLENSEGLDTLSGQPGGGGRDGGGLAPPPGSCSPSLSPSSNRSSPATHSP

SEQ ID NO: 837864 - protein, 462 aa, Homo sapiens; identical to SEQ ID NO: 837863

SEQ ID NO: 837865 - protein, 537 aa, Homo sapiens
IPSWSPHPSWGPGGLGDVSRAGPLVKQFCELALFLGRSRAGLQGTKKDATPRWAPARWLRGPCPVMLAAGEATLRGASEHSSCPTPGGGHLNGYPVPPYAFFFPPMLGGLSPPGALTTLQHQLPVSGYSTPSPATIETQSSSSEEIVPSPPSPPPLPRIYKPCFVCQDKSSGYHYGVSACEGCKGFFRRSIQKNMVYTCHRDKNCIINKVTRNRCQYCRLQKCFEVGMSKESVRNDRNKKKKEVPKPECSESYTLTPEVGELIEKVRKAHQETFPALCQLGKYTTNNSSEQRVSLDIDLWDKFSELSTKCIIKTVEFAKQLPGFTTLTIADQITLLKAACLDILILRICTRYTPEQDTMTFSDGLTLNRTQMHNAGFGPLTDLVFAFANQLLPLEMDDAETGLLSAICLICGDRQDLEQPDRVDMLQEPLLEALKVYVRKRRPSRPHMFPKMLMKITDLRSISAKGAERVITLKMEIPGSMPPLIQEMLENSEGLDTLSGQPGGGGRDGGGLAPPPGSCSPSLSPSSNRSSPATHSP

SEQ ID NO: 837866 - protein, 547 aa, Homo sapiens
VLRGCSLEQRSFISVRLLSYLSACRHPMEDSMDMDMSPLRPQNYLFGCELKADKDYHFKVDNDENEHQLSLRTVSLGAGAKDELHIVEAEAMNYEGSPIKVTLATLKMSVQPTVSLGGFEITPPVVLRLKCGSGPVHISGQHLVAIETQSSSSEEIVPSPPSPPPLPRIYKPCFVCQDKSSGYHYGVSACEGCKGFFRRSIQKNMVYTCHRDKNCIINKVTRNRCQYCRLQKCFEVGMSKESVRNDRNKKKKEVPKPECSESYTLTPEVGELIEKVRKAHQETFPALCQLGKYTTNNSSEQRVSLDIDLWDKFSELSTKCIIKTVEFAKQLPGFTTLTIADQITLLKAACLDILILRICTRYTPEQDTMTFSDGLTLNRTQMHNAGFGPLTDLVFAFANQLLPLEMDDAETGLLSAICLICGDRQDLEQPDRVDMLQEPLLEALKVYVRKRRPSRPHMFPKMLMKITDLRSISAKGAERVITLKMEIPGSMPPLIQEMLENSEGLDTLSGQPGGGGRDGGGLAPPPGSCSPSLSPSSNRSSPATHSP

SEQ ID NO: 837867 - protein, 416 aa, Homo sapiens
PNSNHVASGAGEAAIETQSSSSEEIVPSPPSPPPLPRIYKPCFVCQDKSSGYHYGVSACEGCKGFFRRSIQKNMVYTCHRDKNCIINKVTRNRCQYCRLQKCFEVGMSKESVRNDRNKKKKEVPKPECSESYTLTPEVGELIEKVRKAHQETFPALCQLGKYTTNNSSEQRVSLDIDLWDKFSELSTKCIIKTVEFAKQLPGFTTLTIADQITLLKAACLDILILRICTRYTPEQDTMTFSDGLTLNRTQMHNAGFGPLTDLVFAFANQLLPLEMDDAETGLLSAICLICGDRQDLEQPDRVDMLQEPLLEALKVYVRKRRPSRPHMFPKMLMKITDLRSISAKGAERVITLKMEIPGSMPPLIQEMLENSEGLDTLSGQPGGGGRDGGGLAPPPGSCSPSLSPSSNRSSPATHSP

SEQ ID NO: 837868 - protein, 466 aa, Homo sapiens
FYSTRSAPASQASLRATSSTQSLARLGSPDYGNSALLSLPGYRPTTRSSARRSQAGVSSGAPPAIETQSSSSEEIVPSPPSPPPLPRIYKPCFVCQDKSSGYHYGVSACEGCKGFFRRSIQKNMVYTCHRDKNCIINKVTRNRCQYCRLQKCFEVGMSKESVRNDRNKKKKEVPKPECSESYTLTPEVGELIEKVRKAHQETFPALCQLGKYTTNNSSEQRVSLDIDLWDKFSELSTKCIIKTVEFAKQLPGFTTLTIADQITLLKAACLDILILRICTRYTPEQDTMTFSDGLTLNRTQMHNAGFGPLTDLVFAFANQLLPLEMDDAETGLLSAICLICGDRQDLEQPDRVDMLQEPLLEALKVYVRKRRPSRPHMFPKMLMKITDLRSISAKGAERVITLKMEIPGSMPPLIQEMLENSEGLDTLSGQPGGGGRDGGGLAPPPGSCSPSLSPSSNRSSPATHSP

SEQ ID NO: 837869 - protein, 414 aa, Homo sapiens
MSRAAVGGSLGAIETQSSSSEEIVPSPPSPPPLPRIYKPCFVCQDKSSGYHYGVSACEGCKGFFRRSIQKNMVYTCHRDKNCIINKVTRNRCQYCRLQKCFEVGMSKESVRNDRNKKKKEVPKPECSESYTLTPEVGELIEKVRKAHQETFPALCQLGKYTTNNSSEQRVSLDIDLWDKFSELSTKCIIKTVEFAKQLPGFTTLTIADQITLLKAACLDILILRICTRYTPEQDTMTFSDGLTLNRTQMHNAGFGPLTDLVFAFANQLLPLEMDDAETGLLSAICLICGDRQDLEQPDRVDMLQEPLLEALKVYVRKRRPSRPHMFPKMLMKITDLRSISAKGAERVITLKMEIPGSMPPLIQEMLENSEGLDTLSGQPGGGGRDGGGLAPPPGSCSPSLSPSSNRSSPATHSP

SEQ ID NO: 837870 - protein, 356 aa, Homo sapiens
MPCLPVNACCVRVLTSLGDLLSSWQLSVRLGVDEALSSLQLPSEPPLPSTAVRNDRNKKKKEVPKPECSESYTLTPEVGELIEKVRKAHQETFPALCQLGKYTTNNSSEQRVSLDIDLWDKFSELSTKCIIKTVEFAKQLPGFTTLTIADQITLLKAACLDILILRICTRYTPEQDTMTFSDGLTLNRTQMHNAGFGPLTDLVFAFANQLLPLEMDDAETGLLSAICLICGDRQDLEQPDRVDMLQEPLLEALKVYVRKRRPSRPHMFPKMLMKITDLRSISAKGAERVITLKMEIPGSMPPLIQEMLENSEGLDTLSGQPGGGGRDGGGLAPPPGSCSPSLSPSSNRSSPATHSP

SEQ ID NO: 837871 - protein, 414 aa, Homo sapiens; identical to SEQ ID NO: 837869

SEQ ID NO: 837872 - protein, 303 aa, Homo sapiens
MSRAAVGGSLGAIETQSSSSEEIVPSPPSPPPLPRIYKPCFVCQDKSSGYHYGVSACEGCKGFFRRSIQKNMVYTCHRDKNCIINKVTRNRCQYCRLQKCFEVGMSKESVRNDRNKKKKEVPKPECSESYTLTPEVGELIEKVRKAHQETFPALCQLGKYTTNNSSEQRVSLDIDLWDKFSELSTKCIIKTVEFAKQLPGFTTLTIADQITLLKAACLDILILRICTRYTPEQDTMTFSDGLTLNRTQMQSGRASRRSASQQCARECAEGGRHATGTQAGREGDGNGRKTGGARQAKGKRNQG

SEQ ID NO: 837873 - protein, 462 aa, Homo sapiens; identical to SEQ ID NO: 837863

SEQ ID NO: 837874 - protein, 462 aa, Homo sapiens; identical to SEQ ID NO: 837863

SEQ ID NO: 837875 - protein, 414 aa, Homo sapiens; identical to SEQ ID NO: 837869

SEQ ID NO: 837876 - protein, 590 aa, Homo sapiens
VLRGCSLEQRSFISVRLLSYLSACRHPMEDSMDMDMSPLRPQNYLFGCELKADKDYHFKVDNDENEHQLSLRTVSLGAGAKDELHIVEAEAMNYEGSPIKVTLATLKMSVQPTVSLGGFEITPPVVLRLKCGSGPVHISGQHLVAVEEDAESEDEEEEDVNRVLFMKPKGRGLKHMFGDLVCSWKLAAIETQSSSSEEIVPSPPSPPPLPRIYKPCFVCQDKSSGYHYGVSACEGCKGFFRRSIQKNMVYTCHRDKNCIINKVTRNRCQYCRLQKCFEVGMSKESVRNDRNKKKKEVPKPECSESYTLTPEVGELIEKVRKAHQETFPALCQLGKYTTNNSSEQRVSLDIDLWDKFSELSTKCIIKTVEFAKQLPGFTTLTIADQITLLKAACLDILILRICTRYTPEQDTMTFSDGLTLNRTQMHNAGFGPLTDLVFAFANQLLPLEMDDAETGLLSAICLICGDRQDLEQPDRVDMLQEPLLEALKVYVRKRRPSRPHMFPKMLMKITDLRSISAKGAERVITLKMEIPGSMPPLIQEMLENSEGLDTLSGQPGGGGRDGGGLAPPPGSCSPSLSPSSNRSSPATHSP

SEQ ID NO: 837877 - protein, 457 aa, Homo sapiens
MYESVEVGGPTPNPFLVVDFYNQNRACLLPEKGLPAPGPYSTPLRTPLWNGSNHSIETQSSSSEEIVPSPPSPPPLPRIYKPCFVCQDKSSGYHYGVSACEGCKGFFRRSIQKNMVYTCHRDKNCIINKVTRNRCQYCRLQKCFEVGMSKESVRNDRNKKKKEVPKPECSESYTLTPEVGELIEKVRKAHQETFPALCQLGKYTTNNSSEQRVSLDIDLWDKFSELSTKCIIKTVEFAKQLPGFTTLTIADQITLLKAACLDILILRICTRYTPEQDTMTFSDGLTLNRTQMHNAGFGPLTDLVFAFANQLLPLEMDDAETGLLSAICLICGDRQDLEQPDRVDMLQEPLLEALKVYVRKRRPSRPHMFPKMLMKITDLRSISAKGAERVITLKMEIPGSMPPLIQEMLENSEGLDTLSGQPGGGGRDGGGLAPPPGSCSPSLSPSSNRSSPATHSP

SEQ ID NO: 837878 - protein, 428 aa, Homo sapiens
WARGLLPLPRYTQSYPRLSPGGEKDAIETQSSSSEEIVPSPPSPPPLPRIYKPCFVCQDKSSGYHYGVSACEGCKGFFRRSIQKNMVYTCHRDKNCIINKVTRNRCQYCRLQKCFEVGMSKESVRNDRNKKKKEVPKPECSESYTLTPEVGELIEKVRKAHQETFPALCQLGKYTTNNSSEQRVSLDIDLWDKFSELSTKCIIKTVEFAKQLPGFTTLTIADQITLLKAACLDILILRICTRYTPEQDTMTFSDGLTLNRTQMHNAGFGPLTDLVFAFANQLLPLEMDDAETGLLSAICLICGDRQDLEQPDRVDMLQEPLLEALKVYVRKRRPSRPHMFPKMLMKITDLRSISAKGAERVITLKMEIPGSMPPLIQEMLENSEGLDTLSGQPGGGGRDGGGLAPPPGSCSPSLSPSSNRSSPATHSP

SEQ ID NO: 837879 - protein, 379 aa, Homo sapiens
SGGGVGAENMAGGKAGKDSGKAKAKAVSRSQRAGLQFPVGRIQQTLEDSHHKPWKGGCHCCRVQCFEVGMSKESVRNDRNKKKKEVPKPECSESYTLTPEVGELIEKVRKAHQETFPALCQLGKYTTNNSSEQRVSLDIDLWDKFSELSTKCIIKTVEFAKQLPGFTTLTIADQITLLKAACLDILILRICTRYTPEQDTMTFSDGLTLNRTQMHNAGFGPLTDLVFAFANQLLPLEMDDAETGLLSAICLICGDRQDLEQPDRVDMLQEPLLEALKVYVRKRRPSRPHMFPKMLMKITDLRSISAKGAERVITLKMEIPGSMPPLIQEMLENSEGLDTLSGQPGGGGRDGGGLAPPPGSCSPSLSPSSNRSSPATHSP

SEQ ID NO: 837880 - protein, 152 aa, Homo sapiens
  misc_feature (9)..(9): Xaa can be any naturally occurring amino acid
  misc_feature (24)..(24): Xaa can be any naturally occurring amino acid
  misc_feature (27)..(27): Xaa can be any naturally occurring amino acid
TSQVLLTSXCPEMVMRDGLLSASXHLXDRQDLEQPDRVDMLQEPLLEALKVYVRKRRPSRPHMFPKMLMKITDLRSISAKGAERVITLKMEIPGSMPPLIQEMLENSEGLDTLSGQPGGGGRDGGGLAPPPGSCSPSLSPSSNRSSPATHSP

SEQ ID NO: 837881 - protein, 266 aa, Homo sapiens
MSRAAVGGSLGAIETQSSSSEEIVPSPPSPPPLPRIYKPCFVCQDKSSGYHYGVSACEGCKGFFRRSIQKNMVYTCHRDKNCIINKVTRNRCQYCRLQKCFEVGMSKESVRNDRNKKKKEVPKPECSESYTLTPEVGELIEKVRKAHQETFPALCQLGKYTTNNSSEQRVSLDIDLWDKFSELSTKCIIKTVEFAKQLPGFTTLTIPNLSHPRAPSLPRRTGLQGGLPSPLHPQLGELALPRPPSPGVGAPSPGARGCTCYCWAFH

SEQ ID NO: 837882 - protein, 727 aa, Homo sapiens
SRLERIWSSARKALLLPGRPSRWLIQVAFAALLRPNQSAGHLAAQLTPRPRSQAPGFLKCFLGALKMEMTEMTGVSLKRGALVVEDNDSGVPVEETKKQKLSECSLTKGQDGLQNDFLSISEDVPRPPDTVSTGKGGKNSEAQLEDEEEEEEDGLSEECEEEESESFADMMKHGLTEADVGITKFVSSHQGFSGILKERYSDFVVHEIGKDGRISHLNDLSIPVDEEDPSEDIFTVLTAEEKQRLEELQLFKNKETSVAIEVIEDTKEKRTIIHQAIKSLFPGLETKTEDREGKKYIVAYHAAGKKALANPRKHSWPKSRGSYCHFVLYKENKDTMDAINVLSKYLRVKPNIFSYMGTKDKRAITVQEIAVLKITAQRLAHLNKCLMNFKLGNFSYQKNPLKLGELQGNHFTVVLRNITGTDDQVQQAMNSLKEIGFINYYGMQRFGTTAVPTYQVGRAILQNSWTEVMDLILKPRSGAEKGYLVKCREEWAKTKDPTAALRKLPVKRCVEGQLLRGLSKYGMKNIVSAFGIIPRNNRLMYIHSYQSYVWNNMVSKRIEDYGLKPVPGDLVLKGATATYIEEDDVNNYSIHDVVMPLPGFDVIYPKHKIQEAYREMLTADNLDIDNMRHKIRDYSLSGAYRKIIIRPQNVSWEVVAYDDPKIPLFNTDVDNLEGKTPPVFASEGKYRALKMDFSLPPSTYATMAIREVLKMDTSIKNQTQLNTTWLR

SEQ ID NO: 837883 - protein, 732 aa, Homo sapiens
SRLERIWSSARKALLLPGRPSRWLIQVAFAALLRPNQSAGHLAAQLTPRPRSQAPGFLKCFLGALKMEMTEMTGVSLKRGALVVEDNDSGVPVEETKKQKLSECSLTKGQDGLQNDFLSISEDVPRPPDTVSTGKGGKNSEAQLEDEEEEEEDGLSEECEEEESESFADMMKHGLTEADVGITKFVSSHQGFSGILKERYSDFVVHEIGKDGRISHLNDLSIPVDEEDPSEDIFTVLTAEEKQRLEELQLFKNKETSVAIEVIEDTKEKRTIIHQAIKSLFPGLETKTEDREGKKYIVAYHAAGKKALAKVSGADPRKHSWPKSRGSYCHFVLYKENKDTMDAINVLSKYLRVKPNIFSYMGTKDKRAITVQEIAVLKITAQRLAHLNKCLMNFKLGNFSYQKNPLKLGELQGNHFTVVLRNITGTDDQVQQAMNSLKEIGFINYYGMQRFGTTAVPTYQVGRAILQNSWTEVMDLILKPRSGAEKGYLVKCREEWAKTKDPTAALRKLPVKRCVEGQLLRGLSKYGMKNIVSAFGIIPRNNRLMYIHSYQSYVWNNMVSKRIEDYGLKPVPGDLVLKGATATYIEEDDVNNYSIHDVVMPLPGFDVIYPKHKIQEAYREMLTADNLDIDNMRHKIRDYSLSGAYRKIIIRPQNVSWEVVAYDDPKIPLFNTDVDNLEGKTPPVFASEGKYRALKMDFSLPPSTYATMAIREVLKMDTSIKNQTQLNTTWLR

SEQ ID NO: 837884 - protein, 392 aa, Homo sapiens
MDAINVLSKYLRVKPNIFSYMGTKDKRAITVQEIAVLKITAQRLAHLNKCLMNFKLGNFSYQKNPLKLGELQGNHFTVVLRNITGTDDQVQQAMNSLKEIGFINYYGMQRFGTTAVPTYQVGRAILQNSWTEVMDLILKPRSGAEKGYLVKCREEWAKTKDPTAALRKLPVKRCVEGQLLRGLSKYGMKNIVSAFGIIPRNNRLMYIHSYQSYVWNNMVSKRIEDYGLKPVPGDLVLKGATATYIEEDDVNNYSIHDVVMPLPGFDVIYPKHKIQEAYREMLTADNLDIDNMRHKIRDYSLSGAYRKIIIRPQNVSWEVVAYDDPKIPLFNTDVDNLEGKTPPVFASEGKYRALKMDFSLPPSTYATMAIREVLKMDTSIKNQTQLNTTWLR

SEQ ID NO: 837885 - protein, 727 aa, Homo sapiens; identical to SEQ ID NO: 837882

SEQ ID NO: 837886 - protein, 727 aa, Homo sapiens; identical to SEQ ID NO: 837882

SEQ ID NO: 837887 - protein, 743 aa, Homo sapiens
SRLERIWSSARKALLLPGRPSRWLIQVAFAALLRPNQSAGHLAAQLTPRPRSQAPGFLKCFLGALKMEMTEMTGVSLKRGALVVEDNDSGVPVEETKKQKLSECSLTKGQDGLQNDFLSISEDVPRPPDTVSTGKGGKNSEAQLEDEEEEEEDGLSEECEEEESESFADMMKHGLTEADVGITKFVSSHQGFSGILKERYSDFVVHEIGKDGRISHLNDLSIPVDEEDPSEDIFTVLTAEEKQRLEELQLFKNKETSVAIEVIEDTKEKRTIIHQAIKSLFPGLETKTEDREGKKYIVAYHAAGKKALANPRKHSWPKSRGSYCHFVLYKENKDTMDAINVLSKYLRVKPNIFSYMGTKDKRAITVQEIAVLKITAQRLAHLKFPSLKFIKQLIQVGKSKCLMNFKLGNFSYQKNPLKLGELQGNHFTVVLRNITGTDDQVQQAMNSLKEIGFINYYGMQRFGTTAVPTYQVGRAILQNSWTEVMDLILKPRSGAEKGYLVKCREEWAKTKDPTAALRKLPVKRCVEGQLLRGLSKYGMKNIVSAFGIIPRNNRLMYIHSYQSYVWNNMVSKRIEDYGLKPVPGDLVLKGATATYIEEDDVNNYSIHDVVMPLPGFDVIYPKHKIQEAYREMLTADNLDIDNMRHKIRDYSLSGAYRKIIIRPQNVSWEVVAYDDPKIPLFNTDVDNLEGKTPPVFASEGKYRALKMDFSLPPSTYATMAIREVLKMDTSIKNQTQLNTTWLR

SEQ ID NO: 837888 - protein, 732 aa, Homo sapiens; identical to SEQ ID NO: 837883

SEQ ID NO: 837889 - protein, 860 aa, Homo sapiens
MEQVAEGARVTAVPVSAADSTEELAEVEEGVGVVGEDNDAAARGAEAFGDSEEDGEDVFEVEKILDMKTEGGKVLYKVRWKGYTSDDDTWEPEIHLEDCKEVLLEFRKKIAENKAKAVRKDIQRLSLNNDIFEANSDSDQQSETKEDTSPKKKKKKLRQREEKSPDDLKKKKAKAGKLKDKSKPDLESSLESLVFDLRTKKRISEAKEELKESKKPKKDEVKETKELKKVKKGEIRDLKTKTREDPKENRKTKKEKFVESQVESESSVLNDSPFPEDDSEGLHSDSREEKQNTKSARERAGQDMGLEHGFEKPLDSAMSAEEDTDVRGRRKKKTPRKAEDTRENRKLENKNAFLEKKTVPKKQRNQDRSKSAAELEKLMPVSAQTPKGRRLSGEERGLWSTDSAEEDKETKRNESKEKYQKRHDSDKEEKGRKEPKGLKTLKEIRNAFDLFKLTPEEKNDVSENNRKREEIPLDFKTIDDHKTKENKQSLKERRNTRDETDTWAYIAAEGDQEVLDSVCQADENSDGRQQILSLGMDLQLEWMKLEDFQKHLDGKDENFAATDAIPSNVLRDAVKNGDYITVKVALNSNEEYNLDQEDSSGMTLVMLAAAGGQDDLLRLLITKGAKVNGRQKNGTTALIHAAEKNFLTTVAILLEAGAFVNVQQSNGETALMKACKRGNSDIVRLVIECGADCNILSKHQNSALHFAKQSNNVLVYDLLKNHLETLSRVAEETIKDYFEARLALLEPVFPIACHRLCEGPDFSTDFNYKPPQNIPEGSGILLFIFHANFLGKEVIARLCGPCSVQAVVLNDKFQLPVFLDSHFVYSFSPVAGPNKLFIRLTEAPSAKVKLLIGAYRVQLQ

SEQ ID NO: 837890 - protein, 293 aa, Homo sapiens
MEQVAEGARVTAVPVSAADSTEELAEVEEGVGVVGEDNDAAARGAEAFGDSEEDGEDVFEVEKILDMKTEGGKVLYKVRWKGYTSDDDTWEPEIHLEDCKEVLLEFRKKIAENKAKAVRKDIQRLSLNNDIFEANSDSDQQSETKEDTSPKKKKKKLRQREEKSPDDLKKKKAKAGKLKDKSKPDLESSLEATDKSKPDLGAPGKGVALESKDQGKNLGSHRRTKGSKSPKDEEEQRIRTSRGIAPRRTGAPARSEKLGPGRRYGPQDGARKTQRAAGSNQTGRNGKRHGGEK

SEQ ID NO: 837891 - protein, 135 aa, Homo sapiens
MEQVAEGARVTAVPVSAADSTEELAEVEEGVGVVGEDNDAAARGAEAFGDSEEDGEDVFEVEKILDMKTEGGKVLYKVRWKGYTSDDDTWEPEIHLEDCKEVLLEFRKKIAENKAKAVRKDIQVLCFVSYLFLHT

SEQ ID NO: 837892 - protein, 216 aa, Homo sapiens
MVLSSHGFEKPLDSAMSAEEDTDVRGRRKKKTPRKAEDTRENRKLENKNAFLEKKTVPKKQRNQDRSKSAAELEKLMPVSAQTPKGRRLSGEERGLWSTDSAEEPSLPWTAKQLLSCFKLAHKYRPETKQEKKQRLLARAEKKAAGKGDVPTKRPPVLRAGVNTVTTLVENKKAQLVVIAHDVDPIELVVLLLACVENGVLTDIMEEQMDVVKETA

SEQ ID NO: 837893 - protein, 860 aa, Homo sapiens; identical to SEQ ID NO: 837889

SEQ ID NO: 837894 - protein, 879 aa, Homo sapiens
MEQVAEGARVTAVPVSAADSTEELAEVEEGVGVVGEDNDAAARGAEAFGDSEEDGEDVFEVEKILDMKTEGGKVLYKVRWKGYTSDDDTWEPEIHLEDCKEVLLEFRKKIAENKAKAVRKDIQRLSLNNDIFEANSDSDQQSETKEDTSPKKKKKKLRQREEKSPDDLKKKKAKAGKLKDKSKPDLESSLESLVFDLRTKKRISEAKEELKESKKPKKDEVKETKELKKVKKGEIRDLKTKTREDPKENRKTKKEKFVESQVESESSVLNDSPFPEDDSEGLHSDSREEKQNTKSARERAGQDMGLEHGFEKPLDSAMSAEEDTDVRGRRKKKTPRKAEDTRENRKLENKNAFLEKKTVPKKQRNQDRSKSAAELEKLMPVSAQTPKGRRLSGEERGLWSTDSAEEDKETKRNESKEKYQKRHDSDKEEKGRKEPKGLKTLKEIRNAFDLFKLTPEEKNDVSENNRKREEIPLDFKTIDDHKTKENKQSLKERRNTRDETDTWAYIAAEGDQEVLDSVCQADENSDGRQQILSLGMDLQLEWMKLEDFQKHLDGKDENFAATDAIPSNVLRDAVKNGDYITVKVALNSNEEYNLDQEDSSGMTLVMLAAAGGQDDLLRLLITKGAKVNGRQKNGTTALIHAAEKNFLTTVAILLEAGAFVNVQQSNGETALMKACKRGNSDIVRLVIECGADCNILSKHQNSALHFAKQSNNVLVYDLLKNHLETLSRVAEETIKDYFEARLALLEPVFPIACHRLCEGPDFSTDFNYKPPQNIPEGSGILLFIFHANFLGKEVIARLCGPCSVQAVVLNDKFQLPVFLTGSRSVVQAGVQWRGLQLTGVLTSQAQAILPPQPPNYLGLKMTVILFTHSALLQVPINSS

SEQ ID NO: 837895 - protein, 434 aa, Homo sapiens
MEQVAEGARVTAVPVSAADSTEELAEVEEGVGVVGEDNDAAARGAEAFGDSEEDGEDVFEVEKILDMKTEGGKVLYKVRWKGYTSDDDTWEPEIHLEDCKEVLLEFRKKIAENKAKAVRKDIQRLSLNNDIFEANSDSDQQSETKEDTSPKKKKKKLRQREEKSPDDLKKKKAKAGKLKDKSKPDLESSLESLVFDLRTKKRISEAKEELKESKKPKKDEVKETKELKKVKKGEIRDLKTKTREDPKENRKTKKEKFVESQVESESSVLNDSPFPEDDSEGLHSDSREEKQNTKSARERAGQDMGLEHGFEKPLDSAMSAEEDTDVRGRRKKKTPRKAEDTRENRKLENKNAFLEKKTVPKKQRNQDRSKSAAELEKLMPVSAQTPKGRRLSGEERGLWSTDSAEEGKGHGRQQKTHVEWSRHFTSKERETVKL

SEQ ID NO: 837896 - protein, 520 aa, Homo sapiens
MEQVAEGARVTAVPVSAADSTEELAEVEEGVGVVGEDNDAAARGAEAFGDSEEDGEDVFEVEKILDMKTEGGKVLYKVRWKGYTSDDDTWEPEIHLEDCKEVLLEFRKKIAENKAKAVRKDIQRLSLNNDIFEANSDSDQQSETKEDTSPKKKKKKLRQREEKSPDDLKKKKAKAGKLKDKSKPDLESSLESLVFDLRTKKRISEAKEELKESKKPKKDEVKETKELKKVKKGEIRDLKTKTREDPKENRKTKKEKFVESQVESESSVLNDSPFPEDDSEGLHSDSREEKQNTKSARERAGQDMGLEHGFEKPLDSAMSAEEDTDVRGRRKKKTPRKAEDTRENRKLENKNAFLEKKTVPKKQRNQDRSKSAAELEKLMPVSAQTPKGRRLSGEERGLWSTDSAEEDKETKRNESKEKYQKRHDSDKEEKGRKEPKGLKTLKEIRNAFDLFKLTPEEKNDVSENNRKREEIPLDFKTIDDHKTKENKQSLKERRNTRDETDTWAYIAAEGDQETPAWVTE

SEQ ID NO: 837897 - protein, 537 aa, Homo sapiens
MEQVAEGARVTAVPVSAADSTEELAEVEEGVGVVGEDNDAAARGAEAFGDSEEDGEDVFEVEKILDMKTEGGKVLYKVRWKGYTSDDDTWEPEIHLEDCKEVLLEFRKKIAENKAKAVRKDIQRLSLNNDIFEANSDSDQQSETKEDTSPKKKKKKLRQREEKSPDDLKKKKAKAGKLKDKSKPDLESSLESLVFDLRTKKRISEAKEELKESKKPKKDEVKETKELKKVKKGEIRDLKTKTREDPKENRKTKKEKFVESQVESESSVLNDSPFPEDDSEGLHSDSREEKQNTKSARERAGQDMGLEHGFEKPLDSAMSAEEDTDVRGRRKKKTPRKAEDTRENRKLENKNAFLEKKTVPKKQRNQDRSKSAAELEKLMPVSAQTPKGRRLSGEERGLWSTDSAEEDKETKRNESKEKYQKRHDSDKEEKGRKEPKGLKTLKEIRNAFDLFKLTPEEKNDVSENNRKREEIPLDFKTIDDHKTKENKQSLKERRNTRDETDTWAYIAAEGDQEVLDSVCQADENSGEFGIILQNFSR

SEQ ID NO: 837898 - protein, 827 aa, Homo sapiens [sequence omitted]

SEQ ID NO: 837899 - protein, 623 aa, Homo sapiens
MEQVAEGARVTAVPVSAADSTEELAEVEEGVGVVGEDNDAAARGAEAFGDSEEDGEDVFEVEKILDMKTEGGKVLYKVRWKGYTSDDDTWEPEIHLEDCKEVLLEFRKKIAENKAKAVRKDIQRLSLNNDIFEANSDSDQQSETKEDTSPKKKKKKLRQREEKSPDDLKKKKAKAGKLKDKSKPDLESSLESLVFDLRTKKRISEAKEELKESKKPKKDEVKETKELKKVKKGEIRDLKTKTREDPKENRKTKKEKFVESQVESESSVLNDSPFPEDDSEGLHSDSREEKQNTKSARERAGQDMGLEHGFEKPLDSAMSAEEDTDVRGRRKKKTPRKAEDTRENRKLENKNAFLEKKTVPKKQRNQDRSKSAAELEKLMPVSAQTPKGRRLSGEERGLWSTDSAEEDKETKRNESKEKYQKRHDSDKEEKGRKEPKGLKTLKEIRNAFDLFKLTPEEKNDVSENNRKREEIPLDFKTIDDHKTKENKQSLKERRNTRDETDTWAYIAAEGDQEVLDSVCQADENSDGRQQILSLGMDLQLEWMKLEDFQKHLDGKDENFAATDAIPSNVLRDAVKNGDYITVKVALNSNEEYNLDQEDLIHKTKRRYKNESWAWWHAPVIPST

SEQ ID NO: 837900 - protein, 596 aa, Homo sapiens
MEQVAEGARVTAVPVSAADSTEELAEVEEGVGVVGEDNDAAARGAEAFGDSEEDGEDVFEVEKILDMKTEGGKVLYKVRWKGYTSDDDTWEPEIHLEDCKEVLLEFRKKIAENKAKAVRKDIQRLSLNNDIFEANSDSDQQSETKEDTSPKKKKKKLRQREEKSPDDLKKKKAKAGKLKDKSKPDLESSLESLVFDLRTKKRISEAKEELKESKKPKKDEVKETKELKKVKKGEIRDLKTKTREDPKENRKTKKEKFVESQVESESSVLNDSPFPEDDSEGLHSDSREEKQNTKSARERAGQDMGLEHGFEKPLDSAMSAEEDTDVRGRRKKKTPRKAEDTRENRKLENKNAFLEKKTVPKKQRNQDRSKSAAELEKLMPVSAQTPKGRRLSGEERGLWSTDSAEEDKETKRNESKEKYQKRHDSDKEEKGRKEPKGLKTLKEIRNAFDLFKLTPEEKNDVSENNRKREEIPLDFKTIDDHKTKENKQSLKERRNTRDETDTWAYIAAEGDQEVLDSVCQADENSGKVLYKVRWKGYTSDDDTWEPEIHLEDCKEVLLEFKEENAENKAKAVRKDIQRLSLNNDIFEANSDSDQAK

SEQ ID NO: 837901 - protein, 658 aa, Homo sapiens
ANSFALIGCTGVVCRSAVLRSGRRITAGVVGDWRDLKTKTREDPKENRKTKKEKFVESQVESESSVLNDSPFPEDDSEGLHSDSREEKQNTKSARERAGQDMGLEHGFEKPLDSAMSAEEDTDVRGRRKKKTPRKAEDTRENRKLENKNAFLEKKTVPKKQRNQDRSKSAAELEKLMPVSAQTPKGRRLSGEERGLWSTDSAEEDKETKRNESKEKYQKRHDSDKEEKGRKEPKGLKTLKEIRNAFDLFKLTPEEKNDVSENNRKREEIPLDFKTIDDHKTKENKQSLKERRNTRDETDTWAYIAAEGDQEVLDSVCQADENSDGRQQILSLGMDLQLEWMKLEDFQKHLDGKDENFAATDAIPSNVLRDAVKNGDYITVKVALNSNEEYNLDQEDSSGMTLVMLAAAGGQDDLLRLLITKGAKVNGRQKNGTTALIHAAEKNFLTTVAILLEAGAFVNVQQSNGETALMKACKRGNSDIVRLVIECGADCNILSKHQNSALHFAKQSNNVLVYDLLKNHLETLSRVAEETIKDYFEARLALLEPVFPIACHRLCEGPDFSTDFNYKPPQNIPEGSGILLFIFHANFLGKEVIARLCGPCSVQAVVLNDKFQLPVFLDSHFVYSFSPVAGPNKLFIRLTEAPSAKVKLLIGAYRVQLQ

SEQ ID NO: 837902 - protein, 479 aa, Homo sapiens
MEQVAEGARVTAVPVSAADSTEELAEVEEGVGVVGEDNDAAARGAEAFGDSEEDGEDVFEVEKILDMKTEGGKVLYKVRWKGYTSDDDTWEPEIHLEDCKEVLLEFRKKIAENKAKAVRKDIQRLSLNNDIFEANSDSDQQSETKEDTSPKKKKKKLRQREEKSPDDLKKKKAKAGKLKDKSKPDLESSLESLVFDLRTKKRISEAKEELKESKKPKKDEVKETKELKKVKKGEIRDLKTKTREDPKENRKTKKEKFVESQVESESSVLNDSPFPEDDSEGLHSDSREEKQNTKSARERAGQDMGLEHGFEKPLDSAMSAEEDTDVRGRRKKKTPRKAEDTRENRKLENKNAFLEKKTVPKKQRNQDRSKSAAELEKLMPVSAQTPKGRRLSGEERGLWSTDSAEEDKETKRNESKEKYQKRHDSDKEEKGRKEPKGLKTLKRISADPLKIFIFFFQVVIFHCTYFLSEYSNICLQNAI

SEQ ID NO: 837903 - protein, 563 aa, Homo sapiens
LGTPTMVLSSHGFEKPLDSAMSAEEDTDVRGRRKKKTPRKAEDTRENRKLENKNAFLEKKTVPKKQRNQDRSKSAAELEKLMPVSAQTPKGRRLSGEERGLWSTDSAEEDKETKRNESKEKYQKRHDSDKEEKGRKEPKGLKTLKEIRNAFDLFKLTPEEKNDVSENNRKREEIPLDFKTIDDHKTKENKQSLKERRNTRDETDTWAYIAAEGDQEVLDSVCQADENSDGRQQILSLGMDLQLEWMKLEDFQKHLDGKDENFAATDAIPSNVLRDAVKNGDYITVKVALNSNEEYNLDQEDSSGMTLVMLAAAGGQDDLLRLLITKGAKVNGRQKNGTTALIHAAEKNFLTTVAILLEAGAFVNVQQSNGETALMKACKRGNSDIVRLVIECGADCNILSKHQNSALHFAKQSNNVLVYDLLKNHLETLSRVAEETIKDYFEARLALLEPVFPIACHRLCEGPDFSTDFNYKPPQNIPEGSGILLFIFHANFLGKEVIARLCGPCSVQAVVLNDKFQLPVFLDSHFVYSFSPVAGPNKLFIRLTEAPSAKVKLLIGAYRVQLQ

SEQ ID NO: 837904 - protein, 558 aa, Homo sapiens
MVLSSHGFEKPLDSAMSAEEDTDVRGRRKKKTPRKAEDTRENRKLENKNAFLEKKTVPKKQRNQDRSKSAAELEKLMPVSAQTPKGRRLSGEERGLWSTDSAEEDKETKRNESKEKYQKRHDSDKEEKGRKEPKGLKTLKEIRNAFDLFKLTPEEKNDVSENNRKREEIPLDFKTIDDHKTKENKQSLKERRNTRDETDTWAYIAAEGDQEVLDSVCQADENSDGRQQILSLGMDLQLEWMKLEDFQKHLDGKDENFAATDAIPSNVLRDAVKNGDYITVKVALNSNEEYNLDQEDSSGMTLVMLAAAGGQDDLLRLLITKGAKVNGRQKNGTTALIHAAEKNFLTTVAILLEAGAFVNVQQSNGETALMKACKRGNSDIVRLVIECGADCNILSKHQNSALHFAKQSNNVLVYDLLKNHLETLSRVAEETIKDYFEARLALLEPVFPIACHRLCEGPDFSTDFNYKPPQNIPEGSGILLFIFHANFLGKEVIARLCGPCSVQAVVLNDKFQLPVFLDSHFVYSFSPVAGPNKLFIRLTEAPSAKVKLLIGAYRVQLQ

SEQ ID NO: 837905 - protein, 131 aa, Homo sapiens
METCHSEELRDLSEVTWLISDRDKETVCQLCHSSIVHLQVQIRICAWVVSFKAAAGDISRVFVVLRGVFEIPETKLSTVKARLTYLCASLRGWLTGDSVAWTEGSSRGLLSKAWCLFCLGTEASFLKLPIS

SEQ ID NO: 837906 - protein, 191 aa, Homo sapiens
  misc_feature (60)..(60): Xaa can be any naturally occurring amino acid
MVLSYHSPRVNDCDLLGTILSDQSHLGGPIFFSHHRHLGWDVISLVLHLRKVSFRVLLVXGLSTMVLSSHGFEKPLDSAMSAEEDTDVRGRRKKKTPRKAEDTRENRKLENKNAFLEKKTVPKKQRNQDRSKSAAELEKLMPVSAQTPKGRRLSGEERGLWSTDSAEEPSLQRWSSAFDMCSSLSLITSGF

SEQ ID NO: 837907 - protein, 188 aa, Homo sapiens
  misc_feature (60)..(60): Xaa can be any naturally occurring amino acid
MVLSYHSPRVNDCDLLGTILSDQSHLGGPIFFSHHRHLGWDVISLVLHLRKVSFRVLLVXGLSTMVLSSHGFEKPLDSAMSAEEDTDVRGRRKKKTPRKAEDTRENRKLENKNAFLEKKTVPKKQRNQDRSKSAAELEKLMPVSAQTPKGRRLSGEERGLWSTDSAEEPSLQRWSSAQTRDTLQMVVL

SEQ ID NO: 837908 - protein, 131 aa, Homo sapiens; identical to SEQ ID NO: 837905

SEQ ID NO: 837909 - protein, 104 aa, Homo sapiens
MVLSSHGFEKPLDSAMSAEEDTDVRGRRKKKTPRKAEDTRENRKLENKNAFLEKKTVPKKQRNQDRSKSAAELEKLMPVSAQTPKGRRLSGEERGLWSTDSAEE

SEQ ID NO: 837910 - protein, 879 aa, Homo sapiens; identical to SEQ ID NO: 837894

SEQ ID NO: 837911 - protein, 860 aa, Homo sapiens; identical to SEQ ID NO: 837889

SEQ ID NO: 837912 - protein, 797 aa, Homo sapiens [sequence omitted]

SEQ ID NO: 837913 - protein, 867 aa, Homo sapiens
MEQVAEGARVTAVPVSAADSTEELAEVEEGVGVVGEDNDAAARGAEAFGDSEEDGEDVFEVEKILDMKTEGGKVLYKVRWKGYTSDDDTWEPEIHLEDCKEVLLEFRKKIAENKAKAVRKDIQRLSLNNDIFEANSDSDQQSETKEDTSPKKKKKKLRQREEKSPDDLKKKKAKAGKLKDKSKPDLESSLESLVFDLRTKKRISEAKEELKESKKPKKDEVKETKELKKVKKGEIRDLKTKTREDPKENRKTKKEKFVESQVESESSVLNDSPFPEDDSEGLHSDSREEKQNTKSARERAGQDMGLEHGFEKPLDSAMSAEEDTDVRGRRKKKTPRKAEDTRENRKLENKNAFLEKKTVPKKQRNQDRSKSAAELEKLMPVSAQTPKGRRLSGEERGLWSTDSAEEDKETKRNESKEKYQKRHDSDKEEKGRKEPKGLKTLKEIRNAFDLFKLTPEEKNDVSENNRKREEIPLDFKTIDDHKTKENKQSLKERRNTRDETDTWAYIAAEGDQEVLDSVCQADENSDGRQQILSLGMDLQLEWMKLEDFQKHLDGKDENFAATDAIPSNVLRDAVKNGDYITVKVALNSNEEYNLDQEDSSGMTLVMLAAAGGQDDLLRLLITKGAKVNGRQKNGTTALIHAAEKNFLTTVAILLEAGAFVNVQQSNGETALMKACKRGNSDIVRLVIECGADCNILSKHQNSALHFAKQSNNVLVYDLLKNHLETLSRVAEETIKDYFEARLALLEPVFPIACHRLCEGPDFSTDFNYKPPQNIPEGSGILLFIFHANFLGKEVIARLCGPCSVQAVVLNDKFQLPVFLTGSRSVVQAGVQWRGLQLTGVLTSQAQAILPPQPPNYLGLKMHATTSG

SEQ ID NO: 837914 - protein, 434 aa, Homo sapiens; identical to SEQ ID NO: 837895

SEQ ID NO: 837915 - protein, 708 aa, Homo sapiens
EKKTVPKKQRNQDRSKSAAELEKLMPVSAQTPKGRRLSGEERGLWSTDSPEEDKETKRNESKKPKKDEVKETKELKKVKKGEIRDLKTKTREDPKENRKTKKEKFVESQVESESSVLNDSPFPEDDSEGLHSDSREEKQNTKSARERAGQDMGLEHGFEKPLDSAMSAEEDTDVRGRRKKKTPRKAEDTRENRKLENKNAFLEKKTVPKKQRNQDRSKSAAELEKLMPVSAQTPKGRRLSGEERGLWSTDSAEEDKETKRNESKEKYQKRHDSDKEEKGRKEPKGLKTLKEIRNAFDLFKLTPEEKNDVSENNRKREEIPLDFKTIDDHKTKENKQSLKERRNTRDETDTWAYIAAEGDQEVLDSVCQADENSDGRQQILSLGMDLQLEWMKLEDFQKHLDGKDENFAATDAIPSNVLRDAVKNGDYITVKVALNSNEEYNLDQEDSSGMTLVMLAAAGGQDDLLRLLITKGAKVNGRQKNGTTALIHAAEKNFLTTVAILLEAGAFVNVQQSNGETALMKACKRGNSDIVRLVIECGADCNILSKHQNSALHFAKQSNNVLVYDLLKNHLETLSRVAEETIKDYFEARLALLEPVFPIACHRLCEGPDFSTDFNYKPPQNIPEGSGILLFIFHANFLGKEVIARLCGPCSVQAVVLNDKFQLPVFLDSHFVYSFSPVAGPNKLFIRLTEAPSAKVKLLIGAYRVQLQ

SEQ ID NO: 837916 - protein, 590 aa, Homo sapiens
GDAAGTLPDLMHHSDSREEKQNTKSARERAGQDMGLEHGFEKPLDSAMSAEEDTDVRGRRKKKTPRKAEDTRENRKLENKNAFLEKKTVPKKQRNQDRSKSAAELEKLMPVSAQTPKGRRLSGEERGLWSTDSAEEDKETKRNESKEKYQKRHDSDKEEKGRKEPKGLKTLKEIRNAFDLFKLTPEEKNDVSENNRKREEIPLDFKTIDDHKTKENKQSLKERRNTRDETDTWAYIAAEGDQEVLDSVCQADENSDGRQQILSLGMDLQLEWMKLEDFQKHLDGKDENFAATDAIPSNVLRDAVKNGDYITVKVALNSNEEYNLDQEDSSGMTLVMLAAAGGQDDLLRLLITKGAKVNGRQKNGTTALIHAAEKNFLTTVAILLEAGAFVNVQQSNGETALMKACKRGNSDIVRLVIECGADCNILSKHQNSALHFAKQSNNVLVYDLLKNHLETLSRVAEETIKDYFEARLALLEPVFPIACHRLCEGPDFSTDFNYKPPQNIPEGSGILLFIFHANFLGKEVIARLCGPCSVQAVVLNDKFQLPVFLDSHFVYSFSPVAGPNKLFIRLTEAPSAKVKLLIGAYRVQLQ

SEQ ID NO: 837917 - protein, 429 aa, Homo sapiens
MEQVAEGARVTAVPVSAADSTEELAEVEEGVGVVGEDNDAAARGAEAFGDSEEDGEDVFEVEKILDMKTEGGKVLYKVRWKGYTSDDDTWEPEIHLEDCKEVLLEFRKKIAENKAKAVRKDIQRLSLNNDIFEANSDSDQQSETKEDTSPKKKKKKLRQREEKSPDDLKKKKAKAGKLKDKSKPDLESSLESLVFDLRTKKRISEAKEELKESKKPKKDEVKETKELKKVKKGEIRDLKTKTREDPKENRKTKKEKFVESQVESESSVLNDSPFPEDDSEGLHSDSREEKQNTKSARERAGQDMGLEHGFEKPLDSAMSAEEDTDVRGRRKKKTPRKAEDTRENRKLENKNAFLEKKTVPKKQRNQDRSKSAAELEKLMPVSAQTPKGRRLSGEERGLWSTDSAEEPSLQRWSSAFDMCSSLSLITSGF

SEQ ID NO: 837918 - protein, 688 aa, Homo sapiens
  misc_feature (60)..(60): Xaa can be any naturally occurring amino acid
MVLSYHSPRVNDCDLLGTILSDQSHLGGPIFFSHHRHLGWDVISLVLHLRKVSYPGSFGXRTLNDGPQLYDGPQLNDGPQLNDGPQLNDAPQLNDGPQLNDGPQLIDGPQLNDGPQLNDGPQLNDGPQLNDGPQSHGFEKPLDSAMSAEEDTDVRGRRKKKTPRKAEDTRENRKLENKNAFLEKKTVPKKQRNQDRSKSAAELEKLMPVSAQTPKGRRLSGEERGLWSTDSAEEDKETKRNESKEKYQKRHDSDKEEKGRKEPKGLKTLKEIRNAFDLFKLTPEEKNDVSENNRKREEIPLDFKTIDDHKTKENKQSLKERRNTRDETDTWAYIAAEGDQEVLDSVCQADENSDGRQQILSLGMDLQLEWMKLEDFQKHLDGKDENFAATDAIPSNVLRDAVKNGDYITVKVALNSNEEYNLDQEDSSGMTLVMLAAAGGQDDLLRLLITKGAKVNGRQKNGTTALIHAAEKNFLTTVAILLEAGAFVNVQQSNGETALMKACKRGNSDIVRLVIECGADCNILSKHQNSALHFAKQSNNVLVYDLLKNHLETLSRVAEETIKDYFEARLALLEPVFPIACHRLCEGPDFSTDFNYKPPQNIPEGSGILLFIFHANFLGKEVIARLCGPCSVQAVVLNDKFQLPVFLDSHFVYSFSPVAGPNKLFIRLTEAPSAKVKLLIGAYRVQLQ

SEQ ID NO: 837919 - protein, 70 aa, Homo sapiens
IWCLSSFGRPLRGFFPWALVQCFRVFSPGVARIWGTSWAALPGVVMLGAPSLSLQCVRHNNAAGKELGCS

SEQ ID NO: 837920 - protein, 267 aa, Homo sapiens
  misc_feature (60)..(60): Xaa can be any naturally occurring amino acid
MVLSYHSPRVNDCDLLGTILSDQSHLGGPIFFSHHRHLGWDVISLVLHLRKVSYPGSFGXRTLNDGPQLYDGPQLNDGPQLNDGPQLNDAPQLNDGPQLNDGPQLIDGPQLNDGPQLNDGPQLNDGPQLNDGPQSHGFEKPLDSAMSAEEDTDVRGRRKKKTPRKAEDTRENRKLENKNAFLEKKTVPKKQRNQDRSKSAAELEKLMPVSAQTPKGRRLSGEERGLWSTDSAEEPSLELRTIVELRTIVELRTIVELRTIVELRTIV

SEQ ID NO: 837921 - protein, 156 aa, Homo sapiens
AHFLKLKVSIDKGPQNRAGAIVPWFAKMSFPKYKPSSLRTLPETLDPAEYNISPETRRAQAERLAIRAQLKREYLLQYNDPNRRGLIENPALLRWAYARTINVYPNFRPTPKNSLMGALCGFGPLIFIYYIIKTERDRKEKLIQEGKLDRTFHLSY

SEQ ID NO: 837922 - protein, 156 aa, Homo sapiens; identical to SEQ ID NO: 837921

SEQ ID NO: 837923 - protein, 156 aa, Homo sapiens; identical to SEQ ID NO: 837921

SEQ ID NO: 837924 - protein, 156 aa, Homo sapiens; identical to SEQ ID NO: 837921

SEQ ID NO: 837925 - protein, 147 aa, Homo sapiens
AHFLKLKVSIDKGPQNRAGAIVPWFAKMSFPKYKPSSLRTLPETLDPAEYNISPETRRAQAERLAIRAQLKREYLLQYNDPNRRGLIENPALLRWAYARTINVYPNFRPTPKNSLMGALCGFGPLIFIYYIIKTERVSIQTRCLVFE

SEQ ID NO: 837926 - protein, 96 aa, Homo sapiens
AHFLKLKVSIDKGPQNRAGAIVPWFAKMSFPKYKPSSLRTLPETLDPAEYNISPETRRAQAERLAIRAQLKREYLLQYNDPNRRGLIVSVGPPRRE

SEQ ID NO: 837927 - protein, 96 aa, Homo sapiens; identical to SEQ ID NO: 837926

SEQ ID NO: 837928 - protein, 143 aa, Homo sapiens
GRLLLLNSRPRRPKMSFPKYKPSSLRTLPETLDPAEYNISPETRRAQAERLAIRAQLKREYLLQYNDPNRRGLIENPALLRWAYARTINVYPNFRPTPKNSLMGALCGFGPLIFIYYIIKTERDRKEKLIQEGKLDRTFHLSY

SEQ ID NO: 837929 - protein, 156 aa, Homo sapiens; identical to SEQ ID NO: 837921

SEQ ID NO: 837930 - protein, 156 aa, Homo sapiens; identical to SEQ ID NO: 837921

SEQ ID NO: 837931 - protein, 147 aa, Homo sapiens; identical to SEQ ID NO: 837925

SEQ ID NO: 837932 - protein, 139 aa, Homo sapiens
MRPEGESGPHTRRARAPDRPPTGAGRTGGERGSEKRGRRSRESGEEKRGDTTNGLGERRRQGATPRSDEGERTEQERDTYHALRFDVIGGGVREERRRGAEVTGERAEVKKAREDTNANRKEGAGAQRTEGVEERGGGR

SEQ ID NO: 837933 - protein, 160 aa, Homo sapiens
LSPVANGRGWGAARPAGRGSPRPGTRGEEEAGSQSGSIRFSHRPRCGSQQLGRREEWQRQGSPVSRRLSARRGPQAPGTRLPRRHPARAFPAATMPKRKVSSAEGAAKEEPKRRSARLSAKPPAKVEAKPKKAAAKDKSSDKKVQTKGNKGSKGKTGRSG

SEQ ID NO: 837934 - protein, 162 aa, Homo sapiens
LSPVANGRGWGAARPAGRGSPRPGTRGEEEAGSQSGSIRFSHRPRCGSQQLGRREEWQRQGSPVSRRLSARRGPQAPGTRLPRRHPARAFPAATMPKRKVSSAEGAAKEEPKRRSARLSAKPPAKVEAKPKKAAAKVSLETRIGMQRGLRLHCFLMRGFHFN

SEQ ID NO: 837935 - protein, 176 aa, Homo sapiens
LSPVANGRGWGAARPAGRGSPRPGTRGEEEAGSQSGSIRFSHRPRCGSQQLGRREEWQRQGSPVSRRLSARRGPQAPGTRLPRRHPARAFPAATMPKRKVSSAEGAAKEEPKRRSARLSAVSKASPVTVRFPRVVPGEDAQCCFCLSETSCKSGSEAEKGSSEGKPRNAHWDAAGP

SEQ ID NO: 837936 - protein, 162 aa, Homo sapiens; identical to SEQ ID NO: 837934

SEQ ID NO: 837937 - protein, 138 aa, Homo sapiens
LSPVANGRGWGAARPAGRGSPRPGTRGEEEAGSQSGSIRFSHRPRCGSQQLGRREEWQRQGSPVSRRLSARRGPQAPGTRLPRRHPARAFPAATMPKRKVSSAEGAAKEEPKRRSARLSAKPPAKVEAKPKKAAAKCR

SEQ ID NO: 837938 - protein, 123 aa, Homo sapiens
LSPVANGRGWGAARPAGRGSPRPGTRGEEEAGSQSGSIRFSHRPRCGSQQLGRREEWQRQGSPVSRRLSARRGPQAPGTRLPRRHPARAFPAATMPKRKVSSAEGAAKEEVSAGLLRGVVGFP

SEQ ID NO: 837939 - protein, 160 aa, Homo sapiens; identical to SEQ ID NO: 837933

SEQ ID NO: 837940 - protein, 130 aa, Homo sapiens
ECPLLLEAQPLCPCDLQILGDPQLRRRDSLATQKWSAPPKAPPRKSPRGDRRGCQLNLLQKWKRSRKRQQRRINLQTKKCKQKGTRGAKGKQAEVANQETKEDLPAENGETKTEESPASDEAGEKEAKSD

SEQ ID NO: 837941 - protein, 162 aa, Homo sapiens; identical to SEQ ID NO: 837934

SEQ ID NO: 837942 - protein, 160 aa, Homo sapiens; identical to SEQ ID NO: 837933

SEQ ID NO: 837943 - protein, 115 aa, Homo sapiens
MKQERKKPSLINNHIPCLISGPCLPSCTIQRNIFINYFVNASFLVALETFLRRRESHLIPFFKCKCFFLRGEIICWLFIFWYNQKIVWDIELWEALTVSGVSLTFHRWGVSFYIL

SEQ ID NO: 837944 - protein, 80 aa, Homo sapiens
AAAGAGVLERLAAGGAEGAIRTGRREAVTSRGRALFSGPGGPASPGTAARLYSCVSVSAGQLRRRRRQGRAQEEIGAVVS

SEQ ID NO: 837945 - protein, 138 aa, Homo sapiens; identical to SEQ ID NO: 837937

SEQ ID NO: 837946 - protein, 80 aa, Homo sapiens; identical to SEQ ID NO: 837944

SEQ ID NO: 837947 - protein, 177 aa, Homo sapiens
  misc_feature (11)..(11): Xaa can be any naturally occurring amino acid
  misc_feature (19)..(19): Xaa can be any naturally occurring amino acid
GHRVWPAHRHXPFRVNPFXQNAANKREQGEQRENRPKWLTKKLKKTYLRKTGKRRLRRVQPLMKQERKKPSLINNHIPCLISGPCLPSCTIQRNIFINYFVNASFLVALETFLRRRESHLIPFFKCKCFFLRGEIICWLFIFWYNQKIVWDIELWEALTVSGVSLTFHRWGVSFYIL

SEQ ID NO: 837948 - protein, 124 aa, Homo sapiens
  misc_feature (30)..(30): Xaa can be any naturally occurring amino acid
  misc_feature (32)..(32): Xaa can be any naturally occurring amino acid
KGDSMAAPSVELTFFLGILAAGKVGARCLXGXRCAYSLREAGLPGRCHSSRHRSCSRYVGQAGLELQTLDEPPASASQSAGITGVSHCARNPEEYFYQLFCKCKFFSSSRNIFKKEGIPPHPIF

SEQ ID NO: 837949 - protein, 160 aa, Homo sapiens; identical to SEQ ID NO: 837933

SEQ ID NO: 837950 - protein, 162 aa, Homo sapiens; identical to SEQ ID NO: 837934

SEQ ID NO: 837951 - protein, 162 aa, Homo sapiens; identical to SEQ ID NO: 837934

SEQ ID NO: 837952 - protein, 80 aa, Homo sapiens; identical to SEQ ID NO: 837944

SEQ ID NO: 837953 - protein, 109 aa, Homo sapiens
MGGGGGRPGRRGGGARGRGRGGRRRRAPNPVPSGSPTAPAVGLSSSGGGRSGSGKAAQFREGCRRAAARRHPARAFPAATMPKRKVSSAEGAAKEEVSAGLLRGVVGFP

SEQ ID NO: 837954 - protein, 186 aa, Homo sapiens
AESRSQWAGVGGGPAGGEGEPAAGDAGGGGGGLPIRFHPVLPPPPLWVSAARAAGGVAAARQPSFAKAVGAPRPAGTRHAPSPPPRCPRGRSAPPKAPPRKSPRGDRRGCQLNLLQKWKRSRKRQQRRINLQTKKCKQKGTRGAKGKQAEVANQETKEDLPAENGETKTEESPASDEAGEKEAKSD

SEQ ID NO: 837955 - protein, 115 aa, Homo sapiens; identical to SEQ ID NO: 837943

SEQ ID NO: 837956 - protein, 164 aa, Homo sapiens
LSPVANGRGWGAARPAGRGSPRPGTRGEEEAGSQSGSIRFSHRPRCGSQQLGRREEWQRQGSPVSRRLSARRGPQAPGTRLPRRHPARAFPAATMPKRKVSSAEGAAKEEPKRRSARLSAVSKASPVTVRFPRVVPGEDAQCCFCLSETSCKSGSEAEKGSSEG

SEQ ID NO: 837957 - protein, 160 aa, Homo sapiens; identical to SEQ ID NO: 837933

SEQ ID NO: 837958 - protein, 138 aa, Homo sapiens; identical to SEQ ID NO: 837937

SEQ ID NO: 837959 - protein, 80 aa, Homo sapiens; identical to SEQ ID NO: 837944

SEQ ID NO: 837960 - protein, 162 aa, Homo sapiens; identical to SEQ ID NO: 837934

SEQ ID NO: 837961 - protein, 769 aa, Homo sapiens
MSAAQVSSSRRQSCYLCDLPRMPWAMIWDFSEPVCRGCVNYEGADRIEFVIETARQLKRAHGCFQDGRSPGPPPPAQQQQQQQQQQQQQQQQQQQQQQQQLNHVDGSSKPAVLAAPSGLERYGLSAAAAAAAAAAAAVEQRSRFEYPPPPVSLGSSSHTARLPNGLGGPNGFPKPTPEEGPPELNRQSPNSSSAAASVASRRGTHGGLVTGLPNPGGGGGPQLTVPPNLLPQTLLNGPASAAVLPPPPPHALGSRGPPTPAPPGAPGGPACLGGTPGVSATSSSASSSTSSSVAEVGVGAGGKRPGSVSSTDQERELKEKQRNAEALAELSESLRNRAEEWASKPKMVRDTLLTLAGCTPYEVRFKKDHSLLGRVFAFDAVSKPGMDYELKLFIEYPTGSGNVYSSASGVAKQMYQDCMKDFGRGLSSGFKYLEYEKKHGSGDWRLLGDLLPEAVRFFKEGVPGADMLPQPYLDASCPMLPTALVSLSRAPSAPPGTGALPPAAPSGRGAAASLRKRKASPEPPDSAEGALKLGEEQQRQQWMANQSEALKLTMSAGGFAAPGHAAGGPPPPPPPLGPHSNRTTPPESAPQNGPSPMAALMSVADTLGTAHSPKDGSSVHSTTASARRNSSSPVSPASVPGQRRLASRNGDLNLQVAPPPPSAHPGMDQVHPQNIPDSPMANSGPLCCTICHERLEDTHFVQCPSVPSHKFCFPCSRESIKAQGATGEVYCPSGEKCPLVGSNVPWAFMQGEIATILAGDVKVKKERDP

SEQ ID NO: 837962 - protein, 497 aa, Homo sapiens
SGPESGGGVVWYHACIQHFGSLEVGVGAGGKRPGSVSSTDQERELKEKQRNAEALAELSESLRNRAEEWASKPKMVRDTLLTLAGCTPYEVRFKKDHSLLGRVFAFDAVSKPGMDYELKLFIEYPTGSGNVYSSASGVAKQMYQDCMKDFGRGLSSGFKYLEYEKKHGSGDWRLLGDLLPEAVRFFKEGVPGADMLPQPYLDASCPMLPTALVSLSRAPSAPPGTGALPPAAPSGRGAAASLRKRKASPEPPDSAEGALKLGEEQQRQQWMANQSEALKLTMSAGGFAAPGHAAGGPPPPPPPLGPHSNRTTPPESAPQNGPSPMAALMSVADTLGTAHSPKDGSSVHSTTASARRNSSSPVSPASVPGQRRLASRNGDLNLQVAPPPPSAHPGMDQVHPQNIPDSPMANSGPLCCTICHERLEDTHFVQCPSVPSHKFCFPCSRESIKAQGATGEVYCPSGEKCPLVGSNVPWAFMQGEIATILAGDVKVKKERDP

SEQ ID NO: 837963 - protein, 281 aa, Homo sapiens
MSAAQVSSSRRQSCYLCDLPRMPWAMIWDFSEPVCRGCVNYEGADRIEFVIETARQLKRAHGCFQDGRSPGPPPPAQQQQQQQQQQQQQQQQQQQQQQQQLNHVDGSSKPAVLAAPSGLERYGLSAAAAAAAAAAAAVEQRSRFEYPPASVPGQRRLASRNGDLNLQVAPPPPSAHPGMDQVHPQNIPDSPMANSGPLCCTICHERLEDTHFVQCPSVPSHKFCFPCSRESIKAQGATGEVYCPSGEKCPLVGSNVPWAFMQGEIATILAGDVKVKKERDP

SEQ ID NO: 837964 - protein, 769 aa, Homo sapiens; identical to SEQ ID NO: 837961

SEQ ID NO: 837965 - protein, 769 aa, Homo sapiens; identical to SEQ ID NO: 837961

SEQ ID NO: 837966 - protein, 769 aa, Homo sapiens; identical to SEQ ID NO: 837961

SEQ ID NO: 837967 - protein, 91 aa, Homo sapiens
MSAAQVSSSRRQSCYLCDLPRMPWAMIWDFSEPVCRGCVNYEGADRIEFVIETARQLKRAHGCFQDGRSPGPPPPVGVKTVALSAKEAAAA

SEQ ID NO: 837968 - protein, 404 aa, Homo sapiens
PSSLSPSLWRLQPTFASRQQPLAEECPASSALQRRWLWRWRWWLRRRRRQRRSSGSCQGQPAGPLGGPPANRGAAPQGSMAMNYNAKDEVDGGPPCAPGGTAKTRRPDNTAFKQQRLPAWQPILTAGTVLPIFFIIGLIFIPIGIGIFVTSNNIREIEGNVFMYYGLSNFYQNHRRYVKSRDDSQLNGDSSALLNPSKECEPYRRNEDKPIAPCGAIANSMFNDTLELFLIGNDSYPIPIALKKKGIAWWTDKNVKFRNPPGGDNLEERFKGTTKPVNWLKPVYMLDSDPDNNGFINEDFIVWMRTAALPTFRKLYRLIERKSDLHPTLPAGRYSLNVTYNYPVHYFDGRKRMILSTISWMGGKNPFLGIAYIAVGSISFLLGVVLLVINHKYRNSSNTADITI

SEQ ID NO: 837969 - protein, 440 aa, Homo sapiens
PSSLSPSLWRLQPTFASRQQPLAEECPASSALQRRWLWRWRWWLRRRRRQRRSSGSCQGQPAGPLGGPPANRGAAPQGSMAMNYNAKDEVDGGPPCAPGGTAKTRRPDNTAFKQQRLPAWQPILTAGTVLPIFFIIGLIFIPIGIGIFVTSNNIREIEIDYTGTEPSSPCNKCLSPDVTPCFCTINFTLEKSFEGNVFMYYGLSNFYQNHRRYVKSRDDSQLNGDSSALLNPSKECEPYRRNEDKPIAPCGAIANSMFNDTLELFLIGNDSYPIPIALKKKGIAWWTDKNVKFRNPPGGDNLEERFKGTTKPVNWLKPVYMLDSDPDNNGFINEDFIVWMRTAALPTFRKLYRLIERKSDLHPTLPAGRYSLNVTYNYPVHYFDGRKRMILSTISWMGGKNPFLGIAYIAVGSISFLLGVVLLVINHKYRNSSNTADITI

SEQ ID NO: 837970 - protein, 404 aa, Homo sapiens; identical to SEQ ID NO: 837968

SEQ ID NO: 837971 - protein, 407 aa, Homo sapiens
PSSLSPSLWRLQPTFASRQQPLAEECPASSALQRRWLWRWRWWLRRRRRQRRSSGSCQGQPAGPLGGPPANRGAAPQGSMAMNYNAKDEVDGGPPCAPGGTAKTRRPDNTAFKQQRLPAWQPILTAGTVLPIFFIIGLIFIPIGIGIFVTSNNIREIEIDYTGTEPSSPCNKCLSPDVTPCFCTINFTLEKSFEGNVFMYYGLSNFYQNHRRYVKSRDDSQLNGDSSALLNPSKECEPYRRNEDKPIAPCGAIANSMFNDTLELFLIGNDSYPIPIALKKKGIAWWTDKNVKFRNPPGGDNLEERFKGTTKPVNWLKPVYMLDSDPDNNGFINEDFIVWMRTAALPTFRKLYRLIERKSDLHPTLPAGRYSLNVTYSSSISPYYRPEYRNIEHLSNLADFTQVIIKS

SEQ ID NO: 837972 - protein, 407 aa, Homo sapiens; identical to SEQ ID NO: 837971

SEQ ID NO: 837973 - protein, 407 aa, Homo sapiens; identical to SEQ ID NO: 837971

SEQ ID NO: 837974 - protein, 407 aa, Homo sapiens; identical to SEQ ID NO: 837971

SEQ ID NO: 837975 - protein, 440 aa, Homo sapiens; identical to SEQ ID NO: 837969

SEQ ID NO: 837976 - protein, 242 aa, Homo sapiens
MYYGLSNFYQNHRRYVKSRDDSQLNGDSSALLNPSKECEPYRRNEDKPIAPCGAIANSMFNDTLELFLIGNDSYPIPIALKKKGIAWWTDKNVKFRNPPGGDNLEERFKGTTKPVNWLKPVYMLDSDPDNNGFINEDFIVWMRTAALPTFRKLYRLIERKSDLHPTLPAGRYSLNVTYNYPVHYFDGRKRMILSTISWMGGKNPFLGIAYIAVGSISFLLGVVLLVINHKYRNSSNTADITI

SEQ ID NO: 837977 - protein, 440 aa, Homo sapiens; identical to SEQ ID NO: 837969

SEQ ID NO: 837978 - protein, 407 aa, Homo sapiens; identical to SEQ ID NO: 837971

SEQ ID NO: 837979 - protein, 407 aa, Homo sapiens; identical to SEQ ID NO: 837971

SEQ ID NO: 837980 - protein, 79 aa, Homo sapiens
MTRSWGPEQKSTRGSPGKRITQMAVVRSQGVREGDPWAQAGCVTWVQGEAGAQEKMGGPGTGLLPMGAGEGCVNSPGPT

SEQ ID NO: 837981 - protein, 189 aa, Homo sapiens
MPHRKKKPFIEKKKAVSFHLVHRSQRDPLAADESAPQRVLLPTQKIDNEERRAEQRKYGVFFDDDYDYLQHLKEPSGPSELIPSSTFSAHNRREEKEETLVIPSTGIKLPSSVFASEFEEDVGLLNKAAPVSGPRLDFDPDIVAALDDDFDFDDPDNLLEDDFILQANKATGEEEGMDIQYVWFVSKQR

SEQ ID NO: 837982 - protein, 176 aa, Homo sapiens
FTFKNSSKSCVKLNTLEPLEDQDLPMNELDESEEEEMITVVLEEAKEKWDCESICSTYSNLYNHPQLIKYQPKPKQIRISSKTGIPLNVLPKKGLTAKQTERIQMINGSDLPKVSTQPRSKNESKEDKRARKQAIKEERKERRVEKKANKLAFKLEKRRQEKELLNLKKNVEGLKL

SEQ ID NO: 837983 - protein, 475 aa, Homo sapiens
MPHRKKKPFIEKKKAVSFHLVHRSQRDPLAADESAPQRVLLPTQKIDNEERRAEQRKYGVFFDDDYDYLQHLKEPSGPSELIPSSTFSAHNRREEKEETLVIPSTGIKLPSSVFASEFEEDVGLLNKAAPVSGPRLDFDPDIVAALDDDFDFDDPDNLLEDDFILQANKATGEEEGMDIQKSENEDDSEWEDVDDEKGDSNDDYDSAGLLSDEDCMSVPGKTHRAIADHLFWSEETKSRFTEYSMTSSVMRRNEQLTLHDERFEKFYEQYDDDEIGALDNAELEGSIQVDSNRLQEVLNDYYKEKAENCVKLNTLEPLEDQDLPMNELDESEEEEMITVVLEEAKEKWDCESICSTYSNLYNHPQLIKYQPKPKQIRISSKTGIPLNVLPKKGLTAKQTERIQMINGSDLPKVSTQPRSKNESKEDKRARKQAIKEERKERRVEKKANKLAFKLEKRRQEKELLNLKKNVEGLKL

SEQ ID NO: 837984 - protein, 260 aa, Homo sapiens [sequence omitted]

SEQ ID NO: 837985 - protein, 55 aa, Homo sapiens
MVAGPEPPVVTSTNSAVGETELVTGNKSNTNGNSLPMSIRSWTSLPCSNGHPPYV

SEQ ID NO: 837986 - protein, 215 aa, Homo sapiens
AGEGAGRSASRVPLPAPAPWAREEAGGSLCTRDAAALFARWGVDPPSGAGKGVLSARAPRTLPRAEVPSGPPPAAPWVRGPRGWRQRGARVLHPPLAACLRRSRAPRSPRWPRAAVVRSRRADPGAPLPSGAQLLLVPRPASGMGGGGSALRVCADHRGGINWLSLSPDGQRLLTGSEDGTARLWSTADGQCCALLQGALWPLCGQLCSSAGISC

SEQ ID NO: 837987 - protein, 470 aa, Homo sapiens
AGEGAGRSASRVPLPAPAPWAREEAGGSLCTRDAAALFARWGVDPPSGAGKGVLSARAPRTLPRAEVPSGPPPAAPWVRGPRGWRQRGARVLHPPLAACLRRSRAPRSPRWPRAAVVRSRRADPGAPLPSGAQLLLVPRPASGMGGGGSALRVCADHRGGINWLSLSPDGQRLLTGSEDGTARLWSTADGQCCALLQGHESYVTFCQLEDEAAFTCSADCTIRRWDVLTGQCLQVYRGHTSIVNRILVANNQLFSSSYDRTARVWSVDKGQMSREFRGHRNCVLTLAYSAPWDLPSTPCAEEAAAGGLLVTGSTDGTAKVWQVASGCCHQTLRGHTGAVLCLVLDTPGHTAFTGSTDATIRAWDILSGEQLRVFREHRGSVICLELVNRLVYSGSADRTVKCWLADTGECVRTFTAHRRNVSALKYHAGTCRRISEAGGLGWNGWLHKVIRHPAFFCHSSSSSLAQTFYL

SEQ ID NO: 837988 - protein, 455 aa, Homo sapiens
AGEGAGRSASRVPLPAPAPWAREEAGGSLCTRDAAALFARWGVDPPSGAGKGVLSARAPRTLPRAEVPSGPPPAAPWVRGPRGWRQRGARVLHPPLAACLRRSRAPRSPRWPRAAVVRSRRADPGAPLPSGAQLLLVPRPASGMGGGGSALRVCADHRGGINWLSLSPDGQRLLTGSEDGTARLWSTADGQCCALLQGHESYVTFCQLEDEAAFTCSADCTIRRWDVLTGQCLQVYRGHTSIVNRILVANNQLFSSSYDRTARVWSVDKGQMSREFRGHRNCVLTLAYSAPWDLPSTPCAEEAAAGGLLVTGSTDGTAKVWQVASGCCHQTLRGHTGAVLCLVLDTPGHTAFTGSTDATIRAWDILSGEQLRVFREHRGSVICLELVNRLVYSGSADRTVKCWLADTGECVRTFTAHRRNVSALKYHAGTLFTGSGDACARAFDAQSGELRRVFR

SEQ ID NO: 837989 - protein, 342 aa, Homo sapiens
GTRQPPPQSWACAGKDEMGKMVSVINTVDTSHEDMIHDAQMDYYGTRLATCSSDRSVKIFDVRNGGQILIADLRGHEGPVWQVAWAHPMYGNILASCSYDRKVIIWREENGTWEKSHEHAGHDSSVNSVCWAPHDYGLILACGSSDGAISLLTYTGEGQWEVKKINNAHTIGCNAVSWAPAVVPGSLIDHPSGQKPNYIKRFASGGCDNLIKLWKEEEDGQWKEEQKLEAHSDWVRDVAWAPSIGLPTSTIASCSQDGRVFIWTCDDASSNTWSPKLLHKFNDVVWHVSWSITANILAVSGGDNKVTLWKESVDGQWVCISDVNKGQGSVSASVTEGQQNEQ

SEQ ID NO: 837990 - protein, 332 aa, Homo sapiens
PRPGAATAAIMVSVINTVDTSHEDMIHDAQMDYYGTRLATCSSDRSVKIFDVRNGGQILIADLRGHEGPVWQVAWAHPMYGNILASCSYDRKVIIWREENGTWEKSHEHAGHDSSVNSVCWAPHDYGLILACGSSDGAISLLTYTGEGQWEVKKINNAHTIGCNAVSWAPAVVPGSLIDHPSGQKPNYIKRFASGGCDNLIKLWKEEEDGQWKEEQKLEAHSDWVRDVAWAPSIGLPTSTIASCSQDGRVFIWTCDDASSNTWSPKLLHKFNDVVWHVSWSITANILAVSGGDNKVTLWKESVDGQWVCISDVNKGQGSVSASVTEGQQNEQ

SEQ ID NO: 837991 - protein, 322 aa, Homo sapiens
MVSVINTVDTSHEDMIHDAQMDYYGTRLATCSSDRSVKIFDVRNGGQILIADLRGHEGPVWQVAWAHPMYGNILASCSYDRKVIIWREENGTWEKSHEHAGHDSSVNSVCWAPHDYGLILACGSSDGAISLLTYTGEGQWEVKKINNAHTIGCNAVSWAPAVVPGSLIDHPSGQKPNYIKRFASGGCDNLIKLWKEEEDGQWKEEQKLEAHSDWVRDVAWAPSIGLPTSTIASCSQDGRVFIWTCDDASSNTWSPKLLHKFNDVVWHVSWSITANILAVSGGDNKVTLWKESVDGQWVCISDVNKGQGSVSASVTEGQQNEQ

SEQ ID NO: 837992 - protein, 308 aa, Homo sapiens
MIHDAQMDYYGTRLATCSSDRSVKIFDVRNGGQILIADLRGHEGPVWQVAWAHPMYGNILASCSYDRKVIIWREENGTWEKSHEHAGHDSSVNSVCWAPHDYGLILACGSSDGAISLLTYTGEGQWEVKKINNAHTIGCNAVSWAPAVVPGSLIDHPSGQKPNYIKRFASGGCDNLIKLWKEEEDGQWKEEQKLEAHSDWVRDVAWAPSIGLPTSTIASCSQDGRVFIWTCDDASSNTWSPKLLHKFNDVVWHVSWSITANILAVSGGDNKVTLWKESVDGQWVCISDVNKGQGSVSASVTEGQQNEQ

SEQ ID NO: 837993 - protein, 368 aa, Homo sapiens
MREPVLTWCVPLELLCSHPLPLSAFLKSQVKLYTYRACAGKDEMGKMVSVINTVDTSHEDMIHDAQMDYYGTRLATCSSDRSVKIFDVRNGGQILIADLRGHEGPVWQVAWAHPMYGNILASCSYDRKVIIWREENGTWEKSHEHAGHDSSVNSVCWAPHDYGLILACGSSDGAISLLTYTGEGQWEVKKINNAHTIGCNAVSWAPAVVPGSLIDHPSGQKPNYIKRFASGGCDNLIKLWKEEEDGQWKEEQKLEAHSDWVRDVAWAPSIGLPTSTIASCSQDGRVFIWTCDDASSNTWSPKLLHKFNDVVWHVSWSITANILAVSGGDNKVTLWKESVDGQWVCISDVNKGQGSVSASVTEGQQNEQ

SEQ ID NO: 837994 - protein, 327 aa, Homo sapiens
PRPGAATAAIMVSVINTVDTSHEDMIHDAQMDYYGTRLATCSSDRSVKIFDVRNGGQILIADLRGHEGPVWQVAWAHPMYGNILASCSYDRKVIIWREENGTWEKSHEHAGHDSSVNSVCWAPHDYGLILACGSSDGAISLLTYTGEGQWEVKKINNAHTIGCNAVSWAPAVVPGSLIDHPSGQKPNYIKRFASGGCDNLIKLWKEEEDGQWKEEQKLEAHSDWVRDVAWAPSIGLPTSTIASCSQDGRVFIWTCDDASSNTWSPKLLHKFNDVVWHVSWSITANILAVSGGDNKCPFLGQLTKQLGRAPNSNRIIFPGGVTDAATD

SEQ ID NO: 837995 - protein, 308 aa, Homo sapiens
PRPGAATAAIMVSVINTVDTSHEDMIHDAQMDYYGTRLATCSSDRSVKIFDVRNGGQILIADLRGHEGPVWQVAWAHPMYGNILASCSYDRKVIIWREENGTWEKSHEHAGHDSSVNSVCWAPHDYGLILACGSSDGAISLLTYTGEGQWEVKKINNAHTIGCNAVSWAPAVVPGSLIDHPSGQKPNYIKRFASGGCDNLIKLWKEEEDGQWKEEQKLEAHSDWVRDVAWAPSIGLPTSTIASCSQDGRVFIWTCDDASSNTWSPKLLHKFNDVVWHVSWSITANILAVSGGDNKEELQMQPQIDHLP

SEQ ID NO: 837996 - protein, 285 aa, Homo sapiens
PRPGAATAAIMVSVINTVDTSHEDMIHDAQMDYYGTRLATCSSDRSVKIFDVRNGGQILIADLRGHEGPVWQVAWAHPMYGNILASCSYDRKVIIWREENGTWEKSHEHAGHDSSVNSVCWAPHDYGLILACGSSDGAISLLTYTGEGQWEVKKINNAHTIGCNAVSWAPAVVPGSLIDHPSGQKPNYIKRFASGGCDNLIKLWKEEEDGQWKEEQKLEAHSDWVRDVAWAPSIGLPTSTIASCSQDGRVFIWTCDDASSNTWSPKLLHKFNDVVWHVSWSITAN

SEQ ID NO: 837997 - protein, 324 aa, Homo sapiens
PRPGAATAAIMVSVINTVDTSHEDMIHDAQMDYYGTRLATCSSDRSVKIFDVRNGGQILIADLRGHEGPVWQVAWAHPMYGNILASCSYDRKVIIWREENGTWEKSHEHAGHDSSVNSVCWAPHDYGLILACGSSDGAISLLTYTGEGQWEVKKINNAHTIGRGPKFGGRRLVIGRGEKRSREDDMSQTGGRAYVGKGVSEGGGREGEEEGEGGGHGGGVGEEGERQRKNQHHGSCSQDGRVFIWTCDDASSNTWSPKLLHKFNDVVWHVSWSITANILAVSGGDNKVTLWKESVDGQWVCISDVNKGQGSVSASVTEGQQNEQ

SEQ ID NO: 837998 - protein, 300 aa, Homo sapiens
PRPGAATAAIMVSVINTVDTSHEDMIHDAQMDYYGTRLATCSSDRSVKIFDVRNGGQILIADLRGHEGPVWQVAWAHPMYGNILASCSYDRKVIIWREENGTWEKSHEHAGHDSSVNSVCWAPHDYGLILACGSSDGAISLLTYTGEGQWEVKKINNAHTIGRGPKFGGRRLVIGRGEKRSREDDMSQTGGRAYVGKGVSEGGGREGEEEGEGGGHGGGVGEEGERQRKNQHHGSCSQDGRVFIWTCDDASSNTWSPKLLHKFNDVVWHVSWSITANILAVSGGDNKEELQMQPQIDHLP

SEQ ID NO: 837999 - protein, 204 aa, Homo sapiens
PRPGAATAAIMVSVINTVDTSHEDMIHDAQMDYYGTRLATCSSDRSVKIFDVRNGGQILIADLRGHEGPVWQVAWAHPMYGNILASCSYDRKVIIWREENGTWEKSHEHAGHDSSVNSVCWAPHDYGLILACGSSDGAISLLTYTGEGQWEVKKINNAHTVSPSPAFHAVRAPALPRVCCSLPRGWHGRVPAGQWAGEWSADQT

SEQ ID NO: 838000 - protein, 332 aa, Homo sapiens; identical to SEQ ID NO: 837990

SEQ ID NO: 838001 - protein, 179 aa, Homo sapiens
YDSSLPFELVTSLGHQVMIKIDTEKINNAHTIGCNAVSWAPAVVPGSLIDHPSGQKPNYIKRFASGGCDNLIKLWKEEEDGQWKEEQKLEAHSDWVRDVAWAPSIGLPTSTIASCSQDGRVFIWTCDDASSNTWSPKLLHKFNDVVWHVSWSITANILAVSGGDNKEELQMQPQIDHLP

SEQ ID NO: 838002 - protein, 308 aa, Homo sapiens; identical to SEQ ID NO: 837992

SEQ ID NO: 838003 - protein, 325 aa, Homo sapiens
MGKMVSVINTVDTSHEDMIHDAQMDYYGTRLATCSSDRSVKIFDVRNGGQILIADLRGHEGPVWQVAWAHPMYGNILASCSYDRKVIIWREENGTWEKSHEHAGHDSSVNSVCWAPHDYGLILACGSSDGAISLLTYTGEGQWEVKKINNAHTIGCNAVSWAPAVVPGSLIDHPSGQKPNYIKRFASGGCDNLIKLWKEEEDGQWKEEQKLEAHSDWVRDVAWAPSIGLPTSTIASCSQDGRVFIWTCDDASSNTWSPKLLHKFNDVVWHVSWSITANILAVSGGDNKVTLWKESVDGQWVCISDVNKGQGSVSASVTEGQQNEQ

SEQ ID NO: 838004 - protein, 308 aa, Homo sapiens; identical to SEQ ID NO: 837992

SEQ ID NO: 838005 - protein, 308 aa, Homo sapiens; identical to SEQ ID NO: 837992

SEQ ID NO: 838006 - protein, 332 aa, Homo sapiens; identical to SEQ ID NO: 837990

SEQ ID NO: 838007 - protein, 382 aa, Homo sapiens
PRPGAATAAIMVSVINTVDTSHEDMIHDAQMDYYGTRLATCSSDRSVKIFDVRNGGQILIADLRGHEGPVWQVAWAHPMYGNILASCSYDRKVIIWREENGTWEKSHEHAGHDSSVNSVCWAPHDYGLILACGSSDGAISLLTYTGEGQWEVKKINNAHTIGCNAVSWAPAVVPGSLIDHPSGQKPNYIKRFASGGCDNLIKLWKEEEDGQWKEEQKLEAHSDWVRDVAWAPSIGLPTSTIASCSQDGRVFIWTCDDASSNTWSPKLLHKFNDVVWHVSWSITANILAVSGGDNKAGPQETRNRKESHRLERTCFLSPTKFQKGEWGFVLTLKELPNWAWLLFTLEKNEEGQPVPSRSLGLPPSSSWFKFAVSSSRHLSSVP

SEQ ID NO: 838008 - protein, 329 aa, Homo sapiens
PRPGAATAAIMVSVINTVDTSHEDMIHDAQMDYYGTRLATCSSDRSVKIFDVRNGGQILIADLRGHEGPVWQVAWAHPMYGNILASCSYDRKVIIWREENGTWEKSHEHAGHDSSVNSVCWAPHDYGLILACGSSDGAISLLTYTGEGQWEVKKINNAHTIGCNAVSWAPAVVPGSLIDHPSGQKPNYIKRFASGGCDNLIKLWKEEEDGQWKEEQKLEAHSDWVRDVAWAPSIGLPTSTIASCSQDGRVFIWTCDDASSNTWSPKLLHKFNDVVWHVSWSITATWRPWGHLVPSGALGAGARYGGLSKGQGKGVPLVFGKGPPLGPCL

SEQ ID NO: 838009 - protein, 231 aa, Homo sapiens
PRPGAATAAIMVSVINTVDTSHEDMIHDAQMDYYGTRLATCSSDRSVKIFDVRNGGQILIADLRGHEGPVWQVAWAHPMYGNILASCSYDRKVIIWREENGTWEKSHEHAGHDSSVNSVCWAPHDYGLILACGSSDGAISLLTYTGEGQWEVKKINNAHTIGCNAVSWAPAVVPGSLIDHPSGQKPNYIKRFASGGCDNLIKLWKEEEDGQWKEEQKLEAHIAYGSRARIY

SEQ ID NO: 838010 - protein, 185 aa, Homo sapiens
PRPGAATAAIMVSVINTVDTSHEDMIHDAQMDYYGTRLATCSSDRSVKIFDVRNGGQILIADLRGHEGPVWQVAWAHPMYGNILASCSYDRKVIIWREENGTWEKSHEHAGHDSSVNSVCWAPHDYGLILACGSSDGAISLLTYTGEGQWEVKKINNAHTTGCMPSAGPLLLHLRAITPGSHHTW

SEQ ID NO: 838011 - protein, 386 aa, Homo sapiens
MIPDRNLEMQKEFDAYPKTLEDFRVKTCGGATVTIVSGLLMLLLFLSELQYYLTTEVHPELYVDKSRGDKLKINIDVLFPHMPCAYLSIDAMDVAGEQQLDVEHNLFKQRLDKDGIPVSSEAERHELGKVEVTVFDPDSLDPDRCESCYGAEAEDIKCCNTCEDVREAYRRRGWAFKNPDTIEQCRREGFSQKMQEQKNEGCQVYGFLEVNKVAGNFHFAPGKSFQQSHVHVHDLQSFGLDNINMTHYIQHLSFGEDYPGIVNPLDHTNVTAPQASMMFQYFVKVVPTVYMKVDGEVLRTNQFSVTRHEKVANGLLGDQGLPGVFVLYELSPMMVKLTEKHRSFTHFLTGVCAIIGGMFTVAGLIDSLIYHSARAIQKKIDLGKTT

SEQ ID NO: 838012 - protein, 347 aa, Homo sapiens
  misc_feature (8)..(8): Xaa can be any naturally occurring amino acid
FAAASTRXRARRQKGTEVHPELYVDKSRGDKLKINIDVLFPHMPCAYLSIDAMDVAGEQQLDVEHNLFKQRLDKDGIPVSSEAERHELGKVEVTVFDPDSLDPDRCESCYGAEAEDIKCCNTCEDVREAYRRRGWAFKNPDTIEQCRREGFSQKMQEQKNEGCQVYGFLEVNKVAGNFHFAPGKSFQQSHVHVHDLQSFGLDNINMTHYIQHLSFGEDYPGIVNPLDHTNVTAPQASMMFQYFVKVVPTVYMKVDGEVLRTNQFSVTRHEKVANGLLGDQGLPGVFVLYELSPMMVKLTEKHRSFTHFLTGVCAIIGGMFTVAGLIDSLIYHSARAIQKKIDLGKTT

SEQ ID NO: 838013 - protein, 305 aa, Homo sapiens [sequence omitted]

SEQ ID NO: 838014 - protein, 386 aa, Homo sapiens; identical to SEQ ID NO: 838011

SEQ ID NO: 838015 - protein, 386 aa, Homo sapiens; identical to SEQ ID NO: 838011

SEQ ID NO: 838016 - protein, 386 aa, Homo sapiens; identical to SEQ ID NO: 838011

SEQ ID NO: 838017 - protein, 386 aa, Homo sapiens; identical to SEQ ID NO: 838011

SEQ ID NO: 838018 - protein, 417 aa, Homo sapiens
RKRESVGAGRLASPFRPVPMEALGKLKQFDAYPKTLEDFRVKTCGGATVTIVSGLLMLLLFLSELQYYLTTEVHPELYVDKSRGDKLKINIDVLFPHMPCAYLSIDAMDVAGEQQLDVEHNLFKQRLDKDGIPVSSEAERHELGKVEVTVFDPDSLDPDRCESCYGAEAEDIKCCNTCEDVREAYRRRGWAFKNPDTIEQCRREGFSQKMQEQKNEGCQVYGFLEVNKVAGNFHFAPGKSFQQSHVHGCVCRLKMIARSLACVHDLQSFGLDNINMTHYIQHLSFGEDYPGIVNPLDHTNVTAPQASMMFQYFVKVVPTVYMKVDGEVLRTNQFSVTRHEKVANGLLGDQGLPGVFVLYELSPMMVKLTEKHRSFTHFLTGVCAIIGGMFTVAGLIDSLIYHSARAIQKKIDLGKTT

SEQ ID NO: 838019 - protein, 386 aa, Homo sapiens
MIPDRNLEMQKEFDAYPKTLEDFRVKTCGGATVTIVSGLLMLLLFLSELQYYLTTEVHPELYVDKSRGDKLKINIDVLFPHMPCAYLSIDAMDVAGEQQLDVEHNLFKQRLDKDGIPVSSEAERHELGKVEVTVFDPDSLDPDRCESCYGAEAEDIKCCNTCEDVREAYRRRGWAFKNPDTIEQCRREGFSQKMQEQKNEGCQVYGFLEVNKVAGNFHFAPGKSFQQSHVHVHDLQSFGLDNINMTHYIQHLSFGEDYPGIVNPLDHTNVTAPQASMMFQYFVKVVPTVYMKVDGEVLRTNQFSVTRHEKVANGLLGDQGLPGVFVLYELSPMMVKLTEKHRSFTHFLTGVCAIIGGMFTVAGLIDSLIYHCDSTHWSPCDPCHGQ

SEQ ID NO: 838020 - protein, 418 aa, Homo sapiens
MIPDRNLEMQKEFDAYPKTLEDFRVKTCGGATVTIVSGLLMLLLFLSELQYYLTTEVHPELYVDKSRGDKLKINIDVLFPHMPCAYLSIDAMDVAGEQQLDVEHNLFKQRLDKDGIPVSSEAERHELGKVEVTVFDPDSLDPDRCESCYGAEAEDIKCCNTCEDVREAYRRRGWAFKNPDTIEQCRREGFSQKMQEQKNEGCQVYGFLEVNKVAGNFHFAPGKSFQQSHVHVHDLQSFGLDNINMTHYIQHLSFGEDYPGIVNPLDHTNVTAPQASMMFQYFVKVVPTVYMKVDGEAQQERGRSRGGADGGWSQVLALALAQAPLPPQVLRTNQFSVTRHEKVANGLLGDQGLPGVFVLYELSPMMVKLTEKHRSFTHFLTGVCAIIGGMFTVAGLIDSLIYHSARAIQKKIDLGKTT

SEQ ID NO: 838021 - protein, 392 aa, Homo sapiens
MIPDRNLEMQKEFDAYPKTLEDFRVKTCGGATVTIVSGLLMLLLFLSELQYYLTTEVHPELYVDKSRGDKLKINIDVLFPHMPCAYLSIDAMDVAGEQQLDVEHNLFKQRLDKDGIPVSSEAERHELGKVEVTVFDPDSLDPDRCESCYGAEAEDIKCCNTCEDVREAYRRRGWAFKNPDTIEQCRREGFSQKMQEQKNEGCQVYGFLEVNKVAGNFHFAPGKSFQQSHVHVHDLQSFGLDNINMTHYIQHLSFGEDYPGIVNPLDHTNVTAPQASMMFQYFVKVVPTVYMKVDGEAPLPPQVLRTNQFSVTRHEKVANGLLGDQGLPGVFVLYELSPMMVKLTEKHRSFTHFLTGVCAIIGGMFTVAGLIDSLIYHSARAIQKKIDLGKTT

SEQ ID NO: 838022 - protein, 336 aa, Homo sapiens
MIPDRNLEMQKEFDAYPKTLEDFRVKTCGGATVTIVSGLLMLLLFLSELQYYLTTEVHPELYVDKSRGDKLKINIDVLFPHMPCAYLSIDAMDVAGEQQLDVEHNLFKQRLDKDGIPVSSEAERHELGKVEVTVFDPDSLDPDRCESCYGAEAEDIKCCNTCEDVREAYRRRGWAFKNPDTIEQCRREGFSQKMQEQKNEGCQVYGFLEVNKVAGNFHFAPGKSFQQSHVHVHDLQSFGLDNINMTHYIQHLSFGEDYPGIVNPLDHTNVTAPQASMMFQYFVKVVPTVYMKVDGEVLRTNQFSVTRHEKVANGLLGDQGLPGVFVQHEPSRRKLI

SEQ ID NO: 838023 - protein, 298 aa, Homo sapiens
MIPDRNLEMQKEFDAYPKTLEDFRVKTCGGATVTIVSGLLMLLLFLSELQYYLTTEVHPELYVDKSRGDKLKINIDVLFPHMPCAYLSIDAMDVAGEQQLDVEHNLFKQRLDKDGIPVSSEAERHELGKVEVTVFDPDSLDPDRCESCYGAEAEDIKCCNTCEDVREAYRRRGWAFKNPDTIEQCRREGFSQKMQEQKNEGCQVYGFLEVNKVAGNFHFAPGKSFQQSHVHVHDLQSFGLDNINMTHYIQHLSFGEDYPGIVNPLDHTNVTAPQASMMFQYFVKVVPTVYMKVDGEPL

SEQ ID NO: 838024 - protein, 252 aa, Homo sapiens
RKRESVGAGRLASPFRPVPMEALGKLKQFDAYPKTLEDFRVKTCGGATVTIVSGLLMLLLFLSELQYYLTTEVHPELYVDKSRGDKLKINIDVLFPHMPCAYLSIDAMDVAGEQQLDVEHNLFKQRLDKDGIPVSSEAERHELGKVEVTVFDPDSLDPDRCESCYGAEAEDIKCCNTCEDVREAYRRRGWAFKNPDTIEQCRREGFSQKMQEQKNEGCQVYGFLEVNKVAGNFHFAPGKSFQQSHVHVSDLH

SEQ ID NO: 838025 - protein, 296 aa, Homo sapiens
MIPDRNLEMQKEFDAYPKTLEDFRVKTCGGATVTIVSGLLMLLLFLSELQYYLTTEVHPELYVDKSRGDKLKINIDVLFPHMPCAYLSIDAMDVAGEQQLDVEHNLFKQRLDKDGIPVSSEAERHELGKVEVTVFDPDSLDPDRCESCYGAEAEDIKCCNTCEDVREAYRRRGWAFKNPDTIEQCRREGFSQKMQEQKNEGCQVYGFLEVNKVAGNFHFAPGKSFQQSHVHVHDLQSFGLDNINMTHYIQHLSFGEDYPGIVNPLDHTNVTAPQASMMFQYFVKVVPTVYMKVDGE

SEQ ID NO: 838026 - protein, 296 aa, Homo sapiens; identical to SEQ ID NO: 838025

SEQ ID NO: 838027 - protein, 252 aa, Homo sapiens; identical to SEQ ID NO: 838024

SEQ ID NO: 838028 - protein, 252 aa, Homo sapiens; identical to SEQ ID NO: 838024

SEQ ID NO: 838029 - protein, 292 aa, Homo sapiens
MIPDRNLEMQKEFDAYPKTLEDFRVKTCGGATVTIVSGLLMLLLFLSELQYYLTTEVHPELYVDKSRGDKLKINIDVLFPHMPCAYLSIDAMDVAGEQQLDVEHNLFKQRLDKDGIPVSSEAERHELGKVEVTVFDPDSLDPDRCESCYGAEAEDIKCCNTCEDVREAYRRRGWAFKNPDTIEQCRREGFSQKMQEQKNEGCQVYGFLEVNKVAGNFHFAPGKSFQQSHVHVHDLQSFGLDNINMTHYIQHLSFGEDYPGIVNPLDHTNVTAPQEKASMMLTVLKCMSRSTV

SEQ ID NO: 838030 - protein, 272 aa, Homo sapiens
MIPDRNLEMQKEFDAYPKTLEDFRVKTCGGATVTIVSGLLMLLLFLSELQYYLTTEVHPELYVDKSRGDKLKINIDVLFPHMPCAYLSIDAMDVAGEQQLDVEHNLFKQRLDKDGIPVSSEAERHELGKVEVTVFDPDSLDPDRCESCYGAEAEDIKCCNTCEDVREAYRRRGWAFKNPDTIEQCRREGFSQKMQEQKNEGCQVYGFLEVNKVAGNDHRAPWEEVPTVQCDTSMTGQRELICPQYLSVHVDVHSGLPPSRSTGTSWMTWGSK

SEQ ID NO: 838031 - protein, 385 aa, Homo sapiens
TSLMMFQYFVKVVPTVYMKVDGEVLRTNQFSVTIVSGLLMLLLFLSELQYYLTTEVHPELYVDKSRGDKLKINIDVLFPHMPCAYLSIDAMDVAGEQQLDVEHNLFKQRLDKDGIPVSSEAERHELGKVEVTVFDPDSLDPDRCESCYGAEAEDIKCCNTCEDVREAYRRRGWAFKNPDTIEQCRREGFSQKMQEQKNEGCQVYGFLEVNKVAGNFHFAPGKSFQQSHVHVHDLQSFGLDNINMTHYIQHLSFGEDYPGIVNPLDHTNVTAPQASMMFQYFVKVVPTVYMKVDGEVLRTNQFSVTRHEKVANGLLGDQGLPGVFVLYELSPMMVKLTEKHRSFTHFLTGVCAIIGGMFTVAGLIDSLIYHSARAIQKKIDLGKTT

SEQ ID NO: 838032 - protein, 348 aa, Homo sapiens
  misc_feature (11)..(11): Xaa can be any naturally occurring amino acid
TGIVVLLLSVXLSITPTEVHPELYVDKSRGDKLKINIDVLFPHMPCAYLSIDAMDVAGEQQLDVEHNLFKQRLDKDGIPVSSEAERHELGKVEVTVFDPDSLDPDRCESCYGAEAEDIKCCNTCEDVREAYRRRGWAFKNPDTIEQCRREGFSQKMQEQKNEGCQVYGFLEVNKVAGNFHFAPGKSFQQSHVHVHDLQSFGLDNINMTHYIQHLSFGEDYPGIVNPLDHTNVTAPQASMMFQYFVKVVPTVYMKVDGEVLRTNQFSVTRHEKVANGLLGDQGLPGVFVLYELSPMMVKLTEKHRSFTHFLTGVCAIIGGMFTVAGLIDSLIYHSARAIQKKIDLGKTT

SEQ ID NO: 838033 - protein, 398 aa, Homo sapiens
MIPDRNLEMQKEFDAYPKTLEDFRVKTCGGATVTIVSGLLMLLLFLSELQYYLTTEVHPELYVDKSRGDKLKINIDVLFPHMPCAWSQYLSLIFLLPDLSIDAMDVAGEQQLDVEHNLFKQRLDKDGIPVSSEAERHELGKVEVTVFDPDSLDPDRCESCYGAEAEDIKCCNTCEDVREAYRRRGWAFKNPDTIEQCRREGFSQKMQEQKNEGCQVYGFLEVNKVAGNFHFAPGKSFQQSHVHVHDLQSFGLDNINMTHYIQHLSFGEDYPGIVNPLDHTNVTAPQASMMFQYFVKVVPTVYMKVDGEVLRTNQFSVTRHEKVANGLLGDQGLPGVFVLYELSPMMVKLTEKHRSFTHFLTGVCAIIGGMFTVAGLIDSLIYHSARAIQKKIDLGKTT

SEQ ID NO: 838034 - protein, 386 aa, Homo sapiens; identical to SEQ ID NO: 838011

SEQ ID NO: 838035 - protein, 312 aa, Homo sapiens
RKRESVGAGRLASPFRPVPMEALGKLKQFDAYPKTLEDFRVKTCGGATVTIVSGLLMLLLFLSELQYYLTTEVHPELYVDKSRGDKLKINIDVLFPHMPCAYLSIDAMDVAGEQQLDVEHNLFKQRLDKDGIPVSSEAERHELGKVEVTVFDPDSLDPDRCESCYGAEAEDIKCCNTCEDVREAYRRRGWAFKNPDTIEQCRREGFSQKMQEQKNEGCQVYGFLEVNKVAGNFHFAPGKSFQQSHVHVHDLQSFGLDNINMTHYIQHLSFGEDYPGIVNPLDHTNVTAPQASMMFQYFVKVVPTVYMKVDGE

SEQ ID NO: 838036 - protein, 245 aa, Homo sapiens
ATLADPCIGGACEDIKCCNTCEDVREAYRRRGWAFKNPDTIEQCRREGFSQKMQEQKNEGCQVYGFLEVNKVAGNFHFAPGKSFQQSHVHVHDLQSFGLDNINMTHYIQHLSFGEDYPGIVNPLDHTNVTAPQASMMFQYFVKVVPTVYMKVDGEVLRTNQFSVTRHEKVANGLLGDQGLPGVFVLYELSPMMVKLTEKHRSFTHFLTGVCAIIGGMFTVAGLIDSLIYHSARAIQKKIDLGKTT

SEQ ID NO: 838037 - protein, 417 aa, Homo sapiens; identical to SEQ ID NO: 838018

SEQ ID NO: 838038 - protein, 191 aa, Homo sapiens
SVPVSARQVYGFLEVNKVAGNFHFAPGKSFQQSHVHVHDLQSFGLDNINMTHYIQHLSFGEDYPGIVNPLDHTNVTAPQASMMFQYFVKVVPTVYMKVDGEVLRTNQFSVTRHEKVANGLLGDQGLPGVFVLYELSPMMVKLTEKHRSFTHFLTGVCAIIGGMFTVAGLIDSLIYHSARAIQKKIDLGKTT

SEQ ID NO: 838039 - protein, 373 aa, Homo sapiens
MHHQQTHIKGNTIAFFRQNEMIPDRNLEMQKEFDAYPKTLEDFRVKTCGGATVTIVSGLLMLLLFLSELQYYLTTEVHPELYVDKSRGDKLKINIDVLFPHMPCAYLSIDAMDVAGEQQLDVEHNLFKQRLDKDGIPVSSEAERHELGKVEVTVFDPDSLDPDRCESCYGAEAEDIKCCNTCEDVREAYRRRGWAFKNPDTIEQCRREGFSQKMQEQKNEGCQVYGFLEVNKVAGNFHFAPGKSFQQSHVHVHDLQSFGLDNINMTHYIQHLSFGEDYPGIVNPLDHTNVTAPQASMMFQYFVKVVPTVYMKVDGEVLRTNQFSVTRHEKVANGLLGDQGLPGVFVSLSLSQWLDSSIRSSTTQHEPSRRKLI

SEQ ID NO: 838040 - protein, 334 aa, Homo sapiens
MIPDRNLEMQKEFDAYPKTLEDFRVKTCGGATVTIVSGLLMLLLFLSELQYYLTTEVHPELYVDKSRGDKLKINIDVLFPHMPCAYLSIDAMDVAGEQQLDVEHNLFKQRLDKDGIPVSSEAERHELGKVEVTVFDPDSLDPDRCESCYGAEAEDIKCCNTCEDVREAYRRRGWAFKNPDTIEQCRREGFSQKMQEQKNEGCQVYGFLEVNKVAGNFHFAPGKSFQQSHVHVHDLQSFGLDNINMTHYIQHLSFGEDYPGIVNPLDHTNVTAPQASMMFQYFVKVVPTVYMKVDGEVLHPLPDRCVRHHWGHVHSGWTHRFAHLPLSTSHPEEN

SEQ ID NO: 838041 - protein, 311 aa, Homo sapiens
MIPDRNLEMQKEFDAYPKTLEDFRVKTCGGATVTIVSGLLMLLLFLSELQYYLTTEVHPELYVDKSRGDKLKINIDVLFPHMPCAYLSIDAMDVAGEQQLDVEHNLFKQRLDKDGIPVSSEAERHELGKVEVTVFDPDSLDPDRCESCYGAEAEDIKCCNTCEDVREAYRRRGWAFKNPDTIEQCRREGFSQKMQEQKNEGCQVYGFLEVNKVAGNFHFAPGKSFQQSHVHVHDLQSFGLDNINMTHYIQHLSFGEDYPGIVNPLDHTNVTAPQASMMFQYFVKVVPTVYMKVDGETEDKSVLMSGHRGRR

SEQ ID NO: 838042 - protein, 369 aa, Homo sapiens
MHHQQTHIKGNTIAFFRQNEMIPDRNLEMQKEFDAYPKTLEDFRVKTCGGATVTIVSGLLMLLLFLSELQYYLTTEVHPELYVDKSRGDKLKINIDVLFPHMPCAYLSIDAMDVAGEQQLDVEHNLFKQRLDKDGIPVSSEAERHELGKVEVTVFDPDSLDPDRCESCYGAEAEDIKCCNTCEDVREAYRRRGWAFKNPDTIEQCRREGFSQKMQEQKNEGCQVYGFLEVNKVAGNFHFAPGKSFQQSHVHVHDLQSFGLDNINMTHYIQHLSFGEDYPGIVNPLDHTNVTAPQASMMFQYFVKVVPTVLYELSPMMVKLTEKHRSFTHFLTGVCAIIGGMFTVAGLIDSLIYHSARAIQKKIDLGKTT

SEQ ID NO: 838043 - protein, 297 aa, Homo sapiens
MIPDRNLEMQKEFDAYPKTLEDFRVKTCGGATVTIVSGLLMLLLFLSELQYYLTTEVHPELYVDKSRGDKLKINIDVLFPHMPCAYLSIDAMDVAGEQQLDVEHNLFKQRLDKDGIPVSSEAERHELGKVEVTVFDPDSLDPDRCESCYGAEAEDIKCCNTCEDVREAYRRRGWAFKNPDTIEQCRREGFSQKMQEQKNEGCQVYGFLEVNKVAGNFHFAPGKSFQQSHVHVHDLQSFGLDNINMTHYIQHLSFGEDYPGIVNPLDHTNVTAPQASMMFQYFVKVVPTVYMKVDGEI

SEQ ID NO: 838044 - protein, 306 aa, Homo sapiens
MIPDRNLEMQKEFDAYPKTLEDFRVKTCGGATVTIVSGLLMLLLFLSELQYYLTTEVHPELYVDKSRGDKLKINIDVLFPHMPCAYLSIDAMDVAGEQQLDVEHNLFKQRLDKDGIPVSSEAERHELGKVEVTVFDPDSLDPDRCESCYGAEAEDIKCCNTCEDVREAYRRRGWAFKNPDTIEQCRREGFSQKMQEQKNEGCQVYGFLEVNKVAGNFHFAPGKSFQQSHVHVHDLQSFGLDNINMTHYIQHLSFGEDYPGIVNPLDHTNVTAPQALVSLPVAGLIDSLIYHSARAIQKKIDLGKTT

SEQ ID NO: 838045 - protein, 280 aa, Homo sapiens
MIPDRNLEMQKEFDAYPKTLEDFRVKTCGGATVTIVSGLLMLLLFLSELQYYLTTEVHPELYVDKSRGDKLKINIDVLFPHMPCAYLSIDAMDVAGEQQLDVEHNLFKQRLDKDGIPVSSEAERHELGKVEVTVFDPDSLDPDRCESCYGAEAEDIKCCNTCEDVREAYRRRGWAFKNPDTIEQCRREGFSQKMQEQKNEGCQVYGFLEVNKVAGNFHFAPGKSFQQSHVHVHDLQSFGLDNVLHPLPDRCVRHHWGHVHSGWTHRFAHLPLSTSHPEEN

SEQ ID NO: 838046 - protein, 147 aa, Homo sapiens
MHHQQTHIKGNTIAFFRQNEMIPDRNLEMQKEFDAYPKTLEDFRVKTCGGATVTIVSGLLMLLLFLSELQYYLTTEVHPELYVDKSRGDKLKINIDVLFPHMPCAYLSIDAMDVAGEQQLDVEHNLFKQRLDKDGIPVSSEAERHAD

SEQ ID NO: 838047 - protein, 1711 aa, Homo sapiens
MSAKVRLKKLEQLLLDGPWRNESALSVETLLDVLVCLYTECSHSALRRDKYVAEFLEWAKPFTQLVKEMQLHREDFEIIKVIGRGAFGEVAVVKMKNTERIYAMKILNKWEMLKRAETACFREERDVLVNGDCQWITALHYAFQDENHLYLVMDYYVGGDLLTLLSKFEDKLPEDMARFYIGEMVLAIDSIHQLHYVHRDIKPDNVLLDVNGHIRLADFGSCLKMNDDGTVQSSVAVGTPDYISPEILQAMEDGMGKYGPECDWWSLGVCMYEMLYGETPFYAESLVETYGKIMNHEERFQFPSHVTDVSEEAKDLIQRLICSRERRLGQNGIEDFKKHAFFEGLNWENIRNLEAPYIPDVSSPSDTSNFDVDDDVLRNTEILPPGSHTGFSGLHLPFIGFTFTTESCFSDRGSLKSIMQSNTLTKDEDVQRDLEHSLQMEAYERRIRRLEQEKLELSRKLQESTQTVQSLHGSSRALSNSNRDKEIKKLNEEIERLKNKIADSNRLERQLEDTVALRQEREDSTQRLRGLEKQHRVVRQEKEELHKQLVEASERLKSQAKELKDAHQQRKLALQEFSELNERMAELRAQKQKVSRQLRDKEEEMEVATQKVDAMRQEMRRAEKLRKELEAQLDDAVAEASKERKLREHSENFCKQMESELEALKVKQGGRGAGATLEHQQEISKIKSELEKKVLFYEEELVRREASHVLEVKNVKKEVHDSESHQLALQKEILMLKDKLEKSKRERHNEMEEAVGTIKDKYERERAMLFDENKKLTAENEKLCSFVDKLTAQNRQLEDELQDLAAKKESVAHWEAQIAEIIQWVSDEKDARGYLQALASKMTEELEALRSSSLGSRTLDPLWKVRRSQKLDMSARLELQSALEAEIRAKQLVQEELRKVKDANLTLESKLKDSEAKNRELLEEMEILKKKMEEKFRADTGLKLPDFQDSIFEYFNTAPLAHDLTFRTSSASEQETQAPKPEASPSMSVAASEQQEDMARPPQRPSAVPLPTTQALALAGPKPKAHQFSIKSFSSPTQCSHCTSLMVGLIRQGYACEVCSFACHVSCKDGAPQVCPIPPEQSKRPLGVDVQRGIGTAYKGHVKVPKPTGVKKGWQRAYAVVCDCKLFLYDLPEGKSTQPGVIASQVLDLRDDEFSVSSVLASDVIHATRRDIPCIFRVTASLLGAPSKTSSLLILTENENEKRKWVGILEGLQSILHKNRLRNQVVHVPLEAYDSSLPLIKAILTAAIVDADRIAVGLEEGLYVIEVTRDVIVRAADCKKVHQIELAPREKIVILLCGRNHHVHLYPWSSLDGAEGSFDIKLPETKGCQLMATATLKRNSGTCLFVAVKRLILCYEIQRTKPFHRKFNEIVAPGSVQCLAVLRDRLCVGYPSGFCLLSIQGDGQPLNLVNPNDPSLAFLSQQSFDALCAVELESEEYLLCFSHMGLYVDPQGRRARAQELMWPAAPVACSCSPTHVTVYSEYGVDVFDVRTMEWVQTIGLRRIRPLNSEGTLNLLNCEPPRLIYFKSKFSGAVLNVPDTSDNSKKQMLRTRSKRRFVFKVPEEERLQQRREMLRDPELRSKMISNPTNFNHVAHMGPGDGMQVLMDLPLSAVPPSQEERPGPAPTNLARQPPSRNKPYISWPSSGGSEPSVTVPLRSMSDPDQDFDKEPDSDSTKHSTPSNSSNPSGPPSPNSPHRSQLPLEGLEQPACDT

SEQ ID NO: 838048 - protein, 1711 aa, Homo sapiens; identical to SEQ ID NO: 838047

SEQ ID NO: 838049 - protein, 1685 aa, Homo sapiens
MSAKVRLKKLEQLLLDGPWRNESALSVETLLDVLVCLYTECSHSALRRDKYVAEFLEWAKPFTQLVKEMQLHREDFEIIKVIGRGAFGEVAVVKMKNTERIYAMKILNKWEMLKRAETACFREERDVLVNGDCQWITALHYAFQDENHLYLVMDYYVGGDLLTLLSKFEDKLPEDMARFYIGEMVLAIDSIHQLHYVHRDIKPDNVLLDVNGHIRLADFGSCLKMNDDGTVQSSVAVGTPDYISPEILQAMEDGMGKYGPECDWWSLGVCMYEMLYGETPFYAESLVETYGKIMNHEERFQFPSHVTDVSEEAKDLIQRLICSRERRLGQNGIEDFKKHAFFEGLNWENIRNLEAPYIPDVSSPSDTSNFDVDDDVLRNTEILPPGSHTGFSGLHLPFIGFTFTTESCFSDRGSLKSIMQSNTLTKDEDVQRDLEHSLQMEAYERRIRRLEQEKLELSRKLQESTQTVQSLHGSSRALSNSNRDKEIKKLNEEIERLKNKIADSNRLERQLEDTVALRQEREDSTQRLRGLEKQHRVVRQEKEELHKQLVEASERLKSQAKELKDAHQQRKLALQEFSELNERMAELRAQKQKVSRQLRDKEEEMEVATQKVDAMRQEMRRAEKLRKELEAQLDDAVAEASKERKLREHSENFCKQMESELEALKVKQGGRGAGATLEHQQEISKIKSELEKKVLFYEEELVRREASHVLEVKNVKKEVHDSESHQLALQKEILMLKDKLEKSKRERHNEMEEAVGTIKDKYERERAMLFDENKKLTAENEKLCSFVDKLTAQNRQLEDELQDLAAKKESVAHWEAQIAEIIQWVSDEKDARGYLQALASKMTEELEALRSSSLGSRTLDPLWKVRRSQKLDMSARLELQSALEAEIRAKQLVQEELRKVKDANLTLESKLKDSEAKNRELLEEMEILKKKMEEKFRADTGLKLPDFQDSIFEYFNTAPLAHDLTFRTSSASEQETQAPKPEASPSMSVAASEQQEPKAHQFSIKSFSSPTQCSHCTSLMVGLIRQGYACEVCSFACHVSCKDGAPQVCPIPPEQSKRPLGVDVQRGIGTAYKGHVKVPKPTGVKKGWQRAYAVVCDCKLFLYDLPEGKSTQPGVIASQVLDLRDDEFSVSSVLASDVIHATRRDIPCIFRVTASLLGAPSKTSSLLILTENENEKRKWVGILEGLQSILHKNRLRNQVVHVPLEAYDSSLPLIKAILTAAIVDADRIAVGLEEGLYVIEVTRDVIVRAADCKKVHQIELAPREKIVILLCGRNHHVHLYPWSSLDGAEGSFDIKLPETKGCQLMATATLKRNSGTCLFVAVKRLILCYEIQRTKPFHRKFNEIVAPGSVQCLAVLRDRLCVGYPSGFCLLSIQGDGQPLNLVNPNDPSLAFLSQQSFDALCAVELESEEYLLCFSHMGLYVDPQGRRARAQELMWPAAPVACSCSPTHVTVYSEYGVDVFDVRTMEWVQTIGLRRIRPLNSEGTLNLLNCEPPRLIYFKSKFSGAVLNVPDTSDNSKKQMLRTRSKRRFVFKVPEEERLQQRREMLRDPELRSKMISNPTNFNHVAHMGPGDGMQVLMDLPLSAVPPSQEERPGPAPTNLARQPPSRNKPYISWPSSGGSEPSVTVPLRSMSDPDQDFDKEPDSDSTKHSTPSNSSNPSGPPSPNSPHRSQLPLEGLEQPACDT

SEQ ID NO: 838050 - protein, 1441 aa, Homo sapiens
MSAKVRLKKLEQLLLDGPWRNESALSVETLLDVLVCLYTECSHSALRRDKYVAEFLEWAKPFTQLVKEMQLHREDFEIIKVIGRGAFGEVAVVKMKNTERIYAMKILNKWEMLKRAETACFREERDVLVNGDCQWITALHYAFQDENHLYLVMDYYVGGDLLTLLSKFEDKLPEDMARFYIGEMVLAIDSIHQLHYVHRDIKPDNVLLDVNGHIRLADFGSCLKMNDDGTVQSSVAVGTPDYISPEILQAMEDGMGKYGPECDWWSLGVCMYEMLYGETPFYAESLVETYGKIMNHEERFQFPSHVTDVSEEAKDLIQRLICSRERRLGQNGIEDFKKHAFFEGLNWENIRNLEAPYIPDVSSPSDTSNFDVDDDVLRNTEILPPGSHTGFSGLHLPFIGFTFTTESCFSDRGSLKSIMQSNTLTKDEDVQRDLEHSLQMEAYERRIRRLEQEKLELSRKLQESTQTVQSLHGSSRALSNSNRDKEIKKLNEEIERLKNKIADSNRLERQLEDTVALRQEREDSTQRLRGLEKQHRVVRQEKEELHKQLVEASERLKSQAKELKDAHQQRKLALQEFSELNERMAELRAQKQKVSRQLRDKEEEMEVATQKVDAMRQEMRRAEKLRKELEAQLDDAVAEASKERKLREHSENFCKQMESELEALKVKQGGRGAGATLEHQQEISKIKSELEKKVLFYEEELVRREASHVLEVKNVKKEVHDSESHQLALQKEILMLKDKLEKSKRERHNEMEEAVGTIKDKYERERAMLFDENKKLTAENEKLCSFVDKLTAQNRQLEDELQDLAAKKESVAHWEAQIAEIIQWVSDEKDARGYLQALASKMTEELEALRSSSLGSRTLDPLWKVRRSQKLDMSARLELQSALEAEIRAKQLVQEELRKVKDANLTLESKLKDSEAKNRELLEEMEILKKKMEEKFRADTGLKLPDFQDSIFEYFNTAPLAHDLTFRTSSASEQETQAPKPEASPSMSVAASEQQEDMARPPQRPSAVPLPTTQALALAGPKPKAHQFSIKSFSSPTQCSHCTSLMVGLIRQGYACEVCSFACHVSCKDGAPQVCPIPPEQSKRPLGVDVQRGIGTAYKGHVKVPKPTGVKKGWQRAYAVVCDCKLFLYDLPEGKSTQPGVIASQVLDLRDDEFSVSSVLASDVIHATRRDIPCIFRVTASLLGAPSKTSSLLILTENENEKRKWVGILEGLQSILHKNRLRNQVVHVPLEAYDSSLPLIKAILTAAIVDADRIAVGLEEGLYVIEVTRDVIVRAADCKKVHQIELAPREKIVILLCGRNHHVHLYPWSSLDGAEGSFDIKLPETKGCQLMATATLKRNSGTCLFVAVKRLILCYEIQRTKPFHRKFNEIVAPGSVQCLAVLRDRLCVGYPSGFCLLSIQGDGQPLNLVAAPPTSRCTASMAWTSLMCAPWSGCRPSACGG

SEQ ID NO: 838051 - protein, 1711 aa, Homo sapiens; identical to SEQ ID NO: 838047

SEQ ID NO: 838052 - protein, 252 aa, Homo sapiens
MEWVQTIGLRRVRRPRCPPVRAGFSRCSLCVAALTVPPWFPIQIRPLNSEGTLNLLNCEPPRLIYFKSKFSGAVLNVPDTSDNSKKQMLRTRSKRRFVFKVPEEERLQQRREMLRDPELRSKMISNPTNFNHVAHMGPGDGMQVLMDLPLSAVPPSQEERPGPAPTNLARQPPSRNKPYISWPSSGGSEPSVTVPLRSMSDPDQDFDKEPDSDSTKHSTPSNSSNPSGPPSPNSPHRSQLPLEGLEQPACDT

SEQ ID NO: 838053 - protein, 150 aa, Homo sapiens
GGYVSEGAGVVNRLDGRLRYKISNPTNFNHVAHMGPGDGMQVLMDLPLSAVPPSQEERPGPAPTNLARQPPSRNKPYISWPSSGGSEPSVTVPLRSMSDPDQDFDKEPDSDSTKHSTPSNSSNPSGPPSPNSPHRSQLPLEGLEQPACDT

SEQ ID NO: 838054 - protein, 1504 aa, Homo sapiens
MSAKVRLKKLEQLLLDGPWRNESALSVETLLDVLVCLYTECSHSALRRDKYVAEFLEWAKPFTQLVKEMQLHREDFEIIKVIGRGAFGEVAVVKMKNTERIYAMKILNKWEMLKRAETACFREERDVLVNGDCQWITALHYAFQDENHLYLVMDYYVGGDLLTLLSKFEDKLPEDMARFYIGEMVLAIDSIHQLHYVHRDIKPDNVLLDVNGHIRLADFGSCLKMNDDGTVQSSVAVGTPDYISPEILQAMEDGMGKYGPECDWWSLGVCMYEMLYGETPFYAESLVETYGKIMNHEERFQFPSHVTDVSEEAKDLIQRLICSRERRLGQNGIEDFKKHAFFEGLNWENIRNLEAPYIPDVSSPSDTSNFDVDDDVLRNTEILPPGSHTGFSGLHLPFIGFTFTTESCFSDRGSLKSIMQSNTLTKDEDVQRDLEHSLQMEAYERRIRRLEQEKLELSRKLQESTQTVQSLHGSSRALSNSNRDKEIKKLNEEIERLKNKIADSNRLERQLEDTVALRQEREDSTQRLRGLEKQHRVVRQEKEELHKQLVEASERLKSQAKELKDAHQQRKLALQEFSELNERMAELRAQKQKVSRQLRDKEEEMEVATQKVDAMRQEMRRAEKLRKELEAQLDDAVAEASKERKLREHSENFCKQMESELEALKVKQGGRGAGATLEHQQEISKIKSELEKKVLFYEEELVRREASHVLEVKNVKKEVHDSESHQLALQKEILMLKDKLEKSKRERHNEMEEAVGTIKDKYERERAMLFDENKKLTAENEKLCSFVDKLTAQNRQLEDELQDLAAKKESVAHWEAQIAEIIQWVSDEKDARGYLQALASKMTEELEALRSSSLGSRTLDPLWKVRRSQKLDMSARLELQSALEAEIRAKQLVQEELRKVKDANLTLESKLKDSEAKNRELLEEMEILKKKMEEKFRADTGLKLPDFQDSIFEYFNTAPLAHDLTFRTSSASEQETQAPKPEASPSMSVAASEQQEDMARPPQRPSAVPLPTTQALALAGPKPKAHQFSIKSFSSPTQCSHCTSLMVGLIRQGYACEVCSFACHVSCKDGAPQVCPIPPEQSKRPLGVDVQRGIGTAYKGHVKVPKPTGVKKGWQRAYAVVCDCKLFLYDLPEGKSTQPGVIASQVLDLRDDEFSVSSVLASDVIHATRRDIPCIFRVTASLLGAPSKTSSLLILTENENEKRKWVGILEGLQSILHKNRLRNQVVHVPLEAYDSSLPLIKAILTAAIVDADRIAVGLEEGLYVIEVTRDVIVRAADCKKVHQIELAPREKIVILLCGRNHHVHLYPWSSLDGAEGSFDIKLPETKGCQLMATATLKRNSGTCLFVAVKRLILCYEIQRTKPFHRKFNEIVAPGSVQCLAVLRDRLCVGYPSGFCLLSIQGDGQPLNLVNPNDPSLAFLSQQSFDALCAVELESEEYLLCFSHMGLYVDPQGRRARAQELMWPAAPVACSMYMFSVAYPCCCFSHRQSACVRFCFGLSSSPLVE

SEQ ID NO: 838055 - protein, 596 aa, Homo sapiens
MSAKVRLKKLEQLLLDGPWRNESALSVETLLDVLVCLYTECSHSALRRDKYVAEFLEWAKPFTQLVKEMQLHREDFEIIKVIGRGAFGEVAVVKMKNTERIYAMKILNKWEMLKRAETACFREERDVLVNGDCQWITALHYAFQDENHLYLVMDYYVGGDLLTLLSKFEDKLPEDMARFYIGEMVLAIDSIHQLHYVHRDIKPDNVLLDVNGHIRLADFGSCLKMNDDGTVQSSVAVGTPDYISPEILQAMEDGMGKYGPECDWWSLGVCMYEMLYGETPFYAESLVETYGKIMNHEERFQFPSHVTDVSEEAKDLIQRLICSRERRLGQNGIEDFKKHAFFEGLNWENIRNLEAPYIPDVSSPSDTSNFDVDDDVLRNTEILPPGSHTGFSGLHLPFIGFTFTTESCFSDRGSLKSIMQSNTLTKDEDVQRDLEHSLQMEAYERRIRRLEQEKLELSRKLQESTQTVQSLHGSSRALSNSNRDKEIKKLNEEIERLKNKIADSNRLERQLEDTVALRQEREDSTQRLRGLEKQHRVVRQEKEELHKQLVEASERLKSQAKSALSGPAPPSPATPLPSWAFCWMGTWGVLVFTFLM

SEQ ID NO: 838056 - protein, 330 aa, Homo sapiens
MSAKVRLKKLEQLLLDGPWRNESALSVETLLDVLVCLYTECSHSALRRDKYVAEFLEWAKPFTQLVKEMQLHREDFEIIKVIGRGAFGEVAVVKMKNTERIYAMKILNKWEMLKRAETACFREERDVLVNGDCQWITALHYAFQDENHLYLVMDYYVGGDLLTLLSKFEDKLPEDMARFYIGEMVLAIDSIHQLHYVHRDIKPDNVLLDVNGHIRLADFGSCLKMNDDGTVQSSVAVGTPDYISPEILQAMEDGMGKYGPECDWWSLGVCMYEMLYGETPFYAESLVETYGKIMNHEERFQFPSHVTDVSEEAKDLIQRLSCIQRTPYLQ

SEQ ID NO: 838057 - protein, 121 aa, Homo sapiens
MNFSLIFLTKHMVKTDCSRHVIVLRQPSAHLQCGPRVSTSSLAPGPCASRPGQVAACARLGEPPGWLLPRHPSSLTLPSPTSETPLPLSPRPGHCPHSVCTARRALWQVRHEGASPVPPSQ

SEQ ID NO: 838058 - protein, 204 aa, Homo sapiens
  misc_feature (193)..(193): Xaa can be any naturally occurring amino acid
LFQRIPFYSTLEWVQTIVLRRIRPLNSEGTLNLLNCEPPRLIYFKSKFSGAVLNVPDTSDNSKKQMLRTRSKRRFVFKVPEEERLQQRREMLRDPELRSKMISNPTNFNHVAHMGPGDGMQVLMDLPLSAVPPSQEERPGPAPTNLARQPPSRNKPYISWPSSGGSEPSVTVPLRSMSDPDQDFDKEPDSDSXKHSTPDDADGY

SEQ ID NO: 838059 - protein, 1142 aa, Homo sapiens
TLSRLYPVSALPLSLGSTLSLGSTVSRQLRDKEEEMEVATQKVDAMRQEMRRAEKLRKELEAQLDDAVAEASKERKLREHSENFCKQMESELEALKVKQGGRGAGATLEHQQEISKIKSELEKKVLFYEEELVRREASHVLEVKNVKKEVHDSESHQLALQKEILMLKDKLEKSKRERHNEMEEAVGTIKDKYERERAMLFDENKKLTAENEKLCSFVDKLTAQNRQLEDELQDLAAKKESVAHWEAQIAEIIQWVSDEKDARGYLQALASKMTEELEALRSSSLGSRTLDPLWKVRRSQKLDMSARLELQSALEAEIRAKQLVQEELRKVKDANLTLESKLKDSEAKNRELLEEMEILKKKMEEKFRADTGLKLPDFQDSIFEYFNTAPLAHDLTFRTSSASEQETQAPKPEASPSMSVAASEQQEDMARPPQRPSAVPLPTTQALALAGPKPKAHQFSIKSFSSPTQCSHCTSLMVGLIRQGYACEVCSFACHVSCKDGAPQVCPIPPEQSKRPLGVDVQRGIGTAYKGHVKVPKPTGVKKGWQRAYAVVCDCKLFLYDLPEGKSTQPGVIASQVLDLRDDEFSVSSVLASDVIHATRRDIPCIFRVTASLLGAPSKTSSLLILTENENEKRKWVGILEGLQSILHKNRLRNQVVHVPLEAYDSSLPLIKAILTAAIVDADRIAVGLEEGLYVIEVTRDVIVRAADCKKVHQIELAPREKIVILLCGRNHHVHLYPWSSLDGAEGSFDIKLPETKGCQLMATATLKRNSGTCLFVAVKRLILCYEIQRTKPFHRKFNEIVAPGSVQCLAVLRDRLCVGYPSGFCLLSIQGDGQPLNLVNPNDPSLAFLSQQSFDALCAVELESEEYLLCFSHMGLYVDPQGRRARAQELMWPAAPVACSCSPTHVTVYSEYGVDVFDVRTMEWVQTIGLRRIRPLNSEGTLNLLNCEPPRLIYFKSKFSGAVLNVPDTSDNSKKQMLRTRSKRRFVFKVPEEERLQQRREMLRDPELRSKMISNPTNFNHVAHMGPGDGMQVLMDLPLSAVPPSQEERPGPAPTNLARQPPSRNKPYISWPSSGGSEPSVTVPLRSMSDPDQDFDKEPDSDSTKHSTPSNSSNPSGPPSPNSPHRSQLPLEGLEQPACDT

SEQ ID NO: 838060 - protein, 220 aa, Homo sapiens
MEWVQTIGLRRIRPLNSEGTLNLLNCEPPRLIYFKSKFSGAVLNVPDTSDNSKKQMLRTRSKRRFVFKVPEEERLQQRREMLRDPELRSKMISNPTNFNHVAHMGPGDGMQVLMDLPLSAVPPSQEERPGPAPTNLARQPPSRNKPYISWPSSGGSEPSVTVPLRSMSDPDQDFDKEPDSDSTKHSTPSNSSNPSGPPSPNSPHRSQLPLEGLEQPACDT

SEQ ID NO: 838061 - protein, 132 aa, Homo sapiens
GLVANSARGFNHVAHMGPGDGMQVLMDLPLSAVPPSQEERPGPAPTNLARQPPSRNKPYISWPSSGGSEPSVTVPLRSMSDPDQDFDKEPDSDSTKHSTPSNSSNPSGPPSPNSPHRSQLPLEGLEQPACDT

SEQ ID NO: 838062 - protein, 1711 aa, Homo sapiens; identical to SEQ ID NO: 838047

SEQ ID NO: 838063 - protein, 246 aa, Homo sapiens
MSAKVRLKKLEQLLLDGPWRNESALSVETLLDVLVCLYTECSHSALRRDKYVAEFLEWAKPFTQLVKEMQLHREDFEIIKVIGRGAFGEVAVVKMKNTERIYAMKILNKWEMLKRAETACFREERDVLVNGDCQWITALHYAFQDENHLYLVMDYYVGGDLLTLLSKFEDKLPEDMARFYIGEMVLAIDSIHQLHYVHRDIKPDNVLLDVNGHIRLADFGSCLKMNDDGTVGIFVGDFPFGFGFGI

SEQ ID NO: 838064 - protein, 867 aa, Homo sapiens
GELKQEMVRTDVNLENGLEPAETHSMVRHKDGGYSEEEDVKTCARDSGYDSLSNRLSILDRLLHTHPIWLQLSLSEEEAAEVLQAQPPGIFLVHKSTKMQKKVLSLRLPCEFGAPLKEFAIKESTYTFSLEGSGISFADLFRLIAFYCISRDVLPFTLKLPYAISTAKSEAQLEELAQMGLNFWSSPADSKPPNLPPPHRPLSSDGVCPASLRQLCLINGVHSIKTRTPSELECSQTNGALCFINPLFLKVHSQDLSGGLKRPSTRTPNANGTERTRSPPPRPPPPAINSLHTSPRLARTETQTSMPETVNHNKHGNVALPGTKPTPIPPPRLKKQASFLEAEGGAKTLSGGRPGAGPELELGTAGSPGGAPPEAAPGDCTRAPPPSSESRPPCHGGRQRLSDMSISTSSSDSLEFDRSMPLFGYEADTNSSLEDYEGESDQETMAPPIKSKKKRSSSFVLPKLVKSQLQKVSGVFSSFMTPEKRMVRRIAELSRDKCTYFGCLVQDYVSFLQENKECHVSSTDMLQTIRQFMTQVKNYLSQSSELDPPIESLIPEDQIDVVLEKAMHKCILKPLKGHVEAMLKDFHMADGSWKQLKENLQLVRQRNPQELGVFAPTPDFVDVEKIKVKFMTMQKMYSPEKKVMLLLRVCKLIYTVMENNSGRMYGADDFLPVLTYVIAQCDMLELDTEIEYMMELLDPSLLHGEGGYYLTSAYGALSLIKNFQEEQAARLLSSETRDTLRQWHKRRTTNRTIPSVDDFQNYLRVAFQEVNSGCTGKTLLVRPYITTEDVCQICAEKFKVGDPEEYSLFLFVDETWQQLAEDTYPQKIKAELHSRPQPHIFHFVYKRIKNDPYGIIFQNGEEDLTTS

SEQ ID NO: 838065 - protein, 843 aa, Homo sapiens
GELKQEMVRTDVNLENGLEPAETHSMVRHKDGGYSEEEDVKTCARDSGYDSLSNRLSILDRLLHTHPIWLQLSLSEEEAAEVLQAQPPGIFLVHKSTKMQKKVLSLRLPCEFGAPLKEFAIKESTYRMFYHLPVKLPYAISTAKSEAQLEELAQMGLNFWSSPADSKPPNLPPPHRPLSSDGVCPASLRQLCLINGVHSIKTRTPSELECSQTNGALCFINPLFLKVHSQDLSGGLKRPSTRTPNANGTERTRSPPPRPPPPAINSLHTSPRLARTETQTSMPETVNHNKHGNVALPGTKPTPIPPPRLKKQASFLEAEGGAKTLSGGRPGAGPELELGTAGSPGGAPPEAAPGDCTRAPPPSSESRPPCHGGRQRLSDMSISTSSSDSLEFDRSMPLFGYEADTNSSLEDYEGESDQETMAPPIKSKKKRSSSFVLPKLVKSQLQKVSGVFSSFMTPEKRMVRRIAELSRDKCTYFGCLVQDYVSFLQENKECHVSSTDMLQTIRQFMTQVKNYLSQSSELDPPIESLIPEDQIDVVLEKAMHKCILKPLKGHVEAMLKDFHMADGSWKQLKENLQLVRQRNPQELGVFAPTPDFVDVEKIKVKFMTMQKMYSPEKKVMLLLRVCKLIYTVMENNSGRMYGADDFLPVLTYVIAQCDMLELDTEIEYMMELLDPSLLHGEGGYYLTSAYGALSLIKNFQEEQAARLLSSETRDTLRQWHKRRTTNRTIPSVDDFQNYLRVAFQEVNSGCTGKTLLVRPYITTEDVCQICAEKFKVGDPEEYSLFLFVDETWQQLAEDTYPQKIKAELHSRPQPHIFHFVYKRIKNDPYGIIFQNGEEDLTTS

SEQ ID NO: 838066 - protein, 140 aa, Homo sapiens
MSIVRKQMLHFFFLQTIVIVATLSLADVVLEKAMHKCILKPLKGHVEAMLKDFHMADGSWKQLKENLQLVRQRNPQELGVFAPTPDFVDVEKIKVKFMTMQKMYSPEKKVMLLLRVCKLIYTVMENNSGEAAGSPGFVPL

SEQ ID NO: 838067 - protein, 843 aa, Homo sapiens; identical to SEQ ID NO: 838065

SEQ ID NO: 838068 - protein, 843 aa, Homo sapiens; identical to SEQ ID NO: 838065

SEQ ID NO: 838069 - protein, 892 aa, Homo sapiens
MSERAADDVRGEPRRAAAAAGGAAAAAARQQQQQQQQQQPPPPQPQRQQHPPPPPRRTRPEDGGPGAASTSAAAMATVGERRPLPSPEVMLGQSWNLWVEASKLPGKDGTELDESFKEFGKNREVMGLCREDMPIFGFCPAHDDFYLVVCNDCNQVVKPQAFQSHYERRHSSSSKPPLAVPPTSVFSFFPSLSKSKGGSASGSNRSSSGGVLSASSSSSKLLKSPKEKLQLRGNTRPMHPIQQSRVPHGRIMTPSVKVEKIHPKMDGTLLKSAVGPTCPATVSSLVKPGLNCPSIPKPTLPSPGQILNGKGLPAPPTLEKKPEDNSNNRKFLNKRLSEREFDPDIHCGVIDLDTKKPCTRSLTCKTHSLTQRRAVQGRRKRFDVLLAEHKNKTREKELIRHPDSQQPPQPLRDPHPAPPRTSQEPHQNPHGVIPSESKPFVASKPKPHTPSLPRPPGCPAQQGGSAPIDPPPVHESPHPPLPATEPASRLSSEEGEGDDKEESVEKLDCHYSGHHPQPASFCTFGSRQIGRGYYVFDSRWNRLRCALNLMVEKHLNAQLWKKIPPVPSTTSPISTRIPHRTNSVPTSQCGVSYLAAATVSTSPVLLSSTCISPNSKSVPAHGTTLNAQPAASGAMDPVCSMQSRQVSSSSSSPSTPSGLSSVPSSPMSRKPQKLKSSKSLRPKESSGNSTNCQNASSSTSGGSGKKRKNSSPLLVHSSSSSSSSSSSSHSMESFRKNCVAHSGPPYPSTVTSSHSIGLNCVTNKANAVNVRHDQSGRGPPTGSPAESIKRMSVMVNSSDSTLSLGPFIHQSNELPVNSHGSFSHSHTPLDKLIGKKRKCSPSSSSINNSSSKPTKVAKVPAMNNVHMKHTGTIPGAQGLMNSSLLHQPKARP

SEQ ID NO: 838070 - protein, 892 aa, Homo sapiens; identical to SEQ ID NO: 838069

SEQ ID NO: 838071 - protein, 945 aa, Homo sapiens
MSERAADDVRGEPRRAAAAAGGAAAAAARQQQQQQQQQQPPPPQPQRQQHPPPPPRRTRPEDGGPGAASTSAAAMATVGERRPLPSPEVMLGQSWNLWVEASKLPGKDGTELDESFKEFGKNREVMGLCREDMPIFGFCPAHDDFYLVVCNDCNQVVKPQAFQSHYERRHSSSSKPPLAVPPTSVFSFFPSLSKSKGGSASGSNRSSSGGVLSASSSSSKLLKSPKEKLQLRGNTRPMHPIQQSRVPHGRIMTPSVKVEKIHPKMDGTLLKSAVGPTCPATVSSLVKPGLNCPSIPKPTLPSPGQILNGKGLPAPPTLEKKPEDNSNNRKFLNKRLSEREFDPDIHCGVIDLDTKKPCTRSLTCKTHSLTQRRAVQGRRKRFDVLLAEHKNKTREKELIRHPDSQQPPQPLRDPHPAPPRTSQEPHQNPHGVIPSESKPFVASKPKPHTPSLPRPPGCPAQQGGSAPIDPPPVHESPHPPLPATEPASRLSSEEGEGDDKEESVEKLDCHYSGHHPQPASFCTFGSRQIGRGYYVFDSRWNRLRCALNLMVEKHLNAQLWKKIPPVPSTTSPISTRIPHRTNSVPTSQCGVSYLAAATVSTSPVLLSSTCISPNSKSVPAHGTTLNAQPAASGAMDPVCSMQSRQVSSSSSSPSTPSGLSSVPSSPMSRKPQKLKSSKSLRPKESSGNSTNCQNASSSTSGGSGKKRKNSSPLLVHSSSSSSSSSSSSHSMESFRKNCVAHSGPPYPSTVTSSHSIGLNCVTNKANAVNVRHDQSGRGPPTGSPAESIKRMSVMVNSSDSTLSLGPFIHQSNELPVNSHGSFSHSHTPLDKLIGKKRKCSPSSSSINNSSSKPTKVAKVPAMNNVHMKHTGTIPGAQGLMNSSLLHQDISSPCLRTGISATSPQSPDLKSKGTSLTAENSTGRNNADTFEDKLHLHSALWTPRCL

SEQ ID NO: 838072 - protein, 346 aa, Homo sapiens
MAVVSVIHCPLIFFRKIPPVPSTTSPISTRIPHRTNSVPTSQCGVSYLAAATVSTSPVLLSSTCISPNSKSVPAHGTTLNAQPAASGAMDPVCSMQSRQVSSSSSSPSTPSGLSSVPSSPMSRKPQKLKSSKSLRPKESSGNSTNCQNASSSTSGGSGKKRKNSSPLLVHSSSSSSSSSSSSHSMESFRKNCVAHSGPPYPSTVTSSHSIGLNCVTNKANAVNVRHDQSGRGPPTGSPAESIKRMSVMVNSSDSTLSLGPFIHQSNELPVNSHGSFSHSHTPLDKLIGKKRKCSPSSSSINNSSSKPTKVAKVPAMNNVHMKHTGTIPGAQGLMNSSLLHQPKARP

SEQ ID NO: 838073 - protein, 892 aa, Homo sapiens; identical to SEQ ID NO: 838069

SEQ ID NO: 838074 - protein, 454 aa, Homo sapiens
MSERAADDVRGEPRRAAAAAGGAAAAAARQQQQQQQQQQPPPPQPQRQQHPPPPPRRTRPEDGGPGAASTSAAAMATVGERRPLPSPEVMLGQSWNLWVEASKLPGKDGTELDESFKEFGKNREVMGLCREDMPIFGFCPAHDDFYLVVCNDCNQVVKPQAFQSHYERRHSSSSKPPLAVPPTSVFSFFPSLSKSKGGSASGSNRSSSGGVLSASSSSSKLLKSPKEKLQLRGNTRPMHPIQQSRVPHGRIMTPSVKVEKIHPKMDGTLLKSAVGPTCPATVSSLVKPGLNCPSIPKPTLPSPGQILNGKGLPAPPTLEKKPEDNSNNRKFLNKRLSEREFDPDIHCGVIDLDTKKPCTRSLTCKTHSLTQRRAVQGRRKRFDVLLAEHKNKTREKELIRHPDSQQPPQPLRDPHPAPPRTSQEPHQNPHGVIPSESKPFVASKPKPHTPSLPR

SEQ ID NO: 838075 - protein, 892 aa, Homo sapiens
MSERAADDVRGEPRRAAAAAGGAAAAAARQQQQQQQQQQPPPPQPQRQQHPPPPPRRTRPEDGGPGAASTSAAAMATVGERRPLPSPEVMLGQSWNLWVEASKLPGKDGTELDESFKEFGKNREVMGLCREDMPIFGFCPAHDDFYLVVCNDCNQVVKPQAFQSHYERRHSSSSKPPLAVPPTSVFSFFPSLSKSKGGSASGSNRSSSGGVLSASSSSSKLLKSPKEKLQLRGNTRPMHPIQQSRVPHGRIMTPSVKVEKIHPKMDGTLLKSAVGPTCPATVSSLVKPGLNCPSIPKPTLPSPGQILNGKGLPAPPTLEKKPEDNSNNRKFLNKRLSEREFDPDIHCGVIDLDTKKPCTRSLTCKTHSLTQRRAVQGRRKRFDVLLAEHKNKTREKELIRHPDSQQPPQPLRDPHPAPPRTSQEPHQNPHGVIPSESKPFVASKPKPHTPSLPRPPGCPAQQGGSAPIDPPPVHESPHPPLPATEPASRLSSEEGEGDDKEESVEKLDCHYSGHHPQPASFCTFGSRQIGRGYYVFDSRWNRLRCALNLMVEKHLNAQLWKKIPPVPSTTSPISTRIPHRTNSVPTSQCGVSYLAAATVSTSPVLLSSTCISPNSKSVPAHGTTLNAQPAASGAMDPVCSMQSRQVSSSSSSPSTPSGLSSVPSSPMSRKPQKLKSSKSLRPKESSGNSTNCQNASSSTSGGSGKKRKNSSPLLVHSSSSSSSSSSSSHSMESFRKNCVAHSGPPYPSTVTSSHSIGLNCVTNKANAVNVRHDQSGRGPPTGSPAESIKRMSVMVNSSDSTLSLGPFIHQSNELPVNSHGSFSHSHTPLDKLIGKKRKCSPSSSSINNSSSKPTKVAKVPAMNNVHMKHTGTIPGAQGLMNSSLLHQVGNGL

SEQ ID NO: 838076 - protein, 874 aa, Homo sapiens
MSERAADDVRGEPRRAAAAAGGAAAAAARQQQQQQQQQQPPPPQPQRQQHPPPPPRRTRPEDGGPGAASTSAAAMATVGERRPLPSPEVMLGQSWNLWVEASKLPGKDGTELDESFKEFGKNREVMGLCREDMPIFGFCPAHDDFYLVVCNDCNQVVKPQAFQSHYERRHSSSSKPPLAVPPTSVFSFFPSLSKSKGGSASGSNRSSSGGVLSASSSSSKLLKSPKEKLQLRGNTRPMHPIQQSRVPHGRIMTPSVKVEKIHPKMDGTLLKSAVGPTCPATVSSLVKPGLNCPSIPKPTLPSPGQILNGKGLPAPPTLEKKPEDNSNNRKFLNKRLSEREFDPDIHCGVIDLDTKKPCTRSLTCKTHSLTQRRAVQGRRKRFDVLLAEHKNKTREKELIRHPDSQQPPQPLRDPHPAPPRTSQEPHQNPHGVIPSESKPFVASKPKPHTPSLPRPPGCPAQQGGSAPIDPPPVHESPHPPLPATEPASRLSSEEGEGDDKEESVEKLDCHYSGHHPQPASFCTFGSRQIGRGYYVFDSRWNRLRCALNLMVEKHLNAQLWKKIPPVPSTTSPISTRIPHRTNSVPTSQCGVSYLAAATVSTSPVLLSSTCISPNSKSVPAHGTTLNAQPAASGAMDPVCSMQSRQVSSSSSSPSTPSGLSSVPSSPMSRKPQKLKSSKSLRPKESSGNSTNCQNASSSTSGGSGKKRKNSSPLLVHSSSSSSSSSSSSHSMESFRKNCVAHSGPPYPSTVTSSHSIGLNCVTNKANAVNVRHDQSGRGPPTGSPAESIKRMSVMVNSSDSTLSLGPFIHQSNELPVNSHGSFSHSHTPLDKLIGKKKVAKVPAMNNVHMKHTGTIPGAQGLMNSSLLHQPKARP

SEQ ID NO: 838077 - protein, 388 aa, Homo sapiens
MPVWESASTRLCFLLQFCTFGSRQIGRGYYVFDSRWNRLRCALNLMVEKHLNAQLWKKIPPVPSTTSPISTRIPHRTNSVPTSQCGVSYLAAATVSTSPVLLSSTCISPNSKSVPAHGTTLNAQPAASGAMDPVCSMQSRQVSSSSSSPSTPSGLSSVPSSPMSRKPQKLKSSKSLRPKESSGNSTNCQNASSSTSGGSGKKRKNSSPLLVHSSSSSSSSSSSSHSMESFRKNCVAHSGPPYPSTVTSSHSIGLNCVTNKANAVNVRHDQSGRGPPTGSPAESIKRMSVMVNSSDSTLSLGPFIHQSNELPVNSHGSFSHSHTPLDKLIGKKRKCSPSSSSINNSSSKPTKVAKVPAMNNVHMKHTGTIPGAQGLMNSSLLHQPKARP

SEQ ID NO: 838078 - protein, 561 aa, Homo sapiens
MSERAADDVRGEPRRAAAAAGGAAAAAARQQQQQQQQQQPPPPQPQRQQHPPPPPRRTRPEDGGPGAASTSAAAMATVGERRPLPSPEVMLGQSWNLWVEASKLPGKDGTELDESFKEFGKNREVMGLCREDMPIFGFCPAHDDFYLVVCNDCNQVVKPQAFQSHYERRHSSSSKPPLAVPPTSVFSFFPSLSKSKGGSASGSNRSSSGGVLSASSSSSKLLKSPKEKLQLRGNTRPMHPIQQSRVPHGRIMTPSVKVEKIHPKMDGTLLKSAVGPTCPATVSSLVKPGLNCPSIPKPTLPSPGQILNGKGLPAPPTLEKKPEDNSNNRKFLNKRLSEREFDPDIHCGVIDLDTKKPCTRSLTCKTHSLTQRRAVQGRRKRFDVLLAEHKNKTREKELIRHPDSQQPPQPLRDPHPAPPRTSQEPHQNPHGVIPSESKPFVASKPKPHTPSLPRPPGCPAQQGGSAPIDPPPVHESPHPPLPATEPASRLSSEEGEGDDKEESVEKLDCHYSGHHPQPASFCTFGSRQIGRGYYVFDSRWNRLRCALNLMVEKHLNAQLWK

SEQ ID NO: 838079 - protein, 591 aa, Homo sapiens
MSERAADDVRGEPRRAAAAAGGAAAAAARQQQQQQQQQQPPPPQPQRQQHPPPPPRRTRPEDGGPGAASTSAAAMATVGERRPLPSPEVMLGQSWNLWVEASKLPGKDGTELDESFKEFGKNREVMGLCREDMPIFGFCPAHDDFYLVVCNDCNQVVKPQAFQSHYERRHSSSSKPPLAVPPTSVFSFFPSLSKSKGGSASGSNRSSSGGVLSASSSSSKLLKSPKEKLQLRGNTRPMHPIQQSRVPHGRIMTPSVKVEKIHPKMDGTLLKSAVGPTCPATVSSLVKPGLNCPSIPKPTLPSPGQILNGKGLPAPPTLEKKPEDNSNNRKFLNKRLSEREFDPDIHCGVIDLDTKKPCTRSLTCKTHSLTQRRAVQGRRKRFDVLLAEHKNKTREKELIRHPDSQQPPQPLRDPHPAPPRTSQEPHQNPHGVIPSESKPFVASKPKPHTPSLPRPPGCPAQQGGSAPIDPPPVHESPHPPLPATEPASRLSSEEGEGDDKEESVEKLDCHYSGHHPQPASFCTFGSRQIGRGYYVFDSRWNRLRCALNLMVEKHLNAQLWKKIPPVPSTTSPISTRIPHQILGSRHNLRYR

SEQ ID NO: 838080 - protein, 113 aa, Homo sapiens
MDTCEMVECASSLNSRSQDLGAFCFQKPDLIFIKSAPPLSQPGCPSRPGQQRCLARQGGAETGEPLGRLLWARWQRGGWLLFPALILAFSRLPHTTGFHFHPWVKRKAEIKSF

SEQ ID NO: 838081 - protein, 80 aa, Homo sapiens
LGVHRYKKLEGLNKRQAPVQVTSLLSDDPHWLCHISGAEWMHNTSVLIWASMQLFNLKNDGMNNPAYGFQTENSELKALV

SEQ ID NO: 838082 - protein, 544 aa, Homo sapiens
RCSGSSRFILSVLCPVLIEARPLWPCDLQVLGEPQLNPGTPGSLEMGPLQFRDVAIEFSLEEWHCLDTAQRNLYRDVMLENYRNLVFLGIVVSKPDLVTCLEQGKKPLTMERHEMIAKPPVMSSHFAQDLWPENIQNSFQIGMLRRYEECRHDNLQLKKGCKSVGEHKVHKGGYNGLNQCLTTTQKEIFQCDKYGKVFHKFSNSNTYKTRHTGINLFKCIICGKAFKRSSTLTTHKKIHTGEKPYRCEECGKAFNQSANLTTHKRIHTGEKPYRCEECGKAFKQSSNLTTHKKIHTGEKPYKCEECGKAFNRSTDLTTHKIVHTGEKPYKCEECGKAFKHPSHVTTHKKIHTRGKPYNCEECGKSFKHCSNLTIHKRIHTGEKPYKCEECGKAFHLSSHLTTHKILHTGEKPYRCRECGKAFNHSTTLFSHEKIHTGEKPYKCDECGKTFTWPSILSKHKRTHTGEKPYKCEECGKSFTASSTLTTHKRIHTGEKPYKCEECGKAFNWSSDLNKHKKIHIERKPYIVKNVTDLLNVPPLLISIR

SEQ ID NO: 838083 - protein, 275 aa, Homo sapiens
RCSGSSRFILSVLCPVLIEARPLWPCDLQVLGEPQLNPGTPGSLEMGPLQFRDVAIEFSLEEWHCLDTAQRNLYRDVMLENYRNLVFLGIVVSKPDLVTCLEQGKKPLTMERHEMIAKPPVMSSHFAQDLWPENIQNSFQIGMLRRYEECRHDNLQLKKGCKSVGEHKVHKGGYNGLNQCLTTTQKEIFQCDKYGKVFHKFSNSNTYKTRHTGINLFKCIICGKAFKRSSTLTTHKKIHTGEKPYRCEECGKAFNQSANLTTHKRIHTGEKPLQM

SEQ ID NO: 838084 - protein, 275 aa, Homo sapiens; identical to SEQ ID NO: 838083

SEQ ID NO: 838085 - protein, 275 aa, Homo sapiens; identical to SEQ ID NO: 838083

SEQ ID NO: 838086 - protein, 104 aa, Homo sapiens
MRAVGLWGSPGVLRWLPTVLAFVCHLHRVSRSVSWEVFLGLCAVISRHTLEPFRAPWTSPAFPSWVLGQPLVCPTSAPASGSCRVKQLPLVPFDKSPQELGCFH

SEQ ID NO: 838087 - protein, 78 aa, Homo sapiens
GLRLYPLNTAKVAAFWQAELTGLSSATTAGAAGMSWEEGSIAVAFVYQRPFQREICRGKERLPSRLGSELFLLETCGC

SEQ ID NO: 838088 - protein, 82 aa, Homo sapiens
MLLIFGVELQAGDLEGPRSACSHPLTSRKRRNVGLEPMKSTGIWLCSVTLDKSLPLSGLQFPPCSMRAGDFVCFIHNVFPEL

SEQ ID NO: 838089 - protein, 131 aa, Homo sapiens
ISELMQTEMHHIQTLFIMSEIFRKGMKEELQLDHSTVDKIFPCLDELLEIHRHFFYSMKERRQESCAGSDRNFVIDRIGDILVQQFSEENASKMKKIYGEFCCHHKEAVNLFKELQQNKKFQNFIKASILK

SEQ ID NO: 838090 - protein, 1094 aa, Homo sapiens
QTETDRMDFLRLYLPGLHQALRGALDSLGTFVSYLLGDAVPTVEREAQAAEELGVVAVGKTGKIVEEEAQEDLEGLRGSQNEGAGRLRGPGDDRRHEVGSSAVEQTWGWGDGSSHGSQAERQDSGAGETAKAARCQEPSAHLEARKKSKAGSGACQDRSGQAQERQESHEQEVNREERLRSWEQEEEEEEVRAREPGMARGAESEWTWHGETEGKAGAVGPKAAGDNREMEQGVREADAGETEEPGAEGAGKGEEVVVVEKACESTRAWGTWGPGAEPEDWGILGREEARTTPGREEARAILDGEEARTISGGEEAETASGGEEAETASGGEEAGTASGGEEAGISSGGEAGTASGGEEAGTASGGDEAWTTSGKEEADLLGVRQTQYGAVPGERLLEATGKVWVLEEEGDEEREAEVSPFPKQAQVLGTERTEEAAESQTAGREAVGGQEAGESFEGQVDLRGKEAEMRQDLGIRADRARMEELVQAEEAQEERGSSRDPVAELPSDGEAEGTADLEATPEARPEEELTGEESEAAQTSCGLLGVEWGGLTHSVTKGQGPELMGGAQTPTKQPEEREAGEVELMGVLALSKEEQERSLEAGPRHAGSVKPEASEAFPGAWENRTRKDMERGNTQEDAADGEQREEEETAGGQTLAAEAEGDRESELSEVPEAGGEGLTTQDAGCGTEEGEASVSENQELDGSTGADAGPCPSLGEAYARETEDEEAEADRTSRRGWRLQAVAVGLPDREDAQTGSVAAGIMGGDVVPHISAAGAGEALEGALGQGWDSKEKEEAAAGEHAGGQEFGLEGSAEEEVTGRGSQVEAFESREGGPWGGRVEAEESAGAEDSCGLDPAGSQTARAEGMGAMVEAGGLLEKWTLLEEEAVGWQEREQREDSEGRCGDYHPEGEAPRLLDAEGLMVTGGRRAEAKETEPESLEHVRGQEEQPTHQAPAEAAPESVGEAETAEAMGSARGGAANSWSEAPLPGSLLDVSVPRSRVHLSRSSSQRRSRPSFRRTPAWEQQEEPPAPNPPEEELSAPEQRPLQLEEPLEPSPLRHDGTPVPARRRPLGHGFGLAHPGMMQELQARLGRPKPQ

SEQ ID NO: 838091 - protein, 128 aa, Homo sapiens
ILISDKTNFKATMVKTDKEEHYIMVKGLVQQENIKILNIYAPNTGAHQFTKQLLTDLRNETDSNTIIVGDFNTPLTALDRSSRQKVNKETIDLNYTLEQMDLTDIYRTFHPTTAEYTSIQQHMELSPR

SEQ ID NO: 838092 - protein, 1159 aa, Homo sapiens
SAAAAAAEMSRRKQSKPRQIKRPLEDAIEDEEEECPSEETDIISKGDFPLEESFSTEFGPENLSCEEVEYFCNKGDDEGIQETAESDGDTQSEKPGQPGVETDDWDGPGELEVFQKDGERKIQSRQQLPVGTTWGPFPGKMDLNNNSLKTKAQVPMVLTAGPKWLLDVTWQGVEDNKNNCIVYSKGGQLWCTTTKAISEGEELIAFVVDFDSRLQAASQMTLTEGMYPARLLDSIQLLPQQAAMASILPTAIVNKDIFPCKSCGIWYRSERNLQAHLMYYCSGRQREAAPVSEENEDSAHQISSLCPFPQCTKSFSNARALEMHLNSHSGVKMEEFLPPGASLKCTVCSYTADSVINFHQHLFSHLTQAAFRCNHCHFGFQTQRELLQHQELHVPSGKLPRESDMEHSPSATEDSLQPATDLLTRSELPQSQKAMQTKDASSDTELDKCEKKTQLFLTNQRPEIQPTTNKQSFSYTKIKSEPSSPRLASSPVQPNIGPSFPVGPFLSQFSFPQDITMVPQASEILAKMSELVHRRLRHGSSSYPPVIYSPLMPKGATCFECNITFNNLDNYLVHKKHYCSSRWQQMAKSPEFPSVSEKMPEALSPNTGQTSINLLNPAAHSADPENPLLQTSCINSSTVLDLIGPNGKGHDKDFSTQTKKLSTSSNNDDKINGKPVDVKNPSVPLVDGESDPNKTTCEACNITFSRHETYMVHKQYYCATRHDPPLKRSASNKVPAMQRTMRTRKRRKMYEMCLPEQEQRPPLVQQRFLDVANLNNPCTSTQEPTEGLGECYHPRCDIFPGIVSKHLETSLTINKCVPVSKCDTTHSSVSCLEMDVPIDLSKKCLSQSERTTTSPKRLLDYHECTVCKISFNKVENYLAHKQNFCPVTAHQRNDLGQLDGKVFPNPESERNSPDVSYERSIIKCEKNGNLKQPSPNGNLFSSHLATLQGLKVFSEAAQLIATKEENRHLFLPQCLYPGAIKKAKGADQLSPYYGIKPSDYISGSLVIHNTDIEQSRNAENESPKGQASSNGCAALKKDSLPLLPKNRGMVIVNGGLKQDERPAANPQQENISQNPQHEDDHKSPSWISENPLAANENVSPGIPSAEEQLSSIAKGVNGSSQAPTSGKYCRLCDIQFNNLSNFITHKKFYCSSHAAEHVK

SEQ ID NO: 838093 - protein, 149 aa, Homo sapiens
MDLNNNSLKTKAQVPMVLTAGPKWLLDVTWQGVEDNKNNCIVYSKGGQLWCTTTKAISEGEELIAFVVDFDSRLQAASQMTLTEGMYPARLLDSIQLLPQQAAMASILPTAIVNSKCSVLCSPALEVMGIYGRKKCLLTRNQEQTFFLQ

SEQ ID NO: 838094 - protein, 329 aa, Homo sapiens
LVLEAFQEQVWAEMCSIKAVTAIEKQREENSSEASDVETKLREFEDLQMQLNTSIDLRTNVLNHAYENLTRYKEAVTRAVESITSLEAIIIPYRVDVGNPEESLEMPLRKQEELESTVARIQDLTEKLGMISSPEAKLQLQYTLQELVSKNSAMKEAFKAQETEAERYLENYKCYRKMEEDIYTNLSKMETVLGQSMSSLPLSYREALERLEQSKALVSNLISTKEELMKLRQILRLLRLRCTENDGICLLKMVSALWEKWLSLLEAAKEWEMWCEELKQEWKFVSEEIEREAIILDNLQEELPEISKTKEAATTEELSELLDCLCQYG

SEQ ID NO: 838095 - protein, 349 aa, Homo sapiens
MTAASMGPVRVAFVVLLALCSRPAVGQNCSGPCRCPDEPAPRCPAGVSLVLDGCGCCRVCAKQLGELCTERDPCDPHKGLFCDFGSPANRKIGVCTAKDGAPCIFGGTVYRSGESFQSSCKYQCTCLDGAVGCMPLCSMDVRLPSPDCPFPRRVKLPGKCCEEWVCDEPKDQTVVGPALAAYRLEDTFGPDPTMIRANCLVQTTEWSACSKTCGMGISTRVTNDNASCRLEKQSRLCMVRPCEADLEENIKKGKKCIRTPKISKPIKFELSGCTSMKTYRAKFCGVCTDGRCCTPHRTTTLPVEFKCPDGEVMKKNMMFIKTCACHYNCPGDNDIFESLYYRKMYGDMA

SEQ ID NO: 838096 - protein, 209 aa, Homo sapiens
  misc_feature (181)..(181): Xaa can be any naturally occurring amino acid
MTAASMGPVRVAFVVLLALCSRPAVGQNCSGPCRCPDEPAPRCPAGVSLVLDGCGCCRVCAKQLGELCTERDPCDPHKGLFCDFGSPANRKIGVCTAKDGAPCIFGGTVYRSGESFQSSCKYQCTCLDGAVGCMPLCSMDVRLPSPDCPFPRRVKLPGKCCEEWVCDEPKDQTVVGPALAXYQNWKTRFGPKPKLIELEAKLGLVQEPT

SEQ ID NO: 838097 - protein, 196 aa, Homo sapiens
  misc_feature (171)..(171): Xaa can be any naturally occurring amino acid
  misc_feature (177)..(177): Xaa can be any naturally occurring amino acid
  misc_feature (187)..(187): Xaa can be any naturally occurring amino acid
  misc_feature (194)..(195): Xaa can be any naturally occurring amino acid
MTAASMGPVRVAFVVLLALCSRPAVGQNCSGPCRCPDEPAPRCPAGVSLVLDGCGCCRVCAKQLGELCTERDPCDPHKGLFCDFGSPANRKIGVCTAKDGAPCIFGGTVYRSGESFQSSCKYQCTCLDGAVGCMPLCSMDVSSGPKPLNCPPFPERKGFKSLPPGEKLLAXKEIWGXFLKRKPPKGXPKNPVGXXG

SEQ ID NO: 838098 - protein, 104 aa, Homo sapiens
MTAASMGPVRVAFVVLLALCSRPAVGQNCSGPCRCPDEPAPRCPAGVSLVLDGCGCCRVCAKQLGELCTERDPCDPHKGLFCDFGSPANRKIGVCTGKTRSPHR

SEQ ID NO: 838099 - protein, 267 aa, Homo sapiens
MTAASMGPVRVAFVVLLALCSRPAVGQNCSGPCRCPDEPAPRCPAGVSLVLDGCGCCRVCAKQLGELCTERDPCDPHKGLFCDFGSPANRKIGVCTAKDGAPCIFGGTVYRSGESFQSSCKYQCTCLDGAVGCMPLCSMDVRLPSPDCPFPRRVKLPGKCCEEWVCDEPKDQTVVGPALAAYRLEDTFGPDPTMIRANCLVQTTEWSACSKTCGMGISTRVTNDNASCRLEKQSRLCMVRPCEADLEENIKVHVLLLLTIFHRKNSG

SEQ ID NO: 838100 - protein, 267 aa, Homo sapiens; identical to SEQ ID NO: 838099

SEQ ID NO: 838101 - protein, 203 aa, Homo sapiens
MTPFPRRVKLPGKCCEEWVCDEPKDQTVVGPALAAYRLEDTFGPDPTMIRANCLVQTTEWSACSKTCGMGISTRVTNDNASCRLEKQSRLCMVRPCEADLEENIKKGKKCIRTPKISKPIKFELSGCTSMKTYRAKFCGVCTDGRCCTPHRTTTLPVEFKCPDGEVMKKNMMFIKTCACHYNCPGDNDIFESLYYRKMYGDMA

SEQ ID NO: 838102 - protein, 349 aa, Homo sapiens; identical to SEQ ID NO: 838095

SEQ ID NO: 838103 - protein, 349 aa, Homo sapiens; identical to SEQ ID NO: 838095

SEQ ID NO: 838104 - protein, 349 aa, Homo sapiens; identical to SEQ ID NO: 838095

SEQ ID NO: 838105 - protein, 349 aa, Homo sapiens; identical to SEQ ID NO: 838095

SEQ ID NO: 838106 - protein, 349 aa, Homo sapiens; identical to SEQ ID NO: 838095

SEQ ID NO: 838107 - protein, 198 aa, Homo sapiens
  misc_feature (193)..(193): Xaa can be any naturally occurring amino acid
  misc_feature (196)..(196): Xaa can be any naturally occurring amino acid
MTAASMGPVRVAFVVLLALCSRPAVGQNCSGPCRCPDEPAPRCPAGVSLVLDGCGCCRVCAKQLGELCTERDPCDPHKGLFCDFGSPANRKIGVCTAKDGAPCIFGGTVYRSGESFQSSCKYQCTCLDGAVGCMPLCSMDVRLPSPDCPFPRRVKLPGKCCEEWVCDEPKDQTGWLLGYMKTCNTYKHVQQMXFNXMD

SEQ ID NO: 838108 - protein, 60 aa, Homo sapiens
MVRGRNRPRARAAQKASRSSDRTAAPHHTCTLDASQPTTHEQTSPIHTDARAPNTNHSQP

SEQ ID NO: 838109 - protein, 393 aa, Homo sapiens
MTAASMGPVRVAFVVLLALCSRPAVGQNCSGPCRCPDEPAPRCPAGVSLVLDGCGCCRVCAKQLGELCTERDPCDPHKGLFCDFGSPANRKIGVCTAKDGAPCIFGGTVYRSGESFQSSCKYQCTCLDGAVGCMPLCSMDVRLPSPDCPFPRRVKLPGKCCEEWVCDEPKDQTVVGPALAGESSLPLSQGRDSLPGRESYTVPTERGKYLIQAFYMVFVCSALAAYRLEDTFGPDPTMIRANCLVQTTEWSACSKTCGMGISTRVTNDNASCRLEKQSRLCMVRPCEADLEENIKKGKKCIRTPKISKPIKFELSGCTSMKTYRAKFCGVCTDGRCCTPHRTTTLPVEFKCPDGEVMKKNMMFIKTCACHYNCPGDNDIFESLYYRKMYGDMA

SEQ ID NO: 838110 - protein, 218 aa, Homo sapiens
MVLPASSVVRCTAAESPSRAAASTSARAWTGRWAACPCAAWTFVCPALTAYRLEDTFGPDPTMIRANCLVQTTEWSACSKTCGMGISTRVTNDNASCRLEKQSRLCMVRPCEADLEENIKKGKKCIRTPKISKPIKFELSGCTSMKTYRAKFCGVCTDGRCCTPHRTTTLPVEFKCPDGEVMKKNMMFIKTCACHYNCPGDNDIFESLYYRKMYGDMA

SEQ ID NO: 838111 - protein, 330 aa, Homo sapiens
MTAASMGPVRVAFVVLLALCSRPAVGQNCSGPCRCPDEPAPRCPAGVSLVLDGCGCCRVCAKQLGELCTERDPCDPHKGLFCDFGSPANRKIGVCTAKDGAPCIFGGTVYRSGESFQSSCKYQCTCLDGAVGCMPLCSMDVRLPSPDCPFPRRVKLPGKCCEEWVCDEPKDQTVVGPALAAYRLEDTFGPDPTMIRANCLVQTTEWSACSKTCGMGISTRVTNDNASCRLEKQSRLCMVRPCEADLEENIKKGKKCIRTYRAKFCGVCTDGRCCTPHRTTTLPVEFKCPDGEVMKKNMMFIKTCACHYNCPGDNDIFESLYYRKMYGDMA

SEQ ID NO: 838112 - protein, 349 aa, Homo sapiens; identical to SEQ ID NO: 838095

SEQ ID NO: 838113 - protein, 349 aa, Homo sapiens; identical to SEQ ID NO: 838095

SEQ ID NO: 838114 - protein, 580 aa, Homo sapiens
WLCACPERVARACVFRPEDMMQGEAHPSASLIDRTIKMRKETEARKVVLAWGLLNVSMAGMIYTEMTGKLISSYYNVTYWPLWYIELALASLFSLNALFDFWRYFKYTVAPTSLVVSPGQQTLLGLKTAVVQTTPPHDLAATQIPPAPPSPSIQGQSVLSYSPSRSPSTSPKFTTSCMTGYSPQLQGLSSGGSGSYSPGVTYSPVSGYNKLASFSPSPPSPYPTTVGPVESSGLRSRYRSSPTVYNSPTDKEDYMTDLRTLDTFLRSEEEKQHRVKLGSPDSTSPSSSPTFWNYSRSMGDYAQTLKKFQYQLACRSQAPCANKDEADLSSKQAAEEVWARVAMNRQLLDHMDSWTAKFRNWINETILVPLVQEIESVSTQMRRMGCPELQIGEASITSLKQAALVKAPLIPTLNTIVQYLDLTPNQEYLFERIKELSQGGCMSSFRWNRGGDFKGRKWDTDLPTDSAIIMHVFCTYLDSRLPPHPKYPDGKTFTSQHFVQTPNKPDVTNENVFCIYQSAINPPHYELIYQRHVYNLPKGRNNMFHTLLMFLYIIKTKESGMLGRVNLGLSGVNILWIFGE

SEQ ID NO: 838115 - protein, 580 aa, Homo sapiens; identical to SEQ ID NO: 838114

SEQ ID NO: 838116 - protein, 580 aa, Homo sapiens; identical to SEQ ID NO: 838114

SEQ ID NO: 838117 - protein, 533 aa, Homo sapiens
HLEDLPGSSLAAKVIYTEMTGKLISSYYNVTYWPLWYIELALASLFSLNALFDFWRYFKYTVAPTSLVVSPGQQTLLGLKTAVVQTTPPHDLAATQIPPAPPSPSIQGQSVLSYSPSRSPSTSPKFTTSCMTGYSPQLQGLSSGGSGSYSPGVTYSPVSGYNKLASFSPSPPSPYPTTVGPVESSGLRSRYRSSPTVYNSPTDKEDYMTDLRTLDTFLRSEEEKQHRVKLGSPDSTSPSSSPTFWNYSRSMGDYAQTLKKFQYQLACRSQAPCANKDEADLSSKQAAEEVWARVAMNRQLLDHMDSWTAKFRNWINETILVPLVQEIESVSTQMRRMGCPELQIGEASITSLKQAALVKAPLIPTLNTIVQYLDLTPNQEYLFERIKELSQGGCMSSFRWNRGGDFKGRKWDTDLPTDSAIIMHVFCTYLDSRLPPHPKYPDGKTFTSQHFVQTPNKPDVTNENVFCIYQSAINPPHYELIYQRHVYNLPKGRNNMFHTLLMFLYIIKTKESGMLGRVNLGLSGVNILWIFGE

SEQ ID NO: 838118 - protein, 222 aa, Homo sapiens
WLCACPERVARACVFRPEDMMQGEAHPSASLIDRTIKMRKETEARKVVLAWGLLNVSMAGMIYTEMTGKLISSYYNVTYWPLWYIELALASLFSLNALFDFWRYFKYTVAPTSLVVSPGQQTLLGLKTAVVQTTPPHDLAATQIPPAPPSPSIQGQSVLSYSPSRSPSTSPKFTTSCMTGYSPQLQGLSSGGSGSYSPGVTYSPVSGYNKVMTLFSCLVTLF

SEQ ID NO: 838119 - protein, 590 aa, Homo sapiens
WLCACPERVARACVFRPEDMMQGEAHPSASLIDRTIKMRKETEARKVVLAWGLLNVSMAGMIYTEMTGKLISSYYNVTYWPLWYIELALASLFSLNALFDFWRYFKYTVAPTSLVVSPGQQTLLGLKTAVVQTTPPHDLAATQIPPAPPSPSIQGQSVLSYSPSRSPSTSPKFTTSCMTGYSPQLQGLSSGGSGSYSPGVTYSPVSGYNKLASFSPSPPSPYPTTVGPVESSGLRSRYRSSPTVYNSPTDKEDYMTDLRTLDTFLRSEEEKQHRVKLGSPDSTSPSSSPTFWNYSRSMGDYAQTLKKFQYQLACRSQAPCANKDEADLSSKQAAEEVWARVAMNRQLLDHMDSWTAKFRNWINETILVPLVQEIESVSTQMRRMGCPELQIGEASITSLKQAALVKAPLIPTLNTIVQYLDLTPNQEYLFERIKAFKNFTLFATELSQGGCMSSFRWNRGGDFKGRKWDTDLPTDSAIIMHVFCTYLDSRLPPHPKYPDGKTFTSQHFVQTPNKPDVTNENVFCIYQSAINPPHYELIYQRHVYNLPKGRNNMFHTLLMFLYIIKTKESGMLGRVNLGLSGVNILWIFGE

SEQ ID NO: 838120 - protein, 470 aa, Homo sapiens
WLCACPERVARACVFRPEDMMQGEAHPSASLIDRTIKMRKETEARKVVLAWGLLNVSMAGMIYTEMTGKLISSYYNVTYWPLWYIELALASLFSLNALFDFWRYFKYTVAPTSLVVSPGQQTLLGLKTAVVQTTPPHDLAATQIPPAPPSPSIQGQSVLSYSPSRSPSTSPKFTTSCMTGYSPQLQGLSSGGSGSYSPGVTYSPVSGYNKLASFSPSPPSPYPTTVGPVESSGLRSRYRSSPTVYNSPTDKEDYMTDLRTLDTFLRSEEEKQHRVKLGSPDSTSPSSSPTFWNYSRSMGDYAQTLKKFQYQLACRSQAPCANKDEADLSSKQAAEEVWARVAMNRQLLDHMDSWTAKFRNWINETILVPLVQEIESVSTQMRRMGCPELQIGEASITSLKQAALVKAPLIPTLNTIVQYLDLTPNQEYLFERIKELSQGGCMSSFRWNRGGDFKGRKWDTDLPTDSAVSP

SEQ ID NO: 838121 - protein, 69 aa, Homo sapiens
NLLIFLPSAPMSGAVLDAQNAKAREASQSESPMGLGLLAVDCSADDFLSLVEKLKEGIAGKGDGGSRGL

SEQ ID NO: 838122 - protein, 811 aa, Homo sapiens
MHELVRQGVRSLILTSGTLAPVSSFALEMQMYGPPLPGPEHRDTSDISGVEVVGVPMSRVLGVSGLEGYRGAGALPHCLLPLATLSPFPVCLENPHIIDKHQIWVGVVPRGPDGAQLSSAFDRRFSEECLSSLGKALGNIARVVPYGLLIFFPSYPVMEKSLEFWRARDLARKMEALKPLFVEPRSKGSFSETISAYYARVAAPGSTGATFLAVCRGKASEGLDFSDTNGRGVIVTGLPYPPRMDPRVVLKMQFLDEMKGQGGAGGQFLSGQEWYRQQASRAVNQAIGRVIRHRQDYGAVFLCDHRFAFADARAQLPSWVRPHVRVYDNFGHVIRDVAQFFRVAERTMPAPAPRATAPSVRGEDAVSEAKSPGPFFSTRKAKSLDLHVPSLKQRSSGSPAAGDPESSLCVEYEQEPVPARQRPRGLLAALEHSEQRAGSPGEEQAHSCSTLSLLSEKRPAEEPRGGRKKIRLVSHPEEPVAGAQTDRAKLFMVAVKQELSQANFATFTQALQDYKGSDDFAALAACLGPLFAEDPKKHNLLQGFYQFVRPHHKQQFEEVCIQLTGRGCGYRPEHSIPRRQRAQPVLDPTGRTAPDPKLTVSTAAAQQLDPQEHLNQGRPHLSPRPPPTGDPGSQPQWGSGVPRAGKQGQHAVSAYLADARRALGSAGCSQLLAALTAYKQDDDLDKVLAVLAALTTAKPEDFPLLHRFSMFVRPHHKQRFSQTCTDLTGRPYPGMEPPGPQEERLAVPPVLTHRAPQPGPSRSEKTGKTQSKISSFLRQRPAGTVGAGGEDAGPSQSSGPPHGPAASEWGL

SEQ ID NO: 838123 - protein, 545 aa, Homo sapiens
MPAPAPRATAPSVRGEDAVSEAKSPGPFFSTRKAKSLDLHVPSLKQRSSGSPAAGDPESSLCVEYEQEPVPARQRPRGLLAALEHSEQRAGSPGEEQAHSCSTLSLLSEKRPAEEPRGGRKKIRLVSHPEEPVAGAQTDRAKLFMVAVKQELSQANFATFTQALQDYKGSDDFAALAACLGPLFAEDPKKHNLLQGFYQFVRPHHKQQFEEVCIQLTGRGCGYRPEHSIPRRQRAQPVLDPTGRTAPDPKLTVSTAAAQQLDPQEHLNQGRPHLSPRPPPTGDPGSQPQWGSGVPRAGKQGQHAVSAYLADARRALGSAGCSQLLAALTAYKQDDDLDKVLAVLAALTTAKPEDFPLLHRFSMFVRPHHKQRFSQTCTDLTGRPYPGMEPPGPQEERLAVPPVLTHRAPQPGPSRSEKTGKTQSKISSFLRQRPAGTVGAGGEDAGPSQSSGPPHGPAASEWGEPHGRDIAGQQATGAPGGPLSAGCVCQGCGAEDVVPFQCPACDFQRCQACWQRHLQASRMCPACHTASRKQSVMQVFWPEPQ

SEQ ID NO: 838124 - protein, 296 aa, Homo sapiens
  misc_feature (2)..(3): Xaa can be any naturally occurring amino acid
GXXKKPRLGTRLGDAVSEAKSPGPFFSTRKAKSLDLHVPSLKQRSSGSPAAGDPESSLCVEYEQEPVPARQRPRGLLAALEHSEQRAGSPGEEQAHSCSTLSLLSEKRPAEEPRGGRKKIRLVSHPEEPVAGAQTDRAKLFMVAVKQELSQANFATFTQALQDYKGSDDFAALAACLGPLFAEDPKKHNLLQGFYQFVRPHHKQQFEEVCIQLTGRGCGYRPEHSIPRRQRAQPVLDPTENGAGSKLTCQAEPEWTQSPEQEATVARHPKGTWGTQGGLGAPAGKGRPGGTGYAPG

SEQ ID NO: 838125 - protein, 105 aa, Homo sapiens [sequence omitted]

SEQ ID NO: 838126 - protein, 1602 aa, Homo sapiens
MPKIVLNGVTVDFPFQPYKCQQEYMTKVLECLQQKVNGILESPTGTGKTLCLLCTTLAWREHLRDGISARKIAERAQGELFPDRALSSWGNAAAAAGDPIACYTDIPKIIYASRTHSQLTQVINELRNTSYRPKVCVLGSREQLCIHPEVKKQESNHLQIHLCRKKVASRSCHFYNNVEEKSLEQELASPILDIEDLVKSGSKHRVCPYYLSRNLKQQADIIFMPYNYLLDAKSRRAHNIDLKGTVVIFDEAHNVEKMCEESASFDLTPHDLASGLDVIDQVLEEQTKAAQQGEPHPEFSADSPSPGLNMELEDIAKLKMILLRLEGAIDAVELPGDDSGVTKPGSYIFELFAEAQITFQTKGCILDSLDQIIQHLAGRAGVFTNTAGLQKLADIIQIVFSVDPSEGSPGSPAGLGALQSYKVHIHPDAGHRRTAQRSDAWSTTAARKRGKVLSYWCFSPGHSMHELVRQGVRSLILTSGTLAPVSSFALEMQIPFPVCLENPHIIDKHQIWVGVVPRGPDGAQLSSAFDRRFSEECLSSLGKALGNIARVVPYGLLIFFPSYPVMEKSLEFWRARDLARKMEALKPLFVEPRSKGSFSETISAYYARVAAPGSTGATFLAVCRGKASEGLDFSDTNGRGVIVTGLPYPPRMDPRVVLKMQFLDEMKGQGGAGGQFLSGQEWYRQQASRAVNQAIGRVIRHRQDYGAVFLCDHRFAFADARAQLPSWVRPHVRVYDNFGHVIRDVAQFFRVAERTMPAPAPRATAPSVRGEDAVSEAKSPGPFFSTRKAKSLDLHVPSLKQRSSGSPAAGDPESSLCVEYEQEPVPARQRPRGLLAALEHSEQRAGSPGEEQAHSCSTLSLLSEKRPAEEPRGGRKKIRLVSHPEEPVAGAQTDRAKLFMVAVKQELSQANFATFTQALQDYKGSDDFAALAACLGPLFAEDPKKHNLLQGFYQFVRPHHKQQFEEVCIQLTGRGCGYRPEHSIPRRQRAQPVLDPTGRTAPDPKLTVSTAAAQQLDPQEHLNQGRPHLSPRPPPTGDPGSQPQWGSGVPRAGKQGQHAVSAYLADARRALGSAGCSQLLAALTAYKQDDDLDKVLAVLAALTTAKPEDFPLLHRFSMFVRPHHKQRFSQTCTDLTGRPYPGMEPPGPQEERLAVPPVLTHRAPQPGPSRSEKTGKTQSKISSFLRQRPAGTVGAGGEDAGPSQSSGPPHGPAASEWGEPHGRDIAGQQATGAPGGPLSAGCVCQAVGQRTWCPSSALPVTSSAAKPAGNGTFRPLGCAQPATPPPGSRASCRSSGQSPTRTMRALEGPGLSLLCLVLALPALLPVPAVRGVAETPTYPWRDAETGERLVCAQCPPGTFVQRPCRRDSPTTCGPCPPRHYTQFWNYLERCRYCNVLCGEREEEARACHATHNRACRCRTGFFAHAGFCLEHASCPPGAGVIAPGTPSQNTQCQPCPPGTFSASSSSSEQCQPHRNCTALGLALNVPGSSSHDTLCTSCTGFPLSTRVPGAEECERAVIDFVAFQDISIKRLQRLLQALEAPEGWGPTPRAGRAALQLKLRRRLTELLGAQDGALLVRLLQALRVARMPGLERSVRERFLPVH

SEQ ID NO: 838127 - protein, 1350 aa, Homo sapiens
MPKIVLNGVTVDFPFQPYKCQQEYMTKVLECLQQKVNGILESPTGTGKTLCLLCTTLAWREHLRDGISARKIAERAQGELFPDRALSSWGNAAAAAGDPIACYTDIPKIIYASRTHSQLTQVINELRNTSYRSLLRPGHVSVMLTSSDRRGSCVSPYSSRCRATLWVLETAPPRPTVLSPTRPKVCVLGSREQLCIHPEVKKQESNHLQIHLCRKKVASRSCHFYNNVEEKSLEQELASPILDIEDLVKSGSKHRVCPYYLSRNLKQQADIIFMPYNYLLDAKSRRAHNIDLKGTVVIFDEAHNVEKMCEESASFDLTPHDLASGLDVIDQVLEEQTKAAQQGEPHPEFSADSPSPGLNMELEDIAKLKMILLRLEGAIDAVELPGDDSGVTKPGSYIFELFAEAQITFQTKGCILDSLDQIIQHLAGRAGVFTNTAGLQKLADIIQIVFSVDPSEGSPGSPAGLGALQSYKVHIHPDAGHRRTAQRSDAWSTTAARKRGKVLSYWCFSPGHSMHELVRQGVRSLILTSGTLAPVSSFALEMQIPFPVCLENPHIIDKHQIWVGVVPRGPDGAQLSSAFDRRFSEECLSSLGKALGNIARVVPYGLLIFFPSYPVMEKSLEFWRARDLARKMEALKPLFVEPRSKGSFSETISAYYARVAAPGSTGATFLAVCRGKASEGLDFSDTNGRGVIVTGLPYPPRMDPRVVLKMQFLDEMKGQGGAGGQFLSGQEWYRQQASRAVNQAIGRVIRHRQDYGAVFLCDHRFAFADARAQLPSWVRPHVRVYDNFGHVIRDVAQFFRVAERTMPAPAPRATAPSVRGEDAVSEAKSPGPFFSTRKAKSLDLHVPSLKQRSSGSPAAGDPESSLCVEYEQEPVPARQRPRGLLAALEHSEQRAGSPGEEQAHSCSTLSLLSEKRPAEEPRGGRKKIRLVSHPEEPVAGAQTDRAKLFMVAVKQELSQANFATFTQALQDYKGSDDFAALAACLGPLFAEDPKKHNLLQGFYQFVRPHHKQQFEEVCIQLTGRGCGYRPEHSIPRRQRAQPVLDPTGRTAPDPKLTVSTAAAQQLDPQEHLNQGRPHLSPRPPPTGDPGSQPQWGSGVPRAGKQGQHAVSAYLADARRALGSAGCSQLLAALTAYKQDDDLDKVLAVLAALTTAKPEDFPLLHRFSMFVRPHHKQRFSQTCTDLTGRPYPGMEPPGPQEERLAVPPVLTHRAPQPGPSRSEKTGKTQSKISSFLRQRPAGTVGAGGEDAGPSQSSGPPHGPAASEWGEPHGRDIAGQQATGAPGGPLSAGCVCQGCGAEDVVPFQCPACDFQRCQACWQRHLQASRMCPACHTASRKQSVMQVFWPEPQ

SEQ ID NO: 838128 - protein, 837 aa, Homo sapiens
MHELVRQGVRSLILTSGTLAPVSSFALEMQIPFPVCLENPHIIDKHQIWVGVVPRGPDGAQLSSAFDRRFSEECLSSLGKALGNIARVVPYGLLIFFPSYPVMEKSLEFWRARDLARKMEALKPLFVEPRSKGSFSETISAYYARVAAPGSTGATFLAVCRGKASEGLDFSDTNGRGVIVTGLPYPPRMDPRVVLKMQFLDEMKGQGGAGGQFLSGQEWYRQQASRAVNQAIGRVIRHRQDYGAVFLCDHRFAFADARAQLPSWVRPHVRVYDNFGHVIRDVAQFFRVAERTMPAPAPRATAPSVRGEDAVSEAKSPGPFFSTRKAKSLDLHVPSLKQRSSGSPAAGDPESSLCVEYEQEPVPARQRPRGLLAALEHSEQRAGSPGEEQAHSCSTLSLLSEKRPAEEPRGGRKKIRLVSHPEEPVAGAQTDRAKLFMVAVKQELSQANFATFTQALQDYKGSDDFAALAACLGPLFAEDPKKHNLLQGFYQFVRPHHKQQFEEVCIQLTGRGCGYRPEHSIPRRQRAQPVLDPTGRTAPDPKLTVSTAAAQQLDPQEHLNQGRPHLSPRPPPTGDPGSQPQWGSGVPRAGKQGQHAVSAYLADARRALGSAGCSQLLAALTAYKQDDDLDKVLAVLAALTTAKPEDFPLLHRFSMFVRPHHKQRFSQTCTDLTGRPYPGMEPPGPQEERLAVPPVLTHRAPQPGPSRSEKTGKTQSKISSFLRQRPAGTVGAGGEDAGPSQSSGPPHGPAASEWGEPHGRDIAGQQATGAPGGPLSAGCVCQGCGAEDVVPFQCPACDFQRCQACWQRHLQASRMCPACHTASRKQSVMQVFWPEPQ

SEQ ID NO: 838129 - protein, 542 aa, Homo sapiens
  misc_feature (2)..(3): Xaa can be any naturally occurring amino acid
GXXKKPRLGTRLGDAVSEAKSPGPFFSTRKAKSLDLHVPSLKQRSSGSPAAGDPESSLCVEYEQEPVPARQRPRGLLAALEHSEQRAGSPGEEQAHSCSTLSLLSEKRPAEEPRGGRKKIRLVSHPEEPVAGAQTDRAKLFMVAVKQELSQANFATFTQALQDYKGSDDFAALAACLGPLFAEDPKKHNLLQGFYQFVRPHHKQQFEEVCIQLTGRGCGYRPEHSIPRRQRAQPVLDPTGRTAPDPKLTVSTAAAQQLDPQEHLNQGRPHLSPRPPPTGDPGSQPQWGSGVPRAGKQGQHAVSAYLADARRALGSAGCSQLLAALTAYKQDDDLDKVLAVLAALTTAKPEDFPLLHRFSMFVRPHHKQRFSQTCTDLTGRPYPGMEPPGPQEERLAVPPVLTHRAPQPGPSRSEKTGKTQSKISSFLRQRPAGTVGAGGEDAGPSQSSGPPHGPAASEWGEPHGRDIAGQQATGAPGGPLSAGCVCQGCGAEDVVPFQCPACDFQRCQACWQRHLQASRMCPACHTASRKQSVMQVFWPEPQ

SEQ ID NO: 838130 - protein, 1300 aa, Homo sapiens
MPKIVLNGVTVDFPFQPYKCQQEYMTKVLECLQQKVNGILESPTGTGKTLCLLCTTLAWREHLRDGISARKIAERAQGELFPDRALSSWGNAAAAAGDPIACYTDIPKIIYASRTHSQLTQVINELRNTSYRPKVCVLGSREQLCIHPEVKKQESNHLQIHLCRKKVASRSCHFYNNVEEKSLEQELASPILDIEDLVKSGSKHRVCPYYLSRNLKQQADIIFMPYNYLLDAKSRRAHNIDLKGTVVIFDEAHNVEKMCEESASFDLTPHDLASGLDVIDQVLEEQTKAAQQGEPHPEFSADSPSPGLNMELEDIAKLKMILLRLEGAIDAVELPGDDSGVTKPGSYIFELFAEAQITFQTKGCILDSLDQIIQHLAGRAGVFTNTAGLQKLADIIQIVFSVDPSEGSPGSPAGLGALQSYKVHIHPDAGHRRTAQRSDAWSTTAARKRGKVLSYWCFSPGHSMHELVRQGVRSLILTSGTLAPVSSFALEMQIPFPVCLENPHIIDKHQIWVGVVPRGPDGAQLSSAFDRRFSEECLSSLGKALGNIARVVPYGLLIFFPSYPVMEKSLEFWRARDLARKMEALKPLFVEPRSKGSFSETISAYYARVAAPGSTGATFLAVCRGKASEGLDFSDTNGRGVIVTGLPYPPRMDPRVVLKMQFLDEMKGQGGAGGQFLSGQEWYRQQASRAVNQAIGRVIRHRQDYGAVFLCDHRFAFADARAQLPSWVRPHVRVYDNFGHVIRDVAQFFRVAERTMPAPAPRATAPSVRGEDAVSEAKSPGPFFSTRKAKSLDLHVPSLKQRSSGSPAAGDPESSLCVEYEQEPVPARQRPRGLLAALEHSEQRAGSPGEEQAHSCSTLSLLSEKRPAEEPRGGRKKIRLVSHPEEPVAGAQTDRAKLFMVAVKQELSQANFATFTQALQDYKGSDDFAALAACLGPLFAEDPKKHNLLQGFYQFVRPHHKQQFEEVCIQLTGRGCGYRPEHSIPRRQRAQPVLDPTGRTAPDPKLTVSTAAAQQLDPQEHLNQGRPHLSPRPPPTGDPGSQPQWGSGVPRAGKQGQHAVSAYLADARRALGSAGCSQLLAALTAYKQDDDLDKVLAVLAALTTAKPEDFPLLHRFSMFVRPHHKQRFSQTCTDLTGRPYPGMEPPGPQEERLAVPPVLTHRAPQPGPSRSEKTGKTQSKISSFLRQRPAGTVGAGGEDAGPSQSSGPPHGPAASEWGEPHGRDIAGQQATGAPGGPLSAGCVCQGCGAEDVVPFQCPACDFQRCQACWQRHLQASRMCPACHTASRKQSVMQVFWPEPQ

SEQ ID NO: 838131 - protein, 1219 aa, Homo sapiens
MPKIVLNGVTVDFPFQPYKCQQEYMTKVLECLQQKVNGILESPTGTGKTLCLLCTTLAWREHLRDGISARKIAERAQGELFPDRALSSWGNAAAAAGDPIACYTDIPKIIYASRTHSQLTQVINELRNTSYRPKVCVLGSREQLCIHPEVKKQESNHLQIHLCRKKVASRSCHFYNNVEEKSLEQELASPILDIEDLVKSGSKHRVCPYYLSRNLKQQADIIFMPYNYLLDAKSRRAHNIDLKGTVVIFDEAHNVEKMCEESASFDLTPHDLASGLDVIDQVLEEQTKAAQQGEPHPEFSADSPSPGLNMELEDIAKLKMILLRLEGAIDAVELPGDDSGVTKPGSYIFELFAEAQITFQTKGCILDSLDQIIQHLAGRAGVFTNTAGLQKLADIIQIVFSVDPSEGSPGSPAGLGALQSYKVHIHPDAGHRRTAQRSDAWSTTAARKRGKVLSYWCFSPGHSMHELVRQGVRSLILTSGTLAPVSSFALEMQIPFPVCLENPHIIDKHQIWVGVVPRGPDGAQLSSAFDRRFSEECLSSLGKALGNIARVVPYGLLIFFPSYPVMEKSLEFWRARDLARKMEALKPLFVEPRSKGSFSETISAYYARVAAPGSTGATFLAVCRGKASEGLDFSDTNGRGVIVTGLPYPPRMDPRVVLKMQFLDEMKGQGGAGGQFLSGQEWYRQQASRAVNQAIGRVIRHRQDYGAVFLCDHRFAFADARAQLPSWVRPHVRVYDNFGHVIRDVAQFFRVAERTMPAPAPRATAPSVRGEDAVSEAKSPGPFFSTRKAKSLDLHVPSLKQRSSGSPAAGDPESSLCVEYEQEPVPARQRPRGLLAALEHSEQRAGSPGEEQAHSCSTLSLLSEKRPAEEPRGGRKKIRLVSHPEEPVAGAQTDRAKLFMVAVKQELSQANFATFTQALQDYKGSDDFAALAACLGPLFAEDPKKHNLLQGFYQFVRPHHKQQFEEVCIQLTGRGCGYRPEHSIPRRQRAQPVLDPTGRTAPDPKLTVSTAAAQQLDPQEHLNQGRPHLSPRPPPTGDPGSQPQWGSGVPRAGKQGQHAVSAYLADARRALGSAGCSQLLAALTAYKQDDDLDKVLAVLAALTTAKPEDFPLLHRFSMFVRPHHKQRFSQTCTDLTGRPYPGMEPPGPQEERLAVPPVLTHRAPQPGPSRSEKTGKTQSKISSFLRQRPAGTVGAGGEDAGPSQSSGPPHGPAASEWGL

SEQ ID NO: 838132 - protein, 1300 aa, Homo sapiens; identical to SEQ ID NO: 838130

SEQ ID NO: 838133 - protein, 1054 aa, Homo sapiens
MPKIVLNGVTVDFPFQPYKCQQEYMTKVLECLQQKVNGILESPTGTGKTLCLLCTTLAWREHLRDGISARKIAERAQGELFPDRALSSWGNAAAAAGDPIACYTDIPKIIYASRTHSQLTQVINELRNTSYRPKVCVLGSREQLCIHPEVKKQESNHLQIHLCRKKVASRSCHFYNNVEEKSLEQELASPILDIEDLVKSGSKHRVCPYYLSRNLKQQADIIFMPYNYLLDAKSRRAHNIDLKGTVVIFDEAHNVEKMCEESASFDLTPHDLASGLDVIDQVLEEQTKAAQQGEPHPEFSADSPSPGLNMELEDIAKLKMILLRLEGAIDAVELPGDDSGVTKPGSYIFELFAEAQITFQTKGCILDSLDQIIQHLAGRAGVFTNTAGLQKLADIIQIVFSVDPSEGSPGSPAGLGALQSYKVHIHPDAGHRRTAQRSDAWSTTAARKRGKVLSYWCFSPGHSMHELVRQGVRSLILTSGTLAPVSSFALEMQIPFPVCLENPHIIDKHQIWVGVVPRGPDGAQLSSAFDRRFSEECLSSLGKALGNIARVVPYGLLIFFPSYPVMEKSLEFWRARDLARKMEALKPLFVEPRSKGSFSETISAYYARVAAPGSTGATFLAVCRGKASEGLDFSDTNGRGVIVTGLPYPPRMDPRVVLKMQFLDEMKGQGGAGGQFLSGQEWYRQQASRAVNQAIGRVIRHRQDYGAVFLCDHRFAFADARAQLPSWVRPHVRVYDNFGHVIRDVAQFFRVAERTMPAPAPRATAPSVRGEDAVSEAKSPGPFFSTRKAKSLDLHVPSLKQRSSGSPAAGDPESSLCVEYEQEPVPARQRPRGLLAALEHSEQRAGSPGEEQAHSCSTLSLLSEKRPAEEPRGGRKKIRLVSHPEEPVAGAQTDRAKLFMVAVKQELSQANFATFTQALQDYKGSDDFAALAACLGPLFAEDPKKHNLLQGFYQFVRPHHKQQFEEVCIQLTGRGCGYRPEHSIPRRQRAQPVLDPTENGAGSKLTCQGEPEWTQSPEQEATVARHPKGTWGTQGGLGAPAGKGRPGGTGYAPG

SEQ ID NO: 838134 - protein, 261 aa, Homo sapiens
MPKIVLNGVTVDFPFQPYKCQQEYMTKVLECLQQKVNGILESPTGTGKTLCLLCTTLAWREHLRDGISARKIAERAQGELFPDRALSSWGNAAAAAGDPIACYTDIPKIIYASRTHSQLTQVINELRNTSYRSLLRPGHVSVMLTSSDRRGSCVSPYSSRCRATLWVLETAPPRPTVLSPTRPKVCVLGSREQLCIHPEVKKQESNHLQIHLCRKKVASRSCHFYNNVEGTSSWVGPGSGWSVCSLSGWSSVVSQPGCACP

SEQ ID NO: 838135 - protein, 1219 aa, Homo sapiens; identical to SEQ ID NO: 838131

SEQ ID NO: 838136 - protein, 456 aa, Homo sapiens
MPKIVLNGVTVDFPFQPYKCQQEYMTKVLECLQQKVNGILESPTGTGKTLCLLCTTLAWREHLRDGISARKIAERAQGELFPDRALSSWGNAAAAAGDPIACYTDIPKIIYASRTHSQLTQVINELRNTSYRSLLRPGHVSVMLTSSDRRGSCVSPYSSRCRATLWVLETAPPRPTVLSPTRPKVCVLGSREQLCIHPEVKKQESNHLQIHLCRKKVASRSCHFYNNVEEKSLEQELASPILDIEDLVKSGSKHRVCPYYLSRNLKQQADIIFMPYNYLLDAKSRRAHNIDLKGTVVIFDEAHNVEKMCEESASFDLTPHDLASGLDVIDQVLEEQTKAAQQGEPHPEFSADSPSPGVRNVASVCLQIGYPTVASVPHSIINGYKRVLALSVETDYTFPLAEKVKAFLADPSAFVAAAPVAAATTAAPAAAAAPAKVEAKEESEESDEDMGFGLFD

SEQ ID NO: 838137 - protein, 40 aa, Homo sapiens
MPQARHMPSRGSPAPMGLATFSISRPIQSILLTVPLKIGV

SEQ ID NO: 838138 - protein, 1300 aa, Homo sapiens; identical to SEQ ID NO: 838130

SEQ ID NO: 838139 - protein, 1043 aa, Homo sapiens
MCEESASFDLTPHDLASGLDVIDQVLEEQTKAAQQGEPHPEFSADSPSPGLNMELEDIAKLKMILLRLEGAIDAVELPGDDSGVTKPGSYIFELFAEAQITFQTKGCILDSLDQIIQHLAGRAGVFTNTAGLQKLADIIQIVFSVDPSEGSPGSPAGLGALQSYKVHIHPDAGHRRTAQRSDAWSTTAARKRGKVLSYWCFSPGHSMHELVRQGVRSLILTSGTLAPVSSFALEMQIPFPVCLENPHIIDKHQIWVGVVPRGPDGAQLSSAFDRRFSEECLSSLGKALGNIARVVPYGLLIFFPSYPVMEKSLEFWRARDLARKMEALKPLFVEPRSKGSFSETISAYYARVAAPGSTGATFLAVCRGKASEGLDFSDTNGRGVIVTGLPYPPRMDPRVVLKMQFLDEMKGQGGAGGQFLSGQEWYRQQASRAVNQAIGRVIRHRQDYGAVFLCDHRFAFADARAQLPSWVRPHVRVYDNFGHVIRDVAQFFRVAERTMPAPAPRATAPSVRGEDAVSEAKSPGPFFSTRKAKSLDLHVPSLKQRSSGSPAAGDPESSLCVEYEQEPVPARQRPRGLLAALEHSEQRAGSPGEEQAHSCSTLSLLSEKRPAEEPRGGRKKIRLVSHPEEPVAGAQTDRAKLFMVAVKQELSQANFATFTQALQDYKGSDDFAALAACLGPLFAEDPKKHNLLQGFYQFVRPHHKQQFEEVCIQLTGRGCGYRPEHSIPRRQRAQPVLDPTGRTAPDPKLTVSTAAAQQLDPQEHLNQGRPHLSPRPPPTGDPGSQPQWGSGVPRAGKQGQHAVSAYLADARRALGSAGCSQLLAALTAYKQDDDLDKVLAVLAALTTAKPEDFPLLHRFSMFVRPHHKQRFSQTCTDLTGRPYPGMEPPGPQEERLAVPPVLTHRAPQPGPSRSEKTGKTQSKISSFLRQRPAGTVGAGGEDAGPSQSSGPPHGPAASEWGEPHGRDIAGQQATGAPGGPLSAGCVCQGCGAEDVVPFQCPACDFQRCQACWQRHLQASRMCPACHTASRKQSVMQVFWPEPQ

SEQ ID NO: 838140 - protein, 545 aa, Homo sapiens; identical to SEQ ID NO: 838123

SEQ ID NO: 838141 - protein, 1219 aa, Homo sapiens; identical to SEQ ID NO: 838131

SEQ ID NO: 838142 - protein, 1318 aa, Homo sapiens
MPKIVLNGVTVDFPFQPYKCQQEYMTKVLECLQQKVNGILESPTGTGKTLCLLCTTLAWREHLRDGISARKIAERAQGELFPDRALSSWGNAAAAAGDPIACYTDIPKIIYASRTHSQLTQVINELRNTSYRPKVCVLGSREQLCIHPEVKKQESNHLQIHLCRKKVASRSCHFYNNVEEKSLEQELASPILDIEDLVKSGSKHRVCPYYLSRNLKQQADIIFMPYNYLLDAKSRRAHNIDLKGTVVIFDEAHNVEKMCEESASFDLTPHDLASGLDVIDQVLEEQTKAAQQGEPHPEFSADSPSPGLNMELEDIAKLKMILLRLEGAIDAVELPGDDSGVTKPGSYIFELFAEAQITFQTKGCILDSLDQIIQHLAGRAGVFTNTAGLQKLADIIQIVFSVDPSEGSPGSPAGLGALQSYKVHIHPDAGHRRTAQRSDAWSTTAARKRGKVLSYWCFSPGHSMHELVRQGVRSLILTSGTLAPVSSFALEMQIPFPVCLENPHIIDKHQIWVGVVPRGPDGAQLSSAFDRRFSEECLSSLGKALGNIARVVPYGLLIFFPSYPVMEKSLEFWRARDLARKMEALKPLFVEPRSKGSFSETISAYYARVAAPGSTGATFLAVCRGKASEGLDFSDTNGRGVIVTGLPYPPRMDPRVVLKMQFLDEMKGQGGAGGQFLSGQEWYRQQASRAVNQAIGRVIRHRQDYGAVFLCDHRFAFADARAQLPSWVRPHVRVYDNFGHVIRDVAQFFRVAERTMPAPAPRATAPSVRGEDAVSEAKSPGPFFSTRKAKSLDLHVPSLKQRSSGSPAAGDPESSLCVEYEQEPVPARQRPRGLLAALEHSEQRAGSPGEEQAHSCSTLSLLSEKRPAEEPRGGRKKIRLVSHPEEPVAGAQTDRAKLFMVAVKQELSQANFATFTQALQDYKGSDDFAALAACLGPLFAEDPKKHNLLQGFYQFVRPHHKQQFEEVCIQLTGRGCGYRPEHSIPRRQRAQPVLDPTGNFPDALDQLLWLYISSSGRTAPDPKLTVSTAAAQQLDPQEHLNQGRPHLSPRPPPTGDPGSQPQWGSGVPRAGKQGQHAVSAYLADARRALGSAGCSQLLAALTAYKQDDDLDKVLAVLAALTTAKPEDFPLLHRFSMFVRPHHKQRFSQTCTDLTGRPYPGMEPPGPQEERLAVPPVLTHRAPQPGPSRSEKTGKTQSKISSFLRQRPAGTVGAGGEDAGPSQSSGPPHGPAASEWGEPHGRDIAGQQATGAPGGPLSAGCVCQGCGAEDVVPFQCPACDFQRCQACWQRHLQASRMCPACHTASRKQSVMQVFWPEPQ

SEQ ID NO: 838143 - protein, 727 aa, Homo sapiens
MPKIVLNGVTVDFPFQPYKCQQEYMTKVLECLQQKVNGILESPTGTGKTLCLLCTTLAWREHLRDGISARKIAERAQGELFPDRALSSWGNAAAAAGDPIACYTDIPKIIYASRTHSQLTQVINELRNTSYRPKVCVLGSREQLCIHPEVKKQESNHLQIHLCRKKVASRSCHFYNNVEEKSLEQELASPILDIEDLVKSGSKHRVCPYYLSRNLKQQADIIFMPYNYLLDAKSRRAHNIDLKGTVVIFDEAHNVEKMCEESASFDLTPHDLASGLDVIDQVLEEQTKAAQQGEPHPEFSADSPSPGLNMELEDIAKLKMILLRLEGAIDAVELPGDDSGVTKPGSYIFELFAEAQITFQTKGCILDSLDQIIQHLAGRAGVFTNTAGLQKLADIIQIVFSVDPSEGSPGSPAGLGALQSYKVHIHPDAGHRRTAQRSDAWSTTAARKRGKVLSYWCFSPGHSMHELVRQGVRSLILTSGTLAPVSSFALEMQMYGPPLPGPEHRDTSDISGVEVVGVPMSRVLGVSGLEGYRGAGALPHCLLPLATLSPFPVCLENPHIIDKHQIWVGVVPRGPDGAQLSSAFDRRFSEECLSSLGKALGNIARVVPYGLLIFFPSYPVMEKSLEFWRARDLARKMEALKPLFVEPRSKGSFSEVGTWPGLWACCPLVPPLPLTASPRLTTGPDHGLRRLPLPLQGSCVSFLALSVASYLTKPPAPGGCGNSGPPV

SEQ ID NO: 838144 - protein, 111 aa, Homo sapiens
MSRWCDLDRTKLWHCHRGVLCPPPPTSILAQGSLGPSSLCVQVLWDPRVCGWGLCVVVSCVLLRPTAAPPCPSCLRRGRQKNREEGGRRSGWSATRCVSCPCTCADHHRHA

SEQ ID NO: 838145 - protein, 367 aa, Homo sapiens
MASELCKTISVARLEKHKNLFLNYRNLHHFPLELLKDEGLQYLERLYMKRNSLTSLPENLAQKLPNLVELYLHSNNIVVVPEAIGSLVKLQCLDLSDNALEIVCPEIGRLRALRHLRLANNQLQFLPPEVGDLKELQTLDISTNRLLTLPERLHMCLSLQYLTVDRNRLWYVPRHLCQLPSLNELSMAGNRLAFLPLDLGRSRELQYVYVDNNIHLKGLPSYLYNKVIGCSGCGAPIQVSEVKLLSFSSGQRTVFLPAEVKAIGTEHDHVLPLQELAMRGLYHTYHSLLKDLNFLSPISLPRSLLELLHCPLGHCHRCSEPMFTIVYPKLFPLRETPMAGLHQWKTTVSFVAYCCSTQCLQTFDLLS

SEQ ID NO: 838146 - protein, 353 aa, Homo sapiens
SGTVRNSRDALALLALRNGPILTRYSAAACLMGYIQSWRPNFPENLAQKLPNLVELYLHSNNIVVVPEAIGSLVKLQCLDLSDNALEIVCPEIGRLRALRHLRLANNQLQFLPPEVGDLKELQTLDISTNRLLTLPERLHMCLSLQYLTVDRNRLWYVPRHLCQLPSLNELSMAGNRLAFLPLDLGRSRELQYVYVDNNIHLKGLPSYLYNKVIGCSGCGAPIQVSEVKLLSFSSGQRTVFLPAEVKAIGTEHDHVLPLQELAMRGLYHTYHSLLKDLNFLSPISLPRSLLELLHCPLGHCHRCSEPMFTIVYPKLFPLRETPMAGLHQWKTTVSFVAYCCSTQCLQTFDLLS

SEQ ID NO: 838147 - protein, 213 aa, Homo sapiens
MCLSLQYLTVDRNRLWYVPRHLCQLPSLNELSMAGNRLAFLPLDLGRSRELQYVYVDNNIHLKGLPSYLYNKVIGCSGCGAPIQVSEVKLLSFSSGQRTVFLPAEVKAIGTEHDHVLPLQELAMRGLYHTYHSLLKDLNFLSPISLPRSLLELLHCPLGHCHRCSEPMFTIVYPKLFPLRETPMAGLHQWKTTVSFVAYCCSTQCLQTFDLLS

SEQ ID NO: 838148 - protein, 151 aa, Homo sapiens
MASELCKTISVARLEKHKNLFLNYRNLHHFPLELLKDEGLQYLERLYMKRNSLTSLPENLAQKLPNLVELYLHSNNIVVVPEAIGSLVKLQCLDLSDNALEIVCPEIGRLRALRHLRLANNQLQFLPPVPHCGPKSSMVCAAPSLPAAQPQ

SEQ ID NO: 838149 - protein, 312 aa, Homo sapiens
MASELCKTISVARLEKHKNLFLNYRNLHHFPLELLKDEGLQYLERLYMKRNSLTSLPENLAQKLPNLVELYLHSNNIVVVPEAIGSLVKLQCLDLSDNALEIVCPEIGRLRALRHLRLANNQLQFLPPEVGDLKELQTLDISTNRLLTLPERLHMCLSLQYLTVDRNRLWYVPRHLCQLPSLNELSMAGNRLAFLPLDLGRSRELQYVYVDNNIHLKGLPSYLYNKVIGCSGCGAPIQVSEVKLLSFSSGQRTVFLPAEVKAIGTEHDHVLPLQELAMRGLYHTYHSLLKGRQLLVLWLTAAPPSVCRLLTC

SEQ ID NO: 838150 - protein, 247 aa, Homo sapiens
MASELCKTISVARLEKHKNLFLNYRNLHHFPLELLKDEGLQYLERLYMKRNSLTSLPENLAQKLPNLVELYLHSNNIVVVPEAIGSLVKLQCLDLSDNALEIVCPEIGRLRALRHLRLANNQLQFLPPEVGDLKELQTLDISTNRLLTLPERLHMCLSLQYLTVDRNRLWYVPRHLCQLPSLNELSMAGNRLAFLPLDLGRSRELQYVYVDNNIHLKGLPSYLYNKVIGCSGSTLFTVGGDYMESDH

SEQ ID NO: 838151 - protein, 367 aa, Homo sapiens; identical to SEQ ID NO: 838145

SEQ ID NO: 838152 - protein, 373 aa, Homo sapiens
MASELCKTISVARLEKHKNLFLNYRNLHHFPLELLKDEGLQYLERLYMKRNSLTSLPENLAQKLPNLVELWVCLFKYLHSNNIVVVPEAIGSLVKLQCLDLSDNALEIVCPEIGRLRALRHLRLANNQLQFLPPEVGDLKELQTLDISTNRLLTLPERLHMCLSLQYLTVDRNRLWYVPRHLCQLPSLNELSMAGNRLAFLPLDLGRSRELQYVYVDNNIHLKGLPSYLYNKVIGCSGCGAPIQVSEVKLLSFSSGQRTVFLPAEVKAIGTEHDHVLPLQELAMRGLYHTYHSLLKDLNFLSPISLPRSLLELLHCPLGHCHRCSEPMFTIVYPKLFPLRETPMAGLHQWKTTVSFVAYCCSTQCLQTFDLLS

SEQ ID NO: 838153 - protein, 263 aa, Homo sapiens
MASELCKTISVARLEKHKNLFLNYRNLHHFPLELLKDEGLQYLERLYMKRNSLTSLYLTVDRNRLWYVPRHLCQLPSLNELSMAGNRLAFLPLDLGRSRELQYVYVDNNIHLKGLPSYLYNKVIGCSGCGAPIQVSEVKLLSFSSGQRTVFLPAEVKAIGTEHDHVLPLQELAMRGLYHTYHSLLKDLNFLSPISLPRSLLELLHCPLGHCHRCSEPMFTIVYPKLFPLRETPMAGLHQWKTTVSFVAYCCSTQCLQTFDLLS

SEQ ID NO: 838154 - protein, 289 aa, Homo sapiens
MASELCKTISVARLEKHKNLFLNYRNLHHFPLELLKDEGLQYLERLYMKRNSLTSLPENLAQKLPNLVELYLHSNNIVVVPEAIGSLVKLQCLDLSDNALEIVCPEIGRLRALRHLRLANNQLQFLPPEVGDLKELQTLDISTNRLLTLPERLHMCLSLQYLTVDRNRLWYVPRHLCQLPSLNELSMAGNRLAFLPLDLGRSRELQYVYVDNNIHLKGLPSYLYNKVIGCSGCGAPIQVSEVKLLSFSSGIGYERAVSYLPQLAERKTTVSFVAYCCSTQCLQTFDLLS

SEQ ID NO: 838155 - protein, 473 aa, Homo sapiens
MRAGPGPTVTLALVLAVAWAMELKPTAPPIFTGRPFVVAWDVPTQDCGPRLKVPLDLNAFDVQASPNEGFVNQNITIFYRDRLGLYPRFDSAGRSVHGGVPQNVSLWAHRKMLQKRVEHYIRTQESAGLAVIDWEDWRPVWVRNWQDKDVYRRLSRQLVASRHPDWPPDRIVKQAQYEFEFAAQQFMLETLRYVKAVRPRHLWGFYLFPDCYNHDYVQNWESYTGRCPDVEVARNDQLAWLWAESTALFPSVYLDETLASSRHGRNFVSFRVQEALRVARTHHANHALPVYVFTRPTYSRRLTGLSEMDLISTIGESAALGAAGVILWGDAGYTTSTETCQYLKDYLTRLLVPYVVNVSWATQYCSRAQCHGHGRCVRRNPSASTFLHLSTNSFRLVPGHAPGEPQLRPVGELSWADIDHLQTHFRCQCYLGWSGEQCQWDHRQAAGGASEAWAGSHLTSLLALAALAFTWTL

SEQ ID NO: 838156 - protein, 520 aa, Homo sapiens
GGVPVRRIRVARRASSLSWCQVQGNTLRGEAHQAVLGHGRRAANCVSIEALAARSADTWRTLRGLNVTIKRTSPYFTGRRFTSRGVTVPIVSCCSQSYQVPLDLNAFDVQASPNEGFVNQNITIFYRDRLGLYPRFDSAGRSVHGGVPQNVSLWAHRKMLQKRVEHYIRTQESAGLAVIDWEDWRPVWVRNWQDKDVYRRLSRQLVASRHPDWPPDRIVKQAQYEFEFAAQQFMLETLRYVKAVRPRHLWGFYLFPDCYNHDYVQNWESYTGRCPDVEVARNDQLAWLWAESTALFPSVYLDETLASSRHGRNFVSFRVQEALRVARTHHANHALPVYVFTRPTYSRRLTGLSEMDLISTIGESAALGAAGVILWGDAGYTTSTETCQYLKDYLTRLLVPYVVNVSWATQYCSRAQCHGHGRCVRRNPSASTFLHLSTNSFRLVPGHAPGEPQLRPVGELSWADIDHLQTHFRCQCYLGWSGEQCQWDHRQAAGGASEAWAGSHLTSLLALAALAFTWTL

SEQ ID NO: 838157 - protein, 382 aa, Homo sapiens
MRAGPGPTVTLALVLAVAWAMELKPTAPPIFTGRPFVVAWDVPTQDCGPRLKVPLDLNAFDVQASPNEGFVNQNITIFYRDRLGLYPRFDSAGRSVHGGVPQNVSLWAHRKMLQKRVEHYIRTQESAGLAVIDWEDWRPVWVRNWQDKDVYRRLSRQLVASRHPDWPPDRIVKQAQYEFEFAAQQFMLETLRYVKAVRPRHLWGFYLFPDCYNHDYVQNWESYTGRCPDVEVARNDQLAWLWAESTETCQYLKDYLTRLLVPYVVNVSWATQYCSRAQCHGHGRCVRRNPSASTFLHLSTNSFRLVPGHAPGEPQLRPVGELSWADIDHLQTHFRCQCYLGWSGEQCQWDHRQAAGGASEAWAGSHLTSLLALAALAFTWTL

SEQ ID NO: 838158 - protein, 473 aa, Homo sapiens; identical to SEQ ID NO: 838155

SEQ ID NO: 838159 - protein, 473 aa, Homo sapiens; identical to SEQ ID NO: 838155

SEQ ID NO: 838160 - protein, 277 aa, Homo sapiens
MRAGPGPTVTLALVLAVAWAMELKPTAPPIFTGRPFVVAWDVPTQDCGPRLKVPLDLNAFDVQASPNEGFVNQNITIFYRDRLGLYPRFDSAGRSVHGGVPQNVSLWAHRKMLQKRVEHYIRTQESAGLAVIDWEDWRPVWVRNWQDKDVYRRLSRQLVASRHPDWPPDRIVKQAQYEFEFAAQQFMLETLRYVKAVRPRHLWGFYLFPDCYNHDYVQNWESYTGRCPDVEVARNDQLAWLWAESTALFPSVYLDETLASSRHGLYLDLVGVSCLAA

SEQ ID NO: 838161 - protein, 473 aa, Homo sapiens; identical to SEQ ID NO: 838155

SEQ ID NO: 838162 - protein, 499 aa, Homo sapiens
MRAGPGPTVTLALVLAVAWAMELKPTAPPIFTGRPFVVAWDVPTQDCGPRLKVPLDLNAFDVQASPNEGFVNQNITIFYRDRLGLYPRFDSAGRSVHGGVPQNVSLWAHRKMLQKRVEHYIRTQESAGLAVIDWEDWRPVWVPLDLNAFDVQASPNEGFVNQNITIFYRNWQDKDVYRRLSRQLVASRHPDWPPDRIVKQAQYEFEFAAQQFMLETLRYVKAVRPRHLWGFYLFPDCYNHDYVQNWESYTGRCPDVEVARNDQLAWLWAESTALFPSVYLDETLASSRHGRNFVSFRVQEALRVARTHHANHALPVYVFTRPTYSRRLTGLSEMDLISTIGESAALGAAGVILWGDAGYTTSTETCQYLKDYLTRLLVPYVVNVSWATQYCSRAQCHGHGRCVRRNPSASTFLHLSTNSFRLVPGHAPGEPQLRPVGELSWADIDHLQTHFRCQCYLGWSGEQCQWDHRQAAGGASEAWAGSHLTSLLALAALAFTWTL

SEQ ID NO: 838163 - protein, 293 aa, Homo sapiens
LIRRVRGWVVMRYVKAVRPRHLWGFYLFPDCYNHDYVQNWESYTGRCPDVEVARNDQLAWLWAESTALFPSVYLDETLASSRHGRNFVSFRVQEALRVARTHHANHALPVYVFTRPTYSRRLTGLSEMDLISTIGESAALGAAGVILWGDAGYTTSTETCQYLKDYLTRLLVPYVVNVSWATQYCSRAQCHGHGRCVRRNPSASTFLHLSTNSFRLVPGHAPGEPQLRPVGELSWADIDHLQTHFRCQCYLGWSGEQCQWDHRQAAGGASEAWAGSHLTSLLALAALAFTWTL

SEQ ID NO: 838164 - protein, 473 aa, Homo sapiens; identical to SEQ ID NO: 838155

SEQ ID NO: 838165 - protein, 78 aa, Homo sapiens
MKSLKNNRGGADGEPESEKGNSGKSGYKRKPGARNQGERTLHQINKRPGGTTESSRKKFKREPQEQQGTTKGSQGGRN

SEQ ID NO: 838166 - protein, 189 aa, Homo sapiens
GKSATGNSILGSLVFTSRLRAQPVTKTSQSGRRTWDGQEVVVVDTPSFNQMLDVEKDPSRLEEEVKRCLSCCEKGDTFFVLVFQLGRFTEEDKTAVAKLEAIFGADFTKYAIMLFTRKEDLGAGNLEDFMKNSDNKALRRIFKKCGRRVCAFNNKETGQAQETQVKALLTKVNDLRKESGWSGYPHTQE

SEQ ID NO: 838167 - protein, 309 aa, Homo sapiens
MDEKVFTKELDQWIEQLNECKQLSESQVKSLCEKAKEILTKESNVQEVRCPVTVCGDVHGQFHDLMELFRIGGKSPDTNYLFMGDYVDRGYYSVETVTLLVALKVRYRERITILRGNHESRQITQVYGFYDECLRKYGNANVWKYFTDLFDYLPLTALVDGQIFCLHGGLSPSIDTLDHIRALDRLQEVPHEGPMCDLLWSDPDDRGGWGISPRGAGYTFGQDISETFNHANGLTLVSRAHQLVMEGYNWCHDRNVVTIFSAPNYCYRCGNQAAIMELDDTLKYSFLQFDPAPRRGEPHVTRRTPDYFL

SEQ ID NO: 838168 - protein, 309 aa, Homo sapiens; identical to SEQ ID NO: 838167

SEQ ID NO: 838169 - protein, 309 aa, Homo sapiens; identical to SEQ ID NO: 838167

SEQ ID NO: 838170 - protein, 309 aa, Homo sapiens; identical to SEQ ID NO: 838167

SEQ ID NO: 838171 - protein, 454 aa, Homo sapiens
SILPFPHHPALREPRPKSQGASVTSRLRRACALTPSLRPNSGRAAARGGLCSCAACSPALFPSAPRRLLTPGVTSPRPAAAITESRALEPQRAEEEAQRPTAEYCGESQRASASLNSRQKYTRNRRRRVRVGPCAGGGAGGARSGSRLGRVASWTRRCSPRSWTSGSLSESQVKSLCEKAKEILTKESNVQEVRCPVTVCGDVHGQFHDLMELFRIGGKSPDTNYLFMGDYVDRGYYSVETVTLLVALKVRYRERITILRGNHESRQITQVYGFYDECLRKYGNANVWKYFTDLFDYLPLTALVDGQIFCLHGGLSPSIDTLDHIRALDRLQEVPHEGPMCDLLWSDPDDRGGWGISPRGAGYTFGQDISETFNHANGLTLVSRAHQLVMEGYNWCHDRNVVTIFSAPNYCYRCGNQAAIMELDDTLKYSFLQFDPAPRRGEPHVTRRTPDYFL

SEQ ID NO: 838172 - protein, 292 aa, Homo sapiens
EIPEAWAGSQVKSLCEKAKEILTKESNVQEVRCPVTVCGDVHGQFHDLMELFRIGGKSPDTNYLFMGDYVDRGYYSVETVTLLVALKVRYRERITILRGNHESRQITQVYGFYDECLRKYGNANVWKYFTDLFDYLPLTALVDGQIFCLHGGLSPSIDTLDHIRALDRLQEVPHEGPMCDLLWSDPDDRGGWGISPRGAGYTFGQDISETFNHANGLTLVSRAHQLVMEGYNWCHDRNVVTIFSAPNYCYRCGNQAAIMELDDTLKYSFLQFDPAPRRGEPHVTRRTPDYFL

SEQ ID NO: 838173 - protein, 244 aa, Homo sapiens
MELFRIGGKSPDTNYLFMGDYVDRGYYSVETVTLLVALKVRYRERITILRGNHESRQITQVYGFYDECLRKYGNANVWKYFTDLFDYLPLTALVDGQIFCLHGGLSPSIDTLDHIRALDRLQEVPHEGPMCDLLWSDPDDRGGWGISPRGAGYTFGQDISETFNHANGLTLVSRAHQLVMEGYNWCHDRNVVTIFSAPNYCYRCGNQAAIMELDDTLKYSFLQFDPAPRRGEPHVTRRTPDYFL

SEQ ID NO: 838174 - protein, 309 aa, Homo sapiens; identical to SEQ ID NO: 838167

SEQ ID NO: 838175 - protein, 309 aa, Homo sapiens; identical to SEQ ID NO: 838167

SEQ ID NO: 838176 - protein, 286 aa, Homo sapiens
MDEKVFTKELDQWIEQLNECKQLSESQVKSLCEKAKEILTKESNVQEVRCPVTVCGDVHGQFHDLMELFRIGGKSPDTNYLFMGDYVDRGYYSVETVTLLVALKVRYRERITILRGNHESRQITQVYGFYDECLRKYGNANVWKYFTDLFDYLPLTALVDGQIFCLHGGLSPSIDTLDHIRALDRLQEVPHEGPMCDLLWSDPDDRGGWGISPRGAGYTFGQDISETFNHANGLTLVSRAHQLVMEGYNWCHDRNVVTIFSAPNYCYRCGNQAANSNWGKTFGTIL

SEQ ID NO: 838177 - protein, 309 aa, Homo sapiens; identical to SEQ ID NO: 838167

SEQ ID NO: 838178 - protein, 309 aa, Homo sapiens; identical to SEQ ID NO: 838167

SEQ ID NO: 838179 - protein, 474 aa, Homo sapiens
  misc_feature (173)..(173): Xaa can be any naturally occurring amino acid
SILPFPHHPALREPRPKSQGASVTSRLRRACALTPSLRPNSGRAAARGGLCSCAACSPALFPSAPRRLLTPGVTSPRPAAAITESRALEPQRAEEEAQRPTAEYCGESQRASASLNSRQKYTRNRRRRVRVGPCAGGGAGGARSGSRLGRVASWTRRCSPRSWTSGSHSEPGXWEKPGKGLGPKGQAVSESQVKSLCEKAKEILTKESNVQEVRCPVTVCGDVHGQFHDLMELFRIGGKSPDTNYLFMGDYVDRGYYSVETVTLLVALKVRYRERITILRGNHESRQITQVYGFYDECLRKYGNANVWKYFTDLFDYLPLTALVDGQIFCLHGGLSPSIDTLDHIRALDRLQEVPHEGPMCDLLWSDPDDRGGWGISPRGAGYTFGQDISETFNHANGLTLVSRAHQLVMEGYNWCHDRNVVTIFSAPNYCYRCGNQAAIMELDDTLKYSFLQFDPAPRRGEPHVTRRTPDYFL

SEQ ID NO: 838180 - protein, 309 aa, Homo sapiens; identical to SEQ ID NO: 838167

SEQ ID NO: 838181 - protein, 309 aa, Homo sapiens; identical to SEQ ID NO: 838167

SEQ ID NO: 838182 - protein, 219 aa, Homo sapiens
FFLAAAELTQLLQIHSSSTSRFRSSLRSYFTVTFPYSVWGISEIPHTEYIVEEDSYEKDYGCGCLREEILDGIFCLHGGLSPSIDTLDHIRALDRLQEVPHEGPMCDLLWSDPDDRGGWGISPRGAGYTFGQDISETFNHANGLTLVSRAHQLVMEGYNWCHDRNVVTIFSAPNYCYRCGNQAAIMELDDTLKYSFLQFDPAPRRGEPHVTRRTPDYFL

SEQ ID NO: 838183 - protein, 139 aa, Homo sapiens
AVRLERREIADHGVATCKPTLAGPMCDLLWSDPDDRGGWGISPRGAGYTFGQDISETFNHANGLTLVSRAHQLVMEGYNWCHDRNVVTIFSAPNYCYRCGNQAAIMELDDTLKYSFLQFDPAPRRGEPHVTRRTPDYFL

SEQ ID NO: 838184 - protein, 251 aa, Homo sapiens
MDEKVFTKELDQWIEQLNECKQLSESQVKSLCEKAKEILTKESNVQEVRCPVTVCGDVHGQFHDLMELFRIGGKSPDTNYLFMGDYVDRGYYSVETVTLLVALKVRYRERITILRGNHESRQITQVYGFYDECLRKYGNANVWKYFTDLFDYLPLTALVDGQIFCLHGGLSPSIDTLDHIRALDRLQEVPHEGPMCDLLWSDPDDRGGWGISPRGAGYTFGQDISETFNHANGLTLVSRAHQLVMEVCCVL

SEQ ID NO: 838185 - protein, 104 aa, Homo sapiens
NRNCDQIKENHIKQIQKNLLPQCSSLVFYNVALLYFIFMENHRGLGGVAGGSSPSSQLFFFPSNPTLSLLTPASRFHSLTATFSHPYQHLLTPPPSTQPPPLLR

SEQ ID NO: 838186 - protein, 746 aa, Homo sapiens
MQAKKRYFILLSAGSCLALLFYFGGLQFRASRSHSRREEHSGRNGLHHPSPDHFWPRFPDALRPFVPWDQLENEDSSVHISPRQKRDANSSIYKGKKCRMESCFDFTLCKKNGFKVYVYPQQKGEKIAESYQNILAAIEGSRFYTSDPSQACLFVLSLDTLDRDQLSPQYVHNLRSKVQSLHLWNNGRNHLIFNLYSGTWPDYTEDVGFDIGQAMLAKASISTENFRPNFDVSIPLFSKDHPRTGGERGFLKFNTIPPLRKYMLVFKGKRYLTGIGSDTRNALYHVHNGEDVVLLTTCKHGKDWQKHKDSRCDRDNTEYEKYDYREMLHNATFCLVPRGRRLGSFRFLEALQAACVPVMLSNGWELPFSEVINWNQAAVIGDERLLLQIPSTIRSIHQDKILALRQQTQFLWEAYFSSVEKIVLTTLEIIQDRIFKHISRNSLIWNKHPGGLFVLPQYSSYLGDFPYYYANLGLKPPSKFTAVIHAVTPLVSQSQPVLKLLVAAAKSQYCAQIIVLWNCDKPLPAKHRWPATAVPVVVIEGESKVMSSRFLPYDNIITDAVLSLDEDTVLSTTEVDFAFTVWQSFPERIVGYPARSHFWDNSKERWGYTSKWTNDYSMVLTGAAIYHKYYHYLYSHYLPASLKNMVDQLANCEDILMNFLVSAVTKLPPIKVTQKKQYKETMMGQTSRASRWADPDHFAQRQSCMNTFASWFGYMPLIHSQMRLDPVLFKDQVSILRKKYRDIERL

SEQ ID NO: 838187 - protein, 323 aa, Homo sapiens
MQAKKRYFILLSAGSCLALLFYFGGLQFRASRSHSRREEHSGRNGLHHPSPDHFWPRFPDALRPFVPWDQLENEDSSVHISPRQKRDANSSIYKGKKCRMESCFDFTLCKKNGFKVYVYPQQKGEKIAESYQNILAAIEGSRFYTSDPSQACLFVLSLDTLDRDQLSPQYVHNLRSKVQSLHLWNNGRNHLIFNLYSGTWPDYTEDVGFDIGQAMLAKASISTENFRPNFDVSIPLFSKDHPRTGGERGFLKFNTIPPLRKYMLVFKGKRYLTGIGSDTRNALYHVHNGEDVVLLTTCKHGKDWQKHKDSRCGLQNKAPLESA

SEQ ID NO: 838188 - protein, 746 aa, Homo sapiens; identical to SEQ ID NO: 838186

SEQ ID NO: 838189 - protein, 501 aa, Homo sapiens
MNLEQERPSVCSAPGCSQRFPTEDHLMIHRHKHEMTLKFPSIKTDNMLSDQTPTPTRFLKNCEEVGLFSELDCSLEHEFRKAQEEESSKRNISMHNAVGGAMTGPGTHQLSSARLPNHDTNVVIQQAMPSPQSSSVITQAPSTNRQIGPVPGSLSSLLHLHNRQRQPMPASMPGTLPNPTMPGSSAVLMPMERQMSVNSSIMGMQGPNLSNPCASPQVQPMHSEAKMRLKAALTHHPAAMSNGNMNTMGHMMEMMGSRQDQTPHHHMHSHPHQHQTLPPHHPYPHQHQHPAHHPHPQPHHQQNHPHHHSHSHLHAHPAHHQTSPHPPLHTGNQAQVSPATQQMQPTQTIQPPQPTGGRRRRVVDEDPDERRRKFLERNRAAATRCRQKRKVWVMSLEKKAEELTQTNMQLQNEVSMLKNEVAQLKQLLLTHKDCPITAMQKESQGYLSPESSPPASPVPACSQQQVIQHNTITTSSSVSEVVGSSTLSQLTTHRTDLNPIL

SEQ ID NO: 838190 - protein, 357 aa, Homo sapiens
MSMRPVPGSLSSLLHLHNRQRQPMPASMPGTLPNPTMPGSSAVLMPMERQMSVNSSIMGMQGPNLSNPCASPQVQPMHSEAKMRLKAALTHHPAAMSNGNMNTMGHMMEMMGSRQDQTPHHHMHSHPHQHQTLPPHHPYPHQHQHPAHHPHPQPHHQQNHPHHHSHSHLHAHPAHHQTSPHPPLHTGNQAQVSPATQQMQPTQTIQPPQPTGGRRRRVVDEDPDERRRKFLERNRAAATRCRQKRKVWVMSLEKKAEELTQTNMQLQNEVSMLKNEVAQLKQLLLTHKDCPITAMQKESQGYLSPESSPPASPVPACSQQQVIQHNTITTSSSVSEVVGSSTLSQLTTHRTDLNPIL

SEQ ID NO: 838191 - protein, 475 aa, Homo sapiens
MIHRHKHEMTLKFPSIKTDNMLSDQTPTPTRFLKNCEEVGLFSELDCSLEHEFRKAQEEESSKRNISMHNAVGGAMTGPGTHQLSSARLPNHDTNVVIQQAMPSPQSSSVITQAPSTNRQIGPVPGSLSSLLHLHNRQRQPMPASMPGTLPNPTMPGSSAVLMPMERQMSVNSSIMGMQGPNLSNPCASPQVQPMHSEAKMRLKAALTHHPAAMSNGNMNTMGHMMEMMGSRQDQTPHHHMHSHPHQHQTLPPHHPYPHQHQHPAHHPHPQPHHQQNHPHHHSHSHLHAHPAHHQTSPHPPLHTGNQAQVSPATQQMQPTQTIQPPQPTGGRRRRVVDEDPDERRRKFLERNRAAATRCRQKRKVWVMSLEKKAEELTQTNMQLQNEVSMLKNEVAQLKQLLLTHKDCPITAMQKESQGYLSPESSPPASPVPACSQQQVIQHNTITTSSSVSEVVGSSTLSQLTTHRTDLNPIL

SEQ ID NO: 838192 - protein, 334 aa, Homo sapiens
MPASMPGTLPNPTMPGSSAVLMPMERQMSVNSSIMGMQGPNLSNPCASPQVQPMHSEAKMRLKAALTHHPAAMSNGNMNTMGHMMEMMGSRQDQTPHHHMHSHPHQHQTLPPHHPYPHQHQHPAHHPHPQPHHQQNHPHHHSHSHLHAHPAHHQTSPHPPLHTGNQAQVSPATQQMQPTQTIQPPQPTGGRRRRVVDEDPDERRRKFLERNRAAATRCRQKRKVWVMSLEKKAEELTQTNMQLQNEVSMLKNEVAQLKQLLLTHKDCPITAMQKESQGYLSPESSPPASPVPACSQQQVIQHNTITTSSSVSEVVGSSTLSQLTTHRTDLNPIL

SEQ ID NO: 838193 - protein, 508 aa, Homo sapiens
MIYEESKMNLEQERPSVCSAPGCSQRFPTEDHLMIHRHKHEMTLKFPSIKTDNMLSDQTPTPTRFLKNCEEVGLFSELDCSLEHEFRKAQEEESSKRNISMHNAVGGAMTGPGTHQLSSARLPNHDTNVVIQQAMPSPQSSSVITQAPSTNRQIGPVPGSLSSLLHLHNRQRQPMPASMPGTLPNPTMPGSSAVLMPMERQMSVNSSIMGMQGPNLSNPCASPQVQPMHSEAKMRLKAALTHHPAAMSNGNMNTMGHMMEMMGSRQDQTPHHHMHSHPHQHQTLPPHHPYPHQHQHPAHHPHPQPHHQQNHPHHHSHSHLHAHPAHHQTSPHPPLHTGNQAQVSPATQQMQPTQTIQPPQPTGGRRRRVVDEDPDERRRKFLERNRAAATRCRQKRKVWVMSLEKKAEELTQTNMQLQNEVSMLKNEVAQLKQLLLTHKDCPITAMQKESQGYLSPESSPPASPVPACSQQQVIQHNTITTSSSVSEVVGSSTLSQLTTHRTDLNPIL

SEQ ID NO: 838194 - protein, 334 aa, Homo sapiens; identical to SEQ ID NO: 838192

SEQ ID NO: 838195 - protein, 131 aa, Homo sapiens
MDFQQLADVAEKWCSNTPFELIATEETERRMDFYADPGVSFYVLCPDNGCGDNFHVWSESEDCLPFLQLAQDYISSCGKKTLHEVLEKVFKSFRPLLGLPDADDDAFEEYSADVEEEEPEADHPQMGVSQQ

SEQ ID NO: 838196 - protein, 79 aa, Homo sapiens
QARLTSQLKELEKQEQTYSKASRRQEITKITAELKEIETQKALQQISESRSWFFEKINKIDRLGLPGVNLVVLTSTPLT

SEQ ID NO: 838197 - protein, 84 aa, Homo sapiens
ALPVVLVVIRVGSSIESQAPAMAHSRARGCVVDAAVTTHPHLHVLTIPGELPQTVFLVRSTWPGDLTKPSHFSQFSDNRYDTRS

SEQ ID NO: 838198 - protein, 131 aa, Homo sapiens; identical to SEQ ID NO: 838195

SEQ ID NO: 838199 - protein, 736 aa, Homo sapiens
IQQLSPKEQRAFELKLKEIKEQHKNFEDFYSFMIMKTNFNKEYIENVVRNILKGQNIFTKEAKLFSFLALLNSYVPDTTISLSQCEKFLGIGNKKAFWGTEKFEDKMGTYSTILIKTEVIECGNYCGVRIIHSLIAEFSLEELKKSYHLNKSQIMLDMLTENLFFDTGMGKSKFLQDMHTLLLTRHRDEHEGETGNWFSPFIEALHKDEGNEAVEAVLLESIHRFNPNAFICQALARHFYIKKKDFGNALNWAKQAKIIEPDNSYISDTLGQVYKSKIRWWIEENGGNGNISVDDLIALLDLAEHASSAFKESQQQSEDREYEVKERLYPKSKRRYDTYNIAGYQGEIEVGLYTIQILQLIPFFDNKNELSKRYMVNFVSGSSDIPGDPNNEYKLALKNYIPYLTKLKFSLKKSFDFFDEYFVLLKPRNNIKQNEEAKTRRKVAGYFKKYVDIFCLLEESQNNTGLGSKFSEPLQVERCRRNLVALKADKFSGLLEYLIKSQEDAISTMKCIVNEYTFLLEQCTVKIQSKEKLNFILANIILSCIQPTSRLVKPVEKLKDQLREVLQPIGLTYQFSEPYFLASLLFWPENQQLDQHSEQMKEYAQALKNSFKGQYKHMHRTKQPIAYFFLGKGKRLERLVHKGKIDQCFKKTPDINSLWQSGDVWKEEKVQELLLRLQGRAENNCLYIEYGINEKITIPITPAFLGQLRSGRSIEKVSFYLGFSIGGPLAYDIEIV

SEQ ID NO: 838200 - protein, 736 aa, Homo sapiens; identical to SEQ ID NO: 838199

SEQ ID NO: 838201 - protein, 736 aa, Homo sapiens; identical to SEQ ID NO: 838199

SEQ ID NO: 838202 - protein, 278 aa, Homo sapiens
VCVSWSRGCSERASGVSRALLQSAPGTPATVGISVGELWPFARCCSHSYVRSLRGLSVSTHLLCFTIYIMNPSMKQKQEEIKENIKNSSVPRRTLKMIQPSASGSLVGRENELSAGLSKRKHRNDHLTSTTSSPGVIVPESSENKNLGGVTQESFDLMIKENPSSQYWKEVAEKRRKALYEALKENEKLHKEIEQKDNEIARLKKENKELAEVAEHVQYMAELIERLNGEPLDNFESLDNQEFDSEEETVEDSLVEDSEIGTCAEGTVSSSTDAKPCI

SEQ ID NO: 838203 - protein, 209 aa, Homo sapiens
MNPSMKQKQEEIKENIKNSSVPRRTLKMIQPSASGSLVGRENELSAGLSKRKHRNDHLTSTTSSPGVIVPESSENKNLGGVTQESFDLMIKENPSSQYWKEVAEKRRKALYEALKENEKLHKEIEQKDNEIARLKKENKELAEVAEHVQYMAELIERLNGEPLDNFESLDNQEFDSEEETVEDSLVEDSEIGTCAEGTVSSSTDAKPCI

SEQ ID NO: 838204 - protein, 209 aa, Homo sapiens; identical to SEQ ID NO: 838203

SEQ ID NO: 838205 - protein, 216 aa, Homo sapiens
GQSDRGSPSACKCQKQEEIKENIKNSSVPRRTLKMIQPSASGSLVGRENELSAGLSKRKHRNDHLTSTTSSPGVIVPESSENKNLGGVTQESFDLMIKENPSSQYWKEVAEKRRKALYEALKENEKLHKEIEQKDNEIARLKKENKELAEVAEHVQYMAELIERLNGEPLDNFESLDNQEFDSEEETVEDSLVEDSEIGTCAEGTVSSSTDAKPCI

SEQ ID NO: 838206 - protein, 241 aa, Homo sapiens
VCVSWSRGCSERASGVSRALLQSAPGTPATVGISVGELWPFARCCSHSYVRSLRGLSVSTHLLCFTIYIMNPSMKQKQEEIKENIKNSSVPRRTLKMIQPSASGSLVGRENELSAGLSKRKHRNDHLTSTTSSPGVIVPESSENKNLGGVTQESFDLMIKENPSSQYWKEVAEKRRKALYEALKENEKRLNGEPLDNFESLDNQEFDSEEETVEDSLVEDSEIGTCAEGTVSSSTDAKPCI

SEQ ID NO: 838207 - protein, 190 aa, Homo sapiens
PPPPPPTSSGNGRVYSAQEALLQSAPGTPATVGISVGELWPFARCCSHSYVRSLRGLSVSTHLLCFTIYIMNPSMKQKQEEIKENIKTKKKRKTLLCGRGLGAPGKEVFLRHPSGCGRAAGAPRRGSGVRPWAHTEGVPKGENPGAHRQDRVVREFSSTNKKKPPGRGATPRGGFLGPKPPKGGRSGRGH

SEQ ID NO: 838208 - protein, 209 aa, Homo sapiens; identical to SEQ ID NO: 838203

SEQ ID NO: 838209 - protein, 209 aa, Homo sapiens; identical to SEQ ID NO: 838203

SEQ ID NO: 838210 - protein, 261 aa, Homo sapiens
VCVSWSRGCSERASGVSRALLQSAPGTPATVGISVGELWPFARCCSHSYVRSLRGLSVSTHLLCFTIYIMNPSMKQKQEEIKENIKNSSVPRRTLKMIQPSASGSLVGRENELSAGLSKRKHRNDHLTSTTSSPGVIVPESSENKNLGGVTQESFDLMIKENPSSQYWKEVAEKRRKALYEALKENEKENKELAEVAEHVQYMAELIERLNGEPLDNFESLDNQEFDSEEETVEDSLVEDSEIGTCAEGTVSSSTDAKPCI

SEQ ID NO: 838211 - protein, 195 aa, Homo sapiens
MGSQSSKAPRGDVTAEEAAGASPAKANGQENGHVKSNGDLSPKGEGESPPVNGTDEAAGATGDAIEPAPPSQGAEAKGEVPPKETPKKKKKFSFKKPFKLSGLSFKRNRKEGGGDSSASSPTEEEQEQGEIGACSDEGTAQEGKAAATPESQEPQAKGAEASAASEEEAGPQATEPSTPSGPESGPTPASAEQNE

SEQ ID NO: 838212 - protein, 230 aa, Homo sapiens
RSGAAAGAASGPTPPYYPLRREPGAAPSAPQQTPIMGSQSSKAPRGDVTAEEAAGASPAKANGQENGHVKSNGDLSPKGEGESPPVNGTDEAAGATGDAIEPAPPSQGAEAKGEVPPKETPKKKKKFSFKKPFKLSGLSFKRNRKEGGGDSSASSPTEEEQEQGEIGACSDEGTAQEGKAAATPESQEPQAKGAEASAASEEEAGPQATEPSTPSGPESGPTPASAEQNE

SEQ ID NO: 838213 - protein, 225 aa, Homo sapiens
GFYKRTEPRGVATNWMWENPQEGEEERERVLGGGNSPFLSGHRKVAILLAASPAKANGQENGHVKSNGDLSPKGEGESPPVNGTDEAAGATGDAIEPAPPSQGAEAKGEVPPKETPKKKKKFSFKKPFKLSGLSFKRNRKEGGGDSSASSPTEEEQEQGEIGACSDEGTAQEGKAAATPESQEPQAKGAEASAASEEEAGPQATEPSTPSGPESGPTPASAEQNE

SEQ ID NO: 838214 - protein, 195 aa, Homo sapiens; identical to SEQ ID NO: 838211

SEQ ID NO: 838215 - protein, 195 aa, Homo sapiens; identical to SEQ ID NO: 838211

SEQ ID NO: 838216 - protein, 195 aa, Homo sapiens; identical to SEQ ID NO: 838211

SEQ ID NO: 838217 - protein, 195 aa, Homo sapiens; identical to SEQ ID NO: 838211

SEQ ID NO: 838218 - protein, 195 aa, Homo sapiens; identical to SEQ ID NO: 838211

SEQ ID NO: 838219 - protein, 228 aa, Homo sapiens
GAERRRAQLAGRPRSGGAARLPPAPLPLGAAPPRRDPPISPGGRRLQSAPPARTPHPVGKSRSCQRVSTRGRTVDLPEVRAEKAAIPRARGPTEPGKTWAHRRTIVKCGGTLFAAKRAWHRRHVSPQLVQARQQDSKARHRRATQEANDQIVKAQAVSLSPGVARRAQRRAGSPPQRVERPEGKKTAKIALCKKAFSKHLRRACSFQGGHSRRKRCGGWILYMALRLT

SEQ ID NO: 838220 - protein, 200 aa, Homo sapiens
MALRGDLSCRWRRSARRSLSSHMRSMALSEKLAMFECALGEELSRGIGMYRESPPVNGTDEAAGATGDAIEPAPPSQGAEAKGEVPPKETPKKKKKFSFKKPFKLSGLSFKRNRKEGGGDSSASSPTEEEQEQGEIGACSDEGTAQEGKAAATPESQEPQAKGAEASAASEEEAGPQATEPSTPSGPESGPTPASAEQNE

SEQ ID NO: 838221 - protein, 111 aa, Homo sapiens
TEEVDSTEEVDSTEEVDSWTAQRRWTAGQHRGGGQLDSTEEVDSKGWGRWVISKLQKLCCPCEVTAWTWCPGCLPVPRKEGAIASSQPRSLSSSPSCGFSHQPSGSPLKAS

SEQ ID NO: 838222 - protein, 195 aa, Homo sapiens; identical to SEQ ID NO: 838211

SEQ ID NO: 838223 - protein, 706 aa, Homo sapiens
  misc_feature (4)..(4): Xaa can be any naturally occurring amino acid
DLIXFQVFAGVVWLQNRNENRCLKANAKSCGECIQAGPNCGWCTNSTFLQEGMPTSARCDDLEALKKKGCPPDDIENPRGSKDIKKNKNVTNRSKGTAEKLKPEDITQIQPQQLVLRLRSGEPQTFTLKFKRAEDYPIDLYYLMDLSYSMKDDLENVKSLGTDLMNEMRRITSDFRIGFGSFVEKTVMPYISTTPAKLRNPCTSEQNCTSPFSYKNVLSLTNKGEVFNELVQKLSENNIQTIFAVTEEFQPVYKELKNLIPKSAVGTLSANSSNVIQLIIDAYNSLSSEVILENGKLSEGVTISYKSYCKNGVNGTGENGRKCSNISIGDEVQFEISITSNKCPKKDSDSFKIRPLGFTEEVEVILQYICECECQSEGIPESPKCHEGNGTFECGACRCNEGRVGRHCECSTDEVNSEDMDAYCRKENSSEICSNNGECVCGQCVCRKRDNTNEIYSGKFCECDNFNCDRSNGLICGGNGVCKCRVCECNPNYTGSACDCSLDTSTCEASNGQICNGRGICECGVCKCTDPKFQGQTCEMCQTCLGVCAEHKECVQCRAFNKGEKKDTCTQECSYFNITKVESRDKLPQPVQPDPVSHCKEKDVDDCWFYFTYSVNGNNEVMVHVVENPECPTGPDIIPIVAGVVAGIVLIGLALLLIWKLLMIIHDRREFAKFEKEKMNAKWDTGENPIYKSAVTTVVNPKYEGK

SEQ ID NO: 838224 - protein, 775 aa, Homo sapiens
  misc_feature (4)..(4): Xaa can be any naturally occurring amino acid
DLIXFQVFAGVVWLQNRNENRCLKANAKSCGECIQAGPNCGWCTNSTFLQEGMPTSARCDDLEALKKKGCPPDDIENPRGSKDIKKNKNVTNRSKGTAEKLKPEDITQIQPQQLVLRLRSGEPQTFTLKFKRAEDYPIDLYYLMDLSYSMKDDLENVKSLGTDLMNEMRRITSDFRIGFGSFVEKTVMPYISTTPAKLRNPCTSEQNCTSPFSYKNVLSLTNKGEVFNELVGKQRISGNLDSPEGGFDAIMQVAVCGSLIGWRNVTRLLVFSTDAGFHFAGDGKLGGIVLPNDGQCHLENNMYTMSHYYDYPSIAHLVQKLSENNIQTIFAVTEEFQPVYKELKNLIPKSAVGTLSANSSNVIQLIIDAYNSLSSEVILENGKLSEGVTISYKSYCKNGVNGTGENGRKCSNISIGDEVQFEISITSNKCPKKDSDSFKIRPLGFTEEVEVILQYICECECQSEGIPESPKCHEGNGTFECGACRCNEGRVGRHCECSTDEVNSEDMDAYCRKENSSEICSNNGECVCGQCVCRKRDNTNEIYSGKFCECDNFNCDRSNGLICGGNGVCKCRVCECNPNYTGSACDCSLDTSTCEASNGQICNGRGICECGVCKCTDPKFQGQTCEMCQTCLGVCAEHKECVQCRAFNKGESRDKLPQPVQPDPVSHCKEKDVDDCWFYFTYSVNGNNEVMVHVVENPECPTGPDIIPIVAGVVAGIVLIGLALLLIWKLLMIIHDRREFAKFEKEKMNAKWDTGENPIYKSAVTTVVNPKYEGK

SEQ ID NO: 838225 - protein, 287 aa, Homo sapiens
MDAYCRKENSSEICSNNGECVCGQCVCRKRDNTNEIYSGKFCECDNFNCDRSNGLICGGNGVCKCRVCECNPNYTGSACDCSLDTSTCEASNGQICNGRGICECGVCKCTDPKFQGQTCEMCQTCLGVCAEHKECVQCRAFNKGEKKDTCTQECSYFNITKVESRDKLPQPVQPDPVSHCKEKDVDDCWFYFTYSVNGNNEVMVHVVENPECPTGPDIIPIVAGVVAGIVLIGLALLLIWKLLMIIHDRREFAKFEKEKMNAKWDTGENPIYKSAVTTVVNPKYEGK

SEQ ID NO: 838226 - protein, 784 aa, Homo sapiens
  misc_feature (4)..(4): Xaa can be any naturally occurring amino acid
DLIXFQVFAGVVWLQNRNENRCLKANAKSCGECIQAGPNCGWCTNSTFLQEGMPTSARCDDLEALKKKGCPPDDIENPRGSKDIKKNKNVTNRSKGTAEKLKPEDITQIQPQQLVLRLRSGEPQTFTLKFKRAEDYPIDLYYLMDLSYSMKDDLENVKSLGTDLMNEMRRITSDFRIGFGSFVEKTVMPYISTTPAKLRNPCTSEQNCTSPFSYKNVLSLTNKGEVFNELVGKQRISGNLDSPEGGFDAIMQVAVCGSLIGWRNVTRLLVFSTDAGFHFAGDGKLGGIVLPNDGQCHLENNMYTMSHYYDYPSIAHLVQKLSENNIQTIFAVTEEFQPVYKELKNLIPKSAVGTLSANSSNVIQLIIDAYNSLSSEVILENGKLSEGVTISYKSYCKNGVNGTGENGRKCSNISIGDEVQFEISITSNKCPKKDSDSFKIRPLGFTEEVEVILQYICECECQSEGIPESPKCHEGNGTFECGACRCNEGRVGRHCECSTDEVNSEDMDAYCRKENSSEICSNNGECVCGQCVCRKRDNTNEIYSGKFCECDNFNCDRSNGLICGGNGVCKCRVCECNPNYTGSACDCSLDTSTCEASNGQICNGRGICECGVCKCTDPKFQGQTCEMCQTCLGVCAEHKECVQCRAFNKGEKKDTCTQECSYFNITKVESRDKLPQPVQPDPVSHCKEKDVDDCWFYFTYSVNGNNEVMVHVVENPECPTGPDIIPIVAGVVAGIVLIGLALLLIWKLLMIIHDRREFAKFEKEKMNAKWDTVSYKTSKKQSGL

SEQ ID NO: 838227 - protein, 692 aa, Homo sapiens
  misc_feature (4)..(4): Xaa can be any naturally occurring amino acid
DLIXFQVFAGVVWLQNRNENRCLKANAKSCGECIQAGPNCGWCTNSTFLQEGMPTSARCDDLEALKKKGCPPDDIENPRGSKDIKKNKNVTNRSKGTAEKLKPEDITQIQPQQLVLRLRSGEPQTFTLKFKRAEDYPIDLYYLMDLSYSMKDDLENVKSLGTDLMNEMRRITSDFRIGFGSFVEKTVMPYISTTPAKLRNPCTSEQNCTSPFSYKNVLSLTNKGEVFNELVGKQRISGNLDSPEGGFDAIMQVAVCGSLIGWRNVTRLLVFSTDAGFHFAGDGKLGGIVLPNDGQCHLENNMYTMSHYYDYPSIAHLVQKLSENNIQTIFAVTEEFQPVYKELKNLIPKSAVGTLSANSSNVIQLIIDAYNSLSSEVILENGKLSEGVTISYKSYCKNGVNGTGENGRKCSNISIGDEVQFEISITSNKCPKKDSDSFKIRPLGFTEEVEVILQYICECECQSEGIPESPKCHEGNGTFECGACRCNEGRVGRHCECSTDEVNSEDMDAYCRKENSSEICSNNGECVCGQCVCRKRDKECVQCRAFNKGEKKDTCTQECSYFNITKVESRDKLPQPVQPDPVSHCKEKDVDDCWFYFTYSVNGNNEVMVHVVENPECPTGPDIIPIVAGVVAGIVLIGLALLLIWKLLMIIHDRREFAKFEKEKMNAKWDTGENPIYKSAVTTVVNPKYEGK

SEQ ID NO: 838228 - protein, 814 aa, Homo sapiens
  misc_feature (4)..(4): Xaa can be any naturally occurring amino acid
DLIXFQVFAGVVWLQNRNENRCLKANAKSCGECIQAGPNCGWCTNSTFLQEGMPTSARCDDLEALKKKGCPPDDIENPRGSKDIKKNKNVTNRSKGTAEKLKPEDITQIQPQQLVLRLRSGEPQTFTLKFKRAEDYPIDLYYLMDLSYSMKDDLENVKSLGTDLMNEMRRITSDFRIGFGSFVEKTVMPYISTTPAKLRNPCTSEQNCTSPFSYKNVLSLTNKGEVFNELVGKQRISGNLDSPEGGFDAIMQVAVCGSLIGWRNVTRLLVFSTDAGFHFAGDGKLGGIVLPNDGQCHLENNMYTMSHYYDYPSIAHLVQKLSENNIQTIFAVTEEFQPVYKELKNLIPKSAVGTLSANSSNVIQLIIDAYNSLSSEVILENGKLSEGVTISYKSYCKNGVNGTGENGRKCSNISIGDEVQFEISITSNKCPKKDSDSFKIRPLGFTEEVEVILQYICECECQSEGIPESPKCHEGNGTFECGACRCNEGRVGRHCECSTDEVNSEDMDAYCRKENSSEICSNNGECVCGQCVCRKRDNTNEIYSGKFCECDNFNCDRSNGLICGGNGVCKCRVCECNPNYTGSACDCSLDTSTCEASNGQICNGRGICECGVCKCTDPKFQGQTCEMCQTCLGVCAEHKECVQCRAFNKGEKKDTCTQECSYFNITKVESRDKLPQPVQPDPVSHCKEKDVDDCWFYFTYSVNGNNEVMVHVVENPECPTGPDIIPIVAGVVAGIVLIGLALLLIWKLLMIIHDRREFAKFEKEKMNAKWDTPGVQWCDISSLQPLTSRFQQFSCLSLPSTWDYRVKILFIRVP

SEQ ID NO: 838229 - protein, 793 aa, Homo sapiens
  misc_feature (4)..(4): Xaa can be any naturally occurring amino acid
DLIXFQVFAGVVWLQNRNENRCLKANAKSCGECIQAGPNCGWCTNSTFLQEGMPTSARCDDLEALKKKGCPPDDIENPRGSKDIKKNKNVTNRSKGTAEKLKPEDITQIQPQQLVLRLRSGEPQTFTLKFKRAEDYPIDLYYLMDLSYSMKDDLENVKSLGTDLMNEMRRITSDFRIGFGSFVEKTVMPYISTTPAKLRNPCTSEQNCTSPFSYKNVLSLTNKGEVFNELVGKQRISGNLDSPEGGFDAIMQVAVCGSLIGWRNVTRLLVFSTDAGFHFAGDGKLGGIVLPNDGQCHLENNMYTMSHYYDYPSIAHLVQKLSENNIQTIFAVTEEFQPVYKELKNLIPKSAVGTLSANSSNVIQLIIDAYNSLSSEVILENGKLSEGVTISYKSYCKNGVNGTGENGRKCSNISIGDEVQFEISITSNKCPKKDSDSFKIRPLGFTEEVEVILQYICECECQSEGIPESPKCHEGNGTFECGACRCNEGRVGRHCECSTDEVNSEDMDAYCRKENSSEICSNNGECVCGQCVCRKRDNTNEIYSGKFCECDNFNCDRSNGLICGGNGVCKCRVCECNPNYTGSACDCSLDTSTCEASNGQICNGRGICECGVCKCTDPKFQGQTCEMCQTCLGVCAEHKECVQCRAFNKGEKKDTCTQECSYFNITKVESRDKLPQPVQPDPVSHCKEKDVDDCWFYFTYSVNGNNEVMVHVVENPECPTGPDIIPIVAGVVAGIVLIGLALLLIWKLLMIIHDRREFAKFEKEKMNAKWDTGENPIYKSAVTTVVNPKYEGK

SEQ ID NO: 838230 - protein, 793 aa, Homo sapiens; identical to SEQ ID NO: 838229
  misc_feature (4)..(4): Xaa can be any naturally occurring amino acid

SEQ ID NO: 838231 - protein, 793 aa, Homo sapiens; identical to SEQ ID NO: 838229
  misc_feature (4)..(4): Xaa can be any naturally occurring amino acid

SEQ ID NO: 838232 - protein, 793 aa, Homo sapiens; identical to SEQ ID NO: 838229
  misc_feature (4)..(4): Xaa can be any naturally occurring amino acid

SEQ ID NO: 838233 - protein, 793 aa, Homo sapiens; identical to SEQ ID NO: 838229
  misc_feature (4)..(4): Xaa can be any naturally occurring amino acid

SEQ ID NO: 838234 - protein, 793 aa, Homo sapiens; identical to SEQ ID NO: 838229
  misc_feature (4)..(4): Xaa can be any naturally occurring amino acid

SEQ ID NO: 838235 - protein, 784 aa, Homo sapiens; identical to SEQ ID NO: 838226
  misc_feature (4)..(4): Xaa can be any naturally occurring amino acid

SEQ ID NO: 838236 - protein, 598 aa, Homo sapiens
  misc_feature (4)..(4): Xaa can be any naturally occurring amino acid
  misc_feature (583)..(583): Xaa can be any naturally occurring amino acid
  misc_feature (596)..(596): Xaa can be any naturally occurring amino acid
  misc_feature (598)..(598): Xaa can be any naturally occurring amino acid
DLIXFQVFAGVVWLQNRNENRCLKANAKSCGECIQAGPNCGWCTNSTFLQEGMPTSARCDDLEALKKKGCPPDDIENPRGSKDIKKNKNVTNRSKGTAEKLKPEDITQIQPQQLVLRLRSGEPQTFTLKFKRAEDYPIDLYYLMDLSYSMKDDLENVKSLGTDLMNEMRRITSDFRIGFGSFVEKTVMPYISTTPAKLRNPCTSEQNCTSPFSYKNVLSLTNKGEVFNELVGKQRISGNLDSPEGGFDAIMQVAVCGSLIGWRNVTRLLVFSTDAGFHFAGDGKLGGIVLPNDGQCHLENNMYTMSHYYDYPSIAHLVQKLSENNIQTIFAVTEEFQPVYKELKNLIPKSAVGTLSANSSNVIQLIIDAYNSLSSEVILENGKLSEGVTISYKSYCKNGVNGTGENGRKCSNISIGDEVQFEISITSNKCPKKDSDSFKIRPLGFTEEVEVILQYICECECQSEGIPESPKCHEGNGTFECGACRCNEGRVGRHCECSTDEVNSEDMDAYCRKENSSEICSNNGECVCGQCVCRKRDNTNEIYSGKFCECDNFNCDRSNGLICGGKWGFAKCPCVVKCKPPNXNWANAMVDWFLWXNX

SEQ ID NO: 838237 - protein, 316 aa, Homo sapiens
  misc_feature (4)..(4): Xaa can be any naturally occurring amino acid
DLIXFQVFAGVVWLQNRNENRCLKANAKSCGECIQAGPNCGWCTNSTFLQEGMPTSARCDDLEALKKKGCPPDDIENPRGSKDIKKNKNVTNRSKGTAEKLKPEDITQIQPQQLVLRLRSGEPQTFTLKFKRAEDYPIDLYYLMDLSYSMKDDLENVKSLGTDLMNEMRRITSDFRIGFGSFVEKTVMPYISTTPAKLRNPCTSEQNCTSPFSYKNVLSLTNKGEVFNELVGKQRISGNLDSPEGGFDAIMQVAVCGSLIGWRNVTRLLVFSTDAGFHFAGDGKLGGIVLPNDGQCHLENNMYTMSHYYVSAWFLT

SEQ ID NO: 838238 - protein, 311 aa, Homo sapiens
  misc_feature (4)..(4): Xaa can be any naturally occurring amino acid
  misc_feature (307)..(307): Xaa can be any naturally occurring amino acid
DLIXFQVFAGVVWLQNRNENRCLKANAKSCGECIQAGPNCGWCTNSTFLQEGMPTSARCDDLEALKKKGCPPDDIENPRGSKDIKKNKNVTNRSKGTAEKLKPEDITQIQPQQLVLRLRSGEPQTFTLKFKRAEDYPIDLYYLMDLSYSMKDDLENVKSLGTDLMNEMRRITSDFRIGFGSFVEKTVMPYISTTPAKLRNPCTSEQNCTSPFSYKNVLSLTNKGEVFNELVGKQRISGNLDSPEGGFDAIMQVAVCGSLIGWRNVTRLLVFSTDAGFHFAGDGKLGGIVLPNDGQCHLENYFFPIEXLIFE

SEQ ID NO: 838239 - protein, 280 aa, Homo sapiens
  misc_feature (4)..(4): Xaa can be any naturally occurring amino acid
DLIXFQVFAGVVWLQNRNENRCLKANAKSCGECIQAGPNCGWCTNSTFLQEGMPTSARCDDLEALKKKGCPPDDIENPRGSKDIKKNKNVTNRSKGTAEKLKPEDITQIQPQQLVLRLRSGEPQTFTLKFKRAEDYPIDLYYLMDLSYSMKDDLENVKSLGTDLMNEMRRITSDFRIGFGSFVEKTVMPYISTTPAKLRNPLLCKEPMRVGSLQRQEDEEDKPRQVEVHQEPGAAVPRGQEAPEGKGRETGENRAPLALDPVLRAPGGRPGPSQELNQRS

SEQ ID NO: 838240 - protein, 793 aa, Homo sapiens; identical to SEQ ID NO: 838229
  misc_feature (4)..(4): Xaa can be any naturally occurring amino acid

SEQ ID NO: 838241 - protein, 758 aa, Homo sapiens
HEQPFFFKASKSSHRAEVGIPSCKNVEFVHHPQFGPPDDIENPRGSKDIKKNKNVTNRSKGTAEKLKPEDITQIQPQQLVLRLRSGEPQTFTLKFKRAEDYPIDLYYLMDLSYSMKDDLENVKSLGTDLMNEMRRITSDFRIGFGSFVEKTVMPYISTTPAKLRNPCTSEQNCTSPFSYKNVLSLTNKGEVFNELVGKQRISGNLDSPEGGFDAIMQVAVCGSLIGWRNVTRLLVFSTDAGFHFAGDGKLGGIVLPNDGQCHLENNMYTMSHYYDYPSIAHLVQKLSENNIQTIFAVTEEFQPVYKELKNLIPKSAVGTLSANSSNVIQLIIDAYNSLSSEVILENGKLSEGVTISYKSYCKNGVNGTGENGRKCSNISIGDEVQFEISITSNKCPKKDSDSFKIRPLGFTEEVEVILQYICECECQSEGIPESPKCHEGNGTFECGACRCNEGRVGRHCECSTDEVNSEDMDAYCRKENSSEICSNNGECVCGQCVCRKRDNTNEIYSGKFCECDNFNCDRSNGLICGGNGVCKCRVCECNPNYTGSACDCSLDTSTCEASNGQICNGRGICECGVCKCTDPKFQGQTCEMCQTCLGVCAEHKECVQCRAFNKGEKKDTCTQECSYFNITKVESRDKLPQPVQPDPVSHCKEKDVDDCWFYFTYSVNGNNEVMVHVVENPECPTGPDIIPIVAGVVAGIVLIGLALLLIWKLLMIIHDRREFAKFEKEKMNAKWDTGENPIYKSAVTTVVNPKYEGK

SEQ ID NO: 838242 - protein, 775 aa, Homo sapiens
  misc_feature (4)..(4): Xaa can be any naturally occurring amino acid
DLIXFQVFAGVVWLQNRNENRCLKANAKSCGECIQAGPNCGWCTNSTFLQEGMPTSARCDDLEALKKKGCPPDDIENPRGSKDIKKNKNVTNRSKGTAEKLKPEDITQIQPQQLVLRLRSGEPQTFTLKFKRAEDYPIDLYYLMDLSYSMKDDLENVKSLGTDLMNEMRRITSDFRIGFGSFVEKTVMPYISTTPAKLRNPCTSEQNCTSPFSYKNVLSLTNKGEVFNELVGKQRISGNLDSPEGGFDAIMQVAVCGSLIGWRNVTRLLVFSTDAGFHFAGDGKLGGIVLPNDGQCHLENNMYTMSHYYDYPSIAHLVQKLSENNIQTIFAVTEEFQPVYKELKNLIPKSAVGTLSANSSNVIQLIIDAYNSLSSEVILENGKLSEGVTISYKSYCKNGVNGTGENGRKCSNISIGDEVQFEISITSNKCPKKDSDSFKIRPLGFTEEVEVILQYICECECQSEGIPESPKCHEGNGTFECGACRCNEGRVGRHCECSTDEVNSEDMDAYCRKVCRKRDNTNEIYSGKFCECDNFNCDRSNGLICGGNGVCKCRVCECNPNYTGSACDCSLDTSTCEASNGQICNGRGICECGVCKCTDPKFQGQTCEMCQTCLGVCAEHKECVQCRAFNKGEKKDTCTQECSYFNITKVESRDKLPQPVQPDPVSHCKEKDVDDCWFYFTYSVNGNNEVMVHVVENPECPTGPDIIPIVAGVVAGIVLIGLALLLIWKLLMIIHDRREFAKFEKEKMNAKWDTGENPIYKSAVTTVVNPKYEGK

SEQ ID NO: 838243 - protein, 793 aa, Homo sapiens; identical to SEQ ID NO: 838229
  misc_feature (4)..(4): Xaa can be any naturally occurring amino acid

SEQ ID NO: 838244 - protein, 796 aa, Homo sapiens
  misc_feature (4)..(4): Xaa can be any naturally occurring amino acid
DLIXFQVFAGVVWLQNRNENRCLKANAKSCGECIQAGPNCGWCTNSTFLQEGMPTSARCDDLEALKKKGCPPDDIENPRGSKDIKKNKNVTNRSKGTAEKLKPEDITQIQPQQLVLRLRSGEPQTFTLKFKRAEDYPIDLYYLMDLSYSMKDDLENVKSLGTDLMNEMRRITSDFRIGFGSFVEKTVMPYISTTPAKLRNPCTSEQNCTSPFSYKNVLSLTNKGEVFNELVGKQRISGNLDSPEGGFDAIMQVAVCGSLIGWRNVTRLLVFSTDAGFHFAGDGKLGGIVLPNDGQCHLENNMYTMSHYYDYPSIAHLVQKLSENNIQTIFAVTEEFQPVYKELKNLIPKSAVGTLSANSSNVIQLIIDAYNSLSSEVILENGKLSEGVTISYKSYCKNGVNGTGENGRKCSNISIGDEVQFEISITSNKCPKKDSDSFKIRPLGFTEEVEVILQYICECECQSEGIPESPKCHEGNGTFECGACRCNEGRVGRHCECSTDEVNSEDMDAYCRKENSSEICSNNGECVCGQCVCRKRDNTNEIYSGKFCECDNFNCDRSNGLICGGNGVCKCRVCECNPNYTGSACDCSLDTSTCEASNGQICNGRGICECGVCKCTDPKFQGQTCEMCQTCLGVCAEHKECVQCRAFNKGEKKDTCTQECSYFNITKVESRDKLPQPVQPDPVSHCKEKDVDDCWFYFTYSVNGNNEVMVHVVENPECPTGPDIIPIVAGVVAGIVLIGLALLLIWKLLMIIHDRREFAKFEKEKMNAKWDTQENPIYKSPINNFKNPNYGRKAGL

SEQ ID NO: 838245 - protein, 793 aa, Homo sapiens; identical to SEQ ID NO: 838229
  misc_feature (4)..(4): Xaa can be any naturally occurring amino acid

SEQ ID NO: 838246 - protein, 793 aa, Homo sapiens; identical to SEQ ID NO: 838229
  misc_feature (4)..(4): Xaa can be any naturally occurring amino acid

SEQ ID NO: 838247 - protein, 793 aa, Homo sapiens; identical to SEQ ID NO: 838229
  misc_feature (4)..(4): Xaa can be any naturally occurring amino acid

SEQ ID NO: 838248 - protein, 793 aa, Homo sapiens; identical to SEQ ID NO: 838229
  misc_feature (4)..(4): Xaa can be any naturally occurring amino acid

SEQ ID NO: 838249 - protein, 762 aa, Homo sapiens
  misc_feature (4)..(4): Xaa can be any naturally occurring amino acid
DLIXFQVFAGVVWLQNRNENRCLKANAKSCGECIQAGPNCGWCTNSTFLQEGMPTSARCDDLEALKKKGCPPDDIENPRGSKDIKKNKNVTNRSKGTAEKLKPEDITQIQPQQLVLRLRSGEPQTFTLKFKRAEDYPIDLYYLMDLSYSMKDDLENVKSLGTDLMNEMRRITSDFRIGFGSFVEKTVMPYISTTPAKLRNPCTSEQNCTSPFSYKNVLSLTNKGEVFNELVGKQRISGNLDSPEGGFDAIMQVAVCGSLIGWRNVTRLLVFSTDAGFHFAGDGKLGGIVLPNDGQCHLENNMYTMSHYYDYPSIAHLVQKLSENNIQTIFAVTEEFQPVYKELKNLIPKSAVGTLSANSSNVIQLIIDAYNSLSSEVILENGKLSEGVTISYKSYCKNGVNGTGENGRKCSNISIGDEVQFEISITSNKCPKKDSDSFKIRPLGFTEEVEVILQYICECECQSEGIPESPKCHEGNGTFECGACRCNEGRVGRHCECSTDEVNSEDMDAYCRKENSSEICSNNGECVCGQCVCRKRDNTNEIYSGKFCECDNFNCDRSNGLICGGNGVCKCRVCECNPNYTGSACDCSLDTSTCEASNGQICNGRGICECGVCKCTDPKFQGQTCEMCQTCLGVCAEHKECVQCRAFNKGEKKDTCTQECSYFNITKVESRDKLPQPVQPDPVSHCKEKDVDDCWFYFTYSVNGNNEVMVHVVENPECPTGPDIIPIVAGVVAGIVLIGLALLLIWKLLMIIHDRRWFLNTF

SEQ ID NO: 838250 - protein, 420 aa, Homo sapiens
  misc_feature (4)..(4): Xaa can be any naturally occurring amino acid
DLIXFQVFAGVVWLQNRNENRCLKANAKSCGECIQAGPNCGWCTNSTFLQEGMPTSARCDDLEALKKKGCPPDDIENPRGSKDIKKNKNVTNRSKGTAEKLKPEDITQIQPQQLVLRLRSGEPQTFTLKFKRAEDYPIDLYYLMDLSYSMKDDLENVKSLGTDLMNEMRRITSDFRIGFGSFVEKTVMPYISTTPAKLRNPCTSEQNCTSPFSYKNVLSLTNKGEVFNELVGKQRISGNLDSPEGGFDAIMQVAVCGSLIGWRNVTRLLVFSTDAGFHFAGDGKLGGIVLPNDGQCHLENNMYTMSHYYDYPSIAHLVQKLSENNIQTIFAVTEEFQPVYKELKNLIPKSAVGTLSANSSNVIQLIIDAYNSLSSEVILENGKLSEGVTISYKSYCKNGVNGTGENGRKCSNISIGDESI

SEQ ID NO: 838251 - protein, 224 aa, Homo sapiens
  misc_feature (4)..(4): Xaa can be any naturally occurring amino acid
DLIXFQVFAGVVWLQNRNENRCLKANAKSCGECIQAGPNCGWCTNSTFLQEGMPTSARCDDLEALKKKGCPPDDIENPRGSKDIKKNKNVTNRSKGTAEKLKPEDITQIQPQQLVLRLRSGEPQTFTLKFKRAEDYPIDLYYLMDLSYSMKDDLENVKSLGTDLMNEMRRITSDFRIGFGSFVEKTVMPYISTTPAKLRNPCTSEQNCTSPFSYKNVLSLILTI

SEQ ID NO: 838252 - protein, 48 aa, Homo sapiens
AKSLETRLLSLSLEKNTWDSEEAVPGPQSDRAGSLHTGALQGKAHIFC

SEQ ID NO: 838253 - protein, 75 aa, Homo sapiens
TFTNVSLCLDSSLPEASPETSPREGQVDPQVTGDATAVGWATLSSSFCRQRCVPLITLHQDPPQTVLWPLSGTQL

SEQ ID NO: 838254 - protein, 75 aa, Homo sapiens
WGVWGREKWRQGSPRVTSRGQPHCGEEGPPNNSMDNVDFTAPPPERPHRATGLNDTSLDPLEAWLVRVGGSPRES

SEQ ID NO: 838255 - protein, 120 aa, Homo sapiens
RTTRYMKQTLIELKGKLTTTTTTTTTTTKTRPRNFNTSLSVMNRTIRQKINKGAGLEQHYRPIGRDRYIYRTLHLTTEEYILFSSAHETLSKIDHIVSLNTLKKTEIIQSIFSDHSEINK

SEQ ID NO: 838256 - protein, 588 aa, Homo sapiens
MSSGLRAADFPRWKRHISEQLRRRDRLQRQAFEEIILQYNKLLEKSDLHSVLAQKLQAEKHDVPNRHEISPGHDGTWNDNQLQEMAQLRIKHQEELTELHKKRGELAQLVIDLNNQMQRKDREMQMNEAKIAECLQTISDLETECLDLRTKLCDLERANQTLKDEYDALQITFTALEGKLRKTTEENQELVTRWMAEKAQEANRLNAENEKDSRRRQARLQKELAEAAKEPLPVEQDDDIEVIVDETSDHTEETSPVRAISRAATRRSVSSFPVPQDNVDTHPGSGKEVRVPATALCVFDAHDGEVNAVQFSPGSRLLATGGMDRRVKLWEVFGEKCEFKGSLSGSNAGITSIEFDSAGSYLLAASNDFASRIWTVDDYRLRHTLTGHSGKVLSAKFLLDNARIVSGSHDRTLKLWDLRSKVCIKTVFAGSSCNDIVCTEQCVMSGHFDKKIRFWDIRSESIVREMELLGKITALDLNPERTELLSCSRDDLLKVIDLRTNAIKQTFSAPGFKCGSDWTRVVFSPDGSYVAAGSAEGSLYIWSVLTGKVEKVLSKQHSSSINAVAWSPSGSHVVSVDKGCKAVLWAQY

SEQ ID NO: 838257 - protein, 607 aa, Homo sapiens
MSSGLRAADFPRWKRHISEQLRRRDRLQRQAFEEIILQYNKLLEKSDLHSVLAQKLQAEKHDVPNRHEISPGHDGTWNDNQLQEMAQLRIKHQEELTELHKKRGELAQLVIDLNNQMQRKDREMQMNEAKIAECLQTISDLETECLDLRTKLCDLERANQTLKDEYDALQITFTALEGKLRKTTEENQELVTRWMAEKAQEANRLNAENEKDSRRRQARLQKELAEAAKEPLPVEQDDDIEVIVDETSDHTEETSPVRAISRAATKRLSQPAGGLLDSITNIFGRRSVSSFPVPQDNVDTHPGSGKEVRVPATALCVFDAHDGEVNAVQFSPGSRLLATGGMDRRVKLWEVFGEKCEFKGSLSGSNAGITSIEFDSAGSYLLAASNDFASRIWTVDDYRLRHTLTGHSGKVLSAKFLLDNARIVSGSHDRTLKLWDLRSKVCIKTVFAGSSCNDIVCTEQCVMSGHFDKKIRFWDIRSESIVREMELLGKITALDLNPERTELLSCSRDDLLKVIDLRTNAIKQTFSAPGFKCGSDWTRVVFSPDGSYVAAGSAEGSLYIWSVLTGKVEKVLSKQHSSSINAVAWSPSGSHVVSVDKGCKAVLWAQY

SEQ ID NO: 838258 - protein, 262 aa, Homo sapiens
MSSGLRAADFPRWKRHISEQLRRRDRLQRQAFEEIILQYNKLLEKSDLHSVLAQKLQAEKHDVPNRHEISPGHDGTWNDNQLQEMAQLRIKHQEELTELHKKRGELAQLVIDLNNQMQRKDREMQMNEAKIAECLQTISDLETECLDLRTKLCDLERANQTLKDEYDALQITFTALEGKLRKTTEENQELVTRWMAEKAQEANRLNAENEKDSSEAGMPGCRKSSQEPPKDPLPVEQDDAIGGIVEEPFDTTNCWSASGIYN

SEQ ID NO: 838259 - protein, 216 aa, Homo sapiens
MSSGLRAADFPRWKRHISEQLRRRDRLQRQAFEEIILQYNKLLEKSDLHSVLAQKLQAEKHDVPNRHEISPGHDGTWNDNQLQEMAQLRIKHQEELTELHKKRGELAQLVIDLNNQMQRKDREMQMNEAKKSLQKQQRNLYQSNRMMTLRSLWMKLLITQKRPLLCEPSAEQPLSDSRSLLEAFWILSLISLGDALSLPSQSPRTMWILILVLVKK

SEQ ID NO: 838260 - protein, 607 aa, Homo sapiens; identical to SEQ ID NO: 838257

SEQ ID NO: 838261 - protein, 607 aa, Homo sapiens; identical to SEQ ID NO: 838257

SEQ ID NO: 838262 - protein, 265 aa, Homo sapiens [sequence omitted]

SEQ ID NO: 838263 - protein, 216 aa, Homo sapiens; identical to SEQ ID NO: 838259

SEQ ID NO: 838264 - protein, 265 aa, Homo sapiens [sequence omitted]

SEQ ID NO: 838265 - protein, 343 aa, Homo sapiens
MSSGLRAADFPRWKRHISEQLRRRDRLQRQAFEEIILQYNKLLEKSDLHSVLAQKLQAEKHDVPNRHEIRRRQARLQKELAEAAKEPLPVEQDDDIEVIVDETSDHTEETSPVRAISRAATKRLSQPAGGLLDSITNIFGLSESPLLGHHSSSDAARRRSVSSFPVPQDNVDTHPGSGKEVRVPATALCVFDAHDGEVNAVQFSPGSRLLATGGMDRRVKLWEVFGEKCEFKGSLSGSNAGITSIEFDSAGSYLLAASNDFASRIWTVDDYRLRHTLTGHSGKVLSAKFLLDNARIVSGSHDRTLKLWDLRSKVCEEIQSLCLCICLDVSVEVCVCTSEPAFM

SEQ ID NO: 838266 - protein, 607 aa, Homo sapiens; identical to SEQ ID NO: 838257

SEQ ID NO: 838267 - protein, 68 aa, Homo sapiens
APRRHSVSPCPGGGSGSSTGRRSQLERRGGPPVVEGVSCGAMAVVLPAVVEELLSEMAAAVQESARDS

SEQ ID NO: 838268 - protein, 68 aa, Homo sapiens; identical to SEQ ID NO: 838267

SEQ ID NO: 838269 - protein, 68 aa, Homo sapiens; identical to SEQ ID NO: 838267

SEQ ID NO: 838270 - protein, 134 aa, Homo sapiens
APRRHSVSPCPGGGSGSSTVPDEYLLSLKFLFGSSATQALDLVDRQSITLISSPSGRRVYQVLGSSSKTYTCLASCHYCSCPAFAFSVLRKSDSILCKHLLAVYLSQVMRTCQQLSVSDKQLTDILLMEKKQEA

SEQ ID NO: 838271 - protein, 68 aa, Homo sapiens; identical to SEQ ID NO: 838267

SEQ ID NO: 838272 - protein, 68 aa, Homo sapiens; identical to SEQ ID NO: 838267

SEQ ID NO: 838273 - protein, 131 aa, Homo sapiens
RSSLSKMPPPVQKSARIPDEYLLSLKFLFGSSATQALDLVDRQSITLISSPSGRRVYQVLGSSSKTYTCLASCHYCSCPAFAFSVLRKSDSILCKHLLAVYLSQVMRTCQQLSVSDKQLTDILLMEKKQEA

SEQ ID NO: 838274 - protein, 68 aa, Homo sapiens; identical to SEQ ID NO: 838267

SEQ ID NO: 838275 - protein, 68 aa, Homo sapiens; identical to SEQ ID NO: 838267

SEQ ID NO: 838276 - protein, 135 aa, Homo sapiens
SLITRGTGSFPLLSSFSHSEASHLRVKPRGQSGCTLKSISTFMQRPPFPPAASSQCLSMGGTRLRGSTGSPMALLKLSQHHTPVENVPPPPAFPPPQGSANSANSLQLPAPFSLAGVSPSKSLVLLILSWHLFFG

SEQ ID NO: 838277 - protein, 115 aa, Homo sapiens
MKMYFSKCRGQSGCTLKSISTFMQRPPFPPAASSQCLSMGGTRLRGSTGSPMALLKLSQHHTPVENVPPPPAFPPPQGSANSANSLQLPAPFSLAGVSPSKSLVLLILSWHLFFG

SEQ ID NO: 838278 - protein, 71 aa, Homo sapiens
MRRKEELRPFGEPRPKSSPNQGCDTLFGALGFLMSPSFRVPLRSPVPTVEATVVCLIQMQPHREPVPGYAR

SEQ ID NO: 838279 - protein, 70 aa, Homo sapiens
LAVHLALVPTEAELGKVNVHLGAGTLLIIGQRAEGGQPVSWPDEMLPQWLWEGVLCHSQFLSSSHHQAEQ

SEQ ID NO: 838280 - protein, 124 aa, Homo sapiens
MPACRLGPLAAALLLSLLLFGFTLVSGTGAEKTGVCPELQADQNCTQECVSDSECADNLKCCSAGCATFCSLPNDKEGSCPQVNINFPQLGLCRDQCQVDSQCPGQMKCCRNGCGKVSCVTPNF

SEQ ID NO: 838281 - protein, 109 aa, Homo sapiens
VLVQPGARGTRQSSLLLCLRLVVNAEQQQAVGGGRRLAGLGDNLKCCSAGCATFCSLPNDKEGSCPQVNINFPQLGLCRDQCQVDSQCPGQMKCCRNGCGKVSCVTPNF

SEQ ID NO: 838282 - protein, 124 aa, Homo sapiens; identical to SEQ ID NO: 838280

SEQ ID NO: 838283 - protein, 124 aa, Homo sapiens; identical to SEQ ID NO: 838280

SEQ ID NO: 838284 - protein, 264 aa, Homo sapiens
MTSIPFPGDRLLQVDGVILCGLTHKQAVQCLKGPGQVARLVLERRVPRSTQQCPSANDSMGDERTAVSLVTALPGRPSSCVSVTDGPKFEVKLKKNANGLGFSFVQMEKESCSHLKSDLVRIKRLFPGQPAEENGAIAAGDIILAVNGRSTEGLIFQEVLHLLRGAPQEVTLLLCRPPPGALPEMEQEWQTPELSADKEFTRATCTDSCTSPILDQEDSWRDSASPDAGEGLGLRPESSQKAIREAQWGQNRERPLGQFLDTFS

SEQ ID NO: 838285 - protein, 1017 aa, Homo sapiens
SGRARRRLRGSGCSRRGAAQGTLDRGRAAGKGGSGENPERRGVLQLLLLLLAAAEATARARARARAGATAPPAMAFANFRRILRLSTFEKRKSREYEHVRRDLDPNEVWEIVGELGDGAFGKVYKAKNKETGALAAAKVIETKSEEELEDYIVEIEILATCDHPYIVKLLGAYYHDGKLWIMIEFCPGGAVDAIMLELDRGLTEPQIQVVCRQMLEALNFLHSKRIIHRDLKAGNVLMTLEGDIRLGMAPEVVMCETMKDTPYDYKADIWSLGITLIEMAQIEPPHHELNPMRVLLKIAKSDPPTLLTPSKWSVEFRDFLKIALDKNPETRPSAAQLLEHPFVSSITSNKALRELVAEAKAEVMEEIEDGRDEGEEEDAVDAASTLENHTQNSSEVSPPSLNADKPLEESPSTPLAPSQSQDSVNEPCSQPSGDRSLQTTSPPVVAPGNENGLAVPVPLRKSRPVSMDARIQVAQEKQVAEQGGDLSPAANRSQKASQSRPNSSALETLGGEKLANGSLEPPAQAAPGPSKRDSDCSSLCTSESMDYGTNLSTDLSLNKEMGSLSIKDPKLYKKTLKRTRKFVVDGVEVSITTSKIISEDEKKDEEMRFLRRQELRELRLLQKEEHRNQTQLSNKHELQLEQMHKRFEQEINAKKKFFDTELENLERQQKQQVEKMEQDHAVRRREEARRIRLEQDRDYTRFQEQLKLMKKEVKNEVEKLPRQQRKESMKQKMEEHTQKKQLLDRDFVAKQKEDLELAMKRLTTDNRREICDKERECLMKKQELLRDREAALWEMEEHQLQERHQLVKQQLKDQYFLQRHELLRKHEKEREQMQRYNQRMIEQLKVRQQQEKARLPKIQRSEGKTRMAMYKKSLHINGGGSAAEQREKIKQFSQQEEKRQKSERLQQQQKHENQMRDMLAQCESNMSELQQLQNEKCHLLVEHETQKLKALDESHNQNLKEWRDKLRPRKKALEEDLNQKKREQEMFFKLSEEAECPNPSTPSKAAKFFPYSSADAS

SEQ ID NO: 838286 - protein, 1203 aa, Homo sapiens
SGRARRRLRGSGCSRRGAAQGTLDRGRAAGKGGSGENPERRGVLQLLLLLLAAAEATARARARARAGATAPPAMAFANFRRILRLSTFEKRKSREYEHVRRDLDPNEVWEIVGELGDGAFGKVYKAKNKETGALAAAKVIETKSEEELEDYIVEIEILATCDHPYIVKLLGAYYHDGKLWIMIEFCPGGAVDAIMLELDRGLTEPQIQVVCRQMLEALNFLHSKRIIHRDLKAGNVLMTLEGDIRLADFGVSAKNLKTLQKRDSFIGTPYWMAPEVVMCETMKDTPYDYKADIWSLGITLIEMAQIEPPHHELNPMRVLLKIAKSDPPTLLTPSKWSVEFRDFLKIALDKNPETRPSAAQLLEHPFVSSITSNKALRELVAEAKAEVMEEIEDGRDEGEEEDAVDAASTLENHTQNSSEVSPPSLNADKPLEESPSTPLAPSQSQDSVNEPCSQPSGDRSLQTTSPPVVAPGNENGLAVPVPLRKSRPVSMDARIQVAQEKQVAEQGGDLSPAANRSQKASQSRPNSSALETLGGEKLANGSLEPPAQAAPGPSKRDSDCSSLCTSESMDYGTNLSTDLSLNKEMGSLSIKMKQMEAQRSEEPAQGQVGVGRWTDPRLQTLNLPSGSHGLLLRELEGADSFPGLPDKSRGVTKLTMGHLTLYPKLILEEILYDFVFPSQMYLVKNTQRDSNIFAKQRGVTGAATANQLEAGKGSTVPTGHRDKHAQQLLPVSSVFLRTGILPLLFLKTLSEKKDPKLYKKTLKRTRKFVVDGVEVSITTSKIISEDEKKDEEMRFLRRQELRELRLLQKEEHRNQTQLSNKHELQLEQMHKRFEQEINAKKKFFDTELENLERQQKQQVEKMEQDHAVRRREEARRIRLEQDRDYTRFQEQLKLMKKEVKNEVEKLPRQQRKESMKQKMEEHTQKKQLLDRDFVAKQKEDLELAMKRLTTDNRREICDKERECLMKKQELLRDREAALWEMEEHQLQERHQLVKQQLKDQYFLQRHELLRKHEKEREQMQRYNQRMIEQLKVRQQQEKARLPKIQRSEGKTRMAMYKKSLHINGGGSAAEQREKIKQFSQQEEKRQKSERLQQQQKHENQMRDMLAQCESNMSELQQLQNEKCHLLVEHETQKLKALDESHNQNLKEWRDKLRPRKKALEEDLNQKKREQEMFFKLSEEAECPNPSTPSKAAKFFPYSSADAS

SEQ ID NO: 838287 - protein, 238 aa, Homo sapiens
LGGMSSADREAALWEMEEHQLQERHQLVKQQLKDQYFLQRHELLRKHEKEREQMQRYNQRMIEQLKVRQQQEKARLPKIQRSEGKTRMAMYKKSLHINGGGSAAEQREKIKQFSQQEEKRQKSERLQQQQKHENQMRDMLAQCESNMSELQQLQNEKCHLLVEHETQKLKALDESHNQNLKEWRDKLRPRKKALEEDLNQKKREQEMFFKLSEEAECPNPSTPSKAAKFFPYSSADAS

SEQ ID NO: 838288 - protein, 1041 aa, Homo sapiens
SGRARRRLRGSGCSRRGAAQGTLDRGRAAGKGGSGENPERRGVLQLLLLLLAAAEATARARARARAGATAPPAMAFANFRRILRLSTFEKRKSREYEHVRRDLDPNEVWEIVGELGDGAFGKVYKAKNKETGALAAAKVIETKSEEELEDYIVEIEILATCDHPYIVKLLGAYYHDGKLWIMIEFCPGGAVDAIMLELDRGLTEPQIQVVCRQMLEALNFLHSKRIIHRDLKAGNVLMTLEGDIRLADFGVSAKNLKTLQKRDSFIGTPYWMAPEVVMCETMKDTPYDYKADIWSLGITLIEMAQIEPPHHELNPMRVLLKIAKSDPPTLLTPSKWSVEFRDFLKIALDKNPETRPSAAQLLEHPFVSSITSNKALRELVAEAKAEVMEEIEDGRDEGEEEDAVDAASTLENHTQNSSEVSPPSLNADKPLEESPSTPLAPSQSQDSVNEPCSQPSGDRSLQTTSPPVVAPGNENGLAVPVPLRKSRPVSMDARIQVAQEKQVAEQGGDLSPAANRSQKASQSRPNSSALETLGGEKLANGSLEPPAQAAPGPSKRDSDCSSLCTSESMDYGTNLSTDLSLNKEMGSLSIKDPKLYKKTLKRTRKFVVDGVEVSITTSKIISEDEKKDEEMRFLRRQELRELRLLQKEEHRNQTQLSNKHELQLEQMHKRFEQEINAKKKFFDTELENLERQQKQQVEKMEQDHAVRRREEARRIRLEQDRDYTRFQEQLKLMKKEVKNEVEKLPRQQRKESMKQKMEEHTQKKQLLDRDFVAKQKEDLELAMKRLTTDNRREICDKERECLMKKQELLRDREAALWEMEEHQLQERHQLVKQQLKDQYFLQRHELLRKHEKEREQMQRYNQRMIEQLKVRQQQEKARLPKIQRSEGKTRMAMYKKSLHINGGGSAAEQREKIKQFSQQEEKRQKSERLQQQQKHENQMRDMLAQCESNMSELQQLQNEKCHLLVEHETQKLKALDESHNQNLKEWRDKLRPRKKALEEDLNQKKREQEMFFKLSEEAECPNPSTPSKAAKFFPYSSADAS

SEQ ID NO: 838289 - protein, 567 aa, Homo sapiens
SGRARRRLRGSGCSRRGAAQGTLDRGRAAGKGGSGENPERRGVLQLLLLLLAAAEATARARARARAGATAPPAMAFANFRRILRLSTFEKRKSREYEHVRRDLDPNEVWEIVGELGDGAFGKVYKAKNKETGALAAAKVIETKSEEELEDYIVEIEILATCDHPYIVKLLGAYYHDGKLWIMIEFCPGGAVDAIMLELDRGLTEPQIQVVCRQMLEALNFLHSKRIIHRDLKAGNVLMTLEGDIRLADFGVSAKNLKTLQKRDSFIGTPYWMAPEVVMCETMKDTPYDYKADIWSLGITLIEMAQIEPPHHELNPMRVLLKIAKSDPPTLLTPSKWSVEFRDFLKIALDKNPETRPSAAQLLEHPFVSSITSNKALRELVAEAKAEVMEEIEDGRDEGEEEDAVDAASTLENHTQNSSEVSPPSLNADKPLEESPSTPLAPSQSQDSVNEPCSQPSGDRSLQTTSPPVVAPGNENGLAVPVPLRKSRPVSMDARIQVAQEKQLAFQTWAGSLLDFSSGRKSIRGKWNAPAPGTWQKHRFCTSDGLLLGLRGLSWLPPDSDSTAAECI

SEQ ID NO: 838290 - protein, 199 aa, Homo sapiens
SGRARRRLRGSGCSRRGAAQGTLDRGRAAGKGGSGENPERRGVLQLLLLLLAAAEATARARARARAGATAPPAMAFANFRRILRLSTFEKRKSREYEHVRRDLDPNEVWEIVGELGDGAFGKVYKAKNKETGALAAAKVIETKSEEELEDYIVEIEILATCDHPYIVKLLGAYYHDGKLWVRLPPCLSQLSPHGLVLWS

SEQ ID NO: 838291 - protein, 127 aa, Homo sapiens
MVFPGQDPKLYKKTLKRTRKFVVDGVEVSITTSKIISEDEKKDEEMRFLRQAWEGPPMVVTGWGYGKRSGHWSFGERAVCLQHEVGESRRQKETHFACDPALPHLPNRSPIYPLIHSFIHPSIHLLT

SEQ ID NO: 838292 - protein, 1041 aa, Homo sapiens; identical to SEQ ID NO: 838288

SEQ ID NO: 838293 - protein, 60 aa, Homo sapiens
MVFPGQDPKLYKKTLKRTRKFVVDGVEVSITTSKIISEDEKKDEEMRFLRRQELRESPSN

SEQ ID NO: 838294 - protein, 464 aa, Homo sapiens
MLPLLFLKTLSEKKDPKLYKKTLKRTRKFVVDGVEVSITTSKIISEDEKKDEEMRFLRRQELRELRLLQKEEHRNQTQLSNKHELQLEQMHKRFEQEINAKKKFFDTELENLERQQKQQVEKMEQDHAVRRREEARRIRLEQDRDYTRFQEQLKLMKKEVKNEVEKLPRQQRKESMKQKMEEHTQKKQLLDRDFVAKQKEDLELAMKRLTTDNRREICDKERECLMKKQELLRDREAALWEMEEHQLQERHQLVKQQLKDQYFLQRHELLRKHEKEREQMQRYNQRMIEQLKVRQQQEKARLPKIQRSEGKTRMAMYKKSLHINGGGSAAEQREKIKQFSQQEEKRQKSERLQQQQKHENQMRDMLAQCESNMSELQQLQNEKCHLLVEHETQKLKALDESHNQNLKEWRDKLRPRKKALEEDLNQKKREQEMFFKLSEEAECPNPSTPSKAAKFFPYSSADAS

SEQ ID NO: 838295 - protein, 1041 aa, Homo sapiens; identical to SEQ ID NO: 838288

SEQ ID NO: 838296 - protein, 373 aa, Homo sapiens
SGRARRRLRGSGCSRRGAAQGTLDRGRAAGKGGSGENPERRGVLQLLLLLLAAAEATARARARARAGATAPPAMAFANFRRILRLSTFEKRKSREYEHVRRDLDPNEVWEIVGELGDGAFGKVYKAKNKETGALAAAKVIETKSEEELEDYIVEIEILATCDHPYIVKLLGAYYHDGKLWIMIEFCPGGAVDAIMLELDRGLTEPQIQVVCRQMLEALNFLHSKRIIHRDLKAGNVLMTLEGDIRLADFGVSAKNLKTLQKRDSFIGTPYWMAPEVVMCETMKDTPYDYKADIWSLGITLIEMAQIEPPHHELNPMRVLLKIAKSDPPTLLTPSKWSVEFRDFLKIALDKNPETRPSAAQLLEVSGFPSHSAP

SEQ ID NO: 838297 - protein, 125 aa, Homo sapiens
ARARARARAGATAPPAMAFANFRRILRLSTFEKRKSREYEHVRRDLDPNEVWEIVGELGDGAFGKVYKVRALRWVAGRASRGSGRKGCLSRTRPAWLRLRGLPGAEFGVPGPHPDDSCFLGGTSL

SEQ ID NO: 838298 - protein, 327 aa, Homo sapiens
MNFRQLLLHLPRYLGASGSPRRLWWSPSLDTISSVGSWRGRSSKSPAHWNQVVSEAEKIVGYPTSFMSLRCLLSDELSNIAMQVRKLVGTQHPLLTTARILRGDSMLAVLRALACSRHLPCLGSHFGGFEEPFSPPTALWEPLSGLAKAGAHSLSLQGGVEGEAPAGTGTACSACGPAGVPGGRGLGGPRTRSSQPALLAPGNGGLSTRASGCGGCTESPSSAGPLALCSISRRALAAFPRGRAGDLQPAMPEPPTHSMGSCAARTSPTSTTPYSTAPSPIDHPRAEECERTAQDWQAAPPAAPVRDPLGEASWAPESGGDVESLYI

SEQ ID NO: 838299 - protein, 348 aa, Homo sapiens
MNFRQLLLHLPRYLGASGSPRRLWWSPSLDTISSVGSWRGRSSKSPAHWNQVVSEAEKIVGYPTSFMSLRCLLSDELSNIAMQVRKLVGTQHPLLTTARGLVHDSWNSLQLRGLVVLLISKAAGPSSVNTSCQNYDMVSGIYSCQRSLAEITELIHIALLVHRGIVNLNELQSSDGPLKDMQFGNKIAILSGDFLLANACNGLALLQNTKVVELLASALMDLVQGVYHENSTSKESYITDDIGISTWKEQTFLSHGALLAKSCQAAMELAKHDAEVQNMAFQYGKHMAMSHKINSDVQPFIKEKTSDSMTFNLNSAPVVLHQEFLGRDLWIKQIGEAQEKGRLDYAKR

SEQ ID NO: 838300 - protein, 282 aa, Homo sapiens
MSLRCLLSDELSNIAMQVRKLVGTQHPLLTTARGLVHDSWNSLQLRGLVVLLISKAAGPSSVNTSCQNYDMVSGIYSCQRSLAEITELIHIALLVHRGIVNLNELQSSDGPLKDMQFGNKIAILSGDFLLANACNGLALLQNTKVVELLASALMDLVQGVYHENSTSKESYITDDIGISTWKEQTFLSHGALLAKSCQAAMELAKHDAEVQNMAFQYGKHMAMSHKINSDVQPFIKEKTSDSMTFNLNSAPVVLHQEFLGRDLWIKQIGEAQEKGRLDYAKR

SEQ ID NO: 838301 - protein, 143 aa, Homo sapiens
MNFRQLLLHLPRYLGASGSPRRLWWSPSLDTISSVGSWRGRSSKSPAHWNQVVSEAEKIVGYPTSFMSLRCLLSDELSNIAMQVRKLVGTQHPLLTTARGLVHDSWNSLQLRGLVVLLISKAAGPSSVNTSCQNYDMVSGIYS

SEQ ID NO: 838302 - protein, 359 aa, Homo sapiens
MNFRQLLLHLPRYLGASGSPRRLWWSPSLDTISSVGSWRGRSSKSPAHWNQVVSEAEKIVGYPTSFMSLRCLLSDELSNIAMQVRKLVGTQHPLLTTARGLVHDSWNSLQLRGLVVLLISKAAGPSSVNTSCQNYDMVSGIYSCQRSLAEITELIHIALLVHRGIVNLNELQSSDGPLKDMQFGNKIAILSGDFLLANACNGLALLQNTKVVELLASALMDLVQGVYHENSTSKESYITDDIGISTWKEQTFLSHGALLAKSCQAAMELAKHDAEVQNMAFQYGKHMAMSHKINSDVQPFIKEKTSDSMTFNLNSAPVVLHQEFLGRDLWIKQIGESSSTEVQLSNFQQMLLSTLLSTA

SEQ ID NO: 838303 - protein, 399 aa, Homo sapiens
MNFRQLLLHLPRYLGASGSPRRLWWSPSLDTISSVGSWRGRSSKSPAHWNQVVSEAEKIVGYPTSFMSLRCLLSDELSNIAMQVRKLVGTQHPLLTTARGLVHDSWNSLQLRGLVVLLISKAAGPSSVNTSCQNYDMVSGIYSCQRSLAEITELIHIALLVHRGIVNLNELQSSDGPLKDMQFGNKIAILSGDFLLANACNGLALLQNTKVVELLASALMDLVQGVYHENSTSKESYITDDIGISTWKEQTFLSHGALLAKSCQAAMELAKHDAEVQNMAFQYGKHMAMSHKINSDVQPFIKEKTSDSMTFNLNSAPVVLHQEFLGRDLWIKQIGEAQEKGRLDYAKLRERIKAGKGVTSAIDLCRYHGNKALEALESFPPSEARSALENIVFAVTRFS

SEQ ID NO: 838304 - protein, 220 aa, Homo sapiens
SGVSLLAAEDVSGCHGGLVHDSWNSLQLRGLVVLLISKAAGPSSVNTSCQNYDMVSGIYSCQRSLAEITELIHIALLVHRGIVNLNELQSSDGPLKDMQFGNKIAILSGDFLLANACNGLALLQNTKVVELLASALMDLVQGVYHENSTSKESYITDDIGISTWKEQTFLSHGALLAKSCQAAMELAKHDAEVQNMAFQYGKHMAMSHKAQEKGRLDYAK

SEQ ID NO: 838305 - protein, 212 aa, Homo sapiens
MVSGIYSCQRSLAEITELIHIALLVHRGIVNLNELQSSDGPLKDMQFGNKIAILSGDFLLANACNGLALLQNTKVVELLASALMDLVQGVYHENSTSKESYITDDIGISTWKEQTFLSHGALLAKSCQAAMELAKHDAEVQNMAFQYGKHMAMSHKINSDVQPFIKEKTSDSMTFNLNSAPVVLHQEFLGRDLWIKQIGEAQEKGRLDYAKR

SEQ ID NO: 838306 - protein, 240 aa, Homo sapiens
MNFRQLLLHLPRYLGASGSPRRLWWSPSLDTISSVGSWRGRSSKSPAHWNQVVSEAEKIVGYPTSFMSLRCLLSDELSNIAMQVRKLVGTQHPLLTTARGLVHDSWNSLQLRGLVVLLISKAAGPSSVNTSCQNYDMVSGIYSCQRSLAEITELIHIALLVHRGIVNLNELQSSDGPLKDMQFGNKIAILSGDFLLANACNGLALLQNTKSFSFNGPIAIYQMGDCESAWILSKHPRALS

SEQ ID NO: 838307 - protein, 365 aa, Homo sapiens
RATRTHARDRTSSLVERLKMAASQAVEEMRSRVVLGEFGVRNVHTTDFPGNYSGYDDAWDQDRFEKNFRVDVVHMDENSLEFDMVGIDAAIANAFRRILLAEVPTMAVEKVLVYNNTSIVQDEILAHRLGLIPIHADPRLFEYRNQGDEEGTEIDTLQFRLQVRCTRNPHAAKDSSDPNELYVNHKVYTRHMTWIPLGNQADLFPEGTIRPVHDDILIAQLRPGQEIDLLMHCVKGIGKDHAKFSPVATASYRLLPDITLLEPVEGEAAEELSRCFSPGVIEVQEVQGKKVARVANPRLDTFSREIFRNEKLKKVVRLARVRDHYIFSVESTGVLPPDVLVSEAIKVLMGKCRRFLDELDAVQMD

SEQ ID NO: 838308 - protein, 333 aa, Homo sapiens
RATRTHARDRTSSLVERLKMAASQAVEEMRSRVVLGEFGVRNVHTTDFPGNYSGYDDAWDQDRFEKNFRVDVVHMDENSLEFDMVGIDAAIANAFRRILLAEVPTMAVEKVLVYNNTSIVQDEILAHRLGLIPIHADPRLFEYRNQGDEEGTEIDTLQFRLQVRCTRNPHAAKDSSDPNELYVNHKVYTRHMTWIPLGNQADLFPEGTIRPVHDDILIAQLRPGQEIDLLMHCVKGIGKDHAKFSPVATASYRLLPDITLLEPVEGEAAEELSRCFSPGVIEVQEVQGKKVARVANPRLDTFSREIFRNEKLKKVVRLARVRDHYICEYEVVR

SEQ ID NO: 838309 - protein, 292 aa, Homo sapiens
RATRTHARDRTSSLVERLKMAASQAVEEMRSRVVLGEFGVRNVHTTDFPGNYSGYDDAWDQDRFEKNFRVDVVHMDENSLEFDMVGIDAAIANAFRRILLAEVPTMAVEKVLVYNNTSIVQDEILAHRLGLIPIHADPRLFEYRNQGDEEGTEIDTLQFRLQVRCTRNPHAAKDSSDPNELYVNHKVYTRHMTWIPLGNQADLFPEGTIRPVHDDILIAQLRPGQEIDLLMHCVKGIGKDHAKFSPVATASYRLLPDITLLEPVEGEAAEELSRCFSPGVIEVQEVQAGMRS

SEQ ID NO: 838310 - protein, 169 aa, Homo sapiens
RATRTHARDRTSSLVERLKMAASQAVEEMRSRVVLGEFGVRNVHTTDFPGNYSGYDDAWDQDRFEKNFRVDVVHMDENSLEFDMVGIDAAIANAFRRILLAEVPTMAVEKVLVYNNTSIVQDEILAHRLGLIPIHADPRLFEYRNQGEKMKFWEKWTIWVQILVDCDVG

SEQ ID NO: 838311 - protein, 291 aa, Homo sapiens
MDENSLEFDMVGIDAAIANAFRRILLAEVPTMAVEKVLVYNNTSIVQDEILAHRLGLIPIHADPRLFEYRNQGDEEGTEIDTLQFRLQVRCTRNPHAAKDSSDPNELYVNHKVYTRHMTWIPLGNQADLFPEGTIRPVHDDILIAQLRPGQEIDLLMHCVKGIGKDHAKFSPVATASYRLLPDITLLEPVEGEAAEELSRCFSPGVIEVQEVQGKKVARVANPRLDTFSREIFRNEKLKKVVRLARVRDHYIFSVESTGVLPPDVLVSEAIKVLMGKCRRFLDELDAVQMD

SEQ ID NO: 838312 - protein, 260 aa, Homo sapiens [sequence omitted]

SEQ ID NO: 838313 - protein, 315 aa, Homo sapiens
RATRTHARDRTSSLVERLKMAASQAVEEMRSRVVLGEFGVRNVHTTDFPGNYSGYDDAWDQDRFEKNFRVDVVHMDENSLEFDMVGIDAAIANAFRRILLAEVPTMAVEKVLVYNNTSIVQDEILAHRLGLIPIHADPRLFEYRNQGDEEGTEIDTLQFRLQVRCTRNPHAAKDSSDPNELYVNHKVYTRHMTWIPLGNQADLFPEGTIRPVHDDILIAQLRPGQEIDLLMHCVKGIGKKVARVANPRLDTFSREIFRNEKLKKVVRLARVRDHYIFSVESTGVLPPDVLVSEAIKVLMGKCRRFLDELDAVQMD

SEQ ID NO: 838314 - protein, 361 aa, Homo sapiens
RATRTHARDRTSSLVERLKMAASQAVEEMRSRVVLGEFGVRNVHTTDFPGNYSGYDDAWDQDRFEKNFRVDVVHMDENSLEFDMVGIDAAIANAFRRILLAEVPTMAVEKVLVYNNTSIVQDEILAHRLGLIPIHADPRLFEYRNQGDEEGTEIDTLQFRLQVRCTRNPHAAKDSSDPNELYVNHKVYTRHMTWIPLGNQADLFPEGTIRPVHDDILIAQLRPGQEIDLLMHCVKGIGKDHAKFSPVATASYRLLPDITLLEPVEGEAAEELSRCFSPGVIEVQEVQGKKVARVANPRLDTFSREIFRNEKLKKVVRLARVRDHYICKKDLLAAVAHTCNPSTLGGQGEWITGSRERDHPG

SEQ ID NO: 838315 - protein, 328 aa, Homo sapiens
RATRTHARDRTSSLVERLKMAASQAVEEMRSRVVLGEFGVRNVHTTDFPGNYSGYDDAWDQDRFEKNFRVDVVHMDENSLEFDMVGIDAAIANAFRRILLAEVPTMAVEKVLVYNNTSIVQDEILAHRLGLIPIHADPRLFEYRNQGDEEGTEIDTLQFRLQVRCTRNPHAAKDSSDPNELYVNHKVYTRHMTWIPLGNQADLFPEGTIRPVHDDILIAQLRPGQEIDLLMHCVKGIGKDHAKFSPVATASYRLLPDITLLEPVEGEAAEELSRCFSPGVIEVQEVQGKKVARVANPRLDTFSREIFRNEKLKKCRRFLDELDAVQMD

SEQ ID NO: 838316 - protein, 306 aa, Homo sapiens
RATRTHARDRTSSLVERLKMAASQAVEEMRSRVVLGEFGVRNVHTTDFPGNYSGYDDAWDQDRFEKNFRVDVVHMDENSLEFDMVGIDAAIANAFRRILLAEVPTMAVEKVLVYNNTSIVQDEILAHRLGLIPIHADPRLFEYRNQGDEEGTEIDTLQFRLQVRCTRNPHAAKDSSDPNELYVNHKVYTRHMTWIPLGNQADLFPEGTIRPVHDDILIAQLRPGQEIDLLMHCVKGIGKDHAKFSPVATASYRLLPDITLLEPVEGEAAEELSRCFSPGVIEVQEVQGMVFGMLFKLGPKLYFLSR

SEQ ID NO: 838317 - protein, 169 aa, Homo sapiens; identical to SEQ ID NO: 838310

SEQ ID NO: 838318 - protein, 118 aa, Homo sapiens
RATRTHARDRTSSLVERLKMAASQAVEEMRSRVVLGEFGVRNVHTTDFPGNYSGYDDAWDQDRFEKNFRVDVVHMDENSLEFDMVGIDAAIANAFRRILLAEVLAGMVTRLELLWELH

SEQ ID NO: 838319 - protein, 87 aa, Homo sapiens
MAKHLKFIARTVMVQEGNVESAYRTLNRILTMDGLIEDIKHRRYYEKPCRRRQRESYERCRRIYNMEMARKINFLMRKNRADPWQGC

SEQ ID NO: 838320 - protein, 75 aa, Homo sapiens
MVQEGNVESAYRTLNRILTMDGLIEDIKHRRYYEKPCRRRQRESYERCRRIYNMEMARKINFLMRKNRADPWQGC

SEQ ID NO: 838321 - protein, 75 aa, Homo sapiens; identical to SEQ ID NO: 838320

SEQ ID NO: 838322 - protein, 75 aa, Homo sapiens; identical to SEQ ID NO: 838320

SEQ ID NO: 838323 - protein, 75 aa, Homo sapiens; identical to SEQ ID NO: 838320

SEQ ID NO: 838324 - protein, 87 aa, Homo sapiens; identical to SEQ ID NO: 838319

SEQ ID NO: 838325 - protein, 160 aa, Homo sapiens
MLSPKPQQLNQQNCSPEHYEPQLKTQKDLAVLHIPLEEPVLYIDKPQINLTTSCSAYIPPSSANPDEGYKVSASTHVKTLGQGVAHEVEEMGYIFYPSPKEILTMDGLIEDIKHRRYYEKPCRRRQRESYERCRRIYNMEMARKINFLMRKNRADPWQGC

SEQ ID NO: 838326 - protein, 83 aa, Homo sapiens
LALHLHDNGGERLSAETLFIIPATILTMDGLIEDIKHRRYYEKPCRRRQRESYERCRRIYNMEMARKINFLMRKNRADPWQGC

SEQ ID NO: 838327 - protein, 75 aa, Homo sapiens; identical to SEQ ID NO: 838320

SEQ ID NO: 838328 - protein, 87 aa, Homo sapiens; identical to SEQ ID NO: 838319

SEQ ID NO: 838329 - protein, 279 aa, Homo sapiens
MHITGPENGDPVRPGVAMTDLATGLYAYGAIMAGLIQKYKTGKGLFIDCNLLSSQVACLSHIAANYLIGQKEAKRWGTAHGSIVPYQAFKTKDGYIVVGAGNNQQFATVCKILDLPELIDNSKYKTNHLRVHNRKELIKILSERFEEELTSKWLYLFEGSGVPYGPINNMKNVFAEPQNAVSGFQSLLHSLAHGPFLHLQGSARVLHNGLVMEMEHPTVGKISVPGPAVRYSKFKMSEARPPPLLGQHTTHILKEVLRYDDRAIGELLSAGVVDQHETH

SEQ ID NO: 838330 - protein, 150 aa, Homo sapiens
  misc_feature (1)..(1): Xaa can be any naturally occurring amino acid
XQFRHRCQILDLPELIDNSKYKTNHLRVHNRKELIKILSERFEEELTSKWLYLFEGSGVPYGPINNMKNVFAEPQVLHNGLVMEMEHPTVGKISVPGPAVRYSKFKMSEARPPPLLGQHTTHILKEVLRYDDRAIGELLSAGVVDQHETH

SEQ ID NO: 838331 - protein, 330 aa, Homo sapiens
HETESTYYLSVNRNKKSIAVNIKDPQGGVIELAAVCDVFVDEIAPHIIYCSITGYGQTGPISQRAGYDAVASAVSGLMHITGPENGDPVRPGVAMTDLATGLYAYGAIMAGLIQKYKTGKGLFIDCNLLSSQVACLSHIAANYLIGQKEAKRWGTAHGSIVPYQAFKTKDGYIVVGAGNNQQFATVCKILDLPELIDNSKYKTNHLRVHNRKELIKILSERFEEELTSKWLYLFEGSGVPYGPINNMKNVFAEPQVLHNGLVMEMEHPTVGKISVPGPAVRYSKFKMSEARPPPLLGQHTTHILKEVLRYDDRAIGELLSAGVVDQHETH

SEQ ID NO: 838332 - protein, 445 aa, Homo sapiens
MPSETHAMLATLARVAALRRTCLFSGRGGGRGLWTGRPQSDMNNIKPLEGVKILDLTRVLAGPFATMNLGDLGAEVIKVERPGAGDDTRTWGPPFVGTESTYYLSVNRNKKSIAVNIKDPKGVKIIKELAAVCDVFVENYVPGKLSAMGLGYEDIDEIAPHIIYCSITGYGQTGPISQRAGYDAVASAVSGLMHITGPENGDPVRPGVAMTDLATGLYAYGAIMAGLIQKYKTGKGLFIDCNLLSSQVACLSHIAANYLIGQKEAKRWGTAHGSIVPYQAFKTKDGYIVVGAGNNQQFATVCKILDLPELIDNSKYKTNHLRVHNRKELIKILSERFEEELTSKWLYLFEGSGVPYGPINNMKNVFAEPQVLHNGLVMEMEHPTVGKISVPGPAVRYSKFKMSEARPPPLLGQHTTHILKEVLRYDDRAIGELLSAGVVDQHETH

SEQ ID NO: 838333 - protein, 445 aa, Homo sapiens; identical to SEQ ID NO: 838332

SEQ ID NO: 838334 - protein, 361 aa, Homo sapiens
MPSETHAMLATLARVAALRRTCLFSGRGGGRGLWTGRPQSDMNNIKPLEGVKILDLTRVLAGPFATMNLGDLGAEVIKVERPGAGDDTRTWGPPFVGTESTYYLSVNRNKKSIAVNIKDPKGVKIIKELAAVCDVFVENYVPGKLSAMGLGYEDIDEIAPHIIYCSITGYGQTGPISQRAGYDAVASAVSGLMHITGPENGDPVRPGVAMTDLATGLYAYGAIMAGLIQKYKTGKGLFIDCNLLSSQVACLSHIAANYLIGQKEAKRWGTAHGSIVPYQAFKTKDGYIVVGAGNNQQFATVCKILDLPELIDNSKYKTNHLRVHNRKELIKILSERFEEELTSKWLYLFEGTAQRWSGGPT

SEQ ID NO: 838335 - protein, 320 aa, Homo sapiens
  misc_feature (281)..(281): Xaa can be any naturally occurring amino acid
  misc_feature (287)..(287): Xaa can be any naturally occurring amino acid
MPSETHAMLATLARVAALRRTCLFSGRGGGRGLWTGRPQSDMNNIKPLEGVKILDLTRVLAGPFATMNLGDLGAEVIKVERPGAGDDTRTWGPPFVGTESTYYLSVNRNKKSIAVNIKDPKGVKIIKELAAVCDVFVENYVPGKLSAMGLGYEDIDEIAPHIIYCSITGYGQTGPISQRAGYDAVASAVSGLMHITGPENGDPVRPGVAMTDLATGLYAYGAIMAGLIQKYKTGKGLFIDCNLLSSQVACLSHIAANYLIGQKEAKRWGTAHGSIVPYQLXKPRMAXIEVEQVPQSCQPLQDLELACVNDNSVSTTLRDP

SEQ ID NO: 838336 - protein, 68 aa, Homo sapiens
LLLRSQRSNCCYFIGPAVRYSKFKMSEARPPPLLGQHTTHILKEVLRYDDRAIGELLSAGVVDQHETH

SEQ ID NO: 838337 - protein, 445 aa, Homo sapiens; identical to SEQ ID NO: 838332

SEQ ID NO: 838338 - protein, 423 aa, Homo sapiens
MPSETHAMLATLARVAALRRTCLFSGRGGGRGLWTGRPQSDMNNIKPLEGVKILDLTRVLAGPFATMNLGDLGAEVIKVERPGAGDDTRTWGPPFVGTESTYYLSVNRNKKSIAVNIKDPKGVKIIKELAAVCDVFVENYVPGKLSAMGLGYEDIDEIAPHIIYCSITGYGQTGPISQRAGYDAVASAVSGLMHITGPEVACLSHIAANYLIGQKEAKRWGTAHGSIVPYQAFKTKDGYIVVGAGNNQQFATVCKILDLPELIDNSKYKTNHLRVHNRKELIKILSERFEEELTSKWLYLFEGSGVPYGPINNMKNVFAEPQNAVSGFQSLLHSLAHGPFLHLQGSARVLHNGLVMEMEHPTVGKISVPGPAVRYSKFKMSEARPPPLLGQHTTHILKEVLRYDDRAIGELLSAGVVDQHETH

SEQ ID NO: 838339 - protein, 445 aa, Homo sapiens; identical to SEQ ID NO: 838332

SEQ ID NO: 838340 - protein, 296 aa, Homo sapiens
MPSETHAMLATLARVAALRRTCLFSGRGGGRGLWTGRPQSDMNNIKPLEGVKILDLTRVLAGPFATMNLGDLGAEVIKVERPGAGDDTRTWGPPFVGTESTYYLSVNRNKKSIAVNIKDPKGVKIIKELAAVCDVFVENYVPGKLSAMGLGYEDIDEIAPHIIYCSITGYGQTGPISQRAGYDAVASAVSGLMHITGPENGDPVRPGVAMTDLATGLYAYGAIMAGLIQKYKTGKGLFIDCNLLSSQVACLSHIAANYLIGQKEAKRWGTAHGSIVPYQMRKRVCYFPEETQPVSG

SEQ ID NO: 838341 - protein, 190 aa, Homo sapiens; identical to SEQ ID NO: 738227

SEQ ID NO: 838342 - protein, 190 aa, Homo sapiens; identical to SEQ ID NO: 738227

SEQ ID NO: 838343 - protein, 190 aa, Homo sapiens; identical to SEQ ID NO: 738227

SEQ ID NO: 838344 - protein, 190 aa, Homo sapiens; identical to SEQ ID NO: 738227

SEQ ID NO: 838345 - protein, 195 aa, Homo sapiens
MKASQCCCCLSHLLASVLLLLLLPELSGPLAVLLQAAEAAPGLGPPDPRPRTLPPLPPGPTPAQQPGRGLAEAAGPRGSEGGNGSNPVAGLETDDHGGKAGEGSVGGGLAVSPNPGDKPMTQRALTVLMVVSGAVLVYFVVRTVRMRRRNRKTRRYGVLDTNIENMELTPLEQDDEDDDNTLFDANHPRRLLWNS

SEQ ID NO: 838346 - protein, 190 aa, Homo sapiens; identical to SEQ ID NO: 738227

SEQ ID NO: 838347 - protein, 107 aa, Homo sapiens
MLHGWGSGVVREGWRISEPSQISGQKCGGMGAAWPRPCCKGQGGRPSSLLSGLPLQGASRMTASSSGLGCSPPTSWRNGLPGRTTCFSMCAGSWRTPAAKAVQTGGR

SEQ ID NO: 838348 - protein, 387 aa, Homo sapiens
MWGYGRSLAKAMLQGPGWPSFLTPVWPPSAGCFKDDRIVFWTWMFSTYFMEKWAPRQDDMLFYVRRKLAYSGSESGADGRKAAEPEVEVEVYRRDSKKLPGLGDPDIDWEESVCLNLILQKQVFASPSKHPMDSKGEESKISYPNIFFMIDSFEEVFSDMTVGEGEMVCVELVASDKTNTFQGVIFQGSIRYEALKKVYDNRVSVAARMAQKMSFGFYKYSNMEFVRMKGPQGKGHAEMAVSRVSTGDTSPCGTEEDSSPASPMHERVTSFSTPPTPERNNRPAFFSPSLKRKVPRNRIAEMKKSHSANDSEEFFREDDGGADLHNATNLRSRSLSGTGRSLVGSWLKLNRADGNFLLYAHLTYVTLPLHRILTDILEVRQKPILMT

SEQ ID NO: 838349 - protein, 451 aa, Homo sapiens
FPASSPDTSQPVAFLAPRDFPFPPKLLIHPQAGVRLSCGAGSMGSQAAAEWRNWASWEVSSSLSGCSMGCFKDDRIVFWTWMFSTYFMEKWAPRQDDMLFYVRRKLAYSGSESGADGRKAAEPEVEVEVYRRDSKKLPGLGDPDIDWEESVCLNLILQKLDYMVTCAVCTRADGGDIHIHKKKSQQVFASPSKHPMDSKGEESKISYPNIFFMIDSFEEVFSDMTVGEGEMVCVELVASDKTNTFQGVIFQGSIRYEALKKVYDNRVSVAARMAQKMSFGFYKYSNMEFVRMKGPQGKGHAEMAVSRVSTGDTSPCGTEEDSSPASPMHERVTSFSTPPTPERNNRPAFFSPSLKRKVPRNRIAEMKKSHSANDSEEFFREDDGGADLHNATNLRSRSLSGTGRSLVGSWLKLNRADGNFLLYAHLTYVTLPLHRILTDILEVRQKPILMT

SEQ ID NO: 838350 - protein, 434 aa, Homo sapiens
GLRAGPPALPAAAAPEPAGGAEAEERSLQHMLRAIAEERGRLSLRREVCGLGCFKDDRIVFWTWMFSTYFMEKWAPRQDDMLFYVRRKLAYSGSESGADGRKAAEPEVEVEVYRRDSKKLPGLGDPDIDWEESVCLNLILQKLDYMVTCAVCTRADGGDIHIHKKKSQQVFASPSKHPMDSKGEESKISYPNIFFMIDSFEEVFSDMTVGEGEMVCVELVASDKTNTFQGVIFQGSIRYEALKKVYDNRVSVAARMAQKMSFGFYKYSNMEFVRMKGPQGKGHAEMAVSRVSTGDTSPCGTEEDSSPASPMHERVTSFSTPPTPERNNRPAFFSPSLKRKVPRNRIAEMKKSHSANDSEEFFREDDGGADLHNATNLRSRSLSGTGRSLVGSWLKLNRADGNFLLYAHLTYVTLPLHRILTDILEVRQKPILMT

SEQ ID NO: 838351 - protein, 343 aa, Homo sapiens
VIFFSPSLKRKVPRNRIAEMKKSHSSKKLPGLGDPDIDWEESVCLNLILQKLDYMVTCAVCTRADGGDIHIHKKKSQQVFASPSKHPMDSKGEESKISYPNIFFMIDSFEEVFSDMTVGEGEMVCVELVASDKTNTFQGVIFQGSIRYEALKKVYDNRVSVAARMAQKMSFGFYKYSNMEFVRMKGPQGKGHAEMAVSRVSTGDTSPCGTEEDSSPASPMHERVTSFSTPPTPERNNRPAFFSPSLKRKVPRNRIAEMKKSHSANDSEEFFREDDGGADLHNATNLRSRSLSGTGRSLVGSWLKLNRADGNFLLYAHLTYVTLPLHRILTDILEVRQKPILMT

SEQ ID NO: 838352 - protein, 151 aa, Homo sapiens
QSQAESTEPVGRRDWLGTQARPWRLPGWTCWVTSFSTPPTPERNNRPAFFSPSLKRKVPRNRIAEMKKSHSANDSEEFFREDDGGADLHNATNLRSRSLSGTGRSLVGSWLKLNRADGNFLLYAHLTYVTLPLHRILTDILEVRQKPILMT

SEQ ID NO: 838353 - protein, 451 aa, Homo sapiens; identical to SEQ ID NO: 838349

SEQ ID NO: 838354 - protein, 203 aa, Homo sapiens
GLRAGPPALPAAAAPEPAGGAEAEERSLQHMLRAIAEERGRLSLRREVCGLGCFKDDRIVFWTWMFSTYFMEKWAPRQDDMLFYVRRKLAYSGSESGADGRKAAEPEVEVEVYRRDSKKLPGLGDPDIDWEESVCLNLILQKLDYMVTCAVCTRADGGDIHIHKKKSQQVFASPSKHPMDSKGEESKISYPNIFFMIDSFEEL

SEQ ID NO: 838355 - protein, 352 aa, Homo sapiens
FPASSPDTSQPVAFLAPRDFPFPPKLLIHPQAGVRLSCGAGSMGSQAAAEWRNWASWEVSSSLSGCSMGCFKDDRIVFWTWMFSTYFMEKWAPRQDDMLFYVRRKLAYSGSESGADGRKAAEPEVEVEVYRRDSKKLPGLGDPDIDWEESVCLNLILQKLDYMVTCAVCTRADGGDIHIHKKKSQQVFASPSKHPMDSKGEESKISYPNIFFMIDSFEEVFSDMTVGEGEMVCVELVASDKTNTFQGVIFQGSIRYEALKKVYDNRVSVAARMAQKMSFGFYKYSNMEFVRMKGPQGKGHAEMAVSRVSTGDTSPCGTEEDSSPASPMHERDLLQHNPTPQFYDFHFAIVEL

SEQ ID NO: 838356 - protein, 338 aa, Homo sapiens
FPASSPDTSQPVAFLAPRDFPFPPKLLIHPQAGVRLSCGAGSMGSQAAAEWRNWASWEVSSSLSGCSMGCFKDDRIVFWTWMFSTYFMEKWAPRQDDMLFYVRRKLAYSGSESGADGRKAAEPEVEVEVYRRDSKKLPGLGDPDIDWEESVCLNLILQKLDYMVTCAVCTRADGGDIHIHKKKSQQVFASPSKHPMDSKGEESKISYPNIFFMIDSFEEVFSDMTVGEGEMVCVELVASDKTNTFQGVIFQGSIRYEALKKVYDNRVSVAARMAQKMSFGFYKYSNMEFVRMKGPQGKGHAEMAVSRVSTGDTSPCGTEEDSSPASPMHERDLLQHTP

SEQ ID NO: 838357 - protein, 408 aa, Homo sapiens
GLRAGPPALPAAAAPEPAGGAEAEERSLQHMLRAIAEERGRLSLRREVCGLGCFKDDRIVFWTWMFSTYFMEKWAPRQDDMLFYVRRKLAYSGSESGADGRKAAEPEVEVEVYRRDSKKLPGLGDPDIDWEESVCLNLILQKQVFASPSKHPMDSKGEESKISYPNIFFMIDSFEEVFSDMTVGEGEMVCVELVASDKTNTFQGVIFQGSIRYEALKKVYDNRVSVAARMAQKMSFGFYKYSNMEFVRMKGPQGKGHAEMAVSRVSTGDTSPCGTEEDSSPASPMHERVTSFSTPPTPERNNRPAFFSPSLKRKVPRNRIAEMKKSHSANDSEEFFREDDGGADLHNATNLRSRSLSGTGRSLVGSWLKLNRADGNFLLYAHLTYVTLPLHRILTDILEVRQKPILMT

SEQ ID NO: 838358 - protein, 413 aa, Homo sapiens
MWGYGRSLAKAMLQGPGWPSFLTPVWPPSAGCFKDDRIVFWTWMFSTYFMEKWAPRQDDMLFYVRRKLAYSGSESGADGRKAAEPEVEVEVYRRDSKKLPGLGDPDIDWEESVCLNLILQKLDYMVTCAVCTRADGGDIHIHKKKSQQVFASPSKHPMDSKGEESKISYPNIFFMIDSFEEVFSDMTVGEGEMVCVELVASDKTNTFQGVIFQGSIRYEALKKVYDNRVSVAARMAQKMSFGFYKYSNMEFVRMKGPQGKGHAEMAVSRVSTGDTSPCGTEEDSSPASPMHERVTSFSTPPTPERNNRPAFFSPSLKRKVPRNRIAEMKKSHSANDSEEFFREDDGGADLHNATNLRSRSLSGTGRSLVGSWLKLNRADGNFLLYAHLTYVTLPLHRILTDILEVRQKPILMT

SEQ ID NO: 838359 - protein, 413 aa, Homo sapiens; identical to SEQ ID NO: 838358

SEQ ID NO: 838360 - protein, 451 aa, Homo sapiens; identical to SEQ ID NO: 838349

SEQ ID NO: 838361 - protein, 451 aa, Homo sapiens; identical to SEQ ID NO: 838349

SEQ ID NO: 838362 - protein, 466 aa, Homo sapiens
FPASSPDTSQPVAFLAPRDFPFPPKLLIHPQAGVRLSCGAGSMGSQAAAEWRNWASWEVSSSLSGCSMGCFKDDRIVFWTWMFSTYFMEKWAPRQDDMLFYVRRKLAYSGSESGADGRKAAEPEVEVEVYRRDSKKLPGLGDPDIDWEESVCLNLILQKLDYMVTCAVCTRADGGDIHIHKKKSQQVFASPSKHPMDSKGEESKISYPNIFFMIDSFEEVFSDMTVGEGEMVCVELVASDKTNTFQGVIFQGSIRYEALKKVYDNRVSVAARMAQKMSFGFYKYSNMEFVRMKGPQGKGHAEMAVSRVSTGDTSPCGTEEDSSPASPMHERVTSFSTPPTPERNNRPAFFSPSLKRKVPRNRIAEMKKSHSANDSEEFFREDDGGADLQCNQTEGSACGGPDGPVGRLSERAKKLLLKDNNQSSAGVGLTTPELGNSNKGGSGNRGHPRADTAARVSLKTEHTGQP

SEQ ID NO: 838363 - protein, 203 aa, Homo sapiens; identical to SEQ ID NO: 838354

SEQ ID NO: 838364 - protein, 164 aa, Homo sapiens
MSEPAGDVRQNPCGSKACRRLFGPVDSEQLSRDCDALMAGCIQEARERWNFDFVTETPLEGDFAWERVRGLGLPKLYLPTGPRRGRDELGGGRRPGTSPALLQGTAEEDHVDLSLSCTLVPRSGEQAEGSPGGPGDSQGRKRRQTSMTDFYHSKRRLIFSKRKP

SEQ ID NO: 838365 - protein, 164 aa, Homo sapiens; identical to SEQ ID NO: 838364

SEQ ID NO: 838366 - protein, 164 aa, Homo sapiens; identical to SEQ ID NO: 838364

SEQ ID NO: 838367 - protein, 190 aa, Homo sapiens
EGDGRRQETSKDPSCCNHRDFFCSGAMSEPAGDVRQNPCGSKACRRLFGPVDSEQLSRDCDALMAGCIQEARERWNFDFVTETPLEGDFAWERVRGLGLPKLYLPTGPRRGRDELGGGRRPGTSPALLQGTAEEDHVDLSLSCTLVPRSGEQAEGSPGGPGDSQGRKRRQTSMTDFYHSKRRLIFSKRKP

SEQ ID NO: 838368 - protein, 164 aa, Homo sapiens; identical to SEQ ID NO: 838364

SEQ ID NO: 838369 - protein, 164 aa, Homo sapiens; identical to SEQ ID NO: 838364

SEQ ID NO: 838370 - protein, 181 aa, Homo sapiens
MSEPAGDVRQNPCGSKACRRLFGPVDSEQLSRDCDALMAGCIQEARERWNFDFVTETPLEGDFAWERVRGLGLPKLYLPTGPRRGRDELGGGRRPGTSPALLQGTAEEDHVDLSLSCTLVPRSGEQAEGSPGGPGDSQGRKRRQTSMTGRRGGKILREAALLRIAFAENIPASTKPFRANS

SEQ ID NO: 838371 - protein, 164 aa, Homo sapiens; identical to SEQ ID NO: 838364

SEQ ID NO: 838372 - protein, 94 aa, Homo sapiens
QRIAKNRHSGGGAGLWLVTAVRNPSRDRVDVPRVLPVLSSRPHWPQGRVSWPPTVFLSWAAPPRPLLLGLADFCCLSSDFYHSKRRLIFSKRKP

SEQ ID NO: 838373 - protein, 164 aa, Homo sapiens; identical to SEQ ID NO: 838364

SEQ ID NO: 838374 - protein, 95 aa, Homo sapiens
QGTAEEDHVDLSLSCTLVPRSGEQAEGSPGGPGDSQGRKRRQTSMTGADMCTEGLCKGPGFSESMVQGLTCLVLVQHAPGRRKQAQRGEATSLRS

SEQ ID NO: 838375 - protein, 164 aa, Homo sapiens; identical to SEQ ID NO: 838364

SEQ ID NO: 838376 - protein, 164 aa, Homo sapiens; identical to SEQ ID NO: 838364

SEQ ID NO: 838377 - protein, 164 aa, Homo sapiens; identical to SEQ ID NO: 838364

SEQ ID NO: 838378 - protein, 182 aa, Homo sapiens
GIEEAGGYLSLGCLFSGAMSEPAGDVRQNPCGSKACRRLFGPVDSEQLSRDCDALMAGCIQEARERWNFDFVTETPLEGDFAWERVRGLGLPKLYLPTGPRRGRDELGGGRRPGTSPALLQGTAEEDHVDLSLSCTLVPRSGEQAEGSPGGPGDSQGRKRRQTSMTDFYHSKRRLIFSKRKP

SEQ ID NO: 838379 - protein, 230 aa, Homo sapiens
RKGMVGDRRPLKTPVRSPDFSEPQFPQQCIRAMWGVFRRQTTHSSNPPLPGQQSCCNHRDFFCSGAMSEPAGDVRQNPCGSKACRRLFGPVDSEQLSRDCDALMAGCIQEARERWNFDFVTETPLEGDFAWERVRGLGLPKLYLPTGPRRGRDELGGGRRPGTSPALLQGTAEEDHVDLSLSCTLVPRSGEQAEGSPGGPGDSQGRKRRQTSMTDFYHSKRRLIFSKRKP

SEQ ID NO: 838380 - protein, 190 aa, Homo sapiens
MSEPAGDVRQNPCGSKACRRLFGPVDSEQLSRDCDALMAGCIQEARERWNFDFVTETPLEGDFAWERVRGLGLPKLYLPTGPRRGRDELGGGRRPGTSPALLQGTAEEDHVDLSLSCTLVPRSGEQAEGSPGGPGDSQGRKRRQTSMTGVLTLLARLECSDTIMAHCSFKLLGSSDLPTSASWVAGKLGL

SEQ ID NO: 838381 - protein, 178 aa, Homo sapiens
MSEPAGDVRQNPCGSKACRRLFGPVDSEQLSRDCDALMAGCIQEARERWNFDFVTETPLEGDFAWERVRGLGLPKLYLPTGPRRGRDELGGGRRPGTSPALLQGTAEEDHVDQPGQHGEISTKNTKIGWAWWCTLVIPATWKAEVGGSLEPRRQRLQSAEIIPLYSSLFQGDSEIHLK

SEQ ID NO: 838382 - protein, 519 aa, Homo sapiens
NNFANSDRPMKATAFPAEVKDLTKRIRTVLMATAQMKEHEKDPEMLIDLQYSLAKSYASTPELRKTWLDSMAKIHVKNGDFSEAAMCYVHVAALVAEFLHRKKLFPNGCSAFKKITPNIDEEGAMKEDAGMMDVHYSEEVLLELLEQCVDGLWKAERYEIISEISKLIVPIYEKRREFEKLTQVYRTLHGAYTKILEVMHTKKRLLGTFFRVAFYGQSFFEEEDGKEYIYKEPKLTGLSEISLRLVKLYGEKFGTENVKIIQDSDKVNAKELDPKYAHIQVTYVKPYFDDKELTERKTEFERNHNISRFVFEAPYTLSGKKQGCIEEQCKRRTILTTSNSFPYVKKRIPINCEQQINLKPIDVATDEIKDKTAELQKLCSSTDVDMIQLQLKLQGCVSVQVNAGPLAYARAFLNDSQASKYPPKKVSELKDMFRKFIQACSIALELNERLIKEDQVEYHEGLKSNFRDMVKELSDIIHEQILQEDTMHSPWMSNTLHVFCAISGTSSDRGYGSPRYAEV

SEQ ID NO: 838383 - protein, 519 aa, Homo sapiens; identical to SEQ ID NO: 838382

SEQ ID NO: 838384 - protein, 244 aa, Homo sapiens
RSGAALRRGGRAGGRSGAGGARRVGLAISRSLRFAISGFVWRLAAPASAAAELRLDCSARRAPRCPRPALPSTRSVSEPGSRGFRGRGVATSGGGADLHAPGQAWRTMPGWIEPAPTAAPPPEPVVPLPFPGCKEQRGFFFFNAEVLVFGFFFKFRMCRSARRGPRGRHRSWTPRSACVRPKPAATLRGMRVGADRSLREAGESWPGSPSLSWENLGESSGAGLWAPPEPPRTPGAPPGTLSAA

SEQ ID NO: 838385 - protein, 764 aa, Homo sapiens
MNGEADCPTDLEMAAPKGQDRWSQEDMLTLLECMKNNLPSNDSSKFKTTESHMDWEKVAFKDFSGDMCKLKWVEISNEVRKFRTLTELILDAQEHVKNPYKGKKLKKHPDFPKKPLTPYFRFFMEKRAKYAKLHPEMSNLDLTKILSKKYKELPEKKKMKYIQDFQREKQEFERNLARFREDHPDLIQNAKKSDIPEKPKTPQQLWYTHEKKVYLKVRPDATTKEVKDSLGKQWSQLSDKKRLKWIHKALEQRKEYEEIMRDYIQKHPELNISEEGITKSTLTKAERQLKDKFDGRPTKPPPNSYSLYCAELMANMKDVPSTERMVLCSQQWKLLSQKEKDAYHKKCDQKKKDYEVELLRFLESLPEEEQQRVLGEEKMLNINKKQATSPASKKPAQEGGKGGSEKPKRPVSAMFIFSEEKRRQLQEERPELSESELTRLLARMWNDLSEKKKAKYKAREAALKAQSERKPGGEREERGKLPESPKRAEEIWQQSVIGDYLARFKNDRVKALKAMEMTWNNMEKKEKLMWIKKAAEDQKRYERELSEMRAPPAATNSSKKMKFQGEPKKPPMNGYQKFSQELLSNGELNHLPLKERMVEIGSRWQRISQSQKEHYKKLAEEQQKQYKVHLDLWVKSLSPQDRAAYKEYISNKRKSMTKLRGPNPKSSRTTLQSKSESEEDDEEDEDDEDEDEEEEDDENGDSSEDGGDSSESSSEDESEDGDENEEDDEDEDDDEDDDEDEDNESEGSSSSSSSSGDSSDSDSN

SEQ ID NO: 838386 - protein, 764 aa, Homo sapiens; identical to SEQ ID NO: 838385

SEQ ID NO: 838387 - protein, 727 aa, Homo sapiens
MNGEADCPTDLEMAAPKGQDRWSQEDMLTLLECMKNNLPSNDSSKFKTTESHMDWEKVAFKDFSGDMCKLKWVEISNEVRKFRTLTELILDAQEHVKNPYKGKKLKKHPDFPKKPLTPYFRFFMEKRAKYAKLHPEMSNLDLTKILSKKYKELPEKKKMKYIQDFQREKQEFERNLARFREDHPDLIQNAKKSDIPEKPKTPQQLWYTHEKKVYLKVRPDEIMRDYIQKHPELNISEEGITKSTLTKAERQLKDKFDGRPTKPPPNSYSLYCAELMANMKDVPSTERMVLCSQQWKLLSQKEKDAYHKKCDQKKKDYEVELLRFLESLPEEEQQRVLGEEKMLNINKKQATSPASKKPAQEGGKGGSEKPKRPVSAMFIFSEEKRRQLQEERPELSESELTRLLARMWNDLSEKKKAKYKAREAALKAQSERKPGGEREERGKLPESPKRAEEIWQQSVIGDYLARFKNDRVKALKAMEMTWNNMEKKEKLMWIKKAAEDQKRYERELSEMRAPPAATNSSKKMKFQGEPKKPPMNGYQKFSQELLSNGELNHLPLKERMVEIGSRWQRISQSQKEHYKKLAEEQQKQYKVHLDLWVKSLSPQDRAAYKEYISNKRKSMTKLRGPNPKSSRTTLQSKSESEEDDEEDEDDEDEDEEEEDDENGDSSEDGGDSSESSSEDESEDGDENEEDDEDEDDDEDDDEDEDNESEGSSSSSSSSGDSSDSDSN

SEQ ID NO: 838388 - protein, 764 aa, Homo sapiens; identical to SEQ ID NO: 838385

SEQ ID NO: 838389 - protein, 727 aa, Homo sapiens; identical to SEQ ID NO: 838387

SEQ ID NO: 838390 - protein, 720 aa, Homo sapiens
MNGEADCPTDLEMAAPKGQDRWSQEDMLTLLECMKNNLPSNDSSKFKTTESHMDWEKVAFKDFSGDMCKLKWVEISNEVRKFRTLTELILDAQEHVKNPYKGKKLKKHPDFPKKPLTPYFRFFMEKRAKYAKLHPEMSNLDLTKILSKKYKELPEKKKMKYIQDFQREKQEFERNLARFREDHPDLIQNAKKSDIPEKPKTPQQLWYTHEKKVYLKVRPDEIMRDYIQKHPELNISEEGITKSTLTKAERQLKDKFDGRPTKPPPNSYSLYCAELMANMKDVPSTERMVLCSQQWKLLSQKEKDAYHKKCDQKKKDYEVELLRFLESLPEEEQQRVLGEEKMLNINKKQATSPASKKPAQEGGKGGSEKPKRPVSAMFIFSEEKRRQLQEERPELSESELTRLLARMWNDLSEKKKAKYKAREAALKAQSERKPGGEREERGKLPESPKRAEEIWQQSVIGDYLARFKNDRVKALKAMEMTWNNMEKKEKLMWIKKAAEDQKRYERELSEMRAPPAATNSSKKMKFQGEPKKPPMNGYQKFSQELLSNGELNHLPLKERMVEIGSRWQRISQSQKEHYKKLAEEQQKQYKVHLDLWVKSLSPQDRAAYKEYISNKRKSMTKLRGPNPKSSRTTLQSKSESEEDDEEDEDDEDEDEEEEDDENGDSSESSSEDESEDGDENEEDDEDEDDDEDDDEDEDNESEGSSSSSSSSGDSSDSDSN

SEQ ID NO: 838391 - protein, 92 aa, Homo sapiens
  misc_feature (19)..(19): Xaa can be any naturally occurring amino acid
EDDEDEDDDEDDDEHEDNXSEGSSSSSLDSSEDGGDSSESSSEDESEDGDENEEDDEDEDDDEDDDEDEDNESEGSSSSSSSSGDSSDSDSN

SEQ ID NO: 838392 - protein, 727 aa, Homo sapiens; identical to SEQ ID NO: 838387

SEQ ID NO: 838393 - protein, 443 aa, Homo sapiens
MNGEADCPTDLEMAAPKGQDRWSQEDMLTLLECMKNNLPSNDSSKFKTTESHMDWEKVAFKDFSGDMCKLKWVEISNEVRKFRTLTELILDAQEHVKNPYKGKKLKKHPDFPKKPLTPYFRFFMEKRAKYAKLHPEMSNLDLTKILSKKYKELPEKKKMKYIQDFQREKQEFERNLARFREDHPDLIQNAKKSDIPEKPKTPQQLWYTHEKKVYLKVRPDEIMRDYIQKHPELNISEEGITKSTLTKAERQLKDKFDGRPTKPPPNSYSLYCAELMANMKDVPSTERMVLCSQQWKLLSQDSNYQTKPAPDQPGPPHPLLHLRFRHGQWTGEWGWGVPKSLMRPSTPAAQSKVGWKLGEDPFLPRGACHLDPCIGTGGREHGEEEGRCLQENRHCPGGPLPCPLQEGAAWTRSWGRGQKCFLYMCIYFFLSSELSTRRFLPKK

SEQ ID NO: 838394 - protein, 340 aa, Homo sapiens
MNGEADCPTDLEMAAPKGQDRWSQEDMLTLLECMKNNLPSNDSSKFKTTESHMDWEKVAFKDFSGDMCKLKWVEISNEVRKFRTLTELILDAQEHVKNPYKGKKLKKHPDFPKKPLTPYFRFFMEKRAKYAKLHPEMSNLDLTKILSKKYKELPEKKKMKYIQDFQREKQEFERNLARFREDHPDLIQNAKKSDIPEKPKTPQQLWYTHEKKVYLKVRPDEIMRDYIQKHPELNISEEGITKSTLTKAERQLKDKFDGRPTKPPPNSYSLYCAELMANMKDVPSTERMVLCSQQWKLLSQKEKDAYHKKCDQKKKDYEVELLRFLESLPEEEVLAWRLLA

SEQ ID NO: 838395 - protein, 203 aa, Homo sapiens
MNGEADCPTDLEMAAPKGQDRWSQEDMLTLLECMKNNLPSNDSSKFKTTESHMDWEKVAFKDFSGDMCKLKWVEISNEVRKFRTLTELILDAQEHVKNPYKGKKLKKHPDFPKKPLTPYFRFFMEKRAKYAKLHPEMSNLDLTKILSKKYKELPEKKKMKYIQDFQREKQEFERNLARFREDHPDLIQNAHRGKVQTPQKPKK

SEQ ID NO: 838396 - protein, 764 aa, Homo sapiens; identical to SEQ ID NO: 838385

SEQ ID NO: 838397 - protein, 764 aa, Homo sapiens; identical to SEQ ID NO: 838385

SEQ ID NO: 838398 - protein, 727 aa, Homo sapiens; identical to SEQ ID NO: 838387

SEQ ID NO: 838399 - protein, 411 aa, Homo sapiens
EKDAYHKKCDQKKKDYGQRVLGEEKMLNINKKQATSPASKKPAQEGGKGGSEKPKRPVSAMFIFSEEKRRQLQEERPELSESELTRLLARMWNDLSEKKKAKYKAREAALKAQSERKPGGEREERGKLPESPKRAEEIWQQSVIGDYLARFKNDRVKALKAMEMTWNNMEKKEKLMWIKKAAEDQKRYERELSEMRAPPAATNSSKKMKFQGEPKKPPMNGYQKFSQELLSNGELNHLPLKERMVEIGSRWQRISQSQKEHYKKLAEEQQKQYKVHLDLWVKSLSPQDRAAYKEYISNKRKSMTKLRGPNPKSSRTTLQSKSESEEDDEEDEDDEDEDEEEEDDENGDSSEDGGDSSESSSEDESEDGDENEEDDEDEDDDEDDDEDEDNESEGSSSSSSSSGDSSDSDSN

SEQ ID NO: 838400 - protein, 874 aa, Homo sapiens
MNGEADCPTDLEMAAPKGQDRWSQEDMLTLLECMKNNLPSNDSSKFKTTESHMDWEKVAFKDFSGDMCKLKWVEISNEVRKFRTLTELILDAQEHVKNPYKGKKLKKHPDFPKKPLTPYFRFFMEKRAKYAKLHPEMSNLDLTKILSKKYKELPEKKKMKYIQDFQREKQEFERNLARFREDHPDLIQNAKKSDIPEKPKTPQQLWYTHEKKVYLKVRPDEIMRDYIQKHPELNISEEGITKSTLTKAERQLKDKFDGRPTKPPPNSYSLYCAELMANMKDVPSTERMVLCSQQWKLLSQKEKDAYHKKCDQKKKDYEVELLRFLESLPEEEQQRVLGEEKMLNINKKQATSPASKKPAQEGGKGGSEKPKRPVSAMFIFSEEKRRQLQEERPELSESELTRLLARMWNDLSEKKKAKYKAREAALKAQSERKPGGEREERGKLPESPKRAEEIWQQSVIGDYLARFKNDRVKALKAMEMTWNNMEKKEKLMWIKKAAEDQKRYERELSEMRAPPAATNSSKKMKFQGEPKKPPMNGYQKFSQELLSNGELNHLPLKERMVEIGSRWQRISQSQKEHYKKLAEEQQKQYKVHLDLWVKVRGQGTLGRNREASDYASTILAWPIHPLVLAGLIHDFIPCPRNPSGYTVTITLLFLFFFLFFETCTPAWVTEQDPVSKKKKKKKKKLELCSQIPGALCRDPKSREPGRGEDGVMIYKCSAHCLALGQHAQSAVVGYDSNPCRFCLPQSLSPQDRAAYKEYISNKRKSMTKLRGPNPKSSRTTLQSKSESEEDDEEDEDDEDEDEEEEDDENGDSSEDGGDSSESSSEDESEDGDENEEDDEDEDDDEDDDEDEDNESEGSSSSSSSSGDSSDSDSN

SEQ ID NO: 838401 - protein, 381 aa, Homo sapiens
KTGLPGSTHGPRPSAPGQGGSEKPKRPVSAMFIFSEEKRRQLQEERPELSESELTRLLARMWNDLSEKKKAKYKAREAALKAQSERKPGGEREERGKLPESPKRAEEIWQQSVIGDYLARFKNDRVKALKAMEMTWNNMEKKEKLMWIKKAAEDQKRYERELSEMRAPPAATNSSKKMKFQGEPKKPPMNGYQKFSQELLSNGELNHLPLKERMVEIGSRWQRISQSQKEHYKKLAEEQQKQYKVHLDLWVKSLSPQDRAAYKEYISNKRKSMTKLRGPNPKSSRTTLQSKSESEEDDEEDEDDEDEDEEEEDDENGDSSEDGGDSSESSSEDESEDGDENEEDDEDEDDDEDDDEDEDNESEGSSSSSSSSGDSSDSDSN

SEQ ID NO: 838402 - protein, 549 aa, Homo sapiens
MNGEADCPTDLEMAAPKGQDRWSQEDMLTLLECMKNNLPSNDSSKFKTTESHMDWEKVAFKDFSGDMCKLKWVEISNEVRKFRTLTELILDAQEHVKNPYKGKKLKKHPDFPKKPLTPYFRFFMEKRAKYAKLHPEMSNLDLTKILSKKYKELPEKKKMKYIQDFQREKQEFERNLARFREDHPDLIQNAKKSDIPEKPKTPQQLWYTHEKKVYLKVRPDEIMRDYIQKHPELNISEEGITKSTLTKAERQLKDKFDGRPTKPPPNSYSLYCAELMANMKDVPSTERMVLCSQQWKLLSQKEKDAYHKKCDQKKKDYEVELLRFLESLPEEEQQRVLGEEKMLNINKKQATSPASKKPAQEGGKGGSEKPKRPVSAMFIFSEEKRRQLQEERPELSESELTRLLARMWNDLSEKKKAKYKAREAALKAQSERKPGGEREERGKLPESPKRAEEIWQQSVIGDYLARFKNDRVKALKAMEMTWNNMEKKEKLMWIKKAADCPTDLEMAAPKGQDRWSQEDMLTLLECMKNNLPSNDSSSSSGDSSDSDSN

SEQ ID NO: 838403 - protein, 386 aa, Homo sapiens
MNGEADCPTDLEMAAPKGQDRWSQEDMLTLLECMKNNLPSNDSSKFKTTESHMDWEKVAFKDFSGDMCKLKWVEISNEVRKFRTLTELILDAQEHVKNPYKGKKLKKHPDFPKKPLTPYFRFFMEKRAKYAKLHPEMSNLDLTKILSKKYKELPEKKKMKYIQDFQREKQEFERNLARFREDHPDLIQNAKKSDIPEKPKTPQQLWYTHEKKVYLKVRPDATTKEVKDSLGKQWSQLSDKKRLKWIHKALEQRKEYEEIMRDYIQKHPELNISEEGITKSTLTKAERQLKDKFDGRPTKPPPNSYSLYCAELMANMKDVPSTERMVLCSQQWKLLSQKEKDAYHKKCDQCFLYMCIYFFLSSELSTRRFLPISAAVSVVISGRGRV

SEQ ID NO: 838404 - protein, 471 aa, Homo sapiens
MNGEADCPTDLEMAAPKGQDRWSQEDMLTLLECMKNNLPSNDSSKFKTTESHMDWEKVAFKDFSGDMCKLKWVEISNEVRKFRTLTELILDAQEHVKNPYKGKKLKKHPDFPKKPLTPYFRFFMEKRAKYAKLHPEMSNLDLTKILSKKYKELPEKKKMKYIQDFQREKQEFERNLARFREDHPDLIQNAKKSDIPEKPKTPQQLWYTHEKKVYLKVRPDEIMRDYIQKHPELNISEEGITKSTLTKAERQLKDKFDGRPTKPPPNSYSLYCAELMANMKDVPSTERMVLCSQQWKLLSQKEKDAYHKKCDQKKKDYEVELLRFLESLPEEEQQRVLGEEKMLNINKKQATSPASKKPAQEGGKGGSEKPKRPVSAMFIFSEEKRRQLQEERPELSESELTRLLARMWNDLSEKKKARSGPTRRRSSQRKEPGGAENGQAAQSQKPGLHKRTGSGRQIRELNGNRNCRRRG

SEQ ID NO: 838405 - protein, 284 aa, Homo sapiens
MNGEADCPTDLEMAAPKGQDRWSQEDMLTLLECMKNNLPSNDSSKFKTTESHMDWEKVAFKDFSGDMCKLKWVEISNEVRKFRTLTELILDAQEHVKNPYKGKKLKKHPDFPKKPLTPYFRFFMEKRAKYAKLHPEMSNLDLTKILSKKYKELPEKKKMKYIQDFQREKQEFERNLARFREDHPDLIQNAKKSDIPEKPKTPQQLWYTHEKKVYLKVRPDATTKEVKDSLGKQWSQLSDKKRLKWIHKALEQRKEYERSWETTCALLELTQMGREHTWCGKLYG

SEQ ID NO: 838406 - protein, 106 aa, Homo sapiens
MNGEADCPTDLEMAAPKGQDRWSQEDMLTLLECMKNNLPSNDSSKFKTTESHMDWEKVAFKDFSGDMCKLKWVEISNEVRKFRTLTELILDAQEHVILQGNNSRTP

SEQ ID NO: 838407 - protein, 573 aa, Homo sapiens
VAAAAAASGAAGGGARPRAPKMAEKQKHDGRVKIGHYVLGDTLGVGTFGKVKIGEHQLTGHKVAVKILNRQKIRSLDVVGKIKREIQNLKLFRHPHIIKLYQVISTPTDFFMVMEYVSGGELFDYICKHGRVEEMEARRLFQQILSAVDYCHRHMVVHRDLKPENVLLDAHMNAKIADFGLSNMMSDGEFLRTSCGSPNYAAPEVISGRLYAGPEVDIWSCGVILYALLCGTLPFDDEHVPTLFKKIRGGVFYIPEYLNRSVATLLMHMLQVDPLKRATIKDIREHEWFKQGLPSYLFPEDPSYDANVIDDEAVKEVCEKFECTESEVMNSLYSGDPQDQLAVAYHLIIDNRRIMNQASEFYLASSPPSGSFMDDSAMHIPPGLKPHPERMPPLIADSPKARCPLDALNTTKPKSLAVKKAKWHLGIRSQSKPYDIMAEVYRAMKQLDFEWKVVNAYHLRVRRKNPVTGNYVKMSLQLYLVDNRSYLLDFKSIDDEVVEQRSGSSTPQRSCSAAGLHRPRSSFDSTTAESHSLSGSLTGSLTGSTLSSVSPRLGSHTMDFFEMCASLITTLAR

SEQ ID NO: 838408 - protein, 510 aa, Homo sapiens
VAAAAAASGAAGGGARPRAPKMAEKQKHDGRVKIGHYVLGDTLGVGTFGKVKIGEHQLTGHKVAVKILNRQKIRSLDVVGKIKREIQNLKLFRHPHIIKLYQVISTPTDFFMVMEYVSGGELFDYICKHGRVEEMEARRLFQQILSAVDYCHRHMVVHRDLKPENVLLDAHMNAKIADFGLSNMMSDGEFLRTSCGSPNYAAPEVISGRLYAGPEVDIWSCGVILYALLCGTLPFDDEHVPTLFKKIRGGVFYIPEYLNRSVATLLMHMLQVDPLKRATIKDIREHEWFKQGLPSYLFPEDPSYDANVIDDEAVKEVCEKFECTESEVMNSLYSGDPQDQLAVAYHLIIDNRRIMNQASEFYLASSPPSGSFMDDSAMHIPPGLKPHPERMPPLIADSPKARCPLDALNTTKPKSLAVKKAKWHLGIRSQSKPYDIMAEVYRAMKQLDFEWKVVNAYHLRVRRKNPVTGNYVKMSLQLYLVDNRSYLLDFKSIDGKEAMHAGPTHRMSSR

SEQ ID NO: 838409 - protein, 573 aa, Homo sapiens; identical to SEQ ID NO: 838407

SEQ ID NO: 838410 - protein, 1544 aa, Homo sapiens
PRAQPGGAGKAGRAMVDPVGFAEAWKAQFPDSEPPRMELRSVGDIEQELERCKASIRRLEQEVNEERFRMIYLQTLLAKEKKSYDRQRWGFRRAAQAPDGASEPRASASRPQPAPADGADPPPAEEPEARPDGEGSPGKARPGTARRPGAAASGERDDRGPPASVAALRSNFERIRKGHGQPGADAEKPFYVNVEFHHERGLVKVNDKEVSDRISSLGSQAMQMERKKSQHGAGSSVGDASRPPYRGRSSESSCGVDGDYEDAELNPRFLKDNLIDANGGSRPPWPPLEYQPYQSIYVGGMMEGEGKGPLLRSQSTSEQEKRLTWPRRSYSPRSFEDCGGGYTPDCSSNENLTSSEEDFSSGQSSRVSPSPTTYRMFRDKSRSPSQNSQQSFDSSSPPTPQCHKRHRHCPVVVSEATIVGVRKTGQIWPNDGEGAFHGDAEALQRPVASDFEPQGLSEAARWNSKENLLAGPSENDPNLFVALYDFVASGDNTLSITKGEKLRVLGYNHNGEWCEAQTKNGQGWVPSNYITPVNSLEKHSWYHGPVSRNAAEYLLSSGINGSFLVRESESSPGQRSISLRYEGRVYHYRINTASDGKLYVSSESRFNTLAELVHHHSTVADGLITTLHYPAPKRNKPTVYGVSPNYDKWEMERTDITMKHKLGGGQYGEVYEGVWKKYSLTVAVKTLKEDTMEVEEFLKEAAVMKEIKHPNLVQLLGVCTREPPFYIITEFMTYGNLLDYLRECNRQEVNAVVLLYMATQISSAMEYLEKKNFIHRDLAARNCLVGENHLVKVADFGLSRLMTGDTYTAHAGAKFPIKWTAPESLAYNKFSIKSDVWAFGVLLWEIATYGMSPYPGIDLSQVYELLEKDYRMERPEGCPEKVYELMRACWQWNPSDRPSFAEIHQAFETMFQESSISDEVEKELGKQGVRGAVSTLLQAPELPTKTRTSRRAAEHRDTTDVPEMPHSKGQGESDPLDHEPAVSPLLPRKERGPPEGGLNEDERLLPKDKKTNLFSALIKKKKKTAPTPPKRSSSFREMDGQPERRGAGEEEGRDISNGALAFTPLDTADPAKSPKPSNGAGVPNGALRESGGSGFRSPHLWKKSSTLTSSRLATGEEEGGGSSSKRFLRSCSASCVPHGAKDTEWRSVTLPRDLQSTGRQFDSSTFGGHKSEKPALPRKRAGENRSDQVTRGTVTPPPRLVKKNEEAADEVFKDIMESSPGSSPPNLTPKPLRRQVTVAPASGLPHKEEAGKGSALGTPAAAEPVTPTSKAGSGAPGGTSKGPAEESRVRRHKHSSESPGRDKGKLSRLKPAPPPPPAASAGKAGGKPSQSPSQEAAGEAVLGAKTKATSLVDAVNSDAAKPSQPGEGLKKPVLPATPKPQSAKPSGTPISPAPVPSTLPSASSALAGDQPSSTAFIPLISTRVSLRKTRQPPERIASGAITKGVVLDSTEALCLAISRNSEQMASHSAVLEAGKNLYTFCVSYVDSIQQMRNKFAFREAINKLENNLRELQICPATAGSGPAATQDFSKLLSSVKEISDIVQR

SEQ ID NO: 838411 - protein, 1128 aa, Homo sapiens
ENKTNFFSQFSLPFSFFCSPLSLPEALQRPVASDFEPQGLSEAARWNSKENLLAGPSENDPNLFVALYDFVASGDNTLSITKGEKLRVLGYNHNGEWCEAQTKNGQGWVPSNYITPVNSLEKHSWYHGPVSRNAAEYLLSSGINGSFLVRESESSPGQRSISLRYEGRVYHYRINTASDGKLYVSSESRFNTLAELVHHHSTVADGLITTLHYPAPKRNKPTVYGVSPNYDKWEMERTDITMKHKLGGGQYGEVYEGVWKKYSLTVAVKTLKEDTMEVEEFLKEAAVMKEIKHPNLVQLLGVCTREPPFYIITEFMTYGNLLDYLRECNRQEVNAVVLLYMATQISSAMEYLEKKNFIHRDLAARNCLVGENHLVKVADFGLSRLMTGDTYTAHAGAKFPIKWTAPESLAYNKFSIKSDVWAFGVLLWEIATYGMSPYPGIDLSQVYELLEKDYRMERPEGCPEKVYELMRACWQWNPSDRPSFAEIHQAFETMFQESSISDEVEKELGKQGVRGAVSTLLQAPELPTKTRTSRRAAEHRDTTDVPEMPHSKGQGESDPLDHEPAVSPLLPRKERGPPEGGLNEDERLLPKDKKTNLFSALIKKKKKTAPTPPKRSSSFREMDGQPERRGAGEEEGRDISNGALAFTPLDTADPAKSPKPSNGAGVPNGALRESGGSGFRSPHLWKKSSTLTSSRLATGEEEGGGSSSKRFLRSCSASCVPHGAKDTEWRSVTLPRDLQSTGRQFDSSTFGGHKSEKPALPRKRAGENRSDQVTRGTVTPPPRLVKKNEEAADEVFKDIMESSPGSSPPNLTPKPLRRQVTVAPASGLPHKEEAGKGSALGTPAAAEPVTPTSKAGSGAPGGTSKGPAEESRVRRHKHSSESPGRDKGKLSRLKPAPPPPPAASAGKAGGKPSQSPSQEAAGEAVLGAKTKATSLVDAVNSDAAKPSQPGEGLKKPVLPATPKPQSAKPSGTPISPAPVPSTLPSASSALAGDQPSSTAFIPLISTRVSLRKTRQPPERIASGAITKGVVLDSTEALCLAISRNSEQMASHSAVLEAGKNLYTFCVSYVDSIQQMRNKFAFREAINKLENNLRELQICPATAGSGPAATQDFSKLLSSVKEISDIVQR

SEQ ID NO: 838412 - protein, 999 aa, Homo sapiens
SRSDLLNTLSCVESSLCEILLCSELRLSQTGSRELFELACLCGLKAVPCFLQLYVSSESRFNTLAELVHHHSTVADGLITTLHYPAPKRNKPTVYGVSPNYDKWEMERTDITMKHKLGGGQYGEVYEGVWKKYSLTVAVKTLKEDTMEVEEFLKEAAVMKEIKHPNLVQLLGVCTREPPFYIITEFMTYGNLLDYLRECNRQEVNAVVLLYMATQISSAMEYLEKKNFIHRDLAARNCLVGENHLVKVADFGLSRLMTGDTYTAHAGAKFPIKWTAPESLAYNKFSIKSDVWAFGVLLWEIATYGMSPYPGIDLSQVYELLEKDYRMERPEGCPEKVYELMRACWQWNPSDRPSFAEIHQAFETMFQESSISDEVEKELGKQGVRGAVSTLLQAPELPTKTRTSRRAAEHRDTTDVPEMPHSKGQGESDPLDHEPAVSPLLPRKERGPPEGGLNEDERLLPKDKKTNLFSALIKKKKKTAPTPPKRSSSFREMDGQPERRGAGEEEGRDISNGALAFTPLDTADPAKSPKPSNGAGVPNGALRESGGSGFRSPHLWKKSSTLTSSRLATGEEEGGGSSSKRFLRSCSASCVPHGAKDTEWRSVTLPRDLQSTGRQFDSSTFGGHKSEKPALPRKRAGENRSDQVTRGTVTPPPRLVKKNEEAADEVFKDIMESSPGSSPPNLTPKPLRRQVTVAPASGLPHKEEAGKGSALGTPAAAEPVTPTSKAGSGAPGGTSKGPAEESRVRRHKHSSESPGRDKGKLSRLKPAPPPPPAASAGKAGGKPSQSPSQEAAGEAVLGAKTKATSLVDAVNSDAAKPSQPGEGLKKPVLPATPKPQSAKPSGTPISPAPVPSTLPSASSALAGDQPSSTAFIPLISTRVSLRKTRQPPERIASGAITKGVVLDSTEALCLAISRNSEQMASHSAVLEAGKNLYTFCVSYVDSIQQMRNKFAFREAINKLENNLRELQICPATAGSGPAATQDFSKLLSSVKEISDIVQR

SEQ ID NO: 838413 - protein, 1544 aa, Homo sapiens; identical to SEQ ID NO: 838410

SEQ ID NO: 838414 - protein, 997 aa, Homo sapiens
PRAQPGGAGKAGRAMVDPVGFAEAWKAQFPDSEPPRMELRSVGDIEQELERCKASIRRLEQEVNEERFRMIYLQTLLAKEKKSYDRQRWGFRRAAQAPDGASEPRASASRPQPAPADGADPPPAEEPEARPDGEGSPGKARPGTARRPGAAASGERDDRGPPASVAALRSNFERIRKGHGQPGADAEKPFYVNVEFHHERGLVKVNDKEVSDRISSLGSQAMQMERKKSQHGAGSSVGDASRPPYRGRSSESSCGVDGDYEDAELNPRFLKDNLIDANGGSRPPWPPLEYQPYQSIYVGGMMEGEGKGPLLRSQSTSEQEKRLTWPRRSYSPRSFEDCGGGYTPDCSSNENLTSSEEDFSSGQSSRVSPSPTTYRMFRDKSRSPSQNSQQSFDSSSPPTPQCHKRHRHCPVVVSEATIVGVRKTGQIWPNDGEGAFHGDAEALQRPVASDFEPQGLSEAARWNSKENLLAGPSENDPNLFVALYDFVASGDNTLSITKGEKLRVLGYNHNGEWCEAQTKNGQGWVPSNYITPVNSLEKHSWYHGPVSRNAAEYLLSSGINGSFLVRESESSPGQRSISLRYEGRVYHYRINTASDGKLYVSSESRFNTLAELVHHHSTVADGLITTLHYPAPKRNKPTVYGVSPNYDKWEMERTDITMKHKLGGGQYGEVYEGVWKKYSLTVAVKTLKEDTMEVEEFLKEAAVMKEIKHPNLVQLLGVCTREPPFYIITEFMTYGNLLDYLRECNRQEVNAVVLLYMATQISSAMEYLEKKNFIHRDLAARNCLVGENHLVKVADFGLSRLMTGDTYTAHAGAKFPIKWTAPESLAYNKFSIKSDVWAFGVLLWEIATYGMSPYPGIDLSQVYELLEKDYRMERPEGCPEKVYELMRACWQWNPSDRPSFAEIHQAFETMFQESSISDEVEKELGKQGVRGAVSTLLQAPELPTKTRTSRRAAEHRDTTDVPEMPHSKGQERAILWTMSLPCLHCSLEKSEVPRRAA

SEQ ID NO: 838415 - protein, 140 aa, Homo sapiens
VESSLCEILLCSELRLSQTGSRELFELACLCGLKAVPCFLQLYVSSESRFNTLAELVHHHSTVADGLITTLHYPAPKRNKPTVYGVSPNYDKWEMERTDITMKHKLGGGQYGEVYEGVWKKYSLTVAVKTLKVGWDCRGC

SEQ ID NO: 838416 - protein, 1130 aa, Homo sapiens; identical to SEQ ID NO: 830562

SEQ ID NO: 838417 - protein, 1149 aa, Homo sapiens
MGQQPGKVLGDQRRPSLPALHFIKGAGKKESSRHGGPHCNVFVEHEALQRPVASDFEPQGLSEAARWNSKENLLAGPSENDPNLFVALYDFVASGDNTLSITKGEKLRVLGYNHNGEWCEAQTKNGQGWVPSNYITPVNSLEKHSWYHGPVSRNAAEYLLSSGINGSFLVRESESSPGQRSISLRYEGRVYHYRINTASDGKLYVSSESRFNTLAELVHHHSTVADGLITTLHYPAPKRNKPTVYGVSPNYDKWEMERTDITMKHKLGGGQYGEVYEGVWKKYSLTVAVKTLKEDTMEVEEFLKEAAVMKEIKHPNLVQLLGVCTREPPFYIITEFMTYGNLLDYLRECNRQEVNAVVLLYMATQISSAMEYLEKKNFIHRDLAARNCLVGENHLVKVADFGLSRLMTGDTYTAHAGAKFPIKWTAPESLAYNKFSIKSDVWAFGVLLWEIATYGMSPYPGIDLSQVYELLEKDYRMERPEGCPEKVYELMRACWQWNPSDRPSFAEIHQAFETMFQESSISDEVEKELGKQGVRGAVSTLLQAPELPTKTRTSRRAAEHRDTTDVPEMPHSKGQGESDPLDHEPAVSPLLPRKERGPPEGGLNEDERLLPKDKKTNLFSALIKKKKKTAPTPPKRSSSFREMDGQPERRGAGEEEGRDISNGALAFTPLDTADPAKSPKPSNGAGVPNGALRESGGSGFRSPHLWKKSSTLTSSRLATGEEEGGGSSSKRFLRSCSASCVPHGAKDTEWRSVTLPRDLQSTGRQFDSSTFGGHKSEKPALPRKRAGENRSDQVTRGTVTPPPRLVKKNEEAADEVFKDIMESSPGSSPPNLTPKPLRRQVTVAPASGLPHKEEAGKGSALGTPAAAEPVTPTSKAGSGAPGGTSKGPAEESRVRRHKHSSESPGRDKGKLSRLKPAPPPPPAASAGKAGGKPSQSPSQEAAGEAVLGAKTKATSLVDAVNSDAAKPSQPGEGLKKPVLPATPKPQSAKPSGTPISPAPVPSTLPSASSALAGDQPSSTAFIPLISTRVSLRKTRQPPERIASGAITKGVVLDSTEALCLAISRNSEQMASHSAVLEAGKNLYTFCVSYVDSIQQMRNKFAFREAINKLENNLRELQICPATAGSGPAATQDFSKLLSSVKEISDIVQR

SEQ ID NO: 838418 - protein, 1544 aa, Homo sapiens; identical to SEQ ID NO: 838410

SEQ ID NO: 838419 - protein, 1486 aa, Homo sapiens
PRAQPGGAGKAGRAMVDPVGFAEAWKAQFPDSEPPRMELRSVGDIEQELERCKASIRRLEQEVNEERFRMIYLQTLLAKEKKSYDRQRWGFRRAAQAPDGASEPRASASRPQPAPADGADPPPAEEPEARPDGEGSPGKARPGTARRPGAAASGERDDRGPPASVAALRSNFERIRKGHGQPGADAEKPFYVNVEFHHERGLVKVNDKEVSDRISSLGSQAMQMERKKSQHGAGSSVGDASRPPYRGRSSESSCGVDGDYEDAELNPRFLKDNLIDANGGSRPPWPPLEYQPYQSIYVGGMMEGEGKGPLLRSQSTSEQEKRLTWPRRSYSPRSFEDCGGGYTPDCSSNENLTSSEEDFSSGQSSRVSPSPTTYRMFRDKSRSPSQNSQQSFDSSSPPTPQCHKRHRHCPVVVSEATIVGVRKTGQIWPNDGEGAFHGDAGEKLRVLGYNHNGEWCEAQTKNGQGWVPSNYITPVNSLEKHSWYHGPVSRNAAEYLLSSGINGSFLVRESESSPGQRSISLRYEGRVYHYRINTASDGKLYVSSESRFNTLAELVHHHSTVADGLITTLHYPAPKRNKPTVYGVSPNYDKWEMERTDITMKHKLGGGQYGEVYEGVWKKYSLTVAVKTLKEDTMEVEEFLKEAAVMKEIKHPNLVQLLGVCTREPPFYIITEFMTYGNLLDYLRECNRQEVNAVVLLYMATQISSAMEYLEKKNFIHRDLAARNCLVGENHLVKVADFGLSRLMTGDTYTAHAGAKFPIKWTAPESLAYNKFSIKSDVWAFGVLLWEIATYGMSPYPGIDLSQVYELLEKDYRMERPEGCPEKVYELMRACWQWNPSDRPSFAEIHQAFETMFQESSISDEVEKELGKQGVRGAVSTLLQAPELPTKTRTSRRAAEHRDTTDVPEMPHSKGQGESDPLDHEPAVSPLLPRKERGPPEGGLNEDERLLPKDKKTNLFSALIKKKKKTAPTPPKRSSSFREMDGQPERRGAGEEEGRDISNGALAFTPLDTADPAKSPKPSNGAGVPNGALRESGGSGFRSPHLWKKSSTLTSSRLATGEEEGGGSSSKRFLRSCSASCVPHGAKDTEWRSVTLPRDLQSTGRQFDSSTFGGHKSEKPALPRKRAGENRSDQVTRGTVTPPPRLVKKNEEAADEVFKDIMESSPGSSPPNLTPKPLRRQVTVAPASGLPHKEEAGKGSALGTPAAAEPVTPTSKAGSGAPGGTSKGPAEESRVRRHKHSSESPGRDKGKLSRLKPAPPPPPAASAGKAGGKPSQSPSQEAAGEAVLGAKTKATSLVDAVNSDAAKPSQPGEGLKKPVLPATPKPQSAKPSGTPISPAPVPSTLPSASSALAGDQPSSTAFIPLISTRVSLRKTRQPPERIASGAITKGVVLDSTEALCLAISRNSEQMASHSAVLEAGKNLYTFCVSYVDSIQQMRNKFAFREAINKLENNLRELQICPATAGSGPAATQDFSKLLSSVKEISDIVQR

SEQ ID NO: 838420 - protein, 635 aa, Homo sapiens
MFQESSISDEVEKELGKQGVRGAVSTLLQAPELPTKTRTSRRAAEHRDTTDVPEMPHSKGQGESDPLDHEPAVSPLLPRKERGPPEGGLNEDERLLPKDKKTNLFSALIKKKKKTAPTPPKRSSSFREMDGQPERRGAGEEEGRDISNGALAFTPLDTADPAKSPKPSNGAGVPNGALRESGGSGFRSPHLWKKSSTLTSSRLATGEEEGGGSSSKRFLRSCSASCVPHGAKDTEWRSVTLPRDLQSTGRQFDSSTFGGHKSEKPALPRKRAGENRSDQVTRGTVTPPPRLVKKNEEAADEVFKDIMESSPGSSPPNLTPKPLRRQVTVAPASGLPHKEEAGKGSALGTPAAAEPVTPTSKAGSGAPGGTSKGPAEESRVRRHKHSSESPGRDKGKLSRLKPAPPPPPAASAGKAGGKPSQSPSQEAAGEAVLGAKTKATSLVDAVNSDAAKPSQPGEGLKKPVLPATPKPQSAKPSGTPISPAPVPSTLPSASSALAGDQPSSTAFIPLISTRVSLRKTRQPPERIASGAITKGVVLDSTEALCLAISRNSEQMASHSAVLEAGKNLYTFCVSYVDSIQQMRNKFAFREAINKLENNLRELQICPATAGSGPAATQDFSKLLSSVKEISDIVQR

SEQ ID NO: 838421 - protein, 650 aa, Homo sapiens
MVDPVGFAEAWKAQFPDSEPPRMELRSVGDIEQELERCKASIRRLEQEVNEERFRMIYLQTLLAKEKKSYDRQRWGFRRAAQAPDGASEPRASASRPQPAPADGADPPPAEEPEARPDGEGSPGKARPGTARRPGAAASGERDDRGPPASVAALRSNFERIRKGHGQPGADAEKPFYVNVEFHHERGLVKVNDKEVSDRISSLGSQAMQMERKKSQHGAGSSVGDASRPPYRGRSSESSCGVDGDYEDAELNPRFLKDNLIDANGGSRPPWPPLEYQPYQSIYVGGMMEGEGKGPLLRSQSTSEQEKRLTWPRRSYSPRSFEDCGGGYTPDCSSNENLTSSEEDFSSGQSSRVSPSPTTYRMFRDKSRSPSQNSQQSFDSSSPPTPQCHKRHRHCPVVVSEATIVGVRKTGQIWPNDGEGAFHGDAEALQRPVASDFEPQGLSEAARWNSKENLLAGPSENDPNLFVALYDFVASGDNTLSITKGEKLRVLGYNHNGEWCEAQTKNGQGWVPSNYITPVNSLEKHSWYHGPVSRNAAEYLLSSGINGSFLVRESESSPGQRSISLRYEGRVYHYRINTASDGKLYVSSESRFNTLAELVHHHSTVADGLITTLHYPAPKRNKPTVYGVSPNYDKWEMERTDITISHRQRP

SEQ ID NO: 838422 - protein, 491 aa, Homo sapiens
DDVRAVLVLKSCRGGGGVRSWTGRRVQQVKEEEEPSGRWHRGLTMDEEYDVIVLGTGLTECILSGIMSVNGKKVLHMDRNPYYGGESSSITPLEELYKRFQLLEGPPESMGRGRDWNVDLIPKFLMANGQLVKMLLYTEVTRYLDFKVVEGSFVYKGGKIYKVPSTETEALASNLMGMFEKRRFRKFLVFVANFDENDPKTFEGVDPQTTSMRDVYRKFDLGQDVIDFTGHALALYRTDDYLDQPCLETVNRIKLYSESLARYGKSPYLYPLYGLGELPQGFARLSAIYGGTYMLNKPVDDIIMENGKVVGVKSEGEVARCKQLICDPSYIPDRVRKAGQVIRIICILSHPIKNTNDANSCQIIIPQNQVNRKSDIYVCMISYAHNVAAQGKYIAIASTTVETTDPEKEVEPALELLEPIDQKFVAISDLYEPIDDGCESQVFCSCSYDATTHFETTCNDIKDIYKRMAGTAFDFENMKRKQNDVFGEAEQ

SEQ ID NO: 838423 - protein, 553 aa, Homo sapiens
MDEEYDVIVLGTGLTECILSGIMSVNGKKVLHMDRNPYYGGESSSITPLEELYKRFQLLEGPPESMGRGRDWNVDLIPKFLMANGQLVKMLLYTEVTRYLDFKVVEGSFVYKGGKIYKVPSTETEALASNLMGMFEKRRFRKFLVFVANFDENDPKTFEGVDPQTTSMRDVYRKFDLGQDVIDFTGHALALYRTDDYLDQPCLETVNRIKLYSESLARYGKSPYLYPLYGLGELPQGFARLSAIYGGTYMLNKPVDDIIMENGKVVGVKSEGEVARCKQLICDPSYIPDRVRKAGQVIRIICILSHPIKNTNDANSCQIIIPQNQVNRKSGRPGAGTASSRVFSLGLLFFSSISVGAPCLTSLEKNLSHIVATTTWSPRVWVAWTLSLWEGGGLDAYLLCGAGEGQSGQTCVQPLEPLSAYGQRLWPELTELFLWPDIYVCMISYAHNVAAQGKYIAIASTTVETTDPEKEVEPALELLEPIDQKFVAISDLYEPIDDGCESQVFCSCSYDATTHFETTCNDIKDIYKRMAGTAFDFENMKRKQNDVFGEAEQ

SEQ ID NO: 838424 - protein, 476 aa, Homo sapiens
MDEEYDVIVLGTGLTECILSGIMSVNGKKVLHMDRNPYYGGESSSITPLEELYKRFQLLEGPPESMGRGRDWNVDLIPKFLMANGQLVKMLLYTEVTRYLDFKVVEGSFVYKGGKIYKVPSTETEALASNLMGMFEKRRFRKFLVFVANFDENDPKTFEGVDPQTTSMRDVYRKFDLGQDVIDFTGHALALYRTDDYLDQPCLETVNRIKLYSESLARYGKSPYLYPLYGLGELPQGFARLSAIYGGTYMLNKPVDDIIMENGKVVGVKSEGEVARCKQLICDPSYIPDRVRKAGQVIRIICILSHPIKNTNDANSCQIIIPQNQVNRKSDIYVCMISYAHNVAAQGKYIAIASTTVETTDPEKEVEPALELLEPIDQKFVAISDLYEPIDDGCESQKQLSSPGLLAARPGYLSDSPWALGSGCFQVFCSCSYDATTHFETTCNDIKDIYKRMAGTAFDFENMKRKQNDVFGEAEQ

SEQ ID NO: 838425 - protein, 447 aa, Homo sapiens [sequence omitted]

SEQ ID NO: 838426 - protein, 473 aa, Homo sapiens
AAPVVTVKLREGYIIRYVGVGPTDLNMDEEYDVIVLGTGLTECILSGIMSVNGKKVLHMDRNPYYGGESSSITPLEELYKRFQLLEGPPESMGRGRDWNVDLIPKFLMANGQLVKMLLYTEVTRYLDFKVVEGSFVYKGGKIYKVPSTETEALASNLMGMFEKRRFRKFLVFVANFDENDPKTFEGVDPQTTSMRDVYRKFDLGQDVIDFTGHALALYRTDDYLDQPCLETVNRIKLYSESLARYGKSPYLYPLYGLGELPQGFARLSAIYGGTYMLNKPVDDIIMENGKVVGVKSEGEVARCKQLICDPSYIPDRVRKAGQVIRIICILSHPIKNTNDANSCQIIIPQNQVNRKSDIYVCMISYAHNVAAQGKYIAIASTTVETTDPEKEVEPALELLEPIDQKFVAISDLYEPIDDGCESQVFCSCSYDATTHFETTCNDIKDIYKRMAGTAFDFENMKRKQNDVFGEAEQ

SEQ ID NO: 838427 - protein, 485 aa, Homo sapiens
MDEEYDVIVLGTGLTECILSGIMSVNGKKVLHMDRNPYYGGESSSITPLEELYKRFQLLEGPPESMGRGRDWNVDLIPKFLMANGQLVKMLLYTEVTRYLDFKVVEGSFVYKGGKIYKVPSTETEALASNLMGMFEKRRFRKFLVFVANFDENDPKTFEGVDPQTTSMRDVYRKFDLGQDVIDFTGHALALYRTDELRGSWVVAAPSPGPPPPFPHLPAVPLPRMSLVLSHRLTYLDQPCLETVNRIKLYSESLARYGKSPYLYPLYGLGELPQGFARLSAIYGGTYMLNKPVDDIIMENGKVVGVKSEGEVARCKQLICDPSYIPDRVRKAGQVIRIICILSHPIKNTNDANSCQIIIPQNQVNRKSDIYVCMISYAHNVAAQGKYIAIASTTVETTDPEKEVEPALELLEPIDQKFVAISDLYEPIDDGCESQVFCSCSYDATTHFETTCNDIKDIYKRMAGTAFDFENMKRKQNDVFGEAEQ

SEQ ID NO: 838428 - protein, 447 aa, Homo sapiens [sequence omitted]

SEQ ID NO: 838429 - protein, 447 aa, Homo sapiens [sequence omitted]

SEQ ID NO: 838430 - protein, 196 aa, Homo sapiens
MDEEYDVIVLGTGLTECILSGIMSVNGKKVLHMDRNPYYGGESSSITPLEELYKRFQLLEGPPESMGRGRDWNVDLIPKFLMANGQLVKMLLYTEVTRYLDFKVVEGSFVYKGGKIYKVPSTETEALASNLMGMFEKRRFRKFLVFVANFDENDPKTFEGVDPQTTSMRDVYRKFDLGQDVIDFTGHALALYRTDE

SEQ ID NO: 838431 - protein, 112 aa, Homo sapiens [sequence omitted]

SEQ ID NO: 838432 - protein, 108 aa, Homo sapiens
KGEERRKGGEGGPHYDKTAPSIQSLASSKAARPSPGLLAARPGYLSDSPWALGSGCFQVFCSCSYDATTHFETTCNDIKDIYKRMAGTAFDFENMKRKQNDVFGEAEQ

SEQ ID NO: 838433 - protein, 447 aa, Homo sapiens [sequence omitted]

SEQ ID NO: 838434 - protein, 447 aa, Homo sapiens [sequence omitted]

SEQ ID NO: 838435 - protein, 447 aa, Homo sapiens [sequence omitted]

SEQ ID NO: 838436 - protein, 447 aa, Homo sapiens [sequence omitted]

SEQ ID NO: 838437 - protein, 590 aa, Homo sapiens
MDEEYDVIVLGTGLTECILSGIMSVNGKKVLHMDRNPYYGGESSSITPLEELYKRFQLLEGPPESMGRGRDWNVDLIPKFLMANGQLVKMLLYTEVTRYLDFKVVEGSFVYKGGKIYKVPSTETEALASNLMGMFEKRRFRKFLVFVANFDENDPKTFEGVDPQTTSMRDVYRKFDLGQDVIDFTGHALALYRTDDYLDQPCLETVNRIKLYSESLARYGKSPYLYPLYGLGELPQGFARLSAIYGGTYMLNKPVDDIIMENGKVVGVKSEGEVSPSRACSAVPWLRRGLVTFSVLSSLLLHSPKGLGAGTGGPEVFRVMTVGERSLSEATCHVCGAESVLDHSASGGAGGRAPSPCVKAHLSERQGRAMHSGGAVVMAPRNVLSARAACPCCEQQPHVYLREGCDRGEDFLVPSQVARCKQLICDPSYIPDRVRKAGQVIRIICILSHPIKNTNDANSCQIIIPQNQVNRKSDIYVCMISYAHNVAAQGKYIAIASTTVETTDPEKEVEPALELLEPIDQKFVAISDLYEPIDDGCESQVFCSCSYDATTHFETTCNDIKDIYKRMAGTAFDFENMKRKQNDVFGEAEQ

SEQ ID NO: 838438 - protein, 447 aa, Homo sapiens [sequence omitted]

SEQ ID NO: 838439 - protein, 525 aa, Homo sapiens
MDEEYDVIVLGTGLTECILSGIMSVNGKKVLHMDRNPYYGGESSSITPLEELYKRFQLLEGPPESMGRGRDWNVDLIPKFLMANGQLVKMLLYTEVTRYLDFKVVEGSFVYKGGKIYKVPSTETEALASNLMGMFEKRRFRKFLVFVANFDENDPKTFEGVDPQTTSMRDVYRKFDLGQDVIDFTGHALALYRTDELRGSWVVAAPSPGPPPPFPHLPAVPLPRMSLVLSHRLTYHPFHFPLAFDASSSPGHSGWWEDWPGTWVGVNQGCCYSPYLDQPCLETVNRIKLYSESLARYGKSPYLYPLYGLGELPQGFARLSAIYGGTYMLNKPVDDIIMENGKVVGVKSEGEVARCKQLICDPSYIPDRVRKAGQVIRIICILSHPIKNTNDANSCQIIIPQNQVNRKSDIYVCMISYAHNVAAQGKYIAIASTTVETTDPEKEVEPALELLEPIDQKFVAISDLYEPIDDGCESQVFCSCSYDATTHFETTCNDIKDIYKRMAGTAFDFENMKRKQNDVFGEAEQ

SEQ ID NO: 838440 - protein, 447 aa, Homo sapiens [sequence omitted]

SEQ ID NO: 838441 - protein, 554 aa, Homo sapiens
MDEEYDVIVLGTGLTECILSGIMSVNGKKVLHMDRNPYYGGESSSITPLEELYKRFQLLEGPPESMGRGRDWNVDLIPKFLMANGQLVKMLLYTEVTRYLDFKVVEGSFVYKGGKIYKVPSTETEALASRPPLNPRDIAKCLSQEALRAHPGQSPLHPDLMGMFEKRRFRKFLVFVANFDENDPKTFEGVDPQTTSMRDVYRKFDLGQDVIDFTGHALALYRTDELRGSWVVAAPSPGPPPPFPHLPAVPLPRMSLVLSHRLTYHPFHFPLAFDASSSPGHSGWWEDWPGTWVGVNQGCCYSPYLDQPCLETVNRIKLYSESLARYGKSPYLYPLYGLGELPQGFARLSAIYGGTYMLNKPVDDIIMENGKVVGVKSEGEVARCKQLICDPSYIPDRVRKAGQVIRIICILSHPIKNTNDANSCQIIIPQNQVNRKSDIYVCMISYAHNVAAQGKYIAIASTTVETTDPEKEVEPALELLEPIDQKFVAISDLYEPIDDGCESQVFCSCSYDATTHFETTCNDIKDIYKRMAGTAFDFENMKRKQNDVFGEAEQ

SEQ ID NO: 838442 - protein, 198 aa, Homo sapiens
MLNKPVDDIIMENGKVVGVKSEGEVARCKQLICDPSYIPDRVRKAGQVIRIICILSHPIKNTNDANSCQIIIPQNQVNRKSDIYVCMISYAHNVAAQGKYIAIASTTVETTDPEKEVEPALELLEPIDQKFVAISDLYEPIDDGCESQVFCSCSYDATTHFETTCNDIKDIYKRMAGTAFDFENMKRKQNDVFGEAEQ

SEQ ID NO: 838443 - protein, 447 aa, Homo sapiens [sequence omitted]

SEQ ID NO: 838444 - protein, 354 aa, Homo sapiens
  misc_feature (345)..(345): Xaa can be any naturally occurring amino acid
  misc_feature (353)..(353): Xaa can be any naturally occurring amino acid
MDEEYDVIVLGTGLTECILSGIMSVNGKKVLHMDRNPYYGGESSSITPLEELYKRFQLLEGPPESMGRGRDWNVDLIPKFLMANGQLVKMLLYTEVTRYLDFKVVEGSFVYKGGKIYKVPSTETEALASNLMGMFEKRRFRKFLVFVANFDENDPKTFEGVDPQTTSMRDVYRKFDLGQDVIDFTGHALALYRTDDYLDQPCLETVNRIKLYSESLARYGKSPYLYPLYGLGELPQGFARLSAIYGGTYMLNKPVDDIIMENGKVVGVKSEGEVARCKQLICDPSYIPDRVRKAGQVIRIICILSHPIKNTNDANSCQIIIPQNQVNRKSGHLTCGMISYGTTTXGGAQGARXN

SEQ ID NO: 838445 - protein, 163 aa, Homo sapiens
MDEEYDVIVLGTGLTECILSGIMSVNGKKVLHMDRNPYYGGESSSITPLEELYKRFQLLEGPPESMGRGRDWNVDLIPKFLMANGQLVKMLLYTEVTRYLDFKVVEGSFVYKGGKIYKVPSTETEALASNLMGMFEKRRFRKFLVFVANFDENDPKTFEGVDP

SEQ ID NO: 838446 - protein, 167 aa, Homo sapiens
FLGRSTGRRPAPPAPPRASLDSRRAASPAEPRWCCGPGPGSPPGRRAGEAVAPAGCGGAREEAGLFDAAEGSGDGRTRRHLWSSAVAAAAVAAATAAVKEEEEPSGRWHRGLTMDEEYDVIVLGTGLTECILSGIMSVNGKKVLHMDRNPYYGGESSSITPLEEPPP

SEQ ID NO: 838447 - protein, 148 aa, Homo sapiens
MDEEYDVIVLGTGLTECILSGIMSVNGKKVLHMDRNPYYGGESSSITPLEELYKRFQLLEGPPESMGRGRDWNVDLIPKFLMANGQLVKMLLYTEVTRYLDFKVVEGSFVYKGGKIYKVPSTETEALASTNLMGILRTRFRSRRSEIL

SEQ ID NO: 838448 - protein, 34 aa, Homo sapiens
LYLVQVSFIHILLDEDKFILHLCTLIDLILILVL

SEQ ID NO: 838449 - protein, 251 aa, Homo sapiens
LDKELPNPPPSPPVPSPVRPGPPLATRSRGGAEAKHEPRAHHPSWRRGSAAPASPGSSATNGRASGAARSFPARGPGAPLCSGSGRALAEGLASPLLRAGPNPVAAAALRAPIPELPLLSLAQRLPPGRPLLGTMARGGRGRRLGLALGLLLALVLAPRVLRAKPTVRKERVVRPDSELGERPPEDNQSFQYDHEAFLGKEDSKTFDQLTPDESKERLGKIVDRIDNDGDGFVTTEELKTLDQTGAEKIHL

SEQ ID NO: 838450 - protein, 117 aa, Homo sapiens
MARGGRGRRLGLALGLLLALVLAPRVLRAKPTVRKERVVRPDSELGERPPEDNQSFQYDHEAFLGKEDSKTFDQLTPDESKERLGKIVDRIDNDGDGFVTTEELKTLDQTGAEKIHL

SEQ ID NO: 838451 - protein, 117 aa, Homo sapiens; identical to SEQ ID NO: 838450

SEQ ID NO: 838452 - protein, 117 aa, Homo sapiens; identical to SEQ ID NO: 838450

SEQ ID NO: 838453 - protein, 117 aa, Homo sapiens; identical to SEQ ID NO: 838450

SEQ ID NO: 838454 - protein, 117 aa, Homo sapiens; identical to SEQ ID NO: 838450

SEQ ID NO: 838455 - protein, 117 aa, Homo sapiens; identical to SEQ ID NO: 838450

SEQ ID NO: 838456 - protein, 165 aa, Homo sapiens
MLPRDERRFKAADLNGDLTATREEFTAFLHPEEFEHMKEIVVLETLEDIDKNGDGFVDQDEYIADMFSHEENGPEPDWVLSEREQFNEFRDLNKDGKLDKDEIRHWILPQDYDHAQAEARHLVYESDKNKDEKLTKEEILENWNMFVGSQATNYGEDLTKNHDEL

SEQ ID NO: 838457 - protein, 165 aa, Homo sapiens; identical to SEQ ID NO: 838456

SEQ ID NO: 838458 - protein, 165 aa, Homo sapiens; identical to SEQ ID NO: 838456

SEQ ID NO: 838459 - protein, 192 aa, Homo sapiens
MIPLRLLLPRGNPAEFHDSSDHHTFKKMLPRDERRFKAADLNGDLTATREEFTAFLHPEEFEHMKEIVVLETLEDIDKNGDGFVDQDEYIADMFSHEENGPEPDWVLSEREQFNEFRDLNKDGKLDKDEIRHWILPQDYDHAQAEARHLVYESDKNKDEKLTKEEILENWNMFVGSQATNYGEDLTKNHDEL

SEQ ID NO: 838460 - protein, 117 aa, Homo sapiens; identical to SEQ ID NO: 838450

SEQ ID NO: 838461 - protein, 117 aa, Homo sapiens; identical to SEQ ID NO: 838450

SEQ ID NO: 838462 - protein, 117 aa, Homo sapiens; identical to SEQ ID NO: 838450

SEQ ID NO: 838463 - protein, 117 aa, Homo sapiens; identical to SEQ ID NO: 838450

SEQ ID NO: 838464 - protein, 117 aa, Homo sapiens; identical to SEQ ID NO: 838450

SEQ ID NO: 838465 - protein, 108 aa, Homo sapiens
MARGGRGRRLGLALGLLLALVLAPRVLRAKPTVRKERVVRPDSELGERPPEDNQSFQYDHEAFLGKEDSKTFDQLTPDESKERLGKIVDRIDNDGDGFVTTEELKTLL

SEQ ID NO: 838466 - protein, 106 aa, Homo sapiens [sequence omitted]

SEQ ID NO: 838467 - protein, 251 aa, Homo sapiens; identical to SEQ ID NO: 838449

SEQ ID NO: 838468 - protein, 251 aa, Homo sapiens; identical to SEQ ID NO: 838449

SEQ ID NO: 838469 - protein, 117 aa, Homo sapiens; identical to SEQ ID NO: 838450

SEQ ID NO: 838470 - protein, 117 aa, Homo sapiens; identical to SEQ ID NO: 838450

SEQ ID NO: 838471 - protein, 117 aa, Homo sapiens; identical to SEQ ID NO: 838450

SEQ ID NO: 838472 - protein, 165 aa, Homo sapiens; identical to SEQ ID NO: 838456

SEQ ID NO: 838473 - protein, 106 aa, Homo sapiens [sequence omitted]

SEQ ID NO: 838474 - protein, 117 aa, Homo sapiens; identical to SEQ ID NO: 838450

SEQ ID NO: 838475 - protein, 117 aa, Homo sapiens; identical to SEQ ID NO: 838450

SEQ ID NO: 838476 - protein, 106 aa, Homo sapiens [sequence omitted]

SEQ ID NO: 838477 - protein, 117 aa, Homo sapiens; identical to SEQ ID NO: 838450

SEQ ID NO: 838478 - protein, 106 aa, Homo sapiens [sequence omitted]

SEQ ID NO: 838479 - protein, 69 aa, Homo sapiens
ERVYGFVKDVEESQESMGASLPRRDKEMAGSVGTIERVRDSLVKGLGDTGRGRAVKEPCREPYPAAGVS

SEQ ID NO: 838480 - protein, 332 aa, Homo sapiens
YEAPTMVRCDRGLQMLLTTAGAFAAFSLMAIAIGTDYWLYSSAHICNGTNLTMDDGPPPRRARGDLTHSGLWRVCCIEGIYKGHCFRINHFPEDNDYDHDSSEYLLRIVRASSVFPILSTILLLLGGLCIGAGRIYSRKNNIVLSAGILFVAAGLSNIIGIIVYISSNTGDPSDKRDEDKKNHYNYGWSFYFGALSFIVAETVGVLAVNIYIEKNKELRFKTKREFLKASSSSPYARMPSYRYRRRRSRSSSRSTEASPSRDVSPMGLKITGAIPMGELSMYTLSREPLKVTTAASYSPDQEASFLQVHDFFQQDLKEGFHVSMLNRRTTPV

SEQ ID NO: 838481 - protein, 332 aa, Homo sapiens; identical to SEQ ID NO: 838480

SEQ ID NO: 838482 - protein, 332 aa, Homo sapiens; identical to SEQ ID NO: 838480

SEQ ID NO: 838483 - protein, 99 aa, Homo sapiens
CPPVPYTARPTVGLTSASLPPWPRSPLPASLSGLSNIIGIIVYISSNTGDPSDKRDEDKKNHYNYGWSFYFGALSFIVAETVGVLAVNIYIEKNKELRF

SEQ ID NO: 838484 - protein, 332 aa, Homo sapiens; identical to SEQ ID NO: 838480

SEQ ID NO: 838485 - protein, 553 aa, Homo sapiens
MDVDKELGMESVKAGASGKPEMRLGTQEETSEGDANESSLLVLSSNVPLLALEFLEIAQAKEKAFLPMVSHTFHMRTEESDASQEGDDLPKSSANTSHPKQDDSPKSSEETIQPKEGDIPKAPEETIQSKKEDLPKSSEKAIQPKESNIPKSSAKAIQPKLGNIPKASVKPSQPKEGDIPKAPEETIQSKKEDLPKSSEEAIQPKEGDIPKSSAKPIQPKLGNIAKTSVKPSQPKESDIPKSPEETIQPKEGDIPKSSAKPIQPKLGNIPKASVKPSQPKEGDISKSPEEAIQPKEGDLPKSLEEAIQPKEGDIPKSPEEAIQPKEGDIPKSLEEAIQPKEGDIPKSPEETIQPKKGDIPKSPEEAIQPKEGDIPKSPKQAIQPKEGDIPKSLEEAIPPKEIDIPKSPEETIQPKEDDSPKSLEEATPSKEGDILKPEEETMEFPEGDKVKVILSKEDFEASLKEAGERLVAVDFSATWCGPCRTIRPFFHALSVKHEDVVFLEVDADNCEEVVRECAIMCVPTFQFYKKEEKVDELCGALKEKLEAVIAELK

SEQ ID NO: 838486 - protein, 544 aa, Homo sapiens
MKRISLVLLLHFYLIYFILFYFMFFGTESSLLVLSSNVPLLALEFLEIAQAKEKAFLPMVSHTFHMRTEESDASQEGDDLPKSSANTSHPKQDDSPKSSEETIQPKEGDIPKAPEETIQSKKEDLPKSSEKAIQPKESNIPKSSAKAIQPKLGNIPKASVKPSQPKEGDIPKAPEETIQSKKEDLPKSSEEAIQPKEGDIPKSSAKPIQPKLGNIAKTSVKPSQPKESDIPKSPEETIQPKEGDIPKSSAKPIQPKLGNIPKASVKPSQPKEGDISKSPEEAIQPKEGDLPKSLEEAIQPKEGDIPKSPEEAIQPKEGDIPKSLEEAIQPKEGDIPKSPEETIQPKKGDIPKSPEEAIQPKEGDIPKSPKQAIQPKEGDIPKSLEEAIPPKEIDIPKSPEETIQPKEDDSPKSLEEATPSKEGDILKPEEETMEFPEGDKVKVILSKEDFEASLKEAGERLVAVDFSATWCGPCRTIRPFFHALSVKHEDVVFLEVDADNCEEVVRECAIMCVPTFQFYKKEEKVDELCGALKEKLEAVIAELK

SEQ ID NO: 838487 - protein, 486 aa, Homo sapiens
MVSHTFHMRTEESDASQEGDDLPKSSANTSHPKQDDSPKSSEETIQPKEGDIPKAPEETIQSKKEDLPKSSEKAIQPKESNIPKSSAKAIQPKLGNIPKASVKPSQPKEGDIPKAPEETIQSKKEDLPKSSEEAIQPKEGDIPKSSAKPIQPKLGNIAKTSVKPSQPKESDIPKSPEETIQPKEGDIPKSSAKPIQPKLGNIPKASVKPSQPKEGDISKSPEEAIQPKEGDLPKSLEEAIQPKEGDIPKSPEEAIQPKEGDIPKSLEEAIQPKEGDIPKSPEETIQPKKGDIPKSPEEAIQPKEGDIPKSPKQAIQPKEGDIPKSLEEAIPPKEIDIPKSPEETIQPKEDDSPKSLEEATPSKEGDILKPEEETMEFPEGDKVKVILSKEDFEASLKEAGERLVAVDFSATWCGPCRTIRPFFHALSVKHEDVVFLEVDADNCEEVVRECAIMCVPTFQFYKKEEKVDELCGALKEKLEAVIAELK

SEQ ID NO: 838488 - protein, 538 aa, Homo sapiens
MTTFKEAVTFKDVAVVFTEEELGLLDPAQRKLYRDVMLENFRNLLSVGHQPFHQDTCHFLREEKFWMMGTATQREGNSGGKIQTELESVPEAGAHEEWSCQQIWEQIAKDLTRSQDSIINNSQFFENGDVPSQVEAGLPTIHTGQKPSQGGKCKQSFSDVPIFDLPQQLYSEEKSYTCDECGKSICYISALHVHQRVHVGEKLFMCDVCGKEFSQSSHLQTHQRVHTGEKPFKCEQCGKGFSRRSALNVHHKLHTGEKPYICEACGKAFIHDSQLKEHKRIHTGEKPFKCDICGKTFYFRSRLKSHSMVHTGEKPFRCDTCDKSFHQRSALNRHCMVHTGEKPYRCEQCGKGFIGRLDFYKHQVVHTGEKPYNCKECGKSFRWSSCLLNHQRVHSGEKSFKCEECGKGFYTNSQLSSHQRSHSGEKPYKCEECGKGYVTKFNLDLHQRVHTGERPYNCKECGKNFSRASSILNHKRLHCQKKPFKCEDCGKRLVHRTYRKDQPRDYSGENPSKCEDCGRRYKRRLNLDILLSLFLNDT

SEQ ID NO: 838489 - protein, 538 aa, Homo sapiens; identical to SEQ ID NO: 838488

SEQ ID NO: 838490 - protein, 520 aa, Homo sapiens
MTTFKEAVTFKDVAVVFTEEELGLLDPAQRKLYRDVMLENFRNLLSVGHQPFHQDTCHFLREEKFWMMGTATQREGNSGGKIQTELESVPEAGAHEEWSCQQIWEQIAKDLTRSQDSIINNSQFFGQKPSQGGKCKQSFSDVPIFDLPQQLYSEEKSYTCDECGKSICYISALHVHQRVHVGEKLFMCDVCGKEFSQSSHLQTHQRVHTGEKPFKCEQCGKGFSRRSALNVHHKLHTGEKPYICEACGKAFIHDSQLKEHKRIHTGEKPFKCDICGKTFYFRSRLKSHSMVHTGEKPFRCDTCDKSFHQRSALNRHCMVHTGEKPYRCEQCGKGFIGRLDFYKHQVVHTGEKPYNCKECGKSFRWSSCLLNHQRVHSGEKSFKCEECGKGFYTNSQLSSHQRSHSGEKPYKCEECGKGYVTKFNLDLHQRVHTGERPYNCKECGKNFSRASSILNHKRLHCQKKPFKCEDCGKRLVHRTYRKDQPRDYSGENPSKCEDCGRRYKRRLNLDILLSLFLNDT

SEQ ID NO: 838491 - protein, 538 aa, Homo sapiens; identical to SEQ ID NO: 838488

SEQ ID NO: 838492 - protein, 538 aa, Homo sapiens; identical to SEQ ID NO: 838488

SEQ ID NO: 838493 - protein, 107 aa, Homo sapiens
NRLLTATDSIQLWAPPGDDILEEEEEIDNTVPPVLNDWKCVWQCKTSVSVHLMEWSPDGEYFATAGKDDCLLKVWYPMTGWKSSIIPQDHHEVKRRQSSTQFSFVYL

SEQ ID NO: 838494 - protein, 104 aa, Homo sapiens
MACIMALPWLKKKKKKEKRNGGFSRLLWAAARVIATCISLFISSLSYHRLSSVSERAEVPTCTTFLQRGRYVRSHTLKCFERIHFPTDFLIGCFWVKFCSQYFF

SEQ ID NO: 838495 - protein, 331 aa, Homo sapiens
GVFEASRLLNNFLLPFCACLAIQTEQLPSALADTTDSTTDSLDERKIKGVIELRKSLLSALRTYEPYGSLVQQIRILLLGPIGAGKSSFFNSVRSVFQGHVTHQALVGTNTTGISEKYRTYSIRDGKDGKYLPFILCDSLGLSEKEGGLCRDDIFYILNGNIRDRYQFNPMESIKLNHHDYIDSPSLKDRIHCVAFVFDASSIQYFSSQMIVKIKRIRRELVNAGVVHVALLTHVDSMDLITKGDLIEIERCEPVRSKLEEVQRKLGFALSDISVVSNYSSEWELDPVKDVLILSALRRMLWAADDFLEDLPFEQIGNLREEIINCAQGKK

SEQ ID NO: 838496 - protein, 428 aa, Homo sapiens
MAVTTRLTWLHEKILQNHFGGKRLSLLYKGSVHGFRNGVLLDRCCNQGPTLTVIYSEDHIIGAYAEESYQEGKYASIILFALQDTKISEWKLGLCTPETLFCCDVTKYNSPTNFQIDGRNRKVIMDLKTMENLGLAHSLDERKIKGVIELRKSLLSALRTYEPYGSLVQQIRILLLGPIGAGKSSFFNSVRSVFQGHVTHQALVGTNTTGISEKYRTYSIRDGKDGKYLPFILCDSLGLSEKEGGLCRDDIFYILNGNIRDRYQFNPMESIKLNHHDYIDSPSLKDRIHCVAFVFDASSIQYFSSQMIVKIKRIRRELVNAGVVHVALLTHVDSMDLITKGDLIEIERCEPVRSKLEEVQRKLGFALSDISVVSNYSSEWELDPVKDVLILSALRRMLWAADDFLEDLPFEQIGNLREEIINCAQGKK

SEQ ID NO: 838497 - protein, 452 aa, Homo sapiens [sequence omitted]

SEQ ID NO: 838498 - protein, 161 aa, Homo sapiens [sequence omitted]

SEQ ID NO: 838499 - protein, 350 aa, Homo sapiens
MAVTTRLTWLHEKILQNHFGGKRLSLLYKGSVHGFRNGVLLDRCCNQGPTLTVIYSEDHIIGAYAEESYQEGKYASIILFALQDTKISEWKLGLCTPETLFCCDVTKYNSPTNFQIDGRNRKVIMDLKTMENLGLAQNCTISIQDYEVFRCEDSLDERKIKGVIELRKSLLSALRTYEPYGSLVQQIRILLLGPIGAGKSSFFNSVRSVFQGHVTHQALVGTNTTGISEKYRTYSIRDGKDGKYLPFILCDSLGLSEKEGGLCRDDIFYILNGNIRDRYQFNPMESIKLNHHDYIDSPSLKDRIHCVAFVFDASSIQYFSSQMIVKIKRIRRELVNAARGSPKKTWICSF

SEQ ID NO: 838500 - protein, 161 aa, Homo sapiens [sequence omitted]

SEQ ID NO: 838501 - protein, 373 aa, Homo sapiens
MAVTTRLTWLHEKILQNHFGGKRLSLLYKGSVHGFRNGVLLDRCCNQGPTLTVIYSEDHIIGAYAEESYQEGKYASIILFALQDTKISEWKLGLCTPETLFCCDVTKYNSPTNFQIDGRNRKVIMDLKTMENLGLAQNCTISIQDYEVFRCEDSLDERKIKGVIELRKSLLSALRTYEPYGSLVQQIRILLLGPIGAGKSSFFNSVRSVFQGHVTHQALVGTNTTGISEKYRTYSIRDGKDGKYLPFILCDSLGLSEKEGGLCRDDIFYILNGNIRDRYQFNPMESIKLNHHDYIDSPSLKDRIHCVAFVFDASSIQYFSSQMIVKIKRIRRELVNAGVVHVALLTHVDSMDLITKGDLIEIERCEPVRSKGI

SEQ ID NO: 838502 - protein, 444 aa, Homo sapiens
MAVTTRLTWLHEKILQNHFGGKRLSLLYKGSVHGFRNGVLLDRCCNQGPTLTVIYSEDHIIGAYAEESYQEGKYASIILFALQDTKISEWKLGLCTPETLFCCDVTKYNSPTNFQIDGRNRKVIMDLKTMENLGLAQNCTISIQDYEVFRCEDSLDERKIKGVIELRKSLLSALRTYEPYGSLVQQIRILLLGPIGAGKSSFFNSVRSVFQGHVTHQALVGTNTTGISEKYRTYSIRDGKDGKYLPFILCDSLGLSEKEGGLCRDDIFYILNGNIRDRYQFNPMESIKLNHHDYIDSPSLKDRIHCVAFVFDASSIQYFSSQMIVKIKRIRRELVNAGVVHVALLTHVDSMDLITKGDLIEIERCEPVRSKLEEVQRKLGFALSDISVVSNYSSEWELDPVKDVLILSALRRMLWAADDFLEDLPFEQIGNLREEIINCAQGKK

SEQ ID NO: 838503 - protein, 157 aa, Homo sapiens
MAVTTRLTWLHEKILQNHFGGKRLSLLYKGSVHGFRNGVLLDRCCNQGPTLTVIYSEDHIIGAYAEESYQEGKYASIILFALQDTKISEWKLGLCTPETLFCCDVTKYNSPTNFQIDGRNRKVIMDLKTMENLGLAQNCTISIQDYEVFRCEGLENL

SEQ ID NO: 838504 - protein, 396 aa, Homo sapiens
MAVTTRLTWLHEKILQNHFGGKRLSLLYKGSVHGFRNGVLLDRCCNQGPTLTVIYSEDHIIGAYAEESYQEGKYASIILFALQDTKISEWKLGLCTPETLFCCDVTKYNSPTNFQIDGRNRKVIMDLKTMENLGLAQNCTISIQDYEVFRCEDSLDERKIKGVIELRKSLLSALRTYEPYGSLVQQIRILLLGPIGAGKSSFFNSVRSVFQGHVTHQALVGTNTTGISEKYRTYSIRDGKDGKYLPFILCDSLGLSEKEGGLCRDDIFYILNGNIRDRYQFNPMESIKLNHHDYIDSPSLKDRIHCVAFVFDASSIQYFSSQMIVKIKRIRRELVNAGVVHVALLTHVDSMDLITKGDLIEIERCEPVRSKVMNDALRKHIFWARGSPKKTWICSF

SEQ ID NO: 838505 - protein, 352 aa, Homo sapiens
MAVTTRLTWLHEKILQNHFGGKRLSLLYKGSVHGFRNGVLLDRCCNQGPTLTVIYSEDHIIGAYAEESYQEGKYASIILFALQDTKISEWKLGLCTPETLFCCDVTKYNSPTNFQIDGRNRKVIMDLKTMENLGLAQNCTISIQDYEVFRCEDSLDERKIKGVIELRKSLLSALRTYEPYGSLVQQIRILLLGPIGAGKSSFFNSVRSVFQGHVTHQALVGTNTTGISEKYRTYSIRDGKDGKYLPFILCDSLGLSEKEGGLCRDDIFYILNGNIRDRYQFNPMESIKLNHHDYIDSPSLKDRIHCVAFVFDASSIQYFSSQMIVKIKRIRRELVNAGNLREEIINCAQGKK

SEQ ID NO: 838506 - protein, 106 aa, Homo sapiens
MMRTQCLLGLRTFVAFAAKLWSFSALLRWQICMVIQHQTVRYDIIPLSSCPGISQVKRKIMVLDPDEILIHSHHDGVLRLTVWPGTPPDFILKVVIDKHPVRFFVH

SEQ ID NO: 838507 - protein, 390 aa, Homo sapiens
MRTRTGSQLAAREVTGSGAVPRQLEGRRCQAGRDANGGTSSDGSSSMAAIYGGVEGGGTRSEVLLVSEDGKILAEADGLSTNHWLIGTDKCVERINEMVNRAKRKAGVDPLVPLRSLGLSLSGGDQEDAGRILIEELRDRFPYLSESYLITTDAAGSIATATPDGGVVLISGTGSNCRLINPDGSESGCGGWGHMMGDEGSAYWIAHQAVKIVFDSIDNLEAAPHDIGYVKQAMFHYFQVPDRLGILTHLYRDFDKCRFAGFCRKIAEGAQQGDPLSRYIFRKAGEMLGRHIVAVLPEIDPVLFQGKIGLPILCVGSVWKSWELLKEGFLLALTQGREIQAQNFFSSFTLMKLRHSSALGGASLGARHIGHLLPMDYSANAIAFYSYTFS

SEQ ID NO: 838508 - protein, 390 aa, Homo sapiens; identical to SEQ ID NO: 838507

SEQ ID NO: 838509 - protein, 293 aa, Homo sapiens
MVNRAKRKAGVDPLVPLRSLGLSLSGGDQEDAGRILIEELRDRFPYLSESYLITTDAAGSIATATPDGGVVLISGTGSNCRLINPDGSESGCGGWGHMMGDEGSAYWIAHQAVKIVFDSIDNLEAAPHDIGYVKQAMFHYFQVPDRLGILTHLYRDFDKCRFAGFCRKIAEGAQQGDPLSRYIFRKAGEMLGRHIVAVLPEIDPVLFQGKIGLPILCVGSVWKSWELLKEGFLLALTQGREIQAQNFFSSFTLMKLRHSSALGGASLGARHIGHLLPMDYSANAIAFYSYTFS

SEQ ID NO: 838510 - protein, 195 aa, Homo sapiens
MGDEGSAYWIAHQAVKIVFDSIDNLEAAPHDIGYVKQAMFHYFQVPDRLGILTHLYRDFDKCRFAGFCRKIAEGAQQGDPLSRYIFRKAGEMLGRHIVAVLPEIDPVLFQGKIGLPILCVGSVWKSWELLKEGFLLALTQGREIQAQNFFSSFTLMKLRHSSALGGASLGARHIGHLLPMDYSANAIAFYSYTFS

SEQ ID NO: 838511 - protein, 383 aa, Homo sapiens [sequence omitted]

SEQ ID NO: 838512 - protein, 225 aa, Homo sapiens
MRTRTGSQLAAREVTGSGAVPRQLEGRRCQAGRDANGGTSSDGSSSMAAIYGGVEGGGTRSEVLLVSEDGKILAEADGLSTNHWLIGTDKCVERINEMVNRAKRKAGVDPLVPLRSLGLSLSGGDQEDAGRILIEELRDRFPYLSESYLITTDAAGSIATATPDGGVVLISGTGSNCRLINPDGSESGCGGWGHMMGDEGSGELTDWPSSRSWICSFLHSLSFSP

SEQ ID NO: 838513 - protein, 288 aa, Homo sapiens
MRTRTGSQLAAREVTGSGAVPRQLEGRRCQAGRDANGGTSSDGSSSMAAIYGGVEGGGTRSEVLLVSEDGKILAEADGLSTNHWLIGTDKCVERINEMVNRAKRKAGVDPLVPLRSLGLSLSGGDQEDAGRILIEELRDRFPYLSESYLITTDAAGSIATATPDGGVVLISGTGSNCRLINPDGSESGCGGWGHMMGDEGSAYWIAHQAVKIVFDSIDNLEAAPHDIGYVKQAMFHYFQVPDRLGILTHLYRDFDKCRCSAGRPPFPLYLQEGWGDAGQTHRSSVARD

SEQ ID NO: 838514 - protein, 205 aa, Homo sapiens
MRTRTGSQLAAREVTGSGAVPRQLEGRRCQAGRDANGGTSSDGSSSMAAIYGGVEGGGTRSEVLLVSEDGKILAEADGLSTNHWLIGTDKCVERINEMVNRAKRKAGVDPLVPLRSLGLSLSGGDQEDAGRILIEELRDRFPYLSESYLITTDAAGSIATATPDGGVVLISGTGSNCRLINPDGSESGCGGWGHMMGDEGSALAH

SEQ ID NO: 838515 - protein, 396 aa, Homo sapiens
MRTRTGSQLAAREVTGSGAVPRQLEGRRCQAGRDANGGTSSDGSSSMAAIYGGVEGGGTRSEVLLVSEDGKILAEADGLSTNHWLIGTDKCVERINEMVNRAKRKAGVDPLVPLRSLGLSLSGGDQEDAGRILIEELRDRFPYLSESYLITTDAAGSIATATPDGGVVLISGTGSNCRLINPDGSESGCGGWGHMMGDEGSALSAPAAYWIAHQAVKIVFDSIDNLEAAPHDIGYVKQAMFHYFQVPDRLGILTHLYRDFDKCRFAGFCRKIAEGAQQGDPLSRYIFRKAGEMLGRHIVAVLPEIDPVLFQGKIGLPILCVGSVWKSWELLKEGFLLALTQGREIQAQNFFSSFTLMKLRHSSALGGASLGARHIGHLLPMDYSANAIAFYSYTFS

SEQ ID NO: 838516 - protein, 208 aa, Homo sapiens
ATLVGSPAHGVCMMGDEGSAYWIAHQAVKIVFDSIDNLEAAPHDIGYVKQAMFHYFQVPDRLGILTHLYRDFDKCRFAGFCRKIAEGAQQGDPLSRYIFRKAGEMLGRHIVAVLPEIDPVLFQGKIGLPILCVGSVWKSWELLKEGFLLALTQGREIQAQNFFSSFTLMKLRHSSALGGASLGARHIGHLLPMDYSANAIAFYSYTFS

SEQ ID NO: 838517 - protein, 104 aa, Homo sapiens [sequence omitted]

SEQ ID NO: 838518 - protein, 328 aa, Homo sapiens
MRTRTGSQLAAREVTGSGAVPRQLEGRRCQAGRDANGGTSSDGSSSMAAIYGGVEGGGTRSEVLLVSEDGKILAEADGLSTNHWLIGTDKCVERINEMVNRAKRKAGVDPLVPLRSLGLSLSGGDQEDAGRILIEELRDRFPYLSESYLITTDAAGSIATATPDGGVVLISGTGSNCRLINPDGSESGCGGWGHMMGDEGSAYWIAHQAVKIVFDSIDNLEAAPHDIGYVKQAMFHYFQVLFQGKIGLPILCVGSVWKSWELLKEGFLLALTQGREIQAQNFFSSFTLMKLRHSSALGGASLGARHIGHLLPMDYSANAIAFYSYTFS

SEQ ID NO: 838519 - protein, 225 aa, Homo sapiens; identical to SEQ ID NO: 838512

SEQ ID NO: 838520 - protein, 390 aa, Homo sapiens; identical to SEQ ID NO: 838507

SEQ ID NO: 838521 - protein, 293 aa, Homo sapiens; identical to SEQ ID NO: 838509

SEQ ID NO: 838522 - protein, 293 aa, Homo sapiens; identical to SEQ ID NO: 838509

SEQ ID NO: 838523 - protein, 195 aa, Homo sapiens; identical to SEQ ID NO: 838510

SEQ ID NO: 838524 - protein, 195 aa, Homo sapiens; identical to SEQ ID NO: 838510

SEQ ID NO: 838525 - protein, 191 aa, Homo sapiens
MGDEGSAYWIAHQAVKIVFDSIDNLEAAPHDIGYVKQAMFHYFQVPDRLGILTHLYRDFDKCRFAGFCRKIAEGAQQGDPLSRYIFRKAGEMLGRHIVAVLPEIDPVLFQGKIGLPILCVGSVWKSWELLKEGFLLALTQGREIQAQNFFSSFTLMKLRHSSALGGASLGARHIGHLLPMDYSANAIAFYI

SEQ ID NO: 838526 - protein, 135 aa, Homo sapiens
MKSMLGNTDNFSQMRNLKSLYFGVKKNYSSFSNSRDIRKANFGGQIGDFPLLLMTLLCPFSSQVPDRLGILTHLYRDFDKCRFAGFCRKIAEGTGGGGWVLSGFVLQRSPVGRLSGVQTGLTTIFLSPSDLSSLP

SEQ ID NO: 838527 - protein, 468 aa, Homo sapiens
RGGRRADPGSRQRRCGGSRETLRAGLAGGGADGDGALSGCRRGRAPRVPSMAGSLPPCVVDCGTGYTKLGYAGNTEPQFIIPSCIAIRESAKVVDQAQRRVLRGVDDLDFFIGDEAIDKPTYATKWPIRHGIIEDWDLMERFMEQVVFKYLRAEPEDHYFLMTEPPLNTPENREYLAEIMFESFNVPGLYIAVQAVLALAASWTSRQVGERTLTGIVIDSGDGVTHVIPVAEGYVIGSCIKHIPIAGRDITYFIQQLLREREVGIPPEQSLETAKAIKEKYCYICPDIVKEFAKYDVDPRKWIKQYTGINAINQKKFVIDVGYERFLGPEIFFHPEFANPDFMESISDVVDEVIQNCPIDVRRPLYKNVVLSGGSTMFRDFGRRLQRDLKRVVDARLRLSEELSGGRIKPKPVEVQVVTHHMQRYAVWFGGSMLASTPEFFQVCHTKKDYEEYGPSICRHNPVFGVMS

SEQ ID NO: 838528 - protein, 468 aa, Homo sapiens; identical to SEQ ID NO: 838527

SEQ ID NO: 838529 - protein, 163 aa, Homo sapiens
RGGRRADPGSRQRRCGGSRETLRAGLAGGGADGDGALSGCRRGRAPRVPSMAGSLPPCVVDCGTGYTKLGYAGNTEPQFIIPSCIAIRESAKVVDQAQRRVLRGVDDLDFFIGDEAIDKPTYATKWPIRHGIIEDWDLMERFMEQVVFKYLRAEPEDHYFLMG

SEQ ID NO: 838530 - protein, 398 aa, Homo sapiens
RGGRRADPGSRQRRCGGSRETLRAGLAGGGADGDGALSGCRRGRAPRVPSMAGSLPPCVVDCGTGYTKLGYAGNTEPQFIIPSCIAIRESAKVVDQAQRRVLRGVDDLDFFIGDEAIDKPTYATKWPIRHGIIEDWDLMERFMEQVVFKYLRAEPEDHYFLMTEPPLNTPENREYLAEIMFESFNVPGLYIAVQAVLALAASWTSRQVGERTLTGIVIDSGDGVTHVIPVAEGYVIGSCIKHIPIAGRDITYFIQQLLREREVGIPPEQSLETAKAIKEKYCYICPDIVKEFAKYDVDPRKWIKQYTGINAINQKKFVIDVGYERFLGPEIFFHPEFANPDFMESISDVVDEVIQNCPIDVRRPLYKPEFFQVCHTKKDYEEYGPSICRHNPVFGVMS

SEQ ID NO: 838531 - protein, 114 aa, Homo sapiens
GFTQGSLCFVSCENVVLSGGSTMFRDFGRRLQRDLKRVVDARLRLSEELSGGRIKPKPVEVQVVTHHMQRYAVWFGGSMLASTPEFFQVCHTKKDYEEYGPSICRHNPVFGVMS

SEQ ID NO: 838532 - protein, 460 aa, Homo sapiens
RGGRRADPGSRQRRCGGSRETLRAGLAGGGADGDGALSGCRRGRAPRVPSMAGSLPPCVVDCGTGYTKLGYAGNTEPQFIIPSCIAIRESAKVVDQAQRRVLRGVDDLDFFIGDEAIDKPTYATKWPIRHGIIEDWDLMERFMEQVVFKYLRAEPEDHYFLMTEPPLNTPENREYLAEIMFESFNVPGLYIAVQAVLALAASWTSRQVGERTLTGIVIDSGDGVTHVIPVAEGYVIGSCIKHIPIAGRDITYFIQQLLREREVGIPPEQSLETAKAIKEKYCYICPDIVKEFAKYDVDPRKWIKQYTGINAINQKKFVIDVGYERFLGPEIFFHPEFANPDFMESISDVVDEVIQNCPIDVRRPLYKNVVLSGGSTMFRDFGRRLQRDLKRVVDARLRLSEELSGGRIKPKPVEVQVVTHHMQRYAVWFGGSMLASTPRVLSGLPTSRAACLGISSGRNM

SEQ ID NO: 838533 - protein, 163 aa, Homo sapiens; identical to SEQ ID NO: 838529

SEQ ID NO: 838534 - protein, 330 aa, Homo sapiens
MERFMEQVVFKYLRAEPEDHYFLMTEPPLNTPENREYLAEIMFESFNVPGLYIAVQAVLALAASWTSRQVGERTLTGIVIDSGDGVTHVIPVAEGYVIGSCIKHIPIAGRDITYFIQQLLREREVGIPPEQSLETAKAIKEKYCYICPDIVKEFAKYDVDPRKWIKQYTGINAINQKKFVIDVGYERFLGPEIFFHPEFANPDFMESISDVVDEVIQNCPIDVRRPLYKNVVLSGGSTMFRDFGRRLQRDLKRVVDARLRLSEELSGGRIKPKPVEVQVVTHHMQRYAVWFGGSMLASTPEFFQVCHTKKDYEEYGPSICRHNPVFGVMS

SEQ ID NO: 838535 - protein, 301 aa, Homo sapiens
RGGRRADPGSRQRRCGGSRETLRAGLAGGGADGDGALSGCRRGRAPRVPSMAGSLPPCVVDCGTGYTKLGYAGNTEPQFIIPSCIAIRESAKVVDQAQRRVLRGVDDLDFFIGDEAIDKPTYATKWPIRHGIIEDWDLMERFMEQVVFKYLRAEPEDHYFLMTEPPLNTPENREYLAEIMFESFNVPGLYIAVQAVLALAASWTSRQVGERTLTGIVIDSGDGVTHVIPVAEGYVIGSCIKHIPIAGRDITYFIQQLLREREVGIPPEQSLETAKAIKEKYCYICPDIVKEFANGVHLRCC

SEQ ID NO: 838536 - protein, 126 aa, Homo sapiens
MESISDVVDEVIQNCPIDVRRPLYKNVVLSGGSTMFRDFGRRLQRDLKRVVDARLRLSEELSGGRIKPKPVEVQVVTHHMQRYAVWFGGSMLASTPEFFQVCHTKKDYEEYGPSICRHNPVFGVMS

SEQ ID NO: 838537 - protein, 463 aa, Homo sapiens
RGGRRADPGSRQRRCGGSRETLRAGLAGGGADGDGALSGCRRGRAPRVPSMAGSLPPCVVDCGTGYTKLGYAGNTEPQFIIPSCIAIRESAKVVDQAQRRVLRGVDDLDFFIGDEAIDKPTYATKWPIRHGIIEDWDLMERFMEQVVFKYLRAEPEDHYFLMTEPPLNTPENREYLAEIMFESFNVPGLYIAVQAVLALAASWTSRQVGERTLTGIVIDSGDGVTHVIPVAEGYVIGSCIKHIPIAGRDITYFIQQLLREREVGIPPEQSLETAKAIKEKYCYICPDIVKEFAKYDVDPRKWIKQYTGINAINQKKFVIDVGYERFLGPEIFFHPEFANPDFMESISDVVDEVIQNCPIDVRRPLYKNVVLSGGSTMFRDFGRRLQRDLKRVVDARLRLSEELSGGRIKPKPVEVQVVTHHMQRYAVWFGGSMLASTVSPSLEGSVSPFLCSRLSLGKYCLRR

SEQ ID NO: 838538 - protein, 263 aa, Homo sapiens
RGGRRADPGSRQRRCGGSRETLRAGLAGGGADGDGALSGCRRGRAPRVPSMAGSLPPCVVDCGTGYTKLGYAGNTEPQFIIPSCIAIRESAKVVDQAQRRVLRGVDDLDFFIGDEAIDKPTYATKWPIRHGIIEDWDLMERFMEQVVFKYLRAEPEDHYFLMTEPPLNTPENREYLAEIMFESFNVPGLYIAVQAVLALAASWTSRQVGERTLTGIVIDSGDGVTHVIPVAEGYVIGSCIKHIPIAGEILLHLPRYSQGICQV

SEQ ID NO: 838539 - protein, 597 aa, Homo sapiens
MAEIIQERIEDRLPELEQLERIGLFSHAEIKAIIKKASDLEYKIQRRTLFKEDFINYVQYEINLLELIQRRRTRIGYSFKKDEIENSIVHRVQGVFQRASAKWKDDVQLWLSYVAFCKKWATKTRLSKVFSAMLAIHSNKPALWIMAAKWEMEDRLSSESARQLFLRALRFHPECPKLYKEYFRMELMHAEKLRKEKEEFEKASMDVENPDYSEEILKGELAWIIYKNSVSIIKGAEFHVSLLSIAQLFDFAKDLQKEIYDDLQALHTDDPLTWDYVARRELEIESQTEEQPTTKQAKAVEVGRKEERCCAVYEEAVKTLPTEAMWKCYITFCLERFTKKSNSGFLRGKRLERTMTVFRKAHELKLLSECQYKQLSVSLLCYNFLREALEVAVAGTELFRDSGTMWQLKLQVLIESKSPDIAMLFEEAFVHLKPQVCLPLWISWAEWSEGAKSQEDTEAVFKKALLAVIGADSVTLKNKYLDWAYRSGGYKKARAVFKSLQESRPFSVDFFRKMIQFEKEQESCNMANIREYYERALREFGSADSDLWMDYMKEELNHPLGRPENCGQIYWRAMKMLQGESAEAFVAKHAMHQTGHL

SEQ ID NO: 838540 - protein, 597 aa, Homo sapiens; identical to SEQ ID NO: 838539

SEQ ID NO: 838541 - protein, 597 aa, Homo sapiens; identical to SEQ ID NO: 838539

SEQ ID NO: 838542 - protein, 553 aa, Homo sapiens
MAEIIQERIEDRLPELEQLERIGLFSHAEIKAIIKKASDLEYKIQRRTLFKEDFINYVQYEINLLELIQRRRTRIGYSFKKDEIENSIVHRVQGVFQRASAKWKDDVQLWLSYVAFCKKWATKTRLSKVFSAMLAIHSNKPALWIMAAKWEMEDRLSSESARQLFLRALRFHPECPKLYKEYFRMELMHAEKLRKEKEEFEKASMDVENPDYSEEILKGELAWIIYKNSVSIIKGAEFHVSLLSIAQLFDFAKDLQKEIYDDLQALHTDDPLTWDYVARRELEIESQTEEQPTTKQAKAVEVGRKEERCCAVYEEAVKTLPTEAMWKCYITFCLERFTKKSNSGFLRGKRLERTMTVFRKAHELKLLSECQYKQLSVSLLCYNFLREALEVAVAGTELFRDSGTMWQLKLQVLIESKSPDIAMLFEEAFVHLKPQVCLPLWISWAEWSEGAKSQEDTEAVFKKALLAVIGADSVTLKNKYLDWAYRSGGYKKARAVFKSLQESRPFSVDFFRKMIQFEKEQTESLSVAQAGLLAHCNLCFPGILQYGEHKRIL

SEQ ID NO: 838543 - protein, 527 aa, Homo sapiens
MAEIIQERIEDRLPELEQLERIGLFSHAEIKAIIKKASDLEYKIQRRTLFKEDFINYVQYEINLLELIQRRRTRIGYSFKKDEIENSIVHRVQGVFQRASAKWKDDVQLWLSYVAFCKKWATKTRLSKVFSAMLAIHSNKPALWIMAAKWEMEDRLSSESARQLFLRALRFHPECPKLYKEYFRMELMHAEKLRKEKEEFEKASMDVENPDYSEEILKGELAWIIYKNSVSIIKGAEFHVSLLSIAQLFDFAKDLQKEIYDDLQALHTDDPLTWDYVARRELEIESQTEEQPTTKQAKAVEVGRKEERCCAVYEEAVKTLPTEAMWKCYITFCLERFTKKSNSGFLRGKRLERTMTVFRKAHELKLLSECQYKQLSVSLLCYNFLREALEVAVAGTELFRDSGTMWQLKLQVLIESKSPDIAMLFEEAFVHLKPQVCLPLWISWAEWSEGAKSQEDTEAVFKKALLAVIGADSVTLKNKYLDWAYRSGGYKKARAVFKSLQESRPFSVDFFRKMIQFEKEQIFGWII

SEQ ID NO: 838544 - protein, 597 aa, Homo sapiens; identical to SEQ ID NO: 838539

SEQ ID NO: 838545 - protein, 120 aa, Homo sapiens
MLAIHSNKPALWIMAAKWEMEDRLSSESARQLFLRALRFHPECPKLYKEYFRMELMHAEKLRKEKEEFEKASMDVENPDYSEEILKGELAWIIYKNSVSIIKGSYSVTHAGVQWYNYGSL

SEQ ID NO: 838546 - protein, 446 aa, Homo sapiens
MENRLSSESARQLFLRALRFHPECPKLYKEYFRMELMHAEKLRKEKEEFEKASMDVENPDYSEEILKGELAWIIYKNSVSIIKGAEFHVSLLSIAQLFDFAKDLQKEIYDDLQALHTDDPLTWDYVARRELEIESQTEEQPTTKQAKAVEVGRKEERCCAVYEEAVKTLPTEAMWKCYITFCLERFTKKSNSGFLRGKRLERTMTVFRKAHELKLLSECQYKQLSVSLLCYNFLREALEVAVAGTELFRDSGTMWQLKLQVLIESKSPDIAMLFEEAFVHLKPQVCLPLWISWAEWSEGAKSQEDTEAVFKKALLAVIGADSVTLKNKYLDWAYRSGGYKKARAVFKSLQESRPFSVDFFRKMIQFEKEQESCNMANIREYYERALREFGSADSDLWMDYMKEELNHPLGRPENCGQIYWRAMKMLQGESAEAFVAKHAMHQTGHL

SEQ ID NO: 838547 - protein, 243 aa, Homo sapiens [sequence omitted]

SEQ ID NO: 838548 - protein, 553 aa, Homo sapiens; identical to SEQ ID NO: 838542

SEQ ID NO: 838549 - protein, 176 aa, Homo sapiens
DSTKPETVEPIPSHLALPEEVSLQEQLAQGVPRYSYLGQAMDQDGPSEMQEYFLRPGTDPQSEKLHGKMSLEHEGLATADGICSMMIQNQVSPEDALYGFDSYGPVTDSLIHEGENSYKFEEMFNENCFLVQHEQILPRVKPYDCPECGKAFGKSKHLLQHHIIHTGEKPYKCLEC

SEQ ID NO: 838550 - protein, 101 aa, Homo sapiens
MHALPSWSASVSPSVSLDSDAPSVRRSPALGPWSLRLITRGCRDGRGRVWRGQGPLRPSLRKEWRNPKTGPWRPSCKVGRRAGRQDLGRAWGAGPPEGGGG

SEQ ID NO: 838551 - protein, 274 aa, Homo sapiens
MVLGLCPRKGPLTHLISAWFPHFGFFLQNKIQQIENLACIPSLRFLSLAGNQIRQVENLLDLPCLQFLDLSENLIETLKLDEFPQSLLILNLSGNSCTNQDGYRELVTEALPLLLDLDGQPVVERWISDEEDEASSDEEFPELSGPFCSERGFLKELEQELSRHREHRQQTALTEHLLRMEMQPTLTDLPLLPGVPMAGDSSPSATPAQGEETVPEAVSSPQASSPTKKPCSLIPRGHQSSFWGRKGARAATAPKASVAEAPSTTKTTAKRSKK

SEQ ID NO: 838552 - protein, 316 aa, Homo sapiens
MGNCQRRCTQQCCGMNEWVDGTSAFFSMNDSKGRFHTLDELQTVRLDREGITTIRNLEGLQNLHSLYLQGNKIQQIENLACIPSLRFLSLAGNQIRQVENLLDLPCLQFLDLSENLIETLKLDEFPQSLLILNLSGNSCTNQDGYRELVTEALPLLLDLDGQPVVERWISDEEDEASSDEEFPELSGPFCSERGFLKELEQELSRHREHRQQTALTEHLLRMEMQPTLTDLPLLPGVPMAGDSSPSATPAQGEETVPEAVSSPQASSPTKKPCSLIPRGHQSSFWGRKGARAATAPKASVAEAPSTTKTTAKRSKK

SEQ ID NO: 838553 - protein, 291 aa, Homo sapiens
MSGGKSAQGPEEGGVCITEALITKRNLTFPEDGELSEKMFHTLDELQTVRLDREGITTIRNLEGLQNLHSLYLQGNKIQQIENLACIPSLRFLSLAGNQIRQVENLLDLPCLQFLDLSENLIETLKLDEFPQSLLILNLSGNSCTNQDGYRELVTEALPLLLDLDGQPVVERWISDEEDEASSDEEFPELSGPFCSERGFLKELEQELSRHREHRQQTALTEHLLRMEMQPTLTDLPLLPGVPMAGDSSPSATPAQGEETVPEAVSSPQASSPTKKPCSLIPRGLPLFSDL

SEQ ID NO: 838554 - protein, 321 aa, Homo sapiens
MSGGKSAQGPEEGGVCITEALITKRNLTFPEDGELSEKMFHTLDELQTVRLDREGITTIRNLEGLQNLHSLYLQGNKIQQIENLACIPSLRFLSLAGNQIRQVENLLDLPCLQFLDLSENLIETLKLDEFPQSLLILNLSGNSCTNQDGYRELVTEALPLLLDLDGQPVVERWISDEEDEASSDEEFPELSGPFCSERGFLKELEQELSRHREHRQQTALTEHLLRMEMQPTLTDLPLLPGVPMAGDSSPSATPAQGEETVPEAVSSPQASSPTKKPCSLIPRGHQSSFWGRKGARAATAPKASVAEAPSTTKTTAKRSKK

SEQ ID NO: 838555 - protein, 362 aa, Homo sapiens
MSGGKSAQGPEEGGVCITEALITKRNLTFPEDGELSEKMFHTLDELQTVRLDREGITTIRNLEGLQNLHSLYLQGLQPISCFEEEETMKIPVHHSDPTWRLFGGGGGGWLIFSLPLNKIQQIENLACIPSLRFLSLAGNQIRQVENLLDLPCLQFLDLSENLIETLKLDEFPQSLLILNLSGNSCTNQDGYRELVTEALPLLLDLDGQPVVERWISDEEDEASSDEEFPELSGPFCSERGFLKELEQELSRHREHRQQTALTEHLLRMEMQPTLTDLPLLPGVPMAGDSSPSATPAQGEETVPEAVSSPQASSPTKKPCSLIPRGHQSSFWGRKGARAATAPKASVAEAPSTTKTTAKRSKK

SEQ ID NO: 838556 - protein, 45 aa, Homo sapiens
LAQSLPSPFPQPAGPGLSLPAPPVSTSAFPVPQAACPAGHSVSHL

SEQ ID NO: 838557 - protein, 101 aa, Homo sapiens
RILSSLWGTGAGGTVHAKMAVSTEELEATVQEVLGRLKSHQFFQSTWDTVAFIVFLTFMGTVLLLLLLVVAHCCCCSSPGPRRESPRKERPKGVDNLALEP

SEQ ID NO: 838558 - protein, 114 aa, Homo sapiens
WSRKQEAACAPQDLPGWGNWRLLGGGTVHAKMAVSTEELEATVQEVLGRLKSHQFFQSTWDTVAFIVFLTFMGTVLLLLLLVVAHCCCCSSPGPRRESPRKERPKGVDNLALEP

SEQ ID NO: 838559 - protein, 121 aa, Homo sapiens
TKNACAQRKDHVRTQQKGGHLQAKQRGLRRNQPCPQLDLGLPGSRIVRNNFHCLSYTACGILLWQPKQMNTFIKIKTFCLLKKINTQTHRLIKIFVIHTYYISKYVYNSYTLTIKDKQLNF

SEQ ID NO: 838560 - protein, 53 aa, Homo sapiens
MVSDAGGTLWVTTTQCGGEQWAPATAADNGGPGGPDTPGTELLPTTTNIQRPP

SEQ ID NO: 838561 - protein, 942 aa, Homo sapiens
VTVPEPGAAESRAPCGDSSGGCVRSAGASMDQSVAIQETLAEGEYCVIAVQGVLCEGDSRQSRLLGLVRYRLEHGGQEHALFLYTHRRMAITGDDVSLDQIVPVSRDFTLEEVSPDGELYILGSDVTVQLDTAELSLVFQLPFGSQTRMFLHEVARACPGFDSATRDPEFLWLSRYRCAELELEMPTPRGCNSALVTWPGYATIGGGGSNFDGLRPNGKGVPMDQSSRGQDKPESLQPRQNKSKSEITDMVRSSTITVSDKAHILSMQKFGLRDTIVKSHLLQKEEDYTYIQNFRFFAGTYNVNGQSPKECLRLWLSNGIQAPDVYCVGFQELDLSKEAFFFHDTPKEEEWFKAVSEGLHPDAKYAKVKLIRLVGIMLLLYVKQEHAAYISEVEAETVGTGIMGRMGNKGGVAIRFQFHNTSICVVNSHLAAHIEEYERRNQDYKDICSRMQFCQPDPSLPPLTISNHDVILWLGDLNYRIEELDVEKVKKLIEEKDFQMLYAYDQLKIQVAAKTVFEGFTEGELTFQPTYKYDTGSDDWDTSEKCRAPAWCDRILWKGKNITQLSYQSHMALKTSDHKPVSSVFDIGVRVVNDELYRKTLEEIVRSLDKMENANIPSVSLSKREFCFQNVKYMQLKVESFTIHNGQVPCHFEFINKPDEESYCKQWLNANPSRGFLLPDSDVEIDLELFVNKTTATKLNSGEDKIEDILVLHLDRGKDYFLSVSGNYLPSCFGSPIHTLCYMREPILDLPLETISELTLMPVWTGDDGSQLDSPMEIPKELWMMVDYLYRNAVQQEDLFQQPGLRSEFEHIRDCLDTGMIDNLSASNHSVAEALLLFLESLPEPVICYSTYHNCLECSGNYTASKQVISTLPIFHKNVFHYLMAFLRELLKNSAKNHLDENILASIFGSLLLRNPAGHQKLDMTEKKKAQEFIHQFLCNPL

SEQ ID NO: 838562 - protein, 761 aa, Homo sapiens
RRDEELEEAGREMSAAASSRERNTAGGSNFDGLRPNGKGVPMDQSSRGQDKPESLQPRQNKSKSEITDMVRSSTITVSDKAHILSMQKFGLRDTIVKSHLLQKEEDYTYIQNFRFFAGTYNVNGQSPKECLRLWLSNGIQAPDVYCVGFQELDLSKEAFFFHDTPKEEEWFKAVSEGLHPDAKYAKVKLIRLVGIMLLLYVKQEHAAYISEVEAETVGTGIMGRMGNKGGVAIRFQFHNTSICVVNSHLAAHIEEYERRNQDYKDICSRMQFCQPDPSLPPLTISNHDVILWLGDLNYRIEELDVEKVKKLIEEKDFQMLYAYDQLKIQVAAKTVFEGFTEGELTFQPTYKYDTGSDDWDTSEKCRAPAWCDRILWKGKNITQLSYQSHMALKTSDHKPVSSVFDIGVRVVNDELYRKTLEEIVRSLDKMENANIPSVSLSKREFCFQNVKYMQLKVESFTIHNGQVPCHFEFINKPDEESYCKQWLNANPSRGFLLPDSDVEIDLELFVNKTTATKLNSGEDKIEDILVLHLDRGKDYFLSVSGNYLPSCFGSPIHTLCYMREPILDLPLETISELTLMPVWTGDDGSQLDSPMEIPKELWMMVDYLYRNAVQQEDLFQQPGLRSEFEHIRDCLDTGMIDNLSASNHSVAEALLLFLESLPEPVICYSTYHNCLECSGNYTASKQVISTLPIFHKNVFHYLMAFLRELLKNSAKNHLDENILASIFGSLLLRNPAGHQKLDMTEKKKAQEFIHQFLCNPL

SEQ ID NO: 838563 - protein, 71 aa, Homo sapiens
LTTSMPLELCQTPHACHSSQAVLTVVMKNWEPLVSLPALACSPSQARVLQFEVLIGEALTVDALSSCAISR

SEQ ID NO: 838564 - protein, 942 aa, Homo sapiens; identical to SEQ ID NO: 838561

SEQ ID NO: 838565 - protein, 761 aa, Homo sapiens; identical to SEQ ID NO: 838562

SEQ ID NO: 838566 - protein, 761 aa, Homo sapiens; identical to SEQ ID NO: 838562

SEQ ID NO: 838567 - protein, 761 aa, Homo sapiens; identical to SEQ ID NO: 838562

SEQ ID NO: 838568 - protein, 288 aa, Homo sapiens
RRDEELEEAGREMSAAASSRERNTAGGSNFDGLRPNGKGVPMDQSSRGQDKPESLQPRQNKSKSEITDMVRSSTITVSDKAHILSMQKFGLRDTIVKSHLLQKEEDYTYIQNFRFFAGTYNVNGQSPKECLRLWLSNGIQAPDVYCVGFQELDLSKEAFFFHDTPKEEEWFKAVSEGLHPDAKYAKVKLIRLVGIMLLLYVKQEHAAYISEVEAETVGTGIMGRMGNKGGVAIRFQFHNTSICVVNSHLAAHIEEYERRNQDYKDICSRMQFCQPDPSLPPLTISNHE

SEQ ID NO: 838569 - protein, 120 aa, Homo sapiens
TPYREFGPQGQEIRPEVESLPEPVICYSTYHNCLECSGNYTASKQVISTLPIFHKNVFHYLMAFLRELLKNSAKNHLDENILASIFGSLLLRNPAGHQKLDMTEKKKAQEFIHQFLCNPL

SEQ ID NO: 838570 - protein, 761 aa, Homo sapiens; identical to SEQ ID NO: 838562

SEQ ID NO: 838571 - protein, 808 aa, Homo sapiens
RRDEELEEAGREMSAAASSRERNTAGGSNFDGLRPNGKGVPMDQSSRGQDKPESLQPRQNKSKSEITDMVRSSTITVSDKAHILSMQKFGLRDTIVKSHLLQKEEDYTYIQNFRFFAGTYNVNGQSPKECLRLWLSNGIQAPDVYCVGFQELDLSKEAFFFHDTPKEEEWFKAVSEGLHPDAKYAKVKLIRLVGIMLLLYVKQEHAAYISEVEAETVGTGIMGRMGNKGGVAIRFQFHNTSICVVNSHLAAHIEEYERRNQDYKDICSRMQFCQPDPSLPPLTISNHDVILWLGDLNYRIEELDVEKVKKLIEEKDFQMLYAYDQLKIQVAAKTVFEGFTEGELTFQPTYKYDTGSDDWDTSEKCRAPAWCDRILWKGKNITQLSYQSHMALKTSDHKPVSSVFDIGVRVVNDELYRKTLEEIVRSLDKMENANIPSVSLSKREFCFQNVKYMQLKVESFTIHNGQVPCHFEFINKPDEESYCKQWLNANPSRGFLLPDSDVEIDLELFVNKTTATKLNSGEDKIEDILVLHLDRGKDYFLSVSGNYLPSCFGSPIHTLCYMREPILDLPLETISELFWRLRSPRSRHCQLWCLVIILNYICCHLKDSYGDNSNTRELIWSRPMTLMPVWTGDDGSQLDSPMEIPKELWMMVDYLYRNAVQQEDLFQQPGLRSEFEHIRDCLDTGMIDNLSASNHSVAEALLLFLESLPEPVICYSTYHNCLECSGNYTASKQVISTLPIFHKNVFHYLMAFLRELLKNSAKNHLDENILASIFGSLLLRNPAGHQKLDMTEKKKAQEFIHQFLCNPL

SEQ ID NO: 838572 - protein, 761 aa, Homo sapiens; identical to SEQ ID NO: 838562

SEQ ID NO: 838573 - protein, 271 aa, Homo sapiens
MRELAIEIGVRALLFGVFVFTEFLDPFQRVIQPEEIWLYKNPLVQSDNIPTRLMFAISFLTPLAVICVVKIIRRTDKTEIKEAFLAVSLALALNGVCTNTIKLIVGRPRPDFFYRCFPDGVMNSEMHCTGDPDLVSEGRKSFPSIHSSFAFSGLGFTTFYLAGKLHCFTESGRGKSWRLCAAILPLYCAMMIALSRMCDYKHHWQDSFVGGVIGLIFAYICYRQHYPPLANTACHKPYVSLRVPASLKKEERPTADSAPSLPLEGITEGPV

SEQ ID NO: 838574 - protein, 271 aa, Homo sapiens; identical to SEQ ID NO: 838573

SEQ ID NO: 838575 - protein, 222 aa, Homo sapiens
MRELAIEIGVRALLFGVFVFTEFLDPFQRVIQPEEIWLYKNPLVQSDNIPTRLMFAISFLTPLAVICVVKIIRRTDKTEIKEAFLAVSLALALNGVCTNTIKLIVGRPRPDFFYRCFPDGVMNSEMHCTGDPDLVSEGRKSFPSIHSSFAFSGLGFTTFYLAGKLHCFTESGRGKSWRLCAAILPLYCAMMIALSRMCDYKHHWQAVGRSQPSRRMAAPICS

SEQ ID NO: 838576 - protein, 271 aa, Homo sapiens; identical to SEQ ID NO: 838573

SEQ ID NO: 838577 - protein, 395 aa, Homo sapiens
MRELAIEIGVRALLFGVFVFTEFLDPFQRVIQPEEIWLYKNPLVQSDNIPTRLMFAISFLTPLAVICVVKIIRRTDKTEIKEAFLAVSLALALNGVCTNTIKLIVGRPRPDFFYRCFPDGVMNSEMHCTGDPDLVSEGRKSFPSIHSSFAFSGLGFTTFYLAGKLHCFTESGRGKSWRLCAAILPLYCAMMIALSRMCDYKHHWQDSFVGGVIGLIFAYICYRQHYPPLANTACHKPYVSLRVPASLKKEERPTADSAPSLPLEGITPRPPPPSPRHDAPPPPSAPTSISYLSLLSASLSALFLLLLPIPSVLLNIAKFWHTSHLPLPPLHLYPRPPSTARRTSPPLSYLIPPPHLPPPTHLTSPSPLRSLLTTLSSPLPRSPLRGTRPLHIHYS

SEQ ID NO: 838578 - protein, 64 aa, Homo sapiens
QLGSDPRKAEACPGLSWGWEDSQVVVSSPFLGLIPETKSTQSIWVFPEACLRRRPGLVGVIGGG

SEQ ID NO: 838579 - protein, 350 aa, Homo sapiens [sequence omitted]

SEQ ID NO: 838580 - protein, 374 aa, Homo sapiens
SPGDPDLELPRARPQLVNSPGADKMETNSSLPTNISGGTPAVSAGYLFLDIITYLVFAVTFVLGVLGNGLVIWVAGFRMTHTVTTISYLNLAVADFCFTSTLPFFMVRKAMGGHWPFGWFLCKFVFTIVDINLFGSVFLIALIALDRCVCVLHPVWTQNHRTVSLAKKVIIGPWVMALLLTLPVIIRVTTVPGKTGTVACTFNFSPWTNDPKERINVAVAMLTVRGIIRFIIGFSAPMSIVAVSYGLIATKIHKQGLIKSSRPLRVLSFVAAAFFLCWSPYQVVALIATVRIRELLQGMYKEIGIAVDVTSALAFFNSCLNPMLYVFMGQDFRERLIHALPASLERALTEDSTQTSDTATNSTLPSAEVALQAK

SEQ ID NO: 838581 - protein, 374 aa, Homo sapiens; identical to SEQ ID NO: 838580

SEQ ID NO: 838582 - protein, 432 aa, Homo sapiens
  misc_feature (371)..(371): Xaa can be any naturally occurring amino acid
  misc_feature (374)..(374): Xaa can be any naturally occurring amino acid
  misc_feature (376)..(376): Xaa can be any naturally occurring amino acid
  misc_feature (378)..(378): Xaa can be any naturally occurring amino acid
  misc_feature (380)..(381): Xaa can be any naturally occurring amino acid
  misc_feature (385)..(386): Xaa can be any naturally occurring amino acid
  misc_feature (391)..(392): Xaa can be any naturally occurring amino acid
  misc_feature (394)..(395): Xaa can be any naturally occurring amino acid
  misc_feature (400)..(401): Xaa can be any naturally occurring amino acid
  misc_feature (409)..(414): Xaa can be any naturally occurring amino acid
  misc_feature (419)..(419): Xaa can be any naturally occurring amino acid
SPGDPDLELPRARPQLVNSPGADKMETNSSLPTNISGGTPAVSAGYLFLDIITYLVFAVTFVLGVLGNGLVIWVAGFRMTHTVTTISYLNLAVADFCFTSTLPFFMVRKAMGGHWPFGWFLCKFVFTIVDINLFGSVFLIALIALDRCVCVLHPVWTQNHRTVSLAKKVIIGPWVMALLLTLPVIIRVTTVPGKTGTVACTFNFSPWTNDPKERINVAVAMLTVRGIIRFIIGFSAPMSIVAVSYGLIATKIHKQGLIKSSRPLRVLSFVAAAFFLCWSPYQVVALIATVRIRELLQGMYKEIGIAVDVTSALAFFNSCLNPMLYVFMGQDFRERLIHALPASLERALTEDSTQTSDTATNSTLPSAECVXQVXGXGXFXXTQLXXLLATXXSXXYDTIXXKKTFFLIXXXXXXKKKKXFFFFFFFFFFFFF

SEQ ID NO: 838583 - protein, 316 aa, Homo sapiens
TPHRSSQVQALVWSLRRWEMLARAARGTGALLLRGSLLASGRAPRRASSGLPRNTVVLFVPQQEAWVVERMGRFHRILEPGLNILIPVLDRIRYVQSLKEIVINVPEQSAVTLDNVTLQIDGVLYLRIMDPYKASYGVEDPEYAVTQLAQTTMRSELGKLSLDKVFRERESLNASIVDAINQAADCWGIRCLRYEIKDIHVPPRVKESMQMQVEAERRKRATVLESEGTRESAINVAEGKKQAQILASEAEKAEQINQAAGEASAVLAKAKAKAEAIRILVESCPHNAASRVPLMWPAVFRFPHVLSAYYGSLGVP

SEQ ID NO: 838584 - protein, 88 aa, Homo sapiens
KAFHLEPVVWPSSMSARSPKLAKDSNTILLPSNPGDVTSMVAQAMGVYGALTKAPVPGTPDSLSSGSSRDVQGTDASLDEELDRVKMS

SEQ ID NO: 838585 - protein, 365 aa, Homo sapiens
TPHRSSQVQALVWSLRRWEMLARAARGTGALLLRGSLLASGRAPRRASSGLPRNTVVLFVPQQEAWVVERMGRFHRILEPGLNILIPVLDRIRYVQSLKEIVINVPEQSAVTLDNVTLQIDGVLYLRIMDPYKASYGVEDPEYAVTQLAQTTMRSELGKLSLDKVFRERESLNASIVDAINQAADCWGIRCLRYEIKDIHVPPRVKESMQMQVEAERRKRATVLESEGTRESAINVAEGKKQAQILASEAEKAEQINQAAGEASAVLAKAKAKAEAIRILAAALTQHNGDAAASLTVAEQYVSAFSQTGQGLQHYPTALQPWRCHQHGGSGHGCIWSPHQSPSARDSRLTLQWEQQRCPGYRCKS

SEQ ID NO: 838586 - protein, 346 aa, Homo sapiens
MLARAARGTGALLLRGSLLASGRAPRRASSGLPRNTVVLFVPQQEAWVVERMGRFHRILEPGLNILIPVLDRIRYVQSLKEIVINVPEQSAVTLDNVTLQIDGVLYLRIMDPYKASYGVEDPEYAVTQLAQTTMRSELGKLSLDKVFRERESLNASIVDAINQAADCWGIRCLRYEIKDIHVPPRVKESMQMQVEAERRKRATVLESEGTRESAINVAEGKKQAQILASEAEKAEQINQAAGEASAVLAKAKAKAEAIRILAAALTQHNGDAAASLTVAEQYVSAFSQTGQGLQHYPTALQPWRCHQHGGSGHGCIWSPHQSPSARDSRLTLQWEQQRCPGYRCKS

SEQ ID NO: 838587 - protein, 381 aa, Homo sapiens
YIRGSGTARGKARVGFWERPLRSSRWFRRSLRRWEMLARAARGTGALLLRGSLLASGRAPRRASSGLPRNTVVLFVPQQEAWVVERMGRFHRILEPGLNILIPVLDRIRYVQSLKEIVINVPEQSAVTLDNVTLQIDGVLYLRIMDPYKASYGVEDPEYAVTQLAQTTMRSELGKLSLDKVFRERESLNASIVDAINQAADCWGIRCLRYEIKDIHVPPRVKESMQMQVEAERRKRATVLESEGTRESAINVAEGKKQAQILASEAEKAEQINQAAGEASAVLAKAKAKAEAIRILAAALTQHNGDAAASLTVAEQYVSAFSQTGQGLQHYPTALQPWRCHQHGGSGHGCIWSPHQSPSARDSRLTLQWEQQRCPGYRCKS

SEQ ID NO: 838588 - protein, 465 aa, Homo sapiens
YIRGSGTARGKARVGFWERPLRSSRWFRRSLRRWEMLARAARGTGALLLRGSLLASGRAPRRASSGLPRNTVVLFVPQQEAWVVERMGRFHRILEPGLNILIPVLDRIRYVQSLKEIVINVPEQSAVTLDNVTLQIDGVLYLRIMDPYKASYGVEDPEYAVTQLAQTTMRSELGKLSLDKVFRERESLNASIVDAINQAADCWGIRCLRYEIKDIHVPPRVKESMQMQVEAERRKRATVLESEGTRESAINVAEGKKQAQILASEAEKAEQINQAAGEASAVLAKAKAKAEAIRILAAALTQHNGDAAASLTVAEQYVSAFSQTGQGLQHYPTALQPWRCHQHGGSGYELSEDPAQSTGARDQTETPPPSSTLTYHKGLQSALALDLPSFFVEMESKNETSPLSPANMEVLEIPFFGRYLCWYSESHFTLMVCKIPKINSRAYKTGLREGERKTNLLAPMPSFPV

SEQ ID NO: 838589 - protein, 295 aa, Homo sapiens
MGRFHRILEPGLNILIPVLDRIRYVQSLKEIVINVPEQSAVTLDNVTLQIDGVLYLRIMDPYKASYGVEDPEYAVTQLAQTTMRSELGKLSLDKVFRERESLNASIVDAINQAADCWGIRCLRYEIKDIHVPPRVKESMQMQVEAERRKRATVLESEGTRESAINVAEGKKQAQILASEAEKAEQINQAAGEASAVLAKAKAKAEAIRILAAALTQHNGDAAASLTVAEQYVSAFSQTGQGLQHYPTALQPWRCHQHGGSGHGCIWSPHQSPSARDSRLTLQWEQQRCPGYRCKS

SEQ ID NO: 838590 - protein, 340 aa, Homo sapiens
MGSAPLVSLVPEVAAAVGNGRASSGLPRNTVVLFVPQQEAWVVERMGRFHRILEPGLNILIPVLDRIRYVQSLKEIVINVPEQSAVTLDNVTLQIDGVLYLRIMDPYKASYGVEDPEYAVTQLAQTTMRSELGKLSLDKVFRERESLNASIVDAINQAADCWGIRCLRYEIKDIHVPPRVKESMQMQVEAERRKRATVLESEGTRESAINVAEGKKQAQILASEAEKAEQINQAAGEASAVLAKAKAKAEAIRILAAALTQHNGDAAASLTVAEQYVSAFSQTGQGLQHYPTALQPWRCHQHGGSGHGCIWSPHQSPSARDSRLTLQWEQQRCPGYRCKS

SEQ ID NO: 838591 - protein, 325 aa, Homo sapiens
YIRGSGTARGKARVGFWERPLRSSRWFRRSLRRWEMLARAARGTGALLLRGSLLASGRAPRRASSGLPRNTVVLFVPQQEAWVVERMGRFHRILEPGLNILIPVLDRIRYVQSLKEIVINVPEQSAVTLDNVTLQIDGVLYLRIMDPYKASYGVEDPEYAVTQLAQTTMRSELGKLSLDKVFRERESLNASIVDAINQAADCWGIRCLRYEIKDIHVPPRVKESMQMQVEAERRKRATVLESEGTRESAINVAEGKKQAQILASEAEKAEQINQAAGEASAVLAKAKAKAEAIRILAAALTQHVRGPWVGMGTGIDSGRGSLIYA

SEQ ID NO: 838592 - protein, 540 aa, Homo sapiens
SDLEITRPLPDYRDPLRSSRWFRRSLRRWEMLARAARGTGALLLRGSLLASGRAPRRASSGLPRNTVVLFVPQQEAWVVERMGRFHRILEPCEKPLLPTLGQPDDQSLTTCNVGRTSFGPARTVSSRLCRPDLTGPRLLTIIPMLPPFPMHLTGPILGNLPCPLSALPLSLHRDGYSAGSDSHDSPLHSGASLAFLFSWVFLPVTPQPSEDLFLGRSCCFSGHVPCVDSLHTPGLSLGPNPIVPSLLRTHDSSFQGLNILIPVLDRIRYVQSLKEIVINVPEQSAVTLDNVTLQIDGVLYLRIMDPYKASYGVEDPEYAVTQLAQTTMRSELGKLSLDKVFRERESLNASIVDAINQAADCWGIRCLRYEIKDIHVPPRVKESMQMQVEAERRKRATVLESEGTRESAINVAEGKKQAQILASEAEKAEQINQAAGEASAVLAKAKAKAEAIRILAAALTQHNGDAAASLTVAEQYVSAFSQTGQGLQHYPTALQPWRCHQHGGSGHGCIWSPHQSPSARDSRLTLQWEQQRCPGYRCKS

SEQ ID NO: 838593 - protein, 325 aa, Homo sapiens; identical to SEQ ID NO: 838591

SEQ ID NO: 838594 - protein, 157 aa, Homo sapiens
MQMQVEAERRKRATVLESEGTRESAINVAEGKKQAQILASEAEKAEQINQAAGEASAVLAKAKAKAEAIRILAAALTQHNGDAAASLTVAEQYVSAFSQTGQGLQHYPTALQPWRCHQHGGSGHGCIWSPHQSPSARDSRLTLQWEQQRCPGYRCKS

SEQ ID NO: 838595 - protein, 312 aa, Homo sapiens
MLARAARGTGALLLRGSLLASGRAPRRASSGLPRNTVVLFVPQQEAWVVERMGRFHRILEPGLNILIPVLDRIRYVQSLKEIVINVPEQSAVTLDNVTLQIDGVLYLRIMDPYKASYGVEDPEYAAINQAADCWGIRCLRYEIKDIHVPPRVKESMQMQVEAERRKRATVLESEGTRESAINVAEGKKQAQILASEAEKAEQINQAAGEASAVLAKAKAKAEAIRILAAALTQHNGDAAASLTVAEQYVSAFSQTGQGLQHYPTALQPWRCHQHGGSGHGCIWSPHQSPSARDSRLTLQWEQQRCPGYRCKS

SEQ ID NO: 838596 - protein, 361 aa, Homo sapiens
YIRGSGTARGKARVGFWERPLRSSRWFRRSLRRWEMLARAARGTGALLLRGSLLASGRAPRRASSGLPRNTVVLFVPQQEAWVVERMGRFHRILEPGLNILIPVLDRIRYVQSLKEIVINVPEQSAVTLDNVTLQIDGVLYLRIMDPYKASYGVEDPEYAVTQLAQTTMRSELGKLSLDKVFRERESLNASIVDAINQAADCWGIRCLRYEIKDIHVPPRVKESMQMQVEAERRKRATVLESEGTRESAINVAEGKKQAQILASEAEKAEQINQAAGEASAVLAKQVKLSIDLVSLTHYGMRVPDVPPMRRSNGRSISLPHWGPDVSAVFGPNQGGTIPGMSQLEANYRRRNLSPRLCPKC

SEQ ID NO: 838597 - protein, 234 aa, Homo sapiens
SDLEITRPLPDYRDPLRSSRWFRRSLRRWEMLARAARGTGALLLRGSLLASGRAPRRASSGLPRNTVVLFVPQQEAWVVERMGRFHRILEPGLNILIPVLDRIRYVQSLKEIVINVPEQSAVTLDNVTLQIDGVLYLRIMDPYKASYGVEDPEYAVTQLAQTTMRSELGKLSLDKVFRERESLNASIVDAMGVYGALTKAPVPGTPDSLSSGSSRDVQGTDASLDEELDRVKMS

SEQ ID NO: 838598 - protein, 320 aa, Homo sapiens
MGSAPLVSLVPEVAAAVGNGRASSGLPRNTVVLFVPQQEAWVVERMGRFHRILEPGLNILIPVLDRIRYVQSLKEIVINVPEQSAVTLDNVTLQIDGVLYLRIMDPYKASYGVEDPEYAVTQLAQTTMRSELGKLSLDKVFRERESLNASIVDAINQAADCWGIRCLRYEIKDIHVPPRVKESMQMQVEAERRKRATVLESEGTRESAINVAEGKKQAQILASEAEKAEQINQAAGEASAVLAKQVKLSIDLVSLTHYGMRVPDVPPMRRSNGRSISLPHWGPDVSAVFGPNQGGTIPGMSQLEANYRRRNLSPRLCPKC

SEQ ID NO: 838599 - protein, 183 aa, Homo sapiens
MLARAARGTGALLLRGSLLASGRAPRRASSGLPRNTVVLFVPQQEAWVVERMGRFHRILEPGLNILIPVLDRIRYVQSLKEIVINVPEQSAVTLDNVTLQIDGVLYLRIMDPYKASYGVEDPEYAVTQLAQTTMRSELGKLSLDKVFRVSRSEPELGFEDTNLTLLIFSEGQDQSQALLSVGP

SEQ ID NO: 838600 - protein, 189 aa, Homo sapiens
GRTLDVGVLINEFGYVTVIRYDFAKLESRTDPQGCRVEAERRKRATVLESEGTRESAINVAEGKKQAQILASEAEKAEQINQAAGEASAVLAKAKAKAEAIRILAAALTQHNGDAAASLTVAEQYVSAFSQTGQGLQHYPTALQPWRCHQHGGSGHGCIWSPHQSPSARDSRLTLQWEQQRCPGYRCKS

SEQ ID NO: 838601 - protein, 381 aa, Homo sapiens; identical to SEQ ID NO: 838587

SEQ ID NO: 838602 - protein, 346 aa, Homo sapiens; identical to SEQ ID NO: 838586

SEQ ID NO: 838603 - protein, 381 aa, Homo sapiens; identical to SEQ ID NO: 838587

SEQ ID NO: 838604 - protein, 344 aa, Homo sapiens
YIRGSGTARGKARGSLLASGRAPRRASSGLPRNTVVLFVPQQEAWVVERMGRFHRILEPGLNILIPVLDRIRYVQSLKEIVINVPEQSAVTLDNVTLQIDGVLYLRIMDPYKASYGVEDPEYAVTQLAQTTMRSELGKLSLDKVFRERESLNASIVDAINQAADCWGIRCLRYEIKDIHVPPRVKESMQMQVEAERRKRATVLESEGTRESAINVAEGKKQAQILASEAEKAEQINQAAGEASAVLAKAKAKAEAIRILAAALTQHNGDAAASLTVAEQYVSAFSQTGQGLQHYPTALQPWRCHQHGGSGHGCIWSPHQSPSARDSRLTLQWEQQRCPGYRCKS

SEQ ID NO: 838605 - protein, 325 aa, Homo sapiens; identical to SEQ ID NO: 838591

SEQ ID NO: 838606 - protein, 237 aa, Homo sapiens
MDPYKASYGVEDPEYAVTQLAQTTMRSELGKLSLDKVFRERESLNASIVDAINQAADCWGIRCLRYEIKDIHVPPRVKESMQMQVEAERRKRATVLESEGTRESAINVAEGKKQAQILASEAEKAEQINQAAGEASAVLAKAKAKAEAIRILAAALTQHNGDAAASLTVAEQYVSAFSQTGQGLQHYPTALQPWRCHQHGGSGHGCIWSPHQSPSARDSRLTLQWEQQRCPGYRCKS

SEQ ID NO: 838607 - protein, 300 aa, Homo sapiens
MLARAARGTGALLLRGLNILIPVLDRIRYVQSLKEIVINVPEQSAVTLDNVTLQIDGVLYLRIMDPYKASYGVEDPEYAVTQLAQTTMRSELGKLSLDKVFRERESLNASIVDAINQAADCWGIRCLRYEIKDIHVPPRVKESMQMQVEAERRKRATVLESEGTRESAINVAEGKKQAQILASEAEKAEQINQAAGEASAVLAKAKAKAEAIRILAAALTQHNGDAAASLTVAEQYVSAFSQTGQGLQHYPTALQPWRCHQHGGSGHGCIWSPHQSPSARDSRLTLQWEQQRCPGYRCKS

SEQ ID NO: 838608 - protein, 396 aa, Homo sapiens
MLARAARGTGALLLRGSLLASGRAPRRASSGLPRNTVVLFVPQQEAWVVERMGRFHRILEPGLNILIPVLDRIRYVQSLKEIVINVPEQSAVTLDNVTLQIDGVLYLRIMDPYKASYGVEDPEYAVTQLAQTTMRSELGKLSLDKVFRVSRSEPELGFEDTNLTLLIFSEGQDQSQALLSVRPLIGRLRLWGLHLFFQERESLNASIVDAINQAADCWGIRCLRYEIKDIHVPPRVKESMQMQVEAERRKRATVLESEGTRESAINVAEGKKQAQILASEAEKAEQINQAAGEASAVLAKAKAKAEAIRILAAALTQHNGDAAASLTVAEQYVSAFSQTGQGLQHYPTALQPWRCHQHGGSGHGCIWSPHQSPSARDSRLTLQWEQQRCPGYRCKS

SEQ ID NO: 838609 - protein, 175 aa, Homo sapiens
  misc_feature (20)..(20): Xaa can be any naturally occurring amino acid
RRNPRNGMDAAPGERGLSKXATVEAERRKRATVLESEGTRESAINVAEGKKQAQILASEAEKAEQINQAAGEASAVLAKAKAKAEAIRILAAALTQHNGDAAASLTVAEQYVSAFSQTGQGLQHYPTALQPWRCHQHGGSGHGCIWSPHQSPSARDSRLTLQWEQQRCPGYRCKS

SEQ ID NO: 838610 - protein, 143 aa, Homo sapiens
RRPRGRRGGGVSKEAEGKKQAQILASEAEKAEQINQAAGEASAVLAKAKAKAEAIRILAAALTQHNGDAAASLTVAEQYVSAFSQTGQGLQHYPTALQPWRCHQHGGSGHGCIWSPHQSPSARDSRLTLQWEQQRCPGYRCKS

SEQ ID NO: 838611 - protein, 190 aa, Homo sapiens
AQRKLRLVEPGVQSLRRWEMLARAARGTGALLLRGSLLASGRAPRRASSGLPRNTVVLFVPQQEAWVVERMGRFHRILEPGLNILIPVLDRIRYVQSLKEIVINVPEQSAVTLDNVTLQIDGVLYLRIMDPYKASYGVEDPEYAVTQLAQTTMRSELGKLSPDSLSSGSSRDVQGTDASLDEELDRVKMS

SEQ ID NO: 838612 - protein, 192 aa, Homo sapiens
AQRKLRLVEPGVQSLRRWEMLARAARGTGALLLRGSLLASGRAPRRASSGLPRNTVVLFVPQQEAWVVERMGRFHRILEPGLNILIPVLDRIRYVQSLKEIVINVPEQSAVTLDNVTLQIDGVLYLRIMDPYKASYGVEDPEYAVTQLAQTTMRSELGKLSKTNSLLGTKSPLFFPTPHGGQGHRRDHKIQN

SEQ ID NO: 838613 - protein, 387 aa, Homo sapiens
AQACYSLGNTYTLLQDYERAAEYHLRHLLIAQELADRVGEGRACWSLGNAYVSMGRPAQALTFAKKHLQISQEIGDRHGELTARMNVAQLQLVLGRLTSPAASEKPDLAGYEAQGARPKRTQRLSAETWDLLRLPLEREQNGDSHHSGDWRGPSRDSLPLPVRSRKYQEGPDAERRPREGSHSPLDSADVRVHVPRTSIPRAPSSDEECFFDLLTKFQSSRMDDQRCPLDDGQAGAAEATAAPTLEDRIAQPSMTASPQTEEFFDLIASSQSRRLDDQRASVGSLPGLRITHSNAGHLRGHGEPQEPGDDFFNMLIKYQSSRIDDQRCPPPDVLPRGPTMPDEDFFSLIQRVQAKRMDEQRVDLAGGPEQGAGGPPEPQQQCQPGAS

SEQ ID NO: 838614 - protein, 242 aa, Homo sapiens
DTSGGGVADRRQVRVPILARPQKCVWPGQAAPGLVWGSAGLALAAVTPLPPQSIPRAPSSDEECFFDLLTKFQSSRMDDQRCPLDDGQAGAAEATAAPTLEDRIAQPSMTASPQTEEFFDLIASSQSRRLDDQRASVGSLPGLRITHSNAGHLRGHGEPQEPGDDFFNMLIKYQSSRIDDQRCPPPDVLPRGPTMPDEDFFSLIQRVQAKRMDEQRVDLAGGPEQGAGGPPEPQQQCQPGAS

SEQ ID NO: 838615 - protein, 261 aa, Homo sapiens
CVGHGHRELMAGLTQGVVGTGTGGREASRDVWEVFQAKAGEAGPGQVTDRGLDWGSTHERGEVRGSRRVPRSIPRAPSSDEECFFDLLTKFQSSRMDDQRCPLDDGQAGAAEATAAPTLEDRIAQPSMTASPQTEEFFDLIASSQSRRLDDQRASVGSLPGLRITHSNAGHLRGHGEPQEPGDDFFNMLIKYQSSRIDDQRCPPPDVLPRGPTMPDEDFFSLIQRVQAKRMDEQRVDLAGGPEQGAGGPPEPQQQCQPGAS

SEQ ID NO: 838616 - protein, 387 aa, Homo sapiens; identical to SEQ ID NO: 838613

SEQ ID NO: 838617 - protein, 109 aa, Homo sapiens
  misc_feature (48)..(49): Xaa can be any naturally occurring amino acid
GNLGNTLKVLGRFDEAAVLLQRHLSIAQEQGDKVGEARALYNIGKRDXXKGKQLSWNAANATQDRRHLPPDVRETLCKASEFYERNLLLEGQGRTREQGQVPEHRVSRT

SEQ ID NO: 838618 - protein, 233 aa, Homo sapiens
AGWYWSGSMDGRWWPGHLVYCLRSVWPSTQRGSLLLWRQPVIRSIPRAPSSDEECFFDLLTKFQSSRMDDQRCPLDDGQAGAAEATAAPTLEDRIAQPSMTASPQTEEFFDLIASSQSRRLDDQRASVGSLPGLRITHSNAGHLRGHGEPQEPGDDFFNMLIKYQSSRIDDQRCPPPDVLPRGPTMPDEDFFSLIQRVQAKRMDEQRVDLAGGPEQGAGGPPEPQQQCQPGAS

SEQ ID NO: 838619 - protein, 215 aa, Homo sapiens
QSEAGPRTNFLGGQGEAREQCTLASGTTAADQPRTTGAGGVRPPTALCPPSPPGSMTSAAHHLTYCPGALPCRTRTSSASFRGCRLSAWTSSGWTSPGARSRGQAARPSPSSSASLVRAKALCPPPGPPCPHSWTPVSQSQPRPPEAIAEDRHWACSPTASPTQGDRLRPSCPWWEGVLPSRAGPHGPQLPPFCPCRRPDGAFGMSAPTWCCQTP

SEQ ID NO: 838620 - protein, 181 aa, Homo sapiens
YSRLGHYSVPRLPEGLVPVSSPSGLAPRRRYARLEPQREPPVSGVGSGAGGRAGKAARDAGLSLLGLHSPRYLSRALTPGMVRRQLRVGVRRRGLGWAGSRPEGSTEDSSSESVCVCGPVLLSNGLCWRFEKSCLSSLLPQLRPFCSSSVLSEANPQKHSEVSLLPVAPRLLRTDFFVCLF

SEQ ID NO: 838621 - protein, 1029 aa, Homo sapiens
MTRENVAHNALRQEGLVKGKDDTWKWGTSFQGSSSSVWETSHLHFRQLRYHETSGPQEALSRLRELCRRWLRPEARTKAQILELLVLEQFLSILPGEIRTWVQLHHPGSGEEAVALVEELQKDLDGPAIQVPVLVKDQDTLQKVVSAPGTTLPPVLPGSHIAAEICPHPPTDLVAFNLQDPQHDSPAPEASALSQEENPRNQLMALMLLTAQPQELVMFEEVSVCFTSEEWACLGPIQRALYWDVMLENYGNVTSLEWETMTENEEVTSKPSSSQRADSHKGTSKRLQGSVPQVLDFEEECEWQVLASQWGNETDERADTVKKVSLCERDKKKRTPPEKQGQKWKELGDSLTFGSAISESLIGTEGKKFYKCDMCCKHFNKISHLINHRRIHTGEKPHKCKECGKGFIQRSSLLMHLRNHSGEKPYKCNECGKAFSQSAYLLNHQRIHTGEKPYKCKECGKGFYRHSGLIIHLRRHSGERPYKCNECGKVFSQNAYLIDHQRLHKGEEPYKCNKCQKAFILKKSLILHQRIHSGEKPYKCDECGKTFAQTTYLIDHQRLHSAENPYKCKECGKVFIRSKSLLLHQRVHTEKKTFGCKKCGKIFSSKSNFIDHKRMHSREKPYKCTECGKAFTQSAYLFDHQRLHNGEKPYECNECGKVFILKKSLILHQRFHTGENLYECKDCGKVFGSNRNLIDHERLHNGEKPYECRECGKTFIMSKSFMVHQKLHTQEKAYKCEDCGKAFSYNSSLLVHRRIHTGEKPFECSECGRAFSSNRNLIEHKRIHSGEKPYECDECGKCFILKKSLIGHQRIHTREKSYKCNDCGKVFSYRSNLIAHQRIHTGEKPYACSECGKGFTYNRNLIEHQRIHSGEKTYECHVCRKVLTSSRNLMVHQRIHTGEKPYKCNECGKDFSQNKNLVVHQRMHTGEKPYECDKCRKSFTSKRNLVGHQRIHTGEKPYGCNDCSKVFRQRKNLTVHQKIHTDEKPCECDVSEKEFSQTSNLHLQQKIHTIEEFSWLQNTNESKIEIQKI

SEQ ID NO: 838622 - protein, 1073 aa, Homo sapiens
MTRENVAHNALRQEGLVKGKDDTWKWGTSFQGSSSSVWETSHLHFRQLRYHETSGPQEALSRLRELCRRWLRPEARTKAQILELLVLEQFLSILPGEIRTWVQLHHPGSGEEAVALVEELQKDLDGPAIQVWLLFPPLCTVSSGRGHQCHEWGSRAAPLFSMQSFTAVLMLHTEVPVLVKDQDTLQKVVSAPGTTLPPVLPGSHIAAEICPHPPTDLVAFNLQDPQHDSPAPEASALSQEENPRNQLMALMLLTAQPQELVMFEEVSVCFTSEEWACLGPIQRALYWDVMLENYGNVTSLEWETMTENEEVTSKPSSSQRADSHKGTSKRLQGSVPQVLDFEEECEWQVLASQWGNETDERADTVKKVSLCERDKKKRTPPEKQGQKWKELGDSLTFGSAISESLIGTEGKKFYKCDMCCKHFNKISHLINHRRIHTGEKPHKCKECGKGFIQRSSLLMHLRNHSGEKPYKCNECGKAFSQSAYLLNHQRIHTGEKPYKCKECGKGFYRHSGLIIHLRRHSGERPYKCNECGKVFSQNAYLIDHQRLHKGEEPYKCNKCQKAFILKKSLILHQRIHSGEKPYKCDECGKTFAQTTYLIDHQRLHSAENPYKCKECGKVFIRSKSLLLHQRVHTEKKTFGCKKCGKIFSSKSNFIDHKRMHSREKPYKCTECGKAFTQSAYLFDHQRLHNGEKPYECNECGKVFILKKSLILHQRFHTGENLYECKDCGKVFGSNRNLIDHERLHNGEKPYECRECGKTFIMSKSFMVHQKLHTQEKAYKCEDCGKAFSYNSSLLVHRRIHTGEKPFECSECGRAFSSNRNLIEHKRIHSGEKPYECDECGKCFILKKSLIGHQRIHTREKSYKCNDCGKVFSYRSNLIAHQRIHTGEKPYACSECGKGFTYNRNLIEHQRIHSGEKTYECHVCRKVLTSSRNLMVHQRIHTGEKPYKCNECGKDFSQNKNLVVHQRMHTGEKPYECDKCRKSFTSKRNLVGHQRIHTGEKPYGCNDCSKVFRQRKNLTVHQKIHTDEKPCECDVSEKEFSQTSNLHLQQKIHTIEEFSWLQNTNESKIEIQKI

SEQ ID NO: 838623 - protein, 1120 aa, Homo sapiens
ISINGLMLLTAQPQDLVMFEEVSVCFTSEEWACLGPILRALYWDVMLENYGNVTSLEWETMTENEEVTSKPSSSQRAFSHKGDIKKTSHLHFRQLRYHETSGPQEALSRLRELCRRWLRPEARTKAQILELLVLEQFLSILPGEIRTWVQLHHPGSGEEAVALVEELQKDLDGPAIQVWLLFPPLCTVSSGRGHQCHEWGSRAAPLFSMQSFTAVLMLHTEVPVLVKDQDTLQKVVSAPGTTLPPVLPGSHIAAEICPHPPTDLVAFNLQDPQHDSPAPEASALSQEENPRNQLMALMLLTAQPQELVMFEEVSVCFTSEEWACLGPIQRALYWDVMLENYGNVTSLEWETMTENEEVTSKPSSSQRADSHKGTSKRLQGSVPQVLDFEEECEWQVLASQWGNETDERADTVKKVSLCERDKKKRTPPEKQGQKWKELGDSLTFGSAISESLIGTEGKKFYKCDMCCKHFNKISHLINHRRIHTGEKPHKCKECGKGFIQRSSLLMHLRNHSGEKPYKCNECGKAFSQSAYLLNHQRIHTGEKPYKCKECGKGFYRHSGLIIHLRRHSGERPYKCNECGKVFSQNAYLIDHQRLHKGEEPYKCNKCQKAFILKKSLILHQRIHSGEKPYKCDECGKTFAQTTYLIDHQRLHSAENPYKCKECGKVFIRSKSLLLHQRVHTEKKTFGCKKCGKIFSSKSNFIDHKRMHSREKPYKCTECGKAFTQSAYLFDHQRLHNGEKPYECNECGKVFILKKSLILHQRFHTGENLYECKDCGKVFGSNRNLIDHERLHNGEKPYECRECGKTFIMSKSFMVHQKLHTQEKAYKCEDCGKAFSYNSSLLVHRRIHTGEKPFECSECGRAFSSNRNLIEHKRIHSGEKPYECDECGKCFILKKSLIGHQRIHTREKSYKCNDCGKVFSYRSNLIAHQRIHTGEKPYACSECGKGFTYNRNLIEHQRIHSGEKTYECHVCRKVLTSSRNLMVHQRIHTGEKPYKCNECGKDFSQNKNLVVHQRMHTGEKPYECDKCRKSFTSKRNLVGHQRIHTGEKPYGCNDCSKVFRQRKNLTVHQKIHTDEKPCECDVSEKEFSQTSNLHLQQKIHTIEEFSWLQNTNESKIEIQKI

SEQ ID NO: 838624 - protein, 835 aa, Homo sapiens
MTRENVAHNALRQEGLVKGKDDTWKWGTSFQGSSSSVWETSHLHFRQLRYHETSGPQEALSRLRELCRRWLRPEARTKAQILELLVLEQFLSILPGEIRTWVQLHHPGSGEEAVALVEELQKDLDGPAIQVPVLVKDQDTLQKVVSAPGTTLPPVLPGSHIAAEICPHPPTDLVAFNLQDPQHDSPAPEASALSQEENPRNQLMALMLLTAQPQELVMFEEVSVCFTSEEWACLGPIQRALYWDVMLENYGNVTSLEWETMTENEEVTSKPSSSQRADSHKGTSKRLQGSVPQVLDFEEECEWQVLASQWGNETDERADTVKKVSLCERDKKKRTPPEKQGQKWKELGDSLTFGSAISESLIGTEGKKFYKCDMCCKHFNKISHLINHRRIHTGEKPHKCKECGKGFIQRSSLLMHLRNHSGEKPYKCNECGKAFSQSAYLLNHQRIHTGEKPYKCKECGKGFYRHSGLIIHLRRHSGERPYKCNECGKVFSQNAYLIDHQRLHKGEEPYKCNKCQKAFILKKSLILHQRIHSGEKPYKCDECGKTFAQTTYLIDHQRLHSAENPYKCKECGKVFIRSKSLLLHQRVHTEKKTFGCKKCGKIFSSKSNFIDHKRMHSREKPYKCTECGKAFTQSAYLFDHQRLHNGEKPYECNECGKVFILKKSLILHQRFHTGENLYECKDCGKVFGSNRNLIDHERLHNGEKPYECRECGKTFIMSKSFMVHQKLHTQEKAYKCEDCGKAFSYNSSLLVHRRIHTGEKPFECSECGRAFSSNRNLIEHKRIHSGEKPYECDECGKCFILKKSLIGHQRIHTGNLYACLELSTVTNAKTTVEHA

SEQ ID NO: 838625 - protein, 267 aa, Homo sapiens
MTRENVAHNALRQEGLVKGKDDTWKWGTSFQGSSSSVWETSHLHFRQLRYHETSGPQEALSRLRELCRRWLRPEARTKAQILELLVLEQFLSILPGEIRTWVQLHHPGSGEEAVALVEELQKDLDGPAIQVPVLVKDQDTLQKVVSAPGTTLPPVLPGSHIAAEICPHPPTDLVAFNLQDPQHDSPAPEASALSQEENPRNQLMALMLLTAQPQELVMFEEVSVCFTSEEWACLGPIQRALYWDVMLENYGNVTSLGYRKYRRQRNK

SEQ ID NO: 838626 - protein, 267 aa, Homo sapiens; identical to SEQ ID NO: 838625

SEQ ID NO: 838627 - protein, 284 aa, Homo sapiens
IVHKILLEEEFPTYMTYVGLFSTVSISSNRNLIEHKRIHSGEKPYECDECGKCFILKKSLIGHQRIHTREKSYKCNDCGKVFSYRSNLIAHQRIHTGEKPYACSECGKGFTYNRNLIEHQRIHSGEKTYECHVCRKVLTSSRNLMVHQRIHTGEKPYKCNECGKDFSQNKNLVVHQRMHTGEKPYECDKCRKSFTSKRNLVGHQRIHTGEKPYGCNDCSKVFRQRKNLTVHQKIHTDEKPCECDVSEKEFSQTSNLHLQQKIHTIEEFSWLQNTNESKIEIQKI

SEQ ID NO: 838628 - protein, 1029 aa, Homo sapiens; identical to SEQ ID NO: 838621

SEQ ID NO: 838629 - protein, 812 aa, Homo sapiens
MFEEVSVCFTSEEWACLGPIQRALYWDVMLENYGNVTSLEWETMTENEEVTSKPSSSQRADSHKGTSKRLQGSVPQVLDFEEECEWQVLASQWGNETDERADTVKKVSLCERDKKKRTPPEKQGQKWKELGDSLTFGSAISESLIGTEGKKFYKCDMCCKHFNKISHLINHRRIHTGEKPHKCKECGKGFIQRSSLLMHLRNHSGEKPYKCNECGKAFSQSAYLLNHQRIHTGEKPYKCKECGKGFYRHSGLIIHLRRHSGERPYKCNECGKVFSQNAYLIDHQRLHKGEEPYKCNKCQKAFILKKSLILHQRIHSGEKPYKCDECGKTFAQTTYLIDHQRLHSAENPYKCKECGKVFIRSKSLLLHQRVHTEKKTFGCKKCGKIFSSKSNFIDHKRMHSREKPYKCTECGKAFTQSAYLFDHQRLHNGEKPYECNECGKVFILKKSLILHQRFHTGENLYECKDCGKVFGSNRNLIDHERLHNGEKPYECRECGKTFIMSKSFMVHQKLHTQEKAYKCEDCGKAFSYNSSLLVHRRIHTGEKPFECSECGRAFSSNRNLIEHKRIHSGEKPYECDECGKCFILKKSLIGHQRIHTREKSYKCNDCGKVFSYRSNLIAHQRIHTGEKPYACSECGKGFTYNRNLIEHQRIHSGEKTYECHVCRKVLTSSRNLMVHQRIHTGEKPYKCNECGKDFSQNKNLVVHQRMHTGEKPYECDKCRKSFTSKRNLVGHQRIHTGEKPYGCNDCSKVFRQRKNLTVHQKIHTDEKPCECDVSEKEFSQTSNLHLQQKIHTIEEFSWLQNTNESKIEIQKI

SEQ ID NO: 838630 - protein, 790 aa, Homo sapiens
MTRENVAHNALRQEGLVKGKDDTWKWGTSFQGSSSSVWETSHLHFRQLRYHETSGPQEALSRLRELCRRWLRPEARTKAQILELLVLEQFLSILPGEIRTWVQLHHPGSGEEAVALVEELQKDLDGPAIQVPVLVKDQDTLQKVVSAPGTTLPPVLPGSHIAAEICPHPPTDLVAFNLQDPQHDSPAPEASALSQEENPRNQLMALMLLTAQPQELVMFEEVSVCFTSEEWACLGPIQRALYWDVMLENYGNVTSLEWETMTENEEVTSKPSSSQRADSHKGTSKRLQGSVPQVLDFEEECEWQVLASQWGNETDERADTVKKVSLCERDKKKRTPPEKQGQKWKELGDSLTFGSAISESLIGTEGKKFYKCDMCCKHFNKISHLINHRRIHTGEKPHKCKECGKGFIQRSSLLMHLRNHSGEKPYKCNECGKAFSQSAYLLNHQRIHTGEKPYKCKECGKGFYRHSGLIIHLRRHSGERPYKCNECGKVFSQNAYLIDHQRLHKGEEPYKCNKCQKAFILKKSLILHQRIHSGEKPYKCDECGKTFAQTTYLIDHQRLHSAENPYKCKECGKVFIRSKSLLLHQRVHTEKKTFGCKKCGKIFSSKSNFIDHKRMHSREKPYKCTECGKAFTQSAYLFDHQRLHNGEKPYECNECGKVFILKKSLILHQRFHTGENLYECKDCGKVFGSNRNLIDHERLHNGEKPYECRECGKTFIMSKSFMVHQKLHTQEKAYKCEDCGKAFSYNSSLLVHRRIHTGEKPFECSECGRAWTLFTEDTSRPIPERPYDHR

SEQ ID NO: 838631 - protein, 150 aa, Homo sapiens
VPVLVKDQDTLQKVVSAPGTTLPPVLPGSHIAAEICPHPPTDLVAFNLQDPQHGIYSVLWVLGCSRTLPVAHPPTSRELLPLLPCLGVSYSANFFLLFCCSLLLSWAPLSLYTSPLFFFETESRSVAQAGVQWRDLSSLQPPPPGFTPFS

SEQ ID NO: 838632 - protein, 669 aa, Homo sapiens
MEKKKIVLEQEVKTLNDSLKKVENKVSAIVDEKENVIKEVEGKRALLEIKEREHNQLVKLLELARENEATSLTERGILDLNLRNSLIDKQNYHDELSRKQREKERDFRNLRKMELLLKVSWDALRQTQALHQRLLLEKIISEMESKLVEQQLAEENKLLKEQENMKELVVNLLRMTQIKIDEKEQKSKDFLKAQQKYTNIVKEMKAKDLEIRIHKKKKCEIYRRLREFAKLYDTIRNERNKFVNLLHKAHQKVNEIKERHKMSLNELEILRNSAVSQERKLQNSMLKHANNVTIRESMQNDVRKIVSKLQEMKEKKEAQLNNIDRLANTITMIEEEMVQLRKRYEKAVQHRNESGVQLIEREEEICIFYEKINIQEKMKLNGEIEIHLLEEKIQFLKMKIAEKQRQICVTQKLLPAKRSLDADLAVLQIQFSQCTDRIKDLEKQFVKPDGENRARFLPGKDLTEKEMIQKLDKLELQLAKKEEKLLEKDFIYEQVSRLTDRLCSKTQGCKQDTLLLAKKMNGYQRRIKNATEKMMALVAELSMKQALTIELQKEVREKEDFIFTCNSRIEKGLPLNKEIEKEWLKVLRDEEMHALAIAEKSQEFLEADNRQLPNGVYTTAEQRPNAYIPEADATLPLPKPYGALAPFKPSEPGANMRHIRKPVIKPVEI

SEQ ID NO: 838633 - protein, 701 aa, Homo sapiens [sequence omitted]

SEQ ID NO: 838634 - protein, 510 aa, Homo sapiens
MEKKKIVLEQEVKTLNDSLKKVENKVSAIVDEKENVIKEVEGKRALLEIKEREHNQLVKLLELARENEATSLTERGILDLNLRNSLIDKQNYHDELSRKQREKERDFRNLRKMELLLKVSWDALRQTQALHQRLLLEMEAIPKDDSTLSERRRELHKEVEVAKRNLAQQKIISEMESKLVEQQLAEENKLLKEQENMKELVVNLLRMTQIKIDEKEQKSKDFLKAQQKYTNIVKEMKAKDLEIRIHKKKKCEIYRRLREFAKLYDTIRNERNKFVNLLHKAHQKVNEIKERHKMSLNELEILRNSAVSQERKLQNSMLKHANNVTIRESMQNDVRKIVSKLQEMKEKKEAQLNNIDRLANTITMIEEEMVQLRKRYEKAVQHRNESGVQLIEREEEICIFYEKINIQEKMKLNGEIEIHLLEEKIQFLKMKIAEKQRQICVTQKLLPAKRSLDADLAVLQIQFSQCTDRIKDLEKQFVKPDGENRARFLPGKDLTEKEMIQKLDKVNIIA

SEQ ID NO: 838635 - protein, 742 aa, Homo sapiens
  misc_feature (11)..(11): Xaa can be any naturally occurring amino acid
GNSKEIVGDIXFVLKDEVAHHQTIPVQIGKEIEKITRKKVEMEKKKIVLEQEVKTLNDSLKKVENKVSAIVDEKENVIKEVEGKRALLEIKEREHNQLVKLLELARENEATSLTERGILDLNLRNSLIDKQNYHDELSRKQREKERDFRNLRKMELLLKVSWDALRQTQALHQRLLLEMEAIPKDDSTLSERRRELHKEVEVAKRNLAQQKIISEMESKLVEQQLAEENKLLKEQENMKELVVNLLRMTQIKIDEKEQKSKDFLKAQQKYTNIVKEMKAKDLEIRIHKKKKCEIYRRLREFAKLYDTIRNERNKFVNLLHKAHQKVNEIKERHKMSLNELEILRNSAVSQERKLQNSMLKHANNVTIRESMQNDVRKIVSKLQEMKEKKEAQLNNIDRLANTITMIEEEMVQLRKRYEKAVQHRNESGVQLIEREEEICIFYEKINIQEKMKLNGEIEIHLLEEKIQFLKMKIAEKQRQICVTQKLLPAKRSLDADLAVLQIQFSQCTDRIKDLEKQFVKPDGENRARFLPGKDLTEKEMIQKLDKLELQLAKKEEKLLEKDFIYEQVSRLTDRLCSKTQGCKQDTLLLAKKMNGYQRRIKNATEKMMALVAELSMKQALTIELQKEVREKEDFIFTCNSRIEKGLPLNKEIEKEWLKVLRDEEMHALAIAEKSQEFLEADNRQLPNGVYTTAEQRPNAYIPEADATLPLPKPYGALAPFKPSEPGANMRHIRKPVIKPVEI

SEQ ID NO: 838636 - protein, 292 aa, Homo sapiens
MKLNGEIEIHLLEEKIQFLKMKIAEKQRQICVTQKLLPAKRSLDADLAVLQIQFSQCTDRIKDLEKQFVKPDGENRARFLPGKDLTEKEMIQKLDKLELQLAKKEEKLLEKDFIYEQVSRLTDRLCSKTQGCKQDTLLLAKKMNGYQRRIKNATEKMMALVAELSMKQALTIELQKEVREKEDFIFTCNSRIEKGLPLNKEIEKEWLKVLRDEEMHALAIAEKSQEFLEADNRQLPNGVYTTAEQRPNAYIPEADATLPLPKPYGALAPFKPSEPGANMRHIRKPVIKPVEI

SEQ ID NO: 838637 - protein, 197 aa, Homo sapiens
MLELQLAKKEEKLLEKDFIYEQVSRLTDRLCSKTQGCKQDTLLLAKKMNGYQRRIKNATEKMMALVAELSMKQALTIELQKEVREKEDFIFTCNSRIEKGLPLNKEIEKEWLKVLRDEEMHALAIAEKSQEFLEADNRQLPNGVYTTAEQRPNAYIPEADATLPLPKPYGALAPFKPSEPGANMRHIRKPVIKPVEI

SEQ ID NO: 838638 - protein, 472 aa, Homo sapiens
PSMGKLHSKPAAVCKRRESPEGDSFAVSAAWARKGIEEWIGRQRCPGGVSGPRQLRLAGTIGRSTRELVGDVLRDTLSEEEEDDFRLEVALPPEKTDGLGSGDEKKMERVSEPCPGSKKQLKFEELQCDVSMEEDSRQEWTFTLYDFDNNGKVTREDITSLLHTIYEVVDSSVNHSPTSSKMLRVKLTVAPDGSQSKRSVLVNQADLQSARPRAETKPTEDLRSWEKKQRAPLRFQGDSRLEQSGCYHHCVDENIERRNHYLDLAGIENYTSQFGPGSPSVAQKSELPPRTSNPTRSRSHEPEAIHIPHRKPQGVDPASFHFLDTPIAKVSELQQRLRGTQDGSKHFVRSPKAQGKSVGVGHVARGARNKPPLGPAIPAVSPSAHLAASPALLPSLAPLGHKKHKHRAKESQQGCRGLQAPLASGGPVLGREHLRELPALVVYESQAGQPVQRHEHHHHHEHHHHYHHFYQT

SEQ ID NO: 838639 - protein, 472 aa, Homo sapiens; identical to SEQ ID NO: 838638

SEQ ID NO: 838640 - protein, 434 aa, Homo sapiens
SFVFEDPQTTRHPCRHPSPGQTSPARALAALLGQFCLGQSAPCPLKVWGGQRTGGRPLAWPLGPGFHYPVSVATDRGPAPPISCIQELQCDVSMEEDSRQEWTFTLYDFDNNGKVTREDITSLLHTIYEVVDSSVNHSPTSSKMLRVKLTVAPDGSQSKRSVLVNQADLQSARPRAETKPTEDLRSWEKKQRAPLRFQGDSRLEQSGCYHHCVDENIERRNHYLDLAGIENYTSQFGPGSPSVAQKSELPPRTSNPTRSRSHEPEAIHIPHRKPQGVDPASFHFLDTPIAKVSELQQRLRGTQDGSKHFVRSPKAQGKSVGVGHVARGARNKPPLGPAIPAVSPSAHLAASPALLPSLAPLGHKKHKHRAKESQQGCRGLQAPLASGGPVLGREHLRELPALVVYESQAGQPVQRHEHHHHHEHHHHYHHFYQT

SEQ ID NO: 838641 - protein, 472 aa, Homo sapiens; identical to SEQ ID NO: 838638

SEQ ID NO: 838642 - protein, 148 aa, Homo sapiens
MSSDFPHYNFRMPNIGFQNLPLNIYIVVFGTAIFVFILSLLFCCYLIRLRHQAHKEFYAYKQVILKEKVKELNLHELCAVCLEDFKPRDELGICPCKHAFHRKCLIKWLEVRKVCPLCNMPVLQLAQLHSKQDRGPPQGPLPGAENIV

SEQ ID NO: 838643 - protein, 169 aa, Homo sapiens
MLNKSGESRYPALFPVLGGSSMSSDFPHYNFRMPNIGFQNLPLNIYIVVFGTAIFVFILSLLFCCYLIRLRHQAHKEFYAYKQVILKEKVKELNLHELCAVCLEDFKPRDELGICPCKHAFHRKCLIKWLEVRKVCPLCNMPVLQLAQLHSKQDRGPPQGPLPGAENIV

SEQ ID NO: 838644 - protein, 148 aa, Homo sapiens; identical to SEQ ID NO: 838642

SEQ ID NO: 838645 - protein, 166 aa, Homo sapiens
SLRPPVWWNSLEIAEDSSMSSDFPHYNFRMPNIGFQNLPLNIYIVVFGTAIFVFILSLLFCCYLIRLRHQAHKEFYAYKQVILKEKVKELNLHELCAVCLEDFKPRDELGICPCKHAFHRKCLIKWLEVRKVCPLCNMPVLQLAQLHSKQDRGPPQGPLPGAENIV

SEQ ID NO: 838646 - protein, 175 aa, Homo sapiens
GRRPRAGVWGTEPLRVRDAEETAGPRQPPTHTHSPGASAGRARCAGVRRCLQAEEGRGGGSGAAPGLEGESLTKGGAGLSPGDHGGKVRGPPHVLLAQALASGPRAWEAAGMSWEARRRMARTLPPRWRWARALGGAAWQCFPGPRPLLPFLCGACLVPRCHSVHGSGRGGDLFP

SEQ ID NO: 838647 - protein, 197 aa, Homo sapiens
MNGKNINTLSTIFVSDEVIVPLYVHNDNAVLVLSLYLFFFHSFLPPHSSMSSDFPHYNFRMPNIGFQNLPLNIYIVVFGTAIFVFILSLLFCCYLIRLRHQAHKEFYAYKQVILKEKVKELNLHELCAVCLEDFKPRDELGICPCKHAFHRKCLIKWLEVRKVCPLCNMPVLQLAQLHSKQDRGPPQGPLPGAENIV

SEQ ID NO: 838648 - protein, 116 aa, Homo sapiens
PCGRQCGGIPWISRRELRHQAHKEFYAYKQVILKEKVKELNLHELCAVCLEDFKPRDELGICPCKHAFHRKCLIKWLEVRKVCPLCNMPVLQLAQLHSKQDRGPPQGPLPGAENIV

SEQ ID NO: 838649 - protein, 220 aa, Homo sapiens
MIAELVSSALGLALYLNTLSADFCYDDSRAIKTNQDLLPETPWTHIFYNDFWGTLLTHSGSHKSYRPLCTLSFRLNHAIGGLNPWSYHLVNVLLHAAVTGLFTSFSKILLGDGYWTFMAGLMFASHPIHTEAVAGIVGRADVGASLFFLLSLLCYIKHCSTRGYSARTWGWFLGSGLCAGCSMLWKEQGVTVLAVSAVYDVFVFHRLKIKQILPTIYKVS

SEQ ID NO: 838650 - protein, 223 aa, Homo sapiens
DSRAIIIAEIRTQVLRYKASPSSADFCYDDSRAIKTNQDLLPETPWTHIFYNDFWGTLLTHSGSHKSYRPLCTLSFRLNHAIGGLNPWSYHLVNVLLHAAVTGLFTSFSKILLGDGYWTFMAGLMFASHPIHTEAVAGIVGRADVGASLFFLLSLLCYIKHCSTRGYSARTWGWFLGSGLCAGCSMLWKEQGVTVLAVSAVYDVFVFHRLKIKQILPTIYKVS

SEQ ID NO: 838651 - protein, 595 aa, Homo sapiens
MAGAIASRMSFSSLKRKQPKTFTVRIVTMDAEMEFNCEMKWKGKDLFDLVCRTLGLRETWFFGLQYTIKDTVAWLKMDKKVLDHDVSKEEPVTFHFLAKFYPENAEEELVQEITQHLFFLQVKKQILDEKIYCPPEASVLLASYAVQAKYGDYDPSVHKRGFLAQEELLPKRVINLYQMTPEMWEERITAWYAEHRGRARDEAEMEYLKIAQDLEMYGVNYFAIRNKKGTELLLGVDALGLHIYDPENRLTPKISFPWNEIRNISYSDKEFTIKPLDKKIDVFKFNSSKLRVNKLILQLCIGNHDLFMRRRKADSLEVQQMKAQAREEKARKQMERQRLAREKQMREEAERTRDELERRLLQMKEEATMANEALMRSEETADLLAEKAQITEEEAKLLAQKAAEAEQEMQRIKATAIRTEEEKRLMEQKVLEAEVLALKMAEESERRAKEADQLKQDLQEAREAERRAKQKLLEIATKPTYPPMNPIPAPLPPDIPSFNLIGDSLSFDFKDTDMKRLSMEIEKEKVEYMEKSKHLQEQLNELKTEIEALKLKERETALDILHNENSDRGGSSKHNTIKKLTLQSAKSRVAFFEEL

SEQ ID NO: 838652 - protein, 590 aa, Homo sapiens
MAGAIASRMSFSSLKRKQPKTFTVRIVTMDAEMEFNCEMKWKGKDLFDLVCRTLGLRETWFFGLQYTIKDTVAWLKMDKKVLDHDVSKEEPVTFHFLAKFYPENAEEELVQEITQHLFFLQVKKQILDEKIYCPPEASVLLASYAVQAKYGDYDPSVHKRGFLAQEELLPKRVINLYQMTPEMWEERITAWYAEHRGRARDEAEMEYLKIAQDLEMYGVNYFAIRNKKGTELLLGVDALGLHIYDPENRLTPKISFPWNEIRNISYSDKEFTIKPLDKKIDVFKFNSSKLRVNKLILQLCIGNHDLFMRRRKADSLEVQQMKAQAREEKARKQMERQRLAREKQMREEAERTRDELERRLLQMKEEATMANEALMRSEETADLLAEKAQITEEEAKLLAQKAAEAEQEMQRIKATAIRTEEEKRLMEQKVLEAEVLALKMAEESERRAKEADQLKQDLQEAREAERRAKQKLLEIATKPTYPPMNPIPAPLPPDIPSFNLIGDSLSFDFKDTDMKRLSMEIEKEKVEYMEKSKHLQEQLNELKTEIEALKLKERETALDILHNENSDRGGSSKHNTIKKPQAQGRRPICI

SEQ ID NO: 838653 - protein, 595 aa, Homo sapiens; identical to SEQ ID NO: 838651

SEQ ID NO: 838654 - protein, 595 aa, Homo sapiens; identical to SEQ ID NO: 838651

SEQ ID NO: 838655 - protein, 598 aa, Homo sapiens
MAGAIASRMSFSSLKRKQPKTFTVRIVTMDAEMEFNCEMKWKGKDLFDLVCRTLGLRETWFFGLQYTIKDTVAWLKMDKKVGLELMKLVLDHDVSKEEPVTFHFLAKFYPENAEEELVQEITQHLFFLQVKKQILDEKIYCPPEASVLLASYAVQAKYGDYDPSVHKRGFLAQEELLPKRVINLYQMTPEMWEERITAWYAEHRGRARDEAEMEYLKIAQDLEMYGVNYFAIRNKKGTELLLGVDALGLHIYDPENRLTPKISFPWNEIRNISYSDKEFTIKPLDKKIDVFKFNSSKLRVNKLILQLCIGNHDLFMRRRKADSLEVQQMKAQAREEKARKQMERQRLAREKQMREEAERTRDELERRLLQMKEEATMANEALMRSEETADLLAEKAQITEEEAKLLAQKAAEAEQEMQRIKATAIRTEEEKRLMEQKVLEAEVLALKMAEESERRAKEADQLKQDLQEAREAERRAKQKLLEIATKPTYPPMNPIPAPLPPDIPSFNLIGDSLSFDFKDTDMKRLSMEIEKEKVEYMEKSKHLQEQLNELKTEIEALKLKERETALDILHNENSDRGGSSKHNTIKKPQAQGRRPICI

SEQ ID NO: 838656 - protein, 548 aa, Homo sapiens
MAGAIASRMSFSSLKRKQPKTFTVRIVTMDAEMEFNCEVLDHDVSKEEPVTFHFLAKFYPENAEEELVQEITQHLFFLQVKKQILDEKIYCPPEASVLLASYAVQAKYGDYDPSVHKRGFLAQEELLPKRVINLYQMTPEMWEERITAWYAEHRGRARDEAEMEYLKIAQDLEMYGVNYFAIRNKKGTELLLGVDALGLHIYDPENRLTPKISFPWNEIRNISYSDKEFTIKPLDKKIDVFKFNSSKLRVNKLILQLCIGNHDLFMRRRKADSLEVQQMKAQAREEKARKQMERQRLAREKQMREEAERTRDELERRLLQMKEEATMANEALMRSEETADLLAEKAQITEEEAKLLAQKAAEAEQEMQRIKATAIRTEEEKRLMEQKVLEAEVLALKMAEESERRAKEADQLKQDLQEAREAERRAKQKLLEIATKPTYPPMNPIPAPLPPDIPSFNLIGDSLSFDFKDTDMKRLSMEIEKEKVEYMEKSKHLQEQLNELKTEIEALKLKERETALDILHNENSDRGGSSKHNTIKKPQAQGRRPICI

SEQ ID NO: 838657 - protein, 507 aa, Homo sapiens
MAGAIASRMSFSSLKRKQPKTFTVRIVTMDAEMEFNCEVKKQILDEKIYCPPEASVLLASYAVQAKYGDYDPSVHKRGFLAQEELLPKRVINLYQMTPEMWEERITAWYAEHRGRARDEAEMEYLKIAQDLEMYGVNYFAIRNKKGTELLLGVDALGLHIYDPENRLTPKISFPWNEIRNISYSDKEFTIKPLDKKIDVFKFNSSKLRVNKLILQLCIGNHDLFMRRRKADSLEVQQMKAQAREEKARKQMERQRLAREKQMREEAERTRDELERRLLQMKEEATMANEALMRSEETADLLAEKAQITEEEAKLLAQKAAEAEQEMQRIKATAIRTEEEKRLMEQKVLEAEVLALKMAEESERRAKEADQLKQDLQEAREAERRAKQKLLEIATKPTYPPMNPIPAPLPPDIPSFNLIGDSLSFDFKDTDMKRLSMEIEKEKVEYMEKSKHLQEQLNELKTEIEALKLKERETALDILHNENSDRGGSSKHNTIKKPQAQGRRPICI

SEQ ID NO: 838658 - protein, 624 aa, Homo sapiens
RSEDGDSHARAYAPDAARPRDPSRPLRGARSLGRCRLGVPSRGVPGISGPNPGVPGRACTEGPGSCALPAAVRDLFDLVCRTLGLRETWFFGLQYTIKDTVAWLKMDKKVLDHDVSKEEPVTFHFLAKFYPENAEEELVQEITQHLFFLQVKKQILDEKIYCPPEASVLLASYAVQAKYGDYDPSVHKRGFLAQEELLPKRVINLYQMTPEMWEERITAWYAEHRGRARDEAEMEYLKIAQDLEMYGVNYFAIRNKKGTELLLGVDALGLHIYDPENRLTPKISFPWNEIRNISYSDKEFTIKPLDKKIDVFKFNSSKLRVNKLILQLCIGNHDLFMRRRKADSLEVQQMKAQAREEKARKQMERQRLAREKQMREEAERTRDELERRLLQMKEEATMANEALMRSEETADLLAEKAQITEEEAKLLAQKAAEAEQEMQRIKATAIRTEEEKRLMEQKVLEAEVLALKMAEESERRAKEADQLKQDLQEAREAERRAKQKLLEIATKPTYPPMNPIPAPLPPDIPSFNLIGDSLSFDFKDTDMKRLSMEIEKEKVEYMEKSKHLQEQLNELKTEIEALKLKERETALDILHNENSDRGGSSKHNTIKKLTLQSAKSRVAFFEEL

SEQ ID NO: 838659 - protein, 286 aa, Homo sapiens
MAGAIASRMSFSSLKRKQPKTFTVRIVTMDAEMEFNCEMKWKGKDLFDLVCRTLGLRETWFFGLQYTIKDTVAWLKMDKKVLDHDVSKEEPVTFHFLAKFYPENAEEELVQEITQHLFFLQVKKQILDEKIYCPPEASVLLASYAVQAKYGDYDPSVHKRGFLAQEELLPKRVINLYQMTPEMWEERITAWYAEHRGRARDEAEMEYLKIAQDLEMYGVNYFAIRNKKGTELLLGVDALGLHIYDPENRLTPKISFPWNEIRNISYSDKELTLQSAKSRVAFFEEL

SEQ ID NO: 838660 - protein, 165 aa, Homo sapiens
MAGAIASRMSFSSLKRKQPKTFTVRIVTMDAEMEFNCEMKWKGKDLFDLVCRTLGLRETWFFGLQYTIKDTVAWLKMDKKVLDHDVSKEEPVTFHFLAKFYPENAEEELVQEITQHLFFLQVKKQILDEKIYCPPEASVLLASYAVQAKLTLQSAKSRVAFFEEL

SEQ ID NO: 838661 - protein, 595 aa, Homo sapiens; identical to SEQ ID NO: 838651

SEQ ID NO: 838662 - protein, 595 aa, Homo sapiens; identical to SEQ ID NO: 838651

SEQ ID NO: 838663 - protein, 590 aa, Homo sapiens; identical to SEQ ID NO: 838652

SEQ ID NO: 838664 - protein, 339 aa, Homo sapiens
MAGAIASRMSFSSLKRKQPKTFTVRIVTMDAEMEFNCEMKWKGKDLFDLVCRTLGLRETWFFGLQYTIKDTVAWLKMDKKVLDHDVSKEEPVTFHFLAKFYPENAEEELVQEITQHLFFLQVKKQILDEKIYCPPEASVLLASYAVQAKYGDYDPSVHKRGFLAQEELLPKRVINLYQMTPEMWEERITAWYAEHRGRARDEAEMEYLKIAQDLEMYGVNYFAIRNKKGTELLLGVDALGLHIYDPENRLTPKISFPWNEIRNISYSDKEFTIKPLDKKIDVFKFNSSKLRVNKLILQLCIGNHDLFMRRRKADSLEVQQMKAQAREEKARKQVSTTLF

SEQ ID NO: 838665 - protein, 590 aa, Homo sapiens; identical to SEQ ID NO: 838652

SEQ ID NO: 838666 - protein, 507 aa, Homo sapiens; identical to SEQ ID NO: 838657

SEQ ID NO: 838667 - protein, 552 aa, Homo sapiens
MKWKGKDLFDLVCRTLGLRETWFFGLQYTIKDTVAWLKMDKKVLDHDVSKEEPVTFHFLAKFYPENAEEELVQEITQHLFFLQVKKQILDEKIYCPPEASVLLASYAVQAKYGDYDPSVHKRGFLAQEELLPKRVINLYQMTPEMWEERITAWYAEHRGRARDEAEMEYLKIAQDLEMYGVNYFAIRNKKGTELLLGVDALGLHIYDPENRLTPKISFPWNEIRNISYSDKEFTIKPLDKKIDVFKFNSSKLRVNKLILQLCIGNHDLFMRRRKADSLEVQQMKAQAREEKARKQMERQRLAREKQMREEAERTRDELERRLLQMKEEATMANEALMRSEETADLLAEKAQITEEEAKLLAQKAAEAEQEMQRIKATAIRTEEEKRLMEQKVLEAEVLALKMAEESERRAKEADQLKQDLQEAREAERRAKQKLLEIATKPTYPPMNPIPAPLPPDIPSFNLIGDSLSFDFKDTDMKRLSMEIEKEKVEYMEKSKHLQEQLNELKTEIEALKLKERETALDILHNENSDRGGSSKHNTIKKPQAQGRRPICI

SEQ ID NO: 838668 - protein, 549 aa, Homo sapiens
MAGAIASRMSFSSLKRKQPKTFTVRIVTMDAEMEFNCEMKWKGKDLFDLVCRTLGLRETWFFGLQYTIKDTVAWLKMDKKVKKQILDEKIYCPPEASVLLASYAVQAKYGDYDPSVHKRGFLAQEELLPKRVINLYQMTPEMWEERITAWYAEHRGRARDEAEMEYLKIAQDLEMYGVNYFAIRNKKGTELLLGVDALGLHIYDPENRLTPKISFPWNEIRNISYSDKEFTIKPLDKKIDVFKFNSSKLRVNKLILQLCIGNHDLFMRRRKADSLEVQQMKAQAREEKARKQMERQRLAREKQMREEAERTRDELERRLLQMKEEATMANEALMRSEETADLLAEKAQITEEEAKLLAQKAAEAEQEMQRIKATAIRTEEEKRLMEQKVLEAEVLALKMAEESERRAKEADQLKQDLQEAREAERRAKQKLLEIATKPTYPPMNPIPAPLPPDIPSFNLIGDSLSFDFKDTDMKRLSMEIEKEKVEYMEKSKHLQEQLNELKTEIEALKLKERETALDILHNENSDRGGSSKHNTIKKPQAQGRRPICI

SEQ ID NO: 838669 - protein, 566 aa, Homo sapiens
MAGAIASRMSFSSLKRKQPKTFTVRIVTMDAEMEFNCEMKWKGKDLFDLVCRTLGLRETWFFGLQYTIKDTVAWLKMDKKVLDHDVSKEEPVTFHFLAKFYPENAEEELVQEITQHLFFLQVKKQILDEKIYCPPEASVLLASYAVQAKYGDYDPSVHKRGFLAQEELLPKRVINLYQMTPEMWEERITAWYAEHRGRARDEAEMEYLKIAQDLEMYGVNYFAIRNKKGTELLLGVDALGLHIYDPENRLTPKISFPWNEIRNISYSDKEFTIKPLDKKIDVFKFNSSKLRVNKLILQLCIGNHDLFMRRRKADSLEVQQMKAQAREEKARKQMKEEATMANEALMRSEETADLLAEKAQITEEEAKLLAQKAAEAEQEMQRIKATAIRTEEEKRLMEQKVLEAEVLALKMAEESERRAKEADQLKQDLQEAREAERRAKQKLLEIATKPTYPPMNPIPAPLPPDIPSFNLIGDSLSFDFKDTDMKRLSMEIEKEKVEYMEKSKHLQEQLNELKTEIEALKLKERETALDILHNENSDRGGSSKHNTIKKLTLQSAKSRVAFFEEL

SEQ ID NO: 838670 - protein, 220 aa, Homo sapiens
MAGAIASRMSFSSLKRKQPKTFTVRIVTMDAEMEFNCEVKKQILDEKIYCPPEASVLLASYAVQAKNKKGTELLLGVDALGLHIYDPENRLTPKISFPWNEIRNISYSDKEFTIKPLDKKIDVFKFNSSKLRVNKLILQLCIGNHDLFMRRRKADSLEVQQMKAQAREEKARKQGQRGRSAEAGPAGSTRGGAKSQAEAPGDCHQAHVPAHEPNSSTVAS

SEQ ID NO: 838671 - protein, 595 aa, Homo sapiens; identical to SEQ ID NO: 838651

SEQ ID NO: 838672 - protein, 561 aa, Homo sapiens
MAGAIASRMSFSSLKRKQPKTFTVRIVTMDAEMEFNCEMKWKGKDLFDLVCRTLGLRETWFFGLQYTIKDTVAWLKMDKKVLDHDVSKEEPVTFHFLAKFYPENAEEELVQEITQHLFFLQVKKQILDEKIYCPPEASVLLASYAVQAKYGDYDPSVHKRGFLAQEELLPKRVINLYQMTPEMWEERITAWYAEHRGRARDEAEMEYLKIAQDLEMYGVNYFAIRNKKGTELLLGVDALGLHIYDPENRLTPKISFPWNEIRNISYSDKEFTIKPLDKKIDVFKFNSSKLRVNKLILQLCIGNHDLFMRRRKADSLEVQQMKAQAREEKARKQMKEEATMANEALMRSEETADLLAEKAQITEEEAKLLAQKAAEAEQEMQRIKATAIRTEEEKRLMEQKVLEAEVLALKMAEESERRAKEADQLKQDLQEAREAERRAKQKLLEIATKPTYPPMNPIPAPLPPDIPSFNLIGDSLSFDFKDTDMKRLSMEIEKEKVEYMEKSKHLQEQLNELKTEIEALKLKERETALDILHNENSDRGGSSKHNTIKKPQAQGRRPICI

SEQ ID NO: 838673 - protein, 282 aa, Homo sapiens
MAGAIASRMSFSSLKRKQPKTFTVRIVTMDAEMEFNCEMKWKGKDLFDLVCRTLGLRETWFFGLQYTIKDTVAWLKMDKKVLDHDVSKEEPVTFHFLAKFYPENAEEELVQEITQHLFFLQVKKQILDEKIYCPPEASVLLASYAVQAKYGDYDPSVHKRGFLAQEELLPKRVINLYQMTPEMWEERITAWYAEHRGRARDEAEMEYLKIAQDLEMYGVNYFAIRNKKGTELLLGVDALGLHIYDPENRLTPKISFPWNEIRNISYSDKEPKAWDGQKCLPP

SEQ ID NO: 838674 - protein, 289 aa, Homo sapiens
CEGSGHCSGKSLLRWTVRLSALSSSQRPHAGPPAGPSTLRPPSFPGASFGLDCPCSSILLPPPDLLSSRLPPPLARVMRSRLLLSVAHLPTIRETTEEMLLGGPGQEPPPSPSLDDYVRSISRLAQPTSVLDKATAQGQPRPPHRPAQACRKGRPAVSLRDITARFSGQQPTLPMADTVDPLDWLFGESQEKQPSQRDLPRRTGPSAGLWGPHRQMDSSKPMGAPRGRLCEARMPGHSLARPPQDGQQSSDLRSWTFGQSAQAMASRHRPRPSSVLRTLYSHLPVIHEL

SEQ ID NO: 838675 - protein, 289 aa, Homo sapiens; identical to SEQ ID NO: 838674

SEQ ID NO: 838676 - protein, 289 aa, Homo sapiens; identical to SEQ ID NO: 838674

SEQ ID NO: 838677 - protein, 289 aa, Homo sapiens; identical to SEQ ID NO: 838674

SEQ ID NO: 838678 - protein, 134 aa, Homo sapiens
CEGSGHCSGKSLLRWTVRLSALSSSQRPHAGPPAGPSTLRPPSFPGASFGLDCPCSSILLPPPDLLSSRLPPPLARVMRSRLLLSVAHLPTIRETTEEMLLGGPGQEPPPSPSLDDYSQDVLRPRPGHLESEGP

SEQ ID NO: 838679 - protein, 156 aa, Homo sapiens
SVHCPPPSDPTLDPLPDPPPFGPQASQGLPLDWTVPAHPFSCHPQTSSAPGKREQLPLGLRQNTRALFIFEGNSQPELAQPPYGLETRAVCRGLCIYKGIQGLFHAFPTTSRPGVFITLFYGWVSGGLERWPCQRSHGQCVADPGFKPSLPLTSVC

SEQ ID NO: 838680 - protein, 289 aa, Homo sapiens; identical to SEQ ID NO: 838674

SEQ ID NO: 838681 - protein, 289 aa, Homo sapiens; identical to SEQ ID NO: 838674

SEQ ID NO: 838682 - protein, 153 aa, Homo sapiens
AQLVVSHRQPLSSALTRYPLQWWPCLYPGHFRGSVLGRGRGWKVDPWSAQLKTRFVLFLHKSRQWSITRPRPGERCLCPSSPSRGWLHRTASSAPKSASWLPPSKPMFCEAQENTWSLSKCTNVFRGTVTWHHWGTLLATTHTSCGGIGRVPP

SEQ ID NO: 838683 - protein, 134 aa, Homo sapiens
PKEEGTGLPRPQGPDFHLSAQICLCHCRPGTGRWGAEGKSRPPLKSQPPSDWLQGSRLGRGLVTPEGLKGGWERRTPQTDGGQGSGSGSGDPECAPTPPWPGCCRRPACFPCSWPASSRRAGDKRSRRWTAMVA

SEQ ID NO: 838684 - protein, 79 aa, Homo sapiens
MTDECAALPTLKYVRPGGGFVPNFQLFEKGDVNGEKEQKFYTFLKNSCPPTSDILEGRKDLWVLSWFLFSKLVAGKAQN

SEQ ID NO: 838685 - protein, 124 aa, Homo sapiens
MREGPKALVGGPPLSLSEGPALSAFRLRPLGRDATPLLLRRTCPHPSLVHWLETHPVCPVKAFLQQLMQTHNAAANTQCCCKHTMQLQTHNAAANTQCSCKHTMQLQTHNAAANTQCSCKHNAG

SEQ ID NO: 838686 - protein, 134 aa, Homo sapiens; identical to SEQ ID NO: 838683

SEQ ID NO: 838687 - protein, 157 aa, Homo sapiens
MLPHLLFLFGPELNALQEELAPFGLVILGFPCNQFGKQEPGENSEILPTLKYVRPGGGFVPNFQLFEKGDVNGEKEQKFYTFLKNSCPPTSELLGTSDRLFWEPMKVHDIRWNFEKFLVGPDGIPIMRWHHRTTVSNVKMDILSYMRRQAALGVKRK

SEQ ID NO: 838688 - protein, 137 aa, Homo sapiens
SVPDFLVCCVSELFIGKQEPGENSEILPTLKYVRPGGGFVPNFQLFEKGDVNGEKEQKFYTFLKNSCPPTSELLGTSDRLFWEPMKVHDIRWNFEKFLVGPDGIPIMRWHHRTTVSNVKMDILSYMRRQAALGVKRK

SEQ ID NO: 838689 - protein, 134 aa, Homo sapiens; identical to SEQ ID NO: 838683

SEQ ID NO: 838690 - protein, 104 aa, Homo sapiens
MSPRVSSLFDEKGDVKWRRKSMNILALVSKWNSCPPTSELLGTSDRLFWEPMKVHDIRWNFEKFLVGPDGIPIMRWHHRTTVSNVKMDILSYMRRQAALGVKRK

SEQ ID NO: 838691 - protein, 134 aa, Homo sapiens; identical to SEQ ID NO: 838683

SEQ ID NO: 838692 - protein, 114 aa, Homo sapiens
FAAASTWCQRMMGIPAGHGQQRQDGHPVLHEAAGSPGGQEEVTEGRLIPCPPCRGGTLFRKKSVSPTTLSTHHRPLSYHSRPQPGTNGCIQFCVLPGMWVWVHVGVYTHAYRYA

SEQ ID NO: 838693 - protein, 127 aa, Homo sapiens
  misc_feature (6)..(6): Xaa can be any naturally occurring amino acid
VGPTSXPTRQLLKVPADVVNLHGFPEEAVRCTQGLRGGRDFVQEEIRVSNHTIYPSQTPFLSLKAPAWHKWMHTVLCTARHVGVGACGCLHTCLQVCVIVCVCMGVQPRVYLCVFLGMCTICVPAAV

SEQ ID NO: 838694 - protein, 102 aa, Homo sapiens
MDAYSSVYCQACGCGCMWVFTHMPTGMRDCVCVHGCTATCLPMCLSGNVYHLCACSCVVLDSDNPFSPVLHSNDNSSLTPKPKGKTSAPSEDVPSPLTGPLA

SEQ ID NO: 838695 - protein, 134 aa, Homo sapiens; identical to SEQ ID NO: 838683

SEQ ID NO: 838696 - protein, 79 aa, Homo sapiens
MKVHDIRWNFEKFLVGPDGIPIMRWHHRTTVSNVKMDILSYMRRQAALGVKLPAPLSTCLGGTDLGELHAWGHARPSQT

SEQ ID NO: 838697 - protein, 134 aa, Homo sapiens; identical to SEQ ID NO: 838683

SEQ ID NO: 838698 - protein, 134 aa, Homo sapiens; identical to SEQ ID NO: 838683

SEQ ID NO: 838699 - protein, 134 aa, Homo sapiens; identical to SEQ ID NO: 838683

SEQ ID NO: 838700 - protein, 134 aa, Homo sapiens; identical to SEQ ID NO: 838683

SEQ ID NO: 838701 - protein, 168 aa, Homo sapiens
MDISAVCWQIRPLSSARRGQYIELNALQEELAPFGLVILGFPCNQFGKQEPGENSEILPTLKYVRPGGGFVPNFQLFEKGDVNGEKEQKFYTFLKNSCPPTSELLGTSDRLFWEPMKVHDIRWNFEKFLVGPDGIPIMRWHHRTTVSNVKMDILSYMRRQAALGVKRK

SEQ ID NO: 838702 - protein, 104 aa, Homo sapiens; identical to SEQ ID NO: 838690

SEQ ID NO: 838703 - protein, 134 aa, Homo sapiens; identical to SEQ ID NO: 838683

SEQ ID NO: 838704 - protein, 134 aa, Homo sapiens; identical to SEQ ID NO: 838683

SEQ ID NO: 838705 - protein, 105 aa, Homo sapiens
MHTGRACTIRSGHSGLSLQPIWKTGTRRELRDPSYPQVCPTRWRLVPNFQLFEKGDVNGRERAEILHFPKRTPVLPPRTYLRVGRISEFSPGSCFPNWLQGKPRM

SEQ ID NO: 838706 - protein, 134 aa, Homo sapiens; identical to SEQ ID NO: 838683

SEQ ID NO: 838707 - protein, 109 aa, Homo sapiens
LCLISQVRVRSMADWRWWTGWGLWLKFLGPPLGGVRSQMQVADSRLSHYAVGFSSLASPASVWEWIPQKTLYPLSSQHTLCFSWFSPLMVVFSSLTGSPSGSIPKSSHY

SEQ ID NO: 838708 - protein, 76 aa, Homo sapiens
LLLEPLTTILDHNPQEKGGSVKDGEKLCKPWQHFKPWILQALCFTPRFFNYINQQIPFLRKPVRGEILFQGRQNPD

SEQ ID NO: 838709 - protein, 67 aa, Homo sapiens
AGQEVSICRGVCGAREQGRGFFLPGSLRVKGVKLGFGEGNRNFASGHIWFPATDSHGLSSLPACLGL

SEQ ID NO: 838710 - protein, 67 aa, Homo sapiens
PFRGPHPDPHRFHSWVQRAFLNSRRQLWGRRIFFCGGHPAQEGWRNGAARHSHSFLESRSQGGPSVT

SEQ ID NO: 838711 - protein, 443 aa, Homo sapiens
PCDEAGFSRFETSRIPRQQEQISRRDKSKQVWEAVLLPLSLLSMMDLRNTPAKSLDKFIEDYLLPDTCFRMQINHAIDIICGFLKERCFRGSSYPVCVSKVVKGGSSGKGTTLRGRSDADLVVFLSPLTTFQDQLNRRGEFIQEIRRQLEACQRERAFSVKFEVQAPRWGNPRALSFVLSSLQLGEGVEFDVLPAFDALGQLTGSYKPNPQIYVKLIEECTDLQKEGEFSTCFTELQRDFLKQRPTKLKSLIRLVKHWYQNCKKKLGKLPPQYALELLTVYAWERGSMKTHFNTAQGFRTVLELVINYQQLCIYWTKYYDFKNPIIEKYLRRQLTKPRPVILDPADPTGNLGGGDPKGWRQLAQEAEAWLNYPCFKNWDGSPVSSWILLAESNSADDETDDPRRYQKYGYIGTHEYPHFSHRPSTLQAASTPQAEEDWTCTIL

SEQ ID NO: 838712 - protein, 389 aa, Homo sapiens
PCDEAGFSRFETSRIPRQQEQISRRDKSKQVWEAVLLPLSLLSMMDLRNTPAKSLDKFIEDYLLPDTCFRMQINHAIDIICGFLKERCFRGSSYPVCVSKVVKGGSSGKGTTLRGRSDADLVVFLSPLTTFQDQLNRRGEFIQEIRRQLEACQRERAFSVKFEVQAPRWGNPRALSFVLSSLQLGEGVEFDVLPAFDALGQLTGSYKPNPQIYVKLIEECTDLQKEGEFSTCFTELQRDFLKQRPTKLKSLIRLVKHWYQNCKKKLGKLPPQYALELLTVYAWERGSMKTHFNTAQGFRTVLELVINYQQLCIYWTKYYDFKNPIIADPTGNLGGGDPKGWRQLAQEAEAWLNYPCFKNWDGSPVSSWILLVRPPASSLPFIPAPLHEA

SEQ ID NO: 838713 - protein, 407 aa, Homo sapiens
PCDEAGFSRFETSRIPRQQEQISRRDKSKQVWEAVLLPLSLLSMMDLRNTPAKSLDKFIEDYLLPDTCFRMQINHAIDIICGFLKERCFRGSSYPVCVSKVVKGGSSGKGTTLRGRSDADLVVFLSPLTTFQDQLNRRGEFIQEIRRQLEACQRERAFSVKFEVQAPRWGNPRALSFVLSSLQLGEGVEFDVLPAFDALGQLTGSYKPNPQIYVKLIEECTDLQKEGEFSTCFTELQRDFLKQRPTKLKSLIRLVKHWYQNCKKKLGKLPPQYALELLTVYAWERGSMKTHFNTAQGFRTVLELVINYQQLCIYWTKYYDFKNPIIEKYLRRQLTKPRPVILDPADPTGNLGGGDPKGWRQLAQEAEAWLNYPCFKNWDGSPVSSWILLVRPPASSLPFIPAPLHEA

SEQ ID NO: 838714 - protein, 378 aa, Homo sapiens
MPSEQWLVLHNVSDCSCAFYLGRFASLSINYYFCRLFQGGSSGKGTTLRGRSDADLVVFLSPLTTFQDQLNRRGEFIQEIRRQLEACQRERAFSVKFEVQAPRWGNPRALSFVLSSLQLGEGVEFDVLPAFDALGQLTGSYKPNPQIYVKLIEECTDLQKEGEFSTCFTELQRDFLKQRPTKLKSLIRLVKHWYQNCKKKLGKLPPQYALELLTVYAWERGSMKTHFNTAQGFRTVLELVINYQQLCIYWTKYYDFKNPIIEKYLRRQLTKPRPVILDPADPTGNLGGGDPKGWRQLAQEAEAWLNYPCFKNWDGSPVSSWILLAESNSADDETDDPRRYQKYGYIGTHEYPHFSHRPSTLQAASTPQAEEDWTCTIL

SEQ ID NO: 838715 - protein, 285 aa, Homo sapiens
PCDEAGFSRFETSRIPRQQEQISRRDKSKQVWEAVLLPLSLLSMMDLRNTPAKSLDKFIEDYLLPDTCFRMQINHAIDIICGFLKERCFRGSSYPVCVSKVVKCKKKLGKLPPQYALELLTVYAWERGSMKTHFNTAQGFRTVLELVINYQQLCIYWTKYYDFKNPIIEKYLRRQLTKPRPVILDPADPTGNLGGGDPKGWRQLAQEAEAWLNYPCFKNWDGSPVSSWILLAESNSADDETDDPRRYQKYGYIGTHEYPHFSHRPSTLQAASTPQAEEDWTCTIL

SEQ ID NO: 838716 - protein, 337 aa, Homo sapiens
PCDEAGFSRFETSRIPRQQEQISRRDKSKQVWEAVLLPLSLLSMMDLRNTPAKSLDKFIEDYLLPDTCFRMQINHAIDIICGFLKERCFRGSSYPVCVSKVVKGGSSGKGTTLRGRSDADLVVFLSPLTTFQDQLNRRGEFIQEIRRQLEACQRERAFSVKFEVQAPRWGNPRALSFVLSSLQLGEGVEFDVLPAFDALGQLTGSYKPNPQIYVKLIEECTDLQKEGEFSTCFTELQRDFLKQRPTKLKSLIRLVKHWYQNCKKKLGKLPPQYALELLTVYAWERGSMKTHFNTAQGFRTVLELVINYQQLCIYWTKYYDFKNPIIEKYLPLMPWVS

SEQ ID NO: 838717 - protein, 271 aa, Homo sapiens
PCDEAGFSRFETSRIPRQQEQISRRDKSKQVWEAVLLPLSLLSMMDLRNTPAKSLDKFIEDYLLPDTCFRMQINHAIDIICGFLKERCFRGSSYPVCVSKVVKGGSSGKGTTLRGRSDADLVVFLSPLTTFQDQLNRRGEFIQEIRRQLEACQRERAFSVKFEVQAPRWGNPRALSFVLSSLQLGEGVEFDVLPAFDALGQLTGSYKPNPQIYVKLIEECTDLQKEGEFSTCFTELQRDFLKQRPTKLKSLIRLVKHWYQNPACWYLYIFI

SEQ ID NO: 838718 - protein, 117 aa, Homo sapiens
PCDEAGFSRFETSRIPRQQEQISRRDKSKQVWEAVLLPLSLLSMMDLRNTPAKSLDKFIEDYLLPDTCFRMQINHAIDIICGFLKERCFRGSSYPVCVSKVVKGGSSGKGTTLRGRS

SEQ ID NO: 838719 - protein, 395 aa, Homo sapiens
NETNSSPSSVSRRDKSKQVWEAVLLPLSLLSMMDLRNTPAKSLDKFIEDYLLPDTCFRMQINHAIDIICGFLKERCFRGSSYPVCVSKVVKGGSSGKGTTLRGRSDADLVVFLSPLTTFQDQLNRRGEFIQEIRRQLEACQRERAFSVKFEVQAPRWGNPRALSFVLSSLQLGEGVEFDVLPAFDALGQLTGSYKPNPQIYVKLIEECTDLQKEGEFSTCFTELQRDFLKQRPTKLKSLIRLVKHWYQNCKKKLGKLPPQYALELLTVYAWERGSMKTHFNTAQGFRTVLELVINYQQLCIYWTKYYDFKNPIIEKYLRRQLTKPRPVILDPADPTGNLGGGDPKGWRQLAQEAEAWLNYPCFKNWDGSPVSSWILLVRPPASSLPFIPAPLHEA

SEQ ID NO: 838720 - protein, 407 aa, Homo sapiens; identical to SEQ ID NO: 838713

SEQ ID NO: 838721 - protein, 457 aa, Homo sapiens
PCDEAGFSRFETSRIPRQQEQISRRDKSKQVWEAVLLPLSLLSMMDLRNTPAKSLDKFIEDYLLPDTCFRMQINHAIDIICGFLKERCFRGSSYPVCVSKVVKGGSSGKGTTLRGRSDADLVVFLSPLTTFQDQLNRRGEFIQEIRRQLEACQRERAFSVKFEVQAPRWGNPRALSFVLSSLQLGEGVEFDVLPAFDALGQLTGSYKPNPQIYVKLIEECTDLQKEGEFSTCFTELQRDFLKQRPTKLKSLIRLVKHWYQNCKKKLGKLPPQYALELLTVYAWERGSMKTHFNTAQGFRTVLELVINYQQLCIYWTKYYDFKNPIIEKYLRRQLTKPRPVILDPADPTGNLGGGDPKGWRQLAQEAEAWLNYPCFKNWDGSPVSSWILLTQHTPGSIHPTGRRGLDLHHPLNASASWGKGLQCYLDQFLHFQVGLLIQRGQSSSVSWCIIQDRTQVS

SEQ ID NO: 838722 - protein, 403 aa, Homo sapiens
PCDEAGFSRFETSRIPRQQEQISRRDKSKQVWEAVLLPLSLLSMMDLRNTPAKSLDKFIEDYLLPDTCFRMQINHAIDIICGFLKERCFRGSSYPVCVSKVVKGGSSGKGTTLRGRSDADLVVFLSPLTTFQDQLNRRGEFIQEIRRQLEACQRERAFSVKFEVQAPRWGNPRALSFVLSSLQLGEGVEFDVLPAFDALGQLTGSYKPNPQIYVKLIEECTDLQKEGEFSTCFTELQRDFLKQRPTKLKSLIRLVKHWYQNCKKKLGKLPPQYALELLTVYAWERGSMKTHFNTAQGFRTVLELVINYQQLCIYWTKYYDFKNPIIEKYLRRQLTKPRPVILDPADPTGNLGGGDPKGWRQLAQEAEAWLNYPCFKNWDGSPVSSWILLVNLTLVGRRNYTNN

SEQ ID NO: 838723 - protein, 349 aa, Homo sapiens
PCDEAGFSRFETSRIPRQQEQISRRDKSKQVWEAVLLPLSLLSMMDLRNTPAKSLDKFIEDYLLPDTCFRMQINHAIDIICGFLKERCFRGSSYPVCVSKVVKGGSSGKGTTLRGRSDADLVVFLSPLTTFQDQLNRRGEFIQEIRRQLEACQRERAFSVKFEVQAPRWGNPRALSFVLSSLQLGEGVEFDVLPAFDALGQLTGSYKPNPQIYVKLIEECTDLQKEGEFSTCFTELQRDFLKQRPTKLKSLIRLVKHWYQNCKKKLGKLPPQYALELLTVYAWERGSMKTHFNTAQGFRTVLELVINYQQLCIYWTKYYDFKNPIIEKYLRRQLTKPRYAIPTWLSSPM

SEQ ID NO: 838724 - protein, 220 aa, Homo sapiens
PCDEAGFSRFETSRIPRQQEQISRRDKSKQVWEAVLLPLSLLSMMDLRNTPAKSLDKFIEDYLLPDTCFRMQINHAIDIICGFLKERCFRGSSYPVCVSKVVKGGSSGKGTTLRGRSDADLVVFLSPLTTFQDQLNRRGEFIQEIRRQLEACQRERAFSVKFEVQAPRWGNPRALSFVLSSLQLGEGVEFDVLPAFDALGESSQLLFLPLPISEQKSPTV

SEQ ID NO: 838725 - protein, 115 aa, Homo sapiens
PCDEAGFSRFETSRIPRQQEQISRRDKSKQVWEAVLLPLSLLSMMDLRNTPAKSLDKFIEDYLLPDTCFRMQINHAIDIICGFLKERCFRGSSYPVCVSKVVKVSPGLPGQGRGG

SEQ ID NO: 838726 - protein, 105 aa, Homo sapiens
PSKTGSLRGNSEGTGSAAVCPTVRHFREQGSLVSSPLQAKWAAARSDGVIRGDLAVSHISVLPSATYWMCSKWGSGHGEEPSPQRVDNELFTRKREASKGTSWPS

SEQ ID NO: 838727 - protein, 599 aa, Homo sapiens
MDVHDLFRRLGAGAKFDTRRFSADAARFQIGKRKYDFDSSEVLQGLDFFGNKKSVPGVCGASQTHQKPQNGEKKEESLTERKREQSKKKRKTMTSEIASQEEGATIQWMSSVEAKIEDKKVQRESKLTSGKLENLRKEKINFLRNKHKIHVQGTDLPDPIATFQQLDQEYKINSRLLQNILDAGFQMPTPIQMQAIPVMLHGRELLASAPTGSGKTLAFSIPILMQLKQPANKGFRALIISPTRELASQIHRELIKISEGTGFRIHMIHKAAVAAKKFGPKSSKKFDILVTTPNRLIYLLKQDPPGIDLASVEWLVVDESDKLFEDGKTGFRDQLASIFLACTSHKVRRAMFSATFAYDVEQWCKLNLDNVISVSIGARNSAVETVEQELLFVGSETGKLLAVRELVKKGFNPPVLVFVQSIERAKELFHELIYEGINVDVIHAERTQQQRDNTVHSFRAGKIWVLICTALLARGIDFKGVNLVINYDFPTSSVEYIHRIGRTGRAGNKGKAITFFTEDDKPLLRSVANVIQQAGCPVPEYIKGFQKLLSKQKKKMIKKPLERESISTTPKCFLEKAKDKQKKVTGQNSKKKVALEDKS

SEQ ID NO: 838728 - protein, 637 aa, Homo sapiens
MDVHDLFRRLGAGAKFDTRRFSADAARFQIGKRKYDFDSSEVLQGLDFFGNKKSVPGVCGASQTHQKPQNGEKKEESLTERKREQSKKKRKTMTSETGFHHVGQYGLDLLTCDSPTLGSQSAGITDVSHHAQPEIASQEEGATIQWMSSVEAKIEDKKVQRESKLTSGKLENLRKEKINFLRNKHKIHVQGTDLPDPIATFQQLDQEYKINSRLLQNILDAGFQMPTPIQMQAIPVMLHGRELLASAPTGSGKTLAFSIPILMQLKQPANKGFRALIISPTRELASQIHRELIKISEGTGFRIHMIHKAAVAAKKFGPKSSKKFDILVTTPNRLIYLLKQDPPGIDLASVEWLVVDESDKLFEDGKTGFRDQLASIFLACTSHKVRRAMFSATFAYDVEQWCKLNLDNVISVSIGARNSAVETVEQELLFVGSETGKLLAVRELVKKGFNPPVLVFVQSIERAKELFHELIYEGINVDVIHAERTQQQRDNTVHSFRAGKIWVLICTALLARGIDFKGVNLVINYDFPTSSVEYIHRIGRTGRAGNKGKAITFFTEDDKPLLRSVANVIQQAGCPVPEYIKGFQKLLSKQKKKMIKKPLERESISTTPKCFLEKAKDKQKKVTGQNSKKKVALEDKS

SEQ ID NO: 838729 - protein, 599 aa, Homo sapiens; identical to SEQ ID NO: 838727

SEQ ID NO: 838730 - protein, 513 aa, Homo sapiens
MDVHDLFRRLGAGAKFDTRRFSADAARFQIGKRKYDFDSSEVLQGLDFFGNKKSVPGVCGASQTHQKPQNGEKKEESLTERKREQSKKKRKTMTSEIASQEEGATIQWMSSVEAKIEDKKVQRESKLTSGKLENLRKEKINFLRNKHKIHVQGTDLPDPIATFQQLDQEYKINSRLLQNILDAGFQMPTPIQMQAIPVMLHGRELLASAPTGSGKTLAFSIPILMQLKQPANKGFRALIISPTRELASQIHRELIKISEGTGFRIHMIHKAAVAAKKFGPKSSKKFDILVTTPNRLIYLLKQDPPGIDLASVEWLVVDESDKLFEDGKTGFRDQLASIFLACTSHKVRRAMFSATFAYDVEQWCKLNLDNVISVSIGARNSAVETVEQELLFVGSETGKLLAVRELVKKGFNPPVLVFVQSIERAKELFHELIYEGINVDVIHAERTQQQRDNTVHSFRAGKIWVLICTALLARGIDFKGVNLVINYDFPTSSVEYIHRIGELSFFSFPSVTH

SEQ ID NO: 838731 - protein, 599 aa, Homo sapiens; identical to SEQ ID NO: 838727

SEQ ID NO: 838732 - protein, 114 aa, Homo sapiens
MTSEIASQEEGATIQWMSSVEAKIEDKKVQRESKLTSGKLENLRKEKINFLRNKHKIHVQGTDLPDPIATFQQLDQEYKINSRLLQNILDAGFQMPTPIQMQAIPVMLHVSMKI

SEQ ID NO: 838733 - protein, 599 aa, Homo sapiens; identical to SEQ ID NO: 838727

SEQ ID NO: 838734 - protein, 599 aa, Homo sapiens; identical to SEQ ID NO: 838727

SEQ ID NO: 838735 - protein, 419 aa, Homo sapiens
MDVHDLFRRLGAGAKFDTRRFSADAARFQIGKRKYDFDSSEVLQGLDFFGNKKSVPGVCGASQTHQKPQNGEKKEESLTERKREQSKKKRKTMTSEIASQEEGATIQWMSSVEAKIEDKKVQRESKLTSGKLENLRKEKINFLRNKHKIHVQGTDLPDPIATFQQLDQEYKINSRLLQNILDAGFQMPTPIQMQAIPVMLHGRELLASAPTGSGKTLAFSIPILMQLKQPANKGFRALIISPTRELASQIHRELIKISEGTGFRIHMIHKAAVAAKKFGPKSSKKFDILVTTPNRLIYLLKQDPPGIDLASVEWLVVDESDKLFEDGKTGFRDQLASIFLACTSHKVRRAMFSATFAYDVEQWCKLNLDNVISVSIGARNSAVETVEQELLFVGSETGKLLAVRELVKKVYLYYLLEFW

SEQ ID NO: 838736 - protein, 782 aa, Homo sapiens
MVQHFKPQIFGDRKPVYDGKKNIYTVTALPIGNERVDFEVTIPGEGKDRIFKVSIKWLAIVSWRMLHEALVSGQIPVPLESVQALDVAMRHLASMRYTPVGRSFFSPPEGYYHPLGGGREVWFGFHQSVRPAMWKMMLNIDVSATAFYKAQPVIEFMCEVLDIRNIDEQPKPLTDSQRVRFTKEIKGLKVEVTHCGQMKRKYRVCNVTRRPASHQTFPLQLESGQTVECTVAQYFKQKYNLQLKYPHLPCLQVGQEQKHTYLPLEVCNIVAGQRCIKKLTDNQTSTMIKATARSAPDRQEEISRLMKNASYNLDPYIQEFGIKVKDDMTEVTGRVLPAPILQYGGRNRAIATPNQGVWDMRGKQFYNGIEIKVWAIACFAPQKQCREEVLKNFTDQLRKISKDAGMPIQGQPCFCKYAQGADSVEPMFRHLKNTYSGLQLIIVILPGKTPVYAEVKRVGDTLLGMATQCVQVKNVVKTSPQTLSNLCLKINVKLGGINNILVPHQRSAVFQQPVIFLGADVTHPPAGDGKKPSITAVVGSMDAHPSRYCATVRVQRPRQEIIEDLSYMVRELLIQFYKSTRFKPTRIIFYRDGVPEGQLPQILHYELLAIRDACIKLEKDYQPGITYIVVQKRHHTRLFCADKNERIGKSGNIPAGTTVDTNITHPFEFDFYLCSHAGIQGTSRPSHYYVLWDDNRFTADELQILTYQLCHTYVRCTRSVSIPAPAYYARLVAFRARYHLVDKEHDSGEGSHISGQSNGRDPQALAKAVQVHQDTLRTMYFA

SEQ ID NO: 838737 - protein, 782 aa, Homo sapiens; identical to SEQ ID NO: 838736

SEQ ID NO: 838738 - protein, 817 aa, Homo sapiens [sequence omitted]

SEQ ID NO: 838739 - protein, 782 aa, Homo sapiens; identical to SEQ ID NO: 838736

SEQ ID NO: 838740 - protein, 76 aa, Homo sapiens
MGVVGLYSQGLLLPYPPDSTEAHLGAPSTYPQNRAIATPNQGVWDMRGKQFYNGIEIKVWAIACFAPQKQCREEVL

SEQ ID NO: 838741 - protein, 927 aa, Homo sapiens
WQLAGRSQWELLQAPRRRQRRLRGRRRERPGLVGEPSPARDPEQRECGVPRPLTLDFTVSGPPDLRTGYGMEAGPSGAAAGAYLPPLQQVFQAPRRPGIGTVGKPIKLLANYFEVDIPKIDVYHYEVDIKPDKCPRRVNREVVEYMVQHFKPQIFGDRKPVYDGKKNIYTVTALPIGNERVDFEVTIPGEGKDRIFKVSIKWLAIVSWRMLHEALVSGQIPVPLESVQALDVAMRHLASMRYTPVGRSFFSPPEGYYHPLGGGREVWFGFHQSVRPAMWKMMLNIDVSATAFYKAQPVIEFMCEVLDIRNIDEQPKPLTDSQRVRFTKEIKGLKVEVTHCGQMKRKYRVCNVTRRPASHQTFPLQLESGQTVECTVAQYFKQKYNLQLKYPHLPCLQVGQEQKHTYLPLEVCNIVAGQRCIKKLTDNQTSTMIKATARSAPDRQEEISRLMKNASYNLDPYIQEFGIKVKDDMTEVTGRVLPAPILQYGGRNRAIATPNQGVWDMRGKQFYNGIEIKVWAIACFAPQKQCREEVLKNFTDQLRKISKDAGMPIQGQPCFCKYAQGADSVEPMFRHLKNTYSGLQLIIVILPGKTPVYAEVKRVGDTLLGMATQCVQVKNVVKTSPQTLSNLCLKINVKLGGINNILVPHQRSAVFQQPVIFLGADVTHPPAGDGKKPSITAVVGSMDAHPSRYCATVRVQRPRQEIIEDLSYMVRELLIQFYKSTRFKPTRIIFYRDGVPEGQLPQILHYELLAIRDACIKLEKDYQPGITYIVVQKRHHTRLFCADKNERIGKSGNIPAGTTVDTNITHPFEFDFYLCSHAGIQGTSRPSHYYVLWDDNRFTADELQILTYQLCHTYVRCTRSVSIPAPAYYARLVAFRARYHLVDKEHDSGEGSHISGQSNGRDPQALAKAVQVHQDTLRTMYFA

SEQ ID NO: 838742 - protein, 782 aa, Homo sapiens; identical to SEQ ID NO: 838736

SEQ ID NO: 838743 - protein, 114 aa, Homo sapiens
TWVIHGLGSHGWAHAPGAVPPKSRGSKEEGGGVGRSVGCLVSFYRGGVRVGNRASKTDHQPEISDINLMSPTPHPILSHLALTPLDQKGQHWCPPYTQVSHVTHSAKDSCLTAW

SEQ ID NO: 838744 - protein, 725 aa, Homo sapiens
MGHCLDFELLPKLEVVVVSQLPQATPIPHREVVEYMVQHFKPQIFGDRKPVYDGKKNIYTVTALPIGNERVDFEVTIPGEGKDRIFKVSIKWLAIVSWRMLHEALVSGQIPVPLESVQALDVAMRHLASMRYTPVGRSFFSPPEGYYHPLGGGREVWFGFHQSVRPAMWKMMLNIDVSATAFYKAQPVIEFMCEVLDIRNIDEQPKPLTDSQRVRFTKEIKGLKVEVTHCGQMKRKYRVCNVTRRPASHQTFPLQLESGQTVECTVAQYFKQKYNLQLKYPHLPCLQVGQEQKHTYLPLEVCNIVAGQRCIKKLTDNQTSTMIKATARSAPDRQEEISRLMKNASYNLDPYIQEFGIKVKDDMTEVTGRVLPAPILQYGGRNRAIATPNQGVWDMRGKQFYNGIEIKVWAIACFAPQKQCREEVLKNFTDQLRKISKDAGMPIQGQPCFCKYAQGADSVEPMFRHLKNTYSGLQLIIVILPGKTPVYAEVKRVGDTLLGMATQCVQVKNVVKTSPQTLSNLCLKINVKLGGINNILVPHQRSAVFQQPVIFLGADVTHPPAGDGKKPSITAVVGSMDAHPSRYCATVRVQRPRQEIIEDLSYMVRELLIQFYKSTRFKPTRIIFYRDGVPEGQLPQILHYELLAIRDACIKLEKDYQPGITYIVVQKRHHTRLFCADKNERIGKSGNIPAGTTVDTNITHPFEFDFYLCSHAGIQIRKLKPREIK

SEQ ID NO: 838745 - protein, 189 aa, Homo sapiens
MWRPGSCVAPGPAAMPKRSCPFADVAPLQLKVRVSQRELSRGVCAERYSQEVFEKTKRLLFLGAQAYLDHVWDEGCAVVHLPESPKPGPTGAPRAARGQMLIGPDGRLIRSLGQASEADPSGVASIACSSCVRAVDGKAVCGQCERALCGQCVRTCWGCGSVACTLCGLVDCSDMYEKVLCTSCAMFET

SEQ ID NO: 838746 - protein, 124 aa, Homo sapiens
MWRPGSCVAPGPAAMPKRSCPFADVAPLQLKVRVSQRELSRGVCAERYSQEVFDPSGVASIACSSCVRAVDGKAVCGQCERALCGQCVRTCWGCGSVACTLCGLVDCSDMYEKVLCTSCAMFET

SEQ ID NO: 838747 - protein, 171 aa, Homo sapiens
MWRPGSCVAPGPAAMPKRSCPFADVAPLQLKVRVSQRELSRGVCAERYSQEVFEKTKRLLFLGAQAYLDHVWDEGCAVVHLPESPKPGPTGAPRAARGQMLIGPDGRLIRSLGQASEADPSGVASIACSSCVRAVDGKAVCGQCERALCGQCVRTCWGCGSVACTLCGLVE

SEQ ID NO: 838748 - protein, 189 aa, Homo sapiens; identical to SEQ ID NO: 838745

SEQ ID NO: 838749 - protein, 189 aa, Homo sapiens; identical to SEQ ID NO: 838745

SEQ ID NO: 838750 - protein, 163 aa, Homo sapiens
MWRPGSCVAPGPAAMPKRSCPFADVAPLQLKVRVSQRELSRGVCAERYSQEVFEKTKRLLFLGAQAYLDHVWDEGCAVVHLPESPKPGPTGAPRAARGQMLIGPDGRLIRSLGQASEADPSGVASIACSSCVRAVDGKAVCGQCERALCGQCVRTCSCAMFET

SEQ ID NO: 838751 - protein, 88 aa, Homo sapiens
VILEDWAGRWCLPGRVALTGHAQGPLLVAVPHLWPGGIGFRVNLSCPKRASGGCSISWNVYSFRPLDVDTGDEKFRKWTDSWSSVQTY

SEQ ID NO: 838752 - protein, 559 aa, Homo sapiens
MPLVKRNIDPRHLCHTALPRGIKNELECVTNISLANIIRQLSSLSKYAEDIFGELFNEAHSFSFRVNSLQERVDRLSVSVTQLDPKEEELSLQDITMRKAFRSSTIQDQQLFDRKTLPIPLQETYDVCEQPPPLNILTPYRDDGKEGLKFYTNPSYFFDLWKEKMLQDTEDKRKEKRKQKQKNLDRPHEPEKVPRAPHDRRREWQKLAQGPELAEDDANLLHKHIEVANGPASHFETRPQTYVDHMDGSYSLSALPFSQMSELLTRAEERVLVRPHEPPPPPPMHGAGDAKPIPTCISSATGLIENRPQSPATGRTPVFVSPTPPPPPPPLPSALSTSSLRASMTSTPPPPVPPPPPPPATALQAPAVPPPPAPLQIAPGVLHPAPPPIAPPLVQPSPPVARAAPVCETVPVHPLPQGEVQGLPPPPPPPPLPPPGIRPSSPVTVTALAHPPSGLHPTPSTAPGPHVPLMPPSPPSQVIPASEPKRHPSTLPVISDARSVLLEAIRKGIQLRKVEEQREQEAKHERIENDVATILSRRIAVEYSDSEDDSEFDEVDWLE

SEQ ID NO: 838753 - protein, 559 aa, Homo sapiens; identical to SEQ ID NO: 838752

SEQ ID NO: 838754 - protein, 559 aa, Homo sapiens; identical to SEQ ID NO: 838752

SEQ ID NO: 838755 - protein, 604 aa, Homo sapiens
AGLARGGGGGNGSSRCCSLARRAHGGSGGGLAPQAAFPVAWRLGRCPERVPPQSPTLLGALGGVPRAEGDRRPLPKHEEGVRREPPRFHGKYAEDIFGELFNEAHSFSFRVNSLQERVDRLSVSVTQLDPKEEELSLQDITMRKAFRSSTIQDQQLFDRKTLPIPLQETYDVCEQPPPLNILTPYRDDGKEGLKFYTNPSYFFDLWKEKMLQDTEDKRKEKRKQKQKNLDRPHEPEKVPRAPHDRRREWQKLAQGPELAEDDANLLHKHIEVANGPASHFETRPQTYVDHMDGSYSLSALPFSQMSELLTRAEERVLVRPHEPPPPPPMHGAGDAKPIPTCISSATGLIENRPQSPATGRTPVFVSPTPPPPPPPLPSALSTSSLRASMTSTPPPPVPPPPPPPATALQAPAVPPPPAPLQIAPGVLHPAPPPIAPPLVQPSPPVARAAPVCETVPVHPLPQGEVQGLPPPPPPPPLPPPGIRPSSPVTVTALAHPPSGLHPTPSTAPGPHVPLMPPSPPSQVIPASEPKRHPSTLPVISDARSVLLEAIRKGIQLRKVEEQREQEAKHERIENDVATILSRRIAVEYSDSEDDSEFDEVDWLE

SEQ ID NO: 838756 - protein, 559 aa, Homo sapiens; identical to SEQ ID NO: 838752

SEQ ID NO: 838757 - protein, 559 aa, Homo sapiens; identical to SEQ ID NO: 838752

SEQ ID NO: 838758 - protein, 559 aa, Homo sapiens; identical to SEQ ID NO: 838752

SEQ ID NO: 838759 - protein, 525 aa, Homo sapiens
MPLVKRNIDPRHLCHTALPRGIKNELECVTNISLANIIRQLSSLSKYAEDIFGELFNEAHSFSFRVNSLQERVDRLSVSVTQLDPKEEELSLQDITMRKAFRSSTIQDQQLFDRKTLPIPLQETYDVCEQPPPLNILTPYRDDGKEGLKFYTNPSYFFDLWKEKMLQDTEDKRKEKRKQKQKNLDRPHEPEKVPRAPHDRRREWQKLAQGPELAEDDANLLHKHIEVANGPASHFETRPQTYVDHMDGSYSLSALPFSQMSELLTRAEERVLVRPHEPPPPPPMHGAGDAKPIPTCISSATGLIENRPQSPATGRTPVFVSPTPPPPPPPLPSALSTSSLRASMTSTPPPPVPPPPPPPATALQAPAVPPPPAPLQIAPGVLHPAPPPIAPPLVQPSPPVARAAPVCETVPVHPLPQGEVQGLPPPPPPPPLPPPGIRPSSPVTVTALAHPPSGLHPTPSTAPGPHVPLMPPSPPSQVIPASEPKRHPSTLPVISDARSVLLEAIRKGNFLSSMKSIAIVALETF

SEQ ID NO: 838760 - protein, 164 aa, Homo sapiens
MSLLGDRFRSIIDDAWWFGTVLSQEPYQPQYPDSHFQCYIVRWDNTEIEKLSPWDMEPIPDNVDPPEELGASISVTTDELEKLLYKPQAGEWGQKSRDEECDRIISGIDQLLNLDIAAAFAGPVDLCTYPKYCTVVAYPTDLYTIRMRLVNRFYRLVETCFQNV

SEQ ID NO: 838761 - protein, 2318 aa, Homo sapiens
GPGGAHGMGGGGGGGGARLRRGDASPVRPRRGLHAPLARSLPPPAPRPAMAEPSSARRPVPLIESELYFLIARYLSAGPCRRAAQVLVQELEQYQLLPKRLDWEGNEHNRSYEELVLSNKHVAPDHLLQICQRIGPMLDKEIPPSISRVTSLLGAGRQSLLRTAKDCRHTVWKGSAFAALHRGRPPEMPVNYGSPPNLVEIHRGKQLTGCSTFSTAFPGTMYQHIKMHRRILGHLSAVYCVAFDRTGHRIFTGSDDCLVKIWSTHNGRLLSTLRGHSAEISDMAVNYENTMIAAGSCDKIIRVWCLRTCAPVAVLQGHTGSITSLQFSPMAKGSQRYMVSTGADGTVCFWQWDLESLKFSPRPLKFTEKPRPGVQMLCSSFSVGGMFLATGSTDHVIRMYFLGFEAPEKIAELESHTDKVDSIQFCNNGDRFLSGSRDGTARIWRFEQLEWRSILLDMATRISGDLSSEEERFMKPKVTMIAWNQNDSIVVTAVNDHVLKVWNSYTGQLLHNLMGHADEVFVLETHPFDSRIMLSAGHDGSIFIWDITKGTKMKHYFNMIEGQGHGAVFDCKFSQDGQHFACTDSHGHLLIFGFGCSKPYEKIPDQMFFHTDYRPLIRDSNNYVLDEQTQQAPHLMPPPFLVDVDGNPHPTKYQRLVPGRENSADEHLIPQLGYVATSDGEVIEQIISLQTNDNDERSPESSILDGMIRQLQQQQDQRMGADQDTIPRGLSNGEETPRRGFRRLSLDIQSPPNIGLRRSGQVEGVRQMHQNAPRSQIATERDLQAWKRRVVVPEVPLGIFRKLEDFRLEKGEEERNLYIIGRKRKTLQLSHKSDSVVLVSQSRQRTCRRKYPNYGRRNRSWRELSSGNESSSSVRHETSCDQSEGSGSSEEDEWRSDRKSESYSESSSDSSSRYSDWTADAGINLQPPLRTSCRRRITRFCSSSEDEISTENLSPPKRRRKRKKENKPKKENLRRMTPAELANMEHLYEFHPPVWITDTTLRKSPFVPQMGDEVIYFRQGHEAYIEAVRRNNIYELNPNKEPWRKMDLRDQELVKIVGIRYEVGPPTLCCLKLAFIDPATGKLMDKSFSIRYHDMPDVIDFLVLRQFYDEARQRNWQSCDRFRSIIDDAWWFGTVLSQEPYQPQYPDSHFQCYIVRWDNTEIEKLSPWDMEPIPDNVDPPEELGASISVTTDELEKLLYKPQAGEWGQKSRDEECDRIISGIDQLLNLDIAAAFAGPVDLCTYPKYCTVVAYPTDLYTIRMRLVNRFYRRLSALVWEVRYIEHNARTFNEPESVIARSAKKITDQLLKFIKNQHCTNISELSNTSENDEQNAEDLDDSDLPKTSSGRRRVHDGKKSIRATNYVESNWKKQCKELVNLIFQCEDSEPFRQPVDLVEYPDYRDIIDTPMDFGTVRETLDAGNYDSPLEFCKDIRLIFSNAKAYTPNKRSKIYSMTLRLSALFEEKMKKISSDFKIGQKFNEKLRRSQRFKQRQNCKGDSQPNKSIRNLKPKRLKSQTKIIPELVGSPTQSTSSRTAYLGTHKTSAGISSGVTSGDSSDSAESSERRKRNRPITNGSTLSESEVEDSLATSLSSSASSSSEESKESSRARESSSRSGLSRSSNLRVTRTRAAQRKTGPVSLANGCGRKATRKRVYLSDSDNNSLETGEILKARAGNNRKVLRKCAAVAANKIKLMSDVEENSSSESVCSGRKLPHRNASAVARKKLLHNSEDEQSLKSEIEEEELKDENQPLPVSSSHTAQSNVDESENRDSESESDLRVARKNWHANGYKSHTPAPSKTKFLKIESSEEDSKSHDSDHACNRTAGPSTSVQKLKAESISEEADSEPGRSGGRKYNTFHKNASFFKKTKILSDSEDSESEEQDREDGKCHKMEMNPISGNLNCDPIAMSQCSSDHGCETDLDSDDDKIEKPNNFMKDSASQDNGLSRKISRKRVCSSDSDSSLQVVKKSSKARTGLLRITRRCAATAANKIKLMSDVEDVSLENVHTRSKNGRKKPLHLACTTAKKKLSDCEGSVHCEVPSEQYACEGKPPDPDSEGSTKVLSQALNGDSDSEDMLNSEHKHRHTNIHKIDAPSKRKSSSVTSSGEDSKSHIPGSETDRTFSSESTLAQKATAENNFEVELNYGLRRWNGRRLRTYGKAPFSKTKVIHDSQETAEKEVKRKRSHPELENVKISETTGNSKFRPDTSSKSSDLGSVTESDIDCTDNTKTKRRKTKGKAKVVRKGKTFTANISKTVRRQRQSKRPRLSVDDNDWEDLDYAKSKRVLRRSKIKTRNQGRRTVRYHDGDDDRSLENVLDFNGCTL

SEQ ID NO: 838762 - protein, 169 aa, Homo sapiens
GPGGAHGMGGGGGGGGARLRRGDASPVRPRRGLHAPLARSLPPPAPRPAMAEPSSARRPVPLIESELYFLIARYLSAGPCRRAAQVLVQELEQYQLLPKRLDWEGNEHNRSYEELVLSNKHVAPDHLLQICQRIGPMLDKEIPPSISRVTSLLGAGRQSLLRTAKGTLI

SEQ ID NO: 838763 - protein, 2401 aa, Homo sapiens
GPGGAHGIGGGGGGGGARLRRGDASPVRPRRGLHAPLARSLPPPAPRPAMAEPSSARRPVPLIESELYFLIARYLSAGPCRRAAQVLVQELEQYQLLPKRLDWEGNEHNRSYEELVLSNKHVAPDHLLQICQRIGPMLDKEIPPSISRVTSLLGAGRQSLLRTAKDCRHTVWKGSAFAALHRGRPPEMPVNYGSPPNLVEIHRGKQLTGCSTFSTAFPGTMYQHIKMHRRILGHLSAVYCVAFDRTGHRIFTGSDDCLVKIWSTHNGRLLSTLRGHSAEISDMAVNYENTMIAAGSCDKIIRVWCLRTCAPVAVLQGHTGSITSLQFSPMAKGSQRYMVSTGADGTVCFWQWDLESLKFSPRPLKFTEKPRPGVQMLCSSFSVGGMFLATGSTDHVIRMYFLGFEAPEKIAELESHTDKVDSIQFCNNGDRFLSGSRDGTARIWRFEQLEWRSILLDMATRISGDLSSEEERFMKPKVTMIAWNQNDSIVVTAVNDHVLKVWNSYTGQLLHNLMVGNFWYNVTNEDFLKYDCNFEAIKIIYGTSCFSHVNYEMIRNFYNYKLLSNTFLKVYAVTVCIFKFSICNLKTLLNVMTLLNKGHADEVFVLETHPFDSRIMLSAGHDGSIFIWDITKGTKMKHYFNMIEGQGHGAVFDCKFSQDGQHFACTDSHGHLLIFGFGCSKPYEKIPDQMFFHTDYRPLIRDSNNYVLDEQTQQAPHLMPPPFLVDVDGNPHPTKYQRLVPGRENSADEHLIPQLGYVATSDGEVIEQIISLQTNDNDERSPESSILDGMIRQLQQQQDQRMGADQDTIPRGLSNGEETPRRGFRRLSLDIQSPPNIGLRRSGQVEGVRQMHQNAPRSQIATERDLQAWKRRVVVPEVPLGIFRKLEDFRLEKGEEERNLYIIGRKRKTLQLSHKSDSVVLVSQSRQRTCRRKYPNYGRRNRSWRELSSGNESSSSVRHETSCDQSEGSGSSEEDEWRSDRKSESYSESSSDSSSRYSDWTADAGINLQPPLRTSCRRRITRFCSSSEDEISTENLSPPKRRRKRKKENKPKKENLRRMTPAELANMEHLYEFHPPVWITDTTLRKSPFVPQMGDEVIYFRQGHEAYIEAVRRNNIYELNPNKEPWRKMDLRDQELVKIVGIRYEVGPPTLCCLKLAFIDPATGKLMDKSFSIRYHDMPDVIDFLVLRQFYDEARQRNWQSCDRFRSIIDDAWWFGTVLSQEPYQPQYPDSHFQCYIVRWDNTEIEKLSPWDMEPIPDNVDPPEELGASISVTTDELEKLLYKPQAGEWGQKSRDEECDRIISGIDQLLNLDIAAAFAGPVDLCTYPKYCTVVAYPTDLYTIRMRLVNRFYRRLSALVWEVRYIEHNARTFNEPESVIARSAKKITDQLLKFIKNQHCTNISELSNTSENDEQNAEDLDDSDLPKTSSGRRRVHDGKKSIRATNYVESNWKKQCKELVNLIFQCEDSEPFRQPVDLVEYPDYRDIIDTPMDFGTVRETLDAGNYDSPLEFCKDIRLIFSNAKAYTPNKRSKIYSMTLRLSALFEEKMKKISSDFKIGQKFNEKLRRSQRFKQRQNCKGDSQPNKSIRNLKPKRLKSQTKIIPELVGSPTQSTSSRTAYLGTHKTSAGISSGVTSGDSSDSAESSERRKRNRPITNGSTLSESEVEDSLATSLSSSASSSSEESKESSRARESSSRSGLSRSSNLRVTRTRAAQRKTGPVSLANGCGRKATRKRVYLSDSDNNSLETGEILKARAGNNRKVLRKCAAVAANKIKLMSDVEENSSSESVCSGRKLPHRNASAVARKKLLHNSEDEQSLKSEIEEEELKDENQPLPVSSSHTAQSNVDESENRDSESESDLRVARKNWHANGYKSHTPAPSKTKFLKIESSEEDSKSHDSDHACNRTAGPSTSVQKLKAESISEEADSEPGRSGGRKYNTFHKNASFFKKTKILSDSEDSESEEQDREDGKCHKMEMNPISGNLNCDPIAMSQCSSDHGCETDLDSDDDKIEKPNNFMKDSASQDNGLSRKISRKRVCSSDSDSSLQVVKKSSKARTGLLRITRRCAATAANKIKLMSDVEDVSLENVHTRSKNGRKKPLHLACTTAKKKLSDCEGSVHCEVPSEQYACEGKPPDPDSEGSTKVLSQALNGDSDSEDMLNSEHKHRHTNIHKIDAPSKRKSSSVTSSGEDSKSHIPGSETDRTFSSESTLAQKATAENNFEVELNYGLRRWNGRRLRTYGKAPFSKTKVIHDSQETAEKEVKRKRSHPELENVKISETTGNSKFRPDTSSKSSDLGSVTESDIDCTDNTKTKRRKTKGKAKVVRKGKTFTANISKTVRRQRQSKRPRLSVDDNDWEDLDYAKSKRVLRRSKIKTRNQGRRTVRYHDGDDDRSLENVLDFNGCTL

SEQ ID NO: 838764 - protein, 169 aa, Homo sapiens; identical to SEQ ID NO: 838762

SEQ ID NO: 838765 - protein, 1361 aa, Homo sapiens
GPGGAHGIGGGGGGGGARLRRGDASPVRPRRGLHAPLARSLPPPAPRPAMAEPSSARRPVPLIESELYFLIARYLSAGPCRRAAQVLVQELEQYQLLPKRLDWEGNEHNRSYEELVLSNKHVAPDHLLQICQRIGPMLDKEIPPSISRVTSLLGAGRQSLLRTAKDCRHTVWKGSAFAALHRGRPPEMPVNYGSPPNLVEIHRGKQLTGCSTFSTAFPGTMYQHIKMHRRILGHLSAVYCVAFDRTGHRIFTGSDDCLVKIWSTHNGRLLSTLRGHSAEISDMAVNYENTMIAAGSCDKIIRVWCLRTCAPVAVLQGHTGSITSLQFSPMAKGSQRYMVSTGADGTVCFWQWDLESLKFSPRPLKFTEKPRPGVQMLCSSFSVGGMFLATGSTDHVIRMYFLGFEAPEKIAELESHTDKVDSIQFCNNGDRFLSGSRDGTARIWRFEQLEWRSILLDMATRISGDLSSEEERFMKPKVTMIAWNQNDSIVVTAVNDHVLKVWNSYTGQLLHNLMVGNFWYNVTNEDFLKYDCNFEAIKIIYGTSCFSHVNYEMIRNFYNYKLLSNTFLKVYAVTVCIFKFSICNLKTLLNVMTLLNKGHADEVFVLETHPFDSRIMLSAGHDGSIFIWDITKGTKMKHYFNMIEGQGHGAVFDCKFSQDGQHFACTDSHGHLLIFGFGCSKPYEKIPDQMFFHTDYRPLIRDSNNYVLDEQTQQAPHLMPPPFLVDVDGNPHPTKYQRLVPGRENSADEHLIPQLGYVATSDGEVIEQIISLQTNDNDERSPESSILDGMIRQLQQQQDQRMGADQDTIPRGLSNGEETPRRGFRRLSLDIQSPPNIGLRRSGQVEGVRQMHQNAPRSQIATERDLQAWKRRVVVPEVPLGIFRKLEDFRLEKGEEERNLYIIGRKRKTLQLSHKSDSVVLVSQSRQRTCRRKYPNYGRRNRSWRELSSGNESSSSVRHETSCDQSEGSGSSEEDEWRSDRKSESYSESSSDSSSRYSDWTADAGINLQPPLRTSCRRRITRFCSSSEDEISTENLSPPKRRRKRKKENKPKKENLRRMTPAELANMEHLYEFHPPVWITDTTLRKSPFVPQMGDEVIYFRQGHEAYIEAVRRNNIYELNPNKEPWRKMDLRDQELVKIVGIRYEVGPPTLCCLKLAFIDPATGKLMDKSFSIRYHDMPDVIDFLVLRQFYDEARQRNWQSCDRFRSIIDDAWWFGTVLSQEPYQPQYPDSHFQCYIVRWDNTEIEKLSPWDMEPIPDNVDPPEELGASISVTTDELEKLLYKPQAGEWGQKSRDEECDRIISGIDQLLNLDIAAAFAGPVDLCTYPKYCTVVAYPTDLYTIRMRLVNRFYRLVETCFQNV

SEQ ID NO: 838766 - protein, 2369 aa, Homo sapiens
GPGGAHGMGGGGGGGGARLRRGDASPVRPRRGLHAPLARSLPPPAPRPAMAEPSSARRPVPLIESELYFLIARYLSAGPCRRAAQVLVQELEQYQLLPKRLDWEGNEHNRSYEELVLSNKHVAPDHLLQICQRIGPMLDKEIPPSISRVTSLLGAGRQSLLRTAKDCRHTVWKGSAFAALHRGRPPEMPVNYGSPPNLVEIHRGKQLTGCSTFSTAFPGTMYQHIKMHRRILGHLSAVYCVAFDRTGHRIFTGSDDCLVKIWSTHNGRLLSTLRGHSAEISDMAVNYENTMIAAGSCDKIIRVWCLRTCAPVAVLQGHTGSITSLQFSPMAKGSQRYMVSTGADGTVCFWQWDLESLKFSPRPLKFTEKPRPGVQMLCSSFSVGGMFLATGSTDHVIRMYFLGFEAPEKIAELESHTDKVDSIQFCNNGDRFLSGSRDGTARIWRFEQLEWRSILLDMATRISGDLSSEEERFMKPKVTMIAWNQNDSIVVTAVNDHVLKVWNSYTGQLLHNLMGHADEVFVLETHPFDSRIMLSAGHDGSIFIWDITKGTKMKHYFNMIEGQGHGAVFDCKFSQDGQHFACTDSHGHLLIFGFGCSKPYEKIPDQMFFHTDYRPLIRDSNNYVLDEQTQQAPHLMPPPFLVDVDGNPHPTKYQRLVPGRENSADEHLIPQLGYVATSDGEVIEQIISLQTNDNDERSPESSILDGMIRQLQQQQDQRMGADQDTIPRGLSNGEETPRRGFRRLSLDIQSPPNIGLRRSGQVEGVRQMHQNAPRSQIATERDLQAWKRRVVVPEVPLGIFRKLEDFRLEKGEEERNLYIIGRKRKTLQLSHKSDSVVLVSQSRQRTCRRKYPNYGRRNRSWRELSSGNESSSSVRHETSCDQSEGSGSSEEDEWRSDRKSESYSESSSDSSSRYSDWTADAGINLQPPLRTSCRRRITRFCSSSEDEISTENLSPPKRRRKRKKENKPKKENLRRMTPAELANMEHLYEFHPPVWITDTTLRKSPFVPQMGDEVIYFRQGHEAYIEAVRRNNIYELNPNKEPWRKMDLRDQELVKIVGIRYEVGPPTLCCLKLAFIDPATGKLMDKSFSIRYHDMPDVIDFLVLRQFYDEARQRNWQSCDRFRSIIDDAWWFGTVLSQEPYQPQYPDSHFQCYIVRWDNTEIEKLSPWDMEPIPDNVDPPEELGASISVTTDELEKLLYKPQAGEWGQKSRDEECDRIISGIDQLLNLDIAAAFAGPVDLCTYPKYCTVVAYPTDLYTIRMRLVNRFYRRLSALVWEVRYIEHNARTFNEPESVIARSAKKITDQLLKFIKNQHCTNISELSNTSENDEQNAEDLDDSDLPKTSSGRRRVHDGKKSIRATNYVESNWKKQCKELVNLIFQCEDSEPFRQPVDLVEYPDYRDIIDTPMDFGTVRETLDAGNYDSPLEFCKDIRLIFSNAKAYTPNKRSKIYSMTLRLSALFEEKMKKISSDFKIGQKFNEKLRRSQRFKQRQNCKGDSQPNKSIRNLKPKRLKSQTKIIPELVGSPTQSTSSRTAYLGTHKTSAGISSGVTSGDSSDSAESSERRKRNRPITNGSTLSESEVEDSLATSLSSSASSSSEESKESSRARESSSRSGLSRSSNLRVTRTRAAQRKTGPVSLANGCGRKATRKRVYLSDSDNNSLETGEILKARAGNNRKVLRKCAAVAANKIKLMSDVEENSSSESVCSGRKLPHRNASAVARKKLLHNSEDEQSLKSEIEEEELKDENQPLPVSSSHTAQSNVDESENRDSESESDLRVARKNWHANGYKSHTPAPSKTKFLKIESSEEDSKSHDSDHACNRTAGPSTSVQKLKAESISEEADSEPGRSGGRKYNTFHKNASFFKKTKILSDSEDSESEEQDREDGKCHKMEMNPISGNLNCDPIAMSQCSSDHGCETDLDSDDDKIEKPNNFMKDSASQDNGLSRKISRKRVCSSDSDSSLQVVKKSSKARTGLLRITRRCAATAANKIKLMSDVEDVSLENVHTRSKNGRKKPLHLACTTAKKKLSDCEGSVHCEVPSEQYACEGKPPDPDSEGSTKVLSQALNGDSDSEDMLNSEHKHRHTNIHKIDAPSKRKSSSVTSSGEDSKSHIPGSETDRTFSSESTLAQKATAENNFEVELNYGLRRWNGRRLRTYGKAPFSKTKVIHDSQETAEKEVKRKRSHPELENVKISETTGNSKFRPDTSSKSSDLGSVTESDIDCTDNTKTKRRKTKGKAKVVRKEFVPRDREPNTKVRTCMHNQKDAVQMPSETLKAKMVPEKVPRRCATVAANKIKIMSNLKETISGPENVWIRKSSRKLPHRNASAAAKKKLLNVYKEDDTTINSESEKELEDINRKMLFLRGFRSWKENAQ

SEQ ID NO: 838767 - protein, 2318 aa, Homo sapiens; identical to SEQ ID NO: 838761

SEQ ID NO: 838768 - protein, 169 aa, Homo sapiens; identical to SEQ ID NO: 838762

SEQ ID NO: 838769 - protein, 169 aa, Homo sapiens; identical to SEQ ID NO: 838762

SEQ ID NO: 838770 - protein, 392 aa, Homo sapiens
GPGGAHGMGGGGGGGGARLRRGDASPVRPRRGLHAPLARSLPPPAPRPAMAEPSSARRPVPLIESELYFLIARYLSAGPCRRAAQVLVQELEQYQLLPKRLDWEGNEHNRSYEELVLSNKHVAPDHLLQICQRIGPMLDKEIPPSISRVTSLLGAGRQSLLRTAKDCRHTVWKGSAFAALHRGRPPEMPVNYGSPPNLVEIHRGKQLTGCSTFSTAFPGTMYQHIKMHRRILGHLSAVYCVAFDRTGHRIFTGSDDCLVKIWSTHNGRLLSTLRGHSAEISDMAVNYENTMIAAGSCDKIIRVWCLRTCAPVAVLQGHTGSITSLQFSPMAKGSQRYMVSTGADGTVCFWQWDLESLKFSPRPLKFTEKPRPGVQMLCSSFSVGKNFFTFFS

SEQ ID NO: 838771 - protein, 1446 aa, Homo sapiens
PLSPSTPTRRPPFTRGRLRLLSFRSMEEARLVPTVKEKYPVLKDVMDFIKDQSLSHRSVVKVLSLRKAQAQSILEVLKITQHCAESLGQPHCFHPPFILFLLELLTCQKDFTNYFGHLEGCGADLHKEIRDTYYQLVLFLVKAVKGFSSLNDRSLLPALSCVQTALLHLLDMGWEPNDLAFFVDIQLPDLLMKMSQENISVHDSVISQWSEEDELADAKQNSEWMDECQDGMFEAWYEKIAQEDPEKQRKMHMFIARYCDLLNVDISCDGCDEIAPWHRYRCLQCSDMDLCKTCFLGGVKPEGHGDDHEMVNMEFTCDHCQGLIIGRRMNCNVCDDFDLCYGCYAAKKYSYGHLPTHSITAHPMVTIRISDRQRLIQPYIHNYSWLLFAALALYSAHLASAEDVDGEKLDPQTRSSATTLRSQCMQLVGDCLMKAHQGKGLKALALLGVLPDGDSSLEDQALPVTVPTGASEEQLEKKAVQGAELSEAGNGKRAVHEEIRPVDFKQRNKADKGVSLSKDPSCQTQISDSPADASPPTGLPDAEDSEVSSQKPIEEKAVTPSPEQVFAECSQKRILGLLAAMLPPLKSGPTVPLIDLEHVLPLMFQVVISNAGHLNETYHLTLGLLGQLIIRLLPAEVDAAVIKVLSAKHNLFAAGDSSIVPDGWKTTHLLFSLGAVCLDSRVGLDWACSMAEILRSLNSAPLWRDVIATFTDHCIKQLPFQLKHTNIFTLLVLVGFPQVLCVGTRCVYMDNANEPHNVIILKHFTEKNRAVIVDVKTRKRKTVKDYQLVQKGGGQECGDSRAQLSQYSQHFAFIASHLLQSSMDSHCPEAVEATWVLSLALKGLYKTLKAHGFEEIRATFLQTDLLKLLVKKCSKGTGFSKTWLLRDLEILSIMLYSSKKEINALAEHGDLELDERGDREEEVERPVSSPGDPEQKKLDPLEGLDEPTRICFLMAHDALNAPLHILRAIYELQMKKTDYFFLEVQKRFDGDELTTDERIRSLAQRWQPSKSLRLEEQSAKAVDTDMIILPCLSRPARCDQATAESNPVTQKLISSTESELQQSYAKQRRSKSAALLHKELNCKSKRAVRDYLFRVNEATAVLYARHVLASLLAEWPSHVPVSEDILELSGPAHMTYILDMFMQLEEKHEWEKILQKVLQGCREDMLGTMALAACQFMEEPGMEVQVRESKHPYNNNTNFEDKVHIPGAIYLSIKFDSQCNTEEGCDELAMSSSSDFQQDRHSFSGSQQKWKDFELPGDTLYYRFTSDMSNTEWGYRFTVTAGHLGRFQTGFEILKQMLSEERVVPHLPLAKIWEWLVGVACRQTGHQRLKAIHLLLRIVRCCGHSDLCDLALLKPLWQLFTHMEYGLFEDVTQPGILLPLHRALTELFFVTENRAQELGVLQDYLLALTTDDHLLRCAAQALQNIAAISLAINYPNKATRLWNVEC

SEQ ID NO: 838772 - protein, 1403 aa, Homo sapiens
PLSPSTPTRRPPFTRGRLRLLSFRSMEEARLVPTVKEKYPVLKDVMDFIKDQSLSHRSVVKVLSLRKAQAQSILEVLKITQHCAESLGQPHCFHPPFILFLLELLTCQKDFTNYFGHLEGCGADLHKEIRDTYYQLVLFLVKAVKGFSSLNDRSLLPALSCVQTALLHLLDMGWEPNDLAFFVDIQLPDLLMKMSQENISVHDSVISMHMFIARYCDLLNVDISCDGCDEIAPWHRYRCLQCSDMDLCKTCFLGGVKPEGHGDDHEMVNMEFTCDHCQGLIIGRRMNCNVCDDFDLCYGCYAAKKYSYGHLPTHSITAHPMVTIRISDRQRLIQPYIHNYSWLLFAALALYSAHLASAEDVDGEKLDPQTRSSATTLRSQCMQLVGDCLMKAHQGKGLKALALLGVLPDGDSSLEDQALPVTVPTGASEEQLEKKAVQGAELSEAGNGKRAVHEEIRPVDFKQRNKADKGVSLSKDPSCQTQISDSPADASPPTGLPDAEDSEVSSQKPIEEKAVTPSPEQVFAECSQKRILGLLAAMLPPLKSGPTVPLIDLEHVLPLMFQVVISNAGHLNETYHLTLGLLGQLIIRLLPAEVDAAVIKVLSAKHNLFAAGDSSIVPDGWKTTHLLFSLGAVCLDSRVGLDWACSMAEILRSLNSAPLWRDVIATFTDHCIKQLPFQLKHTNIFTLLVLVGFPQVLCVGTRCVYMDNANEPHNVIILKHFTEKNRAVIVDVKTRKRKTVKDYQLVQKGGGQECGDSRAQLSQYSQHFAFIASHLLQSSMDSHCPEAVEATWVLSLALKGLYKTLKAHGFEEIRATFLQTDLLKLLVKKCSKGTGFSKTWLLRDLEILSIMLYSSKKEINALAEHGDLELDERGDREEEVERPVSSPGDPEQKKLDPLEGLDEPTRICFLMAHDALNAPLHILRAIYELQMKKTDYFFLEVQKRFDGDELTTDERIRSLAQRWQPSKSLRLEEQSAKAVDTDMIILPCLSRPARCDQATAESNPVTQKLISSTESELQQSYAKQRRSKSAALLHKELNCKSKRAVRDYLFRVNEATAVLYARHVLASLLAEWPSHVPVSEDILELSGPAHMTYILDMFMQLEEKHEWEKILQKVLQGCREDMLGTMALAACQFMEEPGMEVQVRESKHPYNNNTNFEDKVHIPGAIYLSIKFDSQCNTEEGCDELAMSSSSDFQQDRHSFSGSQQKWKDFELPGDTLYYRFTSDMSNTEWGYRFTVTAGHLGRFQTGFEILKQMLSEERVVPHLPLAKIWEWLVGVACRQTGHQRLKAIHLLLRIVRCCGHSDLCDLALLKPLWQLFTHMEYGLFEDVTQPGILLPLHRALTELFFVTENRAQELGVLQDYLLALTTDDHLLRCAAQALQNIAAISLAINYPNKATRLWNVEC

SEQ ID NO: 838773 - protein, 1348 aa, Homo sapiens
MFWQLSESVISSVSSYFGHLEGCGADLHKEIRDTYYQLVLFLVKAVKGFSSLNDRSLLPALSCVQTALLHLLDMGWEPNDLAFFVDIQLPDLLMKMSQENISVHDSVISQWSEEDELADAKQNSEWMDECQDGMFEAWYEKIAQEDPEKQRKMHMFIARYCDLLNVDISCDGCDEIAPWHRYRCLQCSDMDLCKTCFLGGVKPEGHGDDHEMVNMEFTCDHCQGLIIGRRMNCNVCDDFDLCYGCYAAKKYSYGHLPTHSITAHPMVTIRISDRQRLIQPYIHNYSWLLFAALALYSAHLASAEDVDGEKLDPQTRSSATTLRSQCMQLVGDCLMKAHQGKGLKALALLGVLPDGDSSLEDQALPVTVPTGASEEQLEKKAVQGAELSEAGNGKRAVHEEIRPVDFKQRNKADKGVSLSKDPSCQTQISDSPADASPPTGLPDAEDSEVSSQKPIEEKAVTPSPEQVFAECSQKRILGLLAAMLPPLKSGPTVPLIDLEHVLPLMFQVVISNAGHLNETYHLTLGLLGQLIIRLLPAEVDAAVIKVLSAKHNLFAAGDSSIVPDGWKTTHLLFSLGAVCLDSRVGLDWACSMAEILRSLNSAPLWRDVIATFTDHCIKQLPFQLKHTNIFTLLVLVGFPQVLCVGTRCVYMDNANEPHNVIILKHFTEKNRAVIVDVKTRKRKTVKDYQLVQKGGGQECGDSRAQLSQYSQHFAFIASHLLQSSMDSHCPEAVEATWVLSLALKGLYKTLKAHGFEEIRATFLQTDLLKLLVKKCSKGTGFSKTWLLRDLEILSIMLYSSKKEINALAEHGDLELDERGDREEEVERPVSSPGDPEQKKLDPLEGLDEPTRICFLMAHDALNAPLHILRAIYELQMKKTDYFFLEVQKRFDGDELTTDERIRSLAQRWQPSKSLRLEEQSAKAVDTDMIILPCLSRPARCDQATAESNPVTQKLISSTESELQQSYAKQRRSKSAALLHKELNCKSKRAVRDYLFRVNEATAVLYARHVLASLLAEWPSHVPVSEDILELSGPAHMTYILDMFMQLEEKHEWEKILQKVLQGCREDMLGTMALAACQFMEEPGMEVQVRESKHPYNNNTNFEDKVHIPGAIYLSIKFDSQCNTEEGCDELAMSSSSDFQQDRHSFSGSQQKWKDFELPGDTLYYRFTSDMSNTEWGYRFTVTAGHLGRFQTGFEILKQMLSEERVVPHLPLAKIWEWLVGVACRQTGHQRLKAIHLLLRIVRCCGHSDLCDLALLKPLWQLFTHMEYGLFEDVTQPGILLPLHRALTELFFVTENRAQELGVLQDYLLALTTDDHLLRCAAQALQNIAAISLAINYPNKATRLWNVEC

SEQ ID NO: 838774 - protein, 1427 aa, Homo sapiens
PLSPSTPTRRPPFTRGRLRLLSFRSMEEARLVPTVKEKYPVLKDVMDFIKDQSLSHRSVVKVLSLRKAQAQSILEVLKITQHCAESLGQPHCFHPPFILFLLELLTCQKDFTNYFGHLEGCGADLHKEIRDTYYQLVLFLVKAVKGFSSLNDRSLLPALSCVQTALLHLLDMGWEPNDLAFFVDIQLPDLLMKMSQENISVHDSVISQWSEEDELADAKQNSEWMDECQDGMFEAWYEKIAQEDPEKQRKMHMFIARYCDLLNVDISCDGCDEIAPWHRYRCLQCSDMDLCKTCFLGGVKPEGHGDDHEMVNMEFTCDHCQGLIIGRRMNCNVCDDFDLCYGCYAAKKYSYGHLPTHSITAHPMVTIRISDRQRLIQPYIHNYSWLLFAALALYSAHLASAEDVDGEKLDPQTRSSATTLRSQCMQLVGDCLMKAHQGKGLKALALLGVLPDGDSSLEDQALPVTVPTGASEEQLEKKAVQGAELSEAGNGKRAVHEEIRPVDFKQRNKADKGVSLSKDPSCQTQISDSPADASPPTGLPDAEDSEVSSQKPIEEKAVTPSPEQVFAECSQKRILGLLAAMLPPLKSGPTVPLIDLEHVLPLMFQVVISNAGHLNETYHLTLGLLGQLIIRLLPAEVDAAVIKVLSAKHNLFAAGDSSIVPDGWKTTHLLFSLGAVCLDSRVGLDWACSMAEILRSLNSAPLWRDVIATFTDHCIKQLPFQLKHTNIFTLLVLVGFPQVLCVGTRCVYMDNANEPHNVIILKHFTEKNRAVIVDVKTRKRKTVKDYQLVQKGGGQECGDSRAQLSQYSQHFAFIASHLLQSSMDSHCPEAVEATWVLSLALKGLYKTLKAHGFEEIRATFLQTDLLKLLVKKCSKGTGFSKTWLLRDLEILSIMLYSSKKEINALAEHGDLELDERGDREEEVERPVSSPGDPEQKKLDPLEGLDEPTRICFLMAHDALNAPLHILRAIYELQMKKTDYFFLEVQKRFDGDELTTDERIRSLAQRWQPSKSLRLEEQSAKAVDTDMIILPCLSRPARCDQATAESNPVTQKLISSTESELQQSYAKQRRSKSAALLHKELNCKSKRAVRDYLFRVNEATAVLYARHVLASLLAEWPSHVPVSEDILELSGPAHMTYILDMFMQLEEKHEWEKILQKVLQGCREDMLGTMALAACQFMEEPGMEVQVRESKHPYNNNTNFEDKVHIPGAIYLSIKFDSQCNTEEGCDELAMSSSSDFQQDRHSFSGSQQKWKDFELPGDTLYYRFTSDMSNTEWGYRFTVTAGHLGRFQTGFEILKQMLSEERVVPHLPLAKIWEWLVGVACRQTGHQRLKAIHLLLRIVRCCGHSDLCDLALLKPLWQLFTHMEYGLFEDVTQPGILLPLHRALTELFFVTENRAQVRPEVWAGSPVPPCAFAPSATQGRSCCLIRA

SEQ ID NO: 838775 - protein, 754 aa, Homo sapiens
MELLPSSRVGLDWACSMAEILRSLNSAPLWRDVIATFTDHCIKQLPFQLKHTNIFTLLVLVGFPQVLCVGTRCVYMDNANEPHNVIILKHFTEKNRAVIVDVKTRKRKTVKDYQLVQKGGGQECGDSRAQLSQYSQHFAFIASHLLQSSMDSHCPEAVEATWVLSLALKGLYKTLKAHGFEEIRATFLQTDLLKLLVKKCSKGTGFSKTWLLRDLEILSIMLYSSKKEINALAEHGDLELDERGDREEEVERPVSSPGDPEQKKLDPLEGLDEPTRICFLMAHDALNAPLHILRAIYELQMKKTDYFFLEVQKRFDGDELTTDERIRSLAQRWQPSKSLRLEEQSAKAVDTDMIILPCLSRPARCDQATAESNPVTQKLISSTESELQQSYAKQRRSKSAALLHKELNCKSKRAVRDYLFRVNEATAVLYARHVLASLLAEWPSHVPVSEDILELSGPAHMTYILDMFMQLEEKHEWEKILQKVLQGCREDMLGTMALAACQFMEEPGMEVQVRESKHPYNNNTNFEDKVHIPGAIYLSIKFDSQCNTEEGCDELAMSSSSDFQQDRHSFSGSQQKWKDFELPGDTLYYRFTSDMSNTEWGYRFTVTAGHLGRFQTGFEILKQMLSEERVVPHLPLAKIWEWLVGVACRQTGHQRLKAIHLLLRIVRCCGHSDLCDLALLKPLWQLFTHMEYGLFEDVTQPGILLPLHRALTELFFVTENRAQVRPEVWAGSPVPPCAFAPSATQGRSCCLIRA

SEQ ID NO: 838776 - protein, 909 aa, Homo sapiens
PLSPSTPTRRPPFTRGRLRLLSFRSMEEARLVPTVKEKYPVLKDVMDFIKDQSLSHRSVVKVLSLRKAQAQSILEVLKITQHCAESLGQPHCFHPPFILFLLELLTCQKDFTNYFGHLEGCGADLHKEIRDTYYQLVLFLVKAVKGFSSLNDRSLLPALSCVQTALLHLLDMGWEPNDLAFFVDIQLPDLLMKMSQENISVHDSVISQWSEEDELADAKQNSEWMDECQDGMFEAWYEKIAQEDPEKQRKMHMFIARYCDLLNVDISCDGCDEIAPWHRYRCLQCSDMDLCKTCFLGGVKPEGHGDDHEMVNMEFTCDHCQGLIIGRRMNCNVCDDFDLCYGCYAAKKYSYGHLPTHSITAHPMVTIRISDRQRLIQPYIHNYSWLLFAALALYSAHLASAEDVDGEKLDPQTRSSATTLRSQCMQLVGDCLMKAHQGKGLKALALLGVLPDGDSSLEDQALPVTVPTGASEEQLEKKAVQGAELSEAGNGKRAVHEEIRPVDFKQRNKADKGVSLSKDPSCQTQISDSPADASPPTGLPDAEDSEVSSQKPIEEKAVTPSPEQVFAECSQKRILGLLAAMLPPLKSGPTVPLIDLEHVLPLMFQVVISNAGHLNETYHLTLGLLGQLIIRLLPAEVDAAVIKVLSAKHNLFAAGDSSIVPDGWKTTHLLFSLGAVCLDSRVGLDWACSMAEILRSLNSAPLWRDVIATFTDHCIKQLPFQLKHTNIFTLLVLVGFPQVLCVGTRCVYMDNANEPHNVIILKHFTEKNRAVIVDVKTRKRKTVKDYQLVQKGGGQECGDSRAQLSQYSQHFAFIASHLLQSSMDSHCPEAVEATWVLSLALKGLYKTLKAHGFEEIRATFLQTDLLKLLVKKCSKGTGFSKTWLLRDLEVRDERDSCSSFLVQMCWPRS

SEQ ID NO: 838777 - protein, 1427 aa, Homo sapiens; identical to SEQ ID NO: 838774

SEQ ID NO: 838778 - protein, 77 aa, Homo sapiens
PPPSCCPDPEGLTGLASPPGHLSALLALFSLLPLVPSTGCSFPVSALPFPTCIFALFSPGPEEAKPAEQRWKHVPTL

SEQ ID NO: 838779 - protein, 1247 aa, Homo sapiens
MSKMIGSMSEALVEERDFDGQKGESRKDKIFQKLKTQIGLEPEQILQKQRTMHMFIARYCDLLNVDISCDGCDEIAPWHRYRCLQCSDMDLCKTCFLGGVKPEGHGDDHEMVNMEFTCDHCQGLIIGRRMNCNVCDDFDLCYGCYAAKKYSYGHLPTHSITAHPMVTIRISDRQRLIQPYIHNYSWLLFAALALYSAHLASAEDVDGEKLDPQTRSSATTLRSQCMQLVGDCLMKAHQGKGLKALALLGVLPDGDSSLEDQALPVTVPTGASEEQLEKKAVQGAELSEAGNGKRAVHEEIRPVDFKQRNKADKGVSLSKDPSCQTQISDSPADASPPTGLPDAEDSEVSSQKPIEEKAVTPSPEQVFAECSQKRILGLLAAMLPPLKSGPTVPLIDLEHVLPLMFQVVISNAGHLNETYHLTLGLLGQLIIRLLPAEVDAAVIKVLSAKHNLFAAGDSSIVPDGWKTTHLLFSLGAVCLDSRVGLDWACSMAEILRSLNSAPLWRDVIATFTDHCIKQLPFQLKHTNIFTLLVLVGFPQVLCVGTRCVYMDNANEPHNVIILKHFTEKNRAVIVDVKTRKRKTVKDYQLVQKGGGQECGDSRAQLSQYSQHFAFIASHLLQSSMDSHCPEAVEATWVLSLALKGLYKTLKAHGFEEIRATFLQTDLLKLLVKKCSKGTGFSKTWLLRDLEILSIMLYSSKKEINALAEHGDLELDERGDREEEVERPVSSPGDPEQKKLDPLEGLDEPTRICFLMAHDALNAPLHILRAIYELQMKKTDYFFLEVQKRFDGDELTTDERIRSLAQRWQPSKSLRLEEQSAKAVDTDMIILPCLSRPARCDQATAESNPVTQKLISSTESELQQSYAKQRRSKSAALLHKELNCKSKRAVRDYLFRVNEATAVLYARHVLASLLAEWPSHVPVSEDILELSGPAHMTYILDMFMQLEEKHEWEKILQKVLQGCREDMLGTMALAACQFMEEPGMEVQVRESKHPYNNNTNFEDKVHIPGAIYLSIKFDSQCNTEEGCDELAMSSSSDFQQDRHSFSGSQQKWKDFELPGDTLYYRFTSDMSNTEWGYRFTVTAGHLGRFQTGFEILKQMLSEERVVPHLPLAKIWEWLVGVACRQTGHQRLKAIHLLLRIVRCCGHSDLCDLALLKPLWQLFTHMEYGLFEDVTQPGILLPLHRALTELFFVTENRAQELGVLQDYLLALTTDDHLLRCAAQALQNIAAISLAINYPNKATRLWNVEC

SEQ ID NO: 838780 - protein, 169 aa, Homo sapiens
MGLVLPWSADDDSPSRATLGNMKQVWRVGCVPALVGPVGLEHAFRGSVWAEARPTTQCQSQRRGPTTKAKLDQVSIAMAQCAPWPLKIPLCRVCRDLDCKGPSLQVWKHLPIRALSPSGSGLQGAAGFTALQLGSQLSPRVLVEPSRGGWRVGFKGDGNTWGRSWNLVA

SEQ ID NO: 838781 - protein, 1427 aa, Homo sapiens; identical to SEQ ID NO: 838774

SEQ ID NO: 838782 - protein, 1157 aa, Homo sapiens
PLSPSTPTRRPPFTRGRLRLLSFRSMEEARLVPTVKEKYPVLKDVMDFIKDQSLSHRSVVKVLSLRKAQAQSILEVLKITQHCAESLGQPHCFHPPFILFLLELLTCQKDFTNYFGHLEGCGADLHKEIRDTYYQLVLFLVKAVKGFSSLNDRSLLPALSCVQTALLHLLDMGWEPNDLAFFVDIQLPDLLMKMSQENISVHDSVISQWSEEDELADAKQNSEWMDECQDGMFEAWYEKIAQEDPEKQRKMHMFIARYCDLLNVDISCDGCDEIAPWHRYRCLQCSDMDLCKTCFLGGVKPEGHGDDHEMVNMEFTCDHCQGLIIGRRMNCNVCDDFDLCYGCYAAKKYSYGHLPTHSITAHPMVTIRISDRQRLIQPYIHNYSWLLFAALALYSAHLASAEDVDGEKLDPQTRSSATTLRSQCMQLVGDCLMKAHQGKGLKALALLGVLPDGDSSLEDQALPVTVPTGASEEQLEKKAVQGAELSEAGNGKRAVHEEIRPVDFKQRNKADKGVSLSKDPSCQTQISDSPADASPPTGLPDAEDSEVSSQKPIEEKAVTPSPEQVFAECSQKRILGLLAAMLPPLKSGPTVPLIDLEHVLPLMFQVVISNAGHLNETYHLTLGLLGQLIIRLLPAEVDAAVIKVLSAKHNLFAAGDSSIVPDGWKTTHLLFSLGAVCLDSRVGLDWACSMAEILRSLNSAPLWRDVIATFTDHCIKQLPFQLKHTNIFTLLVLVGFPQVLCVGTRCVYMDNANEPHNVIILKHFTEKNRAVIVDVKTRKRKTVKDYQLVQKGGGQECGDSRAQLSQYSQHFAFIASHLLQSSMDSHCPEAVEATWVLSLALKGLYKTLKAHGFEEIRATFLQTDLLKLLVKKCSKGTGFSKTWLLRDLEILSIMLYSSKKEINALAEHGDLELDERGDREEEVERPVSSPGDPEQKKLDPLEGLDEPTRICFLMAHDALNAPLHILRAIYELQMKKTDYFFLEVQKRFDGDELTTDERIRSLAQRWQPSKSLRLEEQSAKAVDTDMIILPCLSRPARCDQATAESNPVTQKLISSTESELQQSYAKQRRSKSAALLHKELNCKSKRAVRDYLFRVNEATAVLYARHVLASLLAEWPSHVPVSEDIQGHGPQHVSRQPWSTFCRIFSHSCFSSSCMNI

SEQ ID NO: 838783 - protein, 862 aa, Homo sapiens
PLSPSTPTRRPPFTRGRLRLLSFRSMEEARLVPTVKEKYPVLKDVMDFIKDQSLSHRSVVKVLSLRKAQAQSILEVLKITQHCAESLGQPHCFHPPFILFLLELLTCQKDFTNYFGHLEGCGADLHKEIRDTYYQLVLFLVKAVKGFSSLNDRSLLPALSCVQTALLHLLDMGWEPNDLAFFVDIQLPDLLMKMSQENISVHDSVISQWSEEDELADAKQNSEWMDECQDGMFEAWYEKIAQEDPEKQRKMHMFIARYCDLLNVDISCDGCDEIAPWHRYRCLQCSDMDLCKTCFLGGVKPEGHGDDHEMVNMEFTCDHCQGLIIGRRMNCNVCDDFDLCYGCYAAKKYSYGHLPTHSITAHPMVTIRISDRQRLIQPYIHNYSWLLFAALALYSAHLASAEDVDGEKLDPQTRSSATTLRSQCMQLVGDCLMKAHQGKGLKALALLGVLPDGDSSLEDQALPVTVPTGASEEQLEKKAVQGAELSEAGNGKRAVHEEIRPVDFKQRNKADKGVSLSKDPSCQTQISDSPADASPPTGLPDAEDSEVSSQKPIEEKAVTPSPEQVFAECSQKRILGLLAAMLPPLKSGPTVPLIDLEHVLPLMFQVVISNAGHLNETYHLTLGLLGQLIIRLLPAEVDAAVIKVLSAKHNLFAAGDSSIVPDGWKTTHLLFSLGAVCLDSRVGLDWACSMAEILRSLNSAPLWRDVIATFTDHCIKQLPFQLKHTNIFTLLVLVGFPQVLCVGTRCVYMDNANEPHNVIILKHFTEKNRAVIVDVKTRKRKTVKDYQLVQKGGGQECGDSRAQLSQYSQHFAFIASHLLQSSMDSHCPEAVEATWVLSLALKGLYKTLKVMGSFSSWQWIWL

SEQ ID NO: 838784 - protein, 158 aa, Homo sapiens
MFWQLSESVISSVSSYFGHLEGCGADLHKEIRDTYYQLVLFLVKAVKGFSSLNDRSLLPALSCVQTALLHLLDMGWEPNDLAFFVDIQLPDLLMKMSQENISVHDSVISQWSEEDELADAKQNSEWMDECQDGMFEAWYEKIAQEDPEKQRKGCLNTG

SEQ ID NO: 838785 - protein, 482 aa, Homo sapiens
GGGQTCTGPGKMAAMETETAPLTLESLPTDPLLLILSFLDYRDLINCCYVSRRLSQLSSHDPLWRRHCKKYWLISEEEKTQKNQCWKSLFIDTYSDVGRYIDHYAAIKKAWDDLKKYLEPRCPRMVLSLKEGAREEDLDAVEAQIGCKLPDDYRCSYRIHNGQKLVVPGLLGSMALSNHYRSEDLLDVDTAAGGFQQRQGLKYCLPLTFCIHTGLSQYIAVEAAEGRNKNEVFYQCPDQMARNPAAIDMFIIGATFTDWFTSYVKNVVSGGFPIIRDQIFRYVHDPECVATTGDITVSVSTSFLPELSSVHPPHYFFTYRIRIEMSKDALPEKACQLDSRYWRITNAKGDVEEVQGPGVVGEFPIISPGRVYEYTSCTTFSTTSGYMEGYYTFHFLYFKDKIFNVAIPRFHMACPTFRVSIARLEMGPDEYEEMEEEEEEEEEEDEDDDSADMDESDEDDEEERRRRVFDVPIRRRRCSRLF

SEQ ID NO: 838786 - protein, 426 aa, Homo sapiens
GGGQTCTGPGKMAAMETETAPLTLESLPTDPLLLILSFLDYRDLINCCYVSRRLSQLSSHDPLWRRHCKKYWLISEEEKTQKNQCWKSLFIDTYSDVGRYIDHYAAIKKAWDDLKKYLEPRCPRMVLSLKEGAREEDLDAVEAQIGCKLPDDYRCSYRIHNGQKLVVPGLLGSMALSNHYRSEDLLDVDTAAGGFQQRQGLKYCLPLTFCIHTGLSQYIAVEAAEGRNKNEVFYQCPDQMARNPAAIDMFIIGATFTDWFTSYVKNVVSGGFPIIRDQIFRYVHDPECVATTGDITVSVSTSFLPELSSVHPPHYFFTYRIRIEMSKDALPEKACQLDSRYWRITNAKGDVEEVQGPGVVGEFPIISPGRVYEYTSCTTFSTTSGYMEGYYTFHFLYFKDKIFNVAIPRFHMACPTFRVSIARLVS

SEQ ID NO: 838787 - protein, 309 aa, Homo sapiens
MALSNHYRSEDLLDVDTAAGGFQQRQGLKYCLPLTFCIHTGLSQYIAVEAAEGRNKNEVFYQCPDQMARNPAAIDMFIIGATFTDWFTSYVKNVVSGGFPIIRDQIFRYVHDPECVATTGDITVSVSTSFLPELSSVHPPHYFFTYRIRIEMSKDALPEKACQLDSRYWRITNAKGDVEEVQGPGVVGEFPIISPGRVYEYTSCTTFSTTSGYMEGYYTFHFLYFKDKIFNVAIPRFHMACPTFRVSIARLEMGPDEYEEMEEEEEEEEEEDEDDDSADMDESDEDDEEERRRRVFDVPIRRRRCSRLF

SEQ ID NO: 838788 - protein, 225 aa, Homo sapiens
STLYTSSRLYIPGGFPIIRDQIFRYVHDPECVATTGDITVSVSTSFLPELSSVHPPHYFFTYRIRIEMSKDALPEKACQLDSRYWRITNAKGDVEEVQGPGVVGEFPIISPGRVYEYTSCTTFSTTSGYMEGYYTFHFLYFKDKIFNVAIPRFHMACPTFRVSIARLEMGPDEYEEMEEEEEEEEEEDEDDDSADMDESDEDDEEERRRRVFDVPIRRRRCSRLF

SEQ ID NO: 838789 - protein, 426 aa, Homo sapiens
GGGQTCTGPGKMAAMETETAPLTLESLPTDPLLLILSFLDYRDLINCCYVSRRLSQLSSHDPLWRRHCKKYWLISEEEKTQKNQCWKSLFIDTYSDVGRYIDHYAAIKKAWDDLKKYLEPRCPRMVLSLKEGAREEDLDAVEAQIGCKLPDDYRCSYRIHNGQKLVVPGLLGSMALSNHYRSEDLLDVDTAAGGFQQRQGLKYCLPLTFCIHTGLSQYIAVEAAEGRNKNEVFYQCPDQMARNPAAIDMFIIGATFTDWFTSYVKNVVSGGFPIIRDQIFRYVHDPECVATTGDITVSVSTSFLPELSSVHPPHYFFTYRIRIEMSKDALPEKACQLDSRYWRITNAKGDVEEVQGPGVVGEFPIISPGRVYEYTSCTTFSTTSGYMEGYYTFHFLYFKDKIFNVAIPRFHMACPTFRVSIARLFW

SEQ ID NO: 838790 - protein, 67 aa, Homo sapiens
YQKIVFSFKEMGPDEYEEMEEEEEEEEEEDEDDDSADMDESDEDDEEERRRRVFDVPIRRRRCSRLF

SEQ ID NO: 838791 - protein, 426 aa, Homo sapiens; identical to SEQ ID NO: 838789

SEQ ID NO: 838792 - protein, 482 aa, Homo sapiens; identical to SEQ ID NO: 838785

SEQ ID NO: 838793 - protein, 148 aa, Homo sapiens
GGGQTCTGPGKMAAMETETAPLTLESLPTDPLLLILSFLDYRDLINCCYVSRRLSQLSSHDPLWRRHCKKYWLISEEEKTQKNQCWKSLFIDTYSDVGRYIDHYAAIKKAWDDLKKYLEPRCPRMVLSLKGACSRASPRCLRMPPSSA

SEQ ID NO: 838794 - protein, 158 aa, Homo sapiens
MSKDALPEKACQLDSRYWRITNAKGDVEEVQGPGVVGEFPIISPGRVYEYTSCTTFSTTSGYMEGYYTFHFLYFKDKIFNVAIPRFHMACPTFRVSIARLEMGPDEYEEMEEEEEEEEEEDEDDDSADMDESDEDDEEERRRRVFDVPIRRRRCSRLF

SEQ ID NO: 838795 - protein, 482 aa, Homo sapiens; identical to SEQ ID NO: 838785

SEQ ID NO: 838796 - protein, 426 aa, Homo sapiens; identical to SEQ ID NO: 838786

SEQ ID NO: 838797 - protein, 842 aa, Homo sapiens
MSRPLSDQEKRKQISVRGLAGVENVTELKKNFNRHLHFTLVKDRNVATPRDYYFALAHTVRDHLVGRWIRTQQHYYEKDPKRIYYLSLEFYMGRTLQNTMVNLALENACDEATYQLGLDMEELEEIEEDAGLGNGGLGRLAACFLDSMATLGLAAYGYGIRYEFGIFNQKISGGWQMEEADDWLRYGNPWEKARPEFTLPVHFYGHVEHTSQGAKWVDTQVVLAMPYDTPVPGYRNNVVNTMRLWSAKAPNDFNLKDFNVGGYIQAVLDRNLAENISRVLYPNDNFFEGKELRLKQEYFVVAATLQDIIRRFKSSKFGCRDPVRTNFDAFPDKVAIQLNDTHPSLAIPELMRILVDLERMDWDKAWDVTVRTCAYTNHTVLPEALERWPVHLLETLLPRHLQIIYEINQRFLNRVAAAFPGDVDRLRRMSLVEEGAVKRINMAHLCIAGSHAVNGVARIHSEILKKTIFKDFYELEPHKFQNKTNGITPRRWLVLCNPGLAEVIAERIGEDFISDLDQLRKLLSFVDDEAFIRDVAKVKQENKLKFAAYLEREYKVHINPNSLFDIQVKRIHEYKRQLLNCLHVITLYNRIKREPNKFFVPRTVMIGGKAAPGYHMAKMIIRLVTAIGDVVNHDPAVGDRLRVIFLENYRVSLAEKVIPAADLSEQISTAGTEASGTGNMKFMLNGALTIGTMDGANVEMAEEAGEENFFIFGMRVEDVDKLDQRGYNAQEYYDRIPELRQVIEQLSSGFFSPKQPDLFKDIVNMLMHHDRFKVFADYEDYIKCQEKVSALYKNPREWTRMVIRNIATSGKFSSDRTIAQYAREIWGVEPSRQRLPAPDEAI

SEQ ID NO: 838798 - protein, 842 aa, Homo sapiens; identical to SEQ ID NO: 838797

SEQ ID NO: 838799 - protein, 833 aa, Homo sapiens
MSRPLSDQEKRKQISVRGLAGVENVTELKKNFNRHLHFTLVKDRNVATPRDYYFALAHTVRDHLVGRWIRTQQHYYEKDPKRIYYLSLEFYMGRTLQNTMVNLALENACDEATYQLGLDMEELEEIEEDAGLGNGGLGRLAACFLDSMATLGLAAYGYGIRYEFGIFNQKISGGWQMEEADDWLRYGNPWEKARPEFTLPVHFYGHVEHTSQGAKWVDTQVVLAMPYDTPVPGYRNNVVNTMRLWSAKAPNDFNLKDFNVGGYIQAVLDRNLAENISRVLYPNDNFFEGKELRLKQEYFVVAATLQDIIRRFKSSKFGCRDPVRTNFDAFPDKVAIQLNDTHPSLAIPELMRILVDLERMDWDKAWDVTVRTCAYTNHTVLPEALERWPVHLLETLLPRHLQIIYEINQRFLNRVAAAFPGDVDRLRRMSLVEEGAVKRINMAHLCIAGSHAVNGVARIHSEILKKTIFKDFYELEPHKFQNKTNGITPRRWLVLCNPGLAEVIAERIGEDFISDLDQLRKLLSFVDDEAFIRDVAKVKQENKLKFAAYLEREYKVHINPNSLFDIQVKRIHEYKRQLLNCLHVITLYNRIKREPNKFFVPRTVMIGGKAAPGYHMAKMIIRLVTAIVGDRLRVIFLENYRVSLAEKVIPAADLSEQISTAGTEASGTGNMKFMLNGALTIGTMDGANVEMAEEAGEENFFIFGMRVEDVDKLDQRGYNAQEYYDRIPELRQVIEQLSSGFFSPKQPDLFKDIVNMLMHHDRFKVFADYEDYIKCQEKVSALYKNPREWTRMVIRNIATSGKFSSDRTIAQYAREIWGVEPSRQRLPAPDEAI

SEQ ID NO: 838800 - protein, 122 aa, Homo sapiens
QLCPGRYNAQEYYDRIPELRQVIEQLSSGFFSPKQPDLFKDIVNMLMHHDRFKVFADYEDYIKCQEKVSALYKNPREWTRMVIRNIATSGKFSSDRTIAQYAREIWGVEPSRQRLPAPDEAI

SEQ ID NO: 838801 - protein, 581 aa, Homo sapiens
RSPPCGLLRWFGGPLLASWCRCHLRFRAFGTSAGWYRAFPAPPPLLPPACPSPRDYRPHVSLSPFLSRPSRGGSSSSSSSRRRSPVAAVAGEPMAYSQGGGKKKVCYYYDGDIGNYYYGQGHPMKPHRIRMTHNLLLNYGLYRKMEIYRPHKATAEEMTKYHSDEYIKFLRSIRPDNMSEYSKQMQRFNVGEDCPVFDGLFEFCQLSTGGSVAGAVKLNRQQTDMAVNWAGGLHHAKKSEASGFCYVNDIVLAILELLKYHQRVLYIDIDIHHGDGVEEAFYTTDRVMTVSFHKYGEYFPGTGDLRDIGAGKGKYYAVNFPMRDGIDDESYGQIFKPIISKVMEMYQPSAVVLQCGADSLSGDRLGCFNLTVKGHAKCVEVVKTFNLPLLMLGGGGYTIRNVARCWTYETAVALDCEIPNELPYNDYFEYFGPDFKLHISPSNMTNQNTPEYMEKIKQRLFENLRMLPHAPGVQMQAIPEDAVHEDSGDEDGEDPDKRISIRASDKRIACDEEFSDSEDEGEGGRRNVADHKKGAKKARIEEDKKETEDKKTDVKEEDKSKDNSGEKTDTKGTKSEQLSNP

SEQ ID NO: 838802 - protein, 581 aa, Homo sapiens; identical to SEQ ID NO: 838801

SEQ ID NO: 838803 - protein, 581 aa, Homo sapiens; identical to SEQ ID NO: 838801

SEQ ID NO: 838804 - protein, 663 aa, Homo sapiens
RSPPCGLLRWFGGPLLASWCRCHLRFRAFGTSAGWYRAFPAPPPLLPPACPSPRDYRPHVSLSPFLSRPSRGGSSSSSSSRRRSPVAAVAGEPMAYSQGGGKKKVCYYYDGDIGNYYYGQGHPMKPHRIRMTHNLLLNYGLYRKMEIYRPHKATAEEMTKYHSDEYIKFLRSIRPDNMSEYSKQMQRFNVGEDCPVFDGLFEFCQLSTGGSVAGAVKLNRQQTDMAVNWAGGLHHAKKSEASGFCYVNDIVLAILELLKYHQRVLYIDIDIHHGDGVEEAFYTTDRVMTVSFHKYGEYFPGTGDLRDIGAGKGKYYAVNFPMRDGIDDESYGQIFKPIISKVMEMYQPSAVVLQCGADSLSGDRLGCFNLTVKGHAKCVEVVKTFNLPLLMLGGGGYTIRNVARCWTYETAVALDCEIPNELPYNDYFEYFGPDFKLHISPSNMTNQNTPEYMEKIKQRLFENLRMLPHAPGVQMQAIPEDAVHEDSGDEDGEDPDKRISIRASDKRIACDEEFSDSEDEGEGGRRNVADHKKKKKKKKKKKKKKKKKRRGGAAPEEIPPEGGPRVKAATPFLCGKKGGPKERERIYRYGCSAREGRARYYNKSGAWRGRKEVCDSRGENTFVGGEDDPLNCGGGEETPIWGEQHSPPRERYYKQRSEGRRKI

SEQ ID NO: 838805 - protein, 533 aa, Homo sapiens
RSPPCGLLRWFGGPLLASWCRCHLRFRAFGTSAGWYRAFPAPPPLLPPACPSPRDYRPHVSLSPFLSRPSRGGSSSSSSSRRRSPVAAVAGEPMAYSQGGGKKKVCYYYDGDIGNYYYGQGHPMKPHRIRMTHNLLLNYGLYRKMEIYRPHKATAEEMTKYHSDEYIKFLRSIRPDNMSEYSKQMQRFNVGEDCPVFDGLFEFCQLSTGGSVAGAVKLNRQQTDMAVNWAGGLHHAKKSEASGFCYVNDIVLAILELLKYHQRVLYIDIDIHHGDGVEEAFYTTDRVMTVSFHKYGEYFPGTGDLRDIGAGKGKYYAVNFPMRDGIDDESYGQIFKPIISKVMEMYQPSAVVLQCGADSLSGDRLGCFNLTVKGHAKCVEVVKTFNLPLLMLGGGGYTIRNVARCWTYETAVALDCEIPNELPYNDYFEYFGPDFKLHISPSNMTNQNTPEYMEKIKQRLFENLRMLPHAPGVQMQAIPEDAVHEDSGDEDGEDPDKRISIRASDKRIACDEEFSDSEDEGEGGHGSEISKKP

SEQ ID NO: 838806 - protein, 264 aa, Homo sapiens
RSPPCGLLRWFGGPLLASWCRCHLRFRAFGTSAGWYRAFPAPPPLLPPACPSPRDYRPHVSLSPFLSRPSRGGSSSSSSSRRRSPVAAVAGEPMAYSQGGGKKKVCYYYDGDIGNYYYGQGHPMKPHRIRMTHNLLLNYGLYRKMEIYRPHKATAEEMTKYHSDEYIKFLRSIRPDNMSEYSKQMQRFNVGEDCPVFDGLFEFCQLSTGGSVAGAVKLNRQQTDMAVNWAGGLHHAKKSEASGFCYVNDIVLAILELLKYVNLY

SEQ ID NO: 838807 - protein, 581 aa, Homo sapiens; identical to SEQ ID NO: 838801

SEQ ID NO: 838808 - protein, 240 aa, Homo sapiens
ALTSLRPPEVVWWPPPRELVPLPPPIPSFRHLCRVVPSLPGAPSSPPTGSSSSSSSRRRSPVAAVAGEPMAYSQGGGKKKVCYYYDGDIGNYYYGQGHPMKPHRIRMTHNLLLNYGLYRKMEIYRPHKATAEEMTKYHSDEYIKFLRSIRPDNMSEYSKQMQRFNVGEDCPVFDGLFEFCQLSTGGSVAGAVKLNRQQTDMAVNWAGGLHHAKKSEASGFCYVNDIVLAILELLKYVNLY

SEQ ID NO: 838809 - protein, 294 aa, Homo sapiens [sequence omitted]

SEQ ID NO: 838810 - protein, 77 aa, Homo sapiens
AAAYYYYNCSEFKLLTMYGDMDCIYFQMAFSFLFFLASFIVSFSNYEAKFLFSTMLYVIVFKIDVSYYVKKTDLLKK

SEQ ID NO: 838811 - protein, 54 aa, Homo sapiens
MTKMAIVPQYAFHDLCFVNRIPWFSRGQGYLPVGVFKFWLMGAEEMYTTSRLYS

SEQ ID NO: 838812 - protein, 44 aa, Homo sapiens
MDLHKLNKVTFIFHLSIPPPPTTMYLLVTTLEPSMVTHTCNPST

SEQ ID NO: 838813 - protein, 1615 aa, Homo sapiens
MEAAPPGPPWPLLLLLLLLLALCGCPAPAAASPLLLFANRRDVRLVDAGGVKLESTIVVSGLEDAAAVDFQFSKGAVYWTDVSEEAIKQTYLNQTGAAVQNVVISGLVSPDGLACDWVGKKLYWTDSETNRIEVANLNGTSRKVLFWQDLDQPRAIALDPAHGYMYWTDWGETPRIERAGMDGSTRKIIVDSDIYWPNGLTIDLEEQKLYWADAKLSFIHRANLDGSFRQKVVEGSLTHPFALTLSGDTLYWTDWQTRSIHACNKRTGGKRKEILSALYSPMDIQVLSQERQPFFHTRCEEDNGGCSHLCLLSPSEPFYTCACPTGVQLQDNGRTCKAGAEEVLLLARRTDLRRISLDTPDFTDIVLQVDDIRHAIAIDYDPLEGYVYWTDDEVRAIRRAYLDGSGAQTLVNTEINDPDGIAVDWVARNLYWTDTGTDRIEVTRLNGTSRKILVSEDLDEPRAIALHPVMGLMYWTDWGENPKIECANLDGQERRVLVNASLGWPNGLALDLQEGKLYWGDAKTDKIEVINVDGTKRRTLLEDKLPHIFGFTLLGDFIYWTDWQRRSIERVHKVKASRDVIIDQLPDLMGLKAVNVAKVVGTNPCADRNGGCSHLCFFTPHATRCGCPIGLELLSDMKTCIVPEAFLVFTSRAAIHRISLETNNNDVAIPLTGVKEASALDFDVSNNHIYWTDVSLKTISRAFMNGSSVEHVVEFGLDYPEGMAVDWMGKNLYWADTGTNRIEVARLDGQFRQVLVWRDLDNPRSLALDPTKGYIYWTEWGGKPRIVRAFMDGTNCMTLVDKVGRANDLTIDYADQRLYWTDLDTNMIESSNMLGQERVVIADDLPHPFGLTQYSDYIYWTDWNLHSIERADKTSGRNRTLIQGHLDFVMDILVFHSSRQDGLNDCMHNNGQCGQLCLAIPGGHRCGCASHYTLDPSSRNCSPPTTFLLFSQKSAISRMIPDDQHSPDLILPLHGLRNVKAIDYDPLDKFIYWVDGRQNIKRAKDDGTQPFVLTSLSQGQNPDRQPHDLSIDIYSRTLFWTCEATNTINVHRLSGEAMGVVLRGDRDKPRAIVVNAERGYLYFTNMQDRAAKIERAALDGTEREVLFTTGLIRPVALVVDNTLGKLFWVDADLKRIESCDLSGANRLTLEDANIVQPLGLTILGKHLYWIDRQQQMIERVEKTTGDKRTRIQGRVAHLTGIHAVEEVSLEEFSAHPCARDNGGCSHICIAKGDGTPRCSCPVHLVLLQNLLTCGEPPTCSPDQFACATGEIDCIPGAWRCDGFPECDDQSDEEGCPVCSAAQFPCARGQCVDLRLRCDGEADCQDRSDEADCDAICLPNQFRCASGQCVLIKQQCDSFPDCIDGSDELMCEITKPPSDDSPAHSSAIGPVIGIILSLFVMGGVYFVCQRVVCQRYAGANGPFPHEYVSGTPHVPLNFIAPGGSQHGPFTGIACGKSMMSSVSLMGGRGGVPLYDRNHVTGASSSSSSSTKATLYPPILNPPPSPATDPSLYNMDMFYSSNIPATARPYRPYIIRGMAPPTTPCSTDVCDSDYSASRWKASKYYLDLNSDSDPYPPPPTPHSQYLSAEDSCPPSPATERSYFHLFPPPPSPCTDSS

SEQ ID NO: 838814 - protein, 87 aa, Homo sapiens
  misc_feature (34)..(34): Xaa can be any naturally occurring amino acid
  misc_feature (40)..(40): Xaa can be any naturally occurring amino acid
KAIISRRTSPVMTWVVAWQSQHVIRPFFHPSIPXPMYFGXGSDPYPPPPTPHSQYLSAEDSCPPSPATERSYFHLFPPPPSPCTDSS

SEQ ID NO: 838815 - protein, 144 aa, Homo sapiens
LDSAPFGLTQYSDYIYWTDWNLHSIERADKTERRVLVNASLGWPNGLALDLQEGKLYWGDAKTDKIEVINVDGTKRRTLLEDKLPHIFGFTLLGDFIYWTDWQRRSIERVHKVKASRDVIIDQLPDLMGLKAVNVAKVVGESGG

SEQ ID NO: 838816 - protein, 1184 aa, Homo sapiens
RDLATALQPGQQSETLSQNLKQTNKQKTNKQSVIYPAPLGNHATWCFMVPGKVQVKLLLLGIEPVLFGAAQAPGRVRVGSRVVWPWPIQTYISAVLQVINVDGTKRRTLLEDKLPHIFGFTLLGDFIYWTDWQRRSIERVHKVKASRDVIIDQLPDLMGLKAVNVAKVVGTNPCADRNGGCSHLCFFTPHATRCGCPIGLELLSDMKTCIVPEAFLVFTSRAAIHRISLETNNNDVAIPLTGVKEASALDFDVSNNHIYWTDVSLKTISRAFMNGSSVEHVVEFGLDYPEGMAVDWMGKNLYWADTGTNRIEVARLDGQFRQVLVWRDLDNPRSLALDPTKGYIYWTEWGGKPRIVRAFMDGTNCMTLVDKVGRANDLTIDYADQRLYWTDLDTNMIESSNMLGQERVVIADDLPHPFGLTQYSDYIYWTDWNLHSIERADKTSGRNRTLIQGHLDFVMDILVFHSSRQDGLNDCMHNNGQCGQLCLAIPGGHRCGCASHYTLDPSSRNCSPPTTFLLFSQKSAISRMIPDDQHSPDLILPLHGLRNVKAIDYDPLDKFIYWVDGRQNIKRAKDDGTQPFVLTSLSQGQNPDRQPHDLSIDIYSRTLFWTCEATNTINVHRLSGEAMGVVLRGDRDKPRAIVVNAERGYLYFTNMQDRAAKIERAALDGTEREVLFTTGLIRPVALVVDNTLGKLFWVDADLKRIESCDLSGANRLTLEDANIVQPLGLTILGKHLYWIDRQQQMIERVEKTTGDKRTRIQGRVAHLTGIHAVEEVSLEEFSAHPCARDNGGCSHICIAKGDGTPRCSCPVHLVLLQNLLTCGEPPTCSPDQFACATGEIDCIPGAWRCDGFPECDDQSDEEGCPVCSAAQFPCARGQCVDLRLRCDGEADCQDRSDEADCDAICLPNQFRCASGQCVLIKQQCDSFPDCIDGSDELMCEITKPPSDDSPAHSSAIGPVIGIILSLFVMGGVYFVCQRVVCQRYAGANGPFPHEYVSGTPHVPLNFIAPGGSQHGPFTGIACGKSMMSSVSLMGGRGGVPLYDRNHVTGASSSSSSSTKATLYPPILNPPPSPATDPSLYNMDMFYSSNIPATARPYRPYIIRGMAPPTTPCSTDVCDSDYSASRWKASKYYLDLNSDSDPYPPPPTPHSQYLSAEDSCPPSPATERSYFHLFPPPPSPCTDSS

SEQ ID NO: 838817 - protein, 1034 aa, Homo sapiens
MKDERTEDVMLAAALPAVLGTNPCADRNGGCSHLCFFTPHATRCGCPIGLELLSDMKTCIVPEAFLVFTSRAAIHRISLETNNNDVAIPLTGVKEASALDFDVSNNHIYWTDVSLKTISRAFMNGSSVEHVVEFGLDYPEGMAVDWMGKNLYWADTGTNRIEVARLDGQFRQVLVWRDLDNPRSLALDPTKGYIYWTEWGGKPRIVRAFMDGTNCMTLVDKVGRANDLTIDYADQRLYWTDLDTNMIESSNMLGQERVVIADDLPHPFGLTQYSDYIYWTDWNLHSIERADKTSGRNRTLIQGHLDFVMDILVFHSSRQDGLNDCMHNNGQCGQLCLAIPGGHRCGCASHYTLDPSSRNCSPPTTFLLFSQKSAISRMIPDDQHSPDLILPLHGLRNVKAIDYDPLDKFIYWVDGRQNIKRAKDDGTQPFVLTSLSQGQNPDRQPHDLSIDIYSRTLFWTCEATNTINVHRLSGEAMGVVLRGDRDKPRAIVVNAERGYLYFTNMQDRAAKIERAALDGTEREVLFTTGLIRPVALVVDNTLGKLFWVDADLKRIESCDLSGANRLTLEDANIVQPLGLTILGKHLYWIDRQQQMIERVEKTTGDKRTRIQGRVAHLTGIHAVEEVSLEEFSAHPCARDNGGCSHICIAKGDGTPRCSCPVHLVLLQNLLTCGEPPTCSPDQFACATGEIDCIPGAWRCDGFPECDDQSDEEGCPVCSAAQFPCARGQCVDLRLRCDGEADCQDRSDEADCDAICLPNQFRCASGQCVLIKQQCDSFPDCIDGSDELMCEITKPPSDDSPAHSSAIGPVIGIILSLFVMGGVYFVCQRVVCQRYAGANGPFPHEYVSGTPHVPLNFIAPGGSQHGPFTGIACGKSMMSSVSLMGGRGGVPLYDRNHVTGASSSSSSSTKATLYPPILNPPPSPATDPSLYNMDMFYSSNIPATARPYRPYIIRGMAPPTTPCSTDVCDSDYSASRWKASKYYLDLNSDSDPYPPPPTPHSQYLSAEDSCPPSPATERSYFHLFPPPPSPCTDSS

SEQ ID NO: 838818 - protein, 1508 aa, Homo sapiens
MEAAPPGPPWPLLLLLLLLLALCGCPAPAAASPLLLFANRRDVRLVDAGGVKLESTIVVSGLEDAAAVDFQFSKGAVYWTDVSEEAIKQTYLNQTGAAVQNVVISGLVSPDGLACDWVGKKLYWTDSETNRIEVANLNGTSRKVLFWQDLDQPRAIALDPAHGYMYWTDWGETPRIERAGMDGSTRKIIVDSDIYWPNGLTIDLEEQKLYWADAKLSFIHRANLDGSFRQKVVEGSLTHPFALTLSGDTLYWTDWQTRSIHACNKRTGGKRKEILSALYSPMDIQVLSQERQPFFHTRCEEDNGGCSHLCLLSPSEPFYTCACPTGVQLQDNGRTCKAGAEEVLLLARRTDLRRISLDTPDFTDIVLQVDDIRHAIAIDYDPLEGYVYWTDDEVRAIRRAYLDGSGAQTLVNTEINDPDGIAVDWVARNLYWTDTGTDRIEVTRLNGTSRKILVSEDLDEPRAIALHPVMGLMYWTDWGENPKIECANLDGQERRVLVNASLGWPNGLALDLQEGKLYWGDAKTDKIEVINVDGTKRRTLLEDKLPHIFGFTLLGDFIYWTDWQRRSIERVHKVKASRDVIIDQLPDLMGLKAVNVAKVVGTNPCADRNGGCSHLCFFTPHATRCGCPIGLELLSDMKTCIVPEAFLVFTSRAAIHRISLETNNNDVAIPLTGVKEASALDFDVSNNHIYWTDVSLKTISRAFMNGSSVEHVVEFGLDYPEGMAVDWMGKNLYWADTGTNRIEVARLDGQFRQVLVWRDLDNPRSLALDPTKGYIYWTEWGGKPRIVRAFMDGTNCMTLVDKVGRANDLTIDYADQRLYWTDLDTNMIESSNMLGQERVVIADDLPHPFGLTQYSDYIYWTDWNLHSIERADKTSGRNRTLIQGHLDFVMDILVFHSSRQDGLNDCMHNNGQCGQLCLAIPGGHRCGCASHYTLDPSSRNCSPPTTFLLFSQKSAISRMIPDDQHSPDLILPLHGLRNVKAIDYDPLDKFIYWVDGRQNIKRAKDDGTQPFVLTSLSQGQNPDRQPHDLSIDIYSRTLFWTCEATNTINVHRLSGEAMGVVLRGDRDKPRAIVVNAERGYLYFTNMQDRAAKIERAALDGTEREVLFTTGLIRPVALVVDNTLGKLFWVDADLKRIESCDLSGANRLTLEDANIVQPLGLTILGKHLYWIDRQQQMIERVEKTTGDKRTRIQGRVAHLTGIHAVEEVSLEEFSAHPCARDNGGCSHICIAKGDGTPRCSCPVHLVLLQNLLTCGEPPTCSPDQFACATGEIDCIPGAWRCDGFPECDDQSDEEGCPVCSAAQFPCARGQCVDLRLRCDGEADCQDRSDEADCDAICLPNQFRCASGQCVLIKQQCDSFPDCIDGSDELMCEITKPPSDDSPAHSSAIGPVIGIILSLFVMGGVYFVCQRVVCQRYAGANGPFPHEYVSGTPHVPLNFIAPGGSQHGPFTGIACGKSMMSSVSLMGGRGGVPLYDRNHVTGASSSSSSSTKATLYPPVRGGAGEGRGGM

SEQ ID NO: 838819 - protein, 401 aa, Homo sapiens
ADLWTGHEHRGVPSPLAIQMWEQPPLSRAHGWAENLLTCGEPPTCSPDQFACATGEIDCIPGAWRCDGFPECDDQSDEEGCPVCSAAQFPCARGQCVDLRLRCDGEADCQDRSDEADCDAICLPNQFRCASGQCVLIKQQCDSFPDCIDGSDELMCEITKPPSDDSPAHSSAIGPVIGIILSLFVMGGVYFVCQRVVCQRYAGANGPFPHEYVSGTPHVPLNFIAPGGSQHGPFTGIACGKSMMSSVSLMGGRGGVPLYDRNHVTGASSSSSSSTKATLYPPILNPPPSPATDPSLYNMDMFYSSNIPATARPYRPYIIRGMAPPTTPCSTDVCDSDYSASRWKASKYYLDLNSDSDPYPPPPTPHSQYLSAEDSCPPSPATERSYFHLFPPPPSPCTDSS

SEQ ID NO: 838820 - protein, 837 aa, Homo sapiens
MEAAPPGPPWPLLLLLLLLLALCGCPAPAAASPLLLFANRRDVRLVDAGGVKLESTIVVSGLEDAAAVDFQFSKGAVYWTDVSEEAIKQTYLNQTGAAVQNVVISGLVSPDGLACDWVGKKLYWTDSETNRIEVANLNGTSRKVLFWQDLDQPRAIALDPAHGYMYWTDWGETPRIERAGMDGSTRKIIVDSDIYWPNGLTIDLEEQKLYWADAKLSFIHRANLDGSFRQKVVEGSLTHPFALTLSGDTLYWTDWQTRSIHACNKRTGGKRKEILSALYSPMDIQVLSQERQPFFHTRCEEDNGGCSHLCLLSPSEPFYTCACPTGVQLQDNGRTCKAGAEEVLLLARRTDLRRISLDTPDFTDIVLQVDDIRHAIAIDYDPLEGYVYWTDDEVRAIRRAYLDGSGAQTLVNTEINDPDGIAVDWVARNLYWTDTGTDRIEVTRLNGTSRKILVSEDLDEPRAIALHPVMGLMYWTDWGENPKIECANLDGQERRVLVNASLGWPNGLALDLQEGKLYWGDAKTDKIEVINVDGTKRRTLLEDKLPHIFGFTLLGDFIYWTDWQRRSIERVHKVKASRDVIIDQLPDLMGLKAVNVAKVVGTNPCADRNGGCSHLCFFTPHATRCGCPIGLELLSDMKTCIVPEAFLVFTSRAAIHRISLETNNNDVAIPLTGVKEASALDFDVSNNHIYWTDVSLKTISRAFMNGSSVEHVVEFGLDYPEGMAVDWMGKNLYWADTGTNRIEVARLDGQFRQVLVWRDLDNPRSLALDPTKGYIYWTEWGGKPRIVRAFMDGTNCMTLVDKVGRANDLTIDYADQRLYWTDLDTNMIESSNMLGTA

SEQ ID NO: 838821 - protein, 726 aa, Homo sapiens
MEAAPPGPPWPLLLLLLLLLALCGCPAPAAASPLLLFANRRDVRLVDAGGVKLESTIVVSGLEDAAAVDFQFSKGAVYWTDVSEEAIKQTYLNQTGAAVQNVVISGLVSPDGLACDWVGKKLYWTDSETNRIEVANLNGTSRKVLFWQDLDQPRAIALDPAHGYMYWTDWGETPRIERAGMDGSTRKIIVDSDIYWPNGLTIDLEEQKLYWADAKLSFIHRANLDGSFRQKVVEGSLTHPFALTLSGDTLYWTDWQTRSIHACNKRTGGKRKEILSALYSPMDIQVLSQERQPFFHTRCEEDNGGCSHLCLLSPSEPFYTCACPTGVQLQDNGRTCKAGAEEVLLLARRTDLRRISLDTPDFTDIVLQVDDIRHAIAIDYDPLEGYVYWTDDEVRAIRRAYLDGSGAQTLVNTEINDPDGIAVDWVARNLYWTDTGTDRIEVTRLNGTSRKILVSEDLDEPRAIALHPVMGLMYWTDWGENPKIECANLDGQERRVLVNASLGWPNGLALDLQEGKLYWGDAKTDKIEVINVDGTKRRTLLEDKLPHIFGFTLLGDFIYWTDWQRRSIERVHKVKASRDVIIDQLPDLMGLKAVNVAKVVGTNPCADRNGGCSHLCFFTPHATRCGCPIGLELLSDMKTCIVPEAFLVFTSRAAIHRISLETNNNDVAIPLTGVKEASALDFDVSNNHIYWTDVSLKVAWARTCTQAAFMGKPCLCSCLKGFRHFS

SEQ ID NO: 838822 - protein, 140 aa, Homo sapiens
MSPGDTAGWVQSPACIFWSWPVDRPFPFTAPGLLCPPGRMCLPESHSSVCVPFRPYIIRGMAPPTTPCSTDVCDSDYSASRWKASKYYLDLNSDSDPYPPPPTPHSQYLSAEDSCPPSPATERSYFHLFPPPPSPCTDSS

SEQ ID NO: 838823 - protein, 88 aa, Homo sapiens
EGMAVDWMGKNLYWADTGTNRIEVARLDGQFRQVLVWRDLDNPRSLALDPTKGYSVCLSRASLCSPRMRQCGGANWARWQAVRVALSD

SEQ ID NO: 838824 - protein, 1615 aa, Homo sapiens; identical to SEQ ID NO: 838813

SEQ ID NO: 838825 - protein, 1382 aa, Homo sapiens
MEAAPPGPPWPLLLLLLLLLALCGCPAPAAASPLLLFANRRDVRLVDAGGVKLESTIVVSGLEDAAAVDFQFSKGAVYWTDVSEEAIKQTYLNQTGAAVQNVVISGLVSPDGLACDWVGKKLYWTDSETNRIEVANLNGTSRKVLFWQDLDQPRAIALDPAHGYMYWTDWGETPRIERAGMDGSTRKIIVDSDIYWPNGLTIDLEEQKLYWADAKLSFIHRANLDGSFRQKVVEGSLTHPFALTLSGDTLYWTDWQTRSIHACNKRTGGKRKEILSALYSPMDIQVLSQERQPFFHTRCEEDNGGCSHLCLLSPSEPFYTCACPTGVQLQDNGRTCKAGAEEVLLLARRTDLRRISLDTPDFTDIVLQVDDIRHAIAIDYDPLEGYVYWTDDEVRAIRRAYLDGSGAQTLVNTEINDPDGIAVDWVARNLYWTDTGTDRIEVTRLNGTSRKILVSEDLDEPRAIALHPVMGLMYWTDWGENPKIECANLDGQERRVLVNASLGWPNGLALDLQEGKLYWGDAKTDKIEVINVDGTKRRTLLEDKLPHIFGFTLLGDFIYWTDWQRRSIERVHKVKASRDVIIDQLPDLMGLKAVNVAKVVGTNPCADRNGGCSHLCFFTPHATRCGCPIGLELLSDMKTCIVPEAFLVFTSRAAIHRISLETNNNDVAIPLTGVKEASALDFDVSNNHIYWTDVSLKTISRAFMNGSSVEHVVEFGLDYPEGMAVDWMGKNLYWADTGTNRIEVARLDGQFRQVLVWRDLDNPRSLALDPTKGYIYWTEWGGKPRIVRAFMDGTNCMTLVDKVGRANDLTIDYADQRLYWTDLDTNMIESSNMLGQERVVIADDLPHPFGLTQYSDYIYWTDWNLHSIERADKTSGRNRTLIQGHLDFVMDILVFHSSRQDGLNDCMHNNGQCGQLCLAIPGGHRCGCASHYTLDPSSRNCSPPTTFLLFSQKSAISRMIPDDQHSPDLILPLHGLRNVKAIDYDPLDKFIYWVDGRQNIKRAKDDGTQPFVLTSLSQGQNPDRQPHDLSIDIYSRTLFWTCEATNTINVHRLSGEAMGVVLRGDRDKPRAIVVNAERGYLYFTNMQDRAAKIERAALDGTEREVLFTTGLIRPVALVVDNTLGKLFWVDADLKRIESCDLSGANRLTLEDANIVQPLGLTILGKHLYWIDRQQQMIERVEKTTGDKRTRIQGRVAHLTGIHAVEEVSLEEFSAHPCARDNGGCSHICIAKGDGTPRCSCPVHLVLLQNLLTCGEPPTCSPDQFACATGEIDCIPGAWRCDGFPECDDQSDEEGCPVCSAAQFPCARGQCVDLRLRCDGEADCQDRSDEADCDAICLPNQFRCASGQCVPLHGLILTSAGPLWLLCAPVNSFKYEQRKKYIL

SEQ ID NO: 838826 - protein, 1301 aa, Homo sapiens
MEAAPPGPPWPLLLLLLLLLALCGCPAPAAASPLLLFANRRDVRLVDAGGVKLESTIVVSGLEDAAAVDFQFSKGAVYWTDVSEEAIKQTYLNQTGAAVQNVVISGLVSPDGLACDWVGKKLYWTDSETNRIEVANLNGTSRKVLFWQDLDQPRAIALDPAHGYMYWTDWGETPRIERAGMDGSTRKIIVDSDIYWPNGLTIDLEEQKLYWADAKLSFIHRANLDGSFRQKVVEGSLTHPFALTLSGDTLYWTDWQTRSIHACNKRTGGKRKEILSALYSPMDIQVLSQERQPFFHTRCEEDNGGCSHLCLLSPSEPFYTCACPTGVQLQDNGRTCKAGAEEVLLLARRTDLRRISLDTPDFTDIVLQVDDIRHAIAIDYDPLEGYVYWTDDEVRAIRRAYLDGSGAQTLVNTEINDPDGIAVDWVARNLYWTDTGTDRIEVTRLNGTSRKILVSEDLDEPRAIALHPVMGLMYWTDWGENPKIECANLDGQERRVLVNASLGWPNGLALDLQEGKLYWGDAKTDKIEVINVDGTKRRTLLEDKLPHIFGFTLLGDFIYWTDWQRRSIERVHKVKASRDVIIDQLPDLMGLKAVNVAKVVGTNPCADRNGGCSHLCFFTPHATRCGCPIGLELLSDMKTCIVPEAFLVFTSRAAIHRISLETNNNDVAIPLTGVKEASALDFDVSNNHIYWTDVSLKTISRAFMNGSSVEHVVEFGLDYPEGMAVDWMGKNLYWADTGTNRIEVARLDGQFRQVLVWRDLDNPRSLALDPTKGYIYWTEWGGKPRIVRAFMDGTNCMTLVDKVGRANDLTIDYADQRLYWTDLDTNMIESSNMLGQERVVIADDLPHPFGLTQYSDYIYWTDWNLHSIERADKTSGRNRTLIQGHLDFVMDILVFHSSRQDGLNDCMHNNGQCGQLCLAIPGGHRCGCASHYTLDPSSRNCSPPTTFLLFSQKSAISRMIPDDQHSPDLILPLHGLRNVKAIDYDPLDKFIYWVDGRQNIKRAKDDGTQPFVLTSLSQGQNPDRQPHDLSIDIYSRTLFWTCEATNTINVHRLSGEAMGVVLRGDRDKPRAIVVNAERGYLYFTNMQDRAAKIERAALDGTEREVLFTTGLIRPVALVVDNTLGKLFWVDADLKRIESCDLSGANRLTLEDANIVQPLGLTILGKHLYWIDRQQQMIERVEKTTGDKRTRIQGRVAHLTGIHAVEEVSLEEFSAHPCARDNGGCSHICIAKGDGTPRCSCPVHPEQLAQCVVYHQGHRADEAGGEEDLALGAVQGCAFDLGCPVLHVGEVQVPSLRVDDDG

SEQ ID NO: 838827 - protein, 908 aa, Homo sapiens
MEAAPPGPPWPLLLLLLLLLALCGCPAPAAASPLLLFANRRDVRLVDAGGVKLESTIVVSGLEDAAAVDFQFSKGAVYWTDVSEEAIKQTYLNQTGAAVQNVVISGLVSPDGLACDWVGKKLYWTDSETNRIEVANLNGTSRKVLFWQDLDQPRAIALDPAHGYMYWTDWGETPRIERAGMDGSTRKIIVDSDIYWPNGLTIDLEEQKLYWADAKLSFIHRANLDGSFRQKVVEGSLTHPFALTLSGDTLYWTDWQTRSIHACNKRTGGKRKEILSALYSPMDIQVLSQERQPFFHTRCEEDNGGCSHLCLLSPSEPFYTCACPTGVQLQDNGRTCKAGAEEVLLLARRTDLRRISLDTPDFTDIVLQVDDIRHAIAIDYDPLEGYVYWTDDEVRAIRRAYLDGSGAQTLVNTEINDPDGIAVDWVARNLYWTDTGTDRIEVTRLNGTSRKILVSEDLDEPRAIALHPVMGLMYWTDWGENPKIECANLDGQERRVLVNASLGWPNGLALDLQEGKLYWGDAKTDKIEVINVDGTKRRTLLEDKLPHIFGFTLLGDFIYWTDWQRRSIERVHKVKASRDVIIDQLPDLMGLKAVNVAKVVGTNPCADRNGGCSHLCFFTPHATRCGCPIGLELLSDMKTCIVPEAFLVFTSRAAIHRISLETNNNDVAIPLTGVKEASALDFDVSNNHIYWTDVSLKTISRAFMNGSSVEHVVEFGLDYPEGMAVDWMGKNLYWADTGTNRIEVARLDGQFRQVLVWRDLDNPRSLALDPTKGYIYWTEWGGKPRIVRAFMDGTNCMTLVDKVGRANDLTIDYADQRLYWTDLDTNMIESSNMLGEGRAGAFWSWRAGQPGVGHLPASPHVPCGLQVPQPGRSCGHTHDCPAASPSAVGVVPVHPWVPLLQLCRERLW

SEQ ID NO: 838828 - protein, 756 aa, Homo sapiens
MEAAPPGPPWPLLLLLLLLLALCGCPAPAAASPLLLFANRRDVRLVDAGGVKLESTIVVSGLEDAAAVDFQFSKGAVYWTDVSEEAIKQTYLNQTGAAVQNVVISGLVSPDGLACDWVGKKLYWTDSETNRIEVANLNGTSRKVLFWQDLDQPRAIALDPAHGYMYWTDWGETPRIERAGMDGSTRKIIVDSDIYWPNGLTIDLEEQKLYWADAKLSFIHRANLDGSFRQKVVEGSLTHPFALTLSGDTLYWTDWQTRSIHACNKRTGGKRKEILSALYSPMDIQVLSQERQPFFHTRCEEDNGGCSHLCLLSPSEPFYTCACPTGVQLQDNGRTCKAGAEEVLLLARRTDLRRISLDTPDFTDIVLQVDDIRHAIAIDYDPLEGYVYWTDDEVRAIRRAYLDGSGAQTLVNTEINDPDGIAVDWVARNLYWTDTGTDRIEVTRLNGTSRKILVSEDLDEPRAIALHPVMGLMYWTDWGENPKIECANLDGQERRVLVNASLGWPNGLALDLQEGKLYWGDAKTDKIEVINVDGTKRRTLLEDKLPHIFGFTLLGDFIYWTDWQRRSIERVHKVKASRDVIIDQLPDLMGLKAVNVAKVVGTNPCADRNGGCSHLCFFTPHATRCGCPIGLELLSDMKTCIVPEAFLVFTSRAAIHRISLETNNNDVAIPLTGVKEASALDFDVSNNHIYWTDVSLKTISRAFMNGSSVEHVVEFGLDYPEGMAVDWMGKNLYWAGDAKTDKIEVINVDGTQRRTL

SEQ ID NO: 838829 - protein, 214 aa, Homo sapiens
MEAAPPGPPWPLLLLLLLLLALCGCPAPAAASPLLLFANRRDVRLVDAGGVKLESTIVVSGLEDAAAVDFQFSKGAVYWTDVSEEAIKQTYLNQTILNPPPSPATDPSLYNMDMFYSSNIPATARPYRPYIIRGMAPPTTPCSTDVCDSDYSASRWKASKYYLDLNSDSDPYPPPPTPHSQYLSAEDSCPPSPATERSYFHLFPPPPSPCTDSS

SEQ ID NO: 838830 - protein, 38 aa, Homo sapiens
PPVLRSLGFFVLQPFVLTSLSQGQNPDRQPHDLSIDIY

SEQ ID NO: 838831 - protein, 112 aa, Homo sapiens [sequence omitted]

SEQ ID NO: 838832 - protein, 655 aa, Homo sapiens
GGAGVGAGAGAMEAERGPERRPAERSSPGQTPEEGAQALAEFAALHGPALRASGVPERYWGRLLHKLEHEVFDAGEVFGIMQVEEVEEEEDEAAREVRKQQPNPGNELCYKVIVTRESGLQAAHPNSIFLIDHAWTCRVEHARQQLQQVPGLLHRMANLMGIEFHGELPSTEAVALVLEEMWKFNQTYQLAHGTAEEKMPVWYIMDEFGSRIQHADVPSFATAPFFYMPQQVAYTLLWPLRDLDTGEEVTRDFAYGETDPLIRKCMLLPWAPTDMLDLSSCTPEPPAEHYQAILEENKEKLPLDINPVVHPHGHIFKVYTDVQQVASSLTHPRFTLTQSEADADILFNFSHFKDYRKLSQERPGVLLNQFPCENLLTVKDCLASIARRAGGPEGPPWLPRTFNLRTELPQFVSYFQQRERWGEDNHWICKPWNLARSLDTHVTKSLHSIIRHRESTPKVVSKYIESPVLFLREDVGKVKFDIRYIVLLRSVRPLRLFVYDVFWLRFSNRAFALNDLDDYEKHFTVMNYDPDVVLKQVHCEEFIPEFEKQYPEFPWTDVQAEIFRAFTELFQVACAKPPPLGLCDYPSSRAMYAVDLMLKWDNGPDGRRVMQPQILEVNFNPDCERACRYHPTFFNDVFSTLFLDQPGGCHVTCLV

SEQ ID NO: 838833 - protein, 655 aa, Homo sapiens; identical to SEQ ID NO: 838832

SEQ ID NO: 838834 - protein, 655 aa, Homo sapiens; identical to SEQ ID NO: 838832

SEQ ID NO: 838835 - protein, 226 aa, Homo sapiens
GGAGVGAGAGAMEAERGPERRPAERSSPGQTPEEGAQALAEFAALHGPALRASGVPERYWGRLLHKLEHEVFDAGEVFGIMQVEEVEEEEDEAAREVRKQQPNPGNELCYKVIVTRESGLQAAHPNSIFLIDHAWTCRVEHARQQLQQVPGLLHRMANLMGIEFHGELPSTEAVALVLEEMWKFNQTYQLAHGHVCRRPHAEVGQRPRWKAGDAAADPGGELQPRL

SEQ ID NO: 838836 - protein, 655 aa, Homo sapiens; identical to SEQ ID NO: 838832

SEQ ID NO: 838837 - protein, 655 aa, Homo sapiens; identical to SEQ ID NO: 838832

SEQ ID NO: 838838 - protein, 837 aa, Homo sapiens
MGDKAGLLGGGLRLFLGPCRIEPCGCSVGPHSRPGVVLMHKSRDPGRETRLPRVIQGSQTLPGGTLLPRTPCLAPRNPSPSTPWKHSSQEQILHARNEALGYNWRLISAQMVVRGEEQGVGWCSALGTPSLSCSDPQVRGGCCAPGVWRREDGSAGQRPGAEAMPRAGVGRDMGAFAEAAQRTEVGILPQSTGFGDSECLDKAGNVAATGLVQKQGAEDVVEEGGVVPAGSLTVGVEVHLQDLRLHHPPSIWAVVPLQHEVDGIHGPGGGVVAEAQGWWLGTGHLEQLREGPEDLSLDVRPGKFWVLLLKLGDELFTVHLLQHHIRVIVHDREVLLVVIQVLSAKARLENRSQNTSYTNNRRGLTDLQQHDVADVELDLSHVFSKEQHGTFDVLGHNLGGALSVPDDAVQALGDVGVQAARQVPGLADPVVVLAPPFPLLEVADKLGQLSAQVEGSGQPGWALGATCPARDGGQAVLDSQQVLAGELVQQHAWPLLAEFPVVLEVGEVEEDVGVRLTLGEGEARVGEAAGHLLHVRVDLEDVAVGVHHGVDVKWQLLLVFLQNGLVVLGGRLGCARAEVQHVGGGPGQQHALPDQGVRLSVGKVSGHLLASVQVPQGPQQRVGHLLRHVEEGCRGEAGHVRVLDPRTELVHDIPHRHLLLSCPMGQLVGLVELPHLLQHQGHSLCTGQLTVELNAHQVGHAVQQPGHLLQLLARVLHTARPGVVDEEDAVGVGCLEPALPGHDDLVAQLVPRVGLLLPHLPGCLVLLLFYLLHLHDPKHFPSVENLVLQLVQEAAPVTFGDPRSAQRRAVQRRELGQGLRALLRRLARAATLRRPAL

SEQ ID NO: 838839 - protein, 99 aa, Homo sapiens
INSGKPLAAWQVKCKNAAGGWRVCSVPGPSSRAVGGPNCPGRRELLPEPSSAWEGRARCSGVSSLKLRTIFLVAKLHMMMLPLLSVLSGPLFTSTRYPS

SEQ ID NO: 838840 - protein, 196 aa, Homo sapiens
GGAGVGAGAGAMEAERGPERRPAERSSPGQTPEEGAQALAEFAALHGPALRASGVPERYWGRLLHKLEHEVFDAGEVFGIMQVEEVEEEEDEAAREVRKQQPNPGNELCYKVIVTRESGLQAAHPNSIFLIDHAWTCRVEHARQQLQQVPGLLWQTPANGPKNRGNWGATLERFQRWKLPVPEAVALVLEAETHLC

SEQ ID NO: 838841 - protein, 595 aa, Homo sapiens
TPADGNSGPQVFDAGEVFGIMQVEEVEEEEDEAAREVRKQQPNPGNELCYKVIVTRESGLQAAHPNSIFLIDHAWTCRVEHARQQLQQVPGLLHRMANLMGIEFHGELPSTEAVALVLEEMWKFNQTYQLAHGTAEEKMPVWYIMDEFGSRIQHADVPSFATAPFFYMPQQVAYTLLWPLRDLDTGEEVTRDFAYGETDPLIRKCMLLPWAPTDMLDLSSCTPEPPAEHYQAILEENKEKLPLDINPVVHPHGHIFKVYTDVQQVASSLTHPRFTLTQSEADADILFNFSHFKDYRKLSQERPGVLLNQFPCENLLTVKDCLASIARRAGGPEGPPWLPRTFNLRTELPQFVSYFQQRERWGEDNHWICKPWNLARSLDTHVTKSLHSIIRHRESTPKVVSKYIESPVLFLREDVGKVKFDIRYIVLLRSVRPLRLFVYDVFWLRFSNRAFALNDLDDYEKHFTVMNYDPDVVLKQVHCEEFIPEFEKQYPEFPWTDVQAEIFRAFTELFQVACAKPPPLGLCDYPSSRAMYAVDLMLKWDNGPDGRRVMQPQILEVNFNPDCERACRYHPTFFNDVFSTLFLDQPGGCHVTCLV

SEQ ID NO: 838842 - protein, 154 aa, Homo sapiens [sequence omitted]

SEQ ID NO: 838843 - protein, 33 aa, Homo sapiens
MAVNGGTRKRSGGKRTRDESVNPHRESVPHRES

SEQ ID NO: 838844 - protein, 284 aa, Homo sapiens
WERRQAGSGGGGSWERRHPGPNPLDPQDPSPDAYCNLVILAVANRDAAEESCALICQVFQIIYGDQSIECVDRAGYHYTSTPERPWLCSRINGSQDTFEACYSGTSTPSFHGSHCSGSDHSSLGLEQLQDYMVTLRSKLGPLEIQQFAMLLREYRLGLPIQDYCTGLLKLYGDRRKFLLLGMRPFIPDQDIGYFEGFLEGVGIREGGILTDSFGRIKRSMSSTSASAVRSYDGAAQRPEAQAFHRLLADITHDIEALAPDDDDDDEDEPRGSRGGSDAAEDNYL

SEQ ID NO: 838845 - protein, 305 aa, Homo sapiens
WERRQAGSGGGGSWERRHPGPNPLDPQDPSPDAYCNLVILAVANRDAAEESCALICQVFQIIYGDQSIECVDRAGYHYTSTPERPWLCSRSESCHTDGTYAYDADFSCCSSFNGSQDTFEACYSGTSTPSFHGSHCSGSDHSSLGLEQLQDYMVTLRSKLGPLEIQQFAMLLREYRLGLPIQDYCTGLLKLYGDRRKFLLLGMRPFIPDQDIGYFEGFLEGVGIREGGILTDSFGRIKRSMSSTSASAVRSYDGAAQRPEAQAFHRLLADITHDIEALAPDDDDDDEDEPRGSRGGSDAAEDNYL

SEQ ID NO: 838846 - protein, 113 aa, Homo sapiens [sequence omitted]

SEQ ID NO: 838847 - protein, 1268 aa, Homo sapiens
CRWPLWPSRLAAARRRRGERLSHLVLRLWPPPARGVEGVLPETSAGLCSSAGGRAAMEPRPTAPSSGAPGLAGVGETPSAAALAAARVELPGTAVPSVPEDAAPASRDGGGVRDEGPAAAGDGLGRPLGPTPSQSRFQVDLVSENAGRAAAAAAAAAAAAAAAGAGAGAKQTPADGEASGESEPAKGSEEAKGRFRVNFVDPAASSSAEDSLSDAAGVGVDGPNVSFQNGGDTVLSEGSSLHSGGGGGSGHHQHYYYDTHTNTYYLRTFGHNTMDAVPRIDHYRHTAAQLGEKLLRPSLAELHDELEKEPFEDGFANGEESTPTRDAVVTYTAESKGVVKFGWIKGVLVRCMLNIWGVMLFIRLSWIVGQAGIGLSVLVIMMATVVTTITGLSTSAIATNGFVRGGGAYYLISRSLGPEFGGAIGLIFAFANAVAVAMYVVGFAETVVELLKEHSILMIDEINDIRIIGAITVVILLGISVAGMEWEAKAQIVLLVILLLAIGDFVIGTFIPLESKKPKGFFGYKSEIFNENFGPDFREEETFFSVFAIFFPAATGILAGANISGDLADPQSAIPKGTLLAILITTLVYVGIAVSVGSCVVRDATGNVNDTIVTELTNCTSAACKLNFDFSSCESSPCSYGLMNNFQVMSMVSGFTPLISAGIFSATLSSALASLVSAPKIFQALCKDNIYPAFQMFAKGYGKNNEPLRGYILTFLIALGFILIAELNVIAPIISNFFLASYALINFSVFHASLAKSPGWRPAFKYYNMWISLLGAILCCIVMFVINWWAALLTYVIVLGLYIYVTYKKPDVNWGSSTQALTYLNALQHSIRLSGVEDHVKNFRPQCLVMTGAPNSRPALLHLVHDFTKNVGLMICGHVHMGPRRQAMKEMSIDQAKYQRWLIKNKMKAFYAPVHADDLREGAQYLMQAAGLGRMKPNTLVLGFKKDWLQADMRDVDMYINLFHDAFDIQYGVVVIRLKEGLDISHLQGQEELLSSQEKSPGTKDVVVSVEYSKKSDLDTSKPLSEKPITHKVEEEDGKTATQPLLKKESKGPIVPLNVADQKLLEASTQFQKKQGKNTIDVWWLFDDGGLTLLIPYLLTTKKKWKDCKIRVFIGGKINRIDHDRRAMATLLSKFRIDFSDIMVLGDINTKPKKENIIAFEEIIEPYRLHEDDKEQDIADKMKEDEPWRITDNELELYKTKTYRQIRLNELLKEHSSTANIIVMSLPVARKGAVSSALYMAWLEALSKDLPPILLVRGNHQSVLTFYS

SEQ ID NO: 838848 - protein, 1268 aa, Homo sapiens; identical to SEQ ID NO: 838847

SEQ ID NO: 838849 - protein, 1268 aa, Homo sapiens; identical to SEQ ID NO: 838847

SEQ ID NO: 838850 - protein, 717 aa, Homo sapiens
SRLCTYCSDPPIYGDLADPQSAIPKGTLLAILITTLVYVGIAVSVGSCVVRDATGNVNDTIVTELTNCTSAACKLNFDFSSCESSPCSYGLMNNFQVMSMVSGFTPLISAGIFSATLSSALASLVSAPKIFQALCKDNIYPAFQMFAKGYGKNNEPLRGYILTFLIALGFILIAELNVIAPIISNFFLASYALINFSVFHASLAKSPGWRPAFKYYNMWISLLGAILCCIVMFVINWWAALLTYVIVLGLYIYVTYKKPDVNWGSSTQALTYLNALQHSIRLSGVEDHVKNFRPQCLVMTGAPNSRPALLHLVHDFTKNVGLMICGHVHMGPRRQAMKEMSIDQAKYQRWLIKNKMKAFYAPVHADDLREGAQYLMQAAGLGRMKPNTLVLGFKKDWLQADMRDVDMYINLFHDAFDIQYGVVVIRLKEGLDISHLQGQEELLSSQEKSPGTKDVVVSVEYSKKSDLDTSKPLSEKPITHKVEEEDGKTATQPLLKKESKGPIVPLNVADQKLLEASTQFQKKQGKNTIDVWWLFDDGGLTLLIPYLLTTKKKWKDCKIRVFIGGKINRIDHDRRAMATLLSKFRIDFSDIMVLGDINTKPKKENIIAFEEIIEPYRLHEDDKEQDIADKMKEDEPWRITDNELELYKTKTYRQIRLNELLKEHSSTANIIVMSLPVARKGAVSSALYMAWLEALSKDLPPILLVRGNHQSVLTFYS

SEQ ID NO: 838851 - protein, 314 aa, Homo sapiens
AVVSTQSAHYGRGLAAVEKWLTVAELKAVLKDTLEKKGVLGHLKARIRAEVFNALDDDREPRPSLSHENLLINELIREYLEFNKYKYTASVLIAESKGPIVPLNVADQKLLEASTQFQKKQGKNTIDVWWLFDDGGLTLLIPYLLTTKKKWKDCKIRVFIGGKINRIDHDRRAMATLLSKFRIDFSDIMVLGDINTKPKKENIIAFEEIIEPYRLHEDDKEQDIADKMKEDEPWRITDNELELYKTKTYRQIRLNELLKEHSSTANIIVMSLPVARKGAVSSALYMAWLEALSKDLPPILLVRGNHQSVLTFYS

SEQ ID NO: 838852 - protein, 1268 aa, Homo sapiens; identical to SEQ ID NO: 838847

SEQ ID NO: 838853 - protein, 1268 aa, Homo sapiens; identical to SEQ ID NO: 838847

SEQ ID NO: 838854 - protein, 141 aa, Homo sapiens [sequence omitted]

SEQ ID NO: 838855 - protein, 420 aa, Homo sapiens
MPGGCSRGPAAGDGRLRLARLALVLLGWVSSSSPTSSASSFSSSAPFLASAVSAQPPLPDQCPALCECSEAARTVKCVNRNLTEVPTDLPAYVRNLFLTGNQLAVLPAGAFARRPPLAELAALNLSGSRLDEVRAGAFEHLPSLRQLDLSHNPLADLSPFAFSGSNASVSAPSPLVELILNHIVPPEDERQNRSFEGMVVAALLAGRALQGLRRLELASNHFLYLPRDVLAQLPSLRHLDLSNNSLVSLTYVSFRNLTHLESLHLEDNALKVLHNGTLAELQGLPHIRVFLDNNPWVCDCHMADMVTWLKETEVVQGKDRLTCAYPEKMRNRVLLELNSADLDCDPILPPSLQTSYVFLGIVLALIGAIFLLVLYLNRKGIKKWMHNIRDACRDHMEGYHYRYEINADPRLTNLSSNSDV

SEQ ID NO: 838856 - protein, 420 aa, Homo sapiens; identical to SEQ ID NO: 838855

SEQ ID NO: 838857 - protein, 267 aa, Homo sapiens
DESPRERRRAGGRSGLFSVGQGRRKTLRSGCRMRVPLRSKSDRRGWGGEAGAGFWKEVSGTDWRRLDSKRPVFALRKPRQPPLFTPLSCLSQVPQRIQRGAPTRGEEVAPGRRQEEEREQERGAERPDPPCVLSGGKGRGNRPLREAPGGEGVSQVPAAAPLPRFHERKVFFFQTLPPARALRAQPPEPSERAPSQPSSGETRAAMPGGCSRGPAAGDGRLRLARLALVLLGWVSSSSPTSSASSFSSSAPFLASAVSAQPPLPDQC

SEQ ID NO: 838858 - protein, 420 aa, Homo sapiens; identical to SEQ ID NO: 838855

SEQ ID NO: 838859 - protein, 129 aa, Homo sapiens
MPGGCSRGPAAGDGRLRLARLALVLLGWVSSSSPTSSASSFSSSAPFLASAVSAQPPLPDQCPALCECSEAARTVKCVNRNLTEVPTDLPAYVRNLFLTGNQAWSWPATTSFTCRGMCWPNCPASGTWT

SEQ ID NO: 838860 - protein, 165 aa, Homo sapiens
MAASVVCRAATAGAQVLLRARRSPALLRTPALRSTATFAQALQFVPETQVSLLDNGLRVASEQSSQPTCTVGVWIDVGSRFETEKNNGAGYFLEHLAFKGTKNRPGSALEKEVESMGAHLNAYSTREHTAYYIKALSKDLPKAVELLGDIVQNCSLEDSQIDEGT

SEQ ID NO: 838861 - protein, 136 aa, Homo sapiens
STDVPTVAVCNLNEEGTRCVDVDECAPPAEPCGKGHRCVNSPGSFRCECKTGYYFDGISRTCVDVNECQRYPGRLCDHKCGPVRMSMGAHLNAYSTREHTAYYIKALSKDLPKAVELLGDIVQNCSLEDSQIDEGT

SEQ ID NO: 838862 - protein, 165 aa, Homo sapiens; identical to SEQ ID NO: 838860

SEQ ID NO: 838863 - protein, 165 aa, Homo sapiens; identical to SEQ ID NO: 838860

SEQ ID NO: 838864 - protein, 165 aa, Homo sapiens; identical to SEQ ID NO: 838860

SEQ ID NO: 838865 - protein, 165 aa, Homo sapiens; identical to SEQ ID NO: 838860

SEQ ID NO: 838866 - protein, 165 aa, Homo sapiens; identical to SEQ ID NO: 838860

SEQ ID NO: 838867 - protein, 124 aa, Homo sapiens
MKIDDMMFVLQGQWMRLCTSATESEVARGKNILRNALVSHLDGTTPVCEDIGRSLLTYGRRIPLAEWESRIAEVDASVVREICSKYIYDQCPAVAGYGPIEQLPDYNRIRSGMFWRALLGGKPM

SEQ ID NO: 838868 - protein, 165 aa, Homo sapiens; identical to SEQ ID NO: 838860

SEQ ID NO: 838869 - protein, 124 aa, Homo sapiens; identical to SEQ ID NO: 838867

SEQ ID NO: 838870 - protein, 124 aa, Homo sapiens; identical to SEQ ID NO: 838867

SEQ ID NO: 838871 - protein, 367 aa, Homo sapiens
MCAGTGGSAVRASQPKPGQHNRLSRFPPGGGRAPTVRYCACAATANAPSLRLRGATGPTAAGRWRRPWSVGPLPPGHKCYCAPAARRPCCGRQPCGVRQPSLRRSSSCRRRRLACWTTACVWPPSSPLSPLARWECGLMLAAVLRLRRIMGQATFWSIWLSREQRIGLAVPWRRRWRAWGPILMPTAPGSTQLTTSRRCPRICRKLWSSWVTLCRTVVWKTHRLTKERDVILREMQENDASMRDVVFNYLHATAFQGTPLAQAVEGPSENVRKLSRADLTEYLSTHYKGPLEMVLAAAGEWAQHCVTSAKKLGGSPGLCEERCPLSLRSGGNPRGVPWPARKACGPQSAGRTPQCLWGHPLASHPRG

SEQ ID NO: 838872 - protein, 133 aa, Homo sapiens
MCAGTGGSAVRASQPKPGQHNRLSRFPPGGGRAPTVRYCACAATANAPSLRLRGATGPTAAGRWRRPWSVGPLPPGHKCYCAPAARRPCCGRQPCGVRQPSLRRSSSCRRRRLACWTTACVWPPDLWPPHPPG

SEQ ID NO: 838873 - protein, 140 aa, Homo sapiens
MAASVVCRAATAGAQVLLRARRSPALLRTPALRSTATFAQALQFVPETQVSLLDNGLRVASEQSSQPTCTVGVWIDVGSRFETEKNNGAGYFLEHLAFKRHVLACASRREAYVSKRAGPGFVVPPPPQTQHFGSSNLCHR

SEQ ID NO: 838874 - protein, 167 aa, Homo sapiens
MAASVVCRAATAGAQVLLRARRSPALLRTPALRSTATFAQALQFVPETQVSLLDNGLRVASEQSSQPTCTGVWIDVAHAFRATCSKNHGAQCIAVLVSHLAFHTGNNRIVLCSCPVEKGRWMMQWECPSLNCLQQIRKFNHMGIPTIKRADCRNGICRQKLVFKLLA

SEQ ID NO: 838875 - protein, 165 aa, Homo sapiens; identical to SEQ ID NO: 838860

SEQ ID NO: 838876 - protein, 165 aa, Homo sapiens; identical to SEQ ID NO: 838860

SEQ ID NO: 838877 - protein, 182 aa, Homo sapiens
TVQYSYGLRSRLGASWKMAASVVCRAATAGAQVLLRARRSPALLRTPALRSTATFAQALQFVPETQVSLLDNGLRVASEQSSQPTCTVGVWIDVGSRFETEKNNGAGYFLEHLAFKGTKNRPGSALEKEVESMGAHLNAYSTREHTAYYIKALSKDLPKAVELLGDIVQNCSLEDSQIDEGT

SEQ ID NO: 838878 - protein, 165 aa, Homo sapiens; identical to SEQ ID NO: 838860

SEQ ID NO: 838879 - protein, 165 aa, Homo sapiens; identical to SEQ ID NO: 838860

SEQ ID NO: 838880 - protein, 165 aa, Homo sapiens; identical to SEQ ID NO: 838860

SEQ ID NO: 838881 - protein, 124 aa, Homo sapiens; identical to SEQ ID NO: 838867

SEQ ID NO: 838882 - protein, 124 aa, Homo sapiens; identical to SEQ ID NO: 838867

SEQ ID NO: 838883 - protein, 165 aa, Homo sapiens; identical to SEQ ID NO: 838860

SEQ ID NO: 838884 - protein, 520 aa, Homo sapiens
MCAGTGGSAVRASQPKPGQHNRLSRFPPGGGRAPTVRYCACAATANAPSLRLRGATGPTAAGRWRRPWSVGPLPPGHKCYCAPAARRPCCGRQPCGVRQPSLRRSSSCRRRRLACWTTACVWPPSSPLSPLARWECGLMLAAVLRLRRIMGQATFWSIWLSREQRIGLAVPWRRRWRAWGPILMPTAPGSTQLTTSRRCPRICRKLWSSWVTLCRTVVWKTHRLTKERDVILREMQENDASMRDVVFNYLHATAFQGTPLAQAVEGPSENVRKLSRADLTEYLSTHYKGPLEMGVEHQQLVRPRPEAPRWHPMDICSLTPCRFTGSEIRHRDDALPFAHVAIAVEARTMWPCKWPMPSSATMTALMVVACTCPAHWLQVLWPTSYARVSRPSASAMQRRACWVHTLSVTWMRLCTSATESEVARGKNILRNALVSHLDGTTPVCEDIGRSLLTYGRRIPLAEWESRIAEVDASVVREICSKYIYDQCPAVAGYGPIEQLPDYNRIRSGMFWRALLGGKPM

SEQ ID NO: 838885 - protein, 310 aa, Homo sapiens
MCAGTGGSAVRASQPKPGQHNRLSRFPPGGGRAPTVRYCACAATANAPSLRLRGATGPTAAGRWRRPWSVGPLPPGHKCYCAPAARRPCCGRQPCGVRQPSLRRSSSCRRRRLACWTTACVWPPSSPLSPLARWECGLMLAAVLRLRRIMGQATFWSIWLSREQRIGLAVPWRRRWRAWGPILMPTAPGSTQLTTSRRCPRICRKLWSSWVTLCRTVVWKTHRLTKERDVILREMQENDASMRDVVFNYLAEWESRIAEVDASVVREICSKYIYDQCPAVAGYGPIEQLPDYNRIRSGMFWRALLGGKPM

SEQ ID NO: 838886 - protein, 116 aa, Homo sapiens
MAASVVCRAATAGAQVLLRARRSPALLRTPALRSTATFAQALQFVPETQVSLLDNGLRVASEQSSQPTCTVGVWIDVGSRFETEKNNGAGYFLEHLAFKGTKNRPGSALEKEVEPH

SEQ ID NO: 838887 - protein, 69 aa, Homo sapiens
FEDHAMPHHPTLGDAGRCETGPQPITAIIGDHRREGCDLSQHEVREVLVNLRLEIVCVPVGPGLGWVDL

SEQ ID NO: 838888 - protein, 2962 aa, Homo sapiens
IDQLKSSLNKLETEGTLRICAVMGCIMTEALENKSVHFPLRSKYNRLTKVARFLQENPSCLLCNILHHYLHQANYSIIDDATMSDGLPALVTLKKGLVALARQWMKFIVVTPAFKGVSLHRPAQPLKPQIAMDHEHEDGLGLDNGGGLQSDTSADGAEFEFDAATVSEHTMLLEGTANRPPPGSSGPVTGAEIMRKLSKTHTHSDSALKIKGIHPYHSLSYTSGDTATDSPVHVGRAGMPVKDSPRKESLLSYLTGSFPSLHNLLEGTPQRSSAAVKSSSLTRTGNTVATDMLSEHPLLSEPSSVSFYNWMSNAVGNRGSVLQESPVTKSGHNSLPTGVAPNLPTIPSASDFNTVLSSDQNTLDGTHSQHSTSQDDVAGVEEANQGFPAVQLADAQVVFKPLLSHTGIQSQDTMPFCYRMYFGEHLSFSGTLDCLRADIVDSDTAKERKGKRARRQGHVNLPPLEFKPALMLGTFSISAVVMEKSVCTPQNSTSALSFHDLSKRYYNTFHCNFTISCQSISQHVDMALVRLIHQFSTMIDDIKATQTDIKLSRYTAGSASPTPTFKTRKHRDFRSSDFSRSSRGSLNGGNRVNNAKNKRTNNENNKKESRNKNSLGRSERRTSKVSRKGSKDVVDHMTIHMDDSDSITVSEQSEPSAECWQNMYKLLNFYSLISDPTGILEKSSETFGPAGVRSPTEPTCKVVFENEQDNSSLTKTQRKRSLVTSEPQHVTLIVFGIGMVNRTHLEADIGGLTMESELKRIHGSFTLKEKMKDVLHQKMTETCATAHIGGVNIVLLEGITPNIQLEDFPTSPTSTAKQEFLTVVKCSIAKSQALYSAQRGLKTNNAAVFKVGAISINIPQHPATLHSMMVRSSHQLSKQISDLIRQPSTAPQPVKEDIATPLPSEKTPTSVNQTPVETNEFPQLPEGLEKKPIVLKFSAMLDGIAIGAALLPSLKAEYKMGRMRSHGMTGAQTRFTFELPNHRLRFTSKVSATDMSTIPPSASLNLPPVTMSGKYIMEEHDSYSDQVWSIDELPSKQGYYLQGNYLRCVAEVGSFEHNLTTDLLNHLVFVQKVFMKEVNEVIQKVSGGEQPIPLWNEHDGTADGDKPKILLYSLNLQFKGIQVTATTPSMRAVRFETGLIELELSNRLQTKASPGSSSYLKLFGKCQVDLNLALGQIVKHQVYEEAGSDFHQVAYFKTRIGLRNALREEISGSSDREAVLITLNRPIVYAQPVAFDRAVLFWLNYKAAYDNWNEQRMALHKDIHMATKEVVDMLPGIQQTSAQAFGTLFLQLTVNDLGICLPITNTAQSNHTGDLDTGSALVLTIESTLITACSSESLVSKGHFKNFCIRFADGFETSWDDWKPEIHGDLVMNACVVPDGTYEVCSRTTGQAAAESSSAGTWTLNVLWKMCGIDVHMDPNIGKRLNALGNTLTTLTGEEDIDDIADLNSVNIADLSDEDEVDTMSPTIHTEATDYRRQAASASQPGELRGRKIMKRIVDIRELNEQAKVIDDLKKLGASEGTINQEIQRYQQLESVAVNDIRRDVRKKLRRSSMRAASLKDKWGLSYKPSYSRSKSISASGRPPLKRMERASSRVGETEELPEIRVDAASPGPRVTFNIQDTFPEETELDLLSVTIEGPSHYSSNSEGSCSVFSSPKTPGGFSPGIPFQTEEGRRDDSLSSTSEDSEKDEKDEDHERERFYIYRKPSHTSRKKATGFAAVHQLFTERWPTTPVNRSLSGTATERNIDFELDIRVEIDSGKCVLHPTTLLQEHDDISLRRSYDRSSRSLDQDSPSKKKKFQTNYASTTHLMTGKKVPSSLQTKPSDLETTVFYIPGVDVKLHYNSKTLKTESPNASRGSSLPRTLSKESKLYGMKDSATSPPSPPLPSTVQSKTNTLLPPQPPPIPAAKGKGSGGVKTAKLYAWVALQSLPEEMVISPCLLDFLEKALETIPITPVERNYTAVSSQDEDMGHFEIPDPMEESTTSLVSSSTSAYSSFPVDVVVYVRVQPSQIKFSCLPVSRVECMLKLPSLDLVFSSNRGELETLGTTYPAETLSPGGNATQSGTKTSASKTGIPGSSGLGSPLGRSRHSSSQSDLTSSSSSSSGLSFTACMSDFSLYVFHPYGAGKQKTAVSGLTPGSGGLGNVDEEPTSVTGRKDSLSINLEFVKVSLSRIRRSGGASFFESQSVSKSASKMDTTLINISAVCDIGSASFKYDMRRLSEILAFPRAWYRRSIARRLFLGDQTINLPTSGPGTPDSIEGVSQHLSPESSRKAYCKTWEQPSQSASFTHMPQSPNVFNEHMTNSTMSPGTVGQSLKSPASIRSRSVSDSSVPRRDSLSKTSTPFNKSNKAASQQGTPWETLVVFAINLKQLNVQMNMSNVMGNTTWTTSGLKSQGRLSVGSNRDREISMSVGLGRSQLDSKGGVVGGTIDVNALEMVAHISEHPNQQPSHKIQITMGSTEARVDYMGSSILMGIFSNADLKLQDEWKVNLYNTLDSSITDKSEIFVHGDLKWDIFQVMISRSTTPDLIKIGMKLQEFFTQQFDTSKRALSTWGPVPYLPPKTMTSNLEKSSQEQLLDAAHHRHWPGVLKVVSGCHISLFQIPLPEDGMQFGGSMSLHGNHMTLACFHGPNFRSKSWALFHLEEPNIAFWTEAQKIWEDGSSDHSTYIVQTLDFHLGHNTMVTKPCGALESPMATITKITRRRHENPPHGVASVKEWFNYVTATRNEELNLLRNVDANNTENSTTVKNSSLLSGFRGGSSYNHETETIFALPRMQLDFKSIHVQEPQEPSLQDASLKPKVECSVVTEFTDHICVTMDAELIMFLHDLVSAYLKEKEKAIFPPRILSTRPGQKSPIIIHDDNSSDKDREDSITYTTVDWRDFMCNTWHLEPTLRLISWTGRKIDPVGVDYILQKLGFHHARTTIPKWLQRGVMDPLDKVLSVLIKKLGTALQDEKEKKGKDKEEH

SEQ ID NO: 838889 - protein, 2952 aa, Homo sapiens
IDQLKSSLNKLETEGTLRICAVMGCIMTEALENKSVHFPLRSKYNRLTKVARFLQENPSCLLCNILHHYLHQANYSIIDDATMSDGLPALVTLKKGLVALARQWMKFIVVTPAFKGVSLHRPAQPLKPQIAMDHEHEDGLGLDNGGGLQSDTSADGAEFEFDAATVSEHTMLLEGTANRPPPGSSGPVTGAEIMRKLSKTHTHSDSALKIKGIHPYHSLSYTSGDTATDSPVHVGRAGMPVKDSPRKESLLSYLTGSFPSLHNLLEGTPQRSSAAVKSSSLTRTGNTVATDMLSEHPLLSEPSSVSFYNWMSNAVGNRGSVLQESPVTKSGHNSLPTGVAPNLPTIPSASDFNTVLSSDQNTLDGTHSQHSTSQDDVAGVEEANQGFPAVQLADAQVVFKPLLSHTGIQSQDTMPFCYRMYFGEHLSFSGTLDCLRADIVDSDTAKERKGKRARRQGHVNLPPLEFKPALMLGTFSISAVVMEKSVCTPQNSTSALSFHDLSKRYYNTFHCNFTISCQSISQHVDMALVRLIHQFSTMIDDIKATQTDIKLSRYTAGSASPTPTFKTRKHRDFRSSDFSRSSRGSLNGGNRVNNAKNKRTNNENNKKESRNKNSLGRSERRTSKVSRKGSKDVVDHMTIHMDDSDSITVSEQSEPSAECWQNMYKLLNFYSLISDPTGILEKSSETFGPAGVRSPTEPTCKVVFENEQDNSSLTKTQRKRSLVTSEPQHVTLIVFGIGMVNRTHLEADIGGLTMESELKRIHGSFTLKEKMKDVLHQKMTETCATAHIGGVNIVLLEGITPNIQLEDFPTSPTSTAKQEFLTVVKCSIAKSQALYSAQRGLKTNNAAVFKVGAISINIPQHPATLHSMMVRSSHQLSKQISDLIRQPSTAPQPVKEDIATPLPSEKTPTSVNQTPVETNEFPQLPEGLEKKPIVLKFSAMLDGIAIGAALLPSLKAEYKMGRMRSHGMTGAQTRFTFELPNHRLRFTSKVSATDMSTIPPSASLNLPPVTMSGKYIMEEHDSYSDQVWSIDELPSKQGYYLQGNYLRCVAEVGSFEHNLTTDLLNHLVFVQKVFMKEVNEVIQKVSGGEQPIPLWNEHDGTADGDKPKILLYSLNLQFKGIQVTATTPSMRAVRFETGLIELELSNRLQTKASPGSSSYLKLFGKCQVDLNLALGQIVKHQVYEEAGSDFHQVAYFKTRIGLRNALREEISGSSDREAVLITLNRPIVYAQPVAFDRAVLFWLNYKAAYDNWNEQRMALHKDIHMATKEVVDMLPGIQQTSAQAFGTLFLQLTVNDLGICLPITNTAQSNHTGDLDTGSALVLTIESTLITACSSESLVSKGHFKNFCIRFADGFETSWDDWKPEIHGDLVMNACVVPDGTYEVCSRTTGQAAAGEEDIDDIADLNSVNIADLSDEDEVDTMSPTIHTSSDGSSISGDGHKLTFGQRLVNHLLGLTPPNQRHSVPAEYLCDPEMWGSPQSSQSHLKACRAHSWGNEATDYRRQAASASQPGELRGRKIMKRIVDIRELNEQAKVIDDLKKLGASEGTINQEIQRYQQLESVAVNDIRRDVRKKLRRSSMRAASLKDKWGLSYKPSYSRSKSISASGRPPLKRMERASSRVGETEELPEIRVDAASPGPRVTFNIQDTFPEETELDLLSVTIEGPSHYSSNSEGSCSVFSSPKTPGGFSPGIPFQTEEGRRDDSLSSTSEDSEKDEKDEDHERERFYIYRKPSHTSRKKATGFAAVHQLFTERWPTTPVNRSLSGTATERNIDFELDIRVEIDSGKCVLHPTTLLQEHDDISLRRSYDRSSRSLDQDSPSKKKKFQTNYASTTHLMTGKKVPSSLQTKPSDLETTVFYIPGVDVKLHYNSKTLKTESPNASRGSSLPRTLSKESKLYAKGKGSGGVKTAKLYAWVALQSLPEEMVISPCLLDFLEKALETIPITPVERNYTAVSSQDEDMGHFEIPDPMEESTTSLVSSSTSAYSSFPVDVVVYVRVQPSQIKFSCLPVSRVECMLKLPSLDLVFSSNRGELETLGTTYPAETLSPGGNATQSGTKTSASKTGIPGSSGLGSPLGRSRHSSSQSDLTSSSSSSSGLSFTACMSDFSLYVFHPYGAGKQKTAVSGLTPGSGGLGNVDEEPTSVTGRKDSLSINLEFVKVSLSRIRRSGGASFFESQSVSKSASKMDTTLINISAVCDIGSASFKYDMRRLSEILAFPRAWYRRSIARRLFLGDQTINLPTSGPGTPDSIEGVSQHLSPESSRKAYCKTWEQPSQSASFTHMPQSPNVFNEHMTNSTMSPGTVGQSLKSPASIRSRSVSDSSVPRRDSLSKTSTPFNKSNKAASQQGTPWETLVVFAINLKQLNVQMNMSNVMGNTTWTTSGLKSQGRLSVGSNRDREISMSVGLGRSQLDSKGGVVGGTIDVNALEMVAHISEHPNQQPSHKIQITMGSTEARVDYMGSSILMGIFSNADLKLQDEWKVNLYNTLDSSITDKSEIFVHGDLKWDIFQVMISRSTTPDLIKIGMKLQEFFTQQFDTSKRALSTWGPVPYLPPKTMTSNLEKSSQEQLLDAAHHRHWPGVLKVVSGCHISLFQIPLPEDGMQFGGSMSLHGNHMTLACFHGPNFRSKSWALFHLEEPNIAFWTEAQKIWEDGSSDHSTYIVQTLDFHLGHNTMVTKPCGALESPMATITKITRRRHENPPHGVASVKEWFNYVTATRNEELNLLRNVDANNTENSTTVKNSSLLSGFRGGSSYNHETETIFALPRMQLDFKSIHVQEPQEPSLQDASLKPKVECSVVTEFTDHICVTMDAELIMFLHDLVSAYLKEKEKAIFPPRILSTRPGQKSPIIIHDDNSSDKDREDSITYTTVDWRDFMCNTWHLEPTLRLISWTGRKIDPVGVDYILQKLGFHHARTTIPKWLQRGVMDPLDKVLSVLIKKLGTALQDEKEKKGKDKEEH

SEQ ID NO: 838890 - protein, 2952 aa, Homo sapiens; identical to SEQ ID NO: 838889

SEQ ID NO: 838891 - protein, 2198 aa, Homo sapiens
IDQLKSSLNKLETEGTLRICAVMGCIMTEALENKSVHFPLRSKYNRLTKVARFLQENPSCLLCNILHHYLHQANYSIIDDATMSDGLPALVTLKKGLVALARQWMKFIVVTPAFKGVSLHRPAQPLKPQIAMDHEHEDGLGLDNGGGLQSDTSADGAEFEFDAATVSEHTMLLEGTANRPPPGSSGPVTGAEIMRKLSKTHTHSDSALKIKGIHPYHSLSYTSGDTATDSPVHVGRAGMPVKDSPRKESLLSYLTGSFPSLHNLLEGTPQRSSAAVKSSSLTRTGNTVATDMLSEHPLLSEPSSVSFYNWMSNAVGNRGSVLQESPVTKSGHNSLPTGVAPNLPTIPSASDFNTVLSSDQNTLDGTHSQHSTSQDDVAGVEEANQGFPAVQLADAQVVFKPLLSHTGIQSQDTMPFCYRMYFGEHLSFSGTLDCLRADIVDSDTAKERKGKRARRQGHVNLPPLEFKPALMLGTFSISAVVMEKSVCTPQNSTSALSFHDLSKRYYNTFHCNFTISCQSISQHVDMALVRLIHQFSTMIDDIKATQTDIKLSRYTAGSASPTPTFKTRKHRDFRSSDFSRSSRGSLNGGNRVNNAKNKRTNNENNKKESRNKNSLGRSERRTSKVSRKGSKDVVDHMTIHMDDSDSITVSEQSEPSAECWQNMYKLLNFYSLISDPTGILEKSSETFGPAGVRSPTEPTCKVVFENEQDNSSLTKTQRKRSLVTSEPQHVTLIVFGIGMVNRTHLEADIGGLTMESELKRIHGSFTLKEKMKDVLHQKMTETCATAHIGGVNIVLLEGITPNIQLEDFPTSPTSTAKQEFLTVVKCSIAKSQALYSAQRGLKTNNAAVFKVGAISINIPQHPATLHSMMVRSSHQLSKQISDLIRQPSTAPQPVKEDIATPLPSEKTPTSVNQTPVETNEFPQLPEGLEKKPIVLKFSAMLDGIAIGAALLPSLKAEYKMGRMRSHGMTGAQTRFTFELPNHRLRFTSKVSATDMSTIPPSASLNLPPVTMSGKYIMEEHDSYSDQVWSIDELPSKQGYYLQGNYLRCVAEVGSFEHNLTTDLLNHLVFVQKVFMKEVNEVIQKVSGGEQPIPLWNEHDGTADGDKPKILLYSLNLQFKGIQVTATTPSMRAVRFETGLIELELSNRLQTKASPGSSSYLKLFGKCQVDLNLALGQIVKHQVYEEAGSDFHQVAYFKTRIGLRNALREEISGSSDREAVLITLNRPIVYAQPVAFDRAVLFWLNYKAAYDNWNEQRMALHKDIHMATKEVVDMLPGIQQTSAQAFGTLFLQLTVNDLGICLPITNTAQSNHTGDLDTGSALVLTIESTLITACSSESLVSKGHFKNFCIRFADGFETSWDDWKPEIHGDLVMNACVVPDGTYEVCSRTTGQAAAGEEDIDDIADLNSVNIADLSDEDEVDTMSPTIHTSSDGSSISGDGHKLTFGQRLVNHLLGLTPPNQRHSVPAEYLCDPEMWGSPQSSQSHLKACRAHSWGNEATDYRRQAASASQPGELRGRKIMKRIVDIRELNEQAKVIDDLKKLGASEGTINQEIQRYQQLESVAVNDIRRDVRKKLRRSSMRAASLKDKWGLSYKPSYSRSKSISASGRPPLKRMERASSRVGETEELPEIRVDAASPGPRVTFNIQDTFPEETELDLLSVTIEGPSHYSSNSEGSCSVFSSPKTPGGFSPGIPFQTEEGRRDDSLSSTSEDSEKDEKDEDHERERFYIYRKPSHTSRKKATGFAAVHQLFTERWPTTPVNRSLSGTATERNIDFELDIRVEIDSGKCVLHPTTLLQEHDDISLRRSYDRSSRSLDQDSPSKKKKFQTNYASTTHLMTGKKVPSSLQTKPSDLETTVFYIPGVDVKLHYNSKTLKTESPNASRGSSLPRTLSKESKLYAKGKGSGGVKTAKLYAWVALQSLPEEMVISPCLLDFLEKALETIPITPVERNYTAVSSQDEDMGHFEIPDPMEESTTSLVSSSTSAYSSFPVDVVVYVRVQPSQIKFSCLPVSRVECMLKLPSLDLVFSSNRGELETLGTTYPAETLSPGGNATQSGTKTSASKTGIPGSSGLGSPLGRSRHSSSQSDLTSSSSSSSGLSFTACMSDFSLYVFHPYGAGKQKTAVSGLTPGSGGLGNVDEEPTSVTGRKDSLSINLEFVKVSLSRIRRSGGASFFESQSVSKSASKMDTTLINISGTQFYSF

SEQ ID NO: 838892 - protein, 1637 aa, Homo sapiens
IDQLKSSLNKLETEGTLRICAVMGCIMTEALENKSVHFPLRSKYNRLTKVARFLQENPSCLLCNILHHYLHQANYSIIDDATMSDGLPALVTLKKGLVALARQWMKFIVVTPAFKGVSLHRPAQPLKPQIAMDHEHEDGLGLDNGGGLQSDTSADGAEFEFDAATVSEHTMLLEGTANRPPPGSSGPVTGAEIMRKLSKTHTHSDSALKIKGIHPYHSLSYTSGDTATDSPVHVGRAGMPVKDSPRKESLLSYLTGSFPSLHNLLEGTPQRSSAAVKSSSLTRTGNTVATDMLSEHPLLSEPSSVSFYNWMSNAVGNRGSVLQESPVTKSGHNSLPTGVAPNLPTIPSASDFNTVLSSDQNTLDGTHSQHSTSQDDVAGVEEANQGFPAVQLADAQVVFKPLLSHTGIQSQDTMPFCYRMYFGEHLSFSGTLDCLRADIVDSDTAKERKGKRARRQGHVNLPPLEFKPALMLGTFSISAVVMEKSVCTPQNSTSALSFHDLSKRYYNTFHCNFTISCQSISQHVDMALVRLIHQFSTMIDDIKATQTDIKLSRYTAGSASPTPTFKTRKHRDFRSSDFSRSSRGSLNGGNRVNNAKNKRTNNENNKKESRNKNSLGRSERRTSKVSRKGSKDVVDHMTIHMDDSDSITVSEQSEPSAECWQNMYKLLNFYSLISDPTGILEKSSETFGPAGVRSPTEPTCKVVFENEQDNSSLTKTQRKRSLVTSEPQHVTLIVFGIGMVNRTHLEADIGGLTMESELKRIHGSFTLKEKMKDVLHQKMTETCATAHIGGVNIVLLEGITPNIQLEDFPTSPTSTAKQEFLTVVKCSIAKSQALYSAQRGLKTNNAAVFKVGAISINIPQHPATLHSMMVRSSHQLSKQISDLIRQPSTAPQPVKEDIATPLPSEKTPTSVNQTPVETNEFPQLPEGLEKKPIVLKFSAMLDGIAIGAALLPSLKAEYKMGRMRSHGMTGAQTRFTFELPNHRLRFTSKVSATDMSTIPPSASLNLPPVTMSGKYIMEEHDSYSDQVWSIDELPSKQGYYLQGNYLRCVAEVGSFEHNLTTDLLNHLVFVQKVFMKEVNEVIQKVSGGEQPIPLWNEHDGTADGDKPKILLYSLNLQFKGIQVTATTPSMRAVRFETGLIELELSNRLQTKASPGSSSYLKLFGKCQVDLNLALGQIVKHQVYEEAGSDFHQVAYFKTRIGLRNALREEISGSSDREAVLITLNRPIVYAQPVAFDRAVLFWLNYKAAYDNWNEQRMALHKDIHMATKEVVDMLPGIQQTSAQAFGTLFLQLTVNDLGICLPITNTAQSNHTGDLDTGSALVLTIESTLITACSSESLVSKGHFKNFCIRFADGFETSWDDWKPEIHGDLVMNACVVPDGTYEVCSRTTGQAAAESSSAGTWTLNVLWKMCGIDVHMDPNIGKRLNALGNTLTTLTGEEDIDDIADLNSVNIADLSDEDEVDTMSPTIHTEATDYRRQAASASQPGELRGRKIMKRIVDIRELNEQAKVIDDLKKLGASEGTINQEIQRYQQLESVAVNDIRRDVRKKLRRSSMRAASLKDKWGLSYKPSYSRSKSISASGRPPLKRMERASSRVGETEELPEIRVDAASPGPRVTFNIQDTIAEIRRKKISFKVVF

SEQ ID NO: 838893 - protein, 500 aa, Homo sapiens
MGTARWLALGSLFALAGLLEGRLVGEEEAGFGECDKFFYAGTPPAGLAADSHVKICQRAEGAERFATLYSTRDRIPVYSAFRAPRPAPGGAEQRWLVEPQIDDPNSNLEEAINEAEAITSVNSLGSKQALNTDYLDSDYQRGQLYPFSLSSDVQVATFTLTNSAPMTQSFQERWYVNLHSLMDRALTPQCGSGEDLYILTGTVPSDYRVKDKVAVPEFVWLAACCAVPGGGWAMGFVKHTRDSDIIEDVMVKDLQKLLPFNPQLFQNNCGETEQDTEKMKKILEVVNQIQDEERMVQSQKSSSPLSSTRSKRSTLLPPEASEGSSSFLGKLMGFIATPFIKLFQLIYYLVVAILKNIVYFLWCVTKQVINGIESCLYRLGSATISYFMAIGEELVSIPWKVLKVVAKVIRALLRILCCLLKAICRVLSIPVRVLVDVATFPVYTMGAIPIVCKDIALGLGGTVSLLFDTAFGTLGGLFQVVFSVCKRIGYKVTFDNSGEL

SEQ ID NO: 838894 - protein, 500 aa, Homo sapiens; identical to SEQ ID NO: 838893

SEQ ID NO: 838895 - protein, 500 aa, Homo sapiens; identical to SEQ ID NO: 838893

SEQ ID NO: 838896 - protein, 500 aa, Homo sapiens; identical to SEQ ID NO: 838893

SEQ ID NO: 838897 - protein, 500 aa, Homo sapiens; identical to SEQ ID NO: 838893

SEQ ID NO: 838898 - protein, 489 aa, Homo sapiens
MGTARWLALGSLFALAGLLEGRLVGEEEAGFGECDKFFYAGTPPAGLAADSHVKICQRAEGAERFATLYSTRDRIPVYSAFRAPRPAPGGAEQRWLVEPQIDDPNSNLEEAINEAEAITSVNSLGSKQALNTDYLDSDYQRGQLYPFSLSSDVQVATFTLTNSAPMTQSFQERWYVNLHSLMDRALTPQCGSGEDLYILTGTVPSDYRVKDKVAVPEFVWLAACCAVPGGGWAMGFVKHTRDSDIIEDVMVKDLQKLLPFNPQLFQNNCGETEQDTEKMKKILEVVNQIQDEERMVQSQKRSTLLPPEASEGSSSFLGKLMGFIATPFIKLFQLIYYLVVAILKNIVYFLWCVTKQVINGIESCLYRLGSATISYFMAIGEELVSIPWKVLKVVAKVIRALLRILCCLLKAICRVLSIPVRVLVDVATFPVYTMGAIPIVCKDIALGLGGTVSLLFDTAFGTLGGLFQVVFSVCKRIGYKVTFDNSGEL

SEQ ID NO: 838899 - protein, 500 aa, Homo sapiens; identical to SEQ ID NO: 838893

SEQ ID NO: 838900 - protein, 500 aa, Homo sapiens; identical to SEQ ID NO: 838893

SEQ ID NO: 838901 - protein, 500 aa, Homo sapiens; identical to SEQ ID NO: 838893

SEQ ID NO: 838902 - protein, 500 aa, Homo sapiens; identical to SEQ ID NO: 838893

SEQ ID NO: 838903 - protein, 69 aa, Homo sapiens
EPLSLALRWHLPCARYWAKCFVRTTTLQVVTIIILILQKGKLRHKEHALSYGYLVAETGPTPSGFRVQA

SEQ ID NO: 838904 - protein, 253 aa, Homo sapiens
LLVVLLRTVFLGLVVRFPSFPFFLSFSVMFSVCRPPGGGLFFCILLPPSLGTPLVGDGFPPLCAPPESPLFGVFFTKPLAGGAPARAFYMWWREIPRPVVLFPGGLPLDPLLWPLLAPLPPWAPPAPPPRVLFLKTFFSGPSAARAANGFVFFFFCFFFLIFFFFFFFFIFNCLVFPAFIGSCRNQIGRSSVPAAPNVEKYSRSIPKEPTPMTWTQESYNLRGLFPSVHCRAHATHHLACPDPRRATPCDNSR

SEQ ID NO: 838905 - protein, 491 aa, Homo sapiens
MIATGGVITGLAALKRQDSARSQQHVNLSPSPATQEKKPIRRRPRADVVVVRGKIRLYSPSGFFLILGVLISIIGIAMAVLGYWPQKEHFIDAETTLSTNETQVIRNEGGVVVRFFEQHLHSDKMKMLGPFTMGIGIFIFICANAILHENRDKETKIIHMRDIYSTVIDIHTLRIKEQRQMNGMYTGLMGETEVKQNGSSCASRLAANTIASFSGFRSSFRMDSSVEEDELMLNEGKSSGHLMPPLLSDSSVSVFGLYPPPSKTTDDKTSGSKKCETKSIVSSSISAFTLPVIKLNNCVIDEPSIDNITEDADNLKSRSRNLSMDSLVVPLPNTSESFQPVSTVLPRNNSIGESLSSQYKSSMALGPGAGQLLSPGAARRQFGSNTSLHLLSSHSKSLDLDRGPSTLTVQAEQRKHPSWPRLDRNNSKGYMKLENKEDPMDRLLVPQVAIKKDFTNKEKLLMISRSHNNLSFEHDEFLSNNLKRGTSETRF

SEQ ID NO: 838906 - protein, 491 aa, Homo sapiens; identical to SEQ ID NO: 838905

SEQ ID NO: 838907 - protein, 542 aa, Homo sapiens
MTFSEILDRVGSMGHFQFLHVAILGLPILNMANHNLLQIFTAATPVHHCRPPHNASTGPWVLPMGPNGKPERCLRFVHPPNASLPNDTQRAMEPCLDGWVYNSTKDSIVTEWDLVCNSNKLKEMAQSIFMAGILIGGLVLGDLSDRFGRRPILTCSYLLLAASGSGAAFSPTFPIYMVFRFLCGFGISGITLSTVILNVEWVPTRMRAIMSTALGYCYTFGQFILPGLAYAIPQWRWLQLTVSIPFFVFFLSSWWTPESIRWLVLSGKSSKALKILRRVAVFNGKKEEGERLSLEELKLNLQKEISLAKAKYTASDLFRIPMLRRMTFCLSLAWFATGFAYYSLAMGVEEFGVNLYILQIIFGGVDVPAKFITILSLSYLGRHTTQAAALLLAGGAILALTFVPLDLQTVRTVLAVFGKGCLSSSFSCLFLYTSELYPTVIRQTGMGVSNLWTRVGSMVSPLVKITGEVQPFIPNIIYGITALLGGSAALFLPETLNQPLPETIEDLENWSLRAKKPKQEPEVEKASQRIPLQPHGPGLGSS

SEQ ID NO: 838908 - protein, 533 aa, Homo sapiens
MTFSEILDRVGSMGHFQFLHVAILGLPILNMANHNLLQIFTAATPVHHCRPPHNASTGPWVLPMGPNGKPERCLRFVHPPNASLPNDTQRAMEPCLDGWVYNSTKDSIVTEWDLVCNSNKLKEMAQSIFMAGILIGGLVLGDLSDRFGRRPILTCSYLLLAASGSGAAFSPTFPIYMVFRFLCGFGISGITLSTVILNVEWVPTRMRAIMSTALGYCYTFGQFILPGLAYAIPQWRWLQLTVSIPFFVFFLSSWWTPESIRWLVLSGKSSKALKILRRVAVFNGKKEEGERLSLEELKLNLQKEISLAKAKYTASDLFRIPMLRRMTFCLSLAWFATGFAYYSLAMGVEEFGVNLYILQIIFGGVDVPAKFITILSLSYLGRHTTQAAALLLAGGAILALTFVPLDLQTVRTVLAVFGKGCLSSSFSCLFLYTSELYPTVIRQTGMGVSNLWTRVGSMVSPLVKITGEVQPFIPNIIYGITALLGGSAALFLPETLNQPLPETIEDLENWSVTASGPISAPPWGSRSGPRAFP

SEQ ID NO: 838909 - protein, 533 aa, Homo sapiens; identical to SEQ ID NO: 838908

SEQ ID NO: 838910 - protein, 451 aa, Homo sapiens
MEPCLDGWVYNSTKDSIVTEWDLVCNSNKLKEMAQSIFMAGILIGGLVLGDLSDRFGRRPILTCSYLLLAASGSGAAFSPTFPIYMVFRFLCGFGISGITLSTVILNVEWVPTRMRAIMSTALGYCYTFGQFILPGLAYAIPQWRWLQLTVSIPFFVFFLSSWWTPESIRWLVLSGKSSKALKILRRVAVFNGKKEEGERLSLEELKLNLQKEISLAKAKYTASDLFRIPMLRRMTFCLSLAWFATGFAYYSLAMGVEEFGVNLYILQIIFGGVDVPAKFITILSLSYLGRHTTQAAALLLAGGAILALTFVPLDLQTVRTVLAVFGKGCLSSSFSCLFLYTSELYPTVIRQTGMGVSNLWTRVGSMVSPLVKITGEVQPFIPNIIYGITALLGGSAALFLPETLNQPLPETIEDLENWSLRAKKPKQEPEVEKASQRIPLQPHGPGLGSS

SEQ ID NO: 838911 - protein, 533 aa, Homo sapiens; identical to SEQ ID NO: 838908

SEQ ID NO: 838912 - protein, 533 aa, Homo sapiens; identical to SEQ ID NO: 838908

SEQ ID NO: 838913 - protein, 104 aa, Homo sapiens
MLLPWIFATHVSDPFMSPYHHSLESDTQSCLESQQSSCSGIHRDPRVLHTPALGSLARQEICLYISLGKGLNPRSQTASFCRLHFHGTSQFKTLWLGIPAGQWQ

SEQ ID NO: 838914 - protein, 368 aa, Homo sapiens
MAIKSIASRLRGSRRFLSGFVAGAVVGAAGAGLAALQFFRSQGAEGALTGKQPDGSAEKAVLEQFGFPLTGTEARCYTNHALSYDQAKRVPRWVLEHISKSKIMGDADRKHCKFKPDPNIPPTFSAFNEDYVGSGWSRGHMAPAGNNKFSSKAMAETFYLSNIVPQDFDNNSGYWNRIEMYCRELTERFEDVWVVSGPLTLPQTRGDGKKIVSYQVIGEDNVAVPSHLYKVILARRSSVSTEPLALGAFVVPNEAIGFQPQLTEFQVSLQDLEKLSGLVFFPHLDRTSDIRNICSVDTCKLLDFQEFTLYLSTRKIEGARSVLRLEKIMENLKNAEIEPDDYFMSRYEKKLEELKAKEQSGTQIRKPS

SEQ ID NO: 838915 - protein, 186 aa, Homo sapiens
MAETFYLSNIVPQDFDNNSGYWNRIEMYCRELTERFEDVWVVSGPLTLPQTRGDGKKIVSYQVIGEDNVAVPSHLYKDHAGCCVESPLGTRTSEEATARIQERDDGGSDQRSGLVELGIYFKVEPTGFPAGLDVGCEKQRGGKDDVKGFGLSSWKSSRAPPWGLLSGFNCLLGPVGEAETETEGRG

SEQ ID NO: 838916 - protein, 318 aa, Homo sapiens
MAIKSIASRLRGSRRFLSGFVAGAVVGAAGAGLAALQFFRSQGAEGALTGKQPDGDADRKHCKFKPDPNIPPTFSAFNEDYVGSGWSRGHMAPAGNNKFSSKAMAETFYLSNIVPQDFDNNSGYWNRIEMYCRELTERFEDVWVVSGPLTLPQTRGDGKKIVSYQVIGEDNVAVPSHLYKVILARRSSVSTEPLALGAFVVPNEAIGFQPQLTEFQVSLQDLEKLSGLVFFPHLDRTSDIRNICSVDTCKLLDFQEFTLYLSTRKIEGARSVLRLEKIMENLKNAEIEPDDYFMSRYEKKLEELKAKEQSGTQIRKPS

SEQ ID NO: 838917 - protein, 368 aa, Homo sapiens; identical to SEQ ID NO: 838914

SEQ ID NO: 838918 - protein, 437 aa, Homo sapiens
MAIKSIASRLRGSRRFLSGFVAGAVVGAAGAGLAALQFFRSQGAEGALTGKQPDGSAEKAVLEQFGFPLTGTEARCYTNHALSYDQAKRVPRWVLEHISKSKIMGRFFKFTLLASLFLLSLNLHLWLVLNFWVQVTLLPQPPEYAGITGTTWKVVLALNGERSKGRYKVCSREGDADRKHCKFKPDPNIPPTFSAFNEDYVGSGWSRGHMAPAGNNKFSSKAMAETFYLSNIVPQDFDNNSGYWNRIEMYCRELTERFEDVWVVSGPLTLPQTRGDGKKIVSYQVIGEDNVAVPSHLYKVILARRSSVSTEPLALGAFVVPNEAIGFQPQLTEFQVSLQDLEKLSGLVFFPHLDRTSDIRNICSVDTCKLLDFQEFTLYLSTRKIEGARSVLRLEKIMENLKNAEIEPDDYFMSRYEKKLEELKAKEQSGTQIRKPS

SEQ ID NO: 838919 - protein, 368 aa, Homo sapiens; identical to SEQ ID NO: 838914

SEQ ID NO: 838920 - protein, 165 aa, Homo sapiens
MIYTMKKVHALWASVCLLLNLAPAPLNADSEEDEEHTIITDTELPPLKLMHSFCAFKADDGPCKAIMKRFFFNIFTRQCEEFIYGGCEGNQNRFESLEECKKMCTRDNANRIIKTTLQQEKPDFCFLEEDPGICRGYITRYFYNNQTKQCERFKYGWMPGQYEQF

SEQ ID NO: 838921 - protein, 165 aa, Homo sapiens; identical to SEQ ID NO: 838920

SEQ ID NO: 838922 - protein, 165 aa, Homo sapiens; identical to SEQ ID NO: 838920

SEQ ID NO: 838923 - protein, 165 aa, Homo sapiens; identical to SEQ ID NO: 838920

SEQ ID NO: 838924 - protein, 165 aa, Homo sapiens; identical to SEQ ID NO: 838920

SEQ ID NO: 838925 - protein, 165 aa, Homo sapiens; identical to SEQ ID NO: 838920

SEQ ID NO: 838926 - protein, 165 aa, Homo sapiens; identical to SEQ ID NO: 838920

SEQ ID NO: 838927 - protein, 208 aa, Homo sapiens
MGDVKEIRIDLKVWKSAKKCVQEKSQISAFWKKILEYVEVILPGIFITIRQNSVNVSSMGGCLGNMNNFETLEECKNICEDGPNGFQVDNYGTQLNAVNNSLTPQSTKVPSLFEFHGPSWCLTPADRGLCRANENRFYYNSVIGKCRPFKYSGCGGNENNFTSKQECLRACKKGFIQRISKGGLIKTKRKRKKQRVKIAYEEIFVKNM

SEQ ID NO: 838928 - protein, 165 aa, Homo sapiens; identical to SEQ ID NO: 838920

SEQ ID NO: 838929 - protein, 165 aa, Homo sapiens; identical to SEQ ID NO: 838920

SEQ ID NO: 838930 - protein, 113 aa, Homo sapiens
RFSAFWLRSSVVSVLISLISDTSSIRGQYIKWIFGNRRWNRSLLRPLHASTWYCSTSRNGAPYSTGGWQDGRIGRAPVYSSRRDQRRRWVISAFPAEVSGSSHRDWLDRGCSP

SEQ ID NO: 838931 - protein, 165 aa, Homo sapiens; identical to SEQ ID NO: 838920

SEQ ID NO: 838932 - protein, 165 aa, Homo sapiens; identical to SEQ ID NO: 838920

SEQ ID NO: 838933 - protein, 165 aa, Homo sapiens; identical to SEQ ID NO: 838920

SEQ ID NO: 838934 - protein, 165 aa, Homo sapiens; identical to SEQ ID NO: 838920

SEQ ID NO: 838935 - protein, 208 aa, Homo sapiens; identical to SEQ ID NO: 838927

SEQ ID NO: 838936 - protein, 161 aa, Homo sapiens
MKLPEVCFFNCCTLHESKYEIVTMFIYFNWLYFFPANGFQVDNYGTQLNAVNNSLTPQSTKVPSLFEFHGPSWCLTPADRGLCRANENRFYYNSVIGKCRPFKYSGCGGNENNFTSKQECLRACKKGFIQRISKGGLIKTKRKRKKQRVKIAYEEIFVKNM

SEQ ID NO: 838937 - protein, 68 aa, Homo sapiens
KKHTYRDYIDKVTSCSQDSMYVVTQLINTGDLWEHYDTARGYCVLRFRVRAVEPCKTGTVRRLRNEKS

SEQ ID NO: 838938 - protein, 602 aa, Homo sapiens
GPLAAWLQHQAPGSEWPGSAPRGRGRRARALLGSAGPPRRSASLVPRQTPLYDRRSPRGRGCGGQRGAPAGSPSRLPCPAERPWSTHPDASPATTGDPSGRLKVQVLGPRLKPTNPEPQARGMAAPLEAQDQAPGEGEGLLIVKVEDSSWEQESAQHEDGRDSEACRQRFRQFCYGDVHGPHEAFSQLWELCCRWLRPELRTKEQILELLVLEQFLTVLPGEIQGWVREQHPGSGEEAVALVEDLQKQPVKAWRQGVNSVSPGLARADEHVVVPAQDVPSEEAEPEAAGRGSQATGPPPTVGARRRPSVPQEQHSHSAQPPALLKEGRPGETTDTCFVSGVHGPVALGDIPFYFSREEWGTLDPAQRDLFWDIKRENSRNTTLGFGLKGQSEKSLLQEMVPVVPGQTGSDVTVSWSPEEAEAWESENRPRAALGPVVGARRGRPPTRRRQFRDLAAEKPHSCGQCGKRFRWGSDLARHQRTHTGEKPHKCPECDKSFRSSSDLVRHQGVHTGEKPFSCSECGKSFSRSAYLADHQRIHTGEKPFGCSDCGKSFSLRSYLLDHRRVHTGERPFGCGECDKSFKQRAHLIAHQSLHAKMAQPVG

SEQ ID NO: 838939 - protein, 602 aa, Homo sapiens; identical to SEQ ID NO: 838938

SEQ ID NO: 838940 - protein, 93 aa, Homo sapiens
LFHLTHPVPASAAGRPEPGLLTPFQGPVALGDIPFYFSREEWGTLDPAQRDLFWDIKRENSRNTTLGKHPGPLGPGWPPPILLELQSCFPPHP

SEQ ID NO: 838941 - protein, 575 aa, Homo sapiens
MEKAGSVDERLSGSWGMLAYRSFPASPARTSGAGSSRRKWDLLGRSGRCVFRGRGCGGQRGAPAGSPSRLPCPAERPWSTHPDASPATTGDPSGRLKVQVLGPRLKPTNPEPQARGMAAPLEAQDQAPGEGEGLLIVKVEDSSWEQESAQHEDGRDSEACRQRFRQFCYGDVHGPHEAFSQLWELCCRWLRPELRTKEQILELLVLEQFLTVLPGEIQGWVREQHPGSGEEAVALVEDLQKQPVKAWRQDVPSEEAEPEAAGRGSQATGPPPTVGARRRPSVPQEQHSHSAQPPALLKEGRPGETTDTCFVSGVHGPVALGDIPFYFSREEWGTLDPAQRDLFWDIKRENSRNTTLGFGLKGQSEKSLLQEMVPVVPGQTGSDVTVSWSPEEAEAWESENRPRAALGPVVGARRGRPPTRRRQFRDLAAEKPHSCGQCGKRFRWGSDLARHQRTHTGEKPHKCPECDKSFRSSSDLVRHQGVHTGEKPFSCSECGKSFSRSAYLADHQRIHTGEKPFGCSDCGKSFSLRSYLLDHRRVHTGERPFGCGECDKSFKQRAHLIAHQSLHAKMAQPVG

SEQ ID NO: 838942 - protein, 618 aa, Homo sapiens
PNSRSASPVLFQSRGRRVVRLVTLSVARHFEWPGSAPRGRGRRARALLGSAGPPRRSASLVPRQTPLYDRRSPRGRGCGGQRGAPAGSPSRLPCPAERPWSTHPDASPATTGDPSGRLKVQVLGPRLKPTNPEPQARGMAAPLEAQDQAPGEGEGLLIVKVEDSSWEQESAQHEDGRDSEACRQRFRQFCYGDVHGPHEAFSQLWELCCRWLRPELRTKEQILELLVLEQFLTVLPGEIQGWVREQHPGSGEEAVALVEDLQKQPVKAWRQGVNSVSPGLARADEHVVVPAQDVPSEEAEPEAAGRGSQATGPPPTVGARRRPSVPQEQHSHSAQPPALLKEGRPGETTDTCFVSGVHGPVALGDIPFYFSREEWGTLDPAQRDLFWDIKRENSRNTTLGFGLKGQSEKSLLQEMVPVVPGQTGSDVTVSWSPEEAEAWESENRPRAALGPVVGARRGRPPTRRRQFRDLAAEKPHSCGQCGKRFRWGSDLARHQRTHTGEKPHKCPECDKSFRSSSDLVRHQGVHTGEKPFSCSECGKSFSRSAYLADHQRIHTGEKPFGCSDCGKSFSLRSYLLDHRRVHTGERPFGCGECDKSFKQRAHLIAHQSLHAKMAQPVG

SEQ ID NO: 838943 - protein, 126 aa, Homo sapiens
MGSLKLGAKRVSFGLAVVFTSFCLTGSEDCRDRYCYAEFFMFISGTHCILFFNYMCYSELGDLGWDSKINDLRNSIPYIRTRACSKGCCDMVLTQKDAFGYHPQECLQKVFSEDNKEYLCFHWEEE

SEQ ID NO: 838944 - protein, 139 aa, Homo sapiens
KGCAWEKLDLLIKSKIFPNQFGNDLKCEGKGFIKFRYRRPWKRTFILEGTGGVSLVGEGWGGGFIRVVCLLPFSLFLTPFLSSPAKLLPCPATTFSALSFFPFAHAQLLTHKDFVDFVCIVDGMAALIPSLPVYPRICP

SEQ ID NO: 838945 - protein, 715 aa, Homo sapiens
MWIQVRTIDGSKTCTIEDVSRKATIEELRERVWALFDVRPECQRLFYRGKQLENGYTLFDYDVGLNDIIQLLVRPDPDHLPGTSTQIEAKPCSNSPPKVKKAPRVGPSNQPSTSARARLIDPGFGIYKIPRKRYSRKNVKDLRPRARTILKWNELNVGDVVMVNYNVESPGQRGFWFDAEITTLKTISRTKKELRVKIFLGGSEGTLNDCKIISVDEIFKIERPGAHPLSFADGKFLRRNDPECDLCGGDPEKKCHSCSCRVCGGKHEPNMQLLCDECNVAYHIYCLNPPLDKVPEEEYWYCPSCKTDSSEVVKAGERLKMSKKKAKMPSASTESRRDWGRGMACVGRTRECTIVPSNHYGPIPGIPVGSTWRFRVQVSEAGVHRPHVGGIHGRSNDGAYSLVLAGGFADEVDRGDEFTYTGSGGKNLAGNKRIGAPSADQTLTNMNRALALNCDAPLDDKIGAESRNWRAGKPVRVIRSFKGRKISKYAPEEGNRYDGIYKVVKYWPEISSSHGFLVWRYLLRRDDVEPAPWTSEGIERSRRLCLRLQYPAGYPSDKEGKKPKGQSKKQPSGTTKRPISDDDCPSASKVYKASDSAEAIEAFQLTPQQQHLIREDCQNQKLWDEVLSHLVEGPNFLKKLEQSFMCVCCQELVYQPVTTECFHNVCKDCLQRSFKAQVFSCPACRHDLGQNYIMIPNEILQTLLDLFFPGYSKGR

SEQ ID NO: 838946 - protein, 802 aa, Homo sapiens
MWIQVRTIDGSKTCTIEDVSRKATIEELRERVWALFDVRPECQRLFYRGKQLENGYTLFDYDVGLNDIIQLLVRPDPDHLPGTSTQIEAKPCSNSPPKVKKAPRVGPSNQPSTSARARLIDPGFGIYKVNELVDARDVGLGAWFEAHIHSVTRASDGQSRGKTPLKNGSSCKRTNGNIKHKSKENTNKLDSVPSTSNSDCVAADEDVIYHIQYDEYPESGTLEMNVKDLRPRARTILKWNELNVGDVVMVNYNVESPGQRGFWFDAEITTLKTISRTKKELRVKIFLGGSEGTLNDCKIISVDEIFKIERPGAHPLSFADGKFLRRNDPECDLCGGDPEKKCHSCSCRVCGGKHEPNMQLLCDECNVAYHIYCLNPPLDKVPEEEYWYCPSCKTDSSEVVKAGERLKMSKKKAKMPSASTESRRDWGRGMACVGRTRECTIVPSNHYGPIPGIPVGSTWRFRVQVSEAGVHRPHVGGIHGRSNDGAYSLVLAGGFADEVDRGDEFTYTGSGGKNLAGNKRIGAPSADQTLTNMNRALALNCDAPLDDKIGAESRNWRAGKPVRVIRSFKGRKISKYAPEEGNRYDGIYKVVKYWPEISSSHGFLVWRYLLRRDDVEPAPWTSEGIERSRRLCLRLQYPAGYPSDKEGKKPKGQSKKQPSGTTKRPISDDDCPSASKVYKASDSAEAIEAFQLTPQQQHLIREDCQNQKLWDEVLSHLVEGPNFLKKLEQSFMCVCCQELVYQPVTTECFHNVCKDCLQRSFKAQVFSCPACRHDLGQNYIMIPNEILQTLLDLFFPGYSKGR

SEQ ID NO: 838947 - protein, 485 aa, Homo sapiens
MWIQVRTIDGSKTCTIEDVSRKATIEELRERVWALFDVRPECQRLFYRGKQLENGYTLFDYDVGLNDIIQLLVRPDPDHLPGTSTQIEAKPCSNSPPKVKKAPRVGPSNQPSTSARARLIDPGFGIYKVNELVDARDVGLGAWFEAHIHSVTRASDGQSRGKTPLKNGSSCKRTNGNIKHKSKENTNKLDSVPSTSNSDCVAADEDVIYHIQYDEYPESGTLEMNVKDLRPRARTILKWNELNVGDVVMVNYNVESPGQRGFWFDAEITTLKTISRTKKELRVKIFLGGSEGTLNDCKIISVDEIFKIERPGAHPLSFADGKFLRRNDPECDLCGGDPEKKCHSCSCRVCGGKHEPNMQLLCDECNVAYHIYCLNPPLDKVPEEEYWYCPSCKTDSSEVVKAGERLKMSKKKAKMPSASTESRRDWGRGMACVGRTRECTIVPSNHYGPIPGIPVGSTWRFRVQSLGFTILPRLILNPWGQFLLP

SEQ ID NO: 838948 - protein, 136 aa, Homo sapiens
MWIQVRTIDGSKTCTIEDVSRKATIEELRERVWALFDVRPECQRLFYRGKQLENGYTLFDYDVGLNDIIQLLVRPDPDHLPGTSTQIEAKPCSNSPPKVKKAPRVGPSNQPSTSARARLIDPGFGIYKGLALSPRL

SEQ ID NO: 838949 - protein, 802 aa, Homo sapiens; identical to SEQ ID NO: 838946

SEQ ID NO: 838950 - protein, 797 aa, Homo sapiens
PREARGAGPSPAEWWGVGPCQPQLEVRRAGSEVRASGAQISRRLYLLENGYTLFDYDVGLNDIIQLLVRPDPDHLPGTSTQIEAKPCSNSPPKVKKAPRVGPSNQPSTSARARLIDPGFGIYKVNELVDARDVGLGAWFEAHIHSVTRASDGQSRGKTPLKNGSSCKRTNGNIKHKSKENTNKLDSVPSTSNSDCVAADEDVIYHIQYDEYPESGTLEMNVKDLRPRARTILKWNELNVGDVVMVNYNVESPGQRGFWFDAEITTLKTISRTKKELRVKIFLGGSEGTLNDCKIISVDEIFKIERPGAHPLSFADGKFLRRNDPECDLCGGDPEKKCHSCSCRVCGGKHEPNMQLLCDECNVAYHIYCLNPPLDKVPEEEYWYCPSCKTDSSEVVKAGERLKMSKKKAKMPSASTESRRDWGRGMACVGRTRECTIVPSNHYGPIPGIPVGSTWRFRVQVSEAGVHRPHVGGIHGRSNDGAYSLVLAGGFADEVDRGDEFTYTGSGGKNLAGNKRIGAPSADQTLTNMNRALALNCDAPLDDKIGAESRNWRAGKPVRVIRSFKGRKISKYAPEEGNRYDGIYKVVKYWPEISSSHGFLVWRYLLRRDDVEPAPWTSEGIERSRRLCLRLQYPAGYPSDKEGKKPKGQSKKQPSGTTKRPISDDDCPSASKVYKASDSAEAIEAFQLTPQQQHLIREDCQNQKLWDEVLSHLVEGPNFLKKLEQSFMCVCCQELVYQPVTTECFHNVCKDCLQRSFKAQVFSCPACRHDLGQNYIMIPNEILQTLLDLFFPGYSKGR

SEQ ID NO: 838951 - protein, 594 aa, Homo sapiens
MWIQVRTIDGSKTCTIEDVSRKATIEELRERVWALFDVRPECQRLFYRGKQLENGYTLFDYDVGLNDIIQLLVRPDPDHLPGTSTQIEAKPCSNSPPKVKKAPRVGPSNQPSTSARARLIDPGFGIYKVNELVDARDVGLGAWFEAHIHSVTRASDGQSRGKTPLKNGSSCKRTNGNIKHKSKENTNKLDSVPSTSNSDCVAADEDVIYHIQYDEYPESGTLEMNVKDLRPRARTILKWNELNVGDVVMVNYNVESPGQRGFWFDAEITTLKTISRTKKELRVKIFLGGSEGTLNDCKIISVDEIFKIERPGAHPLSFADGKFLRRNDPECDLCGGDPEKKCHSCSCRVCGGKHEPNMQLLCDECNVAYHIYCLNPPLDKVPEEEYWYCPSCKTDSSEVVKAGERLKMSKKKAKMPSASTESRRDWGRGMACVGRTRECTIVPSNHYGPIPGIPVGSTWRFRVQVSEAGVHRPHVGGIHGRSNDGAYSLVLAGGFADEVDRGDEFTYTGSGGKNLAGNKRIGAPSADQTLTNMNRALALNCDAPLDDKIGAESRNWRAGKPVRVIRSFKGRKISKYAPEEGNRYDGIYKVLYLA

SEQ ID NO: 838952 - protein, 434 aa, Homo sapiens
MWIQVRTIDGSKTCTIEDVSRKATIEELRERVWALFDVRPECQRLFYRGKQLENGYTLFDYDVGLNDIIQLLVRPDPDHLPGTSTQIEAKPCSNSPPKVKKAPRVGPSNQPSTSARARLIDPGFGIYKVNELVDARDVGLGAWFEAHIHSVTRASDGQSRGKTPLKNGSSCKRTNGNIKHKSKENTNKLDSVPSTSNSDCVAADEDVIYHIQYDEYPESGTLEMNVKDLRPRARTILKWNELNVGDVVMVNYNVESPGQRGFWFDAEITTLKTISRTKKELRVKIFLGGSEGTLNDCKIISVDEIFKIERPGAHPLSFADGKFLRRNDPECDLCGGDPEKKCHSCSCRVCGGKHEPNMQLLCDECNVAYHIYCLNPPLDKVPEEEYWYCPSCKTDSSEVVKAGERLKMSKKKAKMPSASTESRRDWGRGGEGRE

SEQ ID NO: 838953 - protein, 1382 aa, Homo sapiens
MPAYFQRPENALKRANEFLEVGKKQPALDVLYDVMKSKKHRTWQKIHEPIMLKYLELCVDLRKSHLAKEGLYQYKNICQQVNIKSLEDVVRAYLKMAEEKTEAAKEESQQMVLDIEDLDNIQTPESVLLSAVSGEDTQDRTDRLLLTPWVKFLWESYRQCLDLLRNNSRVERLYHDIAQQAFKFCLQYTRKAEFRKLCDNLRMHLSQIQRHHNQSTAINLNNPESQSMHLETRLVQLDSAISMELWQEAFKAVEDIHGLFSLSKKPPKPQLMANYYNKVSTVFWKSGNALFHASTLHRLYHLSREMRKNLTQDEMQRMSTRVLLATLSIPITPERTDIARLLDMDGIIVEKQRRLATLLGLQAPPTRIGLINDMVRFNVLQYVVPEVKDLYNWLEVEFNPLKLCERVTKVLNWVREQPEKEPELQQYVPQLQNNTILRLLQQVSQIYQSIEFSRLTSLVPFVDAFQLERAIVDAARHCDLQVRIDHTSRTLSFGSDLNYATREDAPIGPHLQSMPSEQIRNQLTAMSSVLAKALEVIKPAHILQEKEEQHQLAVTAYLKNSRKEHQRILARRQTIEERKERLESLNIQREKEELEQREAELQKVRKAEEERLRQEAKEREKERILQEHEQIKKKTVRERLEQIKKTELGAKAFKDIDIEDLEELDPDFIMAKQVEQLEKEKKELQERLKNQEKKIDYFERAKRLEEIPLIKSAYEEQRIKDMDLWEQQEEERITTMQLEREKALEHKNRMSRMLEDRDLFVMRLKAARQSVYEEKLKQFEERLAEERHNRLEERKRQRKEERRITYYREKEEEEQRRAEEQMLKEREERERAERAKREEELREYQERVKKLEEVERKKRQRELEIEERERRREEERRLGDSSLSRKDSRWGDRDSEGTWRKGPEADSEWRRGPPEKEWRRGEGRDEDRSHRRDEERPRRLGDDEDREPSLRPDDDRVPRRGMDDDRGPRRGPEEDRFSRRGADDDRPSWRNTDDDRPPRRIADEDRGNWRHADDDRPPRRGLDEDRGSWRTADEDRGPRRGMDDDRGPRRGGADDERSSWRNADDDRGPRRGLDDDRGPRRGMDDDRGPRRGMDDDRGPRRGMDDDRGPRRGLDDDRGPWRNADDDRIPRRGAEDDRGPWRNMDDDRLSRRADDDRFPRRGDDSRPGPWRPLVKPGGWREKEKAREESWGPPRESRPSEEREWDREKERDRDNQDREENDKDPERERDRERDVDREDRFRRPRDEGGWRRGPAEESSSWRDSSRRDDRDRDDRRRERDDRRDLRERRDLRDDRDRRGPPLRSEREEVSSWRRADDRKDDRVEERDPPRRVPPPALSRDRERDRDREREGEKEKASWRAEKDRESLRRTKNETDEDGWTTVRR

SEQ ID NO: 838954 - protein, 1382 aa, Homo sapiens; identical to SEQ ID NO: 838953

SEQ ID NO: 838955 - protein, 1509 aa, Homo sapiens
MPAYFQRPENALKRANEFLEVGKKQPALDVLYDVMKSKKHRTWQKIHEPIMLKYLELCVDLRKSHLAKEGLYQYKNICQQVNIKSLEDVVRAYLKMAEEKTEAAKEESQQMVLDIEDLDNIQTPESVLLSAVSGEDTQDRTDRLLLTPWVKFLWESYRQCLDLLRNNSRVERLYHDIAQQAFKFCLQYTRKAEFRKLCDNLRMHLSQIQRHHNQSTAINLNNPESQSMHLETRLVQLDSAISMELWQEAFKAVEDIHGLFSLSKKPPKPQLMANYYNKVSTVFWKSGNALFHASTLHRLYHLSREMRKNLTQDEMQRMSTRVLLATLSIPITPERTDIARLLDMDGIIVEKQRRLATLLGLQAPPTRIGLINDMVRFNVLQYVVPEVKDLYNWLEVEFNPLKLCERVTKEAFVFKFWLLPQSWPSCSFGLYSYLLREKFCPMCWNSVHISLSFFFISREKIYLMCSANLWRLISSMTNLAIAASHLQTSISSFIDTFCISLHWMMFLYIKKKRVLDVLAISYVESVILFQFNGFYEVLNWVREQPEKEPELQQYVPQLQNNTILRLLQQVSQIYQSIEFSRLTSLVPFVDAFQLERAIVDAARHCDLQVRIDHTSRTLSFGSDLNYATREDAPIGPHLQSMPSEQIRNQLTAMSSVLAKALEVIKPAHILQEKEEQHQLAVTAYLKNSRKEHQRILARRQTIEERKERLESLNIQREKEELEQREAELQKVRKAEEERLRQEAKEREKERILQEHEQIKKKTVRERLEQIKKTELGAKAFKDIDIEDLEELDPDFIMAKQVEQLEKEKKELQERLKNQEKKIDYFERAKRLEEIPLIKSAYEEQRIKDMDLWEQQEEERITTMQLEREKALEHKNRMSRMLEDRDLFVMRLKAARQSVYEEKLKQFEERLAEERHNRLEERKRQRKEERRITYYREKEEEEQRRAEEQMLKEREERERAERAKREEELREYQERVKKLEEVERKKRQRELEIEERERRREEERRLGDSSLSRKDSRWGDRDSEGTWRKGPEADSEWRRGPPEKEWRRGEGRDEDRSHRRDEERPRRLGDDEDREPSLRPDDDRVPRRGMDDDRGPRRGPEEDRFSRRGADDDRPSWRNTDDDRPPRRIADEDRGNWRHADDDRPPRRGLDEDRGSWRTADEDRGPRRGMDDDRGPRRGGADDERSSWRNADDDRGPRRGLDDDRGPRRGMDDDRGPRRGMDDDRGPRRGMDDDRGPRRGLDDDRGPWRNADDDRIPRRGAEDDRGPWRNMDDDRLSRRADDDRFPRRGDDSRPGPWRPLVKPGGWREKEKAREESWGPPRESRPSEEREWDREKERDRDNQDREENDKDPERERDRERDVDREDRFRRPRDEGGWRRGPAEESSSWRDSSRRDDRDRDDRRRERDDRRDLRERRDLRDDRDRRGPPLRSEREEVSSWRRADDRKDDRVEERDPPRRVPPPALSRDRERDRDREREGEKEKASWRAEKDRESLRRTKNETDEDGWTTVRR

SEQ ID NO: 838956 - protein, 1382 aa, Homo sapiens; identical to SEQ ID NO: 838953

SEQ ID NO: 838957 - protein, 1224 aa, Homo sapiens
MPAYFQRPENALKRANEFLEVGKKQPALDVLYDVMKSKKHRTWQKIHEPIMLKYLELCVDLRKSHLAKEGLYQYKNICQQVNIKSLEDVVRAYLKMAEEKTEAAKEESQQMVLDIEDLDNIQTPESVLLSAVSGEDTQDRTDRLLLTPWVKFLWESYRQCLDLLRNNSRVERLYHDIAQQAFKFCLQYTRKAEFRKLCDNLRMHLSQIQRHHNQSTAINLNNPESQSMHLETRLVQLDSAISMELWQEAFKAVEDIHGLFSLSKKPPKPQLMANYYNKVSTVFWKSGNALFHASTLHRLYHLSREMRKNLTQDEMQRMSTRVLLATLSIPITPERTDIARLLDMDGIIVEKQRRLATLLGLQAPPTRIGLINDMVRFNVLQYVVPEVKDLYNWLEVEFNPLKLCERVTKVLNWVREQPEKEPELQQYVPQLQNNTILRLLQQVSQIYQSIEFSRLTSLVPFVDAFQLERAIVDAARHCDLQVRIDHTSRTLSFGSDLNYATREDAPIGPHLQSMPSEQIRNQLTAMSSVLAKALEVIKPAHILQEKEEQHQLAVTAYLKNSRKEHQRILARRQTIEERKERLESLNIQREKEELEQREAELQKVRKAEEERLRQEAKEREKERILQEHEQIKKKTVRERLEQIKKTELGAKAFKDIDIEDLEELDPDFIMAKQVEQLEKEKKELQERLKNQEKKIDYFERAKRLEEIPLIKSAYEEQRIKDMDLWEQQEEERITTMQLEREKALEHKNRMSRMLEDRDLFVMRLKAARQSVYEEKLKQFEERLAEERHNRLEERKRQRKEERRITYYREKEEEEQRRAEEQMLKEREERERAERAKREEELREYQERVKKLEEVERKKRQRELEIEERERRREEERRLGDSSLSRKDSRWGDRDSEGTWRKGPEADSEWRRGPPEKEWRRGEGRDEDRSHRRDEERPRRLGDDEDREPSLRPDDDRVPRRGMDDDRGPRRGPEEDRFSRRGADDDRPSWRNTDDDRPPRRIADEDRGNWRHADDDRPPRRGLDEDRGSWRTADEDRGPRRGMDDDRGPRRGGADDERSSWRNADDDRGPRRGLDDDRGPRRGMDDDRGPRRGMDDDRGPRRGMDDDRGPRRGLDDDRGPWRNADDDRIPRRGAEDDRGPWRNMDDDRLSRRADDDRFPRRGDDSRPGPWRPLVKPGGWREKEKAREESWGPPRESRPSEEREWDREERKGQRERCGSRGSLQKT

SEQ ID NO: 838958 - protein, 1382 aa, Homo sapiens; identical to SEQ ID NO: 838953

SEQ ID NO: 838959 - protein, 755 aa, Homo sapiens
LEDPGCFPLSPFGVVPEFYCPIFIRIHWGMGRFCFCFLARNRVILKVCEKTWRAAESRTHHDGGERKIDYFERAKRLEEIPLIKSAYEEQRIKDMDLWEQQEEERITTMQLEREKALEHKNRMSRMLEDRDLFVMRLKAARQSVYEEKLKQFEERLAEERHNRLEERKRQRKEERRITYYREKEEEEQRRAEEQMLKEREERERAERAKREEELREYQERVKKLEEVERKKRQRELEIEERERRREEERRLGDSSLSRKDSRWGDRDSEGTWRKGPEADSEWRRGPPEKEWRRGEGRDEDRSHRRDEERPRRLGDDEDREPSLRPDDDRVPRRGMDDDRGPRRGPEEDRFSRRGADDDRPSWRNTDDDRPPRRIADEDRGNWRHADDDRPPRRGLDEDRGSWRTADEDRGPRRGMDDDRGPRRGGADDERSSWRNADDDRGPRRGLDDDRGPRRGMDDDRGPRRGMDDDRGPRRGMDDDRGPRRGLDDDRGPWRNADDDRIPRRGAEDDRGPWRNMDDDRLSRRADDDRFPRRGDDSRPGPWRPLVKPGGWREKEKAREESWGPPRESRPSEEREWDREKERDRDNQDREENDKDPERERDRERDVDREDRFRRPRDEGGWRRGPAEESSSWRDSSRRDDRDRDDRRRERDDRRDLRERRDLRDDRDRRGPPLRSEREEVSSWRRADDRKDDRVEERDPPRRVPPPALSRDRERDRDREREGEKEKASWRAEKDRESLRRTKNETDEDGWTTVRR

SEQ ID NO: 838960 - protein, 626 aa, Homo sapiens
MLSRIILCDSTARSRYGEKLKQFEERLAEERHNRLEERKRQRKEERRITYYREKEEEEQRRAEEQMLKEREERERAERAKREEELREYQERVKKLEEVERKKRQRELEIEERERRREEERRLGDSSLSRKDSRWGDRDSEGTWRKGPEADSEWRRGPPEKEWRRGEGRDEDRSHRRDEERPRRLGDDEDREPSLRPDDDRVPRRGMDDDRGPRRGPEEDRFSRRGADDDRPSWRNTDDDRPPRRIADEDRGNWRHADDDRPPRRGLDEDRGSWRTADEDRGPRRGMDDDRGPRRGGADDERSSWRNADDDRGPRRGLDDDRGPRRGMDDDRGPRRGMDDDRGPRRGMDDDRGPRRGLDDDRGPWRNADDDRIPRRGAEDDRGPWRNMDDDRLSRRADDDRFPRRGDDSRPGPWRPLVKPGGWREKEKAREESWGPPRESRPSEEREWDREKERDRDNQDREENDKDPERERDRERDVDREDRFRRPRDEGGWRRGPAEESSSWRDSSRRDDRDRDDRRRERDDRRDLRERRDLRDDRDRRGPPLRSEREEVSSWRRADDRKDDRVEERDPPRRVPPPALSRDRERDRDREREGEKEKASWRAEKDRESLRRTKNETDEDGWTTVRR

SEQ ID NO: 838961 - protein, 421 aa, Homo sapiens
MDDDRGPRRGPEEDRFSRRGADDDRPSWRNTDDDRPPRRIADEDRGNWRHADDDRPPRRGLDEDRGSWRTADEDRGPRRGMDDDRGPRRGGADDERSSWRNADDDRGPRRGLDDDRGPRRGMDDDRGPRRGMDDDRGPRRGMDDDRGPRRGLDDDRGPWRNADDDRIPRRGAEDDRGPWRNMDDDRLSRRADDDRFPRRGDDSRPGPWRPLVKPGGWREKEKAREESWGPPRESRPSEEREWDREKERDRDNQDREENDKDPERERDRERDVDREDRFRRPRDEGGWRRGPAEESSSWRDSSRRDDRDRDDRRRERDDRRDLRERRDLRDDRDRRGPPLRSEREEVSSWRRADDRKDDRVEERDPPRRVPPPALSRDRERDRDREREGEKEKASWRAEKDRESLRRTKNETDEDGWTTVRR

SEQ ID NO: 838962 - protein, 341 aa, Homo sapiens
MDDDRGPRRGGADDERSSWRNADDDRGPRRGLDDDRGPRRGMDDDRGPRRGMDDDRGPRRGMDDDRGPRRGLDDDRGPWRNADDDRIPRRGAEDDRGPWRNMDDDRLSRRADDDRFPRRGDDSRPGPWRPLVKPGGWREKEKAREESWGPPRESRPSEEREWDREKERDRDNQDREENDKDPERERDRERDVDREDRFRRPRDEGGWRRGPAEESSSWRDSSRRDDRDRDDRRRERDDRRDLRERRDLRDDRDRRGPPLRSEREEVSSWRRADDRKDDRVEERDPPRRVPPPALSRDRERDRDREREGEKEKASWRAEKDRESLRRTKNETDEDGWTTVRR

SEQ ID NO: 838963 - protein, 341 aa, Homo sapiens; identical to SEQ ID NO: 838962

SEQ ID NO: 838964 - protein, 1096 aa, Homo sapiens
MPAYFQRPENALKRANEFLEVGKKQPALDVLYDVMKSKKHRTWQKIHEPIMLKYLELCVDLRKSHLAKEGLYQYKNICQQVNIKSLEDVVRAYLKMAEEKTEAAKEESQQMVLDIEDLDNIQTPESVLLSAVSGEDTQDRTDRLLLTPWVKFLWESYRQCLDLLRNNSRVERLYHDIAQQAFKFCLQYTRKAEFRKLCDNLRMHLSQIQRHHNQSTAINLNNPESQSMHLETRLVQLDSAISMELWQEAFKAVEDIHGLFSLSKKPPKPQLMANYYNKVSTVFWKSGNALFHASTLHRLYHLSREMRKNLTQDEMQRMSTRVLLATLSIPITPERTDIARLLDMDGIIVEKQRRLATLLGLQAPPTRIGLINDMVRFNVLQYVVPEVKDLYNWLEVEFNPLKLCERVTKVLNWVREQPEKEPELQQYVPQLQNNTILRLLQQVSQIYQSIEFSRLTSLVPFVDAFQLERAIVDAARHCDLQVRIDHTSRTLSFGSDLNYATREDAPIGPHLQSMPSEQIRNQLTAMSSVLAKALEVIKPAHILQEKEEQHQLAVTAYLKNSRKEHQRILARRQTIEERKERLESLNIQREKEELEQREAELQKVRKAEEERLRQEAKEREKERILQEHEQIKKKTVRERLEQIKKTELGAKAFKDIDIEDLEELDPDFIMAKQVEQLEKEKKELQERLKNQEKKIDYFERAKRLEEIPLIKSAYEEQRIKDMDLWEQQEEERITTMQLEREKALEHKNRMSRMLEDRDLFVMRLKAARQSVYEEKLKQFEERLAEERHNRLEERKRQRKEERRITYYREKEEEEQRRAEEQMLKEREERERAERAKREEELREYQERVKKLEEVERKKRQRELEIEERERRREEERRLGDSSLSRKDSRWGDRDSEGTWRKGPEADSEWRRGPPEKEWRRGEGRDEDRSHRRDEERPRRLGDDEDREPSLRPDDDRVPRRGMDDDRGPRRGPEEDRFSRRGADDDRPSWRNTDDDRPPRRIADEDRGNWRHADDDRPPRRGLDEDRGSWRTADEDRGPRRGMDDDRGPRRGGADDERSSWRNADDDRGPRRKNHAIFWNLRVLHYFINHLLTKKKN

SEQ ID NO: 838965 - protein, 121 aa, Homo sapiens [sequence omitted]

SEQ ID NO: 838966 - protein, 1262 aa, Homo sapiens
MPAYFQRPENALKRANEFLEVGKKQPALDVLYDVMKSKKHRTWQKIHEPIMLKYLELCVDLRKSHLAKEGLYQYKNICQQVNIKSLEDVVRAYLKMAEEKTEAAKEESQQMVLDIEDLDNIQTPESVLLSAVSGEDTQDRTDRLLLTPWVKFLWESYRQCLDLLRNNSRVERLYHDIAQQAFKFCLQYTRKAEFRKLCDNLRMHLSQIQRHHNQSTAINLNNPESQSMHLETRLVQLDSAISMELWQEAFKAVEDIHGLFSLSKKPPKPQLMANYYNKVSTVFWKSGNALFHASTLHRLYHLSREMRKNLTQDEMQRMSTRVLLATLSIPITPERTDIARLLDMDGIIVEKQRRLATLLGLQAPPTRIGLINDMVRFNVLQYVVPEVKDLYNWLEVEFNPLKLCERVTKVLNWVREQPEKEPELQQYVPQLQNNTILRLLQQVSQIYQSIEFSRLTSLVPFVDAFQLERAIVDAARHCDLQVRIDHTSRTLSFGSDLNYATREDAPIGPHLQSMPSEQIRNQLTAMSSVLAKALEVIKPAHILQEKEEQHQLAVTAYLKNSRKEHQRILARRQTIEERKERLESLNIQREKEELEQREAELQKVRKAEEERLRQEAKEREKERILQEHEQIKKKTVRERLEQIKKTELGAKAFKDIDIEDLEELDPDFIMAKQVEQLEKEKKELQERLKNQEKKIDYFERAKRLEEIPLIKSAYEEQRIKDMDLWEQQEEERITTMQLEREKALEHKNRMSRMLEDRDLFVMRLKAARQSVYEEKLKQFEERLAEERHNRLEERKRQRKEERRITYYREKEEEEQRRAEEQMLKEREERERAERAKREEELREYQERVKKLEEVERKKRQRELEIEERERRREEERRLGDSSLSRKDSRWGDRDSEGTWRKGPEADSEWRRGPPEKEWRRGEGRDEDRSHRRDEERPRRLGDDEDREPSLRPDDDRVPRRGMDDDRGPRRGPEEDRFSRRGADDDRPSWRNTDDDRPPRRIADEDRGNWRHADDDRPPRRGLDEDRGSWRTADEDRGPRRGMDDDRGPRRGGADDERSSWRNADDDRGPRRGLDDDRGPRRGMDDDRGPRRGMDDDRGPRRGMDDDRGPRRGLDDDRGPWRNADDDRIPRRGAEDDRGPWRNMDDDRLSRRADDDRFPRRGDDSRPGPWRPLVKPGGWREKEKAREESWGPPRESRPSEEREWDREKERDRDNHTGEMKGLRRRTDQWPEPSTQESVKRRRPRRTRDRGRRGTARGPERAEG

SEQ ID NO: 838967 - protein, 1185 aa, Homo sapiens
MPAYFQRPENALKRANEFLEVGKKQPALDVLYDVMKSKKHRTWQKIHEPIMLKYLELCVDLRKSHLAKEGLYQYKNICQQVNIKSLEDVVRAYLKMAEEKTEAAKEESQQMVLDIEDLDNIQTPESVLLSAVSGEDTQDRTDRLLLTPWVKFLWESYRQCLDLLRNNSRVERLYHDIAQQAFKFCLQYTRKAEFRKLCDNLRMHLSQIQRHHNQSTAINLNNPESQSMHLETRLVQLDSAISMELWQEAFKAVEDIHGLFSLSKKPPKPQLMANYYNKVSTVFWKSGNALFHASTLHRLYHLSREMRKNLTQDEMQRMSTRVLLATLSIPITPERTDIARLLDMDGIIVEKQRRLATLLGLQAPPTRIGLINDMVRFNVLQYVVPEVKDLYNWLEVEFNPLKLCERVTKVLNWVREQPEKEPELQQYVPQLQNNTILRLLQQVSQIYQSIEFSRLTSLVPFVDAFQLERAIVDAARHCDLQVRIDHTSRTLSFGSDLNYATREDAPIGPHLQSMPSEQIRNQLTAMSSVLAKALEVIKPAHILQEKEEQHQLAVTAYLKNSRKEHQRILARRQTIEERKERLESLNIQREKEELEQREAELQKVRKAEEERLRQEAKEREKERILQEHEQIKKKTVRERLEQIKKTELGAKAFKDIDIEDLEELDPDFIMAKQVEQLEKEKKELQERLKNQEKKIDYFERAKRLEEIPLIKSAYEEQRIKDMDLWEQQEEERITTMQLEREKALEHKNRMSRMLEDRDLFVMRLKAARQSVYEEKLKQFEERLAEERHNRLEERKRQRKEERRITYYREKEEEEQRRAEEQMLKEREERERAERAKREEELREYQERVKKLEEVERKKRQRELEIEERERRREEERRLGDSSLSRKDSRWGDRDSEGTWRKGPEADSEWRRGPPEKEWRRGEGRDEDRSHRRDEERPRRLGDDEDREPSLRPDDDRVPRRGMDDDRGPRRGPEEDRFSRRGADDDRPSWRNTDDDRPPRRIADEDRGNWRHADDDRPPRRGLDEDRGSWRTADEDRGPRRGMDDDRGPRRGGADDERSSWRNADDDRGPRRGLDDDRGPRRGMDDDRGPRRGMDDDRGPRRGMDDDRGPRRGLDDDRGPWRNADDDRIPRRGAEANNFLWPFKLSSPRGGMKKKTTHFVEGGDAGNREDQINRLIRRMIQGCGTM

SEQ ID NO: 838968 - protein, 845 aa, Homo sapiens [sequence omitted]

SEQ ID NO: 838969 - protein, 824 aa, Homo sapiens
MPAYFQRPENALKRANEFLEVGKKQPALDVLYDVMKSKKHRTWQKIHEPIMLKYLELCVDLRKSHLAKEGLYQYKNICQQVNIKSLEDVVRAYLKMAEEKTEAAKEESQQMVLDIEDLDNIQTPESVLLSAVSGEDTQDRTDRLLLTPWVKFLWESYRQCLDLLRNNSRVERLYHDIAQQAFKFCLQYTRKAEFRKLCDNLRMHLSQIQRHHNQSTAINLNNPESQSMHLETRLVQLDSAISMELWQEAFKAVEDIHGLFSLSKKPPKPQLMANYYNKVSTVFWKSGNALFHASTLHRLYHLSREMRKNLTQDEMQRMSTRVLLATLSIPITPERTDIARLLDMDGIIVEKQRRLATLLGLQAPPTRIGLINDMVRFNVLQYVVPEVKDLYNWLEVEFNPLKLCERVTKVLNWVREQPEKEPELQQYVPQLQNNTILRLLQQVSQIYQSIEFSRLTSLVPFVDAFQLERAIVDAARHCDLQVRIDHTSRTLSFGSDLNYATREDAPIGPHLQSMPSEQIRNQLTAMSSVLAKALEVIKPAHILQEKEEQHQLAVTAYLKNSRKEHQRILARRQTIEERKERLESLNIQREKEELEQREAELQKVRKAEEERLRQEAKEREKERILQEHEQIKKKTVRERLEQIKKTELGAKAFKDIDIEDLEELDPDFIMAKQVEQLEKEKKELQERLKNQEKKIDYFERAKRLEEIPLIKSAYEEQRIKDMDLWEQQEEERITTMQLEREKALEHKNRMSRMLEDRDLFVMRLKAARQSVYEEKLKQFEERLAEERHNRLEERKRRCRLRRCRLRRCGLRRCRLRRCRLRRCR

SEQ ID NO: 838970 - protein, 795 aa, Homo sapiens
MPAYFQRPENALKRANEFLEVGKKQPALDVLYDVMKSKKHRTWQKIHEPIMLKYLELCVDLRKSHLAKEGLYQYKNICQQVNIKSLEDVVRAYLKMAEEKTEAAKEESQQMVLDIEDLDNIQTPESVLLSAVSGEDTQDRTDRLLLTPWVKFLWESYRQCLDLLRNNSRVERLYHDIAQQAFKFCLQYTRKAEFRKLCDNLRMHLSQIQRHHNQSTAINLNNPESQSMHLETRLVQLDSAISMELWQEAFKAVEDIHGLFSLSKKPPKPQLMANYYNKVSTVFWKSGNALFHASTLHRLYHLSREMRKNLTQDEMQRMSTRVLLATLSIPITPERTDIARLLDMDGIIVEKQRRLATLLGLQAPPTRIGLINDMVRFNVLQYVVPEVKDLYNWLEVEFNPLKLCERVTKVLNWVREQPEKEPELQQYVPQLQNNTILRLLQQVSQIYQSIEFSRLTSLVPFVDAFQLERAIVDAARHCDLQVRIDHTSRTLSFGSDLNYATREDAPIGPHLQSMPSEQIRNQLTAMSSVLAKALEVIKPAHILQEKEEQHQLAVTAYLKNSRKEHQRILARRQTIEERKERLESLNIQREKEELEQREAELQKVRKAEEERLRQEAKEREKERILQEHEQIKKKTVRERLEQIKKTELGAKAFKDIDIEDLEELDPDFIMAKQVEQLEKEKKELQERLKNQEKKIDYFERAKRLEEIPLIKSAYEEQRGCARKQRRERRSVSYRNMNKSKRKLSESVWSRSRKQKWVPKHSKILILKTLRNWMQILSWLNRLNNWRKKSKNFKNA

SEQ ID NO: 838971 - protein, 186 aa, Homo sapiens
MPAYFQRPENALKRANEFLEVGKKQPALDVLYDVMKSKKHRTWQKIHEPIMLKYLELCVDLRKSHLAKEGLYQYKNICQQVNIKSLEDVVRAYLKMAEEKTEAAKEESQQMVLDIEDLDNIQTPESVLLSAVSGEDTQDRTDRLLYTENPKDCTQNYSNSSTDQLKVEGYKYNIQKLVAFCYRVAH

SEQ ID NO: 838972 - protein, 1382 aa, Homo sapiens; identical to SEQ ID NO: 838953

SEQ ID NO: 838973 - protein, 1065 aa, Homo sapiens
MSTRVLLATLSIPITPERTDIARLLDMDGIIVEKQRRLATLLGLQAPPTRIGLINDMVRFNVLQYVVPEVKDLYNWLEVEFNPLKLCERVTKVLNWVREQPEKEPELQQYVPQLQNNTILRLLQQVSQIYQSIEFSRLTSLVPFVDAFQLERAIVDAARHCDLQVRIDHTSRTLSFGSDLNYATREDAPIGPHLQSMPSEQIRNQLTAMSSVLAKALEVIKPAHILQEKEEQHQLAVTAYLKNSRKEHQRILARRQTIEERKERLESLNIQREKEELEQREAELQKVRKAEEERLRQEAKEREKERILQEHEQIKKKTVRERLEQIKKTELGAKAFKDIDIEDLEELDPDFIMAKQVEQLEKEKKELQERLKNQEKKIDYFERAKRLEEIPLIKSAYEEQRIKDMDLWEQQEEERITTMQLEREKALEHKNRMSRMLEDRDLFVMRLKAARQSVYEEKLKQFEERLAEERHNRLEERKRQRKEERRITYYREKEEEEQRRAEEQMLKEREERERAERAKREEELREYQERVKKLEEVERKKRQRELEIEERERRREEERRLGDSSLSRKDSRWGDRDSEGTWRKGPEADSEWRRGPPEKEWRRGEGRDEDRSHRRDEERPRRLGDDEDREPSLRPDDDRVPRRGMDDDRGPRRGPEEDRFSRRGADDDRPSWRNTDDDRPPRRIADEDRGNWRHADDDRPPRRGLDEDRGSWRTADEDRGPRRGMDDDRGPRRGGADDERSSWRNADDDRGPRRGLDDDRGPRRGMDDDRGPRRGMDDDRGPRRGMDDDRGPRRGLDDDRGPWRNADDDRIPRRGAEDDRGPWRNMDDDRLSRRADDDRFPRRGDDSRPGPWRPLVKPGGWREKEKAREESWGPPRESRPSEEREWDREKERDRDNQDREENDKDPERERDRERDVDREDRFRRPRDEGGWRRGPAEESSSWRDSSRRDDRDRDDRRRERDDRRDLRERRDLRDDRDRRGPPLRSEREEVSSWRRADDRKDDRVEERDPPRRVPPPALSRDRERDRDREREGEKEKASWRAEKDRESLRRTKNETDEDGWTTVRR

SEQ ID NO: 838974 - protein, 1343 aa, Homo sapiens
MPAYFQRPENALKRANEFLEVGKKQPALDVLYDVMKSKKHRTWQKIHEPIMLKYLELCVDLRKSHLAKEGLYQYKNICQQVNIKSLEDVVRAYLKMAEEKTEAAKEESQQMVLDIEDLDNIQTPESVLLSAVSGEDTQDRTDRLLLTPWVKFLWESYRQCLDLLRNNSRVERLYHDIAQQAFKFCLQYTRKAEFRKLCDNLRMHLSQIQRHHNQSTAINLNNPESQSMHLETRLVQLDSAISMELWQEAFKAVEDIHGLFSLSKKPPKPQLMANYYNKVSTVFWKSGNALFHASTLHRLYHLSREMRKNLTQDEMQRMSTRVLLATLSIPITPERTDIARLLDMDGIIVEKQRRLATLLGLQAPPTRIGLINDMVRFNVLQYVVPEVKDLYNWLEVEFNPLKLCERVTKVLNWVREQPEKEPELQQYVPQLQNNTILRLLQQVSQIYQSIEFSRLTSLVPFVDAFQLERAIVDAARHCDLQVRIDHTSRTLSFGSDLNYATREDAPIGPHLQSMPSEQIRNQLTAMSSVLAKALEVIKPAHILQEKEEQHQLAVTAYLKNSRKEHQRILARRQTIEERKERLESLNIQREKEELEQREAELQKVRKAEEERLRQEAKEREKERILQEHEQIKKKTVRERLEQIKKTELGAKAFKDIDIEDLEELDPDFIMAKQVEQLEKEKKELQERLKNQEKKIDYFERAKRLEEIPLIKSAYEEQRIKDMDLWEQQEEERITTMQLEREKALEHKNRMSRMLEDRDLFVMRLKAARQSVYEEKLKQFEERLAEERHNRLEERKRQRKEERRITYYREKEEEEQRRAEEQMLKEREERERAERAKREEELREYQERVKKLEEVERKKRQRELEIEERERRREEERRLGDSSLSRKDSRWGDRDSEGTWRKGPEADSEWRRGPPEKEWRRGEGRDEDRSHRRDEERPRRLGDDEDREPSLRPDDDRVPRRGMDDDRGPRRGPEEDRFSRRGADDDRPSWRNTDDDRPPRRIADEDRGNWRHADDDRPPRRGLDEDRGSWRTADEDRGPRRGMDDDRGPRRGGADDERSSWRNADDDRGPRRRGLDDDRGPWRNADDDRIPRRGAEDDRGPWRNMDDDRLSRRADDDRFPRRGDDSRPGPWRPLVKPGGWREKEKAREESWGPPRESRPSEEREWDREKERDRDNQDREENDKDPERERDRERDVDREDRFRRPRDEGGWRRGPAEESSSWRDSSRRDDRDRDDRRRERDDRRDLRERRDLRDDRDRRGPPLRSEREEVSSWRRADDRKDDRVEERDPPRRVPPPALSRDRERDRDREREGEKEKASWRAEKDRESLRRTKNETDEDGWTTVRR

SEQ ID NO: 838975 - protein, 621 aa, Homo sapiens
MATQSCAVVCDEEKLKQFEERLAEERHNRLEERKRQRKEERRITYYREKEEEEQRRAEEQMLKEREERERAERAKREEELREYQERVKKLEEVERKKRQRELEIEERERRREEERRLGDSSLSRKDSRWGDRDSEGTWRKGPEADSEWRRGPPEKEWRRGEGRDEDRSHRRDEERPRRLGDDEDREPSLRPDDDRVPRRGMDDDRGPRRGPEEDRFSRRGADDDRPSWRNTDDDRPPRRIADEDRGNWRHADDDRPPRRGLDEDRGSWRTADEDRGPRRGMDDDRGPRRGGADDERSSWRNADDDRGPRRGLDDDRGPRRGMDDDRGPRRGMDDDRGPRRGMDDDRGPRRGLDDDRGPWRNADDDRIPRRGAEDDRGPWRNMDDDRLSRRADDDRFPRRGDDSRPGPWRPLVKPGGWREKEKAREESWGPPRESRPSEEREWDREKERDRDNQDREENDKDPERERDRERDVDREDRFRRPRDEGGWRRGPAEESSSWRDSSRRDDRDRDDRRRERDDRRDLRERRDLRDDRDRRGPPLRSEREEVSSWRRADDRKDDRVEERDPPRRVPPPALSRDRERDRDREREGEKEKASWRAEKDRESLRRTKNETDEDGWTTVRR

SEQ ID NO: 838976 - protein, 561 aa, Homo sapiens
MLKEREERERAERAKREEELREYQERVKKLEEVERKKRQRELEIEERERRREEERRLGDSSLSRKDSRWGDRDSEGTWRKGPEADSEWRRGPPEKEWRRGEGRDEDRSHRRDEERPRRLGDDEDREPSLRPDDDRVPRRGMDDDRGPRRGPEEDRFSRRGADDDRPSWRNTDDDRPPRRIADEDRGNWRHADDDRPPRRGLDEDRGSWRTADEDRGPRRGMDDDRGPRRGGADDERSSWRNADDDRGPRRGLDDDRGPRRGMDDDRGPRRGMDDDRGPRRGMDDDRGPRRGLDDDRGPWRNADDDRIPRRGAEDDRGPWRNMDDDRLSRRADDDRFPRRGDDSRPGPWRPLVKPGGWREKEKAREESWGPPRESRPSEEREWDREKERDRDNQDREENDKDPERERDRERDVDREDRFRRPRDEGGWRRGPAEESSSWRDSSRRDDRDRDDRRRERDDRRDLRERRDLRDDRDRRGPPLRSEREEVSSWRRADDRKDDRVEERDPPRRVPPPALSRDRERDRDREREGEKEKASWRAEKDRESLRRTKNETDEDGWTTVRR

SEQ ID NO: 838977 - protein, 499 aa, Homo sapiens
YTPRKEKGSREEKQKPQAERKEEKKAAAPAPEEEWRRGEGRDEDRSHRRDEERPRRLGDDEDREPSLRPDDDRVPRRGMDDDRGPRRGPEEDRFSRRGADDDRPSWRNTDDDRPPRRIADEDRGNWRHADDDRPPRRGLDEDRGSWRTADEDRGPRRGMDDDRGPRRGGADDERSSWRNADDDRGPRRGLDDDRGPRRGMDDDRGPRRGMDDDRGPRRGMDDDRGPRRGLDDDRGPWRNADDDRIPRRGAEDDRGPWRNMDDDRLSRRADDDRFPRRGDDSRPGPWRPLVKPGGWREKEKAREESWGPPRESRPSEEREWDREKERDRDNQDREENDKDPERERDRERDVDREDRFRRPRDEGGWRRGPAEESSSWRDSSRRDDRDRDDRRRERDDRRDLRERRDLRDDRDRRGPPLRSEREEVSSWRRADDRKDDRVEERDPPRRVPPPALSRDRERDRDREREGEKEKASWRAEKDRESLRRTKNETDEDGWTTVRR

SEQ ID NO: 838978 - protein, 136 aa, Homo sapiens
RPEDHGIINVNEDRVKRQGQRYQDREENDVDGERKKKPERRAGVHLENQGHQKNVNGTEKKKGTEIIKIGRRMTRTLREKGTEREMWIERIASEDLGMKVAGEEDQLRNLQAGETQVAGTIGIGMTVAVRGMTGVI

SEQ ID NO: 838979 - protein, 1382 aa, Homo sapiens; identical to SEQ ID NO: 838953

SEQ ID NO: 838980 - protein, 158 aa, Homo sapiens
MCPYAYVTSENLTQDEMQRDEGGWRRGPAEESSSWRDSSRRDDRDRDDRRRERDDRRDLRERRDLRDDRDRRGPPLRSEREEVSSWRRADDRKDDRVEERDPPRRVPPPALSRDRERDRDREREGEKEKASWRAEKDRESLRRTKNETDEDGWTTVRR

SEQ ID NO: 838981 - protein, 125 aa, Homo sapiens
TRSLSSPANNICFYGECSYYLSTEHALCGKPDQIEGSLAAFLPDLSLAKRKTWRNPWRRSYHKRKKAEWEVDPDYCEEVKQTPPYDSSHRILDVMDMTIFDFLMGNMDHSTTLSLKIMDLNWCLK

SEQ ID NO: 838982 - protein, 103 aa, Homo sapiens
PAPYIRGLGGSRAAAGRSRGSFLSVSGRLGAGDCWRGAWDLTLVPLRLLSRPGPLESSLTPGELSLPPRCRPIFRGRKMPSNAPTNFLRLAKSSLLWMFFMML

SEQ ID NO: 838983 - protein, 591 aa, Homo sapiens
MPAYFQRPENALKRANEFLEVGKKQPALDVLYDVMKSKKHRTWQKIHEPIMLKYLELCVDLRKSHLAKEGLYQYKNICQQVNIKSLEDVVRAYLKMAEEKTEAAKEESQQMVLDIEDLDNIQTPESVLLSAVSGEDTQDRTDRLLLTPWVKFLWESYRQCLDLLRNNSRVERLYHDIAQQAFKFCLQYTRKAEFRKLCDNLRMHLSQIQRHHNQSTAINLNNPESQSMHLETRLVQLDSAISMELWQEAFKAVEDIHGLFSLSKKPPKPQLMANYYNKVSTVFWKSGNALFHASTLHRLYHLSREMRKNLTQDEMQRMSTRVLLATLSIPITPERTDIARLLDMDGIIVEKQRRLATLLGLQAPPTRIGLINDMVRFNVLQYVVPEVKDLYNWLEVEFNPLKLCERVTKVLNWVREQPEKEPELQQYVPQLQNNTILRLLQQVSQIYQSIEFSRLTSLVPFVDAFQLERAIVDAARHCDLQVRIDHTSRTLSFGSDLNYATREDAPIGPHLQSMPSEQIRNQLTAMSSVLAKALEVIKPAHILQEKEEQHQLAVTAYLKNSRKEHQRILARRQTIEERKAGSRRKPGVQGV

SEQ ID NO: 838984 - protein, 309 aa, Homo sapiens
AIPGIPYERRLLIMADPRDKALQDYRKKLLEHKEIDGRLKELREQLKELTKQYEKSENDLKALQSVGQIVGEVLKQLTEEKFIVKATNGPRYVVGCRRQLDKSKLKPGTRVALDMTTLTIMRYLPREVDPLVYNMSHEDPGNVSYSEIGGLSEQIRELREVIELPLTNPELFQRVGIIPPKGCLLYGPPGTGKTLLARAVASQLDCNFLKVVSSSIVDKYIGESARLIREMFNYARDHQPCIIFMDEIDAIGGRRFLRVLQLTERFRERYGVPNPMVGLKLSVELKGLGGQRTETGPVGGRILKPCWPT

SEQ ID NO: 838985 - protein, 117 aa, Homo sapiens
AIPGIPYERRLLIMADPRDKALQDYRKKLLEHKEIDGRLKECECTFLSIYIKCLDSLLPLTKQKPFAEPGNRALEMTRPRARDKALCHPALSLWSSTPSGVEMAQSSPGDRTSAALR

SEQ ID NO: 838986 - protein, 402 aa, Homo sapiens
AIPGIPYERRLLIMADPRDKALQDYRKKLLEHKEIDGRLKELREQLKELTKQYEKSENDLKALQSVGQIVGEVLKQLTEEKFIVKATNGPRYVVGCRRQLDKSKLKPGTRVALDMTTLTIMRYLPREVDPLVYNMSHEDPGNVSYSEIGGLSEQIRELREVIELPLTNPELFQRVGIIPPKGCLLYGPPGTGKTLLARAVASQLDCNFLKVVSSSIVDKYIGESARLIREMFNYARDHQPCIIFMDEIDAIGGRRFSEGTSADREIQRTLMELLNQMDGFDTLHRVKMIMATNRPDTLDPALLRPGRLDRKIHIDLPNEQARLDILKIHAGPITKHGEIDYEAIVKLSDGFNGADLRNVCTEAGMFAIRADHDFVVQEDFMKAVRKVADSKKLESKLDYKPV

SEQ ID NO: 838987 - protein, 277 aa, Homo sapiens
AIPGIPYERRLLIMADPRDKALQDYRKKLLEHKEIDGRLKELREQLKELTKQYEKSENDLKALQSVGQIVGEVLKQLTEEKFIVKATNGPRYVVGCRRQLDKSKLKPGTRVALDMTTLTIMRYLPREVDPLVYNMSHEDPGNVSYSEIGGLSEQIRELREVIELPLTNPELFQRVGIIPPKGCLLYGPPGTGKTLLARAVASQLDCNFLKVVSSSIVDKYIGESARLIREMFNYARDHQPCIIFMDEIDAIGGRRFSEGTSADREIQRTLMEIMKQL

SEQ ID NO: 838988 - protein, 192 aa, Homo sapiens
AIPGIPYERRLLIMADPRDKALQDYRKKLLEHKEIDGRLKELREQLKELTKQYEKSENDLKALQSVGQIVGEVLKQLTEEKFIVKATNGPRYVVGCRRQLDKSKLKPGTRVALDMTTLTIMRYLPREVDPLVYNMSHEDPGNVSYSEIGGLSEQIRELREVIELPLTNPELFQRVGIIPPKGCLLYGPPGCI

SEQ ID NO: 838989 - protein, 292 aa, Homo sapiens
MDQDMLWVVVDRYLPREVDPLVYNMSHEDPGNVSYSEIGGLSEQIRELREVIELPLTNPELFQRVGIIPPKGCLLYGPPGTGKTLLARAVASQLDCNFLKVVSSSIVDKYIGESARLIREMFNYARDHQPCIIFMDEIDAIGGRRFSEGTSADREIQRTLMELLNQMDGFDTLHRVKMIMATNRPDTLDPALLRPGRLDRKIHIDLPNEQARLDILKIHAGPITKHGEIDYEAIVKLSDGFNGADLRNVCTEAGMFAIRADHDFVVQEDFMKAVRKVADSKKLESKLDYKPV

SEQ ID NO: 838990 - protein, 288 aa, Homo sapiens
MTTLTIMRYLPREVDPLVYNMSHEDPGNVSYSEIGGLSEQIRELREVIELPLTNPELFQRVGIIPPKGCLLYGPPGTGKTLLARAVASQLDCNFLKVVSSSIVDKYIGESARLIREMFNYARDHQPCIIFMDEIDAIGGRRFSEGTSADREIQRTLMELLNQMDGFDTLHRVKMIMATNRPDTLDPALLRPGRLDRKIHIDLPNEQARLDILKIHAGPITKHGEIDYEAIVKLSDGFNGADLRNVCTEAGMFAIRADHDFVVQEDFMKAVRKVADSKKLESKLDYKPV

SEQ ID NO: 838991 - protein, 402 aa, Homo sapiens; identical to SEQ ID NO: 838986

SEQ ID NO: 838992 - protein, 172 aa, Homo sapiens
MFNYARDHQPCIIFMDEIDAIGGRRFSEGTSADREIQRTLMELLNQMDGFDTLHRVKMIMATNRPDTLDPALLRPGRLDRKIHIDLPNEQARLDILKIHAGPITKHGEIDYEAIVKLSDGFNGADLRNVCTEAGMFAIRADHDFVVQEDFMKAVRKVADSKKLESKLDYKPV

SEQ ID NO: 838993 - protein, 341 aa, Homo sapiens
AIPGIPYERRLLIMADPRDKALQDYRKKLLEHKEIDGRLKELREQLKELTKQYEKSENDLKALQSVGQIVGEVLKQLTEEKFIVKATNGPRYVVGCRRQLDKSKLKPGTRVALDMTTLTIMRYLPREVDPLVYNMSHEDPGNVSYSEIGGLSEQIRELREVIELPLTNPELFQRVGIIPPKGCLLYGPPGTGKTLLARAVASQLDCNFLKVVSSSIVDKYIGESARLIREMFNYARDHQPCIIFMDEIDAIGGRRFSEGTSADREIQRTLMELLNQMDGFDTLHRVKMIMATNRPDTLDPALLRPGRLDRKIHIDLPNEQARLDILKIHAGPITKHGEIAW

SEQ ID NO: 838994 - protein, 73 aa, Homo sapiens
EDPRELDQTQNYEAIVKLSDGFNGADLRNVCTEAGMFAIRADHDFVVQEDFMKAVRKVADSKKLESKLDYKPV

SEQ ID NO: 838995 - protein, 402 aa, Homo sapiens; identical to SEQ ID NO: 838986

SEQ ID NO: 838996 - protein, 229 aa, Homo sapiens
AIPGIPYERRLLIMADPRDKALQDYRKKLLEHKEIDGRLKELREQLKELTKQYEKSENDLKALQSVGQIVGEVLKQLTEEKFIVKATNGPRYVVGCRRQLDKTGITGSSHLAQQLKFTTSDSCDRIKDEFQLLQAQYHSLKLECDKLASENVRDAAVTMLTVLRSMSYGLATIENAHNRLIIVQKAERGILCPGSMTNISQEHKAEESLGAIDMAKQVIQIPKLNSIIR

SEQ ID NO: 838997 - protein, 402 aa, Homo sapiens; identical to SEQ ID NO: 838986

SEQ ID NO: 838998 - protein, 219 aa, Homo sapiens
AIPGIPYERRLLIMADPRDKALQDYRKKLLEHKEIDGRLKELREQLKELTKQYEKSENDLKALQSVGQIVGEVLKQLTEEKFIVKATNGPRYVVGCRRQLDKSKLKPGTRVALDMTTLTIMRYLPREVDPLVYNMSHEDPGNVSYSEIGGLSEQIRELREVIELPLTNPELFQRVGIIPPKGCLLYGPPGTGKTLLARAVASQLDCNFLKVKGRLFCTY

SEQ ID NO: 838999 - protein, 109 aa, Homo sapiens
AIPGIPYERRLLIMADPRDKALQDYRKKLLEHKEIDGRLKELREQLKELTKQYEKSENDLKALQSVGQIVGEVLKQLTEEKFIVKATNGPRYVVGCRRQGSVDAESWHF

SEQ ID NO: 839000 - protein, 288 aa, Homo sapiens; identical to SEQ ID NO: 838990

SEQ ID NO: 839001 - protein, 192 aa, Homo sapiens
PFPASPMRDGFSSWRTLEIRRFRTTARSCLNTRRSTAVLRSIVGEVLKQLTEEKFIVKATNGPRYVVGCRRQLDKSKLKPGTRVALDMTTLTIMRYLPREVDPLVYNMSHEDPGNVSYSEIGGLSEQIRELREVIELPLTNPELFQRVGIIPPKGCLLYGPPGTGKTLLARAVASQLDCNFLKVKGRLFCTY

SEQ ID NO: 839002 - protein, 109 aa, Homo sapiens; identical to SEQ ID NO: 838999

SEQ ID NO: 839003 - protein, 49 aa, Homo sapiens
AYSANLSHPHKRWHPMGGAGTDHYIQCNPQSFSFASPHLPPINQNSACA

SEQ ID NO: 839004 - protein, 103 aa, Homo sapiens
MILKERPLGVKLGHSPKVFQQWGLTSPGFTEEAPLEALPRPCIKAVLTIDEKGTEAAGAMFLEAIPMSIPPEVKFNKPFVFLMIEQNTKSPLFMGKVVNPTQK

SEQ ID NO: 839005 - protein, 41 aa, Homo sapiens
MIRITQPSTRSPPTWAEFAFSLYRQLAHQSNSISALERCRA

SEQ ID NO: 839006 - protein, 171 aa, Homo sapiens
NRGPPGKCTYDRREAMRITAAEQACQAGTCMIKSLGRMQRAIFFVPDEGAPPTTWKMYSRQFLYWGTPMILKERPLGVKLGHSPKVFQQWGLTSPGFTEEAPLEALPRPCIKAVLTIDEKGTEAAGAMFLEAIPMSIPPEVKFNKPFVFLMIEQNTKSPLFMGKVVNPTQK

SEQ ID NO: 839007 - protein, 418 aa, Homo sapiens
MPSSVSWGILLLAGLCCLVPVSLAEDPQGDAAQKTDTSHHDQDHPTFNKITPNLAEFAFSLYRQLAHQSNSTNIFFSPVSIATAFAMLSLGTKADTHDEILEGLNFNLTEIPEAQIHEGFQELLRTLNQPDSQLQLTTGNGLFLSEGLKLVDKFLEDVKKLYHSEAFTVNFGDTEEAKKQINDYVEKGTQGKIVDLVKELDRDTVFALVNYIFFKGKWERPFEVKDTEEEDFHVDQVTTVKVPMMKRLGMFNIQHCKKLSSWVLLMKYLGNATAIFFLPDEGKLQHLENELTHDIITKFLENEDRRSASLHLPKLSITGTYDLKSVLGQLGITKVFSNGADLSGVTEEAPLKLSKAVHKAVLTIDEKGTEAAGAMFLEAIPMSIPPEVKFNKPFVFLMIEQNTKSPLFMGKVVNPTQK

SEQ ID NO: 839008 - protein, 418 aa, Homo sapiens; identical to SEQ ID NO: 839007

SEQ ID NO: 839009 - protein, 418 aa, Homo sapiens; identical to SEQ ID NO: 839007

SEQ ID NO: 839010 - protein, 418 aa, Homo sapiens; identical to SEQ ID NO: 839007

SEQ ID NO: 839011 - protein, 418 aa, Homo sapiens; identical to SEQ ID NO: 839007

SEQ ID NO: 839012 - protein, 418 aa, Homo sapiens; identical to SEQ ID NO: 839007

SEQ ID NO: 839013 - protein, 79 aa, Homo sapiens
  misc_feature (2)..(3): Xaa can be any naturally occurring amino acid
  misc_feature (7)..(7): Xaa can be any naturally occurring amino acid
VXXVQRXATCPGTVNRQCRLLSRGASSCWQACAAWSLSPWLRIPREMLPRRQGDAAQKTDTSHHDQDHPTFNKITPNLG

SEQ ID NO: 839014 - protein, 103 aa, Homo sapiens; identical to SEQ ID NO: 839004

SEQ ID NO: 839015 - protein, 165 aa, Homo sapiens
MFNIQHCKKAVQLGAADEIPGAMPPPSSSCLMKGKLQAPGENEVLPQLNIYPKTVPNYWGTPMILKERPLGVKLGHSPKVFQQWGLTSPGFTEEAPLEALPRPCIKAVLTIDEKGTEAAGAMFLEAIPMSIPPEVKFNKPFVFLMIEQNTKSPLFMGKVVNPTQK

SEQ ID NO: 839016 - protein, 239 aa, Homo sapiens
MFNIQHCKKAVQLGAADEIPGAMPPPSSSCLMKGKLQAPGENELTPRIFITQVPWGKLKDRSLPPLTGFLPKWAIIEEFTKNNSLIIPTIIATITLLNLYFYLRLIYSTSITLLPISNNVKIKGQFEHYKTTHSSPHSSPLPRYSYLISPFLTDNATSMRKNNRKPTTNPPAADTSDPQARSPRPTQGPGDRNAPGPTDAHTHAPQADDRSHPNTGGGGATTTPAGGDTRHRAGQTEPS

SEQ ID NO: 839017 - protein, 418 aa, Homo sapiens; identical to SEQ ID NO: 839007

SEQ ID NO: 839018 - protein, 418 aa, Homo sapiens; identical to SEQ ID NO: 839007

SEQ ID NO: 839019 - protein, 418 aa, Homo sapiens; identical to SEQ ID NO: 839007

SEQ ID NO: 839020 - protein, 418 aa, Homo sapiens; identical to SEQ ID NO: 839007

SEQ ID NO: 839021 - protein, 517 aa, Homo sapiens
AAALSAGRSPCCRVPFVAGSDSGRPRRAELRGVRRSSRAATTEQQRDWPPRAPFAAVPFPGALTPFSGWDCSGGADSAGIAAEAAASAAASAAERGSMFSPGQEEHCAPNKEPVKYGELVVLGYNGALPNGDRGRRKSRFALYKRPKANGVKPSTVHVISTPQASKAISCKGQHSISYTLSRNQTVVVEYTHDKDTDMFQVGRSTESPIDFVVTDTISGSQNTDEAQITQSTISRFACRIVCDRNEPYTARIFAAGFDSSKNIFLGEKAAKWKNPDGHMDGLTTNGVLVMHPRGGFTEESQPGVWREISVCGDVYTLRETRSAQQRGKLVESETNVLQDGSLIDLCGATLLWRTADGLFHTPTQKHIEALRQEINAARPQCPVGLNTLAFPSINRKEVVEEKQPWAYLSCGHVHGYHNWGHRSDTEANERECPMCRTVGPYVPLWLGCEAGFYVDAGPPTHAFTPCGHVCSEKSAKYWSQIPLPHGTHAFHAACPFCATQLVGEQNCIKLIFQGPID

SEQ ID NO: 839022 - protein, 517 aa, Homo sapiens; identical to SEQ ID NO: 839021

SEQ ID NO: 839023 - protein, 517 aa, Homo sapiens; identical to SEQ ID NO: 839021

SEQ ID NO: 839024 - protein, 160 aa, Homo sapiens
WGAWLREVVGLPGPLGAGQELSPKTLLGPGVGPESGLEMQPGGRAGPGGGAGRLQVGLRGQLEEAWPLPPALPSCSSWLHLPPPSKQALLAQLPPAFVDPEVSATKLFRPTSLLPVTEQSQLRLEKGVCRPRCCLPGESPGPALAPPRPPRPKSLPSSQL

SEQ ID NO: 839025 - protein, 316 aa, Homo sapiens
MDNTFAQCKKGVRVVNCARGGIVDEGALLRALQSGQCAGAALDVFTEEPPRDRALVDHENVISCPHLGASTKEAQSRCGEEIAVQFVDMVKGKSLTGVVNAQALTSAFSPHTKPWIGLAEALGTLMRAWAGSPKGTIQVITQGTSLKNAGNCLSPAVIVGLLKEASKQADVNLVNAKLLVKEAGLNVTTSHSPAAPGEQGFGECLLAVALAGAPYQAVGLVQGTTPVLQGLNGAVFRPEVPLRRDLPLLLFRTQTSDPAMLPTMIGLLAEAGVRLLSYQTSLVSDGETWHVMGISSLLPSLEAWKQHVTEAFQFHF

SEQ ID NO: 839026 - protein, 117 aa, Homo sapiens
LGPLFFSLFNIPDKTVQFTGPPLSVTLKSTENITLRRRSVVCTDIELTLTILALSEHSAGILYSILGLLQAGGVRLLSNVIPGISHGETWHVMGISSLLPSLEAWKQHVTEAFQFHF

SEQ ID NO: 839027 - protein, 316 aa, Homo sapiens; identical to SEQ ID NO: 839025

SEQ ID NO: 839028 - protein, 316 aa, Homo sapiens; identical to SEQ ID NO: 839025

SEQ ID NO: 839029 - protein, 316 aa, Homo sapiens; identical to SEQ ID NO: 839025

SEQ ID NO: 839030 - protein, 316 aa, Homo sapiens; identical to SEQ ID NO: 839025

SEQ ID NO: 839031 - protein, 217 aa, Homo sapiens
MAFANLRKVLISDSLDPCCRKILQDGGLQVVEKQNLSKEELIAELQDCEGLIVRSATKVTADVINAAEKLQVVGRAGTGVDNVDLEAATRKGILVMNTPNGNSLSAAELTCGMIMCLARQIPQATASMKDGKWERKKFMGTELNGKTLGILGLGRIGREVATRMQSFGMKTIGYDPIISPEVSSLLWCSAAAPGGRSGLSVISSLCTLLSCPPRQAC

SEQ ID NO: 839032 - protein, 309 aa, Homo sapiens
MDNTFAQCKKGVRVVNCARGGIVDEGALLRALQSGQCAGAALDVFTEEPPRDRALVDHENVISCPHLGASTKEAQSRCGEEIAVQFVDMVKGKSLTGVVNAQALTSAFSPHTKPWIGLAEALGTLMRAWAGSPKGTIQVITQGTSLKNAGNCLSPAVIVGLLKEASKQADVNLVNAKLLVTTSHSPAAPGEQGFGECLLAVALAGAPYQAVGLVQGTTPVLQGLNGAVFRPEVPLRRDLPLLLFRTQTSDPAMLPTMIGLLAEAGVRLLSYQTSLVSDGETWHVMGISSLLPSLEAWKQHVTEAFQFHF

SEQ ID NO: 839033 - protein, 316 aa, Homo sapiens; identical to SEQ ID NO: 839025

SEQ ID NO: 839034 - protein, 320 aa, Homo sapiens
MDNTFAQCKKGVRVVNCARGGIVDEGALLRALQSGQCAGAALDVFTEEPPRDRALVDHENVISCPHLGASTKEAQSRCGEEIAVQFVDMVKGKSLTGVVNAQALTSAFSPHTKPWIGLAEALGTLMRAWAGSPKGTIQVITQGTSLKNAGNCLSPAVIVGLLKEASKQADVNLVNAKLLVKEAGLNVTTSHSPAAPGEQGFGECLLAVALAGAPYQAVGLVQGTTPVLQGLNGAVFRPEPLWGEIAVQFLDMVKGKSLTGVVNAQPLTSAFSPHTKPWIGLAEALGTLMRAWVWVPQRDHPGDNTGNIPEECWSLPLGLF

SEQ ID NO: 839035 - protein, 217 aa, Homo sapiens; identical to SEQ ID NO: 839031

SEQ ID NO: 839036 - protein, 316 aa, Homo sapiens; identical to SEQ ID NO: 839025

SEQ ID NO: 839037 - protein, 316 aa, Homo sapiens; identical to SEQ ID NO: 839025

SEQ ID NO: 839038 - protein, 316 aa, Homo sapiens; identical to SEQ ID NO: 839025

SEQ ID NO: 839039 - protein, 205 aa, Homo sapiens
MAFANLRKVLISDSLDPCCRKILQDGGLQVVEKQNLSKEELIAELQDCEGLIVRSATKVTADVINAAEKLQVVGRAGTGVDNVDLEAATRKGILVMNTPNGNSLSAAELTCGMIMCLARQIPQATASMKDGKWERKKFMGTELNGKTLGILGLGRIGREVATRMQSFGMKTIGYDPIISPEVSSLLWCSAAAPGGRSGLSVISSL

SEQ ID NO: 839040 - protein, 723 aa, Homo sapiens
FLRRIARYIGDHGGTHMWWCSQWAYVNVVVFVGNVPFSYLNLVLMRLANRVVSLGPGALTTMVNGSQNVSPYCSPFRPNGARLLSQFVWTTAKVDKVLCVEGPKRTSSQTSGCAILFQTMVRTPTFYSGLWSTLSSSKGFQVCASLGVSPGNTNWQMTHSVCSTGFPCDPGRMGAISFSSGCAAWENDSRLFPLWIAPPMPGDHGVCTCVSLLGPLISLLPNLSLGVLPGGLPHDLMWAPSWTPSGIVLTFAPGIRPCALFAPTDFCSTLCDLGCVTFVALTSSRAQGTSSLHPKSCHSKRCPISKRFHYVPPMVLSDSSSYFSEVAPTKLNRSWRFYGTGFPPATFHVQANLVLPSVYCTSRIESPSLWVTLKLHGLCHHVVLSRRHCAPRLHSQEAIGAVDDGNGHLLMPPMGKFSNPQGEISTFTMSTNWTAISSLQSGQCAGAALDVFTEEPPRDRALVDHENVISCPHLGASTKEAQSRCGEEIAVQFVDMVKGKSLTGVVNAQALTSAFSPHTKPWIGLAEALGTLMRAWAGSPKGTIQVITQGTSLKNAGNCLSPAVIVGLLKEASKQADVNLVNAKLLVKEAGLNVTTSHSPAAPGEQGFGECLLAVALAGAPYQAVGLVQGTTPVLQGLNGAVFRPEVPLRRDLPLLLFRTQTSDPAMLPTMIGLLAEAGVRLLSYQTSLVSDGETWHVMGISSLLPSLEAWKQHVTEAFQFHF

SEQ ID NO: 839041 - protein, 299 aa, Homo sapiens
MAFANLRKVLISDSLDPCCRKILQDGGLQVVEKQNLSKEELIAELQDCEGLIVRSATKVTADVINAAEKLQVVGRAGTGVDNVDLEAATRKGILVMNTPNGNSLSAAELTCGMIMCLARQIPQATASMKDGKWERKKFMGTELNGKTLGILGLGRIGREVATRMQSFGMKTIGYDPIISPEVSSLLWCSAAAPGGRSGLSVISSLCTLLSCPPRQVADGKNLWPRGRTGTRVCDTVPEEGQWEKGSRSRGRETAQVARELNGNRFSSKTPDDQVPCGDHRMESRVHTLAVLPTRELNDG

SEQ ID NO: 839042 - protein, 156 aa, Homo sapiens
MGDLAKRGGWTWCSQEVSQSPCLLHTVTTSHSPAAPGEQGFGECLLAVALAGAPYQAVGLVQGTTPVLQGLNGAVFRPEVPLRRDLPLLLFRTQTSDPAMLPTMIGLLAEAGVRLLSYQTSLVSDGETWHVMGISSLLPSLEAWKQHVTEAFQFHF

SEQ ID NO: 839043 - protein, 75 aa, Homo sapiens
  misc_feature (14)..(14): Xaa can be any naturally occurring amino acid
  misc_feature (23)..(23): Xaa can be any naturally occurring amino acid
  misc_feature (25)..(25): Xaa can be any naturally occurring amino acid
RALLRYCAQLRRSXRAAMLALRXIXLLAEAGVRLLSYQTSLVSDGETWHVMGISSLLPSLEAWKQHVTEAFQFHF

SEQ ID NO: 839044 - protein, 97 aa, Homo sapiens
MAFANLRKVLISDSLDPCCRKILQDGGLQVVEKQNLSKEELIAELQGKARERKLRSLGQPPWKKGWLRPGQRAPLACTPYQLVPGPPNWSFCFPCAE

SEQ ID NO: 839045 - protein, 184 aa, Homo sapiens
GPHGSFSLSPGTSLKNAGNCLSPAVIVGLLKEASKQADVNLVNAKLLVKEAGLNVTTSHSPAAPGEQGFGECLLAVALAGAPYQAVGLVQGTTPVLQGLNGAVFRPEVPLRRDLPLLLFRTQTSDPAMLPTMIGLLAEAGVRLLSYQTSLVSDGETWHVMGISSLLPSLEAWKQHVTEAFQFHF

SEQ ID NO: 839046 - protein, 316 aa, Homo sapiens; identical to SEQ ID NO: 839025

SEQ ID NO: 839047 - protein, 316 aa, Homo sapiens; identical to SEQ ID NO: 839025

SEQ ID NO: 839048 - protein, 316 aa, Homo sapiens; identical to SEQ ID NO: 839025

SEQ ID NO: 839049 - protein, 323 aa, Homo sapiens
MDNTFAQCKKGVRVVNCARGGIVDEGALLRALQSGQCAGAALDVFTEEPPRDRALVDHENVISCPHLGASTKEAQSRCGEEIAVQFVDMVKGKSLTGVVNAQALTSAFSPHTKPWIGLAEALGTLMRAWAGSPKGTIQVITQGTSLKNAGNCLSPAVIVGLLKEASKQADVNLVNAKLLVKEAGLNSPCLLHTVTTSHSPAAPGEQGFGECLLAVALAGAPYQAVGLVQGTTPVLQGLNGAVFRPEVPLRRDLPLLLFRTQTSDPAMLPTMIGLLAEAGVRLLSYQTSLVSDGETWHVMGISSLLPSLEAWKQHVTEAFQFHF

SEQ ID NO: 839050 - protein, 316 aa, Homo sapiens; identical to SEQ ID NO: 839025

SEQ ID NO: 839051 - protein, 316 aa, Homo sapiens; identical to SEQ ID NO: 839025

SEQ ID NO: 839052 - protein, 258 aa, Homo sapiens
MDNTFAQCKKGVRVVNCARGGIVDEGALLRALQSGQCAGAALDVFTEEPPRDRALVDHENVISCPHLGASTKEAQSRCGEEIAVQFVDMVKGKSLTGVVNAQALTSAFSPHTKPWIGLAEALGTLMRAWAGSPKGTIQVITQGTSLKNAGNCLSPAVIVGLLKEASKQADVNLVNAKLLVKEAGLNVTTSHSPAAPGEQGFGECLLAVALAGAPYQAVGLVQGTTPVLQGLNGAVFRPEVPLRRDLPLLLFRTLNAGL

SEQ ID NO: 839053 - protein, 217 aa, Homo sapiens; identical to SEQ ID NO: 839031

SEQ ID NO: 839054 - protein, 217 aa, Homo sapiens; identical to SEQ ID NO: 839031

SEQ ID NO: 839055 - protein, 316 aa, Homo sapiens; identical to SEQ ID NO: 839025

SEQ ID NO: 839056 - protein, 316 aa, Homo sapiens; identical to SEQ ID NO: 839025

SEQ ID NO: 839057 - protein, 316 aa, Homo sapiens; identical to SEQ ID NO: 839025

SEQ ID NO: 839058 - protein, 245 aa, Homo sapiens
MWAQSRCGEEIAVQFVDMVKGKSLTGVVNAQALTSAFSPHTKPWIGLAEALGTLMRAWAGSPKGTIQVITQGTSLKNAGNCLSPAVIVGLLKEASKQADVNLVNAKLLVKEAGLNVTTSHSPAAPGEQGFGECLLAVALAGAPYQAVGLVQGTTPVLQGLNGAVFRPEVPLRRDLPLLLFRTQTSDPAMLPTMIGLLAEAGVRLLSYQTSLVSDGETWHVMGISSLLPSLEAWKQHVTEAFQFHF

SEQ ID NO: 839059 - protein, 279 aa, Homo sapiens
MAFANLRKVLISDSLDPCCRKILQDGGLQVVEKQNLSKEELIAELQDCEGLIVRSATKVTADVINAAEKLQVVGRAGTGVDNVDLEAATRKGILVMNTPNGNSLSAAELTCGMIMCLARQIPQATASMKDGKWERKKFMGTELNGKTLGILGLGRIGREVATRMQSFGMKTIGYDPIISPEVSSLLWCSAAAPGGRSGLSVISSLCTLLSCPPRQAADENFGRAKGAVVTALGSWKAPGGPDWPFPGRWVVGNPGRLLPNFCAPLARGTGGVFDVGAPG

SEQ ID NO: 839060 - protein, 208 aa, Homo sapiens
MAFANLRKVLISDSLDPCCRKILQDGGLQVVEKQNLSKEELIAELQDCEGLIVRSATKVTADVINAAEKLQVVGRAGTGVDNVDLEAATRKGILVMNTPNGNSLSAAELTCGMIMCLARQIPQATASMKDGKWERKKFMGTELNGKTLGILGLGRIGREVATRMQSFGMKASFSVAPLHINIPGNILHHGDFGSDFNQMKSPTSFLND

SEQ ID NO: 839061 - protein, 230 aa, Homo sapiens
  misc_feature (229)..(229): Xaa can be any naturally occurring amino acid
MDSTLTASEIRQRFIDFFKRNEHTYVHSSATIPLDDPTLLFANAGMNQFKPIFLNTIDPSHPMAKLSRAANTQKCIRAGGKHNDLDDVGKDVYHHTFFEMLGSWSFGDYFKELACKMALELLTQEFGIPIERLYVTYFGGDEAAGLEADLECKQIWQNLGLDDTKILPGNMKDNFWEMGDTGPCGPCSEIHYDRIGGRDAAHLVNQDDPNVLEIWNLVFIQYNRETDGXS

SEQ ID NO: 839062 - protein, 968 aa, Homo sapiens
MDSTLTASEIRQRFIDFFKRNEHTYVHSSATIPLDDPTLLFANAGMNQFKPIFLNTIDPSHPMAKLSRAANTQKCIRAGGKHNDLDDVGKDVYHHTFFEMLGSWSFGDYFKELACKMALELLTQEFGIPIERLYVTYFGGDEAAGLEADLECKQIWQNLGLDDTKILPGNMKDNFWEMGDTGPCGPCSEIHYDRIGGRDAAHLVNQDDPNVLEIWNLVFIQYNREADGILKPLPKKSIDTGMGLERLVSVLQNKMSNYDTDLFVPYFEAIQKGTGARPYTGKVGAEDADGIDMAYRVLADHARTITVALADGGRPDNTGRGYVLRRILRRAVRYAHEKLNASRGFFATLVDVVVQSLGDAFPELKKDPDMVKDIINEEEVQFLKTLSRGRRILDRKIQSLGDSKTIPGDTAWLLYDTYGFPVDLTGLIAEEKGLVVDMDGFEEERKLAQLKSQGKGAGGEDLIMLDIYAIEELRARGLEVTDDSPKYNYHLDSSGSYVFENTVATVMALRREKMFVEEVSTGQECGVVLDKTCFYAEQGGQIYDEGYLVKVDDSSEDKTEFTVKNAQVRGGYVLHIGTIYGDLKVGDQVWLFIDEPRRRPIMSNHTATHILNFALRSVLGEADQKGSLVAPDRLRFDFTAKGAMSTQQIKKAEEIANEMIEAAKAVYTQDCPLAAAKAIQGLRAVFDETYPDPVRVVSIGVPVSELLDDPSGPAGSLTSVEFCGGTHLRNSSHAGAFVIVTEEAIAKGIRRIVAVTGAEAQKALRKAESLKKCLSVMEAKVKAQTAPNKDVQREIADLGEALATAVIPQWQKDELRETLKSLKKVMDDLDRASKADVQKRVLEKTKQFIDSNPNQPLVILEMESGASAKALNEALKLFKMHSPQTSAMLFTVDNEAGKITCLCQVPQNAANRGLKASEWVQQVSGLMDGKGGGKDVSAQATGKNVGCLQEALQLATSFAQLRLGDVKN

SEQ ID NO: 839063 - protein, 942 aa, Homo sapiens
MDSTLTASEIRQRFIDFFKRNEHTYVHSSATIPLDDPTLLFANAGMNQFKPIFLNTIDPSHPMAKLSRAANTQKCIRAGGKHNDLDDVGKDVYHHTFFEMLGSWSFGDYFKELACKMALELLTQEFGIPIERLYVTYFGGDEAAGLEADLECKQIWQNLGLDDTKILPGNMKDNFWEMGDTGPCGPCSEIHYDRIGGRDAAHLVNQDDPNVLEIWNLVFIQYNREADGILKPLPKKSIDTGMGLERLVSVLQNKMSNYDTDLFVPYFEAIQKGTGARPYTGKVGAEDADGIDMAYRVLADHARTITVALADGGRPDNTGRGYVLRRILRRAVRYAHEKLNASRGFFATLVDVVVQSLGDAFPELKKDPDMVKDIINEEEVQFLKTLSRGRRILDRKIQSLGDSKTIPGDTAWLLYDTYGFPVDLTGLIAEEKGLVVDMDGFEEERKLAQLKSQGKGAGGEDLIMLDIYAIEELRARGLEVTDDSPKYNYHLDSSGSYVFENTVATVMALRREKMFVEEVSTGQECGVVLDKTCFYAEQGGQIYDEGYLVKVDDSSEDKTEFTVKNAQVRGGYVLHIGTIYGDLKVGDQVWLFIDEPRRRPIMSNHTATHILNFALRSVLGEADQKGSLVAPDRLRFDFTAKGAMSTQQIKKAEEIANEMIEAAKAVYTQDCPLAAAKAIQGLRAVFDETYPDPVRVVSIGVPVSELLDDPSGPAGSLTSVEFCGGTHLRNSSHAGAFVIVTEEAIAKGIRRIVAVTGAEAQKALRKAESLKKCLSVMEAKVKAQTAPNKDVQREIADLGEALATAVIPQWQKDELRETLKSLKKVMDDLDRASKADVQKRVLEKTKQFIDSNPNQPLVILEMESGASAKALNEALKLFKMHSPQTSAMLFTVDNEAGKITCLCQVPQVVARMCLHRPQARTLAACRRRCSWPLPSPSCASGM

SEQ ID NO: 839064 - protein, 865 aa, Homo sapiens
MDSTLTASEIRQRFIDFFKRNEHTYVHSSATIPLDDPTLLFANAGMNQFKPIFLNTIDPSHPMAKLSRAANTQKCIRAGGKHNDLDDVGKDVYHHTFFEMLGSWSFGDYFKELACKMALELLTQEFGIPIERLYVTYFGGDEAAGLEADLECKQIWQNLGLDDTKILPGNMKDNFWEMGDTGPCGPCSEIHYDRIGGRDAAHLVNQDDPNVLEIWNLVFIQYNREADGILKPLPKKSIDTGMGLERLVSVLQNKMSNYDTDLFVPYFEAIQKGTGARPYTGKVGAEDADGIDMAYRVLADHARTITVALADGGRPDNTGRGYVLRRILRRAVRYAHEKLNASRGFFATLVDVVVQSLGDAFPELKKDPDMVKDIINEEEVQFLKTLSRGRRILDRKIQSLGDSKTIPGDTAWLLYDTYGFPVDLTGLIAEEKGLVVDMDGFEEERKLAQLKSQGKGAGGEDLIMLDIYAIEELRARGLEVTDDSPKYNYHLDSSGSYVFENTVATVMALRREKMFVEEVSTGQECGVVLDKTCFYAEQGGQIYDEGYLVKVDDSSEDKTEFTVKNAQVRGGYVLHIGTIYGDLKVGDQVWLFIDEPRRRPIMSNHTATHILNFALRSVLGEADQKGSLVAPDRLRFDFTAKGAMSTQQIKKAEEIANEMIEAAKAVYTQDCPLAAAKAIQGLRAVFDETYPDPVRVVSIGVPVSELLDDPSGPAGSLTSVEFCGGTHLRNSSHAGAFVIVTEEAIAKGIRRIVAVTGAEAQKALRKAESLKKCLSVMEAKVKAQTAPNKDVQREIADLGEALATAVIPQWQKDELRETLKSLKKVTGHFLRPAAPRGCKELSGEGGGSHWIHPSSQELFICYKNI

SEQ ID NO: 839065 - protein, 726 aa, Homo sapiens
MDSTLTASEIRQRFIDFFKRNEHTYVHSSATIPLDDPTLLFANAGMNQFKPIFLNTIDPSHPMAKLSRAANTQKCIRAGGKHNDLDDVGKDVYHHTFFEMLGSWSFGDYFKELACKMALELLTQEFGIPIERLYVTYFGGDEAAGLEADLECKQIWQNLGLDDTKILPGNMKDNFWEMGDTGPCGPCSEIHYDRIGGRDAAHLVNQDDPNVLEIWNLVFIQYNREADGILKPLPKKSIDTGMGLERLVSVLQNKMSNYDTDLFVPYFEAIQKGTGARPYTGKVGAEDADGIDMAYRVLADHARTITVALADGGRPDNTGRGYVLRRILRRAVRYAHEKLNASRGFFATLVDVVVQSLGDAFPELKKDPDMVKDIINEEEVQFLKTLSRGRRILDRKIQSLGDSKTIPGDTAWLLYDTYGFPVDLTGLIAEEKGLVVDMDGFEEERKLAQLKSQGKGAGGEDLIMLDIYAIEELRARGLEVTDDSPKYNYHLDSSGSYVFENTVATVMALRREKMFVEEVSTGQECGVVLDKTCFYAEQGGQIYDEGYLVKVDDSSEDKTEFTVKNAQVRGGYVLHIGTIYGDLKVGDQVWLFIDEPRRRPIMSNHTATHILNFALRSVLGEADQKGSLVAPDRLRFDFTAKGAMSTQQIKKAEEIANEMIEAAKAVYTQDCPLAAAKAIQGLRAVFDETYPDPVRVVSIGVPVSELLDDPSGPAGSLTSVEFCGGT

SEQ ID NO: 839066 - protein, 463 aa, Homo sapiens
MTWTMWARMFVEEVSTGQECGVVLDKTCFYAEQGGQIYDEGYLVKVDDSSEDKTEFTVKNAQVRGGYVLHIGTIYGDLKVGDQVWLFIDEPRRRPIMSNHTATHILNFALRSVLGEADQKGSLVAPDRLRFDFTAKGAMSTQQIKKAEEIANEMIEAAKAVYTQDCPLAAAKAIQGLRAVFDETYPDPVRVVSIGVPVSELLDDPSGPAGSLTSVEFCGGTHLRNSSHAGAFVIVTEEAIAKGIRRIVAVTGAEAQKALRKAESLKKCLSVMEAKVKAQTAPNKDVQREIADLGEALATAVIPQWQKDELRETLKSLKKVMDDLDRASKADVQKRVLEKTKQFIDSNPNQPLVILEMESGASAKALNEALKLFKMHSPQTSAMLFTVDNEAGKITCLCQVPQNAANRGLKASEWVQQVSGLMDGKGGGKDVSAQATGKNVGCLQEALQLATSFAQLRLGDVKN

SEQ ID NO: 839067 - protein, 583 aa, Homo sapiens
MDSTLTASEIRQRFIDFFKRNEHTYVHSSATIPLDDPTLLFANAGMNQFKPIFLNTIDPSHPMAKLSRAANTQKCIRAGGKHNDLDDVGKDVYHHTFFEMLGSWSFGDYFKELACKMALELLTQEFGIPIERLYVTYFGGDEAAGLEADLECKQIWQNLGLDDTKILPGNMKDNFWEMGDTGPCGPCSEIHYDRIGGRDAAHLVNQDDPNVLEIWNLVFIQYNREADGILKPLPKKSIDTGMGLERLVSVLQNKMSNYDTDLFVPYFEAIQKGTGARPYTGKVGAEDADGIDMAYRVLADHARTITVALADGGRPDNTGRGYVLRRILRRAVRYAHEKLNASRGFFATLVDVVVQSLGDAFPELKKDPDMVKDIINEEEVQFLKTLSRGRRILDRKIQSLGDSKTIPGDTAWLLYDTYGFPVDLTGLIAEEKGLVVDMDGFEEERKLAQLKSQGKGAGGEDLIMLDIYAIEELRARGLEVTDDSPKYNYHLDSSGSYVFENTVATVMALRREKMFVEEVSTGQECGVVLDKTCFYAEQGGQIYDEGYLVKVDDSSEDSPDLSFPRQQVGIVFAAENKRTTCNT

SEQ ID NO: 839068 - protein, 346 aa, Homo sapiens [sequence omitted]

SEQ ID NO: 839069 - protein, 189 aa, Homo sapiens
PRLVRGWVVQGCAEGDADFGEALATAVIPQWQKDELRETLKSLKKVMDDLDRASKADVQKRVLEKTKQFIDSNPNQPLVILEMESGASAKALNEALKLFKMHSPQTSAMLFTVDNEAGKITCLCQVPQNAANRGLKASEWVQQVSGLMDGKGGGKDVSAQATGKNVGCLQEALQLATSFAQLRLGDVKN

SEQ ID NO: 839070 - protein, 189 aa, Homo sapiens; identical to SEQ ID NO: 839069

SEQ ID NO: 839071 - protein, 128 aa, Homo sapiens
VAGLLRAANAHTSEGPCSSTVAWARSSPQALNEALKLFKMHSPQTSAMLFTVDNEAGKITCLCQVPQNAANRGLKASEWVQQVSGLMDGKGGGKDVSAQATGKNVGCLQEALQLATSFAQLRLGDVKN

SEQ ID NO: 839072 - protein, 73 aa, Homo sapiens
MSNHTATHILNFALRSVLGEADQKGSLVAPDRLRFDFTAKGAMSTQQIKKAEEIANEMIEAAKVGWATAECPP

SEQ ID NO: 839073 - protein, 968 aa, Homo sapiens; identical to SEQ ID NO: 839062

SEQ ID NO: 839074 - protein, 39 aa, Homo sapiens
MDDLDRASKADVQKRVLEKTKQFIDSNPNQPTVDKWYRA

SEQ ID NO: 839075 - protein, 968 aa, Homo sapiens
MDSTLTASEIRQRFIDFFKRNEHTYVHSSATIPLDDPTLLFANAGMNQFKPIFLNTIDPSHPMAKLSRAANTQKCIRAGGKHNDLDDVGKDVYHHTFFEMLGSWSFGDYFKELACKMALELLTQEFGIPIERLYVTYFGGDEAAGLEADLECKQIWQNLGLDDTKILPGNMKDNFWEMGDTGPCGPCSEIHYDRIGGRDAAHLVNQDDPNVLEIWNLVFIQYNREADGILKPLPKKSIDTGMGLERLVSVLQNKMSNYDTDLFVPYFEAIQKGTGARPYTGKVGAEDADGIDMAYRVLADHARTITVALADGGRPDNTGRGYVLRRILRRAVRYAHEKLNASRGFFATLVDVVVQSLGDAFPELKKDPDMVKDIINEEEVQFLKTLSRGRRILDRKIQSLGDSKTIPGDTAWLLYDTYGFPVDLTGLIAEEKGLVVDMDGFEEERKLAQLKSQGKGAGGEDLIMLDIYAIEELRARGLEVTDDSPKYNYHLDSSGSYVFENTVATVMALRREKMFVEEVSTGQECGVVLDKTCFYAEQGGQIYDEGYLVKVDDSSEDKTEFTVKNAQVRGGYVLHIGTIYGDLKVGDQVWLFIDEPRRRPIMSNHTATHILNFALRSVLGEADQKGSLVAPDRLRFDFTAKGAMSTQQIKKAEEIANEMIEAAKAVYTQDCPLAAAKAIQGLRAVFDETYPDPVRVVSIGVPVSELLDDPSGPAGSLTSVEFCGGTHLRNSSHAGAFVIVTEEAIAKGIRRIVAVTGAEAQKALRKAESLKKCLSVMEAKVKAQTAPNKDVQREIADLGEALATAVIPQWQKDELRETLKSLKKVMDDLDRASKADVQKRVLEKTKQFIDSNPNQPLVILEMESGASAKALNEALKLFKMHSPQTSAMLFTVDNEAGKITCLCQVPQNAANRGLKASEWVQQVSGLMDGKGGGKDVSAQASVPDQASMPDQASVPDQASVPDQASVPD

SEQ ID NO: 839076 - protein, 894 aa, Homo sapiens
MDSTLTASEIRQRFIDFFKRNEHTYVHSSATIPLDDPTLLFANAGMNQFKPIFLNTIDPSHPMAKLSRAANTQKCIRAGGKHNDLDDVGKDVYHHTFFEMLGSWSFGDYFKELACKMALELLTQEFGIPIERLYVTYFGGDEAAGLEADLECKQIWQNLGLDDTKILPGNMKDNFWEMGDTGPCGPCSEIHYDRIGGRDAAHLVNQDDPNVLEIWNLVFIQYNREADGILKPLPKKSIDTGMGLERLVSVLQNKMSNYDTDLFVPYFEAIQKGTGARPYTGKVGAEDADGIDMAYRVLADHARTITVALADGGRPDNTGRGYVLRRILRRAVRYAHEKLNASRGFFATLVDVVVQSLGDAFPELKKDPDMVKDIINEEEVQFLKTLSRGRRILDRKIQSLGDSKTIPGDTAWLLYDTYGFPVDLTGLIAEEKGLVVDMDGFEEERKLAQLKSQGKGAGGEDLIMLDIYAIEELRARGLEVTDDSPKYNYHLDSSGSYVFENTVATVMALRREKMFVEEVSTGQECGVVLDKTCFYAEQGGQIYDEGYLVKVDDSSEDKTEFTVKNAQVRGGYVLHIGTIYGDLKVGDQVWLFIDEPRRRPIMSNHTATHILNFALRSVLGEADQKGSLVAPDRLRFDFTAKGAMSTQQIKKAEEIANEMIEAAKAVYTQDCPLAAAKAIQGLRAVFDETYPDPVRVVSIGVPVSELLDDPSGPAGSLTSVEFCGGTHLRNSSHAGAFVIVTEEAIAKGIRRIVAVTGAEAQKALRKAESLKKCLSVMEAKVKAQTAPNKDVQREIADLGEALATAVIPQWQKDELRETLKSLKKVMDDLDRASKADVQKRVLEKTKQFIDSNPNQPLVILEMESGASAKATQGPGSPPLGLISSLVADMWPLWL

SEQ ID NO: 839077 - protein, 700 aa, Homo sapiens
MDSTLTASEIRQRFIDFFKRNEHTYVHSSATIPLDDPTLLFANAGMNQFKPIFLNTIDPSHPMAKLSRAANTQKCIRAGGKHNDLDDVGKDVYHHTFFEMLGSWSFGDYFKELACKMALELLTQEFGIPIERLYVTYFGGDEAAGLEADLECKQIWQNLGLDDTKILPGNMKDNFWEMGDTGPCGPCSEIHYDRIGGRDAAHLVNQDDPNVLEIWNLVFIQYNREADGILKPLPKKSIDTGMGLERLVSVLQNKMSNYDTDLFVPYFEAIQKGTGARPYTGKVGAEDADGIDMAYRVLADHARTITVALADGGRPDNTGRGYVLRRILRRAVRYAHEKLNASRGFFATLVDVVVQSLGDAFPELKKDPDMVKDIINEEEVQFLKTLSRGRRILDRKIQSLGDSKTIPGDTAWLLYDTYGFPVDLTGLIAEEKGLVVDMDGFEEERKLAQLKSQGKGAGGEDLIMLDIYAIEELRARGLEVTDDSPKYNYHLDSSGSYVFENTVATVMALRREKMFVEEVSTGQECGVVLDKTCFYAEQGGQIYDEGYLVKVDDSSEDKTEFTVKNAQVRGGYVLHIGTIYGDLKVGDQVWLFIDEPRRRPIMSNHTATHILNFALRSVLGEADQKGSLVAPDRLRFDFTAKGAMSTQQIKKAEEIANEMIEAAKVGWATAECPPSPHRHCLSTVLAVRCSHSVVSDSSCT

SEQ ID NO: 839078 - protein, 538 aa, Homo sapiens
MDSTLTASEIRQRFIDFFKRNEHTYVHSSATIPLDDPTLLFANAGMNQFKPIFLNTIDPSHPMAKLSRAANTQKCIRAGGKHNDLDDVGKDVYHHTFFEMLGSWSFGDYFKELACKMALELLTQEFGIPIERLYVTYFGGDEAAGLEADLECKQIWQNLGLDDTKILPGNMKDNFWEMGDTGPCGPCSEIHYDRIGGRDAAHLVNQDDPNVLEIWNLVFIQYNREADGILKPLPKKSIDTGMGLERLVSVLQNKMSNYDTDLFVPYFEAIQKGTGARPYTGKVGAEDADGIDMAYRVLADHARTITVALADGGRPDNTGRGYVLRRILRRAVRYAHEKLNASRGFFATLVDVVVQSLGDAFPELKKDPDMVKDIINEEEVQFLKTLSRGRRILDRKIQSLGDSKTIPGDTAWLLYDTYGFPVDLTGLIAEEKGLVVDMDGFEEERKLAQLKSQGKGAGGEDLIMLDIYAIEELRARGLEVTDDSPKYNYHLDSSGSYVFENTVATVMALRREKIFLSRMRRPLSESLEKLHLFFTNDV

SEQ ID NO: 839079 - protein, 308 aa, Homo sapiens
MDSTLTASEIRQRFIDFFKRNEHTYVHSSATIPLDDPTLLFANAGMNQFKPIFLNTIDPSHPMAKLSRAANTQKCIRAGGKHNDLDDVGKDVYHHTFFEMLGSWSFGDYFKELACKMALELLTQEFGIPIERLYVTYFGGDEAAGLEADLECKQIWQNLGLDDTKILPGNMKDNFWEMGDTGPCGPCSEIHYDRIGGRDAAHLVNQDDPNVLEIWNLVFIQYNREADGILKPLPKKSIDTGMGLERLVSVLQNKMSNYDTDLFVPYFEAIQKGTGARPYTGKVGAEDADGIDMALNFCPEPSTSVPSV

SEQ ID NO: 839080 - protein, 190 aa, Homo sapiens
RYSTVVTAILTKPPEASPVIAPALATAVIPQWQKDELRETLKSLKKVMDDLDRASKADVQKRVLEKTKQFIDSNPNQPLVILEMESGASAKALNEALKLFKMHSPQTSAMLFTVDNEAGKITCLCQVPQNAANRGLKASEWVQQVSGLMDGKGGGKDVSAQATGKNVGCLQEALQLATSFAQLRLGDVKN

SEQ ID NO: 839081 - protein, 118 aa, Homo sapiens
MDSTLTASEIRQRFIDFFKRNEHTYVHSSATIPLDDPTLLFANAGMNQFKPIFLNTIDPSHPMAKLSRAANTQKCIRAGGKHNDLDDVGKDVYHHTFFEMLGSWSFGDYFKVSSEQKN

SEQ ID NO: 839082 - protein, 122 aa, Homo sapiens
AAVPAGTCGSDRGWGWGRGRAWRRAGAGGGRLPLPRHFLPGCGRLSGSSAFAPAAAASLSAPASFDRLPPRPGGARLLHGHSASSLPSSLLPLPFFLLPSPPRRHRPGPPAGGRARSSSQKA

SEQ ID NO: 839083 - protein, 496 aa, Homo sapiens
MKLGKKPMYKPVDPYSRMQSTYNYNMRGGAYPPRYFYPFPVPPLLYQVELSVGGQQFNGKGKTRQAAKHDAAAKALRILQNEPLPERLEVNGRESEEENLNKSEISQVFEIALKRNLPVNFEVARESGPPHMKNFVTKVSVGEFVGEGEGKSKKISKKNAAIAVLEELKKLPPLPAVERVKPRIKKKTKPIVKPQTSPEYGQGINPISRLAQIQQAKKEKEPEYTLLTERGLPRRREFVMQVKVGNHTAEGTGTNKKVAKRNAAENMLEILGFKVPQAQPTKPALKSEEKTPIKKPGDGRKVTFFEPGSGDENGTSNKEDEFRMPYLSHQQLPAGILPMVPEVAQAVGVSQGHHTKDFTRAAPNPAKATVTAMIARELLYGGTSPTAETILKNNISSGHVPHGPLTRPSEQLDYLSRVQGFQVEYKDFPKNNKNEFVSLINCSSQPPLISHGIGKDVESCHDMAALNILKLLSELDQQSTEMPRTGNGPMSVCGRC

SEQ ID NO: 839084 - protein, 577 aa, Homo sapiens
MSQVQVQVQNPSAALSGSQILNKNQSLLSQPLMSIPSTTSSLPSENAGRPIQNSALPSASITSTSAAAESITPTVELNALCMKLGKKPMYKPVDPYSRMQSTYNYNMRGGAYPPRYFYPFPVPPLLYQVELSVGGQQFNGKGKTRQAAKHDAAAKALRILQNEPLPERLEVNGRESEEENLNKSEISQVFEIALKRNLPVNFEVARESGPPHMKNFVTKVSVGEFVGEGEGKSKKISKKNAAIAVLEELKKLPPLPAVERVKPRIKKKTKPIVKPQTSPEYGQGINPISRLAQIQQAKKEKEPEYTLLTERGLPRRREFVMQVKVGNHTAEGTGTNKKVAKRNAAENMLEILGFKVPQAQPTKPALKSEEKTPIKKPGDGRKVTFFEPGSGDENGTSNKEDEFRMPYLSHQQLPAGILPMVPEVAQAVGVSQGHHTKDFTRAAPNPAKATVTAMIARELLYGGTSPTAETILKNNISSGHVPHGPLTRPSEQLDYLSRVQGFQVEYKDFPKNNKNEFVSLINCSSQPPLISHGIGKDVESCHDMAALNILKLLSELDQQSTEMPRTGNGPMSVCGRC

SEQ ID NO: 839085 - protein, 496 aa, Homo sapiens; identical to SEQ ID NO: 839083

SEQ ID NO: 839086 - protein, 496 aa, Homo sapiens; identical to SEQ ID NO: 839083

SEQ ID NO: 839087 - protein, 264 aa, Homo sapiens
GLCFDFFVQVKVGNHTAEGTGTNKKVAKRNAAENMLEILGFKVPQAQPTKPALKSEEKTPIKKPGDGRKVTFFEPGSGDENGTSNKEDEFRMPYLSHQQLPAGILPMVPEVAQAVGVSQGHHTKDFTRAAPNPAKATVTAMIARELLYGGTSPTAETILKNNISSGHVPHGPLTRPSEQLDYLSRVQGFQVEYKDFPKNNKNEFVSLINCSSQPPLISHGIGKDVESCHDMAALNILKLLSELDQQSTEMPRTGNGPMSVCGRC

SEQ ID NO: 839088 - protein, 496 aa, Homo sapiens; identical to SEQ ID NO: 839083

SEQ ID NO: 839089 - protein, 496 aa, Homo sapiens; identical to SEQ ID NO: 839083

SEQ ID NO: 839090 - protein, 373 aa, Homo sapiens
MKLGKKPMYKPVDPYSRMQSTYNYNMRGGAYPPRYFYPFPVPPLLYQVELSVGGQQFNGKGKTRQAAKHDAAAKALRILQNEPLPERLEVNGRESEEENLNKSEISQVFEIALKRNLPVNFEVARESGPPHMKNFVTKVSVGEFVGEGEGKSKKISKKNAAIAVLEELKKLPPLPAVERVKPRIKKKTKPIVKPQTSPEYGQGINPISRLAQIQQAKKEKEPEYTLLTERGLPRRREFVMQVKVGNHTAEGTGTNKKVAKRNAAENMLEILGFKVPQAQPTKPALKSEEKTPIKKPGDGRKVTFFEPGSGDENGTSNKEDEFRMPYLSHQQLPAGILPMVPEVAQAVGVSQATPSPLLSLPTVICILSFIIFF

SEQ ID NO: 839091 - protein, 353 aa, Homo sapiens
MKLGKKPMYKPVDPYSRMQSTYNYNMRGGAYPPRYFYPFPVPPLLYQVELSVGGQQFNGKGKTRQAAKHDAAAKALRILQNEPLPERLEVNGRESEEENLNKSEISQVFEIALKRNLPVNFEVARESGPPHMKNFVTKVSVGEFVGEGEGKSKKISKKNAAIAVLEELKKLPPLPAVERVKPRIKKKTKPIVKPQTSPEYGQGINPISRLAQIQQAKKEKEPEYTLLTERGLPRRREFVMQVKVGNHTAEGTGTNKKVAKRNAAENMLEILGFKVPQAQPTKPALKSEEKLGQTLDSHARERPLTGPRAKSTRENQMLPTQRDPTFLVCHGPTTSCSTHTITTAFSSNSDLYS

SEQ ID NO: 839092 - protein, 435 aa, Homo sapiens
MKLGKKPMYKPVDPYSRMQSTYNYNMRGGAYPPRYFYPFPVPPLLYQVELSVGGQQFNGKGKTRQAAKHDAAAKALRILQNEPLPERLEVNGRESEEENLNKSEISQVFEIALKRNLPVNFEVARESGPPHMKNFVTKVSVGEFVGEGEGKSKKISKKNAAIAVLEELKKLPPLPAVERVKPRIKKKTKPIVKPQTSPEYGQGINPISRLAQIQQAKKEKEPEYTLLTERGLPRRREFVMQVKVGNHTAEGTGTNKKVAKRNAAENMLEILGFKVPQAQPTKPALKSEEKTPIKKPGDGRKVTFFEPGSGDENGTSNKEDEFRMPYLSHQQLPAGILPMVPEVAQAVGVSQGHHTKDFTRAAPNPAKATVTAMIARELLYGGTSPTAETILKNNISSGHVPHGPLTRPSEQLDYLSRVQGFQVEIQRLPKKQQEG

SEQ ID NO: 839093 - protein, 325 aa, Homo sapiens
MKLGKKPMYKPVDPYSRMQSTYNYNMRGGAYPPRYFYPFPVPPLLYQVELSVGGQQFNGKGKTRQAAKHDAAAKALRILQNEPLPERLEVNGRESEEENLNKSEISQVFEIALKRNLPVNFEVARESGPPHMKNFVTKVSVGEFVGEGEGKSKKISKKNAAIAVLEELKKLPPLPAVERVKPRIKKKTKPIVKPQTSPEYGQGINPISRLAQIQQAKKEKEPEYTLLTERGLPRRREFVMQVKVGNHTAEGTGTNKKVAKRNAAENMLEILGFKVPQAQPTKPALKSEEKEGECCGLSDCKMVSRLTLGNWGTSRGRLQGKALSA

SEQ ID NO: 839094 - protein, 125 aa, Homo sapiens
AAVPAGTCGSDRGWGWGRGRAWRRAGAGGGRLPLPRHFLPGCGRLSGSSAFAPAAAASLSAPASFDRLPPRPGGARLLHGHSASSLPSSLLPLPFFLLPSPPRRHRPGPPAGGRARSSSQSLLTT

SEQ ID NO: 839095 - protein, 496 aa, Homo sapiens; identical to SEQ ID NO: 839083

SEQ ID NO: 839096 - protein, 496 aa, Homo sapiens; identical to SEQ ID NO: 839083

SEQ ID NO: 839097 - protein, 134 aa, Homo sapiens
AAVPAGTCGSDRGWGWGRGRAWRRAGAGGGRLPLPRHFLPGCGRLSGSSAFAPAAAASLSAPASFDRLPPRPGGARLLHGHSASSLPSSLLPLPFFLLPSPPRRHRPGPPAGGRARSSSQVEFCSCRPGWSAVA

SEQ ID NO: 839098 - protein, 496 aa, Homo sapiens; identical to SEQ ID NO: 839083

SEQ ID NO: 839099 - protein, 502 aa, Homo sapiens
MKLGKKPMYKPVDPYSRMQSTYNYNMRGGAYPPRYFYPFPVPPLLYQVELSVGGQQFNGKGKTRQAAKHDAAAKALRILQNEPLPERLEVNGRESEEENLNKSEISQVFEIALKRNLPVNFESFPLKQVARESGPPHMKNFVTKVSVGEFVGEGEGKSKKISKKNAAIAVLEELKKLPPLPAVERVKPRIKKKTKPIVKPQTSPEYGQGINPISRLAQIQQAKKEKEPEYTLLTERGLPRRREFVMQVKVGNHTAEGTGTNKKVAKRNAAENMLEILGFKVPQAQPTKPALKSEEKTPIKKPGDGRKVTFFEPGSGDENGTSNKEDEFRMPYLSHQQLPAGILPMVPEVAQAVGVSQGHHTKDFTRAAPNPAKATVTAMIARELLYGGTSPTAETILKNNISSGHVPHGPLTRPSEQLDYLSRVQGFQVEYKDFPKNNKNEFVSLINCSSQPPLISHGIGKDVESCHDMAALNILKLLSELDQQSTEMPRTGNGPMSVCGRC

SEQ ID NO: 839100 - protein, 276 aa, Homo sapiens
MRGNAISGAPIIRGTSSVAKASDYDGYYYEEDYYKCMGCDDNVVDVVLPRRLPGWPSSARIRRLRAVPRTPAHAPNNRYSDPMSLRFAENLVPEFGNKEDEFRMPYLSHQQLPAGILPMVPEVAQAVGVSQGHHTKDFTRAAPNPAKATVTAMIARELLYGGTSPTAETILKNNISSGHVPHGPLTRPSEQLDYLSRVQGFQVEYKDFPKNNKNEFVSLINCSSQPPLISHGIGKDVESCHDMAALNILKLLSELDQQSTEMPRTGNGPMSVCGRC

SEQ ID NO: 839101 - protein, 474 aa, Homo sapiens
MKLGKKPMYKPVDPYSRMQSTYNYNMRGGAYPPRYFYPFPVPPLLYQVELSVGGQQFNGKGKTRQAAKHDAAAKALRILQNEPLPERLEVNGRESEEENLNKSEISQVFEIALKRNLPVNFEVARESGPPHMKNFVTKVSVGEFVGEGEGKSKKISKKNAAIAVLEELKKLPPLPAVERVKPRIKKKTKPIVKPQTSPEYGQGINPISRLAQIQQAKKEKEPEYTLLTERGLPRRREFVMQVKVGNHTAEGTGTNKKVAKRNAAENMLEILGFKVPQAQPTKPALKSEEKTPIKKPGDGRKVTFFEPGSGDENGTSNKEDEFRMPYLSHQQLPAGILPMVPEVAQAVGVSQGHHTKDFTRAAPNPAKATVTAMIARELLYGGTSPTAETILKNNISSGHVPHGPLTRPSEQLGQTLDSHARERPLTGPRAKSTRENQMLPTQRDPTFLVCHGPTTSCSTHTITTAFSSNSDLYS

SEQ ID NO: 839102 - protein, 448 aa, Homo sapiens
MYKPVDPYSRMQSTYNYNMRGGAYPPRYFYPFPVPPLLYQVELSVGGQQFNGKGKTRQAAKHDAAAKALRILQNEPLPERLEVNGRESEEENLNKSEISQVFEIALKRNLPVNFEVARESGPPHMKNFVTKVSVGEFVGEGEGKSKKISKKNAAIAVLEELKKLPPLPAVERVKPRIKKKTKPIVKPQTSPEYGQGINPISRLAQIQQAKKEKEPEYTLLTERGLPRRREFVMQVKVGNHTAEGTGTNKKVAKRNAAENMLEILGFKVPQAQPTKPALKSEEKTPIKKPGDGRKVTFFEPGSGDENGTSNKEDEFRMPYLSHQQLPAGILPMVPEVAQAVGVSQGHHTKDFTRAAPNPAKATVTAMIARELLYGGTSPTAETILKNNISSGHVPHGPLTRPSEQLDYLSRVQGFQVEYKDFPKNNKNEFVSLINCSSQPLSPSMHIAQ

SEQ ID NO: 839103 - protein, 332 aa, Homo sapiens
MKLGKKPMYKPVDPYSRMQSTYNYNMRGGAYPPRYFYPFPVPPLLYQVELSVGGQQFNGKGKTRQAAKHDAAAKALRILQNEPLPERLEVNGRESEEENLNKSEISQVFEIALKRNLPVNFEVARESGPPHMKNFVTKVSVGEFVGEGEGKSKKISKKNAAIAVLEELKKLPPLPAVERVKPRIKKKTKPIVKPQTSPEYGQGINPISRLAQIQQAKKEKEPEYTLLTERGLPRRREFVMQVKVGNHTAEGTGTNKKVAKRNAAENMLEILGFKVPQAQPTKPALKSEEKTQRHPPKKKIKRRKHKNKTQINTQHNNKKKGGGAQKSSPGGA

SEQ ID NO: 839104 - protein, 125 aa, Homo sapiens; identical to SEQ ID NO: 839094

SEQ ID NO: 839105 - protein, 109 aa, Homo sapiens
MPRHLALGRDNSIQKDGVNSVGSRDSSSYQWLAADWKPACCRSVGGDMSSHCLEREQSKLRSRHLQKGNGGRTHSGVDLGLSPAVPVAIAFSAIHKHSKPNQTAVHIPA

SEQ ID NO: 839106 - protein, 370 aa, Homo sapiens
MAFRRRTKSYPLFSQEFVIHNHADIGFCLVLCVLIGLMFEVTAKTAFLFILPQYNISVPTADSETVHYHYGPKDLVTILFYIFITIILHAVVQEYILDKISKRLHLSKVKHSKFNESGQLVVFHFTSVIWCFYVVVTEGYLTNPRSLWEDYPHVHLPFQVKFFYLCQLAYWLHALPELYFQKVRKEEIPRQLQYICLYLVHIAGAYLLNLSRLGLILLLLQYSTEFLFHTARLFYFADENNEKLFSAWAAVFGVTRLFILTLAVLAIGFGLARMENQAFDPEKGNFNTLFCRLCVLLLVCAAQAWLMWRFIHSQLRHWREYWNEQSAKRRVPATPRLPARLIKRESGYHENGVVKAENGTSPRTKKLKSP

SEQ ID NO: 839107 - protein, 400 aa, Homo sapiens
TLCSLASGRTLLCRRRQTGIAGAAATAVCAPTSAATMGILEKISEIEKEIARTQKNKATEYHLGLLKAKLAKYRAQLLEPSKSASSKGEGFDVMKSGDARVALIGFPSVGKSTFLSLMTSTASEAASYEFTTLTCIPGVIEYKGANIQLLDLPGIIEGAAQGKGRGRQVIAVARTADVIIMMLDATKGEVQRSLLEKELESVGIRLNKHKPNIYFKPKKGGGISFNSTVTLTQCSEKLVQLILHEYKIFNAEVLFREDCSPDEFIDVIVGNRVYMPCLYVYNKIDQISMEEVDRLARKPNSVVISCGMKLNLDYLLEMLWEYLALTCIYTKKRGQRPDFTDAIILRKGASVEHVCHRIHRSLASQFKYALVWGTSTKYSPQRVGLTHTMEHEDVIQIVKK

SEQ ID NO: 839108 - protein, 306 aa, Homo sapiens
TLCSLASGRTLLCRRRQTGIAGAAATAVCAPTSAATMGILEKISEIEKEIARTQKNKATEYHLGLLKAKLAKYRAQLLEPSKSASSKGEGFDVMKSGDARVALIGFPSVGKSTFLSLMTSTASEAASYEFTTLTCIPGVIEYKGANIQLLDLPGIIEGAAQGKGRGRQVIAVARTADVIIMMLDATKGEVQRSAGWGMGQAHMSGEGQCVPELVLGGLWVFGSLTRESSGRTCHRLNPTPPSLWRLLLKACVQPAQRYLGTGGRGAWPGPASCSEAQVPHHCPEPARSPAPGTEALFIHILAEGYT

SEQ ID NO: 839109 - protein, 120 aa, Homo sapiens
EVIRSNSEKWRPQPLNSQGPLPDWPPPSLQLRHEAEPGLSAGDALGVLGPDLHLHQEERTEARLHRRHHSPERGLSGARVPPHPPVTRQPVQVRPGVDRALHDGNQWLVASKAQLTPSTA

SEQ ID NO: 839110 - protein, 126 aa, Homo sapiens
MMLDATKGEVQRSAGWGMGQAHMSGEGQCVPELVLGGLWVFGSLTRESSGRTCHRLNPTPPSLWRLLLKACVQPAQRYLGTGGRGAWPGPASCSEAQVPHHCPEPARSPAPGTEALFIHILAEGYT

SEQ ID NO: 839111 - protein, 370 aa, Homo sapiens
TLCSLASGRTLLCRRRQTGIAGAAATAVCAPTSAATMGILEKISEIEKEIARTQKNKATEYHLGLLKAKLAKYRAQLLEPSKSASSKGEGFDVMKSGDARVALIGFPSVGKSTFLSLMTSTASEAASYEFTTLTCIPGVIEYKGANIQLLDLLDATKGEVQRSLLEKELESVGIRLNKHKPNIYFKPKKGGGISFNSTVTLTQCSEKLVQLILHEYKIFNAEVLFREDCSPDEFIDVIVGNRVYMPCLYVYNKIDQISMEEVDRLARKPNSVVISCGMKLNLDYLLEMLWEYLALTCIYTKKRGQRPDFTDAIILRKGASVEHVCHRIHRSLASQFKYALVWGTSTKYSPQRVGLTHTMEHEDVIQIVKK

SEQ ID NO: 839112 - protein, 400 aa, Homo sapiens; identical to SEQ ID NO: 839107

SEQ ID NO: 839113 - protein, 197 aa, Homo sapiens
TLCSLASGRTLLCRRRQTGIAGAAATAVCAPTSAATMGILEKISEIEKEIARTQKNKATEYHLGLLKAKLAKYRAQLLEPSKSASSKGEGFDVMKSGDARVALIGFPSVGKLRHEAEPGLSAGDALGVLGPDLHLHQEERTEARLHRRHHSPERGLSGARVPPHPPVTRQPVQVRPGVGHQHQVQSAAGGPDPHHGA

SEQ ID NO: 839114 - protein, 125 aa, Homo sapiens
EVIRSNSEKWRPQPLNSQGPLPDWPPPSFSCGMKLNLDYLLEMLWEYLALTCIYTKKRGQRPDFTDAIILRKGASVEHVCHRIHRSLASQFKYALVWGTSTKYSPQRVGLTHTMEHEDVIQIVKK

SEQ ID NO: 839115 - protein, 37 aa, Homo sapiens
MISFSPSSTFLSLMTSTASEAASYEFTTLTCIPGVIE

SEQ ID NO: 839116 - protein, 73 aa, Homo sapiens
FSPSCPAERPDFTDAIILRKGASVEHVCHRIHRSLASQFKYALVWGTSTKYSPQRVGLTHTMEHEDVIQIVKK

SEQ ID NO: 839117 - protein, 206 aa, Homo sapiens
TLCSLASGRTLLCRRRQTGIAGAAATAVCAPTSAATMGILEKISEIEKEIARTQKNKATEYHLGLLKAKLAKYRAQLLEPSKSASSKGEGFDVMKSGDARVALIGFPSVGKSTFLSLMTSTASEAASYEFTTLTCIPGVIEYKGANIQLLDLPGIIEGAAQGKGRGRQVIAVARTADVIIMMLDATKGEVQRTRSLIFFVDIRLIT

SEQ ID NO: 839118 - protein, 296 aa, Homo sapiens
  misc_feature (2)..(2): Xaa can be any naturally occurring amino acid
  misc_feature (30)..(30): Xaa can be any naturally occurring amino acid
  misc_feature (58)..(58): Xaa can be any naturally occurring amino acid
MXILTNIVRRCDTMEGPWKYARWRQSIRIXPWGPDAVRTVDGNDATRRVNEDSAVTVXGLIGWLAAAPGLASVIIDARIATKGTRCRRSLLEKELESVGIRLNKHKPNIYFKPKKGGGISFNSTVTLTQCSEKLVQLILHEYKIFNAEVLFREDCSPDEFIDVIVGNRVYMPCLYVYNKIDQISMEEVDRLARKPNSVVISCGMKLNLDYLLEMLWEYLALTCIYTKKRGQRPDFTDAIILRKGASVEHVCHRIHRSLASQFKYALVWGTSTKYSPQRVGLTHTMEHEDVIQIVKK

SEQ ID NO: 839119 - protein, 451 aa, Homo sapiens
MPKNKKRNTPHRGSSAGGGGSGAAAATAATAGGQHRNVQPFSDEDASIETMSHCSGYSDPSSFAEDGPEVLDEEGTQEDLEYKLKGLIDLTLDKSAKTRQAALEGIKNALASKMLYEFILERRMTLTDSIERCLKKGKSDEQRAAAALASVLCIQLGPGIESEEILKTLGPILKKIICDGSASMQARQTCATCFGVCCFIATDDITELYSTLECLENIFTKSYLKEKDTTVICSTPNTVLHISSLLAWTLLLTICPINEVKKKLEMHFHKLPSLLSCDDVNMRIAAGESLALLFELARGIESDFFYEDMESLTQMLRALATDGNKHRAKVDKRKQRSVFRDVLRAVEERDFPTETIKFGPERMYIDCWVKKHTYDTFKEVLGSGMQYHLQSNEFLRNVFELGPPVMLDAATLKTMKISRFERHLYNSAAFKARTKARSKCRDKRADVGEFF

SEQ ID NO: 839120 - protein, 451 aa, Homo sapiens; identical to SEQ ID NO: 839119

SEQ ID NO: 839121 - protein, 451 aa, Homo sapiens; identical to SEQ ID NO: 839119

SEQ ID NO: 839122 - protein, 168 aa, Homo sapiens [sequence omitted]

SEQ ID NO: 839123 - protein, 197 aa, Homo sapiens
MPKNKKRNTPHRGSSAGGGGSGAAAATAATAGGQHRNVQPFSDEDASIETMSHCSGYSDPSSFAEDGPEVLDEEGTQEDLEYKLKGLIDLTLDKSAKTRQAALEGIKNALASKMLYEFILERRMTLTDSIERCLKKGKSDEQRAAAALASVLCIQLGPGIESEEILKTLGPILKKIICDGSASMQARQTVSIRYLHL

SEQ ID NO: 839124 - protein, 119 aa, Homo sapiens
  misc_feature (14)..(14): Xaa can be any naturally occurring amino acid
FIFYYSHIIKPNDXLMGTISNVTIKFGPERMYIDCWVKKHTYDTFKEVLGSGMQYHLQSNEFLRNVFELGPPVMLDAATLKTMKISRFERHLYNSAAFKARTKARSKCRDKRADVGEFF

SEQ ID NO: 839125 - protein, 451 aa, Homo sapiens; identical to SEQ ID NO: 839119

SEQ ID NO: 839126 - protein, 117 aa, Homo sapiens
  misc_feature (3)..(3): Xaa can be any naturally occurring amino acid
PKXNVTLSLPPLQERDFPTETIKFGPERMYIDCWVKKHTYDTFKEVLGSGMQYHLQSNEFLRNVFELGPPVMLDAATLKTMKISRFERHLYNSAAFKARTKARSKCRDKRADVGEFF

SEQ ID NO: 839127 - protein, 117 aa, Homo sapiens
  misc_feature (11)..(12): Xaa can be any naturally occurring amino acid
FKCHLSFARRXXRLRQYFHSTIKFGPERMYIDCWVKKHTYDTFKEVLGSGMQYHLQSNEFLRNVFELGPPVMLDAATLKTMKISRFERHLYNSAAFKARTKARSKCRDKRADVGEFF

SEQ ID NO: 839128 - protein, 798 aa, Homo sapiens
MAASLPGPGSRLFRTYGAADGRRQRRPGREAAQWFPPQDRRRFFNSSGSSDASIGDPSQSDDPDDPDDPDFPGSPVRRRRRCPGGRVPKDRPSLTVTPKRWKLRARPSLTVTPRRLGLRARPPQKCSTPCGPLRLPPFPSRDSGRLSPDLSVCGQPRDGDELGISASLFSSLASPCPGSPTPRDSVISIGTSACLVAASAVPSDLHLPEVSLDRASLPCSQEEATGGAKDTRMVHQTRASLRSVLFGLMNSGTPEDSEFRADGKNMRESCCKRKLVVGNGPEGPGLSSTGKRRATGQDSCQERGLQEAVRREHQEASVPKGRIVPRGTDRLERTRSSRKSKHQEATETSLLHSHRFKKGQKLGKDSFPTQDLTPLQNACFWTKTRASFSFHKKKIVTDVSEVCSIYTTATSLSGSLLSECSNRPVMNRTSGAPSSWHSSSMYLLSPLNTLSISNKKASDAEKVYGECSQKGPVPFSHCLPTEKLQRCEKIGEGVFGEVFQTIADHTPVAIKIIAIEGPDLVNGSHQKTFEEILPEIIISKELSLLSGEVCNRTEGFIGLNSVHCVQGSYPPLLLKAWDHYNSTKGSANDRPDFFKDDQLFIVLEFEFGGIDLEQMRTKLSSLATAKSILHQLTASLAVAEASLRFEHRDLHWGNVLLKKTSLKKLHYTLNGKSSTIPSCGLQVSIIDYTLSRLERDGIVVFCDVSMDEDLFTGDGDYQFDIYRLMKKENNNRWGEYHPYSNVLWLHYLTDKMLKQMTFKTKCNTPAMKQIKRKIQEFHRTMLNFSSATDLLCQHSLFK

SEQ ID NO: 839129 - protein, 798 aa, Homo sapiens; identical to SEQ ID NO: 839128

SEQ ID NO: 839130 - protein, 79 aa, Homo sapiens
CHAGLEKSGYPGTPRSCKNKNLPSSPLRLPIGQTPSELLISERGQLWLFLLPPPDGPSSKQPPTGPPGQKWQPLPGDLS

SEQ ID NO: 839131 - protein, 263 aa, Homo sapiens
MSQQRPARRVTQSPPGPDGGDGSPSVPRPHQRGGPAEALKVKRPRFDVSLVYLTRKFMDLVRSAPGGILDLNKVATKLGVRKRRVYDITNVLDGIDLVEKKSKNHIRWIGSDLSNFGAVPQQKKLQEELSDLSAMEDALDELIKDCAQQLFELTDDKENERLAYVTYQDIHSIQAFHEQIVIAVKAPAETRLDVPAPREDSITVHIRSTNGPIDVYLCEVEQGQTSNKRSEGVGTSSSESTHPEGPEEEENPQQSEELLEVSN

SEQ ID NO: 839132 - protein, 263 aa, Homo sapiens; identical to SEQ ID NO: 839131

SEQ ID NO: 839133 - protein, 206 aa, Homo sapiens
MDLVRSAPGGILDLNKVATKLGVRKRRVYDITNVLDGIDLVEKKSKNHIRWIGSDLSNFGAVPQQKKLQEELSDLSAMEDALDELIKDCAQQLFELTDDKENERLAYVTYQDIHSIQAFHEQIVIAVKAPAETRLDVPAPREDSITVHIRSTNGPIDVYLCEVEQGQTSNKRSEGVGTSSSESTHPEGPEEEENPQQSEELLEVSN

SEQ ID NO: 839134 - protein, 75 aa, Homo sapiens
LCAGAHPTASSRNSREQRWDVTRFLQDDNGASKQATSPGAAFVARNRVPPAVQGRATLQPSGAPMGRGASRAHAD

SEQ ID NO: 839135 - protein, 1165 aa, Homo sapiens
  misc_feature (15)..(15): Xaa can be any naturally occurring amino acid
KRRGRQPISTTQPLXTAAPYISWKEELHRSREVRCMLQCPSVEVSFLPLIVNTVALPDELSYICTHGEDWDVAYIIHLYPSLTLRNLLPYSLRYLLEGTAETHELAEGSTADVLHSRISGEIMELVLVKYQGKNWNGHFRIRDTLPEFFPVCFSSDSTEVTTVDLSVHVRRIGSRMVLSVFSPYWLINKTTRVLQYRSEDIHVKHPADFRDIILFSFKKKNIFTKNKVQLKISTSAWSSSFSLDTVGSYGCVKCPANNMEYLVGVSIKMSSFNLSRIVTLTPFCTIANKSSLELEVGEIASDGSMPTNKWNYIASSECLPFWPENLSGKLCVRVVGCEGSSKPFFYNRQDNGTLLSLEDLNGGILVDVNTAEHSTVITFSDYHEGSAPALIMNHTPWDILTYKQSGSPEEMVLLPRQARLFAWADPTGTRKLTWTYAANVGEHDLLKDGCGQFPYDANIQIHWVSFLDGRQRVLLFTDDVALVSKALQAEEMEQADYEITLSLHSLGLSLVNNESKQEVSYIGITSSGVVWEVKPKQKWKPFSQKQIILLEQSYQKHQISRDHGWIKLDNNFEVNFDKDPMEMRLPIRSPIKRDFLSGIQIEFKQSSHQRSLRARLYWLQVDNQLPGAMFPVVFHPVAPPKSIALDSEPKPFIDVSVITRFNEYSKVLQFKYFMVLIQEMALKIDQGFLGAIIALFTPTTDPEAERRRTKLIQQDIDALNAELMETSMTDMSILSFFEHFHISPVKLHLSLSLGSGGEESDKEKQEMFAVHSVNLLLKSIGATLTDVDDLIFKLAYYEIRYQFYKRDQLIWSVVRHYSEQFLKQMYVLVLGLDVLGNPFGLIRGLSEGVEALFYEPFQGAVQGPEEFAEGLVIGVRSLFGHTVGGAAGVVSRITGSVGKGLAAITMDKEYQQKRREELSRQPRDFGDSLARGGKGFLRGVVGGVTGIITKPVEGAKKEGAAGFFKGIGKGLVGAVARPTGGIVDMASSTFQGIQRAAESTEEVSSLRPPRLIHEDGIIRPYDRQESEGSDLLENHIKKLEGETYRYHCAIPGSKKTILMVTNRRVLCIKEVEILGLMCVDWQCPFEDFVFPPSVSENVLKISVKEQGLFHKKDSANQGCVRKVYLKDTATAERACNAIEDAQSTRQQQKLMKQSSVRLLRPQLPS

SEQ ID NO: 839136 - protein, 203 aa, Homo sapiens
DVLTTEDPQCPQPLEGAWPVTLGDAQALKPLKLAAESTEEVSSLRPPRLIHEDGIIRPYDRQESEGSDLLENHIKKLEGETYRYHCAIPGSKKTILMVTNRRVLCIKEVEILGLMCVDWQCPFEDFVFPPSVSENVLKISVKEQGLFHKKDSANQGCVRKVYLKDTATAERACNAIEDAQSTRQQQKLMKQSSVRLLRPQLPS

SEQ ID NO: 839137 - protein, 1165 aa, Homo sapiens; identical to SEQ ID NO: 839135
  misc_feature (15)..(15): Xaa can be any naturally occurring amino acid

SEQ ID NO: 839138 - protein, 1165 aa, Homo sapiens; identical to SEQ ID NO: 839135
  misc_feature (15)..(15): Xaa can be any naturally occurring amino acid

SEQ ID NO: 839139 - protein, 1040 aa, Homo sapiens
  misc_feature (15)..(15): Xaa can be any naturally occurring amino acid
KRRGRQPISTTQPLXTAAPYISWKEELHRSREVRCMLQCPSVEVSFLPLIVNTVALPDELSYICTHGEDWDVAYIIHLYPSLTLRNLLPYSLRYLLEGTAETHELAEGSTADVLHSRISGEIMELVLVKYQGKNWNGHFRIRDTLPEFFPVCFSSDSTEVTTVDLSVHVRRIGSRMVLSVFSPYWLINKTTRVLQYRSEDIHVKHPADFRDIILFSFKKKNIFTKNKVQLKISTSAWSSSFSLDTVGSYGCVKCPANNMEYLVGVSIKMSSFNLSRIVTLTPFCTIANKSSLELEVGEIASDGSMPTNKWNYIASSECLPFWPENLSGKLCVRVVGCEGSSKPFFYNRQDNGTLLSLEDLNGGILVDVNTAEHSTVITFSDYHEGSAPALIMNHTPWDILTYKQSGSPEEMVLLPRQARLFAWADPTGTRKLTWTYAANVGEHDLLKDGCGQFPYDANIQIHWVSFLDGRQRVLLFTDDVALVSKALQAEEMEQADYEITLSLHSLGLSLVNNESKQEVSYIGITSSGVVWEVKPKQKWKPFSQKQIILLEQSYQKHQISRDHGWIKLDNNFEVNFDKDPMEMRLPIRSPIKRDFLSGIQIEFKQSSHQRSLRARLYWLQVDNQLPGAMFPVVFHPVAPPKSIALDSEPKPFIDVSVITRFNEYSKVLQFKYFMVLIQEMALKIDQGFLGAIIALFTPTTDPEAERRRTKLIQQDIDALNAELMETSMTDMSILSFFEHFHISPVKLHLSLSLGSGGEESDKEKQEMFAVHSVNLLLKSIGATLTDVDDLIFKLAYYEIRYQFYKRDQLIWSVVRHYSEQFLKQMYVLVLGLDVLGNPFGLIRGLSEGVEALFYEPFQGAVQGPEEFAEGLVIGVRSLFGHTVGGAAGVVSRITGSVGKGLAAITMDKEYQQKRREELSRQPRDFGDSLARGGKGFLRGVVGGVTGIITKPVEGAKKEGAAGFFKGIGKGLVGAVARPTGGIVDMASSTFQGIQRAAESTEEVSSLRPPRLIHEDGIIRPYDRQESEGSDLLEQELEIQE

SEQ ID NO: 839140 - protein, 97 aa, Homo sapiens
QIHWVSFLDGRQRVLLFTDDVALVSKALQAEEMEQADYEITLSLHSLGLSLVNNESKQEVSYIGITRYARRKIRHPKPLKGIKFIIADLKKVKRYLV

SEQ ID NO: 839141 - protein, 476 aa, Homo sapiens
  misc_feature (15)..(15): Xaa can be any naturally occurring amino acid
KRRGRQPISTTQPLXTAAPYISWKEELHRSREVRCMLQCPSVEVSFLPLIVNTVALPDELSYICTHGEDWDVAYIIHLYPSLTLRNLLPYSLRYLLEGTAETHELAEGSTADVLHSRISGEIMELVLVKYQGKNWNGHFRIRDTLPEFFPVCFSSDSTEVTTVDLSVHVRRIGSRMVLSVFSPYWLINKTTRVLQYRSEDIHVKHPADFRDIILFSFKKKNIFTKNKVQLKISTSAWSSSFSLDTVGSYGCVKCPANNMEYLVGVSIKMSSFNLSRIVTLTPFCTIANKSSLELEVGEIASDGSMPTNKWNYIASSECLPFWPENLSGKLCVRVVGCEGSSKPFFYNRQDNGTLLSLEDLNGGILVDVNTAEHSTVITFSDYHEGSAPALIMNHTPWDILTYKQSGSPEEMVLLPRQARLFAWADPTGTRKLTWTYAANVGEHDLLKVSFDVNECYMSYLTVKEVEKLSSLTPCPN

SEQ ID NO: 839142 - protein, 1165 aa, Homo sapiens; identical to SEQ ID NO: 839135
  misc_feature (15)..(15): Xaa can be any naturally occurring amino acid

SEQ ID NO: 839143 - protein, 327 aa, Homo sapiens
  misc_feature (15)..(15): Xaa can be any naturally occurring amino acid
KRRGRQPISTTQPLXTAAPYISWKEELHRSREVRCMLQCPSVEVSFLPLIVNTVALPDELSYICTHGEDWDVAYIIHLYPSLTLRNLLPYSLRYLLEGTAETHELAEGSTADVLHSRISGEIMELVLVKYQGKNWNGHFRIRDTLPEFFPVCFSSDSTEVTTVDLSVHVRRIGSRMVLSVFSPYWLINKTTRVLQYRSEDIHVKHPADFRDIILFSFKKKNIFTKNKVQLKISTSAWSSSFSLDTVGSYGCVKCPANNMEYLVGVSIKMSSFNLSRIVTLTPFCTIANKSSLELEVGEIASDGSMPTNKWNYIASSEVAFFFVTTDS

SEQ ID NO: 839144 - protein, 819 aa, Homo sapiens
GGGAGGAAVPSQARAGRVPIACCAPGRAAPLGLLAMDADDSRAPKGSLRKFLEHLSGAGKAIGVLTSGGDAQGMNAAVRAVVRMGIYVGAKVYFIYEGYQGMVDGGSNIAEADWESVSSILQVGGTIIGSARCQAFRTREGRLKAACNLLQRGITNLCVIGGDGSLTGANLFRKEWSGLLEELARNGQIDKEAVQKYAYLNVVGMVGSIDNDFCGTDMTIGTDSALHRIIEVVDAIMTTAQSHQRTFVLEVMGRHCGYLALVSALACGADWVFLPESPPEEGWEEQMCVKLSENRARKKRLNIIIVAEGAIDTQNKPITSEKIKELVVTQLGYDTRVTILGHVQRGGTPSAFDRILASRMGVEAVIALLEATPDTPACVVSLNGNHAVRLPLMECVQMTQDVQKAMDERRFQDAVRLRGRSFAGNLNTYKRLAIKLPDDQIPKTNCNVAVINVGAPAAGMNAAVRSAVRVGIADGHRMLAIYDGFDGFAKGQIKEIGWTDVGGWTGQGGSILGTKRVLPGKYLEEIATQMRTHSINALLIIGGFEAYLGLLELSAAREKHEEFCVPMVMVPATVSNNVPGSDFSIGADTALNTITDTCDRIKQSASGTKRRVFIIETMGGYCGYLANMGGLAAGADAAYIFEEPFDIRDLQSNVEHLTEKMKTTIQRGLVLRNESCSENYTTDFIYQLYSEEGKGVFDCRKNVLGHMQQGGAPSPFDRNFGTKISARAMEWITAKLKEARGRGKKFTTDDSICVLGISKRNVIFQPVAELKKQTDFEHRIPKEQWWLKLRPLMKILAKYKASYDVSDSGQLEHVQPWSV

SEQ ID NO: 839145 - protein, 220 aa, Homo sapiens
MGRHCGYLALVSALACGADWVFLPESPPEEGWEEQMCVKLSENRARKKRLNIIIVAEGAIDTQNKPITSEKIKELVVTQLGYDTRVTILGHVQRGGTPSAFDRILASRMGVEAVIALLEATPDTPACVVSLNGNHAVRLPLMECVQMTQDVQKAMDERRFQDAVRLRGRSFAGNLNTYKRLAIKLPDDQIPKTIGNVAVINVGVRLSNQAYRYLDLEGGP

SEQ ID NO: 839146 - protein, 202 aa, Homo sapiens
MGVEAVIALLEATPDTPACVVSLNGNHAVRLPLMECVQMTQDVQKAMDERRFQDAVRLRGRSFAGNLNTYKRLAIKLPDDQIPKTNCNVAVINVGAPAAGMNAAVRSAVRVGIADGHRMLAIYDGFDGFAKGQIKEIGWTDVGGCPAGVHLGKRGPGRLGGIVKVCADTRAGTGERPGPCCTEKSSPVSMATVSGNAKGKTK

SEQ ID NO: 839147 - protein, 239 aa, Homo sapiens
MTQRKKFCPTMDPIQPTRSSKVHLGYQGMVDGGSNIAEADWESVSSILQVGGTIIGSARCQAFRTREGRLKAACNLLQRGITNLCVIGGDGSLTGANLFRKEWSGLLEELARNGQIDKEAVQKYAYLNVVGMVGSIDNDFCGTDMTIGTDSALHRIIEVVDAIMTTAQSTEDLRSGGDGTNTVGYPGPGEGRGRGGAGCLPRIFTQKEGGKTTGVNPEEPARKTGNKKGARARTNSHAE

SEQ ID NO: 839148 - protein, 130 aa, Homo sapiens
VDYYYYIRGRVDVQMTQDVQKAMDERRFQDAVRLRGRSFAGNLNTYKRLAIKLPDDQIPKTNCNVAVINVGAPAAGMNAAVRSAVRVGIADGHRMLAIYDGFDGFAKGQIKEIGWTDVGGRDCFSLSTRP

SEQ ID NO: 839149 - protein, 165 aa, Homo sapiens
MKTTIQRGLVLRNESCSENYTTDFIYQLYSEEGKGVFDCRKNVLGHMQQVGYVTTHLAPVIPEQVNLAGEGFLNAQLEKYVVQVIVPRDSKLWQVELTYLSELQRVSPPLQGLWEQHGFHFLHLVLIREDEECPGVACVHSAPPRCRTAPRPGRRYNQLRYSGSS

SEQ ID NO: 839150 - protein, 819 aa, Homo sapiens; identical to SEQ ID NO: 839144

SEQ ID NO: 839151 - protein, 819 aa, Homo sapiens; identical to SEQ ID NO: 839144

SEQ ID NO: 839152 - protein, 816 aa, Homo sapiens
GGGAGGAAVPSQARAGRVPIACCAPGRAAPLGLLAMDADDSRAPKGSLRKFLEHLSGAGKAIGVLTSGGDAQGMNAAVRAVVRMGIYVGAKVYFIYEGYQGMVDGGSNIAEADWESVSSILQVGGTIIGSARCQAFRTREGRLKAACNLLQRGITNLCVIGGDGSLTGANLFRKEWSGLLEELARNGQIDKEAVQKYAYLNVVGMVGSIDNDFCGTDMTIGTDSALHRIIEVVDAIMTTAQSHQRTFVLEVMGRHCGYLALVSALACGADWVFLPESPPEEGWEEQMCVKLSENRARKKRLNIIIVAEGAIDTQNKPITSEKIKELVVTQLGYDTRVTILGHVQRGGTPSAFDRILASRMGVEAVIALLEATPDTPACVVSLNGNHAVRLPLMECVQMTQDVQKAMDERRFQDAVRLRGRSFAGNLNTYKRLAIKLPDDQIPKTNCNVAVINVGAPAAGMNAAVRSAVRVGIADGHRMLAIYDGFDGFAKGQIKEIGWTDVGGWTGQGGSILGTKRVLPGKYLEEIATQMRTHSINALLIIGGFEAYKSACDMAEARGRHQELCIPLCVVPATISNNVPGTEISLGSDTGLKLTCDRIKQSASGTKRRVFIIETMGGYCGYLANMGGLAAGADAAYIFEEPFDIRDLQSNVEHLTEKMKTTIQRGLVLRNESCSENYTTDFIYQLYSEEGKGVFDCRKNVLGHMQQGGAPSPFDRNFGTKISARAMEWITAKLKEARGRGKKFTTDDSICVLGISKRNVIFQPVAELKKQTDFEHRIPKEQWWLKLRPLMKILAKYKASYDVSDSGQLEHVQPWSV

SEQ ID NO: 839153 - protein, 746 aa, Homo sapiens
MNAAVRAVVRMGIYVGAKVYFIYEGYQGMVDGGSNIAEADWESVSSILQVGGTIIGSARCQAFRTREGRLKAACNLLQRGITNLCVIGGDGSLTGANLFRKEWSGLLEELARNGQIDKEAVQKYAYLNVVGMVGSIDNDFCGTDMTIGTDSALHRIIEVVDAIMTTAQSHQRTFVLEVMGRHCGYLALVSALACGADWVFLPESPPEEGWEEQMCVKLSENRARKKRLNIIIVAEGAIDTQNKPITSEKIKELVVTQLGYDTRVTILGHVQRGGTPSAFDRILASRMGVEAVIALLEATPDTPACVVSLNGNHAVRLPLMECVQMTQDVQKAMDERRFQDAVRLRGRSFAGNLNTYKRLAIKLPDDQIPKTNCNVAVINVGAPAAGMNAAVRSAVRVGIADGHRMLAIYDGFDGFAKGQIKEIGWTDVGGWTGQGGSILGTKRVLPGKYLEEIATQMRTHSINALLIIGGFEAYLGLLELSAAREKHEEFCVPMVMVPATVSNNVPGSDFSIGADTALNTITDTCDRIKQSASGTKRRVFIIETMGGYCGYLANMGGLAAGADAAYIFEEPFDIRDLQSNVEHLTEKMKTTIQRGLVLRNESCSENYTTDFIYQLYSEEGKGVFDCRKNVLGHMQQGGAPSPFDRNFGTKISARAMEWITAKLKEARGRGKKFTTDDSICVLGISKRNVIFQPVAELKKQTDFEHRIPKEQWWLKLRPLMKILAKYKASYDVSDSGQLEHVQPWSV

SEQ ID NO: 839154 - protein, 726 aa, Homo sapiens
MGWDGYQGMVDGGSNIAEADWESVSSILQVGGTIIGSARCQAFRTREGRLKAACNLLQRGITNLCVIGGDGSLTGANLFRKEWSGLLEELARNGQIDKEAVQKYAYLNVVGMVGSIDNDFCGTDMTIGTDSALHRIIEVVDAIMTTAQSHQRTFVLEVMGRHCGYLALVSALACGADWVFLPESPPEEGWEEQMCVKLSENRARKKRLNIIIVAEGAIDTQNKPITSEKIKELVVTQLGYDTRVTILGHVQRGGTPSAFDRILASRMGVEAVIALLEATPDTPACVVSLNGNHAVRLPLMECVQMTQDVQKAMDERRFQDAVRLRGRSFAGNLNTYKRLAIKLPDDQIPKTNCNVAVINVGAPAAGMNAAVRSAVRVGIADGHRMLAIYDGFDGFAKGQIKEIGWTDVGGWTGQGGSILGTKRVLPGKYLEEIATQMRTHSINALLIIGGFEAYLGLLELSAAREKHEEFCVPMVMVPATVSNNVPGSDFSIGADTALNTITDTCDRIKQSASGTKRRVFIIETMGGYCGYLANMGGLAAGADAAYIFEEPFDIRDLQSNVEHLTEKMKTTIQRGLVLRNESCSENYTTDFIYQLYSEEGKGVFDCRKNVLGHMQQGGAPSPFDRNFGTKISARAMEWITAKLKEARGRGKKFTTDDSICVLGISKRNVIFQPVAELKKQTDFEHRIPKEQWWLKLRPLMKILAKYKASYDVSDSGQLEHVQPWSV

SEQ ID NO: 839155 - protein, 819 aa, Homo sapiens; identical to SEQ ID NO: 839144

SEQ ID NO: 839156 - protein, 785 aa, Homo sapiens
GGGAGGAAVPSQARAGRVPIACCAPGRAAPLGLLAMDADDSRAPKGSLRKFLEHLSGAGKAIGVLTSGGDAQGMNAAVRAVVRMGIYVGAKVYFIYEGYQGMVDGGSNIAEADWESVSSILQVGGTIIGSARCQAFRTREGRLKAACNLLQRGITNLCVIGGDGSLTGANLFRKEWSGLLEELARNGQIDKEAVQKYAYLNVVGMVGSIDNDFCGTDMTIGTDSALHRIIEVVDAIMTTAQSHQRTFVLEVMGRHCGYLALVSALACGADWVFLPESPPEEGWEEQMCVKLSENRARKKRLNIIIVAEGAIDTQNKPITSEKIKELVVTQLGYDTRVTILGHVQRGGTPSAFDRILASRMGVEAVIALLEATPDTPACVVSLNGNHAVRLPLMECVQMTQDVQKAMDERRFQDAVRLRGRSFAGNLNTYKRLAIKLPDDQIPKTNCNVAVINVGAPAAGMNAAVRSAVRVGIADGHRMLAIYDGFDGFAKGQIKEIGWTDVGGWTGQGGSILGTKRVLPGKYLEEIATQMRTHSINALLIIGGFEAYLGLLELSAAREKHEEFCVPMVMVPATVSNNVPGSDFSIGADTALNTITDTCDRIKQSASGTKRRVFIIETMGGYCGYLANMGGLAAGADAAYIFEEPFDIRDLQSNVEHLTEKMKTTIQRGLVLRNESCSENYTTDFIYQLYSEEGKGVFDCRKNVLGHMQQGGAPSPFDRNFGTKISARAMEWITAKLKEARGRGKKFTTDDSICVLGISKRNVIFQPVAELKKQTDFETVSMQPPR

SEQ ID NO: 839157 - protein, 777 aa, Homo sapiens
GGGAGGAAVPSQARAGRVPIACCAPGRAAPLGLLAMDADDSRAPKGSLRKFLEHLSGAGKAIGVLTSGGDAQGMNAAVRAVVRMGIYVGAKVYFIYEGYQGMVDGGSNIAEADWESVSSILQVGGTIIGSARCQAFRTREGRLKAACNLLQRGITNLCVIGGDGSLTGANLFRKEWSGLLEELARNGQIDKEAVQKYAYLNVVGMVGSIDNDFCGTDMTIGTDSALHRIIEVVDAIMTTAQSHQRTFVLEVMGRHCGYLALVSALACGADWVFLPESPPEEGWEEQMCVKLSENRARKKRLNIIIVAEGAIDTQNKPITSEKIKELVVTQLGYDTRVTILGHVQRGGTPSAFDRILASRMGVEAVIALLEATPDTPACVVSLNGNHAVRLPLMECVQMTQDVQKAMDERRFQDAVRLRGRSFAGNLNTYKRLAIKLPDDQIPKTNCNVAVINVGAPAAGMNAAVRSAVRVGIADGHRMLAIYDGFDGFAKGQIKEIGWTDVGGWTGQGGSILGTKRVLPGKYLEEIATQMRTHSINALLIIGGFEAYLGLLELSAAREKHEEFCVPMVMVPATVSNNVPGSDFSIGADTALNTITDTCDRIKQSASGTKRRVFIIETMGGYCGYLANMGGLAAGADAAYIFEEPFDIRDLQSNVEHLTEKMKTTIQRGLVLRNESCSENYTTDFIYQLYSEEGKGVFDCRKNVLGHMQQGGAPSPFDRNFGTKISARAMEWITAKLKEARGRGKKFTTDDSICVLGISKRNVIFQPVAELKKQTDFE

SEQ ID NO: 839158 - protein, 581 aa, Homo sapiens
MLPWKVLKGPASRFIPGVRYLALVSALACGADWVFLPESPPEEGWEEQMCVKLSENRARKKRLNIIIVAEGAIDTQNKPITSEKIKELVVTQLGYDTRVTILGHVQRGGTPSAFDRILASRMGVEAVIALLEATPDTPACVVSLNGNHAVRLPLMECVQMTQDVQKAMDERRFQDAVRLRGRSFAGNLNTYKRLAIKLPDDQIPKTNCNVAVINVGAPAAGMNAAVRSAVRVGIADGHRMLAIYDGFDGFAKGQIKEIGWTDVGGWTGQGGSILGTKRVLPGKYLEEIATQMRTHSINALLIIGGFEAYLGLLELSAAREKHEEFCVPMVMVPATVSNNVPGSDFSIGADTALNTITDTCDRIKQSASGTKRRVFIIETMGGYCGYLANMGGLAAGADAAYIFEEPFDIRDLQSNVEHLTEKMKTTIQRGLVLRNESCSENYTTDFIYQLYSEEGKGVFDCRKNVLGHMQQGGAPSPFDRNFGTKISARAMEWITAKLKEARGRGKKFTTDDSICVLGISKRNVIFQPVAELKKQTDFEHRIPKEQWWLKLRPLMKILAKYKASYDVSDSGQLEHVQPWSV

SEQ ID NO: 839159 - protein, 549 aa, Homo sapiens
MMYSRHPVLFRHGAELMCIYTARNRARKKRLNIIIVAEGAIDTQNKPITSEKIKELVVTQLGYDTRVTILGHVQRGGTPSAFDRILASRMGVEAVIALLEATPDTPACVVSLNGNHAVRLPLMECVQMTQDVQKAMDERRFQDAVRLRGRSFAGNLNTYKRLAIKLPDDQIPKTNCNVAVINVGAPAAGMNAAVRSAVRVGIADGHRMLAIYDGFDGFAKGQIKEIGWTDVGGWTGQGGSILGTKRVLPGKYLEEIATQMRTHSINALLIIGGFEAYLGLLELSAAREKHEEFCVPMVMVPATVSNNVPGSDFSIGADTALNTITDTCDRIKQSASGTKRRVFIIETMGGYCGYLANMGGLAAGADAAYIFEEPFDIRDLQSNVEHLTEKMKTTIQRGLVLRNESCSENYTTDFIYQLYSEEGKGVFDCRKNVLGHMQQGGAPSPFDRNFGTKISARAMEWITAKLKEARGRGKKFTTDDSICVLGISKRNVIFQPVAELKKQTDFEHRIPKEQWWLKLRPLMKILAKYKASYDVSDSGQLEHVQPWSV

SEQ ID NO: 839160 - protein, 530 aa, Homo sapiens
LVRGRVLMAEGLNIIIVAEGAIDTQNKPITSEKIKELVVTQLGYDTRVTILGHVQRGGTPSAFDRILASRMGVEAVIALLEATPDTPACVVSLNGNHAVRLPLMECVQMTQDVQKAMDERRFQDAVRLRGRSFAGNLNTYKRLAIKLPDDQIPKTNCNVAVINVGAPAAGMNAAVRSAVRVGIADGHRMLAIYDGFDGFAKGQIKEIGWTDVGGWTGQGGSILGTKRVLPGKYLEEIATQMRTHSINALLIIGGFEAYLGLLELSAAREKHEEFCVPMVMVPATVSNNVPGSDFSIGADTALNTITDTCDRIKQSASGTKRRVFIIETMGGYCGYLANMGGLAAGADAAYIFEEPFDIRDLQSNVEHLTEKMKTTIQRGLVLRNESCSENYTTDFIYQLYSEEGKGVFDCRKNVLGHMQQGGAPSPFDRNFGTKISARAMEWITAKLKEARGRGKKFTTDDSICVLGISKRNVIFQPVAELKKQTDFEHRIPKEQWWLKLRPLMKILAKYKASYDVSDSGQLEHVQPWSV

SEQ ID NO: 839161 - protein, 554 aa, Homo sapiens
GGGAGGAAVPSQARAGRVPIACCAPGRAAPLGLLAMDADDSRAPKGSLRKFLEHLSGAGKAIGVLTSGGDAQGMNAAVRAVVRMGIYVGAKVYFIYEGYQGMVDGGSNIAEADWESVSSILQVGGTIIGSARCQAFRTREGRLKAACNLLQRGITNLCVIGGDGSLTGANLFRKEWSGLLEELARNGQIDKEAVQKYAYLNVVGMVGSIDNDFCGTDMTIGTDSALHRIIEVVDAIMTTAQSHQRTFVLEVMGRHCGYLALVSALACGADWVFLPESPPEEGWEEQMCVKLSENRARKKRLNIIIVAEGAIDTQNKPITSEKIKELVVTQLGYDTRVTILGHVQRGGTPSAFDRILASRMGVEAVIALLEATPDTPACVVSLNGNHAVRLPLMECVQMTQDVQKAMDERRFQDAVRLRGRSFAGNLNTYKRLAIKLPDDQIPKTNCNVAVINVGAPAAGMNAAVRSAVRVGIADGHRMLAIYDGFDGFAKGQIKEIGWTDVGGWTGQGGSILGTKRVLPGKYLEEIATQMRTHSINALLIIGGFEAATVDCLFL

SEQ ID NO: 839162 - protein, 537 aa, Homo sapiens
GGGAGGAAVPSQARAGRVPIACCAPGRAAPLGLLAMDADDSRAPKGSLRKFLEHLSGAGKAIGVLTSGGDAQGMNAAVRAVVRMGIYVGAKVYFIYEGYQGMVDGGSNIAEADWESVSSILQVGGTIIGSARCQAFRTREGRLKAACNLLQRGITNLCVIGGDGSLTGANLFRKEWSGLLEELARNGQIDKEAVQKYAYLNVVGMVGSIDNDFCGTDMTIGTDSALHRIIEVVDAIMTTAQSHQRTFVLEVMGRHCGYLALVSALACGADWVFLPESPPEEGWEEQMCVKLSENRARKKRLNIIIVAEGAIDTQNKPITSEKIKELVVTQLGYDTRVTILGHVQRGGTPSAFDRILASRMGVEAVIALLEATPDTPACVVSLNGNHAVRLPLMECVQMTQDVQKAMDERRFQDAVRLRGRSFAGNLNTYKRLAIKLPDDQIPKTNCNVAVINVGAPAAGMNAAVRSAVRVGIADGHRMLAIYDGFDGFAKGQIKEIGWTDVGGWTGQGGSILGTKRVPPGEYIGRDRPFDRVPARFV

SEQ ID NO: 839163 - protein, 317 aa, Homo sapiens
MGPGRRERQMARPPKRDIEVTSRWLPWWGCGGPRSHPLRGHIPAAAHPSPLRDAGTACLGAVGGPCCTHSWGSSGMVGAPRAWAGVTDRFSVDQTCDRIKQSASGTKRRVFIIETMGGYCGYLANMGGLAAGADAAYIFEEPFDIRDLQSNVEHLTEKMKTTIQRGLVLRNESCSENYTTDFIYQLYSEEGKGVFDCRKNVLGHMQQGGAPSPFDRNFGTKISARAMEWITAKLKEARGRGKKFTTDDSICVLGISKRNVIFQPVAELKKQTDFEHRIPKEQWWLKLRPLMKILAKYKASYDVSDSGQLEHVQPWSV

SEQ ID NO: 839164 - protein, 225 aa, Homo sapiens
MLTCDRIKQSASGTKRRVFIIETMGGYCGYLANMGGLAAGADAAYIFEEPFDIRDLQSNVEHLTEKMKTTIQRGLVLRNESCSENYTTDFIYQLYSEEGKGVFDCRKNVLGHMQQGGAPSPFDRNFGTKISARAMEWITAKLKEARGRGKKFTTDDSICVLGISKRNVIFQPVAELKKQTDFEHRIPKEQWWLKLRPLMKILAKYKASYDVSDSGQLEHVQPWSV

SEQ ID NO: 839165 - protein, 113 aa, Homo sapiens
MQQGGAPSPFDRNFGTKISARAMEWITAKLKEARGRGKKFTTDDSICVLGISKRNVIFQPVAELKKQTDFEHRIPKEQWWLKLRPLMKILAKYKASYDVSDSGQLEHVQPWSV

SEQ ID NO: 839166 - protein, 269 aa, Homo sapiens
GGGAGGAAVPSQARAGRVPIACCAPGRAAPLGLLAMDADDSRAPKGSLRKFLEHLSGAGKAIGVLTSGGDAQGMNAAVRAVVRMGIYVGAKVYFIYEGYQGMVDGGSNIAEADWESVSSILQVGGTIIGSARCQAFRTREGRLKAACNLLQRGITNLCVIGGDGSLTGANLFRKEWSGLLEELARNGQIDKEAVQKYAYLNVVGMVGSIDNDFCGTDMTIGTDSALHRIIEVVDAIMTTAQSHQRTFVLEVMGRHCGPAAWEWRQSSPC

SEQ ID NO: 839167 - protein, 336 aa, Homo sapiens
MNAAVRAVVRMGIYVGAKVYFIYEGYQGMVDGGSNIAEADWESVSSILQVGGTIIGSARCQAFRTREGRLKAACNLLQRGITNLCVIGGDGSLTGANLFRKEWSGLLEELARNGQIDKEAVQKYAYLNVVGMVGSIDNDFCGTDMTIGTDSALHRIIEVVDAIMTTAQSHQRTFVLEVMGRHCGYLALVSALACGADWVFLPESPPEEGWEEQMCVKLSENRARKKRLNIIIVAEGAIDTQNKPITSEKIKELSVLQVGYDTRVTISGRAMGALCSQVGRAGWGGLLLRRRTRGLSIGHGARWGGVRAGGGEGPEGARTGGGPQLGRGGVDWGGRG

SEQ ID NO: 839168 - protein, 135 aa, Homo sapiens
GGGAGGAAVPSQARAGRVPIACCAPGRAAPLGLLAMDADDSRAPKGSLRKFLEHLSGAGKAIGVLTSGGDAQGMNAAVRAVVRMGIYVGAKVYFIYEGYQGMVDGGSNIAEADWESVSSILQVVGTGLRPQGSLS

SEQ ID NO: 839169 - protein, 111 aa, Homo sapiens
WSGSLHSSGRDFGTKISARAMEWITAKLKEARGRGKKFTTDDSICVLGISKRNVIFQPVAELKKQTDFEHRIPKEQWWLKLRPLMKILAKYKASYDVSDSGQLEHVQPWSV

SEQ ID NO: 839170 - protein, 87 aa, Homo sapiens
FLIPERISQWNPRAATQVLARLCGFVCGLPRAETAASARRAEMWRGAECGPPVIQLHAPFPACTWAPPLHDEGGHLVWSLQPCAPSH

SEQ ID NO: 839171 - protein, 81 aa, Homo sapiens
GGGAGGAAVPSQARAGRVPIACCAPGRAAPLGLLAMDADDSRAPKGSLRKFLEHLSGAGKAIGVLTSGGDAQGLGSQRKKT

SEQ ID NO: 839172 - protein, 103 aa, Homo sapiens
TCFRGRDPAVAVDSSCRLCPIEKVSGKEPSTGPGSVSVSWHRQAEGVQRATGERRGGSSPLPRRSLEGYCIAFALVENGPFLKPRSLQASWLTRLSKPLFSAF

SEQ ID NO: 839173 - protein, 819 aa, Homo sapiens; identical to SEQ ID NO: 839144

SEQ ID NO: 839174 - protein, 819 aa, Homo sapiens; identical to SEQ ID NO: 839144

SEQ ID NO: 839175 - protein, 768 aa, Homo sapiens
GGGAGGAAVPSQARAGRVPIACCAPGRAAPLGLLAMDADDSRAPKGSLRKFLEHLSGAGKAIGVLTSGGDAQGMNAAVRAVVRMGIYVGAKVYFIYEGYQGMVDGGSNIAEADWESVSSILQVGGTIIGSARCQAFRTREGRLKAACNLLQRGITNLCVIGGDGSLTGANLFRKEWSGLLEELARNGQIDKEAVQKYAYLNVVGMVGSIDNDFCGTDMTIGTDSALHRIIEVVDAIMTTAQSHQRTFVLEVMGRHCGYLALVSALACGADWVFLPESPPEEGWEEQMCVKLSENRARKKRLNIIIVAEGAIDTQNKPITSEKIKELVVTQLGYDTRVTILGHVQRGGTPSAFDRILASRMGVEAVIALLEATPDTPACVVSLNGNHAVRLPLMECVQMTQDVQKAMDERRFQDAVRLRGRSFAGNLNTYKRLAIKLPDDQIPKTNCNVAVINVGAPAAGMNAAVRSAVRVGIADGHRMLAIYDGFDGFAKGQIKEIGWTDVGGWTGQGGSILGTKRVLPGKYLEEIATQMRTHSINALLIIGGFETCDRIKQSASGTKRRVFIIETMGGYCGYLANMGGLAAGADAAYIFEEPFDIRDLQSNVEHLTEKMKTTIQRGLVLRNESCSENYTTDFIYQLYSEEGKGVFDCRKNVLGHMQQGGAPSPFDRNFGTKISARAMEWITAKLKEARGRGKKFTTDDSICVLGISKRNVIFQPVAELKKQTDFEHRIPKEQWWLKLRPLMKILAKYKASYDVSDSGQLEHVQPWSV

SEQ ID NO: 839176 - protein, 746 aa, Homo sapiens; identical to SEQ ID NO: 839153

SEQ ID NO: 839177 - protein, 746 aa, Homo sapiens; identical to SEQ ID NO: 839153

SEQ ID NO: 839178 - protein, 730 aa, Homo sapiens
SARYEAGFGYQGMVDGGSNIAEADWESVSSILQVGGTIIGSARCQAFRTREGRLKAACNLLQRGITNLCVIGGDGSLTGANLFRKEWSGLLEELARNGQIDKEAVQKYAYLNVVGMVGSIDNDFCGTDMTIGTDSALHRIIEVVDAIMTTAQSHQRTFVLEVMGRHCGYLALVSALACGADWVFLPESPPEEGWEEQMCVKLSENRARKKRLNIIIVAEGAIDTQNKPITSEKIKELVVTQLGYDTRVTILGHVQRGGTPSAFDRILASRMGVEAVIALLEATPDTPACVVSLNGNHAVRLPLMECVQMTQDVQKAMDERRFQDAVRLRGRSFAGNLNTYKRLAIKLPDDQIPKTNCNVAVINVGAPAAGMNAAVRSAVRVGIADGHRMLAIYDGFDGFAKGQIKEIGWTDVGGWTGQGGSILGTKRVLPGKYLEEIATQMRTHSINALLIIGGFEAYLGLLELSAAREKHEEFCVPMVMVPATVSNNVPGSDFSIGADTALNTITDTCDRIKQSASGTKRRVFIIETMGGYCGYLANMGGLAAGADAAYIFEEPFDIRDLQSNVEHLTEKMKTTIQRGLVLRNESCSENYTTDFIYQLYSEEGKGVFDCRKNVLGHMQQGGAPSPFDRNFGTKISARAMEWITAKLKEARGRGKKFTTDDSICVLGISKRNVIFQPVAELKKQTDFEHRIPKEQWWLKLRPLMKILAKYKASYDVSDSGQLEHVQPWSV

SEQ ID NO: 839179 - protein, 804 aa, Homo sapiens
GGGAGGAAVPSQARAGRVPIACCAPGRAAPLGLLAMDADDSRAPKGSLRKFLEHLSGAGKAIGVLTSGGDAQGMNAAVRAVVRMGIYVGAKVYFIYEGYQGMVDGGSNIAEADWESVSSILQVGGTIIGSARCQAFRTREGRLKAACNLLQRGITNLCVIGGDGSLTGANLFRKEWSGLLEELARNGQIDKEAVQKYAYLNVVGMVGSIDNDFCGTDMTIGTDSALHRIIEVVDAIMTTAQRYLALVSALACGADWVFLPESPPEEGWEEQMCVKLSENRARKKRLNIIIVAEGAIDTQNKPITSEKIKELVVTQLGYDTRVTILGHVQRGGTPSAFDRILASRMGVEAVIALLEATPDTPACVVSLNGNHAVRLPLMECVQMTQDVQKAMDERRFQDAVRLRGRSFAGNLNTYKRLAIKLPDDQIPKTNCNVAVINVGAPAAGMNAAVRSAVRVGIADGHRMLAIYDGFDGFAKGQIKEIGWTDVGGWTGQGGSILGTKRVLPGKYLEEIATQMRTHSINALLIIGGFEAYLGLLELSAAREKHEEFCVPMVMVPATVSNNVPGSDFSIGADTALNTITDTCDRIKQSASGTKRRVFIIETMGGYCGYLANMGGLAAGADAAYIFEEPFDIRDLQSNVEHLTEKMKTTIQRGLVLRNESCSENYTTDFIYQLYSEEGKGVFDCRKNVLGHMQQGGAPSPFDRNFGTKISARAMEWITAKLKEARGRGKKFTTDDSICVLGISKRNVIFQPVAELKKQTDFEHRIPKEQWWLKLRPLMKILAKYKASYDVSDSGQLEHVQPWSV

SEQ ID NO: 839180 - protein, 568 aa, Homo sapiens
MGRHCGYLALVSALACGADWVFLPESPPEEGWEEQMCVKLSENRARKKRLNIIIVAEGAIDTQNKPITSEKIKELVVTQLGYDTRVTILGHVQRGGTPSAFDRILASRMGVEAVIALLEATPDTPACVVSLNGNHAVRLPLMECVQMTQDVQKAMDERRFQDAVRLRGRSFAGNLNTYKRLAIKLPDDQIPKTNCNVAVINVGAPAAGMNAAVRSAVRVGIADGHRMLAIYDGFDGFAKGQIKEIGWTDVGGWTGQGGSILGTKRVLPGKYLEEIATQMRTHSINALLIIGGFEAYLGLLELSAAREKHEEFCVPMVMVPATVSNNVPGSDFSIGADTALNTITDTCDRIKQSASGTKRRVFIIETMGGYCGYLANMGGLAAGADAAYIFEEPFDIRDLQSNVEHLTEKMKTTIQRGLVLRNESCSENYTTDFIYQLYSEEGKGVFDCRKNVLGHMQQGGAPSPFDRNFGTKISARAMEWITAKLKEARGRGKKFTTDDSICVLGISKRNVIFQPVAELKKQTDFEHRIPKEQWWLKLRPLMKILAKYKASYDVSDSGQLEHVQPWSV

SEQ ID NO: 839181 - protein, 608 aa, Homo sapiens
GGGAGGAAVPSQARAGRVPIACCAPGRAAPLGLLAMDADDSRAPKGSLRKFLEHLSGAGKAIGVLTSGGDAQGMNAAVRAVVRMGIYVGAKVYFIYEGYQGMVDGGSNIAEADWESVSSILQVGGTIIGSARCQAFRTREGRLKAACNLLQRGITNLCVIGGDGSLTGANLFRKEWSGLLEELARNGQIDKEAVQKYAYLNVVGMVGSIDNDFCGTDMTIGTDSALHRIIEVVDAIMTTAQSHQRTFVLEVMGRHCGYLALVSALACGADWVFLPESPPEEGWEEQMCVKLSENRARKKRLNIIIVAEGAIDTQNKPITSEKIKELVVTQLGYDTRVTILGHVQRGGTPSAFDRILASRMGVEAVIALLEATPDTPACVVSLNGNHAVRLPLMECVQMTQDVQKAMDERRFQDAVRLRGRSFAGNLNTYKRLAIKLPDDQIPKTNCNVAVINVGAPAAGMNAAVRSAVRVGIADGHRMLAIYDGFDGFAKGQIKEIGWTDVGGWTGQGGSILGTKRVLPGKYLEEIATQMRTHSINALLIIGGFEAYLGLLELSAAREKHEEFCVPMVMVPATVSNNVPGSDFSIGADTALNTITDVSPCAPCQAGAG

SEQ ID NO: 839182 - protein, 595 aa, Homo sapiens
GGGAGGAAVPSQARAGRVPIACCAPGRAAPLGLLAMDADDSRAPKGSLRKFLEHLSGAGKAIGVLTSGGDAQGMNAAVRAVVRMGIYVGAKVYFIYEGYQGMVDGGSNIAEADWESVSSILQVGGTIIGSARCQAFRTREGRLKAACNLLQRGITNLCVIGGDGSLTGANLFRKEWSGLLEELARNGQIDKEAVQKYAYLNVVGMVGSIDNDFCGTDMTIGTDSALHRIIEVVDAIMTTAQSHQRTFVLEVMGRHCGYLALVSALACGADWVFLPESPPEEGWEEQMCVKLSENRARKKRLNIIIVAEGAIDTQNKPITSEKIKELVVTQLGYDTRVTILGHVQRGGTPSAFDRILASRMGVEAVIALLEATPDTPACVVSLNGNHAVRLPLMECVQMTQDVQKAMDERRFQDAVRLRGRSFAGNLNTYKRLAIKLPDDQIPKTNCNVAVINVGAPAAGMNAAVRSAVRVGIADGHRMLAIYDGFDGFAKGQIKEIGWTDVGGWTGQGGSILGTKRVLPGKYLEEIATQMRTHSINALLIIGGFEAYKSACDMAEARGRHQELCIPLCVVPATISNNVPGTEISLGSDTGLNAEV

SEQ ID NO: 839183 - protein, 471 aa, Homo sapiens
GGGAGGAAVPSQARAGRVPIACCAPGRAAPLGLLAMDADDSRAPKGSLRKFLEHLSGAGKAIGVLTSGGDAQGMNAAVRAVVRMGIYVGAKVYFIYEGYQGMVDGGSNIAEADWESVSSILQVGGTIIGSARCQAFRTREGRLKAACNLLQRGITNLCVIGGDGSLTGANLFRKEWSGLLEELARNGQIDKEAVQKYAYLNVVGMVGSIDNDFCGTDMTIGTDSALHRIIEVVDAIMTTAQSHQRTFVLEVMGRHCGYLALVSALACGADWVFLPESPPEEGWEEQMCVKLSENRARKKRLNIIIVAEGAIDTQNKPITSEKIKELVVTQLGYDTRVTILGHVQRGGTPSAFDRILASRMGVEAVIALLEATPDTPACVVSLNGNHAVRLPLMECVQMTQDVQKAMDERRFQDAVRLRGRSFAGNLNTYKRLAIKLPDDQIPKTIGNVAVINVGVRLSNQAYRYLDLEGGP

SEQ ID NO: 839184 - protein, 175 aa, Homo sapiens
AAPDVRRSNVEHLTEKMKTTIQRGLVLRNESCSENYTTDFIYQLYSEEGKGVFDCRKNVLGHMQQGGAPSPFDRNFGTKISARAMEWITAKLKEARGRGKKFTTDDSICVLGISKRNVIFQPVAELKKQTDFEHRIPKEQWWLKLRPLMKILAKYKASYDVSDSGQLEHVQPWSV

SEQ ID NO: 839185 - protein, 166 aa, Homo sapiens
VVFTAALISEHKASLVVVRNESCSENYTTDFIYQLYSEEGKGVFDCRKNVLGHMQQGGAPSPFDRNFGTKISARAMEWITAKLKEARGRGKKFTTDDSICVLGISKRNVIFQPVAELKKQTDFEHRIPKEQWWLKLRPLMKILAKYKASYDVSDSGQLEHVQPWSV

SEQ ID NO: 839186 - protein, 93 aa, Homo sapiens
QVVVGRLYHLVDSADPTNPVFLARPLAVLARRRHLPPVTAGLTAVSSYLHRHRIPKEQWWLKLRPLMKILAKYKASYDVSDSGQLEHVQPWSV

SEQ ID NO: 839187 - protein, 276 aa, Homo sapiens
LKGARCRQGASLAGMAASALRGLPVAGGGESSESEDDGWEIGYLDRTSQKLKRLLPIEEKKEKFKKAMTIGDVSLVQELLDSGISVDSNFQYGWTPLMYAASVANAELVRVLLDRGANASFEKDKQSILITACSAHGSEEQILKCVELLLSRNADPNVACRRLMTPIMYAARDGHTQVVALLVAHGAEVNTQDENGYTALTWAARQGHKNIVLKLLELGANKMLQTKDGKMPSEIAKRNKHHEIFNLLSFTLNPLEGKLQQLTKEDTICNNIDNRF

SEQ ID NO: 839188 - protein, 162 aa, Homo sapiens
LKGARCRQGASLAGMAASALRGLPVAGGGESSESEDDGWEIGYLDRTSQKLKRLLPIEEKKEKFKKAMTIGDVSLVQELLDSGISVDSNFQYGWTPLMYAASVANAELVRVLLDRGANASFEKDKQSILITACSAHGSEEQILKCVELLLSRNADPNVACRL

SEQ ID NO: 839189 - protein, 162 aa, Homo sapiens; identical to SEQ ID NO: 839188

SEQ ID NO: 839190 - protein, 235 aa, Homo sapiens
LKGARCRQGASLAGMAASALRGLPVAGGGESSESEDDGWEIGYLDRTSQKLKRLLPIEEKKEKFKKAMTIGDVSLVQELLDSDKQSILITACSAHGSEEQILKCVELLLSRNADPNVACRRLMTPIMYAARDGHTQVVALLVAHGAEVNTQDENGYTALTWAARQGHKNIVLKLLELGANKMLQTKDGKMPSEIAKRNKHHEIFNLLSFTLNPLEGKLQQLTKEDTICNNIDNRF

SEQ ID NO: 839191 - protein, 467 aa, Homo sapiens
MALHPRRVRLKPWLVAQVDSGLYPGLIWLHRDSKRFQIPWKHATRHSPQQEEENTIFKAWAVETGKYQEGVDDPDPAKWKAQLRCALNKSREFNLMYDGTKEVPMNPVKIYQVCDIPQPQGSIINPGSTGSAPWDEKDNDVDEEDEEDELDQSQHHVPIQDTFPFLNINGSPMAPASVGNCSVGNCSPEAVWPKTEPLEMEVPQAPIQPFYSSPELWISSLPMTDLDIKFQYRGKEYGQTMTVSNPQGCRLFYGDLGPMPDQEELFGPVSLEQVKFPGPEHITNEKQKLFTSKLLDVMDRGLILEVSGHAIYAIRLCQCKVYWSGPCAPSLVAPNLIERQKKVKLFCLETFLSDLIAHQKGQIEKQPPFEIYLCFGEEWPDGKPLERKLILVQVIPVVARMIYEMFSGDFTRSFDSGSVRLQISTPDIKDNIVAQLKQLYRILQTQESWQPMQPTPSMQLPPALPPQ

SEQ ID NO: 839192 - protein, 467 aa, Homo sapiens; identical to SEQ ID NO: 839191

SEQ ID NO: 839193 - protein, 467 aa, Homo sapiens; identical to SEQ ID NO: 839191

SEQ ID NO: 839194 - protein, 295 aa, Homo sapiens
MAPASVGNCSVGNCSPEAVWPKTEPLEMEVPQAPIQPFYSSPELWISSLPMTDLDIKFQYRGKEYGQTMTVSNPQGCRLFYGDLGPMPDQEELFGPVSLEQVKFPGPEHITNEKQKLFTSKLLDVMDRGLILEVSGHAIYAIRLCQCKVYWSGPCAPSLVAPNLIERQKKVKLFCLETFLSDLIAHQKGQIEKQPPFEIYLCFGEEWPDGKPLERKLILVQVIPVVARMIYEMFSGDFTRSFDSGSVRLQISTPDIKDNIVAQLKQLYRILQTQESWQPMQPTPSMQLPPALPPQ

SEQ ID NO: 839195 - protein, 467 aa, Homo sapiens; identical to SEQ ID NO: 839191

SEQ ID NO: 839196 - protein, 389 aa, Homo sapiens
MALHPRRVRLKPWLVAQVDSGLYPGLIWLHRDSKRFQIPWKHATRHSPQQEEENTIFKAWAVETGKYQEGVDDPDPAKWKAQLRCALNKSREFNLMYDGTKEVPMNPVKIYQVCDIPQPQGSIINPGSTGSAPWDEKDNDVDEEDEEDELDQSQHHVPIQDTFPFLNINGSPMAPASVGNCSVGNCSPEAVWPKTEPLEMEVPQAPIQPFYSSPELWISSLPMTDLDIKFQYRGKEYGQTMTVSNPQGCRLFYGDLGPMPDQEELFGPVSLEQVKFPGPEHITNEKQKLFTSKLLDVMDRGLILEVSGHAIYAIRLCQCKVYWSGPCAPSLVAPNLIERQKKVKLFCLETFLSGKSFLRKLIVGITLWKYIPSTIPVFHLPAFLAWQRS

SEQ ID NO: 839197 - protein, 173 aa, Homo sapiens [sequence omitted]

SEQ ID NO: 839198 - protein, 467 aa, Homo sapiens; identical to SEQ ID NO: 839191

SEQ ID NO: 839199 - protein, 509 aa, Homo sapiens
SSAHLGWAGKGWCGTGRGTCSPYLGRARRPLAKTSRSVVATGDLRCGLGSEGRPLLVDRLSKESLSGQGKDKPTSKRFQIPWKHATRHSPQQEEENTIFKAWAVETGKYQEGVDDPDPAKWKAQLRCALNKSREFNLMYDGTKEVPMNPVKIYQVCDIPQPQGSIINPGSTGSAPWDEKDNDVDEEDEEDELDQSQHHVPIQDTFPFLNINGSPMAPASVGNCSVGNCSPEAVWPKTEPLEMEVPQAPIQPFYSSPELWISSLPMTDLDIKFQYRGKEYGQTMTVSNPQGCRLFYGDLGPMPDQEELFGPVSLEQVKFPGPEHITNEKQKLFTSKLLDVMDRGLILEVSGHAIYAIRLCQCKVYWSGPCAPSLVAPNLIERQKKVKLFCLETFLSDLIAHQKGQIEKQPPFEIYLCFGEEWPDGKPLERKLILVQVIPVVARMIYEMFSGDFTRSFDSGSVRLQISTPDIKDNIVAQLKQLYRILQTQESWQPMQPTPSMQLPPALPPQ

SEQ ID NO: 839200 - protein, 245 aa, Homo sapiens [sequence omitted]

SEQ ID NO: 839201 - protein, 410 aa, Homo sapiens
MALHPRRVRLKPWLVAQVDSGLYPGLIWLHRDSKRFQIPWKHATRHSPQQEEENTIFKAWAVETGKYQEGVDDPDPAKWKAQLRCALNKSREFNLMYDGTKEVPMNPVKIYQVCDIPQPQGSIINPGSTGSAPWDEKDNDVDEEDEEDELDQSQHHVPIQDTFPFLNINGSPMAPASVGNCSVGNCSPEAVWPKTEPLEMEVPQAPIQPFYSSPELWISSLPMTDLDIKFQYRGKEYGQTMTVSNPQGCRLFYGDLGPMPDQEELFGPVSLEQVKFPGPEHITNEKQKLFTSKLLDVMDRGLILEVSGHAIYAIRLCQCKVYWSGPCAPSLVAHGHGLPVLLPTVLKLDVQVSHWERADPQFWRAIEGLYRCLGYFHLQGFSFGPHCLRAAVAHTQFPHWLRHGVMQVPS

SEQ ID NO: 839202 - protein, 179 aa, Homo sapiens
WHPASAGRATGARLFPGCGRRSRCAARGALLGAPSAVGSAPGIGLGSRGAREGCAFPTAPLASSGTAATEISSRGNYADPFRGSSPRPSSPPPPLCWGAWAGPRRGGGSGSLGREAAGGRGAAGHRFSPPCDAVLSPATPSASRACASAPPRSARCFCRDAHANRRRPSPCSIPASAGR

SEQ ID NO: 839203 - protein, 441 aa, Homo sapiens
MLLPGRARQPPTPQPVQHPGLRRQVEPPGQLLRLFYCTVLVCSKEISALTDFSGYLTKLLQNHTTYACDGDYLNLQCPRHSTISVQSAFYGQDYQMCSSQKPASQREDSLTCVAATTFQKVLDECQNQRACHLLVNSRVFGPDLCPGSSKYLLVSFKCQPNELKNKTVCEDQELKLHCHESKFLNIYSATYGRRTQERDICSSKAERLPPFDCLSYSALQVLSRRCYGKQRCKIIVNNHHFGSPCLPGVKKYLTVTYACVPKNILTAIDPAIANLKPSLKQKDGEYGINFDPSGSKVLRKDGILVSNSLAAFAYIRAHPERAALLFVSSVCIGLALTLCALVIRESCAKDFRDLQLGREQLVPGSDKVEEDSEDEEEEEDPSESDFPGELSGFCRTSYPIYSSIEAAELAERIERREQIIQEIWMNSGLDTSLPRNMGQFY

SEQ ID NO: 839204 - protein, 346 aa, Homo sapiens
MCSSQKPASQREDSLTCVAATTFQKVLDECQNQRACHLLVNSRVFGPDLCPGSSKYLLVSFKCQPNELKNKTVCEDQELKLHCHESKFLNIYSATYGRRTQERDICSSKAERLPPFDCLSYSALQVLSRRCYGKQRCKIIVNNHHFGSPCLPGVKKYLTVTYACVPKNILTAIDPAIANLKPSLKQKDGEYGINFDPSGSKVLRKDGILVSNSLAAFAYIRAHPERAALLFVSSVCIGLALTLCALVIRESCAKDFRDLQLGREQLVPGSDKVEEDSEDEEEEEDPSESDFPGELSGFCRTSYPIYSSIEAAELAERIERREQIIQEIWMNSGLDTSLPRNMGQFY

SEQ ID NO: 839205 - protein, 423 aa, Homo sapiens
MLLPGRARQPPTPQPVQHPGLRRQVEPPGQLLRLFYCTVLVCSKEISALTDFSGYLTKLLQNHTTYACDGDYLNLQCPRHSTISVQSAFYGQDYQMCSSQKPASQREDSLTCVAATTFQKVLDECQNQRACHLLVNSRVFGPDLCPGSSKYLLVSFKCQPNELKNKTVCEDQELKLHCHESKFLNIYSATYGRRTQERDICSSKAERLPPFDCLSYSALQVLSRRCYGKQRCKIIVNNHHFGSPCLPGVKKYLTVTYACVPKNILTAIDPAIANLGSKVLRKDGILVSNSLAAFAYIRAHPERAALLFVSSVCIGLALTLCALVIRESCAKDFRDLQLGREQLVPGSDKVEEDSEDEEEEEDPSESDFPGELSGFCRTSYPIYSSIEAAELAERIERREQIIQEIWMNSGLDTSLPRNMGQFY

SEQ ID NO: 839206 - protein, 179 aa, Homo sapiens; identical to SEQ ID NO: 839202

SEQ ID NO: 839207 - protein, 228 aa, Homo sapiens [sequence omitted]

SEQ ID NO: 839208 - protein, 179 aa, Homo sapiens; identical to SEQ ID NO: 839202

SEQ ID NO: 839209 - protein, 441 aa, Homo sapiens; identical to SEQ ID NO: 839203

SEQ ID NO: 839210 - protein, 414 aa, Homo sapiens
MLLPGRARQPPTPQPVQHPGLRRQVEPPGQLLRLFYCTVLVCSKEISALTDFSGYLTKLLQNHTTYACDGDYLNLQCPRHSTISVQSAFYGQDYQMCSSQKPASQREDSLTCVAATTFQKVLDECQNQRACHLLVNSRVFGPDLCPGSSKYLLVSFKCQPNELKNKTVCEDQELKLHCHESKFLNIYSATYGRRTQERDICSSKAERLPPFDCLSYSALQVLSRRCYGKQRCKIIVNNHHFGSPCLPGVKKYLTVTYACGINFDPSGSKVLRKDGILVSNSLAAFAYIRAHPERAALLFVSSVCIGLALTLCALVIRESCAKDFRDLQLGREQLVPGSDKVEEDSEDEEEEEDPSESDFPGELSGFCRTSYPIYSSIEAAELAERIERREQIIQEIWMNSGLDTSLPRNMGQFY

SEQ ID NO: 839211 - protein, 103 aa, Homo sapiens
MEFLLATLWQPLLTLEPTRRELPCCSCPVSASAWPSHCAPWSSESPVPRTSATCSWGGSSWCQEVTRSRRTARMKKRRRTPLSLISQGNCRGSVGLHILYTVP

SEQ ID NO: 839212 - protein, 299 aa, Homo sapiens
MLLPGRARQPPTPQPVQHPGLRRQVEPPGQLLRLFYCTVLVCSKEISALTDFSGYLTKLLQNHTTYACDGDYLNLQCPRHSTISVQSAFYGQDYQMCSSQKPASQREDSLTCVAATTFQKVLDECQNQRACHLLVNSRVFGPDLCPGSSKYLLVSFKCQPNELKNKTVCEDQELKLHCHESKFLNIYSATYGRRTQERDICSSKAERLPPFDCLSYSALQVLSRRCYGKQRCKIIVNNHHFGSPCLPGVKKYLTVTYACVPKNILTAIDPAIANLKPSLKQKDGEYGNFYGLVPAFLFK

SEQ ID NO: 839213 - protein, 66 aa, Homo sapiens
KSLIAYSSISHIALVVTAILIQNPLRLHRRSHSHNRPRTYILITILPSKHYYNKHPHHYNLPRNNI

SEQ ID NO: 839214 - protein, 98 aa, Homo sapiens
THLHQPPNISINLAMDIPILLLIVPILIAMAFLMLTERKILGYIQLRKGPNVVGPYGLLQPFADAIKLFTKEPLKPATSTITLYITAPTLALTIALLL

SEQ ID NO: 839215 - protein, 98 aa, Homo sapiens; identical to SEQ ID NO: 839214

SEQ ID NO: 839216 - protein, 105 aa, Homo sapiens
VALRRSLYSRVLADICYSLNITSKPSFWLLLSGRFLLTLKYQLNSVLFSTTVMVLPGRVSVFFFLNSQAPVVLAGSLIYTNHPTIYKPSHGHPLMSGRSDYRLSL

SEQ ID NO: 839217 - protein, 98 aa, Homo sapiens; identical to SEQ ID NO: 839214

SEQ ID NO: 839218 - protein, 87 aa, Homo sapiens
MRHNYNKLHLPTTNRPKIAHCLLIQPIALAVRLTANITAGHLLMHLIGSATLAISTINLPSTLIIFTILILLTILEIAVALIQAYVF

SEQ ID NO: 839219 - protein, 98 aa, Homo sapiens; identical to SEQ ID NO: 839214

SEQ ID NO: 839220 - protein, 77 aa, Homo sapiens
LDLTFSKVKESELVSGFNIEYAAGPFALFFIAEYTNIIIINTLTTTIFLGTTYDALSPELYTTYFVTKTLLLTSLFL

SEQ ID NO: 839221 - protein, 189 aa, Homo sapiens
AQARGARGWQCACAASACGTPRCLGASARGKMAEQATKSVLFVCLGNICRSPIAEAVFRKLVTDQNISENWRVDSAATSGYEIGNPPDYRGQSCMKRHGIPMSHVARQITKEDFATFDYILCMDESNLRDLNRKSNQVKTCKAKIELLGSYDPQKQLIIEDPYYGNDSDFETVYQQCVRCCRAFLEKAH

SEQ ID NO: 839222 - protein, 189 aa, Homo sapiens
AQARGARGWQCACAASACGTPRCLGASARGKMAEQATKSVLFVCLGNICRSPIAEAVFRKLVTDQNISENWVIDSGAVSDWNVGRSPDPRAVSCLRNHGIHTAHKARQITKEDFATFDYILCMDESNLRDLNRKSNQVKTCKAKIELLGSYDPQKQLIIEDPYYGNDSDFETVYQQCVRCCRAFLEKAH

SEQ ID NO: 839223 - protein, 189 aa, Homo sapiens; identical to SEQ ID NO: 839221

SEQ ID NO: 839224 - protein, 101 aa, Homo sapiens
AQARGARGWQCACAASACGTPRCLGASARGKMAEQATKSVLFVCLGNICRSPIAEAVFRKLVTDQNISENWRVDSAATSGGSLTAVLFLTGTWAGPQTQEL

SEQ ID NO: 839225 - protein, 111 aa, Homo sapiens
AQARGARGWQCACAASACGTPRCLGASARGKMAEQATKSVLFVCLGNICRSPIAEAVFRKLVTDQNISENWRVDSAATSGYEIGNPPDYRGQSCMKRHGIPMSHVARQRFE

SEQ ID NO: 839226 - protein, 101 aa, Homo sapiens; identical to SEQ ID NO: 839224

SEQ ID NO: 839227 - protein, 189 aa, Homo sapiens; identical to SEQ ID NO: 839222

SEQ ID NO: 839228 - protein, 71 aa, Homo sapiens
EFPRRARKSVLFVCLGNICRSPIAEAVFRKLVTDQNISENWRVDSAATSGGSLTAVLFLTGTWAGPQTQEL

SEQ ID NO: 839229 - protein, 111 aa, Homo sapiens; identical to SEQ ID NO: 839225

SEQ ID NO: 839230 - protein, 189 aa, Homo sapiens; identical to SEQ ID NO: 839221

SEQ ID NO: 839231 - protein, 94 aa, Homo sapiens
AQARGARGWQCACAASACGTPRCLGASARGKMAEQATKSVLFVCLGNICRSPIAEAVFRKLVTDQNISENWRVDSAATSGYEIGNPPDCCGQPD

SEQ ID NO: 839232 - protein, 159 aa, Homo sapiens
EFPRRARKSVLFVCLGNICRSPIAEAVFRKLVTDQNISENWVIDSGAVSDWNVGRSPDPRAVSCLRNHGIHTAHKARQITKEDFATFDYILCMDESNLRDLNRKSNQVKTCKAKIELLGSYDPQKQLIIEDPYYGNDSDFETVYQQCVRCCRAFLEKAH

SEQ ID NO: 839233 - protein, 189 aa, Homo sapiens; identical to SEQ ID NO: 839221

SEQ ID NO: 839234 - protein, 189 aa, Homo sapiens; identical to SEQ ID NO: 839222

SEQ ID NO: 839235 - protein, 129 aa, Homo sapiens
AQARGARGWQCACAASACGTPRCLGASARGKMAEQATKSVLFVCLGNICRSPIAEAVFRKLVTDQNISENWRVDSAATSGYEIGNPPDYRGQSCMKRHGIPMSHVARQITKEDFATFDYILCMDESNLR

SEQ ID NO: 839236 - protein, 189 aa, Homo sapiens; identical to SEQ ID NO: 839221

SEQ ID NO: 839237 - protein, 148 aa, Homo sapiens
NSPARREAARPIAEAVFRKLVTDQNISENWRVDSAATSGYEIGNPPDYRGQSCMKRHGIPMSHVARQITKEDFATFDYILCMDESNLRDLNRKSNQVKTCKAKIELLGSYDPQKQLIIEDPYYGNDSDFETVYQQCVRCCRAFLEKAH

SEQ ID NO: 839238 - protein, 101 aa, Homo sapiens; identical to SEQ ID NO: 839224

SEQ ID NO: 839239 - protein, 174 aa, Homo sapiens
AQARGARGWQCACAASACGTPRCLGASARGKMAEQATKSVLFVCLGNICRSPIAEAVFRKLVTDQNISENWRVDSAATSGYEIGNPPDYRGQSCMKRHGIPMSHVARQITKEDFATFDYILCMDESNLRDLNRKSNQVKTCKAKIELLGSYDPQKQLIIEDPYYVSTVHVLGLI

SEQ ID NO: 839240 - protein, 171 aa, Homo sapiens
AQARGARGWQCACAASACGTPRCLGASARGKMAEQATKSVLFVCLGNICRSPIAEAVFRKLVTDQNISENWRVDSAATSGYEIGNPPDYRGQSCMKRHGIPMSHVARQITKEDFATFDYILCMDESNLRDLNRKSNQVKTCKAKIELLGSYDPQVYQQCVRCCRAFLEKAH

SEQ ID NO: 839241 - protein, 189 aa, Homo sapiens; identical to SEQ ID NO: 839221

SEQ ID NO: 839242 - protein, 174 aa, Homo sapiens; identical to SEQ ID NO: 839239

SEQ ID NO: 839243 - protein, 506 aa, Homo sapiens
VRGRWYSAEGSERGSPSSGGNPLSGVASSSPNLPHRDAAVAGSSPRLPSLLPPRPPPALSLDIASDSLRTANKVDSDLADYKLRAQPLLVRAHSSLGPGRPRSPLACDDCSLRSAKSSFSLLAPIRSKDVRSRSYLEGSLLASGALLGADELARYFPDRNVALFVATWNMQGQKELPPSLDEFLLPAEADYAQDLYVIGVQEGCSDRREWETRLQETLGPHYVLLSSAAHGVLYMSLFIRRDLIWFCSEVECSTVTTRIVSQIKTKGALGISFTFFGTSFLFITSHFTSGDGKVAERLLDYTRTVQALVLPRNVPDTNPYRSSAADVTTRFDEVFWFGDFNFRLSGGRTVVDALLCQGLVVDVPALLQHDQLIREMRKGSIFKGFQEPDIHFLPSYKFDIGKDTYDSTSKQRTPSYTDRVLYRSRHKGDICPVSYSSCPGIKTSDHRPVYGLFRVKVRPGRDNIPLAAGKFDRELYLLGIKRRISKEIQRQQALQSQNSSTICSVS

SEQ ID NO: 839244 - protein, 464 aa, Homo sapiens
VRGRWYSAEGSERGSPSSGGNPLSGVASSSPNLPHRDAAVAGSSPRLPSLLPPRPPPALSLDIASDSLRTANKVDSDLADYKLRAQPLLVRAHSSLGPGRPRSPLACDDCSLRSAKSSFSLLAPIRSKDVRSRSYLEGSLLASGALLGADELARYFPDRNVALFVATWNMQGQKELPPSLDEFLLPAEADYAQDLYVIGVQEGCSDRREWETRLQETLGPHYVLLSSAAHGVLYMSLFIRRDLIWFCSEVECSTVTTRIVSQIKTKGALGISFTFFGTSFLFITSHFTSGDGKVAERLLDYTRTVQALVLPRNVPDTNPYRSSAADVTTRFDEVFWFGDFNFRLSGGRTVVDALLCQGLVVDVPALLQHDQLIREMRKGSIFKGFQEPDIHFLPSYKFDIGKDTYDSTSKQRTPSYTDRVLYRSRHKGDICPVSYSSCPGIKTSDHRPVYGLFRVKVRPGRDKN

SEQ ID NO: 839245 - protein, 506 aa, Homo sapiens; identical to SEQ ID NO: 839243

SEQ ID NO: 839246 - protein, 100 aa, Homo sapiens
PSARCTLAHPPARPMAASLGMSRYLDICWKPQEATEAGQGRSSRCPQGLSSGEGQALAQLATDARQQNGHECQGSQKASLWGALENSREVSGPRPTAPHK

SEQ ID NO: 839247 - protein, 644 aa, Homo sapiens
MPSKAENLRPSEPAPQPPEGRTLQGQLPGAPPAQRAGSPPDAPGSESPALACSTPATPSGEDPPARAAPIAPRPPARPRLERALSLDDKGWRRRRFRGSQEDLEARNGTSPSRGSVQSEGPGAPAHSCSPPCLSTSLQEIPKSRGVLSSERGSPSSGGNPLSGVASSSPNLPHRDAAVAGSSPRLPSLLPPRPPPALSLDIASDSLRTANKVDSDLADYKLRAQPLLVRAHSSLGPGRPRSPLACDDCSLRSAKSSFSLLAPIRSKDVRSRSYLEGSLLASGALLGADELARYFPDRNVALFVATWNMQGQKELPPSLDEFLLPAEADYAQDLYVIGVQEGCSDRREWETRLQETLGPHYVLLSSAAHGVLYMSLFIRRDLIWFCSEVECSTVTTRIVSQIKTKGALGISFTFFGTSFLFITSHFTSGDGKVAERLLDYTRTVQALVLPRNVPDTNPYRSSAADVTTRFDEVFWFGDFNFRLSGGRTVVDALLCQGLVVDVPALLQHDQLIREMRKGSIFKGFQEPDIHFLPSYKFDIGKDTYDSTSKQRTPSYTDRVLYRSRHKGDICPVSYSSCPGIKTSDHRPVYGLFRVKVRPGRDNIPLAAGKFDRELYLLGIKRRISKEIQRQQALQSQNSSTICSVS

SEQ ID NO: 839248 - protein, 472 aa, Homo sapiens
VRGRWYSAEGSERGSPSSGGNPLSGVASSSPNLPHRDAAVAGSSPRLPSLLPPRPPPALSLDIASDSLRTANKVDSDLADYKLRAQPLLVRAHSSLGPGRPRSPLACDDCSLRSAKSSFSLLAPIRSKDVRSRSYLEGSLLASGALLGADELARYFPDRNVALFVATWNMQGQKELPPSLDEFLLPAEADYAQDLYVIGVQEGCSDRDLIWFCSEVECSTVTTRIVSQIKTKGALGISFTFFGTSFLFITSHFTSGDGKVAERLLDYTRTVQALVLPRNVPDTNPYRSSAADVTTRFDEVFWFGDFNFRLSGGRTVVDALLCQGLVVDVPALLQHDQLIREMRKGSIFKGFQEPDIHFLPSYKFDIGKDTYDSTSKQRTPSYTDRVLYRSRHKGDICPVSYSSCPGIKTSDHRPVYGLFRVKVRPGRDNIPLAAGKFDRELYLLGIKRRISKEIQRQQALQSQNSSTICSVS

SEQ ID NO: 839249 - protein, 150 aa, Homo sapiens
RAWGAAAGTSWSEPVRVPILLAGSIFKGFQEPDIHFLPSYKFDIGKDTYDSTSKQRTPSYTDRVLYRSRHKGDICPVSYSSCPGIKTSDHRPVYGLFRVKVRPGRDNIPLAAGKFDRELYLLGIKRRISKEIQRQQALQSQNSSTICSVS

SEQ ID NO: 839250 - protein, 109 aa, Homo sapiens
  misc_feature (96)..(96): Xaa can be any naturally occurring amino acid
  misc_feature (98)..(99): Xaa can be any naturally occurring amino acid
  misc_feature (101)..(101): Xaa can be any naturally occurring amino acid
SEGQSGRCKIVVVGDAECGKTALLQVFAKDAYPGSYVPTVFENYTASFEIDKRRIELNMWDTSGSSYYDNVRPLAYPDSDAVLICFDISRPETLCXVXXSXEFMFFPLP

SEQ ID NO: 839251 - protein, 227 aa, Homo sapiens
SEGQSGRCKIVVVGDAECGKTALLQVFAKDAYPGSYVPTVFENYTASFEIDKRRIELNMWDTSGSSYYDNVRPLAYPDSDAVLICFDISRPETLDSVLKKWQGETQEFCPNAKVVLVGCKLDMRTDLATLRELSKQRLIPVTHEQGTVLAKQVGAVSYVECSSRSSERSVRDVFHVATVASLGRGHRQLRRTDSRRGMQRSAQLSGRPDRGNEGEIHKDRAKSCNLM

SEQ ID NO: 839252 - protein, 227 aa, Homo sapiens; identical to SEQ ID NO: 839251

SEQ ID NO: 839253 - protein, 234 aa, Homo sapiens
SEGQSGRCKIVVVGDAECGKTALLQVFAKDAYPGSYVPTVFENYTASFEIDKRRIELNMWDTSGSSYYDNVRPLAYPDSDAVLICFDISRPETLDSVLKKWQGETQEFCPNAKVVLVGCKLDMRTDLATLRELSKQRLIPVTHEQGTVLAKQVGAVSYVECSSRSSERSVRDVFHVATVASLGRGHRQLRRTDSRRGMQRSAQLSGRPDRGNEGEIHKDRAKSCNLIYSHTSNL

SEQ ID NO: 839254 - protein, 227 aa, Homo sapiens; identical to SEQ ID NO: 839251

SEQ ID NO: 839255 - protein, 240 aa, Homo sapiens
SEGQSGRCKIVVVGDAECGKTALLQVFAKDAYPGSYVPTVFENYTASFEIDKRRIELNMWDTSGSSYYDNVRPLAYPDSDAVLICFDISRPETLDSVLKKWQGETQEFCPNAKVVLVGCKLDMRTDLATLRELSKQRLIPVTHEQGTVLAKQVGAVSYVECSSRSSERSVRDVFHVATVASLGRGHRQLRRTDSRRGMQRSAQLSGRPDRGNEGEIHKENVHSMTFSFPLLSLLQLFSHI

SEQ ID NO: 839256 - protein, 60 aa, Homo sapiens
HFQHQEHCLDHLINASQCSQQQQVLTPVFHKRCLHPRTNQLQAVPSAPPAHLNTSLQTQR

SEQ ID NO: 839257 - protein, 67 aa, Homo sapiens
GQILMPNIGYGSNKKTKHMLLMCNKSYCAEIAHNVSSKNRKAIVETAAQLAIRVTNPNARLRSEENE

SEQ ID NO: 839258 - protein, 33 aa, Homo sapiens
MGCTLYVSLFPRERDIILVFFIFETPTQRCLAY

SEQ ID NO: 839259 - protein, 1009 aa, Homo sapiens
PARRLGHRLAVVAAPPAVLCPYRPRSQGRVLAMPARRLLLLLTLLLPGLGIFGSTSTVTLPETLLFVSTLDGSLHAVSKRTGSIKWTLKEDPVLQVPTHVEEPAFLPDPNDGSLYTLGSKNNEGLTKLPFTIPELVQASPCRSSDGILYMGKKQDIWYVIDLLTGEKQQTLSSAFADSLCPSTSLLYLGRTEYTITMYDTKTRELRWNATYFDYAASLPEDDVDYKMSHFVSNGDGLVVTVDSESGDVLWIQNYASPVVAFYVWQREGLRKVMHINVAVETLRYLTFMSGEVGRITKWKYPFPKETEAKSKLTPTLYVGKYSTSLYASPSMVHEGVAVVPRGSTLPLLEGPQTDGVTIGDKGECVITPSTDVKFDPGLKSKNKLNYLRNYWLLIGHHETPLSASTKMLERFPNNLPKHRENVIPADSEKKSFEEVINLVDQTSENAPTTVSRDVEEKPAHAPARPEAPVDSMLKDMATIILSTFLLIGWVAFIITYPLSMHQQQQLQHQQFQKELEKIQLLQQQQQQLPFHPPGDTAQDGELLDTSGPYSESSGTSSPSTSPRASNHSLCSGSSASKAGSSPSLEQDDGDEETSVVIVGKISFCPKDVLGHGAEGTIVYRGMFDNRDVAVKRILPECFSFADREVQLLRESDEHPNVIRYFCTEKDRQFQYIAIELCAATLQEYVEQKDFAHLGLEPITLLQQTTSGLAHLHSLNIVHRDLKPHNILISMPNAHGKIKAMISDFGLCKKLAVGRHSFSRRSGVPGTEGWIAPEMLSEDCKENPTYTVDIFSAGCVFYYVISEGSHPFGKSLQRQANILLGACSLDCLHPEKHEDVIARELIEKMIAMDPQKRPSAKHVLKHPFFWSLEKQLQFFQDVSDRIEKESLDGPIVKQLERGGRAVVKMDWRENITDPLQTDLRKFRTYKGGSVRDLLRAMRNKKHHYRELPAEVRETLGTLPDDFVCYFTSRFPHLLAHTYRAMELCSHERLFQPYYFHEPPEPQPPVTPDAL

SEQ ID NO: 839260 - protein, 225 aa, Homo sapiens
PARRLGHRLAVVAAPPAVLCPYRPRSQGRVLAMPARRLLLLLTLLLPGLGVSDRGAWGGGQLATAGSGPGQRRGAGAGVRAGSATAAARCPVSPAVGGSGRAEEAAPGRESFPDGSRGPTEASAARRASQASAAVTGSGSPDPAGSGATSWRPARHLGVPEGPGLRRPPTCGTLLLAGGRRRCLAGAAEEPKGRWDPGEGSVLRFESLFELFKNSKTLGNECNRE

SEQ ID NO: 839261 - protein, 225 aa, Homo sapiens; identical to SEQ ID NO: 839260

SEQ ID NO: 839262 - protein, 127 aa, Homo sapiens
LVNFFFSFFFFLKKLPFTIPELVQASPCRSSDGILYMGKKQDIWYVIDLLTGEKQQTLSSAFADSLCPSTSLLYLGRTEYTITMYDTKTRELRWNATYFDYAASLPEDDVDYSKCSLLDFTSLGQYF

SEQ ID NO: 839263 - protein, 466 aa, Homo sapiens
PARRLGHRLAVVAAPPAVLCPYRPRSQGRVLAMPARRLLLLLTLLLPGLGIFGSTSTVTLPETLLFVSTLDGSLHAVSKRTGSIKWTLKEDPVLQVPTHVEEPAFLPDPNDGSLYTLGSKNNEGLTKLPFTIPELVQASPCRSSDGILYMGKKQDIWYVIDLLTGEKQQTLSSAFADSLCPSTSLLYLGRTEYTITMYDTKTRELRWNATYFDYAASLPEDDVDYKMSHFVSNGDGLVVTVDSESGDVLWIQNYASPVVAFYVWQREGLRKVMHINVAVETLRYLTFMSGEVGRITKWKYPFPKETEAKSKLTPTLYVGKYSTSLYASPSMVHEGVAVVPRGSTLPLLEGPQTDGVTIGDKGECVITPSTDVKFDPGLKSKNKLNYLRNYWLLIGHHETPLSASTKMLERFPNNLPKHRENVIPADSEKKSFEETLLQMTSVFSWILNLPSKEEVFAFLRIFEKNM

SEQ ID NO: 839264 - protein, 205 aa, Homo sapiens
QRDIITVCNDPYTLAQQLTHIELERLNYIGPEEFVQAFVQKDPLDNDKSCYSERKKTRNLEAYVEWFNRLSYLVATEICMPVKKKHRARMIEYFIDVARECFNIGNFNSLMAIISGMNMSPVSRLKKTWAKVKTAKFDILEVCEADVLLLSNTLHLESGIPLCGLASPSDYDRGKSPSIFTDPGKGKWVELEGKINQVMYWLLYR

SEQ ID NO: 839265 - protein, 246 aa, Homo sapiens
QRDIITVCNDPYTLAQQLTHIELERLNYIGPEEFVQAFVQKDPLDNDKSCYSERKKTRNLEAYVEWFNRLSYLVATEICMPVKKKHRARMIEYFIDVARECFNIGNFNSLMAIISGMNMSPVSRLKKTWAKVKTAKFDILEHQMDPSSNFYNYRTALRGAAQRSLTAHSSREKIVIPFFSLLIKDIYFLNEGCANRLPNGHVNFEKFWELAKQVSEFMTWKQVECPFERDRKILQYLLTVPVFSED

SEQ ID NO: 839266 - protein, 40 aa, Homo sapiens
MALEQGSLHLPVKGGWGEWEEHQEVSAVATGCFDDRPGRF

SEQ ID NO: 839267 - protein, 96 aa, Homo sapiens
HRATGARSNATVPRACLQPSLSFLSVTSFYDLEMTITPFLAPNQPEATSSGCYRLRRLLWATAPAQKHRQATQQLLERMRFAHPGPGAVRGDSHDP

SEQ ID NO: 839268 - protein, 96 aa, Homo sapiens; identical to SEQ ID NO: 839267

SEQ ID NO: 839269 - protein, 96 aa, Homo sapiens; identical to SEQ ID NO: 839267

SEQ ID NO: 839270 - protein, 369 aa, Homo sapiens
LDPRVRAPQEPKPGSKSAPHVEAPPQPPELAADKKGREREREESSEARGPSAMRRASRDYTKYLRGSEEMGGGPGAPHEGPLHAPPPPAPHQPPAASRSMFVALLGLGLGQVVCSVALFFYFRAQMDPNRISEDGTHCIYRILRLHENADFQDTTLESQDTKLIPDSCRRIKQAFQGAVQKELQHIVGSQHIRAEKAMVDGSWLDLAKRSKLEAQPFAHLTINATDIPSGSHKVSLSSWYHDRGWAKISNMTFSNGKLIVNQDGFYYLYANICFRHHETSGDLATEYLQLMVYVTKTSIKIPSSHTLMKGGSTKYWSGNSEFHFYSINVGGFFKLRSGEEISIEVSNPSLLDPDQDATYFGAFKVRDID

SEQ ID NO: 839271 - protein, 244 aa, Homo sapiens
MDPNRISEDGTHCIYRILRLHENADFQDTTLESQDTKLIPDSCRRIKQAFQGAVQKELQHIVGSQHIRAEKAMVDGSWLDLAKRSKLEAQPFAHLTINATDIPSGSHKVSLSSWYHDRGWAKISNMTFSNGKLIVNQDGFYYLYANICFRHHETSGDLATEYLQLMVYVTKTSIKIPSSHTLMKGGSTKYWSGNSEFHFYSINVGGFFKLRSGEEISIEVSNPSLLDPDQDATYFGAFKVRDID

SEQ ID NO: 839272 - protein, 188 aa, Homo sapiens
LDPRVRAPQEPKPGSKSAPHVEAPPQPPELAADKKGREREREESSEARGPSAMRRASRDYTKYLRGSEEMGGGPGAPHEGPLHAPPPPAPHQPPAASRSMFVALLGLGLGQVVCSVALFFYFRAQMDPNRISEDGTHCIYRILRLHENADFQDTTLESQDTKLIPDSCRRIKQAFQGAVQKRWWMAHG

SEQ ID NO: 839273 - protein, 121 aa, Homo sapiens
CLSFPQGLRSGLAVDGRLSSLKAVAAFRPHHLYHYFLSDMFKLFLHYIYPSSQGKVPIVLDEWMICHCHDGHTDTNQRNRLGVGLTPVIPALWEAEEGGLPEPRSSRPAWATWRDPVSTKN

SEQ ID NO: 839274 - protein, 117 aa, Homo sapiens
MSSNVPADMINLRLILVSGKTKEFLFSPNDSASDIAKHVYDNWPMDWEEEQVSSPNILRLIYQGRFLHGNVTLGALKLPFGKTTVMHLVARETLPEPNSQGQRNREKTGESNCCVIL

SEQ ID NO: 839275 - protein, 117 aa, Homo sapiens; identical to SEQ ID NO: 839274

SEQ ID NO: 839276 - protein, 117 aa, Homo sapiens; identical to SEQ ID NO: 839274

SEQ ID NO: 839277 - protein, 117 aa, Homo sapiens; identical to SEQ ID NO: 839274

SEQ ID NO: 839278 - protein, 117 aa, Homo sapiens; identical to SEQ ID NO: 839274

SEQ ID NO: 839279 - protein, 117 aa, Homo sapiens; identical to SEQ ID NO: 839274

SEQ ID NO: 839280 - protein, 117 aa, Homo sapiens; identical to SEQ ID NO: 839274

SEQ ID NO: 839281 - protein, 117 aa, Homo sapiens; identical to SEQ ID NO: 839274

SEQ ID NO: 839282 - protein, 210 aa, Homo sapiens
MFESFNVPGLYIAVQAVLALAASWTSRQVGERTLTGIVIDSGDGVTHVIPVAEGYVIGSCIKHIPIAGRDITYFIQQLLREREVGIPPEQSLETAKAIKEKYCYICPDIVKEFAKYDVDPQKWIKQYTGINAINQKKFVIDVGYERFLGPEIFFHPEFANPDSMESISDVVDEVIQNCPIDVRRPLYKMEQIPLSYPQGHGFHPLSPPFH

SEQ ID NO: 839283 - protein, 210 aa, Homo sapiens; identical to SEQ ID NO: 839282

SEQ ID NO: 839284 - protein, 154 aa, Homo sapiens
LLSSKPTNDGTCIEIGYVKYSIFQLVMQYLYYGGPESLLIKNNEIMELLSAAKFFQLEALQRHCEIICAKSINTDNCVDIYNHAKFLGVTELSAYCEGYFLKNMMVLIENEAFKQLLYDKNGEGTGQDVLQDLQRTLAIRIQSIHLSSSKGSVV

SEQ ID NO: 839285 - protein, 154 aa, Homo sapiens; identical to SEQ ID NO: 839284

SEQ ID NO: 839286 - protein, 1146 aa, Homo sapiens
MCFIKVIKQVILLFLVLVTYLHIYLGGVMFFLKGTPVTPVTPANVVQGLPDPWVSQITNTDTLAAVAQILQSPQGQQLQQLIQTLQIQQQKPQPSILQALDAGLVVQLQALTAQLTAAAAAANTLTPLEQGVSFNKKLMDRFDFGEDSEHSEEPKKEIPASQLSHVSESVNNSIFHQIAEQLQQQNLEHLRQQLLEQQQPQKATPQDSQEGTFGSEHSASPSQGSSQQHFLEPEVNLDDSIDIQQQDMDIDEGQDGVEEEVFEQEAKKVAVRSRSRTHSRSRSRSPRKRRSRSRSGSRKRKHRKRSRSRSRERKRKSSRSYSSERRAREREKERQKKGLPPIRSKTLSVCSTTLWVGQVDKKATQQDLTNLFEEFGQIESINMIPPRGCAYVCMVHRQDAFRALQKLSSGSYKIGSKVIKIAWALNKGVKTEYKQFWDVDLGVTYIPWEKVKVDDLEGFAEGGMIDQETVNTEWETVKSSEPVKETVQTTQSPTPVEKETVVTTQAEVFPPPVAMLQIPVAPAVPTVSLVPPAFPVSMPVPPPGFSPIPPPPFLRASFNPSQPPPGFMPPPVPPPVVPPPTIPPVVPTSLVQPSLSMTPETVKDVGFGSLVIPGGSVASNLATSALPAGNVFNAPTKQAEPEEKVPHLIDHQISSGENTRSVIPNDISSNAAILGGQPPNVTSNSGILGVQRPNVSSNSEILGVRPSNVSSSSGIIAAQPPNILNNSGILGIQPPSVSNSSGLLGVLPPNIPNNSGLVGVQPPNVPNTPGLLGTQPPAGPQNLPPLSIPNQRMPTMPMLDIRPGLIPQAPGPRFPLIQPGIPPQRGIPPPSVLDSALHPPPRGPFPPGDIFSQPERPFLAPGRQSVDNVTNPEKRIPLGNDNIQQEGDRDYRFPPIETRESISRPPPVDVRDVVGRPIDPREGPGRPPLDGRDHFGRPPVDIRENLVRPGIDHLGRRDHFGFNPEKPWGHRGDFDEREHRVLPVYGGPKGLHEERGRFRSGNYRFDPRSGPWNRGFGQEVHRDFDDRRRPWERQRDRDDRDFDFCREMNGNRLGRDRIQNTWVPPPHARVFDYFEGATSQRKGDNVPQVNGENTERHAQPPPIPVQNDPELYEKLTSSNEINKEKSDTVADIESEPVVESTETEGT

SEQ ID NO: 839287 - protein, 1432 aa, Homo sapiens
MEAVKTFNSELYSLNDYKPPISKAKMTQITKAAIKAIKFYKHVVQSVEKFIQKCKPEYKVPGLYVIDSIVRQSRHQFGQEKDVFAPRFSNNIISTFQNLYRCPGDDKSKIVRVLNLWQKNNVFKSEIIQPLLDMAAGIPPPVVTPVLASTTTAMSNTPGTPVTPVTPANVVQGLPDPWVSQITNTDTLAAVAQILQSPQGQQLQQLIQTLQIQQQKPQPSILQALDAGLVVQLQALTAQLTAAAAAANTLTPLEQGVSFNKKLMDRFDFGEDSEHSEEPKKEIPASQLSHVSESVNNSIFHQIAEQLQQQNLEHLRQQLLEQQQPQKATPQDSQEGTFGSEHSASPSQGSSQQHFLEPEVNLDDSIDIQQQVKVNVFLGHKFLKVAKEIIKYFIQQCPEYIFPTLKLHFVIVSPIEAKLVQGLSMAPRPSTWPRTALNAAQHKFVNFLKKYEICFCDFFFFLSLSAVISVSIFYVWPKTLLLLMGPREAKRLDTPVLGINAPIVNIFKNRIVNVELCLNQPFCLFAVLLTFKDMDIDEGQDGVEEEVFEQEAKKVAVRSRSRTHSRSRSRSPRKRRSRSRSGSRKRKHRKRSRSRSRERKRKSSRSYSSERRAREREKERQKKGLPPIRSKTLSVCSTTLWVGQVDKKATQQDLTNLFEEFGQIESINMIPPRGCAYVCMVHRQDAFRALQKLSSGSYKIGSKVIKIAWALNKGVKTEYKQFWDVDLGVTYIPWEKVKVDDLEGFAEGGMIDQETVNTEWETVKSSEPVKETVQTTQSPTPVEKETVVTTQAEVFPPPVAMLQIPVAPAVPTVSLVPPAFPVSMPVPPPGFSPIPPPPFLRASFNPSQPPPGFMPPPVPPPVVPPPTIPPVVPTSLVQPSLSMTPETVKDVGFGSLVIPGGSVASNLATSALPAGNVFNAPTKQAEPEEKVPHLIDHQISSGENTRSVIPNDISSNAAILGGQPPNVTSNSGILGVQRPNVSSNSEILGVRPSNVSSSSGIIAAQPPNILNNSGILGIQPPSVSNSSGLLGVLPPNIPNNSGLVGVQPPNVPNTPGLLGTQPPAGPQNLPPLSIPNQRMPTMPMLDIRPGLIPQAPGPRFPLIQPGIPPQRGIPPPSVLDSALHPPPRGPFPPGDIFSQPERPFLAPGRQSVDNVTNPEKRIPLGNDNIQQEGDRDYRFPPIETRESISRPPPVDVRDVVGRPIDPREGPGRPPLDGRDHFGRPPVDIRENLVRPGIDHLGRRDHFGFNPEKPWGHRGDFDEREHRVLPVYGGPKGLHEERGRFRSGNYRFDPRSGPWNRGFGQEVHRDFDDRRRPWERQRDRDDRDFDFCREMNGNRLGRDRIQNTWVPPPHARVFDYFEGATSQRKGDNVPQVNGENTERHAQPPPIPVQNDPELYEKLTSSNEINKEKSDTVADIESEPVVESTETEGT

SEQ ID NO: 839288 - protein, 632 aa, Homo sapiens
MLQIPVAPAVPTVSLVPPAFPVSMPVPPPGFSPIPPPPFLRASFNPSQPPPGFMPPPVPPPVVPPPTIPPVVPTSLVQPSLSMTPETVKDVGFGSLVIPGGSVASNLATSALPAGNVFNAPTKQAEPEEKVPHLIDHQISSGENTRSVIPNDISSNAAILGGQPPNVTSNSGILGVQRPNVSSNSEILGVRPSNVSSSSGIIAAQPPNILNNSGILGIQPPSVSNSSGLLGVLPPNIPNNSGLVGVQPPNVPNTPGLLGTQPPAGPQNLPPLSIPNQRMPTMPMLDIRPGLIPQAPGPRFPLIQPGIPPQRGIPPPSVLDSALHPPPRGPFPPGDIFSQPERPFLAPGRQSVDNVTNPEKRIPLGNDNIQQEGDRDYRFPPIETRESISRPPPVDVRDVVGRPIDPREGPGRPPLDGRDHFGRPPVDIRENLVRPGIDHLGRRDHFGFNPEKPWGHRGDFDEREHRVLPVYGGPKGLHEERGRFRSGNYRFDPRSGPWNRGFGQEVHRDFDDRRRPWERQRDRDDRDFDFCREMNGNRLGRDRIQNTWVPPPHARVFDYFEGATSQRKGDNVPQVNGENTERHAQPPPIPVQNDPELYEKLTSSNEINKEKSDTVADIESEPVVESTETEGT

SEQ ID NO: 839289 - protein, 1271 aa, Homo sapiens
MEAVKTFNSELYSLNDYKPPISKAKMTQITKAAIKAIKFYKHVVQSVEKFIQKCKPEYKVPGLYVIDSIVRQSRHQFGQEKDVFAPRFSNNIISTFQNLYRCPGDDKSKIVRVLNLWQKNNVFKSEIIQPLLDMAAGIPPPVVTPVLASTTTAMSNTPGTPVTPVTPANVVQGLPDPWVSQITNTDTLAAVAQILQSPQGQQLQQLIQTLQIQQQKPQPSILQALDAGLVVQLQALTAQLTAAAAAANTLTPLEQGVSFNKKLMDRFDFGEDSEHSEEPKKEIPASQLSHVSESVNNSIFHQIAEQLQQQNLEHLRQQLLEQQQPQKATPQDSQEGTFGSEHSASPSQGSSQQHFLEPEVNLDDSIDIQQQDMDIDEGQDGVEEEVFEQEAKKVAVRSRSRTHSRSRSRSPRKRRSRSRSGSRKRKHRKRSRSRSRERKRKSSRSYSSERRAREREKERQKKGLPPIRSKTLSVCSTTLWVGQVDKKATQQDLTNLFEEFGQIESINMIPPRGCAYVCMVHRQDAFRALQKLSSGSYKIGSKVIKIAWALNKGVKTEYKQFWDVDLGVTYIPWEKVKVDDLEGFAEGGMIDQETVNTEWETVKSSEPVKETVQTTQSPTPVEKETVVTTQAEVFPPPVAMLQIPVAPAVPTVSLVPPAFPVSMPVPPPGFSPIPPPPFLRASFNPSQPPPGFMPPPVPPPVVPPPTIPPVVPTSLVQPSLSMTPETVKDVGFGSLVIPGGSVASNLATSALPAGNVFNAPTKQAEPEEKVPHLIDHQISSGENTRSVIPNDISSNAAILGGQPPNVTSNSGILGVQRPNVSSNSEILGVRPSNVSSSSGIIAAQPPNILNNSGILGIQPPSVSNSSGLLGVLPPNIPNNSGLVGVQPPNVPNTPGLLGTQPPAGPQNLPPLSIPNQRMPTMPMLDIRPGLIPQAPGPRFPLIQPGIPPQRGIPPPSVLDSALHPPPRGPFPPGDIFSQPERPFLAPGRQSVDNVTNPEKRIPLGNDNIQQEGDRDYRFPPIETRESISRPPPVDVRDVVGRPIDPREGPGRPPLDGRDHFGRPPVDIRENLVRPGIDHLGRRDHFGFNPEKPWGHRGDFDEREHRVLPVYGGPKGLHEERGRFRSGNYRFDPRSGPWNRGFGQEVHRDFDDRRRPWERQRDRDDRDFDFCREMNGNRLGRDRIQNTWVPPPHARVFDYFEGATSQRKGDNVPQVNGENTERHAQPPPIPVQNDPELYEKLTSSNEINKEKSDTVADIESEPVVESTETEGT

SEQ ID NO: 839290 - protein, 1190 aa, Homo sapiens
MEAVKTFNSELYSLNDYKPPISKAKMTQITKAAIKAIKFYKHVVQSVEKFIQKCKPEYKVPGLYVIDSIVRQSRHQFGQEKDVFAPRFSNNIISTFQNLYRCPGDDKSKIVRVLNLWQKNNVFKSEIIQPLLDMAAGIPPPVVTPVLASTTTAMSNTPGTPVTPVTPANVVQGLPDPWVSQITNTDTLAAVAQILQSPQGQQLQQLIQTLQIQQQKPQPSILQALDAGLVVQLQALTAQLTAAAAAANTLTPLEQGVSFNKKLMDRFDFGEDSEHSEEPKKEIPASQLSHVSESVNNSIFHQIAEQLQQQNLEHLRQQLLEQQQPQKATPQDSQEGTFGSEHSASPSQGSSQQHFLEPEVNLDDSIDIQQQDMDIDEGQDGVEEEVFEQEAKKVAVRSRSRTHSRSRSRSPRKRRSRSRSGSRKRKHRKRSRSRSRERKRKSSRSYSSERRAREREKERQKKGLPPIRSKTLSVCSTTLWVGQVDKKATQQDLTNLFEEFGQIESINMIPPRGCAYVCMVHRQDAFRALQKLSSGSYKIGSKVIKIAWALNKGVKTEYKQFWDVDLGVTYIPWEKVKVDDLEGFAEGGMIDQETVNTEWETVKSSEPVKETVQTTQSPTPVEKETVVTTQAEVFPPPVAMLQIPVAPAVPTVSLVPPAFPVSMPVPPPGFSPIPPPPFLRASFNPSQPPPGFMPPPVPPPVVPPPTIPPVVPTSLVQPSLSMTPETVKDVGFGSLVIPGGSVASNLATSALPAGNVFNAPTKQAEPEEKVPHLIDHQISSGENTRSVIPNDISSNAAILGGQPPNVTSNSGILGVQRPNVSSNSQNLPPLSIPNQRMPTMPMLDIRPGLIPQAPGPRFPLIQPGIPPQRGIPPPSVLDSALHPPPRGPFPPGDIFSQPERPFLAPGRQSVDNVTNPEKRIPLGNDNIQQEGDRDYRFPPIETRESISRPPPVDVRDVVGRPIDPREGPGRPPLDGRDHFGRPPVDIRENLVRPGIDHLGRRDHFGFNPEKPWGHRGDFDEREHRVLPVYGGPKGLHEERGRFRSGNYRFDPRSGPWNRGFGQEVHRDFDDRRRPWERQRDRDDRDFDFCREMNGNRLGRDRIQNTWVPPPHARVFDYFEGATSQRKGDNVPQVNGENTERHAQPPPIPVQNDPELYEKLTSSNEINKEKSDTVADIESEPVVESTETEGT

SEQ ID NO: 839291 - protein, 1253 aa, Homo sapiens
MEAVKTFNSELYSLNDYKPPISKAKMTQITKAAIKAIKFYKHVVQSVEKFIQKCKPEYKVPGLYVIDSIVRQSRHQFGQEKDVFAPRFSNNIISTFQNLYRCPGDDKSKIVRVLNLWQKNNVFKSEIIQPLLDMAAGIPPPVVTPVLASTTTAMSNTPGTPVTPVTPANVVQGLPDPWVSQITNTDTLAAVAQILQSPQGQQLQQLIQTLQIQQQKPQPSILQALDAGLVVQLQALTAQLTAAAAAANTLTPLEQGVSFNKKLMDRFDFGEDSEHSEEPKKEIPASQLSHVSESVNNSIFHQIAEQLQQQNLEHLRQQLLEQQQPQKATPQDSQEGTFGSEHSASPSQGSSQQHFLEPEVNLDDSIDIQQQDMDIDEGQDGVEEEVFEQEAKKVAVRSRSRTHSRSRSRSPRKRRSRSRSGSRKRKHRKRSRSRSRERKRKSSRSYSSERRAREREKERQKKGLPPIRSKTLSVCSTTLWVGQVDKKATQQDLTNLFEEFGQIESINMIPPRGCAYVCMVHRQDAFRALQKLSSGSYKIGSKVIKIAWALNKGVKTEYKQFWDVDLGVTYIPWEKVKVDDLEGFAEGGMIDQETVNTEWETVKSSEPVKETVQTTQSPTPVEKETVVTTQAEVFPPPVAMLQIPVAPAVPTVSLVPPAFPVSMPVPPPGFSPIPPPPFLRASFNPSQPPPGFMPPPVPPPVVPPPTIPPVVPTSLVQPSLSMTPETVKDVGFGSLVIPGGSVASNLATSALPAGNVFNAPTKQAEPEEKVPHLIDHQISSGENTRSVIPNDISSNAAILGGQPPNVTSNSGILGVQRPNVSSNSEILGVRPSNVSSSSGIIAAQPPNILNNSGILGIQPPSVSNSSGLLGVLPPNIPNNSGLVGVQPPNVPNTPGLLGTQPPAGPQNLPPLSIPNQRMPTMPMLDIRPGLIPQAPGPRFPLIQPGIPPQRGIPPPSVLDSALHPPPRGPFPPGDIFSQPERPFLAPGRQSVDNVTNPEKRIPLGNDNIQQEGDRDYRFPPIETRESISRPPPVDVRDVVGRPIDPREGPGRPPLDGRDHFGRPPVDIRENLVRPGIDHLGRRDHFGFNPEKPWGHRGDFDEREHRVLPVYGGPPRSGPWNRGFGQEVHRDFDDRRRPWERQRDRDDRDFDFCREMNGNRLGRDRIQNTWVPPPHARVFDYFEGATSQRKGDNVPQVNGENTERHAQPPPIPVQNDPELYEKLTSSNEINKEKSDTVADIESEPVVESTETEGT

SEQ ID NO: 839292 - protein, 1070 aa, Homo sapiens
MEAVKTFNSELYSLNDYKPPISKAKMTQITKAAIKAIKFYKHVVQSVEKFIQKCKPEYKVPGLYVIDSIVRQSRHQFGQEKDVFAPRFSNNIISTFQNLYRCPGDDKSKIVRVLNLWQKNNVFKSEIIQPLLDMAAGIPPPVVTPVLASTTTAMSNTPGTPVTPVTPANVVQGLPDPWVSQITNTDTLAAVAQILQSPQGQQLQQLIQTLQIQQQKPQPSILQALDAGLVVQLQALTAQLTAAAAAANTLTPLEQGVSFNKKLMDRFDFGEDSEHSEEPKKEIPASQLSHVSESVNNSIFHQIAEQLQQQNLEHLRQQLLEQQQPQKATPQDSQEGTFGSEHSASPSQGSSQQHFLEPEVNLDDSIDIQQQDMDIDEGQDGVEEEVFEQEAKKVAVRSRSRTHSRSRSRSPRKRRSRSRSGSRKRKHRKRSRSRSRERKRKSSRSYSSERRAREREKERQKKGLPPIRSKTLSVCSTTLWVGQVDKKATQQDLTNLFEEFGQIESINMIPPRGCAYVCMVHRQDAFRALQKLSSGSYKIGSKVIKIAWALNKGVKTEYKQFWDVDLGVTYIPWEKVKVDDLEGFAEGGMIDQETVNTEWETVKSSEPVKETVQTTQSPTPVEKETVVTTQAEVFPPPVAMLQIPVAPAVPTVSLVPPAFPVSMPVPPPGFSPIPPPPFLRASFNPSQPPPGFMPPPVPPPVVPPPTIPPVVPTSLVQPSLSMTPETVKDVGFGSLVIPGGSVASNLATSALPAGNVFNAPTKQAEPEEKVPHLIDHQISSGENTRSVIPNDISSNAAILGGQPPNVTSNSGILGVQRPNVSSNSEILGVRPSNVSSSSGIIAAQPPNILNNSGILGIQPPSVSNSSGLLGVLPPNIPNNSGLVGVQPPNVPNTPGLLGTQPPAGPQNLPPLSIPNQRMPTMPMLDIRPGLIPQAPGPRFPLIQPGIPPQRGIPPPSVLDSALHPPPRGPFPPGDIFSQPERPFLAPGRQSVDNVTNPEKRIPLGNDNIQQEGDRDFHKLKQSRFFDENESPVDPQHGSKLADYNGDDGNVGEYEAGAAELAYMRTEDGRV

SEQ ID NO: 839293 - protein, 696 aa, Homo sapiens
MEAVKTFNSELYSLNDYKPPISKAKMTQITKAAIKAIKFYKHVVQSVEKFIQKCKPEYKVPGLYVIDSIVRQSRHQFGQEKDVFAPRFSNNIISTFQNLYRCPGDDKSKIVRVLNLWQKNNVFKSEIIQPLLDMAAGIPPPVVTPVLASTTTAMSNTPGTPVTPVTPANVVQGLPDPWVSQITNTDTLAAVAQILQSPQGQQLQQLIQTLQIQQQKPQPSILQALDAGLVVQLQALTAQLTAAAAAANTLTPLEQGVSFNKKLMDRFDFGEDSEHSEEPKKEIPASQLSHVSESVNNSIFHQIAEQLQQQNLEHLRQQLLEQQQPQKATPQDSQEGTFGSEHSASPSQGSSQQHFLEPEVNLDDSIDIQQQDMDIDEGQDGVEEEVFEQEAKKVAVRSRSRTHSRSRSRSPRKRRSRSRSGSRKRKHRKRSRSRSRERKRKSSRSYSSERRAREREKERQKKGLPPIRSKTLSVCSTTLWVGQVDKKATQQDLTNLFEEFGQIESINMIPPRGCAYVCMVHRQDAFRALQKLSSGSYKIGSKVIKIAWALNKGVKTEYKQFWDVDLGVTYIPWEKVKVDDLEGFAEGGMIDQETVNTEWETVKSSEPVKETVQTTQSPTPVEKETVVTTQAEVFPPPVAMLQIPVAPAVPTVSLVPPAFPVSMPVPPPGFSPIPPPPFLRASFNPSQPPPGKEFLF

SEQ ID NO: 839294 - protein, 1271 aa, Homo sapiens; identical to SEQ ID NO: 839289

SEQ ID NO: 839295 - protein, 1271 aa, Homo sapiens; identical to SEQ ID NO: 839289

SEQ ID NO: 839296 - protein, 899 aa, Homo sapiens [sequence omitted]

SEQ ID NO: 839297 - protein, 1271 aa, Homo sapiens; identical to SEQ ID NO: 839289

SEQ ID NO: 839298 - protein, 1271 aa, Homo sapiens; identical to SEQ ID NO: 839289

SEQ ID NO: 839299 - protein, 365 aa, Homo sapiens
RILRFNCALQWMPTMPMLDIRPGLIPQAPGPRFPLIQPGIPPQRGIPPPSVLDSALHPPPRGPFPPGDIFSQPERPFLAPGRQSVDNVTNPEKRIPLGNDNIQQEGDRDYRFPPIETRESISRPPPVDVRDVVGRPIDPREGPGRPPLDGRDHFGRPPVDIRENLVRPGIDHLGRRDHFGFNPEKPWGHRGDFDEREHRVLPVYGGPKGLHEERGRFRSGNYRFDPRSGPWNRGFGQEVHRDFDDRRRPWERQRDRDDRDFDFCREMNGNRLGRDRIQNTWVPPPHARVFDYFEGATSQRKGDNVPQVNGENTERHAQPPPIPVQNDPELYEKLTSSNEINKEKSDTVADIESEPVVESTETEGT

SEQ ID NO: 839300 - protein, 788 aa, Homo sapiens
MEAVKTFNSELYSLNDYKPPISKAKMTQITKAAIKAIKFYKHVVQSVEKFIQKCKPEYKVPGLYVIDSIVRQSRHQFGQEKDVFAPRFSNNIISTFQNLYRCPGDDKSKIVRVLNLWQKNNVFKSEIIQPLLDMAAGIPPPVVTPVLASTTTAMSNTPGTPVTPVTPANVVQGLPDPWVSQITNTDTLAAVAQILQSPQGQQLQQLIQTLQIQQQKPQPSILQALDAGLVVQLQALTAQLTAAAAAANTLTPLEQGVSFNKKLMDRFDFGEDSEHSEEPKKEIPASQLSHVSESVNNSIFHQIAEQLQQQNLEHLRQQLLEQQQPQKATPQDSQEGTFGSEHSASPSQGSSQQHFLEPEVNLDDSIDIQQQDMDIDEGQDGVEEEVFEQEAKKVAVRSRSRTHSRSRSRSPRKRRSRSRSGSRKRKHRKRSRSRSRERKRKSSRSYSSERRAREREKERQKKGLPPIRSKTLSVCSTTLWVGQVDKKATQQDLTNLFEEFGQIESINMIPPRGCAYVCMVHRQDAFRALQKLSSGSYKIGSKVIKIAWALNKGVKTEYKQFWDVDLGVTYIPWEKVKVDDLEGFAEGGMIDQETVNTEWETVKSSEPVKETVQTTQSPTPVEKETVVTTQAEVFPPPVAMLQIPVAPAVPTVSLVPPAFPVSMPVPPPGFSPIPPPPFLRASFNPSQPPPGFMPPPVPPPVVPPPTIPPVVPTSLVQPSLSMTPETVKDVGFGSLVIPGGSVASNLATSALPAGNVFNAPTKQAEPEEKVPHLIDHQISSGENTRSGK

SEQ ID NO: 839301 - protein, 71 aa, Homo sapiens
  misc_feature (2)..(2): Xaa can be any naturally occurring amino acid
  misc_feature (4)..(4): Xaa can be any naturally occurring amino acid
  misc_feature (25)..(25): Xaa can be any naturally occurring amino acid
SXYXSVVSDGRRILRAPWKTLEIAXIHPLTPSEHSARGSPYWCRRSGQVATLPTAPPSDADSGLLFDHVGF

SEQ ID NO: 839302 - protein, 110 aa, Homo sapiens
PLWAQHPHNCTSPPFLFLLRWLTQKGARQKKINEWLGIKNETEDQYALMEDECFLEMLSISMLAYCLRVLQLWVHSLICMIKMNWPFSTSKLLTDTTIFDRIPRVNCLCY

SEQ ID NO: 839303 - protein, 728 aa, Homo sapiens
MAGPEGFQYRALYPFRRERPEDLELLPGDVLVVSRAALQALGVAEGGERCPQSVGWMPGLNERTRQRGDFPGTYVEFLGPVALARPGPRPRGPRPLPARPRDGAPEPGLTLPDLPEQFSPPDVAPPLLVKLVEAIERTGLDSESHYRPELPAPRTDWSLSDVDQWDTAALADGIKSFLLALPAPLVTPEASAEARRALREAAGPVGPALEPPTLPLHRALTLRFLLQHLGRVARRAPALGPAVRALGATFGPLLLRAPPPPSSPPPGGAPDGSEPSPDFPALLVEKLLQEHLEEQEVAPPALPPKPPKAKPAPTVLANGGSPPSLQDAEWYWGDISREEVNEKLRDTPDGTFLVRDASSKIQGEYTLTLRKGGNNKLIKVFHRDGHYGFSEPLTFCSVVDLINHYRHESLAQYNAKLDTRLLYPVSKYQQDQIVKEDSVEAVGAQLKVYHQQYQDKSREYDQLYEEYTRTSQELQMKRTAIEAFNETIKIFEEQGQTQEKCSKEYLERFRREGNEKEMQRILLNSERLKSRIAEIHESRTKLEQQLRAQASDNREIDKRMNSLKPDLMQLRKIRDQYLVWLTQKGARQKKINEWLGIKNETEDQYALMEDEDDLPHHEERTWYVGKINRTQAEEMLSGKRDGTFLIRESSQRGCYACSVVVDGDTKHCVIYRTATGFGFAEPYNLYGSLKELVLHYQHASLVQHNDALTVTLAHPVRAPGPGPPPAAR

SEQ ID NO: 839304 - protein, 653 aa, Homo sapiens
MAGPEGFQYRALYPFRRERPEDLELLPGDVLVVSRAALQALGVAEGGERCPQSVGWMPGLNERTRQRGDFPGTYVEFLGPVALARPGPRPRGPRPLPARPRDGAPEPGLTLPDLPEQFSPPDVAPPLLVKLVEAIERTGLDSESHYRPELPAPRTDWSLSDVDQWDTAALADGIKSFLLALPAAAPSSPPPGGAPDGSEPSPDFPALLVEKLLQEHLEEQEVAPPALPPKPPKAKPAPTVLANGGSPPSLQDAEWYWGDISREEVNEKLRDTPDGTFLVRDASSKIQGEYTLTLRKGGNNKLIKVFHRDGHYGFSEPLTFCSVVDLINHYRHESLAQYNAKLDTRLLYPVSKYQQDQIVKEDSVEAVGAQLKVYHQQYQDKSREYDQLYEEYTRTSQELQMKRTAIEAFNETIKIFEEQGQTQEKCSKEYLERFRREGNEKEMQRILLNSERLKSRIAEIHESRTKLEQQLRAQASDNREIDKRMNSLKPDLMQLRKIRDQYLVWLTQKGARQKKINEWLGIKNETEDQYALMEDEDDLPHHEERTWYVGKINRTQAEEMLSGKRDGTFLIRESSQRGCYACSVVVDGDTKHCVIYRTATGFGFAEPYNLYGSLKELVLHYQHASLVQHNDALTVTLAHPVRAPGPGPPPAAR

SEQ ID NO: 839305 - protein, 305 aa, Homo sapiens
IPPRIKQDQIVKEDSVEAVGAQLKVYHQQYQDKSREYDQLYEEYTRTSQELQMKRTAIEAFNETIKIFEEQGQTQEKCSKEYLERFRREGNEKEMQRILLNSERLKSRIAEIHESRTKLEQQLRAQASDNREIDKRMNSLKPDLMQLRKIRDQYLVWLTQKGARQKKINEWLGIKNETEDQYALMEDEDDLPHHEERTWYVGKINRTQAEEMLSGKRDGTFLIRESSQRGCYACSVVVDGDTKHCVIYRTATGFGFAEPYNLYGSLKELVLHYQHASLVQHNDALTVTLAHPVRAPGPGPPPAAR

SEQ ID NO: 839306 - protein, 728 aa, Homo sapiens; identical to SEQ ID NO: 839303

SEQ ID NO: 839307 - protein, 603 aa, Homo sapiens
MAGPEGFQYRALYPFRRERPEDLELLPGDVLVVSRAALQALGVAEGGERCPQSVGWMPGLNERTRQRGDFPGTYVEFLGPVALARPGPRPRGPRPLPARPRDGAPEPGLTLPDLPEQFSPPDVAPPLLVKLVEAIERTGLDSESHYRPELPAPRTDWSLSDVDQWDTAALADGIKSFLLALPAPLVTPEASAEARRALREAAGPVGPALEPPTLPLHRALTLRFLLQHLGRVARRAPALGPAVRALGATFGPLLLRAPPPPSSPPPGGAPDGSEPSPDFPALLVEKLLQEHLEEQEVAPPALPPKPPKAKPAPTVLANGGSPPSLQDAEWYWGDISREEVNEKLRDTPDGTFLVRDASSKIQGEYTLTLRKGGNNKLIKVFHRDGHYGFSEPLTFCSVVDLINHYRHESLAQYNAKLDTRLLYPVSKYQQDQIVKEDSVEAVGAQLKVYHQQYQDKSREYDQLYEEYTRTSQELQMKRTAIEAFNETIKIFEEQGQTQEKCSKEYLERFRREGNEKEMQRILLNSERLKSRIAEIHESRTKLEQQLRAQASDNREIDKRMNSLKPDLMQLRKIRDQYLVWLTQKGARQKKINEWLGIKNETEE

SEQ ID NO: 839308 - protein, 392 aa, Homo sapiens [sequence omitted]

SEQ ID NO: 839309 - protein, 728 aa, Homo sapiens; identical to SEQ ID NO: 839303

SEQ ID NO: 839310 - protein, 606 aa, Homo sapiens
RSGQHLRADSPVPFTPRLDSESHYRPELPAPRTDWSLSDVDQWDTAALADGIKSFLLALPAPLVTPEASAEARRALREAAGPVGPALEPPTLPLHRALTLRFLLQHLGRVARRAPALGPAVRALGATFGPLLLRAPPPPSSPPPGGAPDGSEPSPDFPALLVEKLLQEHLEEQEVAPPALPPKPPKAKPAPTVLANGGSPPSLQDAEWYWGDISREEVNEKLRDTPDGTFLVRDASSKIQGEYTLTLRKGGNNKLIKVFHRDGHYGFSEPLTFCSVVDLINHYRHESLAQYNAKLDTRLLYPVSKYQQDQIVKEDSVEAVGAQLKVYHQQYQDKSREYDQLYEEYTRTSQELQMKRTAIEAFNETIKIFEEQGQTQEKCSKEYLERFRREGNEKEMQRILLNSERLKSRIAEIHESRTKLEQQLRAQASDNREIDKRMNSLKPDLMQLRKIRDQYLVWLTQKGARQKKINEWLGIKNETEDQYALMEDEDDLPHHEERTWYVGKINRTQAEEMLSGKRDGTFLIRESSQRGCYACSVVVDGDTKHCVIYRTATGFGFAEPYNLYGSLKELVLHYQHASLVQHNDALTVTLAHPVRAPGPGPPPAAR

SEQ ID NO: 839311 - protein, 519 aa, Homo sapiens
MEHLLHTAMRELASHMCLYHLLLRPAHTVSYIPPGVQAHAQSCAHAWADRPYPALTTLPFPLRSEPSPDFPALLVEKLLQEHLEEQEVAPPALPPKPPKAKPAPTVLANGGSPPSLQDAEWYWGDISREEVNEKLRDTPDGTFLVRDASSKIQGEYTLTLRKGGNNKLIKVFHRDGHYGFSEPLTFCSVVDLINHYRHESLAQYNAKLDTRLLYPVSKYQQDQIVKEDSVEAVGAQLKVYHQQYQDKSREYDQLYEEYTRTSQELQMKRTAIEAFNETIKIFEEQGQTQEKCSKEYLERFRREGNEKEMQRILLNSERLKSRIAEIHESRTKLEQQLRAQASDNREIDKRMNSLKPDLMQLRKIRDQYLVWLTQKGARQKKINEWLGIKNETEDQYALMEDEDDLPHHEERTWYVGKINRTQAEEMLSGKRDGTFLIRESSQRGCYACSVVVDGDTKHCVIYRTATGFGFAEPYNLYGSLKELVLHYQHASLVQHNDALTVTLAHPVRAPGPGPPPAAR

SEQ ID NO: 839312 - protein, 689 aa, Homo sapiens
MAGPEGFQYRALYPFRRERPEDLELLPGDVLVVSRAALQALGVAEGGERCPQSVGWMPGLNERTRQRGDFPGTYVEFLGPVALARPGPRPRGPRPLPARPRDGAPEPGLTLPDLPEQFSPPDVAPPLLVKLVEAIERTGLDSESHYRPELPAPRTDWSLSDVDQWDTAALADGIKSFLLALPAPLVTPEASAEARRALREAAGPVGPALEPPTLPLHRALTLRFLLQHLGRVARRAPALGPAVRALGATFGPLLLRAPPPPSSPPPGGAPDGSEPSPDFPALLVEKLLQEHLEEQEVAPPALPPKPPKAKPAPTVLANGGSPPSLQDAEWYWGDISREEVNEKLRDTPDGTFLVRDASSKIQGEYTLTLRKGGNNKLIKVFHRDGHYGFSEPLTFCSVVDLINHYRHESLAQYNAKLDTRLLYPVSKYQQDQIVKEDSVEAVGAQLKVYHQQYQDKSREYDQLYEEYTRTSQELQMKRTAIEAFNETIKIFEEQGQTQEKCSKEYLERFRREGNEKEMQRILLNSERLKSRIAEIHESRTKLEQQLRAQASDNREIDKRMNSLKPDLMQLRKIRDQYLVWLTQKGARQKKINEWLGIKNETEDQYALMEDEDDLPHHEERTWYVGKINRTQAEEMLSGKRDGTFLIRESSQRGCYACSVVKLRHCPRPLPLMQIQGFSSIMLGFDSVFP

SEQ ID NO: 839313 - protein, 266 aa, Homo sapiens
IPPRIKQDQIVKEDSVEAVGAQLKVYHQQYQDKSREYDQLYEEYTRTSQELQMKRTAIEAFNETIKIFEEQGQTQEKCSKEYLERFRREGNEKEMQRILLNSERLKSRIAEIHESRTKLEQQLRAQASDNREIDKRMNSLKPDLMQLRKIRDQYLVWLTQKGARQKKINEWLGIKNETEDQYALMEDEDDLPHHEERTWYVGKINRTQAEEMLSGKRDGTFLIRESSQRGCYACSVVKLRHCPRPLPLMQIQGFSSIMLGFDSVFP

SEQ ID NO: 839314 - protein, 297 aa, Homo sapiens
RPERVLSGGAAPAQSGPADGGVKGTLRSRAPRPRYISMNNLNDPPNWNIRPNSRADGGDGSRWNYALLVPMLGLAAFRWIWSRESQKEVEKEREAYRRRTAAFQQDLEAKYHAMISENRRAVAQLSLELEKEQNRTASYREALISQGRKLVEEKKLLEQERAQVMQEKRQVQPLRSAYLSCLQREENWQRRARLLLKEFEAVLTERQNIYCSLFLPRSKRLEIEKSLLVRASVDPVAADLEMAAGLTDIFQHDTYCGDVWNTNKRQNGRLMWLYLKYWELVVELKKFKRVEEAILEK

SEQ ID NO: 839315 - protein, 297 aa, Homo sapiens; identical to SEQ ID NO: 839314

SEQ ID NO: 839316 - protein, 302 aa, Homo sapiens
MATQAYTELQAAPPPSQPPQAPPQAQPQPPPPPPPAAPQPPQPPTAAATPQPQYVTELQSPQPQAQPPGGQKQYVTELPAVPAPSQPTGAPTPSPAPQQYIVVTVSEGAMRASETVSEASPGSTASQTGVPTQVVQQVQGTQQRLLVQTSVQAKPGHVSPLQLTNIQVPQQALPTQRLVVQSAAPGSKGGQVSLTVHGTQQVHSPPEQSPVQANSSSSKTAGAPTGTVPQQLQVHGVQQSVPVTQERSVVQATPQAPKPGPVQPLTVQGLQPVHVAQEVCVSPSYPTGKGAGPGLGLGSAGP

SEQ ID NO: 839317 - protein, 211 aa, Homo sapiens
PISLLQPLPTRSSQRHTHEACSCTLAKSTLVEVAQHLVDLCGVLQQQNSLEQWAAWLDGVVSQVLKPYQGSAGFPKAAKLFLLKWSFYSSMVIRDLTLRSAASFGSFHLIRLLYDEYMYYLIEHRVAQAKGETPIAVMGEFANLATSLNPLDPDKDEEEEEEEESEDELPQDISLAAGGESPALGPETLEPPAKLARTDARGLFVQALPSS

SEQ ID NO: 839318 - protein, 979 aa, Homo sapiens
MATQAYTELQAAPPPSQPPQAPPQAQPQPPPPPPPAAPQPPQPPTAAATPQPQYVTELQSPQPQAQPPGGQKQYVTELPAVPAPSQPTGAPTPSPAPQQYIVVTVSEGAMRASETVSEASPGSTASQTGVPTQVVQQVQGTQQRLLVQTSVQAKPGHVSPLQLTNIQVPQQALPTQRLVVQSAAPGSKGGQVSLTVHGTQQVHSPPEQSPVQANSSSSKTAGAPTGTVPQQLQVHGVQQSVPVTQERSVVQATPQAPKPGPVQPLTVQGLQPVHVAQEVQQLQQVPVPHVYSSQVQYVEGGDASYTASAIRSSTYSYPETPLYTQTASTSYYEAAGTATQVSTPATSQAVASSGSMPMYVSGSQVVASSTSTGAGASNSSGGGGSGGGGGGGGGGGGGGSGSTGGGGSGAGTYVIQGGYMLGSASQSYSHTTRASPATVQWLLDNYETAEGVSLPRSTLYCHYLLHCQEQKLEPVNAASFGKLIRSVFMGLRTRRLGTRGNSKYHYYGLRIKASSPLLRLMEDQQHMAMRGQPFSQKQRLKPIQKMEGMTNGVAVGQQPSTGLSDISAQVQQYQQFLDASRSLPDFTELDLQGKVLPEGVGPGDIKAFQVLYREHCEAIVDVMVNLQFTLVETLWKTFWRYNLSQPSEAPPLAVHDEAEKRLPKAILVLLSKFEPVLQWTKHCDNVLYQGLVEILIPDVLRPIPSALTQAIRNFAKSLESWLTHAMVNIPEEMLRVKVAAAGAFAQTLRRYTSLNHLAQAARAVLQNTAQINQMLSDLNRVDFANVQEQASWVCRCEDRVVQRLEQDFKVTLQQQNSLEQWAAWLDGVVSQVLKPYQGSAGFPKAAKLFLLKWSFYSSMVIRDLTLRSAASFGSFHLIRLLYDEYMYYLIEHRVAQAKGETPIAVMGEFANLATSLNPLDPDKDEEEEEEEESEDELPQDISLAAGGESPALGPETLEPPAKLARTDARGLFVQALPSS

SEQ ID NO: 839319 - protein, 360 aa, Homo sapiens
STWLTHAMVNIFEEMLRVKVPVTQAIRNFAKSLESWLTHAMVNIPEEMLRVKVPVTQAIRNFAKSLESWLTHAMVNIPEEMLRVKGALTQAIRNFAKSLESWLTHAMVNIPEEMLRVKVAAAGAFAQTLRRYTSLNHLAQAARAVLQNTAQINQMLSDLNRVDFANVQEQASWVCRCEDRVVQRLEQDFKVTLQQQNSLEQWAAWLDGVVSQVLKPYQGSAGFPKAAKLFLLKWSFYSSMVIRDLTLRSAASFGSFHLIRLLYDEYMYYLIEHRVAQAKGETPIAVMGEFANLATSLNPLDPDKDEEEEEEEESEDELPQDISLAAGGESPALGPETLEPPAKLARTDARGLFVQALPSS

SEQ ID NO: 839320 - protein, 658 aa, Homo sapiens
MEKASGRQSIALSTVETGTVNPGLELMEKEVEPEGSKRTDAQGHSLGDGLGPSTYQRRSRWPFSKARSFCKTHASLFKKILLGLLCLAYAAYLLAACILNFQRALALFVITCLVIFVLVHSFLKKLLGKKLTRCLKPFENSRLRLWTKWVFAGVSLVGLILWLALDTAQRPEQLIPFAGICMFILILFACSKHHSAVSWRTVFSGLGLQFVFGILVIRTDLGYTVFQWLGEQVQIFLNYTVAGSSFVFGDTLVKDVFAFQALPIIIFFGCVVSILYYLGLVQWVVQKVAWFLQITMGTTATETLAVAGNIFVGMTEAPLLIRPYLGDMTLSEIHAVMTGGFATISGTVLGAFIAFGVDASSLISASVMAAPCALASSKLAYPEVEESKFKSEEGVKLPRGKERNVLEAASNGAVDAIGLATNVAANLIAFLAVLAFINAALSWLGELVDIQGLTFQVICSYLLRPMVFMMGVEWTDCPMVAEMVGIKFFINEFVAYQQLSQYKNKRLSGMEEWIEGEKQWISVRAEIITTFSLCGFANLSSIGITLGGLTSIVPHRKSDLSKVVVRALFTGACVSLISACMAGILYVPRGAEADCVSFPNTSFTNRTYETYMCCRGLFQSTSLNGTNPPSFSGPWEDKEFSAMALTNCCGFYNNTVCA

SEQ ID NO: 839321 - protein, 553 aa, Homo sapiens
MEKASGRQSIALSTVETGTVNPGLELMEKEVEPEGSKRTDAQGHSLGDGLGPSTYQRRSRWPFSKARSFCKTHASLFKKILLGLLCLAYAAYLLAACILNFQRALALFVITCLVIFVLVHSFLKKLLGKKLTRCLKPFENSRLEALDEMVSWRTVFSGLGLQFVFGILVIRTDLGYTVFQWLGEQVQIFLNYTVAGSSFVFGDTLVKDVFAFQALPIIIFFGCVVSILYYLGLVQWVVQKVSVFFQVAWFLQITMGTTATETLAVAGNIFVGMTEAPLLIRPYLGDMTLSEIHAVMTGGFATISGTVLGAFIAFGVDASSLISASVMAAPCALASSKLAYPEVEESKFKSEEGVKLPRGKERNVLEAASNGAVDAIGLATNVAANLIAFLAVLAFINAALSWLGELVDIQGLTFQVICSYLLRPMVFMMGVEWTDCPMVAEMVGIKFFINEFVAYQQLSQYKNKRLSGMEEWIEGEKQWISVRAEIITTFSLCGFANLSSIGITLGGLTSIVPHRKSDLSKVVVRALFTGACVSLISACMAGRCLSSDGDTAA

SEQ ID NO: 839322 - protein, 658 aa, Homo sapiens; identical to SEQ ID NO: 839320

SEQ ID NO: 839323 - protein, 110 aa, Homo sapiens
CSDTSLYRQKQRPREGRETFKVTQHLWKSQLHGWASWPQARSCPLPAFLLLYSSDTLSALGPGRDAALKEAHILKFFCLCPSRVLASGFLEGPRSGRSFSLLFVPAQTYM

SEQ ID NO: 839324 - protein, 815 aa, Homo sapiens
CVSAFPPFLLFVSRFAWEAVPGFQGSTGSLMANATRRESEVDQKFQGSVSFKDVTVGFTQEEWQHLDPSQRALYRDVMLENYSNLVSVGYCAHKPEVIFRLEQGEEPWRLEEEFPSQSFPEVWTADHLKERSQENQSKHLWEVVFINNEMLTKEQGNVIGIPFNMDVSSFPSRKMFCQYDSCGMSFNTVSELVISKINYLGKKSDEFNACGKLLLNIKHDETHTREKNEVLKNRNTLSHRENTLQHEKIQTLDHNFEYSICQETLLEKAVFNTRKRENAEENNCDYNEFGRTFCDSSSLLFHQIPPSKDSHYEFSDCEKFLCVKSTLSKHDGVPVKHYDCGESGNNFRRKLCLSQLQKGDKGEKHFECNECGKAFWEKSHLTRHQRVHTGEKHFQCNQCGKTFWEKSNLTKHQRSHTGEKPFECNECGKAFSHKSALTLHQRTHTGEKPYQCNACGKTFYQKSDLTKHQRTHTGQKPYECYECGKSFCMNSHLTVHQRTHTGEKPFECLECGKSFCQKSHLTQHQRTHIGDKPYECNACGKTFYHKSVLTRHQIIHTGLKPYECYECGKTFCLKSDLTIHQRTHTGEKPFACPECGKFFSHKSTLSQHYRTHTGEKPYECHECGKIFYNKSYLTKHNRTHTGEKPYECNECGKTFCQKSQLTQHQRIHIGEKPYECNECGKAFCHKSALIVHQRTHTQEKPYKCNECGKSFCVKSGLILHERKHTGEKPYECNECGKSFSHKSSLTVHHRAHTGEKSCQCNECGKIFYRKSDLAKHQRSHTGEKPYECNTCRKTFSQKSNLIVHQRTHIGEKPYE

SEQ ID NO: 839325 - protein, 131 aa, Homo sapiens [sequence omitted]

SEQ ID NO: 839326 - protein, 371 aa, Homo sapiens
TGEKPHKCEVCGMAFHHSSVLRQHKRTHTGQKPYECYECGKSFCMNSHLTVHQRTHTGEKPFECLECGKSFCQKSHLTQHQRTHIGDKPYECNACGKTFYHKSVLTRHQIIHTGLKPYECYECGKTFCLKSDLTIHQRTHTGEKPFACPECGKFFSHKSTLSQHYRTHTGEKPYECHECGKIFYNKSYLTKHNRTHTGEKPYECNECGKTFCQKSQLTQHQRIHIGEKPYECNECGKAFCHKSALIVHQRTHTQEKPYKCNECGKSFCVKSGLILHERKHTGEKPYECNECGKSFSHKSSLTVHHRAHTGEKSCQCNECGKIFYRKSDLAKHQRSHTGEKPYECNTCRKTFSQKSNLIVHQRTHIGEKPYE

SEQ ID NO: 839327 - protein, 116 aa, Homo sapiens
MNKVDQKFQGSVSFKDVTVGFTQEEWQHLDPSQRALYRDVMLENYSNLVSVGYCAHKPEVIFRLEQGEEPWRLEEEFPSQSFPGSSWLWWFPRLSLFWMTLTVWRNPGEKSGQLIT

SEQ ID NO: 839328 - protein, 116 aa, Homo sapiens; identical to SEQ ID NO: 839327

SEQ ID NO: 839329 - protein, 778 aa, Homo sapiens [sequence omitted]

SEQ ID NO: 839330 - protein, 804 aa, Homo sapiens
MNKVDQKFQGSVSFKDVTVGFTQEEWQHLDPSQRALYRDVMLENYSNLVSVGYCAHKPEVIFRLEQGEEPWRLEEEFPSQSFPGSSWLWWFPRLSLFWMTLTVWRNPGEEVWTADHLKERSQENQSKHLWEVVFINNEMLTKEQGNVIGIPFNMDVSSFPSRKMFCQYDSCGMSFNTVSELVISKINYLGKKSDEFNACGKLLLNIKHDETHTREKNEVLKNRNTLSHRENTLQHEKIQTLDHNFEYSICQETLLEKAVFNTRKRENAEENNCDYNEFGRTFCDSSSLLFHQIPPSKDSHYEFSDCEKFLCVKSTLSKHDGVPVKHYDCGESGNNFRRKLCLSQLQKGDKGEKHFECNECGKAFWEKSHLTRHQRVHTGEKHFQCNQCGKTFWEKSNLTKHQRSHTGEKPFECNECGKAFSHKSALTLHQRTHTGEKPYQCNACGKTFYQKSDLTKHQRTHTGQKPYECYECGKSFCMNSHLTVHQRTHTGEKPFECLECGKSFCQKSHLTQHQRTHIGDKPYECNACGKTFYHKSVLTRHQIIHTGLKPYECYECGKTFCLKSDLTIHQRTHTGEKPFACPECGKFFSHKSTLSQHYRTHTGEKPYECHECGKIFYNKSYLTKHNRTHTGEKPYECNECGKTFCQKSQLTQHQRIHIGEKPYECNECGKAFCHKSALIVHQRTHTQEKPYKCNECGKSFCVKSGLILHERKHTGEKPYECNECGKSFSHKSSLTVHHRAHTGEKSCQCNECGKIFYRKSDLAKHQRSHTGEKPYECNTCRKTFSQKSNLIVHQRTHIGEKPYE

SEQ ID NO: 839331 - protein, 778 aa, Homo sapiens [sequence omitted]

SEQ ID NO: 839332 - protein, 120 aa, Homo sapiens
MNKVDQKFQGSVSFKDVTVGFTQEEWQHLDPSQRALYRDVMLENYSNLVSVGYCAHKPEVIFRLEQGEEPWRLEEEFPSQSFPEVWTADHLKERSQENQSKHLWEVVFINNEMLTKEQGP

SEQ ID NO: 839333 - protein, 81 aa, Homo sapiens
HLKTAMSNMPAVFQRNLKGDRDRIRLIAKTHDRREHAQAIPVPHLLPPTPPSVPITCAQESAACRVTKTSGMFLHTLLLWL

SEQ ID NO: 839334 - protein, 103 aa, Homo sapiens
MTKGALSASVNSLLYKGRRRGTEWQHLASLGCCVKERCQAFLICHCRGKGVIYVGLFEGCIPSEVFHQTAIIHLDESLRNFRRRETSRPPGFWFLNDMKRILC

SEQ ID NO: 839335 - protein, 1498 aa, Homo sapiens
MKSEKVPSSPAEAEKGPSLLLKDMRQKTELQQIGKKIPSSFTSVDKVNIEAVGGEKCALQNSPRSQKQQTCTDNTGDSDDSASGIEDVSDDLSKMKNDESNKENSSEMDYLENATVIDESALTPEQRLGLKQAEERLERDHIFRLEKRSPEYTNCRYLCKLCLIHIENIQGAHKHIKEKRHKKNILEKQEESELRSLPPPSPAHLAALSVAVIELAKEHGITDDDLRVRQEIVEEMSKVITTFLPECSLRLYGSSLTRFALKSSDVNIDIKFPPKMNHPDLLIKVLGILKKNVLYVDVESDFHAKVPVVVCRDRKSGLLCRVSAGNDMACLTTDLLTALGKIEPVFIPLVLAFRYWAKLCYIDSQTDGGIPSYCFALMVMFFLQQRKPPLLPCLLGSWIEGFDPKRMDDFQLKGIVEEKFVKWECNSSSATEKNSIAEENKAKADQPKDDTKKTETDNQSNAMKEKHGKSPLALETPNRVSLGQLWLELLKFYTLDFALEEYVICVRIQDILTRENKNWPKRRIAIEDPFSVKRNVARSLNSQLVYEYVVERFRAAYRYFACPQTKGGNKSTVDFKKREKGKISNKKPVKSNNMATNGCILLGETTEKINAEREQPVQCDEMDCTSQRCIIDNNNLLVNELDFADHGQDSSSLSTSKSSEIEPKLDKKQDDLAPSETCLKKELSQCNCIDLSKSPDPDKSTGTDCRSNLETESSHQSVCTDTSATSCNCKATEDASDLNDDDNLPTQELYYVFDKFILTSGKPPTIVCSICKKDGHSKNDCPEDFRKIDLKPLPPMTNRFREILDLVCKRCFDELSPPCSEQHNREQILIGLEKFIQKEYDEKARLCLFGSSKNGFGFRDSDLDICMTLEGHENAEKLNCKEIIENLAKILKRHPGLRNILPITTAKVPIVKFEHRRSGLEGDISLYNTLAQHNTRMLATYAAIDPRVQYLGYTMKVFAKRCDIGDASRGSLSSYAYILMVLYFLQQRKPPVIPVLQEIFDGKQIPQRMVDGWNAFFFDKTEELKKRLPSLGKNTESLGELWLGLLRFYTEEFDFKEYVISIRQKKLLTTFEKQWTSKCIAIEDPFDLNHNLGAGVSRKMTNFIMKAFINGRKLFGTPFYPLIGREAEYFFDSRVLTDGELAPNDRCCRVCGKIGHYMKDCPKRKSSLLFRLKKKDSEEEKEGNEEEKDSRDVLDPRDLHDTRDFRDPRDLRCFICGDAGHVRRECPEVKLARQRNSSVAAAQLVRNLVNAQQVAGSAQQQGDQSIRTRQSSECSESPSYSPQPQPFPQNSSQSAAITQPSSQPGSQPKLGPPQQGAQPPHQVQMPLYNFPQSPPAQYSPMHNMGLLPMHPLQIPAPSWPIHGPVIHSAPGSAPSNIGLNDPSIIFAQPAARPVAIPNTSHDGHWPRTVAPNSLVNSGAVGNSEPGFRGLTPPIPWEHAPRPHFPLVPASWPYGLHQNFMHQGNARFQPNKPFYTQDRCATRRCRERCPHPPRGNVSE

SEQ ID NO: 839336 - protein, 821 aa, Homo sapiens
MKSEKVPSSPAEAEKGPSLLLKDMRQKTELQQIGKKIPSSFTSVDKVNIEAVGGEKCALQNSPRSQKQQTCTDNTGDSDDSASGIEDVSDDLSKMKNDESNKENSSEMDYLENATVIDESALTPEQRLGLKQAEERLERDHIFRLEKRSPEYTNCRYLCKLCLIHIENIQGAHKHIKEKRHKKNILEKQEESELRSLPPPSPAHLAALSVAVIELAKEHGITDDDLRVRQEIVEEMSKVITTFLPECSLRLYGSSLTRFALKSSDVNIDIKFPPKMNHPDLLIKVLGILKKNVLYVDVESDFHAKVPVVVCRDRKSGLLCRVSAGNDMACLTTDLLTALGKIEPVFIPLVLAFRYWAKLCYIDSQTDGGIPSYCFALMVMFFLQQRKPPLLPCLLGSWSPLALETPNRVSLGQLWLELLKFYTLDFALEEYVICVRIQDILTRENKNWPKRRIAIEDPFSVKRNVARSLNSQLVYEYVVERFRAAYRYFACPQTKGGNKSTVDFKKREKGKISNKKPVKSNNMATNGCILLGETTEKINAEREQPVQCDEMDCTSQRCIIDNNNLLVNELDFADHGQDSSSLSTSKSSEIEPKLDKKQDDLAPSETCLKKELSQCNCIDLSKSPDPDKSTGTDCRSNLETESSHQSVCTDTSATSCNCKATEDASDLNDDDNLPTQELYYVFDKFILTSGKPPTIVCSICKKDGHSKNDCPEDFRKIDLKPLPPMTNRFREILDLVCKRCFDELSPPCSEQHNREQILIGLEKFIQKEYDEKARLCLFGSSKNGFGFRDSDLDICMTLEGHENAEALIVGGDCPSSREEKD

SEQ ID NO: 839337 - protein, 848 aa, Homo sapiens
MKSEKVPSSPAEAEKGPSLLLKDMRQKTELQQIGKKIPSSFTSVDKVNIEAVGGEKCALQNSPRSQKQQTCTDNTGDSDDSASGIEDVSDDLSKMKNDESNKENSSEMDYLENATVIDESALTPEQRLGLKQAEERLERDHIFRLEKRSPEYTNCRYLCKLCLIHIENIQGAHKHIKEKRHKKNILNVHLGCMAPSLTRFALKSSDVNIDIKFPPKMNHPDLLIKVLGILKKNVLYVDVESDFHAKVPVVVCRDRKSGLLCRVSAGNDMACLTTDLLTALGKIEPVFIPLVLAFRYWAKLCYIDSQTDGGIPSYCFALMVMFFLQQRKPPLLPCLLGSWIEGFDPKRMDDFQLKGIVEEKFVKWECNSSSATEKNSIAEENKAKADQPKDDTKKTETDNQSNAMKEKHGKSPLALETPNRVSLGQLWLELLKFYTLDFALEEYVICVRIQDILTRENKNWPKRRIAIEDPFSVKRNVARSLNSQLVYEYVVERFRAAYRYFACPQTKGGNKSTVDFKKREKGKISNKKPVKSNNMATNGCILLGETTEKINAEREQPVQCDEMDCTSQRCIIDNNNLLVNELDFADHGQDSSSLSTSKSSEIEPKLDKKQDDLAPSETCLKKELSQCNCIDLSKSPDPDKSTGTDCRSNLETESSHQSVCTDTSATSCNCKATEDASDLNDDDNLPTQELYYVFDKFILTSGKPPTIVCSICKKDGHSKNDCPEDFRKIDLKPLPPMTNRFREILDLVCKRCFDELSPPCSEQHNREQILIGLEKFIQKEYDEKARLCLFGSSKNGFGFRDSDLDICMTLEGHENAEALIVGRRLSKLQGRKRLIGQGRSVPGLLNSN

SEQ ID NO: 839338 - protein, 657 aa, Homo sapiens
MSKVITTFLPECSLRLYGSSLTRFALKSSDVNIDIKFPPKMNHPDLLIKVLGILKKNVLYVDVESDFHAKVPVVVCRDRKSGLLCRVSAGNDMACLTTDLLTALGKIEPVFIPLVLAFRYWAKLCYIDSQTDGGIPSYCFALMVMFFLQQRKPPLLPCLLGSWIEGFDPKRMDDFQLKGIVEEKFVKWECNSSSATEKNSIAEENKAKADQPKDDTKKTETDNQSNAMKEKHGKSPLALETPNRVSLGQLWLELLKFYTLDFALEEYVICVRIQDILTRENKNWPKRRIAIEDPFSVKRNVARSLNSQLVYEYVVERFRAAYRYFACPQTKGGNKSTVDFKKREKGKISNKKPVKSNNMATNGCILLGETTEKINAEREQPVQCDEMDCTSQRCIIDNNNLLVNELDFADHGQDSSSLSTSKSSEIEPKLDKKQDDLAPSETCLKKELSQCNCIDLSKSPDPDKSTGTDCRSNLETESSHQSVCTDTSATSCNCKATEDASDLNDDDNLPTQELYYVFDKFILTSGKPPTIVCSICKKDGHSKNDCPEDFRKIDLKPLPPMTNRFREILDLVCKRCFDELSPPCSEQHNREQILIGLEKFIQKEYDEKARLCLFGSSKNGFGFRDSDLDICMTLEGHENAEALIVGGDCPSSREEKD

SEQ ID NO: 839339 - protein, 531 aa, Homo sapiens
SHPRLLPYTRVNPSSSLLLWSRIEGFDPKRMDDFQLKGIVEEKFVKWECNSSSATEKNSIAEENKAKADQPKDDTKKTETDNQSNAMKEKHGKSPLALETPNRVSLGQLWLELLKFYTLDFALEEYVICVRIQDILTRENKNWPKRRIAIEDPFSVKRNVARSLNSQLVYEYVVERFRAAYRYFACPQTKGGNKSTVDFKKREKGKISNKKPVKSNNMATNGCILLGETTEKINAEREQPVQCDEMDCTSQRCIIDNNNLLVNELDFADHGQDSSSLSTSKSSEIEPKLDKKQDDLAPSETCLKKELSQCNCIDLSKSPDPDKSTGTDCRSNLETESSHQSVCTDTSATSCNCKATEDASDLNDDDNLPTQELYYVFDKFILTSGKPPTIVCSICKKDGHSKNDCPEDFRKIDLKPLPPMTNRFREILDLVCKRCFDELSPPCSEQHNREQILIGLEKFIQKEYDEKARLCLFGSSKNGFGFRDSDLDICMTLEGHENAEALIVGRRLSKLQGRKRLIGQGRSVPGLLNSN

SEQ ID NO: 839340 - protein, 848 aa, Homo sapiens; identical to SEQ ID NO: 839337

SEQ ID NO: 839341 - protein, 848 aa, Homo sapiens; identical to SEQ ID NO: 839337

SEQ ID NO: 839342 - protein, 848 aa, Homo sapiens; identical to SEQ ID NO: 839337

SEQ ID NO: 839343 - protein, 848 aa, Homo sapiens; identical to SEQ ID NO: 839337

SEQ ID NO: 839344 - protein, 519 aa, Homo sapiens
MVLYFLQQRKPPVIPVLQEIFDGKQIPQRMVDGWNAFFFDKTEELKKRLPSLGKNTESLGELWLGLLRFYTEEFDFKEYVISIRQKKLLTTFEKQWTSKCIAIEDPFDLNHNLGAGVSRKMTNFIMKAFINGRKLFGTPFYPLIGREAEYFFDSRVLTDGELAPNDRCCRVCGKIGHYMKDCPKRKSSLLFRLKKKDSEEEKEGNEEEKDSRDVLDPRDLHDTRDFRDPRDLRCFICGDAGHVRRECPEVKLARQRNSSVAAAQLVRNLVNAQQVAGSAQQQGDQSIRTRQSSECSESPSYSPQPQPFPQNSSQSAAITQPSSQPGSQPKLGPPQQGAQPPHQVQMPLYNFPQSPPAQYSPMHNMGLLPMHPLQIPAPSWPIHGPVIHSAPGSAPSNIGLNDPSIIFAQPAARPVAIPNTSHDGHWPRTVAPNSLVNSGAVGNSEPGFRGLTPPIPWEHAPRPHFPLVPASWPYGLHQNFMHQGNARFQPNKPFYTQDRCATRRCRERCPHPPRGNVSE

SEQ ID NO: 839345 - protein, 110 aa, Homo sapiens
SSEIEPKLDKKQDDLAPSETCLKKELSQCNCIDLSKSPDPDKSTGTDCRSNLETESSHQSVCTDTSATSCNCKATEDASDLNDDDNLPTQELYYVFDKFILTSGKVGYSL

SEQ ID NO: 839346 - protein, 48 aa, Homo sapiens
MFYMWRCWTCKRLKKKDSEEEKDGNEEEKDSRDVLDPRDLHDTRDFRD

SEQ ID NO: 839347 - protein, 848 aa, Homo sapiens; identical to SEQ ID NO: 839337

SEQ ID NO: 839348 - protein, 848 aa, Homo sapiens; identical to SEQ ID NO: 839337

SEQ ID NO: 839349 - protein, 848 aa, Homo sapiens; identical to SEQ ID NO: 839337

SEQ ID NO: 839350 - protein, 848 aa, Homo sapiens; identical to SEQ ID NO: 839337

SEQ ID NO: 839351 - protein, 848 aa, Homo sapiens; identical to SEQ ID NO: 839337

SEQ ID NO: 839352 - protein, 562 aa, Homo sapiens
MLATYAAIDPRVQYLGYTMKVFAKRCDIGDASRGSLSSYAYILMVLYFLQQRKPPVIPVLQEIFDGKQIPQRMVDGWNAFFFDKTEELKKRLPSLGKNTESLGELWLGLLRFYTEEFDFKEYVISIRQKKLLTTFEKQWTSKCIAIEDPFDLNHNLGAGVSRKMTNFIMKAFINGRKLFGTPFYPLIGREAEYFFDSRVLTDGELAPNDRCCRVCGKIGHYMKDCPKRKSSLLFRLKKKDSEEEKEGNEEEKDSRDVLDPRDLHDTRDFRDPRDLRCFICGDAGHVRRECPEVKLARQRNSSVAAAQLVRNLVNAQQVAGSAQQQGDQSIRTRQSSECSESPSYSPQPQPFPQNSSQSAAITQPSSQPGSQPKLGPPQQGAQPPHQVQMPLYNFPQSPPAQYSPMHNMGLLPMHPLQIPAPSWPIHGPVIHSAPGSAPSNIGLNDPSIIFAQPAARPVAIPNTSHDGHWPRTVAPNSLVNSGAVGNSEPGFRGLTPPIPWEHAPRPHFPLVPASWPYGLHQNFMHQGNARFQPNKPFYTQDRCATRRCRERCPHPPRGNVSE

SEQ ID NO: 839353 - protein, 848 aa, Homo sapiens; identical to SEQ ID NO: 839337

SEQ ID NO: 839354 - protein, 97 aa, Homo sapiens
AYGHKCTKVIPKRCQSGGNPGHLENAITISDQEDHRYEGKSKEPLQDNVIATYEEHEDSVYAVDWSSADPWLFASLSYDGRLVINRVPRALKYHILL

SEQ ID NO: 839355 - protein, 107 aa, Homo sapiens
MEDDAPVIYGLEFQARALTPQTAETDAIRFLVGTQSLKYDNQIHIIDFDDENNIINKNVLLHQAGEIWHISASPADRGVLTTCYNRTFRQQSSLVLVVSLLLCSVCP

SEQ ID NO: 839356 - protein, 119 aa, Homo sapiens [sequence omitted]

SEQ ID NO: 839357 - protein, 414 aa, Homo sapiens
MEDDAPVIYGLEFQARALTPQTAETDAIRFLVGTQSLKYDNQIHIIDFDDENNIINKNVLLHQAGEIWHISASPADRGVLTTCYNRTFCCVLSLDSFGALGKSAAQLFIALATSSDSKVLTCAAVWRMPKELESGSHESPDDSSSTAQTLELLCHLDNTAHGNMACVVWEPMGDGKKIISLADNHILLWDLQESSSQAVLASSASLEGKGQLKFTSGRWSPHHNCTQVATANDTTLRGWDTRSMSQIYCIENAHGQLVRDLDFNPNKQYYLASCGDDCKVKFWDTRNVTEPVKTLEEHSHWVWNVRYNHSHDQLVLTGSSDSRVILSNMVSISSEPFGHLVDDDDISDQEDHRSEEKSKEPLQDNVIATYEEHEDSVYAVDWSSADPWLFASLSYDGRLVINRVPRALKYHILL

SEQ ID NO: 839358 - protein, 243 aa, Homo sapiens
MGDGKKIISLADNHILLWDLQESSSQAVLASSASLEGKGQLKFTSGRWSPHHNCTQVATANDTTLRGWDTRSMSQIYCIENAHGQLVRDLDFNPNKQYYLASCGDDCKVKFWDTRNVTEPVKTLEEHSHWVWNVRYNHSHDQLVLTGSSDSRVILSNMVSISSEPFGHLVDDDDISDQEDHRSEEKSKEPLQDNVIATYEEHEDSVYAVDWSSADPWLFASLSYDGRLVINRVPRALKYHILL

SEQ ID NO: 839359 - protein, 287 aa, Homo sapiens
MPKELESGSHESPDDSSSTAQTLELLCHLDNTAHGNMACVVWEPMGDGKKIISLADNHILLWDLQESSSQAVLASSASLEGKGQLKFTSGRWSPHHNCTQVATANDTTLRGWDTRSMSQIYCIENAHGQLVRDLDFNPNKQYYLASCGDDCKVKFWDTRNVTEPVKTLEEHSHWVWNVRYNHSHDQLVLTGSSDSRVILSNMVSISSEPFGHLVDDDDISDQEDHRSEEKSKEPLQDNVIATYEEHEDSVYAVDWSSADPWLFASLSYDGRLVINRVPRALKYHILL

SEQ ID NO: 839360 - protein, 299 aa, Homo sapiens
LYGSAEVRILIPIPSASSTRLHMSPDDSSSTAQTLELLCHLDNTAHGNMACVVWEPMGDGKKIISLADNHILLWDLQESSSQAVLASSASLEGKGQLKFTSGRWSPHHNCTQVATANDTTLRGWDTRSMSQIYCIENAHGQLVRDLDFNPNKQYYLASCGDDCKVKFWDTRNVTEPVKTLEEHSHWVWNVRYNHSHDQLVLTGSSDSRVILSNMVSISSEPFGHLVDDDDISDQEDHRSEEKSKEPLQDNVIATYEEHEDSVYAVDWSSADPWLFASLSYDGRLVINRVPRALKYHILL

SEQ ID NO: 839361 - protein, 243 aa, Homo sapiens; identical to SEQ ID NO: 839358

SEQ ID NO: 839362 - protein, 171 aa, Homo sapiens
MSQIYCIENAHGQLVRDLDFNPNKQYYLASCGDDCKVKFWDTRNVTEPVKTLEEHSHWVWNVRYNHSHDQLVLTGSSDSRVILSNMVSISSEPFGHLVDDDDISDQEDHRSEEKSKEPLQDNVIATYEEHEDSVYAVDWSSADPWLFASLSYDGRLVINRVPRALKYHILL

SEQ ID NO: 839363 - protein, 236 aa, Homo sapiens
MEDDAPVIYGLEFQESSSQAVLASSASLEGKGQLKFTSGRWSPHHNCTQVATANDTTLRGWDTRSMSQIYCIENAHGQLVRDLDFNPNKQYYLASCGDDCKVKFWDTRNVTEPVKTLEEHSHWVWNVRYNHSHDQLVLTGSSDSRVILSNMVSISSEPFGHLVDDDDISDQEDHRSEEKSKEPLQDNVIATYEEHEDSVYAVDWSSADPWLFASLSYDGRLVINRVPRALKYHILL

SEQ ID NO: 839364 - protein, 267 aa, Homo sapiens
MIPSHIFDGYKAKIPSTARPEGHRYASGEMSVVRPHRVLGWRRWRQPLPAGQERRGDESTLGRGIRQGPGKPVCARSTQWLFLIHLLFSFAVLPSPSAQIYCIENAHGQLVRDLDFNPNKQYYLASCGDDCKVKFWDTRNVTEPVKTLEEHSHWVWNVRYNHSHDQLVLTGSSDSRVILSNMVSISSEPFGHLVDDDDISDQEDHRSEEKSKEPLQDNVIATYEEHEDSVYAVDWSSADPWLFASLSYDGRLVINRVPRALKYHILL

SEQ ID NO: 839365 - protein, 115 aa, Homo sapiens
MKNMYHSSYLPAWVSQMFMLTFGTSLSLSVVWEPMGDGKKIISLADNHILLWDLQESSSQAVVSKSNNTAFVSVFLNQTPHVLTHRWELNNEITWTQGGEHHTPGPVVGLGEREG

SEQ ID NO: 839366 - protein, 387 aa, Homo sapiens
MEDDAPVIYGLEFQARALTPQTAETDAIRFLVGTQSLKYDNQIHIIDFDDENNIINKNVLLHQAGEIWHISASPADRGVLTTCYNRTSDSKVLTCAAVWRMPKELESGSHESPDDSSSTAQTLELLCHLDNTAHGNMACVVWEPMGDGKKIISLADNHILLWDLQESSSQAVLASSASLEGKGQLKFTSGRWSPHHNCTQVATANDTTLRGWDTRSMSQIYCIENAHGQLVRDLDFNPNKQYYLASCGDDCKVKFWDTRNVTEPVKTLEEHSHWVWNVRYNHSHDQLVLTGSSDSRVILSNMVSISSEPFGHLVDDDDISDQEDHRSEEKSKEPLQDNVIATYEEHEDSVYAVDWSSADPWLFASLSYDGRLVINRVPRALKYHILL

SEQ ID NO: 839367 - protein, 256 aa, Homo sapiens
MEDDAPVIYGLEFQARALTPQTAETDAIRFLVGTQSLKYDNQIHIIDFDDENNIINKNVLLHQAGEIWHISASPADRGVLTTCYNRTSDSKVLTCAAVWRMPKELESGSHESPDDSSSTAQTLELLCHLDNTAHGNMACVVWEPMGDGKKIISLADNHILLWDLQESSSQAVREESEHSEGACTDPVCAIIPRLEALWGRGTLESGNRDGPRHLHLPRASLTEGGPATSLTQGRRTRHGPHSQKDPPRASRMEEGP

SEQ ID NO: 839368 - protein, 394 aa, Homo sapiens
MEDDAPVIYGLEFQARALTPQTAETDAIRFLVGTQSLKYDNQIHIIDFDDENNIINKNVLLHQAGEIWHISASPADRGVLTTCYNRTSDSKVLTCAAVWRMPKELESGSHESPDDSSSTAQTLELLCHLDNTAHGNMACVVWEPMGDGKKIISLADNHILLWDLQESSSQAVENIVTPQLASSASLEGKGQLKFTSGRWSPHHNCTQVATANDTTLRGWDTRSMSQIYCIENAHGQLVRDLDFNPNKQYYLASCGDDCKVKFWDTRNVTEPVKTLEEHSHWVWNVRYNHSHDQLVLTGSSDSRVILSNMVSISSEPFGHLVDDDDISDQEDHRSEEKSKEPLQDNVIATYEEHEDSVYAVDWSSADPWLFASLSYDGRLVINRVPRALKYHILL

SEQ ID NO: 839369 - protein, 366 aa, Homo sapiens
MEDDAPVIYGLEFQARALTPQTAETDAIRFLVGTQSLKYDNQIHIIDFDDENNIINKNVLLHQAGEIWHISASPADRGVLTTCYNRTSDSKVLTCAAVWRMPKELESGSHESPDDSSSTAQTLELLCHLDNTAHGNMACVVWEPMGDGKKIISLADNHILLWDLQESSSQAVLASSASLEGKGQLKFTSGRWSPHHNQIYCIENAHGQLVRDLDFNPNKQYYLASCGDDCKVKFWDTRNVTEPVKTLEEHSHWVWNVRYNHSHDQLVLTGSSDSRVILSNMVSISSEPFGHLVDDDDISDQEDHRSEEKSKEPLQDNVIATYEEHEDSVYAVDWSSADPWLFASLSYDGRLVINRVPRALKYHILL

SEQ ID NO: 839370 - protein, 341 aa, Homo sapiens
MEDDAPVIYGLEFQARALTPQTAETDAIRFLVGTQSLKYDNQIHIIDFDDENNIINKNVLLHQAGEIWHISASPADRGVLTTCYNRSKCGFSNVVWEPMGDGKKIISLADNHILLWDLQESSSQAVLASSASLEGKGQLKFTSGRWSPHHNCTQVATANDTTLRGWDTRSMSQIYCIENAHGQLVRDLDFNPNKQYYLASCGDDCKVKFWDTRNVTEPVKTLEEHSHWVWNVRYNHSHDQLVLTGSSDSRVILSNMVSISSEPFGHLVDDDDISDQEDHRSEEKSKEPLQDNVIATYEEHEDSVYAVDWSSADPWLFASLSYDGRLVINRVPRALKYHILL

SEQ ID NO: 839371 - protein, 243 aa, Homo sapiens; identical to SEQ ID NO: 839358

SEQ ID NO: 839372 - protein, 277 aa, Homo sapiens
MKNMYHSSYLPAWVSQMFMLTFGTSLSLSVVWEPMGDGKKIISLADNHILLWDLQESSSQAVLASSASLEGKGQLKFTSGRWSPHHNCTQVATANDTTLRGWDTRSMSQIYCIENAHGQLVRDLDFNPNKQYYLASCGDDCKVKFWDTRNVTEPVKTLEEHSHWVWNVRYNHSHDQLVLTGSSDSRVILSNMVSISSEPFGHLVDDDDISDQEDHRSEEKSKEPLQDNVIATYEEHEDSVYAVDWSSADPWLFASLSYDGRLVINRVPRALKYHILL

SEQ ID NO: 839373 - protein, 171 aa, Homo sapiens; identical to SEQ ID NO: 839362

SEQ ID NO: 839374 - protein, 282 aa, Homo sapiens
MEDDAPVIYGLEFQARALTPQTAETDAIRFLVGTQSLKYDNQIHIIDFDDENNIINKNVLLHQAGEIWHISASPADRGVLTTCYNRTSDSKVLTCAAVWRMPKELESGSHESPDDSSSTAQTLELLCHLDNTAHGNMACVVWEPMGDGKKIISLADNHILLWDLQESSSQAVLASSASLEGKGQLKFTSGRWSPHHNCTQVATANDTTLRGWDTRSMSQIYCIENAHGQLVRDLDFNPNKQYYLASCGDDCKVKFWDTRNVTEPVKTLEEHSHWLGRSWLLQ

SEQ ID NO: 839375 - protein, 1258 aa, Homo sapiens
MPEQERQITAREGASRKILSKLSLPTRAWEPAMKKSFAFDNVGYEGGLDGLGPSSQVATSTVRILGMTCQSCVKSIEDRISNLKGIISMKVSLEQGSATVKYVPSVVCLQQVCHQIGDMGFEASIAEGKAASWPSRSLPAQEAVVKLRVEGMTCQSCVSSIEGKVRKLQGVVRVKVSLSNQEAVITYQPYLIQPEDLRDHVNDMGFEAAIKSKVAPLSLGPIDIERLQSTNPKRPLSSANQNFNNSETLGHQGSHVVTLQLRIDGMHCKSCVLNIEENIGQLLGVQSIQVSLENKTAQVKYDPSCTSPVALQRAIEALPPGNFKVSLPDGAEGSGTDHRSSSSHSPGSPPRNQVQGTCSTTLIAIAGMTCASCVHSIEGMISQLEGVQQISVSLAEGTATVLYNPSVISPEELRAAIEDMGFEASVVSESCSTNPLGNHSAGNSMVQTTDGTPTSVQEVAPHTGRLPANHAPDILAKSPQSTRAVAPQKCFLQIKGMTCASCVSNIERNLQKEAGVLSVLVALMAGKAEIKYDPEVIQPLEIAQFIQDLGFEAAVMEDYAGSDGNIELTITGMTCASCVHNIESKLTRTNGITYASVALATSKALVKFDPEIIGPRDIIKIIESKTSEALAKLMSLQATEATVVTLGEDNLIIREEQVPMELVQRGDIVKVVPGGKFPVDGKVLEGNTMADESLITGEAMPVTKKPGSTVIARSINAHGSVLIKATHVGNDTTLAQIVKLVEEAQMSKNPNKHISQTEVIIRFAFQTSITVLCIACPCSLGLATPTAVMVGTGVAAQNGILIKGGKPLEMAHKIKTVMFDKTGTITHGVPRVMRVLLLGDVATLPLRKVLAVVGTAEASSEHPLGVAVTKYCKEELGTETLGYCTDFQAVPGCGIGCKVSNVEGILAHSERPLSAPASHLNEAGSLPAEKDAVPQTFSVLIGNREWLRRNGLTISSDVSDAMTDHEMKGQTAILVAIDGVLCGMIAIADAVKQEAALAVHTLQSMGVDVVLITGDNRKTARAIATQVGINKVFAEVLPSHKVAKVQELQNKGKKVAMVGDGVNDSPALAQADMGVAIGTGTDVAIEAADVVLIRNDLLDVVASIHLSKRTVRRIRINLVLALIYNLVGIPIAAGVFMPIGIVLQPWMGSAAMAASSVSVVLSSLQLKCYKKPDLERYEAQAHGHMKPLTASQVSVHIGMDDRWRDSPRATPWDQVSYVSQVSLSSLTSDKPSRHSAAADDDGDKWSLLLNGRDEEQYI

SEQ ID NO: 839376 - protein, 1374 aa, Homo sapiens
MPEQERQITAREGASRKILSKLSLPTRAWEPAMKKSFAFDNVGYEGGLDGLGPSSQVATSTVRILGMTCQSCVKSIEDRISNLKGIISMKVSLEQGSATVKYVPSVVCLQQVCHQIGDMGFEASIAEGKAASWPSRSLPAQEAVVKLRVEGMTCQSCVSSIEGKVRKLQGVVRVKVSLSNQEAVITYQPYLIQPEDLRDHVNDMGFEAAIKSKVAPLSLGPIDIERLQSTNPKRPLSSANQNFNNSETLGHQGSHVVTLQLRIDGMHCKSCVLNIEENIGQLLGVQSIQVSLENKTAQVKYDPSCTSPVALQRAIEALPPGNFKVSLPDGAEGSGTDHRSSSSHSPGSPPRNQVQGTCSTTLIAIAGMTCASCVHSIEGMISQLEGVQQISVSLAEGTATVLYNPSVISPEELRAAIEDMGFEASVVSESCSTNPLGNHSAGNSMVQTTDGTPTSVQEVAPHTGRLPANHAPDILAKSPQSTRAVAPQKCFLQIKGMTCASCVSNIERNLQKEAGVLSVLVALMAGKAEIKYDPEVIQPLEIAQFIQDLGFEAAVMEDYAGSDGNIELTITGMTCASCVHNIESKLTRTNGITYASVALATSKALVKFDPEIIGPRDIIKIIEEIGFHASLAQRNPNAHHLDHKMEIKQWKKSFLCSLVFGIPVMALMIYMLIPSNEPHQSMVLDHNIIPGLSILNLIFFILCTFVQLLGGWYFYVQAYKSLRHRSANMDVLIVLATSIAYVYSLVILVVAVAEKAERSPVTFFDTPPMLFVFIALGRWLEHLAKSKTSEALAKLMSLQATEATVVTLGEDNLIIREEQVPMELVQRGDIVKVVPGGKFPVDGKVLEGNTMADESLITGEAMPVTKKPGSTVIARSINAHGSVLIKATHVGNDTTLAQIVKLVEEAQMSKAPIQQLADRFSGYFVPFIIIMSTLTLVVWIVIGFIDFGVVQKYFPNPNKHISQTEVIIRFAFQTSITVLCIACPCSLGLATPTAVMVGTGVAAQNGILIKGGKPLEMAHKIKTVMFDKTGTITHGVPRVMRVLLLGDVATLPLRKVLAVVGTAEASSEHPLGVAVTKYCKEELGTETLGYCTDFQAVPGCGIGCKVSNVEGILAHSERPLSAPASHLNEAGSLPAEKDAVPQTFSVLIGNREWLRRNGLTISSDVSDAMTDHEMKGQTAILVAIDGVLCGMIAIADAVKQEAALAVHTLQSMGVDVVLITGDNRKTARAIATQVGINKVFAEVLPSHKVAKVQELQNKGKKVAMVGDGVNDSPALAQADMGVAIGTGTDVAIEAADVVLIRNDLLDVVASIHLSKRTVRRIRINLVLALIYNLVGIPIAAGVFMPIGIVLQPWMGSAAMAASSVSVVLSSLQLK

SEQ ID NO: 839377 - protein, 1374 aa, Homo sapiens; identical to SEQ ID NO: 839376

SEQ ID NO: 839378 - protein, 640 aa, Homo sapiens
MPEQERQITAREGASRKILSKLSLPTRAWEPAMKKSFAFDNVGYEGGLDGLGPSSQVATSTVRILGMTCQSCVKSIEDRISNLKGIISMKVSLEQGSATVKYVPSVVCLQQVCHQIGDMGFEASIAEGKAASWPSRSLPAQEAVVKLRVEGMTCQSCVSSIEGKVRKLQGVVRVKVSLSNQEAVITYQPYLIQPEDLRDHVNDMGFEAAIKSKVAPLSLGPIDIERLQSTNPKRPLSSANQNFNNSETLGHQGSHVVTLQLRIDGMHCKSCVLNIEENIGQLLGVQSIQVSLENKTAQVKYDPSCTSPVALQRAIEALPPGNFKVSLPDGAEGSGTDHRSSSSHSPGSPPRNQVQGTCSTTLIAIAGMTCASCVHSIEGMISQLEGVQQISVSLAEGTATVLYNPSVISPEELRAAIEDMGFEASVVSESCSTNPLGNHSAGNSMVQTTDGTPTSVQEVAPHTGRLPANHAPDILAKSPQSTRAVAPQKCFLQIKGMTCASCVSNIERNLQKEAGVLSVLVALMAGKAEIKYDPEVIQPLEIAQFIQDLGFEAAVMEDYAGSDGNIELTITGMTCASCVHNIESKLTRTNGITYASVALATSKALVKFDPEIIGPRDIIKIIEVSNSLKNCSHLFKNSNI

SEQ ID NO: 839379 - protein, 1465 aa, Homo sapiens
MPEQERQITAREGASRKILSKLSLPTRAWEPAMKKSFAFDNVGYEGGLDGLGPSSQVATSTVRILGMTCQSCVKSIEDRISNLKGIISMKVSLEQGSATVKYVPSVVCLQQVCHQIGDMGFEASIAEGKAASWPSRSLPAQEAVVKLRVEGMTCQSCVSSIEGKVRKLQGVVRVKVSLSNQEAVITYQPYLIQPEDLRDHVNDMGFEAAIKSKVAPLSLGPIDIERLQSTNPKRPLSSANQNFNNSETLGHQGSHVVTLQLRIDGMHCKSCVLNIEENIGQLLGVQSIQVSLENKTAQVKYDPSCTSPVALQRAIEALPPGNFKVSLPDGAEGSGTDHRSSSSHSPGSPPRNQVQGTCSTTLIAIAGMTCASCVHSIEGMISQLEGVQQISVSLAEGTATVLYNPSVISPEELRAAIEDMGFEASVVSESCSTNPLGNHSAGNSMVQTTDGTPTSVQEVAPHTGRLPANHAPDILAKSPQSTRAVAPQKCFLQIKGMTCASCVSNIERNLQKEAGVLSVLVALMAGKAEIKYDPEVIQPLEIAQFIQDLGFEAAVMEDYAGSDGNIELTITGMTCASCVHNIESKLTRTNGITYASVALATSKALVKFDPEIIGPRDIIKIIEEIGFHASLAQRNPNAHHLDHKMEIKQWKKSFLCSLVFGIPVMALMIYMLIPSNEPHQSMVLDHNIIPGLSILNLIFFILCTFVQLLGGWYFYVQAYKSLRHRSANMDVLIVLATSIAYVYSLVILVVAVAEKAERSPVTFFDTPPMLFVFIALGRWLEHLAKSKTSEALAKLMSLQATEATVVTLGEDNLIIREEQVPMELVQRGDIVKVVPGGKFPVDGKVLEGNTMADESLITGEAMPVTKKPGSTVIARSINAHGSVLIKATHVGNDTTLAQIVKLVEEAQMSKAPIQQLADRFSGYFVPFIIIMSTLTLVVWIVIGFIDFGVVQKYFPNPNKHISQTEVIIRFAFQTSITVLCIACPCSLGLATPTAVMVGTGVAAQNGILIKGGKPLEMAHKIKTVMFDKTGTITHGVPRVMRVLLLGDVATLPLRKVLAVVGTAEASSEHPLGVAVTKYCKEELGTETLGYCTDFQAVPGCGIGCKVSNVEGILAHSERPLSAPASHLNEAGSLPAEKDAVPQTFSVLIGNREWLRRNGLTISSDVSDAMTDHEMKGQTAILVAIDGVLCGMIAIADAVKQEAALAVHTLQSMGVDVVLITGDNRKTARAIATQVGINKVFAEVLPSHKVAKVQELQNKGKKVAMVGDGVNDSPALAQADMGVAIGTGTDVAIEAADVVLIRNDLLDVVASIHLSKRTVRRIRINLVLALIYNLVGIPIAAGVFMPIGIVLQPWMGSAAMAASSVSVVLSSLQLKCYKKPDLERYEAQAHGHMKPLTASQVSVHIGMDDRWRDSPRATPWDQVSYVSQVSLSSLTSDKPSRHSAAADDDGDKWSLLLNGRDEEQYI

SEQ ID NO: 839380 - protein, 1465 aa, Homo sapiens; identical to SEQ ID NO: 839379

SEQ ID NO: 839381 - protein, 519 aa, Homo sapiens
MPLTLSCFQNPNKHISQTEVIIRFAFQTSITVLCIACPCSLGLATPTAVMVGTGVAAQNGILIKGGKPLEMAHKIKTVMFDKTGTITHGVPRVMRVLLLGDVATLPLRKVLAVVGTAEASSEHPLGVAVTKYCKEELGTETLGYCTDFQAVPGCGIGCKVSNVEGILAHSERPLSAPASHLNEAGSLPAEKDAVPQTFSVLIGNREWLRRNGLTISSDVSDAMTDHEMKGQTAILVAIDGVLCGMIAIADAVKQEAALAVHTLQSMGVDVVLITGDNRKTARAIATQVGINKVFAEVLPSHKVAKVQELQNKGKKVAMVGDGVNDSPALAQADMGVAIGTGTDVAIEAADVVLIRNDLLDVVASIHLSKRTVRRIRINLVLALIYNLVGIPIAAGVFMPIGIVLQPWMGSAAMAASSVSVVLSSLQLKCYKKPDLERYEAQAHGHMKPLTASQVSVHIGMDDRWRDSPRATPWDQVSYVSQVSLSSLTSDKPSRHSAAADDDGDKWSLLLNGRDEEQYI

SEQ ID NO: 839382 - protein, 249 aa, Homo sapiens
LCSQPFSILGFGDIVVPGFLVAYCCRFDVQVCSRQIYFVACTVAYAVGLLVTFMAMVLMQMGQPALLYLVSSTLLTSLAVAACRQELSLFWTGQGRAKMCGLGCAPSAGSRQKQEGAADAHTASTLERGTSRGAGDLDSNPGEDTTEIVTISENEATNPEDRSDSSEGWSDAHLDPNELPFIPPGASEELMPLMPMAMLIPLMPLMPPPSELGHVHAQAQAHETGLPWAGLHKRKGLKVRKSMSTQAPL

SEQ ID NO: 839383 - protein, 150 aa, Homo sapiens
LCSQPFSILGFGDIVVPGFLVAYCCRFDVQVCSRQIYFVACRTHWAFPTACSSCTVCGCPLSRTAPPSGWSDAHLDPNELPFIPPGASEELMPLMPMAMLIPLMPLMPPPSELGHVHAQAQAHETGLPWAGLHKRKGLKVRKSMSTQAPL

SEQ ID NO: 839384 - protein, 172 aa, Homo sapiens
MHEEAQRHGCVTCLRSPTWWAGVWPLPHPGATLASSGIHSSELGSLWAALCPGRWREGPAGRERWAGGGWGPAVSQRLFASPVFSPGQWEPAPPTVGQWAAWGLFSSSLSFLLSPHFSISSLSTQRFWTACLSGPSRGWPGVLVSMLGGWEGSDSSFAASCSVAWVGLWPEV

SEQ ID NO: 839385 - protein, 454 aa, Homo sapiens
MAEMGSKGVTAGKIASNVQKKLTRAQEKVLQKLGKADETKDEQFEQCVQNFNKQLTEGTRLQKDLRTYLASVKAMHEASKKLNECLQEVYEPDWPGRDEANKIAENNDLLWMDYHQKLVDQALLTMDTYLGQFPDIKSRIAKRGRKLVDYDSARHHYESLQTAKKKDEAKIAKAEEELIKAQKVFEEMNVDLQEELPSLWNSRVGFYVNTFQSIAGLEENFHKEMSKLNQNLNDVLVGLEKQHGSNTFTVKAQPRKKSKLFSRLRRKKNSDNAPAKGNKSPSPPDGSPAATPEIRVNHEPEPAGGATPGATLPKSPSQPAEASEVAGGTQPAAGAQEPGETAASEAASSSLPAVVVETFPATVNGTVEGGSGAGRLDLPPGFMFKVQAQHDYTATDTDELQLKAGDVVLVIPFQNPEEQDEGWLMGVKESDWNQHKELEKCRGVFPENFTERVP

SEQ ID NO: 839386 - protein, 518 aa, Homo sapiens
MAEMGSKGVTAGKIASNVQKKLTRAQEKVLQKLGKADETKDEQFEQCVQNFNKQLTEGTRLQKDLRTYLASVKAMHEASKKLNECLQEVYEPDWPGRDEANKIAENNDLLWMDYHQKLVDQALLTMDTYLGQFPDIKSRIAKRGRKLVDYDSARHHYESLQTAKKKDEAKIAKAEEELIKAQKVFEEMNVDLQEELPSLWNSRVGFYVNTFQSIAGLEENFHKEMSKLNQNLNDVLVGLEKQHGSNTFTVKAQPSDNAPAKGNKSPSPPDGSPAATPEIRVNHEPEPAGGATPGATLPKSPSQLRKGPPVPPPPKHTPSKEVKQEQILSLFEDTFVPEISVTTPSQPTESPAGSLPSGEPSAAEGTFAVSWPSQTAEPGPAQPAEASEVAGGTQPAAGAQEPGETAASEAASSSLPAVVVETFPATVNGTVEGGSGAGRLDLPPGFMFKVQAQHDYTATDTDELQLKAGDVVLVIPFQNPEEQDEGWLMGVKESDWNQHKELEKCRGVFPENFTERVP

SEQ ID NO: 839387 - protein, 593 aa, Homo sapiens
MAEMGSKGVTAGKIASNVQKKLTRAQEKVLQKLGKADETKDEQFEQCVQNFNKQLTEGTRLQKDLRTYLASVKAMHEASKKLNECLQEVYEPDWPGRDEANKIAENNDLLWMDYHQKLVDQALLTMDTYLGQFPDIKSRIAKRGRKLVDYDSARHHYESLQTAKKKDEAKIAKPVSLLEKAAPQWCQGKLQAHLVAQTNLLRNQAEEELIKAQKVFEEMNVDLQEELPSLWNSRVGFYVNTFQSIAGLEENFHKEMSKLNQNLNDVLVGLEKQHGSNTFTVKAQPSDNAPAKGNKSPSPPDGSPAATPEIRVNHEPEPAGGATPGATLPKSPSQLRKGPPVPPPPKHTPSKEVKQEQILSLFEDTFVPEISVTTPSQFEAPGPFSEQASLLDLDFDPLPPVTSPVKAPTPSGQSIPWDLWEPTESPAGSLPSGEPSAAEGTFAVSWPSQTAEPGPAQPAEASEVAGGTQPAAGAQEPGETAASEAASSSLPAVVVETFPATVNGTVEGGSGAGRLDLPPGFMFKVQAQHDYTATDTDELQLKAGDVVLVIPFQNPEEQDEGWLMGVKESDWNQHKELEKCRGVFPENFTERVP

SEQ ID NO: 839388 - protein, 519 aa, Homo sapiens
MAEMGSKGVTAGKIASNVQKKLTRAQEKVLQKLGKADETKDEQFEQCVQNFNKQLTEGTRLQKDLRTYLASVKAMHEASKKLNECLQEVYEPDWPGRDEANKIAENNDLLWMDYHQKLVDQALLTMDTYLGQFPDIKSRIAKRGRKLVDYDSARHHYESLQTAKKKDEAKIAKAEEELIKAQKVFEEMNVDLQEELPSLWNSRVGFYVNTFQSIAGLEENFHKEMSKLNQNLNDVLVGLEKQHGSNTFTVKAQPSDNAPAKGNKSPSPPDGSPAATPEIRVNHEPEPAGGATPGATLPKSPSQFEAPGPFSEQASLLDLDFDPLPPVTSPVKAPTPSGQSIPWDLWEPTESPAGSLPSGEPSAAEGTFAVSWPSQTAEPGPAQPAEASEVAGGTQPAAGAQEPGETAASEAASSSLPAVVVETFPATVNGTVEGGSGAGRLDLPPGFMFKVQAQHDYTATDTDELQLKAGDVVLVIPFQNPEEQDEGWLMGVKESDWNQHKELEKCRGVFPENFTERVP

SEQ ID NO: 839389 - protein, 409 aa, Homo sapiens
MAEMGSKGVTAGKIASNVQKKLTRAQEKVLQKLGKADETKDEQFEQCVQNFNKQLTEGTRLQKDLRTYLASVKAMHEASKKLNECLQEVYEPDWPGRDEANKIAENNDLLWMDYHQKLVDQALLTMDTYLGQFPDIKSRIAKRGRKLVDYDSARHHYESLQTAKKKDEAKIAKAEEELIKAQKVFEEMNVDLQEELPSLWNSRVGFYVNTFQSIAGLEENFHKEMSKLNQNLNDVLVGLEKQHGSNTFTVKAQPSDNAPAKGNKSPSPPDGSPAATPEIRVNHEPEPAGGATPGATLPKSPSQSSLPAVVVETFPATVNGTVEGGSGAGRLDLPPGFMFKVQAQHDYTATDTDELQLKAGDVVLVIPFQNPEEQDEGWLMGVKESDWNQHKELEKCRGVFPENFTERVP

SEQ ID NO: 839390 - protein, 550 aa, Homo sapiens
MAEMGSKGVTAGKIASNVQKKLTRAQEKVLQKLGKADETKDEQFEQCVQNFNKQLTEGTRLQKDLRTYLASVKAMHEASKKLNECLQEVYEPDWPGRDEANKIAENNDLLWMDYHQKLVDQALLTMDTYLGQFPDIKSRIAKRGRKLVDYDSARHHYESLQTAKKKDEAKIAKPVSLLEKAAPQWCQGKLQAHLVAQTNLLRNQAEEELIKAQKVFEEMNVDLQEELPSLWNSRVGFYVNTFQSIAGLEENFHKEMSKLNQNLNDVLVGLEKQHGSNTFTVKAQPSDNAPAKGNKSPSPPDGSPAATPEIRVNHEPEPAGGATPGATLPKSPSQFEAPGPFSEQASLLDLDFDPLPPVTSPVKAPTPSGQSIPWDLWEPTESPAGSLPSGEPSAAEGTFAVSWPSQTAEPGPAQPAEASEVAGGTQPAAGAQEPGETAASEAASSSLPAVVVETFPATVNGTVEGGSGAGRLDLPPGFMFKVQAQHDYTATDTDELQLKAGDVVLVIPFQNPEEQDEGWLMGVKESDWNQHKELEKCRGVFPENFTERVP

SEQ ID NO: 839391 - protein, 490 aa, Homo sapiens
RRESLAGCLTVAFPLPACLSSVCVCLPGEPRCENAGARGCASCLRGPRPQALLGGRGETGLTSQPALPVQAGGEEMMRKVLQKLGKADETKDEQFEQCVQNFNKQLTEGTRLQKDLRTYLASVKAMHEASKKLNECLQEVYEPDWPGRDEANKIAENNDLLWMDYHQKLVDQALLTMDTYLGQFPDIKSRIAKRGRKLVDYDSARHHYESLQTAKKKDEAKIAKAEEELIKAQKVFEEMNVDLQEELPSLWNSRVGFYVNTFQSIAGLEENFHKEMSKLNQNLNDVLVGLEKQHGSNTFTVKAQPSDNAPAKGNKSPSPPDGSPAATPEIRVNHEPEPAGGATPGATLPKSPSQPAEASEVAGGTQPAAGAQEPGETAASEAASSSLPAVVVETFPATVNGTVEGGSGAGRLDLPPGFMFKVQAQHDYTATDTDELQLKAGDVVLVIPFQNPEEQDEGWLMGVKESDWNQHKELEKCRGVFPENFTERVP

SEQ ID NO: 839392 - protein, 365 aa, Homo sapiens
MHEASKKLNECLQEVYEPDWPGRDEANKIAENNDLLWMDYHQKLVDQALLTMDTYLGQFPDIKSRIAKRGRKLVDYDSARHHYESLQTAKKKDEAKIAKAEEELIKAQKVFEEMNVDLQEELPSLWNSRVGFYVNTFQSIAGLEENFHKEMSKLNQNLNDVLVGLEKQHGSNTFTVKAQPSDNAPAKGNKSPSPPDGSPAATPEIRVNHEPEPAGGATPGATLPKSPSQPAEASEVAGGTQPAAGAQEPGETAASEAASSSLPAVVVETFPATVNGTVEGGSGAGRLDLPPGFMFKVQAQHDYTATDTDELQLKAGDVVLVIPFQNPEEQDEGWLMGVKESDWNQHKELEKCRGVFPENFTERVP

SEQ ID NO: 839393 - protein, 409 aa, Homo sapiens; identical to SEQ ID NO: 839389

SEQ ID NO: 839394 - protein, 518 aa, Homo sapiens; identical to SEQ ID NO: 839386

SEQ ID NO: 839395 - protein, 518 aa, Homo sapiens; identical to SEQ ID NO: 839386

SEQ ID NO: 839396 - protein, 518 aa, Homo sapiens; identical to SEQ ID NO: 839386

SEQ ID NO: 839397 - protein, 518 aa, Homo sapiens; identical to SEQ ID NO: 839386

SEQ ID NO: 839398 - protein, 173 aa, Homo sapiens
MPTESPAGSLPSGEPSAAEGTFAVSWPSQTAEPGPAQPAEASEVAGGTQPAAGAQEPGETAASEAASSSLPAVVVETFPATVNGTVEGGSGAGRLDLPPGFMFKVQAQHDYTATDTDELQLKAGDVVLVIPFQNPEEQDEGWLMGVKESDWNQHKELEKCRGVFPENFTERVP

SEQ ID NO: 839399 - protein, 71 aa, Homo sapiens
AVQLERQGSPARRSPSAARAPPSSRTWRCRRPEWPFKRQLIVRRGRAGGADRGLRPGPSPLPPSVPASLAG

SEQ ID NO: 839400 - protein, 369 aa, Homo sapiens
MAEMGSKGVTAGKIASNVQKKLTRAQEKVLQKLGKADETKDEQFEQCVQNFNKQLTEGTRLQKDLRTYLASVKAMHEASKKLNECLQEVYEPDWPGRDEANKIAENNDLLWMDYHQKLVDQALLTMDTYLGQFPDIKSRIAKRGRKLVDYDSARHHYESLQTAKKKDEAKIAKAEEELIKAQKVFEEMNVDLQEELPSLWNSRVGFYVNTFQSIAGLEENFHKEMSKLNQNLNDVLVGLEKQHGSNTFTVKAQPSDNAPAKGNKSPSPPDGSPAATPEIRVNHEPEPAGGATPGATLPKSPSQPAEASEVAGGTQPAAGAQEPGETAASEAASSSLPAVVVETFPATPRHPGKGPLFLAAAVGGAQTPA

SEQ ID NO: 839401 - protein, 266 aa, Homo sapiens
MAEMGSKGVTAGKIASNVQKKLTRAQEKVLQKLGKADETKDEQFEQCVQNFNKQLTEGTRLQKDLRTYLASVKAMHEASKKLNECLQEVYEPDWPGRDEANKIAENNDLLWMDYHQKLVDQALLTMDTYLGQFPDIKSRIAKRGRKLVDYDSARHHYESLQTAKKKDEAKIAKAEEELIKAQKVFEEMNVDLQEELPSLWNSRVGFYVNTFQSIAGLEENFHKEMSKLNQNLNDVLVGLEKQHGSNTFTVKAQPSGAGGCRATMLA

SEQ ID NO: 839402 - protein, 304 aa, Homo sapiens
MAEMGSKGVTAGKIASNVQKKLTRAQEKVLQKLGKADETKDEQFEQCVQNFNKQLTEGTRLQKDLRTYLASVKAMHEASKKLNECLQEVYEPDWPGRDEANKIAENNDLLWMDYHQKLVDQALLTMDTYLGQFPDIKSRIAKRGRKLVDYDSARHHYESLQTAKKKDEAKIAKAEEELIKAQKVFEEMNVDLQEELPSLWNSRVGFYVNTFQSIAGLEENFHKEMSKLNQNLNDVLVGLEKQHGSNTFTVKAQPRKKSKLFSRLPERRTAAPPGQGSSFPGSCCGWGPDTSLAWLCPADGLCAV

SEQ ID NO: 839403 - protein, 71 aa, Homo sapiens; identical to SEQ ID NO: 839399

SEQ ID NO: 839404 - protein, 482 aa, Homo sapiens
MAEMGSKGVTAGKIASNVQKKLTRAQEKVLQKLGKADETKDEQFEQCVQNFNKQLTEGTRLQKDLRTYLASVKAMHEASKKLNECLQEVYEPDWPGRDEANKIAENNDLLWMDYHQKLVDQALLTMDTYLGQFPDIKSRIAKRGRKLVDYDSARHHYESLQTAKKKDEAKIAKAEEELIKAQKVFEEMNVDLQEELPSLWNSRVGFYVNTFQSIAGLEENFHKEMSKLNQNLNDVLVGLEKQHGSNTFTVKAQPSDNAPAKGNKSPSPPDGSPAATPEIRVNHEPEPAGGATPGATLPKSPSQLRKGPPVPPPPKHTPSKEVKQEQILSLFEDTFVPEISVTTPSQPAEASEVAGGTQPAAGAQEPGETAASEAASSSLPAVVVETFPATVNGTVEGGSGAGRLDLPPGFMFKVQAQHDYTATDTDELQLKAGDVVLVIPFQNPEEQDEGWLMGVKESDWNQHKELEKCRGVFPENFTERVP

SEQ ID NO: 839405 - protein, 439 aa, Homo sapiens
MAEMGSKGVTAGKIASNVQKKLTRAQEKVLQKLGKADETKDEQFEQCVQNFNKQLTEGTRLQKDLRTYLASVKAMHEASKKLNECLQEVYEPDWPGRDEANKIAENNDLLWMDYHQKLVDQALLTMDTYLGQFPDIKSRIAKRGRKLVDYDSARHHYESLQTAKKKDEAKIAKAEEELIKAQKVFEEMNVDLQEELPSLWNSRVGFYVNTFQSIAGLEENFHKEMSKLNQNLNDVLVGLEKQHGSNTFTVKAQPSDNAPAKGNKSPSPPDGSPAATPEIRVNHEPEPAGGATPGATLPKSPSQPAEASEVAGGTQPAAGAQEPGETAASEAASSSLPAVVVETFPATVNGTVEGGSGAGRLDLPPGFMFKVQAQHDYTATDTDELQLKAGDVVLVIPFQNPEEQDEGWLMGVKESDWNQHKELEKCRGVFPENFTERVP

SEQ ID NO: 839406 - protein, 475 aa, Homo sapiens
MAEMGSKGVTAGKIASNVQKKLTRAQEKVLQKLGKADETKDEQFEQCVQNFNKQLTEGTRLQKDLRTYLASVKAMHEASKKLNECLQEVYEPDWPGRDEANKIAENNDLLWMDYHQKLVDQALLTMDTYLGQFPDIKSRIAKRGRKLVDYDSARHHYESLQTAKKKDEAKIAKAEEELIKAQKVFEEMNVDLQEELPSLWNSRVGFYVNTFQSIAGLEENFHKEMSKLNQNLNDVLVGLEKQHGSNTFTVKAQPSDNAPAKGNKSPSPPDGSPAATPEIRVNHEPEPAGGATPGATLPKSPSQPTESPAGSLPSGEPSAAEGTFAVSWPSQTAEPGPAQPAEASEVAGGTQPAAGAQEPGETAASEAASSSLPAVVVETFPATVNGTVEGGSGAGRLDLPPGFMFKVQAQHDYTATDTDELQLKAGDVVLVIPFQNPEEQDEGWLMGVKESDWNQHKELEKCRGVFPENFTERVP

SEQ ID NO: 839407 - protein, 497 aa, Homo sapiens
MAEMGSKGVTAGKIASNVQKKLTRAQEKVLQKLGKADETKDEQFEQCVQNFNKQLTEGTRLQKDLRTYLASVKAMHEASKKLNECLQEVYEPDWPGRDEANKIAENNDLLWMDYHQKLVDQALLTMDTYLGQFPDIKSRIAKRGRKLVDYDSARHHYESLQTAKKKDEAKIAKAEEELIKAQKVFEEMNVDLQEELPSLWNSRVGFYVNTFQSIAGLEENFHKEMSKLNQNLNDVLVGLEKQHGSNTFTVKAQPRKKSKLFSRLRRKKNSDNAPAKGNKSPSPPDGSPAATPEIRVNHEPEPAGGATPGATLPKSPSQLRKGPPVPPPPKHTPSKEVKQEQILSLFEDTFVPEISVTTPSQPAEASEVAGGTQPAAGAQEPGETAASEAASSSLPAVVVETFPATVNGTVEGGSGAGRLDLPPGFMFKVQAQHDYTATDTDELQLKAGDVVLVIPFQNPEEQDEGWLMGVKESDWNQHKELEKCRGVFPENFTERVP

SEQ ID NO: 839408 - protein, 424 aa, Homo sapiens
MAEMGSKGVTAGKIASNVQKKLTRAQEKVLQKLGKADETKDEQFEQCVQNFNKQLTEGTRLQKDLRTYLASVKAMHEASKKLNECLQEVYEPDWPGRDEANKIAENNDLLWMDYHQKLVDQALLTMDTYLGQFPDIKSRIAKRGRKLVDYDSARHHYESLQTAKKKDEAKIAKAEEELIKAQKVFEEMNVDLQEELPSLWNSRVGFYVNTFQSIAGLEENFHKEMSKLNQNLNDVLVGLEKQHGSNTFTVKAQPRKKSKLFSRLRRKKNSDNAPAKGNKSPSPPDGSPAATPEIRVNHEPEPAGGATPGATLPKSPSQSSLPAVVVETFPATVNGTVEGGSGAGRLDLPPGFMFKVQAQHDYTATDTDELQLKAGDVVLVIPFQNPEEQDEGWLMGVKESDWNQHKELEKCRGVFPENFTERVP

SEQ ID NO: 839409 - protein, 452 aa, Homo sapiens
MAEMGSKGVTAGKIASNVQKKLTRAQEKVLQKLGKADETKDEQFEQCVQNFNKQLTEGTRLQKDLRTYLASVKAMHEASKKLNECLQEVYEPDWPGRDEANKIAENNDLLWMDYHQKLVDQALLTMDTYLGQFPDIKSRIAKRGRKLVDYDSARHHYESLQTAKKKDEAKIAKAEEELIKAQKVFEEMNVDLQEELPSLWNSRVGFYVNTFQSIAGLEENFHKEMSKLNQNLNDVLVGLEKQHGSNTFTVKAQPSDNAPAKGNKSPSPPDGSPAATPEIRVNHEPEPAGGATPGATLPKSPSQLRKGPPVPPPPKHTPSKEVKQEQILSLFEDTFVPEISVTTPSQSSLPAVVVETFPATVNGTVEGGSGAGRLDLPPGFMFKVQAQHDYTATDTDELQLKAGDVVLVIPFQNPEEQDEGWLMGVKESDWNQHKELEKCRGVFPENFTERVP

SEQ ID NO: 839410 - protein, 417 aa, Homo sapiens
MAEMGSKGVTAGKIASNVQKKLTRAQEKVLQKLGKADETKDEQFEQCVQNFNKQLTEGTRLQKDLRTYLASVKAMHEASKKLNECLQEVYEPDWPGRDEANKIAENNDLLWMDYHQKLVDQALLTMDTYLGQFPDIKSRIAKRGRKLVDYDSARHHYESLQTAKKKDEAKIAKAEEELIKAQKVFEEMNVDLQEELPSLWNSRVGFYVNTFQSIAGLEENFHKEMSKLNQNLNDVLVGLEKQHGSNTFTVKAQPSDNAPAKGNKSPSPPDGSPAATPEIRVNHEPEPAGGATPGATLPKSPSQLTRTSAIQSSLPAVVVETFPATVNGTVEGGSGAGRLDLPPGFMFKVQAQHDYTATDTDELQLKAGDVVLVIPFQNPEEQDEGWLMGVKESDWNQHKELEKCRGVFPENFTERVP

SEQ ID NO: 839411 - protein, 506 aa, Homo sapiens
MAEMGSKGVTAGKIASNVQKKLTRAQEKVLQKLGKADETKDEQFEQCVQNFNKQLTEGTRLQKDLRTYLASVKAMHEASKKLNECLQEVYEPDWPGRDEANKIAENNDLLWMDYHQKLVDQALLTMDTYLGQFPDIKSRIAKRGRKLVDYDSARHHYESLQTAKKKDEAKIAKPVSLLEKAAPQWCQGKLQAHLVAQTNLLRNQAEEELIKAQKVFEEMNVDLQEELPSLWNSRVGFYVNTFQSIAGLEENFHKEMSKLNQNLNDVLVGLEKQHGSNTFTVKAQPSDNAPAKGNKSPSPPDGSPAATPEIRVNHEPEPAGGATPGATLPKSPSQPTESPAGSLPSGEPSAAEGTFAVSWPSQTAEPGPAQPAEASEVAGGTQPAAGAQEPGETAASEAASSSLPAVVVETFPATVNGTVEGGSGAGRLDLPPGFMFKVQAQHDYTATDTDELQLKAGDVVLVIPFQNPEEQDEGWLMGVKESDWNQHKELEKCRGVFPENFTERVP

SEQ ID NO: 839412 - protein, 607 aa, Homo sapiens
GSSWPPLAALLVPGWLLPVQGLLCCCLWHSWAWAQGIESCGEVLQKLGKADETKDEQFEQCVQNFNKQLTEGTRLQKDLRTYLASVKAMHEASKKLNECLQEVYEPDWPGRDEANKIAENNDLLWMDYHQKLVDQALLTMDTYLGQFPDIKSRIAKRGRKLVDYDSARHHYESLQTAKKKDEAKIAKPVSLLEKAAPQWCQGKLQAHLVAQTNLLRNQAEEELIKAQKVFEEMNVDLQEELPSLWNSRVGFYVNTFQSIAGLEENFHKEMSKLNQNLNDVLVGLEKQHGSNTFTVKAQPSDNAPAKGNKSPSPPDGSPAATPEIRVNHEPEPAGGATPGATLPKSPSQLRKGPPVPPPPKHTPSKEVKQEQILSLFEDTFVPEISVTTPSQFEAPGPFSEQASLLDLDFDPLPPVTSPVKAPTPSGQSIPWDLWEPTESPAGSLPSGEPSAAEGTFAVSWPSQTAEPGPAQPAEASEVAGGTQPAAGAQEPGETAASEAASSSLPAVVVETFPATVNGTVEGGSGAGRLDLPPGFMFKVQAQHDYTATDTDELQLKAGDVVLVIPFQNPEEQDEGWLMGVKESDWNQHKELEKCRGVFPENFTERVP

SEQ ID NO: 839413 - protein, 317 aa, Homo sapiens
HSRRQCPPAVSQHSPFPGRAGHRAGSVTHLLPAVPSPALCGRVMGPEHHCLAEEELIKAQKVFEEMNVDLQEELPSLWNSRVGFYVNTFQSIAGLEENFHKEMSKLNQNLNDVLVGLEKQHGSNTFTVKAQPSDNAPAKGNKSPSPPDGSPAATPEIRVNHEPEPAGGATPGATLPKSPSQPAEASEVAGGTQPAAGAQEPGETAASEAASSSLPAVVVETFPATVNGTVEGGSGAGRLDLPPGFMFKVQAQHDYTATDTDELQLKAGDVVLVIPFQNPEEQDEGWLMGVKESDWNQHKELEKCRGVFPENFTERVP

SEQ ID NO: 839414 - protein, 360 aa, Homo sapiens
HSRRQCPPAVSQHSPFPGRAGHRAGSVTHLLPAVPSPALCGRVMGPEHHCLAEEELIKAQKVFEEMNVDLQEELPSLWNSRVGFYVNTFQSIAGLEENFHKEMSKLNQNLNDVLVGLEKQHGSNTFTVKAQPSDNAPAKGNKSPSPPDGSPAATPEIRVNHEPEPAGGATPGATLPKSPSQLRKGPPVPPPPKHTPSKEVKQEQILSLFEDTFVPEISVTTPSQPAEASEVAGGTQPAAGAQEPGETAASEAASSSLPAVVVETFPATVNGTVEGGSGAGRLDLPPGFMFKVQAQHDYTATDTDELQLKAGDVVLVIPFQNPEEQDEGWLMGVKESDWNQHKELEKCRGVFPENFTERVP

SEQ ID NO: 839415 - protein, 282 aa, Homo sapiens
MSPPNPVLCCAFPRGPSPAADPQLRKGPPVPPPPKHTPSKEVKQEQILSLFEDTFVPEISVTTPSQFEAPGPFSEQASLLDLDFDPLPPVTSPVKAPTPSGQSIPWDLWEPTESPAGSLPSGEPSAAEGTFAVSWPSQTAEPGPAQPAEASEVAGGTQPAAGAQEPGETAASEAASSSLPAVVVETFPATVNGTVEGGSGAGRLDLPPGFMFKVQAQHDYTATDTDELQLKAGDVVLVIPFQNPEEQDEGWLMGVKESDWNQHKELEKCRGVFPENFTERVP

SEQ ID NO: 839416 - protein, 154 aa, Homo sapiens
ALVPFCRRVVTLPKSPSQPAEASEVAGGTQPAAGAQEPGETAASEAASSSLPAVVVETFPATVNGTVEGGSGAGRLDLPPGFMFKVQAQHDYTATDTDELQLKAGDVVLVIPFQNPEEQDEGWLMGVKESDWNQHKELEKCRGVFPENFTERVP

SEQ ID NO: 839417 - protein, 342 aa, Homo sapiens
MAEMGSKGVTAGKIASNVQKKLTRAQEKVLQKLGKADETKDEQFEQCVQNFNKQLTEGTRLQKDLRTYLASVKAMHEASKKLNECLQEVYEPDWPGRDEANKIAENNDLLWMDYHQKLVDQALLTMDTYLGQFPDIKSRIAKRGRKLVDYDSARHHYESLQTAKKKDEAKIAKAEEELIKAQKVFEEMNVDLQEELPSLWNSRVGFYVNTFQSIAGLEENFHKEMSKLNQNLNDVLVGLEKQHGSNTFTVKAQPSDNAPAKGNKSPSPPDGSPAATPEIRVNHEPEPAGGATPGATLPKSPSQLRKGPPVPPPPKHTPSKPRHPGKGPLFLAAAVGGAQTPA

SEQ ID NO: 839418 - protein, 159 aa, Homo sapiens
MAEMGSKGVTAGKIASNVQKKLTRAQEKVLQKLGKADETKDEQFEQCVQNFNKQLTEGTRLQKDLRTYLASVKAMHEASKKLNECLQEVYEPDWPGRDEANKIAENNDLLWMDYHQKLVDQALLTMDTYLGQFPDIKPRHPGKGPLFLAAAVGGAQTPA

SEQ ID NO: 839419 - protein, 81 aa, Homo sapiens
PSLLRSVNSMGPLGGKLHVCSLSSPWGSHSSVCVQAHMLLACSQVHAPHTPPTRRTHRHVLTHRELVKPPASSHSAASPSG

SEQ ID NO: 839420 - protein, 351 aa, Homo sapiens
ARGGGEARAGVRAPGVGVGGGNRRGRRDSAGQRDPATLDSASPPARVAAPQPLRIMEHLKAFDDEINAFLDNMFGPRDSRVRGWFMLDSYLPTFFLTVMYLLSIWLGNKYMKNRPALSLRGILTLYNLGITLLSAYMLAELILSTWEGGYNLQCQDLTSAGEADIRVAKVLWWYYFSKSVEFLDTIFFVLRKKTSQITFLHVYHHASMFNIWWCVLNWIPCGQSFFGPTLNSFIHILMYSYYGLSVFPSMHKYLWWKKYLTQAQLVQFVLTITHTMSAVVKPCGFPFGCLIFQSSYMLTLVILFLNFYVQTYRKKPMKKDMQEPPAGKEVKNGFSKAYFTAANGVMNKKAQ

SEQ ID NO: 839421 - protein, 351 aa, Homo sapiens; identical to SEQ ID NO: 839420

SEQ ID NO: 839422 - protein, 451 aa, Homo sapiens
MAKLYEAVTFKDVAVIFTEEELGLLDPAQRKLYRDVMLENFRNLLSVGGKIQTEMETFPEAGTHEEFSCKQIWEQIASDLTRSQDTTISNSQLFEQDDNPSQIKARLSTVHTREKPFQGENCKQFFSDVSFFDLPQQLYSGEKSHTCDECGKSFCYISALHIHQRVHMGVKCYKCDVCGKEFSQSSRLQTHQRVHTGEKPFKCEQCGKGFRCRSALKVHCKLHMREKPYNCEKCGKAFMHNFQLQKHHRIHTGEKPFKCEICGKSFCLRSSLNRHCMVHTAEKLYKSEKYGRGFIDRLDLHKHQMIHMGQKPYNCKECGKSFKWSSYLLVHQRVHTGEKPYKCEECGKGYISKSGLDFHHRTHTGERSYNCDNCGKSFRHASSILNHKKLHCQRKPLKCEDCGKRLVCRSYCKDQQRDHSGENPSKCEDCGKRYKRRLNLDIILSLFLNDI

SEQ ID NO: 839423 - protein, 482 aa, Homo sapiens
MAKLYEAVTFKDVAVIFTEEELGLLDPAQRKLYRDVMLENFRNLLSVGHQPFHGDTFHFLREEKFWVMGTTSQREGNLGGKIQTEMETFPEAGTHEEFSCKQIWEQIASDLTRSQDTTISNSQLFEQDDNPSQIKARLSTVHTREKPFQGENCKQFFSDVSFFDLPQQLYSGEKSHTCDECGKSFCYISALHIHQRVHMGVKCYKCDVCGKEFSQSSRLQTHQRVHTGEKPFKCEQCGKGFRCRSALKVHCKLHMREKPYNCEKCGKAFMHNFQLQKHHRIHTGEKPFKCEICGKSFCLRSSLNRHCMVHTAEKLYKSEKYGRGFIDRLDLHKHQMIHMGQKPYNCKECGKSFKWSSYLLVHQRVHTGEKPYKCEECGKGYISKSGLDFHHRTHTGERSYNCDNCGKSFRHASSILNHKKLHCQRKPLKCEDCGKRLVCRSYCKDQQRDHSGENPSKCEDCGKRYKRRLNLDIILSLFLNDI

SEQ ID NO: 839424 - protein, 516 aa, Homo sapiens
GSLSHFHILRVLPNESPFLGARNHPMIDSGEKKPGRRAEEAVTFKDVAVIFTEEELGLLDPAQRKLYRDVMLENFRNLLSVGHQPFHGDTFHFLREEKFWVMGTTSQREGNLGGKIQTEMETFPEAGTHEEFSCKQIWEQIASDLTRSQDTTISNSQLFEQDDNPSQIKARLSTVHTREKPFQGENCKQFFSDVSFFDLPQQLYSGEKSHTCDECGKSFCYISALHIHQRVHMGVKCYKCDVCGKEFSQSSRLQTHQRVHTGEKPFKCEQCGKGFRCRSALKVHCKLHMREKPYNCEKCGKAFMHNFQLQKHHRIHTGEKPFKCEICGKSFCLRSSLNRHCMVHTAEKLYKSEKYGRGFIDRLDLHKHQMIHMGQKPYNCKECGKSFKWSSYLLVHQRVHTGEKPYKCEECGKGYISKSGLDFHHRTHTGERSYNCDNCGKSFRHASSILNHKKLHCQRKPLKCEDCGKRLVCRSYCKDQQRDHSGENPSKCEDCGKRYKRRLNLDIILSLFLNDI

SEQ ID NO: 839425 - protein, 75 aa, Homo sapiens
GTKKQRRMIRRGPPALGGETAASGRHKGFCGVAPGLTALIIPGFHLDALAGEAQDALWLDPCTEPPAQPPRGLKP

SEQ ID NO: 839426 - protein, 415 aa, Homo sapiens
FANLTSVGAMAPARCFSARLRTVFQGVGHWALSTWAGLKPSRLLPQRASPRLLSVGRADLAKHQELPGKKLLSEKKLKRYFVDYRRVLVCGGNGGAGASCFHSEPRKEFGGPDGGDGGNGGHVILRVDQQVKSLSSVLSRYQGFSGEDGGSKNCFGRSGAVLYIRVPVGTLVKEGGRVVADLSCVGDEYIAALGGAGGKGNRFFLANNNRAPVTCTPGQPGQQRVLHLELKTVAHAGMVGFPNAGKSSLLRAISNARPAVASYPFTTLKPHVGIVHYEGHLQIAVADIPGIIRGAHQNRGLGSAFLRHIERCRFLLFVVDLSQPEPWTQVDDLKYELEMYEKGLSARPHAIVANKIDLPEAQANLSQLRDHLGQEVIVLSALTGENLEQLLLHLKVLYDAYAEAELGQGRQPLRW

SEQ ID NO: 839427 - protein, 178 aa, Homo sapiens
MVGFPNAGKSSLLRAISNARPAVASYPFTTLKPHVGIVHYEGHLQIAVADIPGIIRGAHQNRGLGSAFLRHIERCRFLLFVVDLSQPEPWTQVDDLKYELEMYEKGLSARPHAIVANKIDLPEAQANLSQLRDHLGQEVIVLSALTGENLEQLLLHLKVLYDAYAEAELGQGRQPLRW

SEQ ID NO: 839428 - protein, 304 aa, Homo sapiens
MVVVTQGTEILVLALVDQQVKSLSSVLSRYQGFSGEDGGSKNCFGRSGAVLYIRVPVGTLVKEGGRVVADLSCVGDEYIAALGGAGGKGNRFFLANNNRAPVTCTPGQPGQQRVLHLELKTVAHAGMVGFPNAGKSSLLRAISNARPAVASYPFTTLKPHVGIVHYEGHLQIAVADIPGIIRGAHQNRGLGSAFLRHIERCRFLLFVVDLSQPEPWTQVDDLKYELEMYEKGLSARPHAIVANKIDLPEAQANLSQLRDHLGQEVIVLSALTGENLEQLLLHLKVLYDAYAEAELGQGRQPLRW

SEQ ID NO: 839429 - protein, 415 aa, Homo sapiens; identical to SEQ ID NO: 839426

SEQ ID NO: 839430 - protein, 415 aa, Homo sapiens; identical to SEQ ID NO: 839426

SEQ ID NO: 839431 - protein, 183 aa, Homo sapiens
AQLWGPAVPQVPVGTLVKEGGRVVADLSCVGDEYIAALGGAGGKGNRFFLANNNRAPVTCTPGQPGQQRVLHLELKTVAHAGMVGFPNAGKSSLLRAISNARAGSPLGLCLSKPGCEFGGFECIKCLVDTGELWCFWVSGPRLLAWDALMLGSIPCPPPRLPSVFPAPVSLRRLMSQLLICAD

SEQ ID NO: 839432 - protein, 136 aa, Homo sapiens
FANLTSVGAMAPARCFSARLRTVFQGVGHWALSTWAGLKPSRLLPQRASPRLLSVGRADLAKHQELPGKKLLSEKKLKRYFVDYRRVLVCGGNGGAGASCFHSEPRKEFGGPDGGDGGNGGHVILRGRCPGAVQRG

SEQ ID NO: 839433 - protein, 122 aa, Homo sapiens
FANLTSVGAMAPARCFSARLRTVFQGVGHWALSTWAGLKPSRLLPQRASPRLLSVGRADLAKHQELPGKKLLSEKKLVRLLELEQLACLLLRRHRVWFRVLLWVSSLLMLVDDLSDGARGAS

SEQ ID NO: 839434 - protein, 68 aa, Homo sapiens
TDTALTKVLPRAVPPSSLFPPGGIPQRREVLTAPGHFKRQTRRGFLPVHHPEAPRRDRPLRRPPTNSR

SEQ ID NO: 839435 - protein, 75 aa, Homo sapiens; identical to SEQ ID NO: 839425

SEQ ID NO: 839436 - protein, 415 aa, Homo sapiens; identical to SEQ ID NO: 839426

SEQ ID NO: 839437 - protein, 260 aa, Homo sapiens
AQLWGPAVPQVPVGTLVKEGGRVVADLSCVGDEYIAALGGAGGKGNRFFLANNNRAPVTCTPGQPGQQRVLHLELKTVAHAGMVGFPNAGKSSLLRAISNARPAVASYPFTTLKPHVGIVHYEGHLQIAVADIPGIIRGAHQNRGLGSAFLRHIERCRFLLFVVDLSQPEPWTQVDDLKYELEMYEKGLSARPHAIVANKIDLPEAQANLSQLRDHLGQEVIVLSALTGENLEQLLLHLKVLYDAYAEAELGQGRQPLRW

SEQ ID NO: 839438 - protein, 416 aa, Homo sapiens
FANLTSVGAMAPARCFSARLRTVFQGVGHWALSTWAGLKPSRLLPQRASPRLLSVGRADLAKHQELPGKKLLSEKKLKRYFVDYRRVLVCGGNGGAGASCFHSEPRKEFGGPDGGDGGNGGHVILRVDQQVKSLSSVLSRYQGFSGEDGGSKNCFGRSGAVLYIRVPVGTLVKEGGRVVADLSCVGDEYIAALGGAGGKGNRFFLANNNRAPVTCTPGQPGQQRVLHLELKTVAHAGMVGFPNAGKSSLLRAISNARPAVASYPFTTLKPHVGIVHYEGHLQIAVADIPGIIRGAHQNRGLGSAFLRHIERCRFLLFVVDLSQPEPWTQVDDLKYELEMYEKGLSARPHAIVANKIDLPEAQANLSQLRDHLGQEVIVLSALTGENLEQLLLHLRAESICVRCEEENRFWKLGERV

SEQ ID NO: 839439 - protein, 290 aa, Homo sapiens
FANLTSVGAMAPARCFSARLRTVFQGVGHWALSTWAGLKPSRLLPQRASPRLLSVGRADLAKHQELPGKKLLSEKKLKRYFVDYRRVLVCGGNGGAGASCFHSEPRKEFGGPDGGDGGNGGHVILRVDQQVKSLSSVLSRYQGFSGEDGGSKNCFGRSGAVLYIRVPVGTLVKEGGRVVADLSCVGDEYIAALGGAGGKGNRFFLANNNRAPVTCTPGQPGQQRVLHLELKTVAHAGMVGFPNAGKSSLLRAISNARPAVASYPFTTLKPHVGIVHYEGHLQIAGSHPIP

SEQ ID NO: 839440 - protein, 238 aa, Homo sapiens
FANLTSVGAMAPARCFSARLRTVFQGVGHWALSTWAGLKPSRLLPQRASPRLLSVGRADLAKHQELPGKKLLSEKKLKRYFVDYRRVLVCGGNGGAGASCFHSEPRKEFGGPDGGDGGNGGHVILRVDQQVKSLSSVLSRYQGFSGEDGGSKNCFGRSGAVLYIRVSRDCRTWPCPRCSGSSSSWGPPCDPRGPCGLMPTARKQHNGNGGWQTAGKQPHPSKQTQTGICTRVSHHVHV

SEQ ID NO: 839441 - protein, 118 aa, Homo sapiens
VDPETHCHAERCFLSWFCDDILSPNTNYEVTWYTSWSPCPECAGEVAEFLARHSNVNLTIFTARLCYSWPQGHSIVPPCLTTSSPLSQALLVEALHPPPQSCSPSLGAPNLTLPISPA

SEQ ID NO: 839442 - protein, 130 aa, Homo sapiens
VDPETHCHAERCFLSWFCDDILSPNTNYEVTWYTSWSPCPECAGEVAEFLARHSNVNLTIFTARLCYFWDTDYQEGLCSLSQEGASVKIMGYKDFVSCWKNLRPAWATRQSPISTKKKYKKKARCGGMHL

SEQ ID NO: 839443 - protein, 67 aa, Homo sapiens
TSWSPCPECAGEVAEFLARHSNVNLTIFTARLCYFWDTDYQEGLCSLSQEGASVKIMGYKGETWGAE

SEQ ID NO: 839444 - protein, 58 aa, Homo sapiens
HCSFLDVPAVLCILRMALQRIFMVSSRFRCWPYLILHCVTPWEYLASVPCLRRSLTLQ

SEQ ID NO: 839445 - protein, 407 aa, Homo sapiens
MELLEEDLTCPICCSLFDDPRVLPCSHNFCKKCLEGILEGSVRNSLWRPAPFKCPTCRKETSATGINSLQVNYSLKGIVEKYNKIKISPKMPVCKGHLGQPLNIFCLTDMQLICGICATRGEHTKHVFCSIEDAYAQERDAFESLFQSFETWRRGDALSRLDTLETSKRKSLQLLTKDSDKVKEFFEKLQHTLDQKKNEILSDFETMKLAVMQAYDPEINKLNTILQEQRMAFNIAEAFKDVSEPIVFLQQMQEFREKIKVIKETPLPPSNLPASPLMKNFDTSQWEDIKLVDVDKLSLPQDTGTFISKIPWSFYKLFLLILLLGLVIVFGPTMFLEWSLFDDLATWKGCLSNFTSYLTKTADFIEQSVFYWEQVTDGFFIFNERFKNFTLVVLNNVAEFVCKYKLL

SEQ ID NO: 839446 - protein, 213 aa, Homo sapiens [sequence omitted]

SEQ ID NO: 839447 - protein, 407 aa, Homo sapiens; identical to SEQ ID NO: 839445

SEQ ID NO: 839448 - protein, 407 aa, Homo sapiens; identical to SEQ ID NO: 839445

SEQ ID NO: 839449 - protein, 410 aa, Homo sapiens
MDVMELLEEDLTCPICCSLFDDPRVLPCSHNFCKKCLEGILEGSVRNSLWRPAPFKCPTCRKETSATGINSLQVNYSLKGIVEKYNKIKISPKMPVCKGHLGQPLNIFCLTDMQLICGICATRGEHTKHVFCSIEDAYAQERDAFESLFQSFETWRRGDALSRLDTLETSKRKSLQLLTKDSDKVKEFFEKLQHTLDQKKNEILSDFETMKLAVMQAYDPEINKLNTILQEQRMAFNIAEAFKDVSEPIVFLQQMQEFREKIKVIKETPLPPSNLPASPLMKNFDTSQWEDIKLVDVDKLSLPQDTGTFISKIPWSFYKLFLLILLLGLVIVFGPTMFLEWSLFDDLATWKGCLSNFSSYLTKTADFIEQSVFYWEQVTDGFFIFNERFKNFTLVVLNNVAEFVCKYKLL

SEQ ID NO: 839450 - protein, 272 aa, Homo sapiens
MSSQELVTLNVGGKIFTTRFSTIKQFPASRLARMLDGRDQEFKMVGGQIFVDRDGDLFSFILDFLRTHQLLLPTEFSDYLRLQREALFYELRSLVDLLNPYLLQPRPALVEVHFLSRNTQAFFRVFGSCSKTIEMLTGRITVFTEQPSAPTWNGNFFPPQMTLLPLPPQRPSYHDLVFQCGSDSTTDNQTGVRYVSIKPDNRKLANGTNVLGLLIDTLLKEGFHLVSTRTVSSEDKTECYSFERIKSPEVLITNETPKPETIIIPEQSQIKK

SEQ ID NO: 839451 - protein, 407 aa, Homo sapiens
MELLEEDLTCPICCSLFDDPRVLPCSHNFCKKCLEGILEGSVRNSLWRPAPFKCPTCRKETSATGINSLQVNYSLKGIVEKYNKIKISPKMPVCKGHLGQPLNIFCLTDMQLICGICATRGEHTKHVFCSIEDAYAQERDAFESLFQSFETWRRGDALSRLDTLETSKRKSLQLLTKDSDKVKEFFEKLQHTLDQKKNEILSDFETMKLAVMQAYDPEINKLNTILQEQRMAFNIAEAFKDVSEPIVFLQQMQEFREKIKVIKETPLPPSNLPASPLMKNFDTSQWEDIKLVDVDKLSLPQDTGTFISKIPWSFYKLFLLILLLGLVIVFGPTMFLEWSLFDDLATWKGCLSNFSSYLTKTADFIEQSVFYWEQVTDGFFIFNERFKNFTLVVLNNVAEFVCKYKLL

SEQ ID NO: 839452 - protein, 229 aa, Homo sapiens
MSSQELVTLNVGGKIFTTRFSTIKQFPASRLARMLDGRDQEFKMVGGQIFVDRDGDLFSFILDFLRTHQLLLPTEFSDYLRLQREALFYELRSLVDLLNPYLLQPRPALVEVHFLSRNTQAFFRVFGSCSKTIEMLTGRITVFTEQPSAPTWNGNFFPPQMTLLPLPPQRPSYHDLVFQCGSDSTTDNQTGVRLVCNGVISAHHNLRLWGSSDSPASASRVAGITGMFL

SEQ ID NO: 839453 - protein, 142 aa, Homo sapiens
MISTARVPADKPVRIAFSLNDASDDTPPEDSIPLVFPELDQQLQPLPPCHDSEESMEVFKQHCQIAEEYHEVKKEITLLEQRKKELIAKLDQAEKEKVDAAELVREFEALTEENRTLRLAQSQCVEQLEKLRIQYQKRQGSS

SEQ ID NO: 839454 - protein, 278 aa, Homo sapiens
MVQLIAPLEVMWNEAADLKPLALSRRLECSGGIMAHYSPDLLGPEMESRYFAQVGLEHLASSSPPAFGFLKCLDYSISVLCSATSLAMLEDNPKVSKLATGDWMLTLKPKSITVPVEIPSSPLAGRPRRRRRLRCPHDQHSQVPADKPVRIAFSLNDASDDTPPEDSIPLVFPELDQQLQPLPPCHDSEESMEVFKQHCQIAEEYHEVKKEITLLEQRKKELIAKLDQAEKEKVDAAELVREFEALTEENRTLRLAQSQCVEQLEKLRIQYQKRQGSS

SEQ ID NO: 839455 - protein, 163 aa, Homo sapiens
MVQLIAPLEVMWNEAADLKPLALSRRLECSGGIMAHYSPDLLGPEMESRYFAQVGLEHLASSSPPAFGFLKCLDYSISVLCSATSLAMLEDNPKVSKLATGDWMLTLKPKSITVPVEIPSSPLGSRYVAQAGLELLSSRDPPSSASQSAGITGMSHRAWLKLN

SEQ ID NO: 839456 - protein, 133 aa, Homo sapiens
MASNSEIQAWLSDYDDTPPEDSIPLVFPELDQQLQPLPPCHDSEESMEVFKQHCQIAEEYHEVKKEITLLEQRKKELIAKLDQAEKEKVDAAELVREFEALTEENRTLRLAQSQCVEQLEKLRIQYQKRQGSS

SEQ ID NO: 839457 - protein, 124 aa, Homo sapiens
MGNMADDTPPEDSIPLVFPELDQQLQPLPPCHDSEESMEVFKQHCQIAEEYHEVKKEITLLEQRKKELIAKLDQAEKEKVDAAELVREFEALTEENRTLRLAQSQCVEQLEKLRIQYQKRQGSS

SEQ ID NO: 839458 - protein, 142 aa, Homo sapiens; identical to SEQ ID NO: 839453

SEQ ID NO: 839459 - protein, 242 aa, Homo sapiens
MVQLIAPLEVMWNEAADLKPLALSRRLECSGGIMAHYSPDLLGPEMESRYFAQVGLEHLASSSPPAFGFLKCLDYSISVLCSATSLAMLEDNPKVSKLATGDWMLTLKPKSITVPVEIPSSPLDDTPPEDSIPLVFPELDQQLQPLPPCHDSEESMEVFKQHCQIAEEYHEVKKEITLLEQRKKELIAKLDQAEKEKVDAAELVREFEALTEENRTLRLAQSQCVEQLEKLRIQYQKRQGSS

SEQ ID NO: 839460 - protein, 142 aa, Homo sapiens; identical to SEQ ID NO: 839453

SEQ ID NO: 839461 - protein, 142 aa, Homo sapiens; identical to SEQ ID NO: 839453

SEQ ID NO: 839462 - protein, 185 aa, Homo sapiens
DQQQLNQSSVTACSQEKEPVVRFPRRCDEKLEDPGEGGGSGAHMISTARVPADKPVRIAFSLNDASDDTPPEDSIPLVFPELDQQLQPLPPCHDSEESMEVFKQHCQIAEEYHEVKKEITLLEQRKKELIAKLDQAEKEKVDAAELVREFEALTEENRTLRLAQSQCVEQLEKLRIQYQKRQGSS

SEQ ID NO: 839463 - protein, 124 aa, Homo sapiens
MVQLIAPLEVMWNEAADLKPLALSRRLECSGGIMAHYSPDLLGPEMESRYFAQVGLEHLASSSPPAFGFLKCLDYSISVLCSATSLAMLEDNPKVSKLATGDWMLTLKPKSITVPVEIPSSPLG

SEQ ID NO: 839464 - protein, 684 aa, Homo sapiens
MPRPALSVTSFCHRLGKRERKQSFMGNSGNSWSHTPFPKLELGLGPQPMAPRELPTCSICLERLRDPISLDCGHDFCIRCFSTHRLPGCEPPCCPECRKICKQKRGLRSLGEKMKLLPQRPLPPALQVWGLGLISQTQEEEGGFGPILEHQDTELQAEHIPGSGAGPEMLRGPSLLLAQETCPVRAEPLLLVRINASGGLILRMGAINRCLKHPLARDTPVCLLAVLGEQHSGKSFLLNHLLQGLPGLESGEGGRPRGGEASLQGCRWGANGLARGIWMWSHPFLLGKEGKKVAVFLVDTGDAMSPELSRETRIKLCALTTMLSSYQILSTSQELKDTDLDYLEMFVHVAEVMGKHYGMVPIQHLDLLVRDSSHPNKAGQGHVGNIFQRLSGRYPKVQELLQGKRARCCLLPAPGRRRMNQGHASPGGDTDDDFRHLLGAYVSDVLSAAPQHAKSRCQGYWNEGRAVARGDRRLLTGQQLAQEIKNLSGWMGRTGPGFTSPDEMAAQLHDLRKVEAAKREFEEYVRQQDVATKRIFSALRVLPDTMRNLLSTQKDAILARHGVALLCKGRDQTLEALEAELQATAKAFMDSYTMRFCGHLAAVGGAVGAGLMGLAGGVVGAGMAAAALAAEAGMVAAGAAVGATGAAVVGGGVGAGLAATVGCMEKEEDERLLEGDREPLLQEE

SEQ ID NO: 839465 - protein, 632 aa, Homo sapiens
MPRPALSVTSFCHRLGKRERKQSFMGNSGNSWSHTPFPKLELGLGPQPMAPRELPTCSICLERLRDPISLDCGHDFCIRCFSTHRLPGCEPPCCPECRKICKQKRGLRSLGEKMKLLPQRPLPPALQETCPVRAEPLLLVRINASGGLILRMGAINRCLKHPLARDTPVCLLAVLGEQHSGKSFLLNHLLQGLPGLESGEGGRPRGGEASLQGCRWGANGLARGIWMWSHPFLLGKEGKKVAVFLVDTGDAMSPELSRETRIKLCALTTMLSSYQILSTSQELKDTDLDYLEMFVHVAEVMGKHYGMVPIQHLDLLVRDSSHPNKAGQGHVGNIFQRLSGRYPKVQELLQGKRARCCLLPAPGRRRMNQGHASPGGDTDDDFRHLLGAYVSDVLSAAPQHAKSRCQGYWNEGRAVARGDRRLLTGQQLAQEIKNLSGWMGRTGPGFTSPDEMAAQLHDLRKVEAAKREFEEYVRQQDVATKRIFSALRVLPDTMRNLLSTQKDAILARHGVALLCKGRDQTLEALEAELQATAKAFMDSYTMRFCGHLAAVGGAVGAGLMGLAGGVVGAGMAAAALAAEAGMVAAGAAVGATGAAVVGGGVGAGLAATVGCMEKEEDERLLEGDREPLLQEE

SEQ ID NO: 839466 - protein, 38 aa, Homo sapiens
MEPVSHAAIYWRAFYLQSPSEQRSRTRKSLACFRNREK

SEQ ID NO: 839467 - protein, 73 aa, Homo sapiens
HRYSRVESREPPLCSDPPKWLLQWLVDNNFQHSVNVSCAHPEWLAGQSILNVDLKDFVCGLYFCFKILYITHL

SEQ ID NO: 839468 - protein, 899 aa, Homo sapiens
MQLKYLNLSNNRITTLEAGCFDNLSSSLLVVKLNRNRMSMIPPKIFKLPHLQFLELKRNRIKIVEGLTFQGLDSLRSLKMQRNGISKLKDGAFFGLNNMEELELEHNNLTRVNKGWLYGLRMLQQLYVSQNAIERISPDAWEFCQRLSELDLSYNQLTRLDESAFVGLSLLERLNLGDNRVTHIADGVFRFLSNLQTLDLRNNEISWAIEDASEAFAGLTSLTKLILQGNQIKSITKKAFIGLESLEHLDLNNNAIMSIQENAFSQTHLKELILNTSSLLCDCHLKWLLQWLVDNNFQHSVNVSCAHPEWLAGQSILNVDLKDFVCDDFLKPQIRTHPETIIALRGMNVTLTCTAVSSSDSPMSTVWRKDSEILYDVDTENFVRYWQQAGEALEYTSILHLFNVNFTDEGKYQCIVTNHFGSNYSQKAKLTVNEMPSFLKTPMDLTIRTGAMARLECAAEGHPAPQISWQKDGGTDFPAARERRMHVMPEDDVFFIANVKIEDMGIYSCMAQNTAGGLSANASLTVLETPSFIRPLEDKTVTRGETAVLQCIAGGSPAPRLNWTKDDGPLLVTERHFFAAANQLLIIVDAGLEDAGKYTCIMSNTLGTERGHIYLNVISSPNCDSSQSSIGHEDDGWTTVGIVIIVVVCCVVGTSLIWVIVIYHMRRKNEDYSITNTEELNLPADIPSYLSSQGTLSEPQEGYSNSEAGSHQQLMPPANGYIHKGTDGGTGTRVICSDCYDNANIYSRTREYCPYTYIAEEDVLDQTLSSLMVQMPKETYLVHPPQDTTALESLIPSANREPSAFPTNHERISEKKLPSTQMSGETLQRPVWNINRELGLPHPPFSQQPVHESPQLHQNEGLAGREPDCSASSMSCHRLQDHAFDFSRTRNIQDGSEGT

SEQ ID NO: 839469 - protein, 473 aa, Homo sapiens
MAPAPLGVPEEQLLGCRSRVLSRLLFIAQTALLLLPAAGAGLCPAPCSCRIPLLDCSRRKLPAPSWRALSGLLPPDTAILDFSHNRLSNWNISLESQTLQEVKMNYNELTEIPYFGEPTSNITLLSLVHNIIPEINAQALQFYPALESLDLSSNIISEIKTSSFPRMQLKYLNLSNNRITTLEAGCFDNLSSSLLVVKLNRNRMSMIPPKIFKLPHLQFLELKRNRIKIVEGLTFQGLDSLRSLKMQRNGISKLKDGAFFGLNNMEELELEHNNLTRVNKGWLYGLRMLQQLYVSQNAIERISPDAWEFCQRLSELDLSYNQLTRLDESAFVGLSLLERLNLGDNRVTHIADGVFRFLSNLQTLDLRNNEISWAIEDASEAFAGLTSLTKLILQGNQIKSITKKAFIGLESLEHLDLNNNAIMSIQENAFSQTHLKELYGAVTPIGSDSSLDPQTSHPGPQVCTFEAIVFTPD

SEQ ID NO: 839470 - protein, 438 aa, Homo sapiens [sequence omitted]

SEQ ID NO: 839471 - protein, 1065 aa, Homo sapiens
MAPAPLGVPEEQLLGCRSRVLSRLLFIAQTALLLLPAAGAGLCPAPCSCRIPLLDCSRRKLPAPSWRALSGLLPPDTAILDFSHNRLSNWNISLESQTLQEVKMNYNELTEIPYFGEPTSNITLLSLVHNIIPEINAQALQFYPALESLDLSSNIISEIKTSSFPRMQLKYLNLSNNRITTLEAGCFDNLSSSLLVVKLNRNRMSMIPPKIFKLPHLQFLELKRNRIKIVEGLTFQGLDSLRSLKMQRNGISKLKDGAFFGLNNMEELELEHNNLTRVNKGWLYGLRMLQQLYVSQNAIERISPDAWEFCQRLSELDLSYNQLTRLDESAFVGLSLLERLNLGDNRVTHIADGVFRFLSNLQTLDLRNNEISWAIEDASEAFAGLTSLTKLILQGNQIKSITKKAFIGLESLEHLDLNNNAIMSIQENAFSQTHLKELILNTSSLLCDCHLKWLLQWLVDNNFQHSVNVSCAHPEWLAGQSILNVDLKDFVCDDFLKPQIRTHPETIIALRGMNVTLTCTAVSSSDSPMSTVWRKDSEILYDVDTENFVRYWQQAGEALEYTSILHLFNVNFTDEGKYQCIVTNHFGSNYSQKAKLTVNEMPSFLKTPMDLTIRTGAMARLECAAEGHPAPQISWQKDGGTDFPAARERRMHVMPEDDVFFIANVKIEDMGIYSCMAQNTAGGLSANASLTVLETPSFIRPLEDKTVTRGETAVLQCIAGGSPAPRLNWTKDDGPLLVTERHFFAAANQLLIIVDAGLEDAGKYTCIMSNTLGTERGHIYLNVISSPNCDSSQSSIGHEDDGWTTVGIVIIVVVCCVVGTSLIWVIVIYHMRRKNEDYSITNTEELNLPADIPSYLSSQGTLSEPQEGYSNSEAGSHQQLMPPANGYIHKGTDGGTGTRVICSDCYDNANIYSRTREYCPYTYIAEEDVLDQTLSSLMVQMPKETYLVHPPQDTTALESLIPSANREPSAFPTNHERISEKKLPSTQMSGETLQRPVWNINRELGLPHPPFSQQPVHESPQLHQNEGLAGREPDCSASSMSCHRLQDHAFDFSRTRNIQDGSEGT

SEQ ID NO: 839472 - protein, 553 aa, Homo sapiens
MNVTLTCTAVSSSDSPMSTVWRKDSEILYDVDTENFVRYWQQAGEALEYTSILHLFNVNFTDEGKYQCIVTNHFGSNYSQKAKLTVNEMPSFLKTPMDLTIRTGAMARLECAAEGHPAPQISWQKDGGTDFPAARERRMHVMPEDDVFFIANVKIEDMGIYSCMAQNTAGGLSANASLTVLETPSFIRPLEDKTVTRGETAVLQCIAGGSPAPRLNWTKDDGPLLVTERHFFAAANQLLIIVDAGLEDAGKYTCIMSNTLGTERGHIYLNVISSPNCDSSQSSIGHEDDGWTTVGIVIIVVVCCVVGTSLIWVIVIYHMRRKNEDYSITNTEELNLPADIPSYLSSQGTLSEPQEGYSNSEAGSHQQLMPPANGYIHKGTDGGTGTRVICSDCYDNANIYSRTREYCPYTYIAEEDVLDQTLSSLMVQMPKETYLVHPPQDTTALESLIPSANREPSAFPTNHERISEKKLPSTQMSGETLQRPVWNINRELGLPHPPFSQQPVHESPQLHQNEGLAGREPDCSASSMSCHRLQDHAFDFSRTRNIQDGSEGT

SEQ ID NO: 839473 - protein, 473 aa, Homo sapiens; identical to SEQ ID NO: 839469

SEQ ID NO: 839474 - protein, 31 aa, Homo sapiens
RKYSQQNIDKFNPAVHKKNYRPYPRRICLRH

SEQ ID NO: 839475 - protein, 116 aa, Homo sapiens
MEAGLTSPPRWAGSAAGALPLLRVPLLAALETGWTAWVGLRICSAPCGDRCQGQTIREKRIVEAANKKEVDYEAGDIPTEWEAWIRRTRKTPPTMEEILKNEKHRRRNQNKKPRFL

SEQ ID NO: 839476 - protein, 113 aa, Homo sapiens
LLEGLQDGGRPDFSASVGWVGGWSITPTAGPAAGSAGNWVDGMGWSQDLFRALWRSLSREVKEHVGTDQFGNKYYYIPQYKNWRGEVAAWAAIAWSVIARTNYSREKNCRSSK

SEQ ID NO: 839477 - protein, 119 aa, Homo sapiens
LLEGLQDGGRPDFSASVGWVGGWSITPTAGPAAGSAGNWVDGMGWSQDLFRALWRSLSREVKEHVGTDQFGNKYYYIPQYKNWRGQTIREKRIVEAANKKEVDYEAGDIPTEWEGNTKE

SEQ ID NO: 839478 - protein, 113 aa, Homo sapiens; identical to SEQ ID NO: 839476

SEQ ID NO: 839479 - protein, 148 aa, Homo sapiens
LLEGLQDGGRPDFSASVGWVGGWSITPTAGPAAGSAGNWVDGMGWSQDLFRALWRSLSREVKEHVGTDQFGNKYYYIPQYKNWRGQTIREKRIVEAANKKEVDYEAGDIPTEWEAWIRRTRKTPPTMEEILKNEKHRRRNQNKKPRFL

SEQ ID NO: 839480 - protein, 389 aa, Homo sapiens
LLEGLQDGGRPDFSASVGWVGGWSITPTAGPAAGSAGNWVDGMGWSQDLFRALWRSLSREVKEHVGTDQFGNKYYYIPQYKNWRGQTIREKRIVEAANKKTKKKKKNFVGAGLGPRKSFLKPPSLFGAPGPPEVYGRTSWATKVWSPGENPGAMAPRWLGFLPQLKNSAPGGNTRSGFGETKLQEGEVRRGPVAGSNTQGGVQGRGVRKSRNLGGPDVWKQRENQSQELNTEQYQQQDRSNADKQQDTEPADKVNSEETETIPAESMHYYAQEYKDSEQSRHPWPHATRQNVGPRRGNEGTTTINTNTAQNNRTITQGQSRQDNNGEPAGKEETNAETPTLRNSGEDNNKNNASPARKHEQTRTTNTHAPHRLRHTQANREQTREQPTN

SEQ ID NO: 839481 - protein, 118 aa, Homo sapiens
LLEGLQDGGRPDFSASVGWVGGWSITPTAGPAAGSAGNWVDGMGWSQDLFRALWRSLSREVKEHVGTDQFGNKYYYIPQYKNWRAWIRRTRKTPPTMEEILKNEKHRRRNQNKKPRFL

SEQ ID NO: 839482 - protein, 113 aa, Homo sapiens; identical to SEQ ID NO: 839476

SEQ ID NO: 839483 - protein, 113 aa, Homo sapiens; identical to SEQ ID NO: 839476

SEQ ID NO: 839484 - protein, 67 aa, Homo sapiens
MNSEVPMNSDRYSSAPLLSPLDSAFFLRICTEVKPPALLELQLLLLGSLESPSIKAFLGLHMCLSGC

SEQ ID NO: 839485 - protein, 156 aa, Homo sapiens
MSRKSGIGHEASLKRKAEEKLESYRKKIHMKNQAEEKAAEQFRMRLKNKQDEMKLEGDLRRSQRACQQLDVQKNIQVPREAWYWLRLEEETEEDEEEKEQDEDEYKSEDLSVLEKLQILTSYLREEHLYCIWCGTAYEDKEDLSSNCPGPTSADHD

SEQ ID NO: 839486 - protein, 60 aa, Homo sapiens
MRSARSTALNRGEQRAVRYYSHMKLNMAEEEDYMSDSFINVQEDIRPGLPMLRQIREARR

SEQ ID NO: 839487 - protein, 164 aa, Homo sapiens
VEPIPLNIKTGKSGIGHEASLKRKAEEKLESYRKKIHMKNQAEEKAAEQFRMRLKNKQDEMKLEGDLRRSQRACQQLDVQKNIQVPREAWYWLRLEEETEEDEEEKEQDEDEYKSEDLSVLEKLQILTSYLREEHLYCIWCGTAYEDKEDLSSNCPGPTSADHD

SEQ ID NO: 839488 - protein, 142 aa, Homo sapiens
LSDNQRMDKLEKTNSSLRKQNLDLLEQFRMRLKNKQDEMKLEGDLRRSQRACQQLDVQKNIQVPREAWYWLRLEEETEEDEEEKEQDEDEYKSEDLSVLEKLQILTSYLREEHLYCIWCGTAYEDKEDLSSNCPGPTSADHD

SEQ ID NO: 839489 - protein, 105 aa, Homo sapiens
WGKGKPSETQRQARDDRDQGRGDWIQEGTQSRKRQMSPRVGHFSPGILTQGARIVPRARTPGPGRTRLKQLPSLARPLRETSPGPRAPTLTPAPTSLGQALPGYP

SEQ ID NO: 839490 - protein, 396 aa, Homo sapiens
KRGQLEKKQPECEEAHGREVQEEEKKQKFWHLFPGCAKMGDWSFLGNFLEEVHKHSTVVGKVWLTVLFIFRMLVLGTAAESSWGDEQADFRCDTIQPGCQNVCYDQAFPISHIRYWVLQIIFVSTPSLVYMGHAMHTVRMQEKRKLREAERAKEVRGSGSYEYPVAEKAELSCWEEGNGRIALQGTLLNTYVCSILIRTTMEVGFIVGQYFIYGIFLTTLHVCRRSPCPHPVNCYVSRPTEKNVFIVFMLAVAALSLLLSLAELYHLGWKKIRQRFVKPRQHMAKCQLSGPSVGIVQSCTPPPDFNQCLENGPGGKFFNPFSNNMASQQNTDNLVTEQVRGQEQTPGEGFIQVRYGQKPEVPNGVSPGHRLPHGYHSDKRRLSKASSKARSDDLSV

SEQ ID NO: 839491 - protein, 358 aa, Homo sapiens
MGDWSFLGNFLEEVHKHSTVVGKVWLTVLFIFRMLVLGTAAESSWGDEQADFRCDTIQPGCQNVCYDQAFPISHIRYWVLQIIFVSTPSLVYMGHAMHTVRMQEKRKLREAERAKEVRGSGSYEYPVAEKAELSCWEEGNGRIALQGTLLNTYVCSILIRTTMEVGFIVGQYFIYGIFLTTLHVCRRSPCPHPVNCYVSRPTEKNVFIVFMLAVAALSLLLSLAELYHLGWKKIRQRFVKPRQHMAKCQLSGPSVGIVQSCTPPPDFNQCLENGPGGKFFNPFSNNMASQQNTDNLVTEQVRGQEQTPGEGFIQVRYGQKPEVPNGVSPGHRLPHGYHSDKRRLSKASSKARSDDLSV

SEQ ID NO: 839492 - protein, 363 aa, Homo sapiens
SLHFQTVPPGRTQTGRGLQHKAASTGRRKFWHLFPGCAKMGDWSFLGNFLEEVHKHSTVVGKVWLTVLFIFRMLVLGTAAESSWGDEQADFRCDTIQPGCQNVCYDQAFPISHIRYWVLQIIFVSTPSLVYMGHAMHTVRMQEKRKLREAERAKEVRGSGSYEYPVAEKAELSCWEEGNGRIALQGTLLNTYVCSILIRTTMEVGFIVGQYFIYGIFLTTLHVCRRSPCPHPVNCYVSRPTEKNVFIVFMLAVAALSLLLSLAELYHLGWKKIRQRFVKPRQHMAKCQLSGPSVGIVQSCTPPPDFNQCLENGPGGKFFNPFSNNMASQQNTDNLITLPPPRKSSKFPANRQHESRNLHYMCS

SEQ ID NO: 839493 - protein, 318 aa, Homo sapiens
KRGQLEKKQPECEEAHGREVQEEEKKQKFWHLFPGCAKMGDWSFLGNFLEEVHKHSTVVGKVWLTVLFIFRMLVLGTAAESSWGDEQADFRCDTIQPGCQNVCYDQAFPISHIRYWVLQIIFVSTPSLVYMGHAMHTVRMQEKRKLREAERAKEVRGSGSYEYPVAEKAELSCWEEGNGRIALQGTLLNTYVCSILIRTTMEVGFIVGQYFIYGIFLTTLHVCRRSPCPHPVNCYVSRPTEKNVFIVFMLAVAALSLLLSLAELYHLGWKKIRQRFVKPRQHMAKCQLSGPSVGIVQSCTPPPTSISTLTSIKDPLDL

SEQ ID NO: 839494 - protein, 358 aa, Homo sapiens; identical to SEQ ID NO: 839491

SEQ ID NO: 839495 - protein, 358 aa, Homo sapiens; identical to SEQ ID NO: 839491

SEQ ID NO: 839496 - protein, 327 aa, Homo sapiens
KRGQLEKKQPECEEAHGREVQEEEKKQKFWHLFPGCAKMGDWSFLGNFLEEVHKHSTVVGKVWLTVLFIFRMLVLGTAAESSWGDEQADFRCDTIQPGCQNVCYDQAFPISHIRYWVLQIIFVSTPSLVYMGHAMHTVRMQEKRKLREAERAKEVRGSGSYEYPVAEKAELSCWEEGNGRIALQGTLLNTYVCSILIRTTMEVGFIVGQYFIYGIFLTTLHVCRRSPCPHPVNCYVSRPTEKNVFIVFMLAVAALSLLLSLAELYHLGWKKIRQRFVKPRQHMAKCQLSGPSVGIVQSCTPPPDFNQCLENGPGGKFFNPFSNLSFC

SEQ ID NO: 839497 - protein, 100 aa, Homo sapiens
CDPPAWASQSAGITGVSYASVPNWYQVLCWVCFSGWSASPWVDAVIIAILQWGKLRHMGLKNLPEVILPEVGKLGSSRPCLVPVCFQDLRAWMIPAFRDH

SEQ ID NO: 839498 - protein, 348 aa, Homo sapiens [sequence omitted]

SEQ ID NO: 839499 - protein, 326 aa, Homo sapiens
MRQTPLTCSGHTRPVVDLAFSGITPYGYFLISACKDGKPMLRQGDTGDWIGTFLGHKGAVWGATLNKDATKAATAAADFTAKVWDAVSGDELMTLAHKHIVKTVDFTQDSNYLLTGGQDKLLRIYDLNKPEAEPKEISGHTSGIKKALWCSEDKQILSADDKTVRLWDHATMTEVKSLNFNMSVSSMEYIPEGEILVITYGRSIAFHSAVSLDPIKSFEAPATINSASLHPEKEFLVAGGEDFKLYKYDYNSGEELESYKGHFGPIHCVRFSPDGELYASGSEDGTLRLWQTVVGKTYGLWKCVLPEEIASENSDCIFPSAPDVKA

SEQ ID NO: 839500 - protein, 348 aa, Homo sapiens [sequence omitted]

SEQ ID NO: 839501 - protein, 177 aa, Homo sapiens [sequence omitted]

SEQ ID NO: 839502 - protein, 348 aa, Homo sapiens [sequence omitted]

SEQ ID NO: 839503 - protein, 161 aa, Homo sapiens
VTGASKDLLGQTYCTMKSNRSSISLDPIKSFEAPATINSASLHPEKEFLVAGGEDFKLYKYDYNSGEELESYKGHFGPIHCVRFSPDGELYASGSEDGTLRLWQTVVGKTYGLWKCVLPEEDSGELAKPKIGFPETTEEELEEIASENSDCIFPSAPDVKA

SEQ ID NO: 839504 - protein, 178 aa, Homo sapiens
  misc_feature (167)..(167): Xaa can be any naturally occurring amino acid
  misc_feature (170)..(170): Xaa can be any naturally occurring amino acid
MRQTPLTCSGHTRPVVDLAFSGITPYGYFLISACKDGKPMLRQGDTGDWIGTFLGHKGAVWGATLNKDATKAATAAADFTAKVWDAVSGDELMTLAHKHIVKTVDFTQDSNYLLTGGQDKLLRIYDLNKPEAEPKEISGHTSGIKKALWCSEDKQILSADDKTVRTXGDXCLPIEQKI

SEQ ID NO: 839505 - protein, 60 aa, Homo sapiens
MRQTPLTCSGHTRPVVDLAFSGITPYGYFLISACKDGKPMLRNERFLKSVLDHPLPNERF

SEQ ID NO: 839506 - protein, 348 aa, Homo sapiens [sequence omitted]

SEQ ID NO: 839507 - protein, 329 aa, Homo sapiens
MRQTPLTCSGHTRPVVDLAFSGITPYGYFLISACKDGKPMLRQGDTGDWIGTFLGHKGAVWGATLNKDATKAATAAADFTAKVWDAVSGDELMTLAHKHIVKTVDFTQDSNYLLTGGQDKLLRIYDLNKPEAEPKEISGHTSGIKKALWCSEDKQILSADDKTVRLWDHATMTEVKSLNFNMSVSSMEYIPEGEILVITYGRSIAFHSAVSLDPIKSFEAPATINSASLHPEKEFLVAGGEDFKLYKYDYNSGEELELYASGSEDGTLRLWQTVVGKTYGLWKCVLPEEDSGELAKPKIGFPETTEEELEEIASENSDCIFPSAPDVKA

SEQ ID NO: 839508 - protein, 256 aa, Homo sapiens
MTLAHKHIVKTVDFTQDSNYLLTGGQDKLLRIYDLNKPEAEPKEISGHTSGIKKALWCSEDKQILSADDKTVRLWDHATMTEVKSLNFNMSVSSMEYIPEGEILVITYGRSIAFHSAVSLDPIKSFEAPATINSASLHPEKEFLVAGGEDFKLYKYDYNSGEELESYKGHFGPIHCVRFSPDGELYASGSEDGTLRLWQTVVGKTYGLWKCVLPEEDSGELAKPKIGFPETTEEELEEIASENSDCIFPSAPDVKA

SEQ ID NO: 839509 - protein, 351 aa, Homo sapiens
MRQTPLTCSGHTRPVVDLAFSGITPYGYFLISACKDGKPMLRQGDTGDWIGTFLGHKGAVWGATLNKDATKAATAAADFTAKVWDAVSGDELMTLAHKHIVKTVDFTQRIVTLLLPRATRIHLVTHLCTSPTREAEPKEISGHTSGIKKALWCSEDKQILSADDKTVRLWDHATMTEVKSLNFNMSVSSMEYIPEGEILVITYGRSIAFHSAVSLDPIKSFEAPATINSASLHPEKEFLVAGGEDFKLYKYDYNSGEELESYKGHFGPIHCVRFSPDGELYASGSEDGTLRLWQTVVGKTYGLWKCVLPEEDSGELAKPKIGFPETTEEELEEIASENSDCIFPSAPDVKA

SEQ ID NO: 839510 - protein, 167 aa, Homo sapiens
CTRRRSSYYFVHHDLCPGLVPRRVHAHAESLDPIKSFEAPATINSASLHPEKEFLVAGGEDFKLYKYDYNSGEELESYKGHFGPIHCVRFSPDGELYASGSEDGTLRLWQTVVGKTYGLWKCVLPEEDSGELAKPKIGFPETTEEELEEIASENSDCIFPSAPDVKA

SEQ ID NO: 839511 - protein, 109 aa, Homo sapiens
MRQTPLTCSGHTRPVVDLAFSGITPYGYFLISACKDGKPMLRQGDTGDWIGTFLGHKGAVWGATLNKDATKAATAAADFTAVSVAKMANFGVLCSLCPEIIKNFSVRYS

SEQ ID NO: 839512 - protein, 778 aa, Homo sapiens
MPAFLGLKCLGKLCSSEKSKVTSSERTSARGSNRKRLIVEDRRVSGTSFTAHRRATITHLLYLCPKDYCPRGRVCNSVDPFVAHPQDPHHPSEKPVIHCHKCGEPCKGEVLRVQTKHFHIKCFTCKVCGCDLAQGGFFIKNGEYLCTLDYQRMYGTRCHGCGEFVEGEVVTALGKTYHPNCFACTICKRPFPPGDRVTFNGRDCLCQLCAQPMSSSPKETTFSSNCAGCGRDIKNGQALLALDKQWHLGCFKCKSCGKVLTGEYISKDGAPYCEKDYQGLFGVKCEACHQFITGKVLEAGDKHYHPSCARCSRCNQMFTEGEEMYLQGSTVWHPDCKQSTKTEEKLRPTRTSSESIYSRPGSSIPGSPGHTIYAKVDNEILDYKDLAAIPKVKAIYDIERPDLITYEPFYTSGYDDKQERQSLGESPRTLSPTPSAEGYQDVRDRMIHRSTSQGSINSPVYSRHSYTPTTSRSPQHFHRPGNEPSSGRNSPLPYRPDSLPLTPTYAQAPKHFHVPDQGINIYRKPPIYKQHAALAAQSKSSEDIIKFSKFPAAQAPDPSETPKIETDHWPGPPSFAVVGPDMKRRSSGREEDDEELLRRRQLQEEQLMKLNSGLGQLILKEEMEKESRERSSLLASRYDSPINSASHIPSSKTASLPGYGRNGLHRPVSTDFAQYNSYGDVSGGVRDYQTLPDGHMPAMRMDRGVSMPNMLEPKIFPYEMLMVTNRGRNKILREVDRTRLERHLAPEVFREIFGMSIQEFDRLPLWRRNDMKKKAKLF

SEQ ID NO: 839513 - protein, 220 aa, Homo sapiens
SCGRRPRTGSRRGPGPGGRSGAAFFPAPCGAVQRLPAPAPAACTMSARVAHPQDPHHPSEKPVIHCHKCGEPCKGEVLRVQTKHFHIKCFTCKVCGCDLAQGGFFIKNGEYLCTLDYQRMYGTRCHGCGEFVEGEVVTALGKTYHPNCFACTICKRPFPPGDRVTFNGRDCLCQLCAQPMSSSPKETTFSSKKMVAAVGREWTTDNQKRKTNDPGSSENF

SEQ ID NO: 839514 - protein, 462 aa, Homo sapiens
MFTEGEEMYLQGSTVWHPDCKQSTKTEEKLRPTRTSSESIYSRPGSSIPGSPGHTIYAKVDNEILDYKDLAAIPKVKAIYDIERPDLITYEPFYTSGYDDKQERQSLGESPRTLSPTPSAEGYQDVRDRMIHRSTSQGSINSPVYSRHSYTPTTSRSPQHFHRPGNEPSSGRNSPLPYRPDSLPLTPTYAQAPKHFHVPDQGINIYRKPPIYKQHAALAAQSKSSEDIIKFSKFPAAQAPDPSETPKIETDHWPGPPSFAVVGPDMKRRSSGREEDDEELLRRRQLQEEQLMKLNSGLGQLILKEEMEKESRERSSLLASRYDSPINSASHIPSSKTASLPGYGRNGLHRPVSTDFAQYNSYGDVSGGVRDYQTLPDGHMPAMRMDRGVSMPNMLEPKIFPYEMLMVTNRGRNKILREVDRTRLERHLAPEVFREIFGMSIQEFDRLPLWRRNDMKKKAKLF

SEQ ID NO: 839515 - protein, 718 aa, Homo sapiens
MLMTLEMTELTDPHHTMGDYKVAHPQDPHHPSEKPVIHCHKCGEPCKGEVLRVQTKHFHIKCFTCKVCGCDLAQGGFFIKNGEYLCTLDYQRMYGTRCHGCGEFVEGEVVTALGKTYHPNCFACTICKRPFPPGDRVTFNGRDCLCQLCAQPMSSSPKETTFSSNCAGCGRDIKNGQALLALDKQWHLGCFKCKSCGKVLTGEYISKDGAPYCEKDYQGLFGVKCEACHQFITGKVLEAGDKHYHPSCARCSRCNQMFTEGEEMYLQGSTVWHPDCKQSTKTEEKLRPTRTSSESIYSRPGSSIPGSPGHTIYAKVDNEILDYKDLAAIPKVKAIYDIERPDLITYEPFYTSGYDDKQERQSLGESPRTLSPTPSAEGYQDVRDRMIHRSTSQGSINSPVYSRHSYTPTTSRSPQHFHRPGNEPSSGRNSPLPYRPDSLPLTPTYAQAPKHFHVPDQGINIYRKPPIYKQHAALAAQSKSSEDIIKFSKFPAAQAPDPSETPKIETDHWPGPPSFAVVGPDMKRRSSGREEDDEELLRRRQLQEEQLMKLNSGLGQLILKEEMEKESRERSSLLASRYDSPINSASHIPSSKTASLPGYGRNGLHRPVSTDFAQYNSYGDVSGGVRDYQTLPDGHMPAMRMDRGVSMPNMLEPKIFPYEMLMVTNRGRNKILREVDRTRLERHLAPEVFREIFGMSIQEFDRLPLWRRNDMKKKAKLF

SEQ ID NO: 839516 - protein, 701 aa, Homo sapiens
MGLYVAHPQDPHHPSEKPVIHCHKCGEPCKGEVLRVQTKHFHIKCFTCKVCGCDLAQGGFFIKNGEYLCTLDYQRMYGTRCHGCGEFVEGEVVTALGKTYHPNCFACTICKRPFPPGDRVTFNGRDCLCQLCAQPMSSSPKETTFSSNCAGCGRDIKNGQALLALDKQWHLGCFKCKSCGKVLTGEYISKDGAPYCEKDYQGLFGVKCEACHQFITGKVLEAGDKHYHPSCARCSRCNQMFTEGEEMYLQGSTVWHPDCKQSTKTEEKLRPTRTSSESIYSRPGSSIPGSPGHTIYAKVDNEILDYKDLAAIPKVKAIYDIERPDLITYEPFYTSGYDDKQERQSLGESPRTLSPTPSAEGYQDVRDRMIHRSTSQGSINSPVYSRHSYTPTTSRSPQHFHRPGNEPSSGRNSPLPYRPDSLPLTPTYAQAPKHFHVPDQGINIYRKPPIYKQHAALAAQSKSSEDIIKFSKFPAAQAPDPSETPKIETDHWPGPPSFAVVGPDMKRRSSGREEDDEELLRRRQLQEEQLMKLNSGLGQLILKEEMEKESRERSSLLASRYDSPINSASHIPSSKTASLPGYGRNGLHRPVSTDFAQYNSYGDVSGGVRDYQTLPDGHMPAMRMDRGVSMPNMLEPKIFPYEMLMVTNRGRNKILREVDRTRLERHLAPEVFREIFGMSIQEFDRLPLWRRNDMKKKAKLF

SEQ ID NO: 839517 - protein, 401 aa, Homo sapiens
MFTEGEEMYLQGSTVWHPDCKQSTKTEEKLRAKVDNEILDYKDLAAIPKVKAIYDIERPDLITYEPFYTSGYDDKQERQSLGESPRTLSPTPSAEGYQDVRDRMIHRSTSQGSINSPVYSRHSYTPTTSRSPQHFHRPDQGINIYRKPPIYKQHAALAAQSKSSEDIIKFSKFPAAQAPDPSETPKIETDHWPGPPSFAVVGPDMKRRSSGREEDDEELLRRRQLQEEQLMKLNSGLGQLILKEEMEKESRERSSLLASRYDSPINSASHIPSSKTASLPGYGRNGLHRPVSTDFAQYNSYGDVSGGVRDYQTLPDGHMPAMRMDRGVSMPNMLEPKIFPYEMLMVTNRGRNKILREVDRTRLERHLAPEVFREIFGMSIQEFDRLPLWRRNDMKKKAKLF

SEQ ID NO: 839518 - protein, 778 aa, Homo sapiens [sequence omitted]

SEQ ID NO: 839519 - protein, 427 aa, Homo sapiens
MFTEGEEMYLQGSTVWHPDCKQSTKTEEKLRPTRTSSESIYSRPGSSIPGSPGHTIYAKVDNEILDYKDLAAIPKVKAIYDIERPDLITYEPFYTSGYDDKQERQSLGESPRTLSPTPSAEGYQDVRDRMIHRSTSQGSINSPVYSRHSYTPTTSRSPQHFHRPDQGINIYRKPPIYKQHAALAAQSKSSEDIIKFSKFPAAQAPDPSETPKIETDHWPGPPSFAVVGPDMKRRSSGREEDDEELLRRRQLQEEQLMKLNSGLGQLILKEEMEKESRERSSLLASRYDSPINSASHIPSSKTASLPGYGRNGLHRPVSTDFAQYNSYGDVSGGVRDYQTLPDGHMPAMRMDRGVSMPNMLEPKIFPYEMLMVTNRGRNKILREVDRTRLERHLAPEVFREIFGMSIQEFDRLPLWRRNDMKKKAKLF

SEQ ID NO: 839520 - protein, 575 aa, Homo sapiens
SQWVCRHWRDPVAHPQDPHHPSEKPVIHCHKCGEPCKGEVLRVQTKHFHIKCFTCKVCGCDLAQGGFFIKNGEYLCTLDYQRMYGTRCHGCGEFVEGEVVTALGKTYHPNCFACTICKRPFPPGDRVTFNGRDCLCQLCAQPMSSSPKETTFSSNCAGCGRDIKNGQALLALDKQWHLGCFKCKSCGKVLTGEYISKDGAPYCEKDYQGLFGVKCEACHQFITGKVLRQVTNITTPAVHDAADATRCSQKERKCIFKSPRTLSPTPSAEGYQDVRDRMIHRSTSQGSINSPVYSRHSYTPTTSRSPQHFHRPDQGINIYRKPPIYKQHAALAAQSKSSEDIIKFSKFPAAQAPDPSETPKIETDHWPGPPSFAVVGPDMKRRSSGREEDDEELLRRRQLQEEQLMKLNSGLGQLILKEEMEKESRERSSLLASRYDSPINSASHIPSSKTASLPGYGRNGLHRPVSTDFAQYNSYGDVSGGVRDYQTLPDGHMPAMRMDRGVSMPNMLEPKIFPYEMLMVTNRGRNKILREVDRTRLERHLAPEVFREIFGMSIQEFDRLPLWRRNDMKKKAKLF

SEQ ID NO: 839521 - protein, 197 aa, Homo sapiens [sequence omitted]

SEQ ID NO: 839522 - protein, 126 aa, Homo sapiens [sequence omitted]

SEQ ID NO: 839523 - protein, 778 aa, Homo sapiens; identical to SEQ ID NO: 839512

SEQ ID NO: 839524 - protein, 778 aa, Homo sapiens; identical to SEQ ID NO: 839512

SEQ ID NO: 839525 - protein, 191 aa, Homo sapiens
MFTEGEEMYLQGSTVWHPDCKQSTKTEEKLRPTRTSSESIYSRPGSSIPGSPGHTIYAKVDNEILDYKDLAAIPKVKAIYDIERPDLITYEPFYTSGYDDKQERQSLGESPRTLSPTPSAEGYQDVRDRMIHRSTSQGSINSPVYSRHSYTPTTSRSPQHFHRPDQGINIYRKPPIYKQHVLFEVILLLLI

SEQ ID NO: 839526 - protein, 269 aa, Homo sapiens
MFTEGEEMYLQGSTVWHPDCKQSTKTEEKLRPTRTSSESIYSRPGSSIPGSPGHTIYAKVDNEILDYKDLAAIPKVKAIYDIERPDLITYEPFYTSGYDDKQERQSLGESPRTLSPTPSAEGYQDVRDRMIHRSTSQGSINSPVYSRHSYTPTTSRSPQHFHRPDQGINIYRKPPIYKQHAALAAQSKSSEDIIKFSKFPAAQAPDPSETPKIETDHWPGPPSFAVVGPDMKRRSSGREEDDEELLRRRQLQEEQLMKKKPTVSKNEES

SEQ ID NO: 839527 - protein, 194 aa, Homo sapiens
MFTEGEEMYLQGSTVWHPDCKQSTKTEEKLRPTRTSSESIYSRPGSSIPGSPGHTIYAKVDNEILDYKDLAAIPKVKAIYDIERPDLITYEPFYTSGYDDKQERQSLGESPRTLSPTPSAEGYQDVRDRMIHRSTSQGSINSPVYSRHSYTPTTSRSPQHFHRPVKFPGALLTGGLYSERSLCAGFCALLRRSN

SEQ ID NO: 839528 - protein, 187 aa, Homo sapiens
MFTEGEEMYLQGSTVWHPDCKQSTKTEEKLRPTRTSSESIYSRPGSSIPGSPGHTIYAKVDNEILDYKDLAAIPKVKAIYDIERPDLITYEPFYTSGYDDKQERQSLGESPRTLSPTPSAEGYQDVRDRMIHRSTSQGSINSPVYSRHSYTPTTSRSPQHFHRPVRVTVPGFTLYNKLCFCDFFPYY

SEQ ID NO: 839529 - protein, 270 aa, Homo sapiens
SQWVCRHWRDPVAHPQDPHHPSEKPVIHCHKCGEPCKGEVLRVQTKHFHIKCFTCKVCGCDLAQGGFFIKNGEYLCTLDYQRMYGTRCHGCGEFVEGEVVTALGKTYHPNCFACTICKRPFPPGDRVTFNGRDCLCQLCAQPMSSSPKETTFSSNCAGCGRDIKNGQALLALDKQWHLGCFKCKSCGKVLTGEYISKDGAPYCEKDYQGLFGVKCEACHQFITGKVLEAGDKHYHPSCARCSRCNQMFTEGEEMYLQGNLGKSTERILEY

SEQ ID NO: 839530 - protein, 154 aa, Homo sapiens [sequence omitted]

SEQ ID NO: 839531 - protein, 708 aa, Homo sapiens
SQWVCRHWRDPVAHPQDPHHPSEKPVIHCHKCGEPCKGEVLRVQTKHFHIKCFTCKVCGCDLAQGGFFIKNGEYLCTLDYQRMYGTRCHGCGEFVEGEVVTALGKTYHPNCFACTICKRPFPPGDRVTFNGRDCLCQLCAQPMSSSPKETTFSSNCAGCGRDIKNGQALLALDKQWHLGCFKCKSCGKVLTGEYISKDGAPYCEKDYQGLFGVKCEACHQFITGKVLEAGDKHYHPSCARCSRCNQMFTEGEEMYLQGSTVWHPDCKQSTKTEEKLRPTRTSSESIYSRPGSSIPGSPGHTIYAKVDNEILDYKDLAAIPKVKAIYDIERPDLITYEPFYTSGYDDKQERQSLGESPRTLSPTPSAEGYQDVRDRMIHRSTSQGSINSPVYSRHSYTPTTSRSPQHFHRPGNEPSSGRNSPLPYRPDSLPLTPTYAQAPKHFHVPDQGINIYRKPPIYKQHAALAAQSKSSEDIIKFSKFPAAQAPDPSETPKIETDHWPGPPSFAVVGPDMKRRSSGREEDDEELLRRRQLQEEQLMKLNSGLGQLILKEEMEKESRERSSLLASRYDSPINSASHIPSSKTASLPGYGRNGLHRPVSTDFAQYNSYGDVSGGVRDYQTLPDGHMPAMRMDRGVSMPNMLEPKIFPYEMLMVTNRGRNKILREVDRTRLERHLAPEVFREIFGMSIQEFDRLPLWRRNDMKKKAKLF

SEQ ID NO: 839532 - protein, 626 aa, Homo sapiens
MYGTRCHGCGEFVEGEVVTALGKTYHPNCFACTICKRPFPPGDRVTFNGRDCLCQLCAQPMSSSPKETTFSSNCAGCGRDIKNGQALLALDKQWHLGCFKCKSCGKVLTGEYISKDGAPYCEKDYQGLFGVKCEACHQFITGKVLEAGDKHYHPSCARCSRCNQMFTEGEEMYLQGSTVWHPDCKQSTKTEEKLRPTRTSSESIYSRPGSSIPGSPGHTIYAKVDNEILDYKDLAAIPKVKAIYDIERPDLITYEPFYTSGYDDKQERQSLGESPRTLSPTPSAEGYQDVRDRMIHRSTSQGSINSPVYSRHSYTPTTSRSPQHFHRPGNEPSSGRNSPLPYRPDSLPLTPTYAQAPKHFHVPDQGINIYRKPPIYKQHAALAAQSKSSEDIIKFSKFPAAQAPDPSETPKIETDHWPGPPSFAVVGPDMKRRSSGREEDDEELLRRRQLQEEQLMKLNSGLGQLILKEEMEKESRERSSLLASRYDSPINSASHIPSSKTASLPGYGRNGLHRPVSTDFAQYNSYGDVSGGVRDYQTLPDGHMPAMRMDRGVSMPNMLEPKIFPYEMLMVTNRGRNKILREVDRTRLERHLAPEVFREIFGMSIQEFDRLPLWRRNDMKKKAKLF

SEQ ID NO: 839533 - protein, 700 aa, Homo sapiens
MAHVAHPQDPHHPSEKPVIHCHKCGEPCKGEVLRVQTKHFHIKCFTCKVCGCDLAQGGFFIKNGEYLCTLDYQRMYGTRCHGCGEFVEGEVVTALGKTYHPNCFACTICKRPFPPGDRVTFNGRDCLCQLCAQPMSSSPKETTFSSNCAGCGRDIKNGQALLALDKQWHLGCFKCKSCGKVLTGEYISKDGAPYCEKDYQGLFGVKCEACHQFITGKVLEAGDKHYHPSCARCSRCNQMFTEGEEMYLQGSTVWHPDCKQSTKTEEKLRPTRTSSESIYSRPGSSIPGSPGHTIYAKVDNEILDYKDLAAIPKVKAIYDIERPDLITYEPFYTSGYDDKQERQSLGESPRTLSPTPSAEGYQDVRDRMIHRSTSQGSINSPVYSRHSYTPTTSRSPQHFHRPGNEPSSGRNSPLPYRPDSLPLTPTYAQAPKHFHVPDQGINIYRKPPIYKQHAALAAQSKSSEDIIKFSKFPAAQAPDPSETPKIETDHWPGPPSFAVVGPDMKRRSSGREEDDEELLRRRQLQEEQLMKLNSGLGQLILKEEMEKESRERSSLLASRYDSPINSASHIPSSKTASLPGYGRNGLHRPVSTDFAQYNSYGDVSGGVRDYQTLPDGHMPAMRMDRGVSMPNMLEPKIFPYEMLMVTNRGRNKILREVDRTRLERHLAPEVFREIFGMSIQEFDRLPLWRRNDMKKKAKLF

SEQ ID NO: 839534 - protein, 427 aa, Homo sapiens; identical to SEQ ID NO: 839519

SEQ ID NO: 839535 - protein, 778 aa, Homo sapiens; identical to SEQ ID NO: 839512

SEQ ID NO: 839536 - protein, 124 aa, Homo sapiens
HYERISVTVRTLGSCSVLGSKPWSPFGPAGSSPCLFPLLSSLAKRPWPPLCPFGYKEGIDDSVAWGQERDTLHEHFSSHLIPPSQGKRHLAPEVFREIFGMSIQEFDRLPLWRRNDMKKKAKLF

SEQ ID NO: 839537 - protein, 778 aa, Homo sapiens; identical to SEQ ID NO: 839512

SEQ ID NO: 839538 - protein, 272 aa, Homo sapiens
MFTEGEEMYLQGSTVWHPDCKQSTKTEEKLRPTRTSSESIYSRPGSSIPGSPGHTIYAKVDNEILDYKDLAAIPKVKAIYDIERPDLITYEPFYTSGYDDKQERQSLGESPRTLSPTPSAEGYQDVRDRMIHRSTSQGSINSPVYSRHSYTPTTSRSPQHFHRPDQGINIYRKPPIYKQHAALAAQSKSSEDIIKFSKFPAAQAPDPSETPKIETDHWPGPPSFAVVGPDMKRRSSGREEDDEELLRRRQLQEEQLMKLNSGLGQLILKANV

SEQ ID NO: 839539 - protein, 353 aa, Homo sapiens
MFTEGEEMYLQGSTVWHPDCKQSTKTEEKLRPTRTSSESIYSRPGSSIPGSPGHTIYAKVDNEILDYKDLAAIPKVKAIYDIERPDLITYEPFYTSGYDDKQERQSLGESPRTLSPTPSAEGYQDVRDRMIHRSTSQGSINSPVYSRHSYTPTTSRSPQHFHRPDQGINIYRKPPIYKQHAALAAQSKSSEDIIKFSKFPAAQAPDPSETPKIETDHWPGPPSFAVVGPDMKRRSSGREEDDEELLRRRQLQEEQLMKLNSGLGQLILKEEMEKESRERSSLLASRYDSPINSASHIPSSKTASLPGYGRNGLHRPVSTDFAQYNSYGDVSGGVRDYRHSQIATACEPMRDPL

SEQ ID NO: 839540 - protein, 187 aa, Homo sapiens; identical to SEQ ID NO: 839528

SEQ ID NO: 839541 - protein, 296 aa, Homo sapiens
SQWVCRHWRDPVAHPQDPHHPSEKPVIHCHKCGEPCKGEVLRVQTKHFHIKCFTCKVCGCDLAQGGFFIKNGEYLCTLDYQRMYGTRCHGCGEFVEGEVVTALGKTYHPNCFACTICKRPFPPGDRVTFNGRDCLCQLCAQPMSSSPKETTFSSNCAGCGRDIKNGQALLALDKQWHLGCFKCKSCGKVLTGEYISKDGAPYCEKDYQGLFGVKCEACHQFITGKVLEAGDKHYHPSCARCSRCNQMFTEGEEMYLQGSTVWHPDCKQSTKTEEKLRLCWYTLLRSVHEEVEAQGS

SEQ ID NO: 839542 - protein, 585 aa, Homo sapiens [sequence omitted]

SEQ ID NO: 839543 - protein, 661 aa, Homo sapiens
MAFDVSCFFWVVLFSAGCKVITSWDQMCIEKEANKTYNCENLGLSEIPDTLPNTTEFLEFSFNFLPTIHNRTFSRLMNLTFLDLTRCQINWIHEDTFQSHHQLSTLVLTGNPLIFMAETSLNGPKSLKHLFLIQTGISNLEFIPVHNLENLESLYLGSNHISSIKFPKDFPARNLKVLDFQNNAIHYISREDMRSLEQAINLSLNFNGNNVKGIELGAFDSTVFQSLNFGGTPNLSVIFNGLQNSTTQSLWLGTFEDIDDEDISSAMLKGLCEMSVESLNLQEHRFSDISSTTFQCFTQLQELDLTATHLKGLPSGMKGLNLLKKLVLSVNHFDQLCQISAANFPSLTHLYIRGNVKKLHLGVGCLEKLGNLQTLDLSHNDIEASDCCSLQLKNLSHLQTLNLSHNEPLGLQSQAFKECPQLELLDLAFTRLHINAPQSPFQNLHFLQVLNLTYCFLDTSNQHLLAGLPVLRHLNLKGNHFQDGTITKTNLLQTVGSLEVLILSSCGLLSIDQQAFHSLGKMSHVDLSHNSLTCDSIDSLSHLKGIYLNLAANSINIISPRLLPILSQQSTINLSHNPLDCTCSNIHFLTWYKENLHKLEGSEETTCANPPSLRGVKLSDVKLSCGITAIGIFFLIVFLLLLAILLFFAVKYLLRWKYQHI

SEQ ID NO: 839544 - protein, 1437 aa, Homo sapiens
RGTLYGGREDAADVLAASPEAAPGGAGGIVSLIWPPECQGGVPAAVIMVKEQFRETDVAKKISHICFGMKSPEEMRQQAHIQVVSKNLYSQDNQHAPLLYGVLDHRMGTSEKDRPCETCGKNLADCLGHYGYIDLELPCFHVGYFRAVIGILQMICKTCCHIMLSQEEKKQFLDYLKRPGLTYLQKRGLKKKISDKCRKKNICHHCGAFNGTVKKCGLLKIIHEKYKTNKKVVDPIVSNFLQSFETAIEHNKEVEPLLGRAQENLNPLVVLNLFKRIPAEDVPLLLMNPEAGKPSDLILTRLLVPPLCIRPSVVSDLKSGTNEDDLTMKLTEIIFLNDVIKKHRISGAKTQMIMEDWDFLQLQCALYINSELSGIPLNMAPKKWTRGFVQRLKGKQGRFRGNLSGKRVDFSGRTVISPDPNLRIDEVAVPVHVAKILTFPEKVNKANINFLRKLVQNGPEVHPGANFIQQRHTQMKRFLKYGNREKMAQELKYGDIVERHLIDGDVVLFNRQPSLHKLSIMAHLARVKPHRTFRFNECVCTPYNADFDGDEMNLHLPQTEEAKAEALVLMGTKANLVTPRNGEPLIAAIQDFLTGAYLLTLKDTFFDRAKACQIIASILVGKDEKIKVRLPPPTILKPVTLWTGKQIFSVILRPSDDNPVRANLRTKGKQYCGKGEDLCANDSYVTIQNSELMSGSMDKGTLGSGSKNNIFYILLRDWGQNEAADAMSRLARLAPVYLSNRGFSIGIGDVTPGQGLLKAKYELLNAGYKKCDEYIEALNTGKLQQQPGCTAEETLEALILKELSVIRDHAGSACLRELDKSNSPLTMALCGSKGSFINISQMIACVGQQAISGSRVPDGFENRSLPHFEKHSKLPAAKGFVANSFYSGLTPTEFFFHTMAGREGLVDTAVKTAETGYMQRRLVKSLEDLCSQYDLTVRSSTGDIIQFIYGGDGLDPAAMEGKDEPLEFKRVLDNIKAVFPCPSEPALSKNELILTTESIMKKSEFLCCQDSFLQEIKKFIKGVSEKIKKTRDKYGINDNGTTEPRVLYQLDRITPTQVEKFLETCRDKYMRAQMEPGSAVGALCAQSIGEPGTQMTLKTFHFAGVASMNITLGVPRIKEIINASKAISTPIITAQLDKDDDADYARLVKGRIEKTLLGEISEYIEEVFLPDDCFILVKLSLERIRLLRLEVNAETVRYSICTSKLRVKPGDVAVHGEAVVCVTPRENSKSSMYYVLQFLKEDLPKVVVQGIPEVSRAVIHIDEQSGKEKYKLLVEGDNLRAVMATHGVKGTRTTSNNTYEVEKTLGIEAARTTIINEIQYTMVNHGMSIDRRHVMLLSDLMTYKGEVLGITRFGLAKMKESVLMLASFEKTADHLFDAAYFGQKDSVCGVSECIIMGIPMNIGTGLFKLLHKADRDPNPPKRPLIFDTNEFHIPLVT

SEQ ID NO: 839545 - protein, 1314 aa, Homo sapiens
RGTLYGGREDAADVLAASPEAAPGGAGGIVSLIWPPECQGGVPAAVIMVKEQFRETDVAKKISHICFGMKSPEEMRQQAHIQVVSKNLYSQDNQHAPLLYGVLDHRMGTSEKDRPCETCGKNLADCLGHYGYIDLELPCFHVGYFRAVIGILQMICKTCCHIMLSQEEKKQFLDYLKRPGLTYLQKRGLKKKISDKCRKKNICHHCGAFNGTVKKCGLLKIIHEKYKTNKKVVDPIVSNFLQSFETAIEHNKEVEPLLGRAQENLNPLVVLNLFKRIPAEDVPLLLMNPEAGKPSDLILTRLLVPPLCIRPSVVSDLKSGTNEDDLTMKLTEIIFLNDVIKKHRISGAKTQMIMEDWDFLQLQCALYINSELSGIPLNMAPKKWTRGFVQRLKGKQGRFRGNLSGKRVDFSGRTVISPDPNLRIDEVAVPVHVAKILTFPEKVNKANINFLRKLVQNGPEVHPGANFIQQRHTQMKRFLKYGNREKMAQELKYGDIVERHLIDGDVVLFNRQPSLHKLSIMAHLARVKPHRTFRFNECVCTPYNADFDGDEMNLHLPQTEEAKAEALVLMGTKANLVTPRNGEPLIAAIQDFLTGAYLLTLKDTFFDRAKACQIIASILVGKDEKIKVRLPPPTILKPVTLWTGKQIFSVILRPSDDNPVRANLRTKGKQYCGKGEDLCANDSYVTIQNSELMSGSMDKGTLGSGSKNNIFYILLRDWGQNEAADAMSRLARLAPVYLSNRGFSIGIGDVTPGQGLLKAKYELLNAGYKKCDEYIEALNTGKLQQQPGCTAEETLERRLVKSLEDLCSQYDLTVRSSTGDIIQFIYGGDGLDPAAMEGKDEPLEFKRVLDNIKAVFPCPSEPALSKNELILTTESIMKKSEFLCCQDSFLQEIKKFIKGVSEKIKKTRDKYGINDNGTTEPRVLYQLDRITPTQVEKFLETCRDKYMRAQMEPGSAVGALCAQSIGEPGTQMTLKTFHFAGVASMNITLGVPRIKEIINASKAISTPIITAQLDKDDDADYARLVKGRIEKTLLGEISEYIEEVFLPDDCFILVKLSLERIRLLRLEVNAETVRYSICTSKLRVKPGDVAVHGEAVVCVTPRENSKSSMYYVLQFLKEDLPKVVVQGIPEVSRAVIHIDEQSGKEKYKLLVEGDNLRAVMATHGVKGTRTTSNNTYEVEKTLGIEAARTTIINEIQYTMVNHGMSIDRRHVMLLSDLMTYKGEVLGITRFGLAKMKESVLMLASFEKTADHLFDAAYFGQKDSVCGVSECIIMGIPMNIGTGLFKLLHKADRDPNPPKRPLIFDTNEFHIPLVT

SEQ ID NO: 839546 - protein, 1414 aa, Homo sapiens
RGTLYGGREDAADVLAASPEAAPGGAGGIVSLIWPPECQGGVPAAVIMVKEQFRETDVAKKISHICFGMKSPEEMRQQAHIQVVSKNLYSQDNQHAPLLYGVLDHRMGTSEKDRPCETCGKNLADCLGHYGYIDLELPCFHVGYFRAVIGILQMICKTCCHIMLSQEEKKQFLDYLKRPGLTYLQKRGLKKKISDKCRKKNICHHCGAFNGTVKKCGLLKIIHEKYKTNKKVVDPIVSNFLQSFETAIEHNKEVEPLLGRAQENLNPLVVLNLFKRIPAEDVPLLLMNPEAGKPSDLILTRLLVPPLCIRPSVVSDLKSGTNEDDLTMKLTEIIFLNDVIKKHRISGAKTQMIMEDWDFLQLQCALYINSELSGIPLNMAPKKWTRGFVQRLKGKQGRFRGNLSGKRVDFSGRTVISPDPNLRIDEVAVPVHVAKILTFPEKVNKANINFLRKLVQNGPEVHPGANFIQQRHTQMKRFLKYGNREKMAQELKYGDIVERHLIDGDVVLFNRQPSLHKLSIMAHLARVKPHRTFRFNECVCTPYNADFDGDEMNLHLPQTEEAKAEALVLMGTKANLVTPRNGEPLIAAIQDFLTGAYLLTLKDTFFDRAKACQIIASILVGKDEKIKVRLPPPTILKPVTLWTGKQIFSVILRPSDDNPVRANLRTKGKQYCGKGEDLCANDSYVTIQNSELMSGSMDKGTLGSGSKNNIFYILLRDWGQNEAADAMSRLARLAPVYLSNRGFSIGIGDVTPGQGLLKAKYELLNAGYKKCDEYIEALNTGKLQQQPGCTAEETLEALILKELSVIRDHAGSACLRELDKSNSPLTMALCGSKGSFINISQMIACVGQQAISGSRVPDGFENRSLPHFEKHSKLPAAKGFVANSFYSGLTPTEFFFHTMAGREGLVDTAVKTAETGYMQRRLVKSLEDLCSQYDLTVRSSTGDIIQFIYGGDGLDPAAMEGKDEPLEFKRVLDNIKAVFPCPSEPALSKNELILTTESIMKKSEFLCCQDSFLQEIKKFIKGVSEKIKKTRDKYGINDNGTTEPRVLYQLDRITPTQVEKFLETCRDKYMRAQMEPGSAVGALCAQSIGEPGTQMTLKTFHFAGVASMNITLGVPRIKEIINASKAISTPIITAQLDKDDDADYARLDDCFILVKLSLERIRLLRLEVNAETVRYSICTSKLRVKPGDVAVHGEAVVCVTPRENSKSSMYYVLQFLKEDLPKVVVQGIPEVSRAVIHIDEQSGKEKYKLLVEGDNLRAVMATHGVKGTRTTSNNTYEVEKTLGIEAARTTIINEIQYTMVNHGMSIDRRHVMLLSDLMTYKGEVLGITRFGLAKMKESVLMLASFEKTADHLFDAAYFGQKDSVCGVSECIIMGIPMNIGTGLFKLLHKADRDPNPPKRPLIFDTNEFHIPLVT

SEQ ID NO: 839547 - protein, 1027 aa, Homo sapiens
RGTLYGGREDAADVLAASPEAAPGGAGGIVSLIWPPECQGGVPAAVIMVKEQFRETDVAKKISHICFGMKSPEEMRQQAHIQVVSKNLYSQDNQHAPLLYGVLDHRMGTSEKDRPCETCGKNLADCLGHYGYIDLELPCFHVGYFRAVIGILQMICKTCCHIMLSQEEKKQFLDYLKRPGLTYLQKRGLKKKISDKCRKKNICHHCGAFNGTVKKCGLLKIIHEKYKTNKKVVDPIVSNFLQSFETAIEHNKEVEPLLGRAQENLNPLVVLNLFKRIPAEDVPLLLMNPEAGKPSDLILTRLLVPPLCIRPSVVSDLKSGTNEDDLTMKLTEIIFLNDVIKKHRISGAKTQMIMEDWDFLQLQCALYINSELSGIPLNMAPKKWTRGFVQRLKGKQGRFRGNLSGKRVDFSGRTVISPDPNLRIDEVAVPVHVAKILTFPEKVNKANINFLRKLVQNGPEVHPGANFIQQRHTQMKRFLKYGNREKMAQELKYGDIVERHLIDGDVVLFNRQPSLHKLSIMAHLARVKPHRTFRFNECVCTPYNADFDGDEMNLHLPQTEEAKAEALVLMGTKANLVTPRNGEPLIAAIQDFLTGAYLLTLKDTFFDRAKACQIIASILVGKDEKIKVRLPPPTILKPVTLWTGKQIFSVILRPSDDNPVRANLRTKGKQYCGKGEDLCANDSYVTIQNSELMSGSMDKGTLGSGSKNNIFYILLRDWGQNEAADAMSRLARLAPVYLSNRGFSIGIGDVTPGQGLLKAKYELLNAGYKKCDEYIEALNTGKLQQQPGCTAEETLEALILKELSVIRDHAGSACLRELDKSNSPLTMALCGSKGSFINISQMIACVGQQAISGSRVPDGFENRSLPHFEKHSKLPAAKGFVANSFYSGLTPTEFFFHTMAGREGLVDTAVKTAETGYMQRRLVKSLEDLCSQYDLTVRSSTGDIIQFIYGGDGLDPAAMEGKDEPLEFKRVLDNIKAVFPCPSEPALSKNELILTTESIMKKSEFLCCQDSFLQSSEVELVTVYGHM

SEQ ID NO: 839548 - protein, 1437 aa, Homo sapiens; identical to SEQ ID NO: 839544

SEQ ID NO: 839549 - protein, 1437 aa, Homo sapiens; identical to SEQ ID NO: 839544

SEQ ID NO: 839550 - protein, 72 aa, Homo sapiens
PLRLFPSSVAHVTGPLGCELHPIRGEAAPGDAKTGFSGLSGIRWGPLGPPSSGKLQNSVIHQLEHRDKEIQA

SEQ ID NO: 839551 - protein, 348 aa, Homo sapiens
RAGTGLLLSGGGSMAAGAAEAAVAAVEEVGSAGQFEELLRLKAKSLLVVHFWAPWAPQCAQMNEVMAELAKELPQVSFVKLEAEGVPEVSEKYEISSVPTFLFFKNSQKIDRLDGAHAPELTKKVQRHASSGSFLPSANEHLKEDLNLRLKKLTHAAPCMLFMKGTPQEPRCGFSKQMVEILHKHNIQFSSFDIFSDEEVRQGLKAYSSWPTYPQLYVSGELIGGLDIIKELEASEELDTICPKAPKLEERLKVLTNKASVMLFMKGNKQEAKCGFSKQILEILNSTGVEYETFDILEDEEVRQGLKAYSNWPTYPQLYVKGELVGGLDIVKELKENGELLPILRGEN

SEQ ID NO: 839552 - protein, 348 aa, Homo sapiens; identical to SEQ ID NO: 839551

SEQ ID NO: 839553 - protein, 348 aa, Homo sapiens; identical to SEQ ID NO: 839551

SEQ ID NO: 839554 - protein, 348 aa, Homo sapiens; identical to SEQ ID NO: 839551

SEQ ID NO: 839555 - protein, 348 aa, Homo sapiens; identical to SEQ ID NO: 839551

SEQ ID NO: 839556 - protein, 395 aa, Homo sapiens
RAGTGLLLSGGGSMAAGAAEAAVAAVEEVGSAGQFEELLRLKAKSLLVVHFWAPWAPQCAQMNEVMAELAKELPQVSFVKLEAEGVPEVSEKYEISSVPTFLFFKNSQKIDRLDGAHAPELTKKVQRHASSGSFLPSANEHLKEDLNLRLKKLTHAAPCMLFMKGTPQEPRCGFSKQMVEILHKHNIQFSSFDIFSDEEVRQGLKAYSSWPTYPQLYVSGELIGGLDIIKELEASEELDTICPKAPKLEERLKVLTNKASVMLFMKGNKQEAKCGFSKQILEILNSTGVEYETFDILEDEEVRQGLKAYSNWPTYPQLYVKGELVGGLDIVKELKENGELLPILRGELGAVHDLVLRNGLGIENSCFLSYMFCVFHNVVLNKCMLHFFPTKNRMQ

SEQ ID NO: 839557 - protein, 315 aa, Homo sapiens
MLTSVRACRERSLLVVHFWAPWAPQCAQMNEVMAELAKELPQVSFVKLEAEGVPEVSEKYEISSVPTFLFFKNSQKIDRLDGAHAPELTKKVQRHASSGSFLPSANEHLKEDLNLRLKKLTHAAPCMLFMKGTPQEPRCGFSKQMVEILHKHNIQFSSFDIFSDEEVRQGLKAYSSWPTYPQLYVSGELIGGLDIIKELEASEELDTICPKAPKLEERLKVLTNKASVMLFMKGNKQEAKCGFSKQILEILNSTGVEYETFDILEDEEVRQGLKAYSNWPTYPQLYVKGELVGGLDIVKELKENGELLPILRGEN

SEQ ID NO: 839558 - protein, 284 aa, Homo sapiens
RAGTGLLLSGGGSMAAGAAEAAVAAVEEVGSAGQFEELLRLKAKSLLVVHFWAPWAPQCAQMNEVMAELAKELPQVSFVKLEAEGVPEVSEKYEISSVPTFLFFKNSQKIDRLDGAHAPELTKKVQRHASSGSFLPSANEHLKEDLNLRLKKLTHAAPCMLFMKGTPQEPRCGFSKQMVEILHKHNIQFSSFDIFSDEEVRQGLKAYSSWPTYPQLYVSGELIGGLDIIKELEASEELDTICPKAPKLEERLKVLTNKASVMLFMKGNKQGAKCGFRKQFWNTK

SEQ ID NO: 839559 - protein, 317 aa, Homo sapiens
MAAGAAEAAVAAVEEVGSAGQFEELLRLKAKSLLVVHFWAPWAPQCAQMNEVMAELAKELPQVSFVKLEAEGVPEVSEKYEISSVPTFLFFKNSQKIDRLDGAHAPELTNLKEDLNLRLKKLTHAAPCMLFMKGTPQEPRCGFSKQMVEILHKHNIQFSSFDIFSDEEVRQGLKAYSSWPTYPQLYVSGELIGGLDIIKELEASEELDTICPKAPKLEERLKVLTNKASVMLFMKGNKQEAKCGFSKQILEILNSTGVEYETFDILEDEEVRQGLKAYSNWPTYPQLYVKGELVGGLDIVKELKENGELLPILRGEN

SEQ ID NO: 839560 - protein, 114 aa, Homo sapiens
GREARLEAPAPALAPTPTAVQARGTRPSRPLAWAAPPRDGGGGDSAVPQWRGGGRGGAETPALRATERDPRLRAPPFLCPPGGSGRLGVGPLLFSLPSGTPLSQEERRGKAPLH

SEQ ID NO: 839561 - protein, 81 aa, Homo sapiens
SRGSHMIAPRSMKGNKQEAKCGFSKQILEILNSTGVEYETFDILEDEEVRQGLKAYSNWPTYPQLYVKGELVEQLMWDTDA

SEQ ID NO: 839562 - protein, 335 aa, Homo sapiens
MAAGAAEAAVAAVEEVGSAGQFEELLRLKAKSLLVVHFWAPWAPQCAQMNEVMAELAKELPQVSFVKLEAEGVPEVSEKYEISSVPTFLFFKNSQKIDRLDGAHAPELTKKVQRHASSGSFLPSANEHLKEDLNLRLKKLTHAAPCMLFMKGTPQEPRCGFSKQMVEILHKHNIQFSSFDIFSDEEVRQGLKAYSSWPTYPQLYVSGELIGGLDIIKELEASEELDTICPKAPKLEERLKVLTNKASVMLFMKGNKQEAKCGFSKQILEILNSTGVEYETFDILEDEEVRQGLKAYSNWPTYPQLYVKGELVGGLDIVKELKENGELLPILRGEN

SEQ ID NO: 839563 - protein, 335 aa, Homo sapiens; identical to SEQ ID NO: 839562

SEQ ID NO: 839564 - protein, 348 aa, Homo sapiens; identical to SEQ ID NO: 839551

SEQ ID NO: 839565 - protein, 356 aa, Homo sapiens
RAGTGLLLSGGGSMAAGAAEAAVAAVEEVGSAGQFEELLRLKAKSLLVVHFWAPWAPQCAQMNEVMAELAKELPQVSFVKLEAEGVPEVSEKYEISSVPTFLFFKNSQKIDRLDGAHAPELTKKVQRHASSGSFLPSANEHLKEDLNLRLKKLTHAAPCMLFMKGTPQEPRCGFSKQMVEILHKHNIQFSSFDIFSDEEVRQGLKAYSSWPTYPQLYVSGELIGGLDIIKELEASEELDTICPKAPKLEERLKVLTNKASVMLFMKGNKQEAKCGFSKQILEILNSTGVEYETFDILEDEEVRQGLKAYSNWPTYPQLYVKGELVGGLDIVKTGSGSALQPGRQSETWSQKKKKRI

SEQ ID NO: 839566 - protein, 189 aa, Homo sapiens
MLFMKGTPQEPRCGFSKQMVEILHKHNIQFSSFDIFSDEEVRQGLKAYSSWPTYPQLYVSGELIGGLDIIKELEASEELDTICPKAPKLEERLKVLTNKASVMLFMKGNKQEAKCGFSKQILEILNSTGVEYETFDILEDEEVRQGLKAYSNWPTYPQLYVKGELVGGLDIVKELKENGELLPILRGEN

SEQ ID NO: 839567 - protein, 95 aa, Homo sapiens
SRGSHMIAPRSMKGNKQEAKCGFSKQILEILNSTGVEYETFDILEDEEVRQGLKAYSNWPTYPQLYVKGELVGGLDIVKELKENGELLPILRGEN

SEQ ID NO: 839568 - protein, 1121 aa, Homo sapiens
MPIVDKLKEALKPGRKDSADDGELGKLLASSAKKVLLQKIEFEPASKSFSYQLEALKSKYVLLNPKTEGASRHKSGDDPPARRQGSEHTYESCGDGVPAPQKVLFPTERLSLRWERVFRVGAGLHNLGNTCFLNATIQCLTYTPPLANYLLSKEHARSCHQGSFCMLCVMQNHIVQAFANSGNAIKPVSFIRDLKKIARHFRFGNQEDAHEFLRYTIDAMQKACLNGCAKLDRQTQATTLVHQIFGGYLRSRVKCSVCKSVSDTYDPYLDVALEIRQAANIVRALELFVKADVLSGENAYMCAKCKKKVPASKRFTIHRTSNVLTLSLKRFANFSGGKITKDVGYPEFLNIRPYMSQNNGDPVMYGLYAVLVHSGYSCHAGHYYCYVKASNGQWYQMNDSLVHSSNVKVVLNQQAYVLFYLRIPGSKKSPEGLISRTGSSSLPGRPSVIPDHSKKNIGNGIISSPLTGKRQDSGTMKKPHTTEEIGVPISRNGSTLGLKSQNGCIPPKLPSGSPSPKLSQTPTHMPTILDDPGKKVKKPAPPQHFSPRTAQGLPGTSNSNSSRSGSQRQGSWDSRDVVLSTSPKLLATATANGHGLKGNDESAGLDRRGSSSSSPEHSASSDSTKAPQTPRSGAAHLCDSQETNCSTAGHSKTPPSGADSKTVKLKSPVLSNTTTEPASTMSPPPAKKLALSAKKASTLWRATGNDLRPPPPSPSSDLTHPMKTSHPVVASTWPVHRARAVSPAPQSSSRLQPPFSPHPTLLSSTPKPPGTSEPRSCSSISTALPQVNEDLVSLPHQLPEASEPPRSPSEKRKKTFVGEPQRLGSETCLPQHIREATAAPHGKRKRKKKKRPEDTAASALQEGQTQRQPGSPMYRREGQAQLPAVRRQEDGTQPQVNGQQVGCVTDGHHASSRKRRRKGAEGLGEEGGLHQDPLRHSCSPMGDGDPEAMEESPRKKKKRKQETQRAVEEDGHLKCPRSAKPQDAVVPESSSCAPSANGWCPGDRMGLSQAPPVSWNGERESDVVQELLKYSSDKAYGRKVLTWDGKMSAVSQDAIEDSRQARTETVVDDWDEEFDRGKEKKIKKFKREKRRNFNAFQKLQTRRNFWSVTHPAKAASLSYRR

SEQ ID NO: 839569 - protein, 818 aa, Homo sapiens
MGAIPRVILLSPSLKGWGLLFRLDRQTQATTLVHQIFGGYLRSRVKCSVCKSVSDTYDPYLDVALEIRQAANIVRALELFVKADVLSGENAYMCAKCKKKVPASKRFTIHRTSNVLTLSLKRFANFSGGKITKDVGYPEFLNIRPYMSQNNGDPVMYGLYAVLVHSGYSCHAGHYYCYVKASNGQWYQMNDSLVHSSNVKVVLNQQAYVLFYLRIPGSKKSPEGLISRTGSSSLPGRPSVIPDHSKKNIGNGIISSPLTGKRQDSGTMKKPHTTEEIGVPISRNGSTLGLKSQNGCIPPKLPSGSPSPKLSQTPTHMPTILDDPGKKVKKPAPPQHFSPRTAQGLPGTSNSNSSRSGSQRQGSWDSRDVVLSTSPKLLATATANGHGLKGNDESAGLDRRGSSSSSPEHSASSDSTKAPQTPRSGAAHLCDSQETNCSTAGHSKTPPSGADSKTVKLKSPVLSNTTTEPASTMSPPPAKKLALSAKKASTLWRATGNDLRPPPPSPSSDLTHPMKTSHPVVASTWPVHRARAVSPAPQSSSRLQPPFSPHPTAASALQEGQTQRQPGSPMYRREGQAQLPAVRRQEDGTQPQVNGQQVGCVTDGHHASSRKRRRKGAEGLGEEGGLHQDPLRHSCSPMGDGDPEAMEESPRKKKKRKQETQRAVEEDGHLKCPRSAKPQDAVVPESSSCAPSANGWCPGDRMGLSQAPPVSWNGERESDVVQELLKYSSDKAYGRKVLTWDGKMSAVSQDAIEDSRQARTETVVDDWDEEFDRGKEKKIKKFKREKRRNFNAFQKLQTRRNFWSVTHPAKAASLSYRR

SEQ ID NO: 839570 - protein, 74 aa, Homo sapiens
MLHDDIPTLANYSGGKITKDVGYPEFLNIRPYMSQNNGDPVMYGLYAVLVHSGYSCHAGHYYCYVKLKHAGSSR

SEQ ID NO: 839571 - protein, 1121 aa, Homo sapiens; identical to SEQ ID NO: 839568

SEQ ID NO: 839572 - protein, 917 aa, Homo sapiens
MGLLDGAIPRVILLSPSLKGWGLLFRLDRQTQATTLVHQIFGGYLRSRVKCSVCKSVSDTYDPYLDVALEIRQAANIVRALELFVKADVLSGENAYMCAKCKKKVPASKRFTIHRTSNVLTLSLKRFANFSGGKITKDVGYPEFLNIRPYMSQNNGDPVMYGLYAVLVHSGYSCHAGHYYCYVKASNGQWYQMNDSLVHSSNVKVVLNQQAYVLFYLRIPGSKKSPEGLISRTGSSSLPGRPSVIPDHSKKNIGNGIISSPLTGKRQDSGTMKKPHTTEEIGVPISRNGSTLGLKSQNGCIPPKLPSGSPSPKLSQTPTHMPTILDDPGKKVKKPAPPQHFSPRTAQGLPGTSNSNSSRSGSQRQGSWDSRDVVLSTSPKLLATATANGHGLKGNDESAGLDRRGSSSSSPEHSASSDSTKAPQTPRSGAAHLCDSQETNCSTAGHSKTPPSGADSKTVKLKSPVLSNTTTEPASTMSPPPAKKLALSAKKASTLWRATGNDLRPPPPSPSSDLTHPMKTSHPVVASTWPVHRARAVSPAPQSSSRLQPPFSPHPTLLSSTPKPPGTSEPRSCSSISTALPQVNEDLVSLPHQLPEASEPPRSPSEKRKKTFVGEPQRLGSETCLPQHIREATAAPHGKRKRKKKKRPEDTAASALQEGQTQRQPGSPMYRREGQAQLPAVRRQEDGTQPQVNGQQVGCVTDGHHASSRKRRRKGAEGLGEEGGLHQDPLRHSCSPMGDGDPEAMEESPRKKKKRKQETQRAVEEDGHLKCPRSAKPQDAVVPESSSCAPSANGWCPGDRMGLSQAPPVSWNGERESDVVQELLKYSSDKAYGRKVLTWDGKMSAVSQDAIEDSRQARTETVVDDWDEEFDRGKEKKIKKFKREKRRNFNAFQKLQTRRNFWSVTHPAKAASLSYRR

SEQ ID NO: 839573 - protein, 1121 aa, Homo sapiens; identical to SEQ ID NO: 839568

SEQ ID NO: 839574 - protein, 699 aa, Homo sapiens
MQSRALGFLLGTISPEAAPASTTPWAQSSASKPSEELSSSSSSLTGKRQDSGTMKKPHTTEEIGVPISRNGSTLGLKSQNGCIPPKLPSGSPSPKLSQTPTHMPTILDDPGKKVKKPAPPQHFSPRTAQGLPGTSNSNSSRSGSQRQGSWDSRDVVLSTSPKLLATATANGHGLKGNDESAGLDRRGSSSSSPEHSASSDSTKAPQTPRSGAAHLCDSQETNCSTAGHSKTPPSGADSKTVKLKSPVLSNTTTEPASTMSPPPAKKLALSAKKASTLWRATGNDLRPPPPSPSSDLTHPMKTSHPVVASTWPVHRARAVSPAPQSSSRLQPPFSPHPTLLSSTPKPPGTSEPRSCSSISTALPQVNEDLVSLPHQLPEASEPPRSPSEKRKKTFVGEPQRLGSETCLPQHIREATAAPHGKRKRKKKKRPEDTAASALQEGQTQRQPGSPMYRREGQAQLPAVRRQEDGTQPQVNGQQVGCVTDGHHASSRKRRRKGAEGLGEEGGLHQDPLRHSCSPMGDGDPEAMEESPRKKKKRKQETQRAVEEDGHLKCPRSAKPQDAVVPESSSCAPSANGWCPGDRMGLSQAPPVSWNGERESDVVQELLKYSSDKAYGRKVLTWDGKMSAVSQDAIEDSRQARTETVVDDWDEEFDRGKEKKIKKFKREKRRNFNAFQKLQTRRNFWSVTHPAKAASLSYRR

SEQ ID NO: 839575 - protein, 1121 aa, Homo sapiens; identical to SEQ ID NO: 839568

SEQ ID NO: 839576 - protein, 1121 aa, Homo sapiens; identical to SEQ ID NO: 839568

SEQ ID NO: 839577 - protein, 1121 aa, Homo sapiens; identical to SEQ ID NO: 839568

SEQ ID NO: 839578 - protein, 150 aa, Homo sapiens [sequence omitted]

SEQ ID NO: 839579 - protein, 501 aa, Homo sapiens
MPIVDKLKEALKPGRKDSADDGELGKLLASSAKKVLLQKIEFEPASKSFSYQLEALKSKYVLLNPKTEGASRHKSGDDPPARRQGSEHTYESCGDGVPAPQKVLFPTERLSLRWERVFRVGAGLHNLGNTCFLNATIQCLTYTPPLANYLLSKEHARSCHQGSFCMLCVMQNHIVQAFANSGNAIKPVSFIRDLKKIARHFRFGNQEDAHEFLRYTIDAMQKACLNGCAKLDRQTQATTLVHQIFGGYLRSRVKCSVCKSVSDTYDPYLDVALEIRQAANIVRALELFVKADVLSGENAYMCAKCKKKVPASKRFTIHRTSNVLTLSLKRFANFSGGKITKDVGYPEFLNIRPYMSQNNGDPVMYGLYAVLVHSGYSCHAGHYYCYVKASNGQWYQMNDSLVHSSNVKVVLNQQAYVLFYLRIPGSKKSPEGLISRTGSSSLPGRPSVIPDHSKKNIGNGIISSPLTGKTESHSVAQAGVQWRNLGSLQPPPPSGDGVSLY

SEQ ID NO: 839580 - protein, 1080 aa, Homo sapiens
MPIVDKLKEALKPGRKDSADDGELGKLLASSAKKVLLQKIEFEPASKSFSYQLEALKSKYVLLNPKTEGASRHKSGDDPPARRQGSEHTYESCGDGVPAPQKVLFPTERLSLRWERVFRVGAGLHNLGNTCFLNATIQCLTYTPPLANYLLSKEHARSCHQGSFCMLCVMQNHIVQAFANSGNAIKPVSFIRDLKKIARHFRFGNQEDAHEFLRYTIDAMQKACLNGCAKLDRQTQATTLVHQIFGGYLRSRVKCSVCKSVSDTYDPYLDVALEIRQAANIVRALELFVKADVLSGENAYMCAKCKKKVPASKRFTIHRTSNVLTLSLKRFANFSGGKITKDVGYPEFLNIRPYMSQNNGDPVMYGLYAVLVHSGYSCHAGHYYCYVKASNGQWYQMNDSLVHSSNVKVVLNQQAYVLFYLRIPGSKKSPEGLISRTGSSSLPGRPSVIPDHSKKNIGNGIISSPLTGKRQDSGTMKKPHTTEEIGVPISRNGSTLGLKSQNGCIPPKLPSGSPSPKLSQTPTHMPTILDDPGKKVKKPAPPQHPGYSHCQRAWAEGERRERWPRQEGLQQLQPRALGQQRLHQGPPDPQEWSGPSLRFSGNELFHRWPLQNAAKWSRFKTVKLKSPVLSNTTTEPASTMSPPPAKKLALSAKKASTLWRATGNDLRPPPPSPSSDLTHPMKTSHPVVASTWPVHRARAVSPAPQSSSRLQPPFSPHPTLLSSTPKPPGTSEPRSCSSISTALPQVNEDLVSLPHQLPEASEPPRSPSEKRKKTFVGEPQRLGSETCLPQHIREATAAPHGKRKRKKKKRPEDTAASALQEGQTQRQPGSPMYRREGQAQLPAVRRQEDGTQPQVNGQQVGCVTDGHHASSRKRRRKGAEGLGEEGGLHQDPLRHSCSPMGDGDPEAMEESPRKKKKRKQETQRAVEEDGHLKCPRSAKPQDAVVPESSSCAPSANGWCPGDRMGLSQAPPVSWNGERESDVVQELLKYSSDKAYGRKVLTWDGKMSAVSQDAIEDSRQARTETVVDDWDEEFDRGKEKKIKKFKREKRRNFNAFQKLQTRRNFWSVTHPAKAASLSYRR

SEQ ID NO: 839581 - protein, 1121 aa, Homo sapiens; identical to SEQ ID NO: 839568

SEQ ID NO: 839582 - protein, 823 aa, Homo sapiens
MHLLHRCKKKVPASKRFTIHRTSNVLTLSLKRFANFSGGKITKDVGYPEFLNIRPYMSQNNGDPVMYGLYAVLVHSGYSCHAGHYYCYVKASNGQWYQMNDSLVHSSNVKVVLNQQAYVLFYLRIPGSKKSPEGLISRTGSSSLPGRPSVIPDHSKKNIGNGIISSPLTGKRQDSGTMKKPHTTEEIGVPISRNGSTLGLKSQNGCIPPKLPSGSPSPKLSQTPTHMPTILDDPGKKVKKPAPPQHFSPRTAQGLPGTSNSNSSRSGSQRQGSWDSRDVVLSTSPKLLATATANGHGLKGNDESAGLDRRGSSSSSPEHSASSDSTKAPQTPRSGAAHLCDSQETNCSTAGHSKTPPSGADSKTVKLKSPVLSNTTTEPASTMSPPPAKKLALSAKKASTLWRATGNDLRPPPPSPSSDLTHPMKTSHPVVASTWPVHRARAVSPAPQSSSRLQPPFSPHPTLLSSTPKPPGTSEPRSCSSISTALPQVNEDLVSLPHQLPEASEPPRSPSEKRKKTFVGEPQRLGSETCLPQHIREATAAPHGKRKRKKKKRPEDTAASALQEGQTQRQPGSPMYRREGQAQLPAVRRQEDGTQPQVNGQQVGCVTDGHHASSRKRRRKGAEGLGEEGGLHQDPLRHSCSPMGDGDPEAMEESPRKKKKRKQETQRAVEEDGHLKCPRSAKPQDAVVPESSSCAPSANGWCPGDRMGLSQAPPVSWNGERESDVVQELLKYSSDKAYGRKVLTWDGKMSAVSQDAIEDSRQARTETVVDDWDEEFDRGKEKKIKKFKREKRRNFNAFQKLQTRRNFWSVTHPAKAASLSYRR

SEQ ID NO: 839583 - protein, 459 aa, Homo sapiens
MPIVDKLKEALKPGRKDSADDGELGKLLASSAKKVLLQKIEFEPASKSFSYQLEALKSKYVLLNPKTEGASRHKSGDDPPARRQGSEHTYESCGDGVPAPQKVLFPTERLSLRWERVFRVGAGLHNLGNTCFLNATIQCLTYTPPLANYLLSKEHARSCHQGSFCMLCVMQNHIVQAFANSGNAIKPVSFIRDLKKIARHFRFGNQEDAHEFLRYTIDAMQKACLNGCAKLDRQTQATTLVHQIFGGYLRSRVKCSVCKSVSDTYDPYLDVALEIRQAANIVRALELFVKADVLSGENAYMCAKCKKKVPASKRFTIHRTSNVLTLSLKRFANFSGGKITKDVGYPEFLNIRPYMSQNNGDPVMYGLYAVLVHSGYSCHAGHYYCYVKASNGQWYQMNDSLVHSSNVKVVLNQQAYVLFYLRLPDTHTHANHPRRPWKEGEEASSSTASWLQPLPTGMG

SEQ ID NO: 839584 - protein, 1121 aa, Homo sapiens; identical to SEQ ID NO: 839568

SEQ ID NO: 839585 - protein, 287 aa, Homo sapiens
MLDQVSRARPGSAVSSGHSSLHIGVNRLGSVRMGNATGFPSTVSVAACGASANACGGKNVAGTCVHWVTAGVAPSPCCRRVSVRSCSPSNLLRADCCLSLPSSCSPMGDGDPEAMEESPRKKKKRKQETQRAVEEDGHLKCPRSAKPQDAVVPESSSCAPSANGWCPGDRMGLSQAPPVSWNGERESDVVQELLKYSSDKAYGRKVLTWDGKMSAVSQDAIEDSRQARTETVVDDWDEEFDRGKEKKIKKFKREKRRNFNAFQKLQTRRNFWSVTHPAKAASLSYRR

SEQ ID NO: 839586 - protein, 106 aa, Homo sapiens
MFHRQWSVLAEAAAPGWGYQESGGWWPHVLQVVSRCIAGGSGQAIPCFSGLTPPLCPSPPSPASSAGPLHLLALPVLRKEEVTPPSHLSLLWNSRGWPYCAPLPCE

SEQ ID NO: 839587 - protein, 739 aa, Homo sapiens
MPIVDKLKEALKPGRKDSADDGELGKLLASSAKKVLLQKIEFEPASKSFSYQLEALKSKYVLLNPKTEGASRHKSGDDPPARRQGSEHTYESCGDGVPAPQKVLFPTERLSLRWERVFRVGAGLHNLGNTCFLNATIQCLTYTPPLANYLLSKEHARSCHQGSFCMLCVMQNHIVQAFANSGNAIKPVSFIRDLKKIARHFRFGNQEDAHEFLRYTIDAMQKACLNGCAKLDRQTQATTLVHQIFGGYLRSRVKCSVCKSVSDTYDPYLDVALEIRQAANIVRALELFVKADVLSGENAYMCAKCKKKVPASKRFTIHRTSNVLTLSLKRFANFSGGKITKDVGYPEFLNIRPYMSQNNGDPVMYGLYAVLVHSGYSCHAGHYYCYVKASNGQWYQMNDSLVHSSNVKVVLNQQAYVLFYLRIPGSKKSPEGLISRTGSSSLPGRPSVIPDHSKKNIGNGIISSPLTGKRQDSGTMKKPHTTEEIGVPISRNGSTLGLKSQNGCIPPKLPSGSPSPKLSQTPTHMPTILDDPGKKVKKPAPPQHFSPRTAQGLPGTSNSNSSRSGSQRQGSWDSRDVVLSTSPKLLATATANGHGLKGNDESAGLDRRGSSSSSPEHSASSDSTKAPQTPRSGAAHLCDSQETNCSTAGHSKTPPSGADSKTVKLKSPVLSNTTTEPASTMSPPPAKKLALSAKKASTLWRATGNDLRPPPPSPSSDLTHPMKTSHPVVASTWPVHRAR

SEQ ID NO: 839588 - protein, 54 aa, Homo sapiens
MHLLHRCKKKVPASKRFTIHRTSNVLTLSLKRFANFSGGKITKVSARDTIPGSS

SEQ ID NO: 839589 - protein, 101 aa, Homo sapiens
LAALLHGHLHSQTSLVEDGQGGSGLETPPGNSSERPQVLRPQRRPEGMQLLFVNLKWLSWAQGAPVEKLRKDINGWQMQELAALQLVGVCCSVGVRTLVGV

SEQ ID NO: 839590 - protein, 104 aa, Homo sapiens
PTVEYQGLHSQTSLVEDGQGGSGLETPPGNSSERPQVLRPQRRPEGMQLLFVNLKWLSWAQGAPVEKLRKDINGWQMQEAALGCMLSTSDLCTVEGLRTMLKHD

SEQ ID NO: 839591 - protein, 187 aa, Homo sapiens
TGRGAVRTCSEEARPGAVACRAGDMDPLFQQTHKQVHEIQSCMGRLETADKQSVHIVENEIQASIDQIFSRLERLEILSSKEPPNKRQNARLRVDQLKYDVQHLQTALRNFQHRRHAREQQERQREELLSRTFTTNGTQKKILDIANMLGLSNTVMRLIEKRAFQDKYFMIENSILLCCPGWSAIAQ

SEQ ID NO: 839592 - protein, 236 aa, Homo sapiens
TGRGAVRTCSEEARPGAVACRAGDMDPLFQQTHKQVHEIQSCMGRLETADKQSVHIVENEIQASIDQIFSRLERLEILSSKEPPNKRQNARLRVDQLKYDVQHLQTALRNFQHRRHAREQQERQREELLSRTFTTNDSDTTIPMDESLQFNSSLQKVHNGMDDLILDGHNILDGLRTQRLTLKGTQKKILDIANMLGLSNTVMRLIEKRAFQDKYFMIGGMLLTCVVMFLVVQYLT

SEQ ID NO: 839593 - protein, 236 aa, Homo sapiens; identical to SEQ ID NO: 839592

SEQ ID NO: 839594 - protein, 236 aa, Homo sapiens; identical to SEQ ID NO: 839592

SEQ ID NO: 839595 - protein, 236 aa, Homo sapiens; identical to SEQ ID NO: 839592

SEQ ID NO: 839596 - protein, 236 aa, Homo sapiens; identical to SEQ ID NO: 839592

SEQ ID NO: 839597 - protein, 281 aa, Homo sapiens
MDPLFQQTHKVIYIVACYQNFILFYDGIIFRFMCLPHFVIHSSVDGHLSCFHHWAVENNTAMNSGVEVSVLVSLLNFLRQVHEIQSCMGRLETADKQSVHIVENEIQASIDQIFSRLERLEILSSKEPPNKRQNARLRVDQLKYDVQHLQTALRNFQHRRHAREQQERQREELLSRTFTTNDSDTTIPMDESLQFNSSLQKVHNGMDDLILDGHNILDGLRTQRLTLKGTQKKILDIANMLGLSNTVMRLIEKRAFQDKYFMIGGMLLTCVVMFLVVQYLT

SEQ ID NO: 839598 - protein, 236 aa, Homo sapiens; identical to SEQ ID NO: 839592

SEQ ID NO: 839599 - protein, 218 aa, Homo sapiens
TGRGAVRTCSEEARPGAVACRAGDMDPLFQQTHKQVHEIQSCMGRLETADKQSVHIVENEIQASIDQIFSRLERLEILSSKEPPNKRQNARLRVDQLKYDVQHLQTALRNFQHRRHAREQQERQREELLSRTFTTNDSDTTIPMDESLDGHNILDGLRTQRLTLKGTQKKILDIANMLGLSNTVMRLIEKRAFQDKYFMIGGMLLTCVVMFLVVQYLT

SEQ ID NO: 839600 - protein, 236 aa, Homo sapiens; identical to SEQ ID NO: 839592

SEQ ID NO: 839601 - protein, 219 aa, Homo sapiens
TGRGAVRTCSEEARPGAVACRAGDMDPLFQQTHKQVHEIQSCMGRLETADKQSVHIVENEIQASIDQIFSRLERLEILSSKEPPNKRQNARLRVDQLKYDVQHLQTALRNFQHRRHAREQQERQREELLSRTFTTNDSDTTIPMDESLQFNSSLQKVHNGMDDLILDGHNILDGLRTQRLTLKVGSLLGDREKASCFSLIQQFSNCVYILITCPQIVIF

SEQ ID NO: 839602 - protein, 270 aa, Homo sapiens
TGRGAVRTCSEEARPGAVACRAGDMDPLFQQTHKQVHEIQSCMGRLETADKQSVHIVENEIQASIDQIFSRLERLEILSSKEPPNKRQNARLRVDQLKYDVQHLQTALRNFQHRRHAREQQERQREELLSRTFTTNDSDTTIPMDESLQFNSSLQKVHNGMDDLILDGHNILDGLRTQRLTLKGTQKKILDIANMLGLSNTVMRLIEKRAFQDKYFMIAKDPARQHTLEEGLQGAAEPFVLELWEAEVPAPIMRGLIGHLFVVCTSAFHT

SEQ ID NO: 839603 - protein, 220 aa, Homo sapiens
TGRGAVRTCSEEARPGAVACRAGDMDPLFQQTHKQVHEIQSCMGRLETADKQSVHIVENEIQASIDQIFSRLERLEILSSKEPPNKRQNARLRVDQLKYDVQHLQTALRNFQHRRHAREQQERQREELLSRTFTTNDSDTTIPMDESLQFNSSLQKVHNGMDDLILDGHNILDGLRTQRLTLKGTQKKILDIANMLGLSNTVMRLIEKRAFQDKYFMIAM

SEQ ID NO: 839604 - protein, 189 aa, Homo sapiens
TGRGAVRTCSEEARPGAVACRAGDMDPLFQQTHKQVHEIQSCMGRLETADKQSVHIVENEIQASIDQIFSRLERLEILSSKEPPNKRQNARLRVDQLKYDVQHLQTALRNFQHRRHAREQQERQREELLSRTFTTNGTQKKILDIANMLGLSNTVMRLIEKRAFQDKYFMIGGMLLTCVVMFLVVQYLT

SEQ ID NO: 839605 - protein, 125 aa, Homo sapiens
MGRLETADKQSVHIVENEIQASIDQIFSRLERLEILSSKEPPNKRQNARLRVDQLKYDVQHLQTALRNFQHRRHAREQQERQREELLSRTFTTNVSQARGEGRPALDRSWGLEFRSLSAICFGGV

SEQ ID NO: 839606 - protein, 234 aa, Homo sapiens
EKETSNFLGPRYTQRGKMAQGGRTHRALSSPTLPAFQPCKKIWLFPRGVCLAASPPQTSPPSQPSSMFTPTRKSSFLNRFSLHPLRVAIFGSCNITSYILHQGEGEIPEAGLLFFVKLFFWCIFFLFQKILIVGGCHLSTQHLVFGLQILIPFCWCHCLSFLWKTCATGLSEGCLLQQGQRLKQAWSMQDWVSSPKQSVWGDHMTARWADQNLPWNSHRHCWFPDQHPFLPYSH

SEQ ID NO: 839607 - protein, 236 aa, Homo sapiens; identical to SEQ ID NO: 839592

SEQ ID NO: 839608 - protein, 236 aa, Homo sapiens; identical to SEQ ID NO: 839592

SEQ ID NO: 839609 - protein, 236 aa, Homo sapiens; identical to SEQ ID NO: 839592

SEQ ID NO: 839610 - protein, 194 aa, Homo sapiens
MGRLETADKQSVHIVENEIQASIDQIFSRLERLEILSSKEPPNKRQNARLRVDQLKYDVQHLQTALRNFQHRRHAREQQERQREELLSRTFTTNDSDTTIPMDESLQFNSSLQKVHNGMDDLILDGHNILDGLRTQRLTLKGTQKKILDIANMLGLSNTVMRLIEKRAFQDKYFMIGGMLLTCVVMFLVVQYLT

SEQ ID NO: 839611 - protein, 189 aa, Homo sapiens; identical to SEQ ID NO: 839604

SEQ ID NO: 839612 - protein, 236 aa, Homo sapiens; identical to SEQ ID NO: 839592

SEQ ID NO: 839613 - protein, 219 aa, Homo sapiens; identical to SEQ ID NO: 839601

SEQ ID NO: 839614 - protein, 219 aa, Homo sapiens; identical to SEQ ID NO: 839601

SEQ ID NO: 839615 - protein, 167 aa, Homo sapiens
TGRGAVRTCSEEARPGAVACRAGDMDPLFQQTHKQVHEIQSCMGRLETADKQSVHIVENEIQASIDQIFSRLERLEILSSKEPPNKRQNARLRVDQLKYDVQHLQTALRNFQHRRHAREQQERQREELLSRTFTTNVSQARGEGRPALDRSWGLEFRSLSAICFGGV

SEQ ID NO: 839616 - protein, 149 aa, Homo sapiens
MGRLETADKQSVHIVENEIQASIDQIFSRLERLEILSSKEPPNKRQNARLRVDQLKYDVQHLQTALRNFQHRRHAREQQERQREELLSRTFTTNGTQKKILDIANMLGLSNTVMRLIEKRAFQDKYFMIDKEHMFLTRECALFPTHSHH

SEQ ID NO: 839617 - protein, 248 aa, Homo sapiens [sequence omitted]

SEQ ID NO: 839618 - protein, 248 aa, Homo sapiens [sequence omitted]

SEQ ID NO: 839619 - protein, 248 aa, Homo sapiens [sequence omitted]

SEQ ID NO: 839620 - protein, 216 aa, Homo sapiens
MERASLIQKAKLAEQAERYEDMAAFMKGAVEKGEELSCEERNLLSVAYKNVVGGQRAAWRVLSSIEQKSNEEGSEEKGPEVREYRVFYLKMKGDYYRYLAEVATGDDKKRIIDSARSAYQEAMDISKKEMPPTNPIRLGLALNFSVFHYEIANSPEEAISLAKTTFDEAMADLHTLSEDSYKDSTLIMQLLRDNLTLWTADNAGEEGGEAPQEPQS

SEQ ID NO: 839621 - protein, 248 aa, Homo sapiens [sequence omitted]

SEQ ID NO: 839622 - protein, 126 aa, Homo sapiens
MKGDYYRYLAEVATGDDKKRIIDSARSAYQEAMDISKKEMPPTNPIRLGLALNFSVFHYEIANSPEEAISLAKTTFDEAMADLHTLSEDSYKDSTLIMQLLRDNLTLWTADNAGEEGGEAPQEPQS

SEQ ID NO: 839623 - protein, 163 aa, Homo sapiens
AGGLGAGRAGKISGWTWHTLHLIKEAGDAESRVFYLKMKGDYYRYLAEVATGDDKKRIIDSARSAYQEAMDISKKEMPPTNPIRLGLALNFSVFHYEIANSPEEAISLAKTTFDEAMADLHTLSEDSYKDSTLIMQLLRDNLTLWTADNAGEEGGEAPQEPQS

SEQ ID NO: 839624 - protein, 422 aa, Homo sapiens
MSVGAMKKGVGRAVGLGGGSGCQATEEDPLPDCGACAPGQGGRRWRLPQPAWVEGSSARLWEQATGTGWMDLEASLLPTGPNASNTSDGPDNLTSAGSPPRTGSISYINIIMPSVFGTICLLGIIGNSTVIFAVVKKSKLHWCNNVPDIFIINLSVVDLLFLLGMPFMIHQLMGNGVWHFGETMCTLITAMDANSQFTSTYILTAMAIDRYLATVHPISSTKFRKPSVATLVICLLWALSFISITPVWLYARLIPFPGGAVGCGIRLPNPDTDLYWFTLYQFFLAFALPFVVITAAYVRILQRMTSSVAPASQRSIRLRTKRVTRTAIAICLVFFVCWAPYYVLQLTQLSISRPTLTFVYLYNAAISLGYANSCLNPFVYIVLCETFRKRLVLSVKPAAQGQLRAVSNAQTADEERTESKGT

SEQ ID NO: 839625 - protein, 402 aa, Homo sapiens
MLCPSKTDGSGHSGRIHQETHGEGKRDKISNSEGRENGGRGFQMNGGSLEAEHASRMSVLRAKPMSNSQRLLLLSPGSPPRTGSISYINIIMPSVFGTICLLGIIGNSTVIFAVVKKSKLHWCNNVPDIFIINLSVVDLLFLLGMPFMIHQLMGNGVWHFGETMCTLITAMDANSQFTSTYILTAMAIDRYLATVHPISSTKFRKPSVATLVICLLWALSFISITPVWLYARLIPFPGGAVGCGIRLPNPDTDLYWFTLYQFFLAFALPFVVITAAYVRILQRMTSSVAPASQRSIRLRTKRVTRTAIAICLVFFVCWAPYYVLQLTQLSISRPTLTFVYLYNAAISLGYANSCLNPFVYIVLCETFRKRLVLSVKPAAQGQLRAVSNAQTADEERTESKGT

SEQ ID NO: 839626 - protein, 422 aa, Homo sapiens; identical to SEQ ID NO: 839624

SEQ ID NO: 839627 - protein, 308 aa, Homo sapiens
MASSNTVLMRLVASAYSIAQKAGMIVRRVIAEGDLGIVEKTCATDLQTKADRLAQMSICSSLARKFPKLTIIGEEDLPSEEVDQELIEDSQWEEILKQPCPSQYSAIKEEDLVVWVDPLDGTKEYTEGLLDNVTVLIGIAYEGKAIAGVINQPYYNYEAGPDAVLGRTIWGVLGLGAFGFQLKEVPAGKHIITTTRSHSNKLVTDCVAAMNPDAVLRVGGAGNKIIQLIEGKASAYVFASPGCKKWDTCAPEVILHAVGGKLTDIHGNVLQYHKDVKHMNSAGVLATLRNYDYYASRVPESIKNALVP

SEQ ID NO: 839628 - protein, 272 aa, Homo sapiens
MASSQSVSQSVSQSSVSQSVSQSVVSQSVSQSVSRQSVSQSVSQSSVSQSVSQSVVSQSVSQSVSRQSVSQSVSQSSVSQSVSQSVVSQSVSQSVSRQSVSQSVSQSSVSQSVSQSVVSQSVSQSVSRQSVSQSVSQSSVSQSVSQSVVSQSVSQSVSRQSVSQSVSQSSVSQSVSQSVVSQSVSQSVSRQSVSQSVSQSSVSQSVSQSVVSQSVSQSVSRQSVSQSVSQSSVSQSVSQSVVSQSVSQSVSRQSVSQSVSQSSVSQSVSQSV

SEQ ID NO: 839629 - protein, 272 aa, Homo sapiens
MASSNTVLMRLVASAYSIAQKAGMIVRRVIAEGDLGIVEKTCATDLQTKADRLAQMSICSSLARKFPKLTIIGEELVVWVDPLDGTKEYTEGLLDNVTVLIGIAYEGKAIAGVINQPYYNYEAGPDAVLGRTIWGVLGLGAFGFQLKEVPAGKHIITTTRSHSNKLVTDCVAAMNPDAVLRVGGAGNKIIQLIEGKASAYVFASPGCKKWDTCAPEVILHAVGGKLTDIHGNVLQYHKDVKHMNSAGVLATLRNYDYYASRVPESIKNALVP

SEQ ID NO: 839630 - protein, 323 aa, Homo sapiens
MASSNTVLMRLVASAYSIAQKAGMIVRRVIAEGDLGIVEKTCATDLQTKADRLAQMSICSSLARKFPKLTIIGEEDLPSEEVDQELIEDSQWEEILKQPCPSQYSAIKEEDLVVWVDPLDGTKEYTEGLLDNVTVLIGIAYEGKAIAGVINQPYYNYENNEKQQLREHRNEAKAGPDAVLGRTIWGVLGLGAFGFQLKEVPAGKHIITTTRSHSNKLVTDCVAAMNPDAVLRVGGAGNKIIQLIEGKASAYVFASPGCKKWDTCAPEVILHAVGGKLTDIHGNVLQYHKDVKHMNSAGVLATLRNYDYYASRVPESIKNALVP

SEQ ID NO: 839631 - protein, 323 aa, Homo sapiens; identical to SEQ ID NO: 839630

SEQ ID NO: 839632 - protein, 308 aa, Homo sapiens; identical to SEQ ID NO: 839627

SEQ ID NO: 839633 - protein, 301 aa, Homo sapiens
MASSNTVLMRLVASAYSIAQKAGMIVRRVIAEGDLGIVEKTCATDLQTKADRLAQMSICSSLARKFPKLTIIGEEDLPSEEVDQELIEDSQWEEILKQPCPSQYSAIKEEDLVVWVDPLDGTKEYTEGLLDNVTVLIGIAYEGKAIAGVINQPYYNYENNEKQQLREHRNEAKAGPDAVLGRTIWGVLGLGAFGFQLKEVPAGKHIITTTRSHSNKLVTDCVAAMNPDAVLRVGGAGNKIIQLIEGKASAYVFASPGCKKWDTCAPEVILHAVGGKLTDIHGNVLQYHKDWDYRCEPPHLA

SEQ ID NO: 839634 - protein, 156 aa, Homo sapiens
MASSNTVLMRLVASAYSIAQKAGMIVRRVIAEGDLGIVEKTCATDLQTKADRLAQMSICSSLARKFPKLTIIGEEDLPSEEVDQELIEDSQWEEILKQPCPSQYSAIKEEDLVVWVDPLDGTKEYTEGLLDNVTVLIGIAYEGKAWDYRCEPPHLA

SEQ ID NO: 839635 - protein, 240 aa, Homo sapiens
MSICSSLARKFPKLTIIGEEDLPSEEVDQELIEDSQWEEILKQPCPSQYSAIKEEDLVVWVDPLDGTKEYTEGLLDNVTVLIGIAYEGKAIAGVINQPYYNYEAGPDAVLGRTIWGVLGLGAFGFQLKEVPAGKHIITTTRSHSNKLVTDCVAAMNPDAVLRVGGAGNKIIQLIEGKASAYVFASPGCKKWDTCAPEVILHAVGGKLTDIQDVLVTQVEALTEGLAMESICFQDKLHPKY

SEQ ID NO: 839636 - protein, 308 aa, Homo sapiens; identical to SEQ ID NO: 839627

SEQ ID NO: 839637 - protein, 308 aa, Homo sapiens; identical to SEQ ID NO: 839627

SEQ ID NO: 839638 - protein, 242 aa, Homo sapiens
MASSNTVLMRLVASAYSIAQKAGMIVRRVIAEGDLGIVEKTCATDLQTKADRLAQMSICSSLARKFPKLTIIGEEDLPSEEVDQELIEDSQWEEILKQPCPSQYSAIKEEDLVVWVDPLDGTKEYTEGLLDNVTVLIGIAYEGKAIAGVINQPYYNYEIIQLIEGKASAYVFASPGCKKWDTCAPEVILHAVGGKLTDIHGNVLQYHKDVKHMNSAGVLATLRNYDYYASRVPESIKNALVP

SEQ ID NO: 839639 - protein, 242 aa, Homo sapiens; identical to SEQ ID NO: 839638

SEQ ID NO: 839640 - protein, 295 aa, Homo sapiens
MASSNTVLMRLVASAYSIAQKAGMIVRRVIAEGDLGIVEKTCATDLQTKADRLAQMSICSSLARKFPKLTIIGEEDLPSEEVDQELIEDSQWEEILKQPCPSQYSAIKEEDLVVWVDPLDGTKEYTEGLLDNVTVLIGIAYEGKAIAGVINQPYYNYEAGPDAVLGRTIWGVLGLGAFGFQLKEVPAGKHIITTTRSHSNKLVTDCVAAMNPDAVLRVGGAGNKIIQLIEGKASAYVFASPGCKKWDTCAPEVILHAVGGKLTDIQDVLVTQVEALTEGLAMESICFQDKLHPKY

SEQ ID NO: 839641 - protein, 401 aa, Homo sapiens
MLDSCKLKSACNLPFICNKKIINTAGTSNAEVPLADPGMYQLDITLRRGQSLAARDRGGTSDPYVKFKIGGKEVFRSKIIHKNLNPVWEEKACILVDHLREPLYIKVFDYDFGLQDDFMGSAFLDLTQLELNRPTDVTLTLKDPHYPDHDLGIILLSVILTPKEGESRDVTMLMRKSWKRSSKELSENEVVGSYFSVKSLFWRTCGRPALPVLGFCRAELQNPYCKNVQFQTQSLRLSDLHRKSHLWRGIVSITLIEGRDLKAMDSNGLSDPYVKFRLGHQKYKSKIMPKTLNPQWREQFDFHLYEERGGVIDITAWDKDAGKRDDFIGRCQVDLSALSREQTHKLELQLEEGEGHLVLLVTLTASATVSISDLSVNSLEDQKEREEILKRYNRCVTGLNR

SEQ ID NO: 839642 - protein, 549 aa, Homo sapiens
MLDSCKLKSACNLPFICNKKIINTAGTSNAEVPLADPGMYQLDITLRRGQSLAARDRGGTSDPYVKFKIGGKEVFRSKIIHKNLNPVWEEKACILVDHLREPLYIKVFDYDFGLQDDFMGSAFLDLTQLELNRPTDVTLTLKDPHYPDHDLGIILLSVILTPKEGESRDVTMLMRKSWKRSSKELSENEVVGSYFSVKSLFWRTCGRPALPVLGFCRAELQNPYCKNVQFQTQSLRLSDLHRKSHLWRGIVSITLIEGRDLKAMDSNGLSDPYVKFRLGHQKYKSKIMPKTLNPQWREQFDFHLYEERGGVIDITAWDKDAGKRDDFIGRCQVDLSALSREQTHKLELQLEEGEGHLVLLVTLTASATVSISDLSVNSLEDQKEREEILKRYSPLRIFHNLKDVGFLQVKVIRAEGLMAADVTGQKWTILCGHRNTKTETHRSQNQSKGKSLRLHGRNLLTPWKRDDNHSTKAPNCCISAAPQHQGHITGDTTPGKQDNEHKGTQQKNTGRDTTDTDTQTNHSIHHTRRRNQRHTRRPAPPPHPVPTPR

SEQ ID NO: 839643 - protein, 331 aa, Homo sapiens
FFIFRVFQKIINTAGTSNAEVPLADPGMYQLDITLRRGQSLAARDRGGTSDPYVKFKIGGKEVFRSKIIHKNLNPVWEEKACILVDHLREPLYIKVFDYDFGLQDDFMGSAFLDLTQLELNRPTDVTLTLKDPHYPDHDLGIILLSVILTPKEGESRDVFQTQSLRLSDLHRKSHLWRGIVSITLIEGRDLKAMDSNGLSDPYVKFRLGHQKYKSKIMPKTLNPQWREQFDFHLYEERGGVIDITAWDKDAGKRDDFIGRCQVDLSALSREQTHKLELQLEEGEGHLVLLVTLTASATVSISDLSVNSLEDQKEREEILKRYNRCVTGLNR

SEQ ID NO: 839644 - protein, 503 aa, Homo sapiens
MLDSCKLKSACNLPFICNKKIINTAGTSNAEVPLADPGMYQLDITLRRGQSLAARDRGGTSDPYVKFKIGGKEVFRSKIIHKNLNPVWEEKACILVDHLREPLYIKVFDYDFGLQDDFMGSAFLDLTQLELNRPTDVTLTLKDPHYPDHDLGIILLSVILTPKEGESRDVTMLMRKSWKRSSKFQTQSLRLSDLHRKSHLWRGIVSITLIEGRDLKAMDSNGLSDPYVKFRLGHQKYKSKIMPKTLNPQWREQFDFHLYEERGGVIDITAWDKDAGKRDDFIGRCQVDLSALSREQTHKLELQLEEGEGHLVLLVTLTASATVSISDLSVNSLEDQKEREEILKRYSPLRIFHNLKDVGFLQVKVIRAEGLMAADVTGQKWTILCGHRNTKTETHRSQNQSKGKSLRLHGRNLLTPWKRDDNHSTKAPNCCISAAPQHQGHITGDTTPGKQDNEHKGTQQKNTGRDTTDTDTQTNHSIHHTRRRNQRHTRRPAPPPHPVPTPR

SEQ ID NO: 839645 - protein, 169 aa, Homo sapiens
MYDRRRYHIILFFITLLMIARFFHILLISCACLQVYVYKSFPHLTFLMPLLSSSSFLSCTLVWVHNTPQRCRCATSPSAPSTPSLLVCEPRLDSSVHVICSYTGLSTTPPLPTLSLPCFSPFRPCASRSFFQLPGGACSLPAPCHYHAHFSACFPLLPFSDWLTLFFKT

SEQ ID NO: 839646 - protein, 141 aa, Homo sapiens
MGRLPPFLISMRRDFPKMPLVLFPLLLFFSPERRNVLADSSSSPLLFPFRSQPYQQALIHCPEMVLKAFQCFGVRISPAKGTILKGKPIEPCKFWHTYLEFAPFSFLKLAIYYSSLFETIWFLLANVLLPGLWHGTSWRES

SEQ ID NO: 839647 - protein, 517 aa, Homo sapiens
MASDGARKQFWKRSNSKLPGSIQHVYGAQHPPFDPLLHGTLLRSTAKMPTTPVKAKRVSTFQEFESNTSDAWDAGEDDDELLAMAAESLNSEVVMETANRVLRNHSQRQGRPTLQEGPGLQQKPRPEAEPPSPPSGDLRLVKSVSESHTSCPAESASDAAPLQRSQSLPHSATVTLGGTSDPSTLSSSALSEREASRLDKFKQLLAGPNTDLEELRRLSWSGIPKPVRPMTWKLLSGYLPANVDRRPATLQRKQKEYFAFIEHYYDSRNDEVHQDTYRQIHIDIPRMSPEALILQPKVTEIFERILFIWAIRHPASGYVQGINDLVTPFFVVFICEYIEAEEVDTVDVSGVPAEVLCNIEADTYWCMSKLLDGIQDNYTFAQPGIQMKVKMLEELVSRIDEQVHRHLDQHEVRYLQFAFRWMNNLLMREVPLRCTIRLWDTYQSEPDGFSHFHLYVCAAFLVRWRKEILEEKDFQELLLFLQNLPTAHWDDEDISLLLAEAYRLKFAFADAPNHYKK

SEQ ID NO: 839648 - protein, 517 aa, Homo sapiens; identical to SEQ ID NO: 839647

SEQ ID NO: 839649 - protein, 439 aa, Homo sapiens
MASDGARKQFWKRSNSKLPGSLLRSTAKMPTTPVKAKRVSTFQEFESNTSDAWDAGEDDDELLAMAAESLNSEVVMETANRVLRNHSQRQGRPTLQEGPGLQQKPRPEAEPPSPPSGDLRLVKSVSESHTSCPAEELRRLSWSGIPKPVRPMTWKLLSGYLPANVDRRPATLQRKQKEYFAFIEHYYDSRNDEVHQDTYRQIHIDIPRMSPEALILQPKVTEIFERILFIWAIRHPASGYVQGINDLVTPFFVVFICEYIEAEEVDTVDVSGVPAEVLCNIEADTYWCMSKLLDGIQDNYTFAQPGIQMKVKMLEELVSRIDEQVHRHLDQHEVRYLQFAFRWMNNLLMREVPLRCTIRLWDTYQSEPDGFSHFHLYVCAAFLVRWRKEILEEKDFQELLLFLQNLPTAHWDDEDISLLLAEAYRLKFAFADAPNHYKK

SEQ ID NO: 839650 - protein, 470 aa, Homo sapiens
MPTTPVKAKRVSTFQEFESNTSDAWDAGEDDDELLAMAAESLNSEVVMETANRVLRNHSQRQGRPTLQEGPGLQQKPRPEAEPPSPPSGDLRLVKSVSESHTSCPAESASDAAPLQRSQSLPHSATVTLGGTSDPSTLSSSALSEREASRLDKFKQLLAGPNTDLEELRRLSWSGIPKPVRPMTWKLLSGYLPANVDRRPATLQRKQKEYFAFIEHYYDSRNDEVHQDTYRQIHIDIPRMSPEALILQPKVTEIFERILFIWAIRHPASGYVQGINDLVTPFFVVFICEYIEAEEVDTVDVSGVPAEVLCNIEADTYWCMSKLLDGIQDNYTFAQPGIQMKVKMLEELVSRIDEQVHRHLDQHEVRYLQFAFRWMNNLLMREVPLRCTIRLWDTYQSEPDGFSHFHLYVCAAFLVRWRKEILEEKDFQELLLFLQNLPTAHWDDEDISLLLAEAYRLKFAFADAPNHYKK

SEQ ID NO: 839651 - protein, 434 aa, Homo sapiens
MAAESLNSEVVMETANRVLRNHSQRQGRPTLQEGPGLQQKPRPEAEPPSPPSGDLRLVKSVSESHTSCPAESASDAAPLQRSQSLPHSATVTLGGTSDPSTLSSSALSEREASRLDKFKQLLAGPNTDLEELRRLSWSGIPKPVRPMTWKLLSGYLPANVDRRPATLQRKQKEYFAFIEHYYDSRNDEVHQDTYRQIHIDIPRMSPEALILQPKVTEIFERILFIWAIRHPASGYVQGINDLVTPFFVVFICEYIEAEEVDTVDVSGVPAEVLCNIEADTYWCMSKLLDGIQDNYTFAQPGIQMKVKMLEELVSRIDEQVHRHLDQHEVRYLQFAFRWMNNLLMREVPLRCTIRLWDTYQSEPDGFSHFHLYVCAAFLVRWRKEILEEKDFQELLLFLQNLPTAHWDDEDISLLLAEAYRLKFAFADAPNHYKK

SEQ ID NO: 839652 - protein, 458 aa, Homo sapiens
MASDGARKQFWKRSNSKLPGSIQHVYGAQHPPFDPLLHGTLLRSTAKMPTTPVKAKRVSTFQEFESNTSDAWDAGEDDDELLAMAAESLNSEVVMETANRVLRNHSQRQGRPTLQEGPGLQQKPRPEAEPPSPPSGDLRLVKSVSESHTSCPAEELRRLSWSGIPKPVRPMTWKLLSGYLPANVDRRPATLQRKQKEYFAFIEHYYDSRNDEVHQDTYRQIHIDIPRMSPEALILQPKVTEIFERILFIWAIRHPASGYVQGINDLVTPFFVVFICEYIEAEEVDTVDVSGVPAEVLCNIEADTYWCMSKLLDGIQDNYTFAQPGIQMKVKMLEELVSRIDEQVHRHLDQHEVRYLQFAFRWMNNLLMREVPLRCTIRLWDTYQSEPDGFSHFHLYVCAAFLVRWRKEILEEKDFQELLLFLQNLPTAHWDDEDISLLLAEAYRLKFAFADAPNHYKK

SEQ ID NO: 839653 - protein, 337 aa, Homo sapiens
MAGRVLTHEVAQPTCFVSCRGSMRPALQGPREEELRRLSWSGIPKPVRPMTWKLLSGYLPANVDRRPATLQRKQKEYFAFIEHYYDSRNDEVHQDTYRQIHIDIPRMSPEALILQPKVTEIFERILFIWAIRHPASGYVQGINDLVTPFFVVFICEYIEAEEVDTVDVSGVPAEVLCNIEADTYWCMSKLLDGIQDNYTFAQPGIQMKVKMLEELVSRIDEQVHRHLDQHEVRYLQFAFRWMNNLLMREVPLRCTIRLWDTYQSEPDGFSHFHLYVCAAFLVRWRKEILEEKDFQELLLFLQNLPTAHWDDEDISLLLAEAYRLKFAFADAPNHYKK

SEQ ID NO: 839654 - protein, 288 aa, Homo sapiens
MTWKLLSGYLPANVDRRPATLQRKQKEYFAFIEHYYDSRNDEVHQDTYRQIHIDIPRMSPEALILQPKVTEIFERILFIWAIRHPASGYVQGINDLVTPFFVVFICEYIEAEEVDTVDVSGVPAEVLCNIEADTYWCMSKLLDGIQDNYTFAQPGIQMKVKMLEELVSRIDEQVHRHLDQHEVRYLQFAFRWMNNLLMREVPLRCTIRLWDTYQSEPDGFSHFHLYVCAAFLVRWRKEILEEKDFQELLLFLQNLPTAHWDDEDISLLLAEAYRLKFAFADAPNHYKK

SEQ ID NO: 839655 - protein, 439 aa, Homo sapiens; identical to SEQ ID NO: 839649

SEQ ID NO: 839656 - protein, 412 aa, Homo sapiens
MASDGARKQFWKRSNSKLPGSIQHVYGAQHPPFDPLLHGTLLRSTAKMPTTPVKAKRVSTFQEFESNTSDAWDAGEDDDELLAMAAESLNSEVVMETANRVLRNHSQRQGRPTLQEGPGLQQKPRPEAEPPSPPSGDLRLVKSVSESHTSCPAESASDAAPLQRSQSLPHSATVTLGGTSDPSTLSSSALSEREASRLDKFKQLLAGPNTDLEELRRLSWSGIPKPVRPMTWKLLSGYLPANVDRRPATLQRKQKEYFAFIEHYYDSRNDEVHQDTYRQIHIDIPRMSPEALILQPKVTEIFERILFIWAIRHPASGYVQGINDLVTPFFVVFICEYIEAEEVDTVDVSGVPAEVLCNIEADTYWCMSKLLDGIQDNYTFAQPGIQMKVKMLEELVSRIDEQVHRTWPTRRG

SEQ ID NO: 839657 - protein, 121 aa, Homo sapiens
PNPMHQAALGKGQARHPPDSMYQVALGKGQVRHLPDSMHQAALGKGQSEPDGFSHFHLYVCAAFLVRWRKEILEEKDFQELLLFLQNLPTAHWDDEDISLLLAEAYRLKFAFADAPNHYKK

SEQ ID NO: 839658 - protein, 517 aa, Homo sapiens; identical to SEQ ID NO: 839647

SEQ ID NO: 839659 - protein, 362 aa, Homo sapiens
MASDGARKQFWKRSNSKLPGSIQHVYGAQHPPFDPLLHGTLLRSTAKMPTTPVKAKRVSTFQEFESNTSDAWDAGEDDDELLAMAAESLNSEVVMETANRVLRNHSQRQGRPTLQEGPGLQQKPRPEAEPPSPPSGDLRLVKSVSESHTSCPAESASDAAPLQRSQSLPHSATVTLGGTSDPSTLSSSALSEREASRLDKFKQLLAGPNTDLEELRRLSWSGIPKPVRPMTWKLLSGYLPANVDRRPATLQRKQKEYFAFIEHYYDSRNDEVHQDTYRQIHIDIPRMSPEALILQPKVTEIFERILFIWAIRHPASGYVQGINDLVTPFFVVFICEYIGQLHLCPTWDSNESENVRRTREPD

SEQ ID NO: 839660 - protein, 476 aa, Homo sapiens
MASDGARKQFWKRSNSKLPGSIQHVYGAQHPPFDPLLHGTLLRSTAKMPTTPVKAKRVSTFQEFESNTSDAWDAGEDDDELLAMAAESLNSEVVMETANRVLRNHSQRQGRPTLQEGPGLQQKPRPEAEPPSPPSGDLRLVKSVSESHTSCPAESASDAAPLQRSQSLPHSATVTLGGTSDPSTLSSSALSEREASRLDKFKQLLAGPNTDLEELRRLSWSGIPKPVRPMTWKLLSGYLPANVDRRPATLQRKQKEYFAFIEHYYDSRNDEVHQDTYRQIHIDIPRMSPEALILQPKVTEIFERILFIWAIRHPASGYVQGINDLVTPFFVVFICEYIEAEEVDTVDVSGVPAEVLCNIEADTYWCMSKLLDGIQDNYTFAQPGIQMKVKMLEELVSRIDEQVHRHLDQHEVRYLQFAFRWMNNLLMREVPLRCTIRLWDTYQSEPDGFSHFHLYVCAAFLVRWRKEILEEKDFQG

SEQ ID NO: 839661 - protein, 391 aa, Homo sapiens
MASDGARKQFWKRSNSKLPGSIQHVYGAQHPPFDPLLHGTLLRSTAKMPTTPVKAKRVSTFQEFESNTSDAWDAGEDDDELLAMAAESLNSEVVMETANRVLRNHSQRQGRPTLQEGPGLQQKPRPEAEPPSPPSGDLRLVKSVSESHTSCPAESASDAAPLQRSQSLPHSATVTLGGTSDPSTLSSSALSEREASRLDKFKQLLAGPNTDLEAEEVDTVDVSGVPAEVLCNIEADTYWCMSKLLDGIQDNYTFAQPGIQMKVKMLEELVSRIDEQVHRHLDQHEVRYLQFAFRWMNNLLMREVPLRCTIRLWDTYQSEPDGFSHFHLYVCAAFLVRWRKEILEEKDFQELLLFLQNLPTAHWDDEDISLLLAEAYRLKFAFADAPNHYKK

SEQ ID NO: 839662 - protein, 517 aa, Homo sapiens; identical to SEQ ID NO: 839647

SEQ ID NO: 839663 - protein, 397 aa, Homo sapiens
MASDGARKQFWKRSNSKLPGSIQHVYGAQHPPFDPLLHGTLLRSTAKMPTTPVKAKRVSTFQEFESNTSDAWDAGEDDDELLAMAAESLNSEVVMETANRVLRNHSQRQGRPTLQEGPGLQQKPRPEAEPPSPPSGDLRLVKSVSESHTSCPAESASDAAPLQRSQSLPHSATVTLGGTSDPSTLSSSALSEREASRLDKFKQLLAGPNTDLEELRRLSWSGIPKPVRPMTWKLLSGYLPANVDRRPATLQRKQKEYFAFIEHYYDSRNDEVHQDTYRQIHIDIPRMSPEALILQPKVTEIFERILFIWAIRHPASGYVQGINDLVTPFFVVFICEYIEAEEVDTVDVSGVPAEVLCNIEADTYWCMSKLLDGIQTTTPLPNLGPLGLKGPLGVPSS

SEQ ID NO: 839664 - protein, 345 aa, Homo sapiens [sequence omitted]

SEQ ID NO: 839665 - protein, 258 aa, Homo sapiens
MASDGARKQFWKRSNSKLPGSIQHVYGAQHPPFDPLLHGTLLRSTAKMPTTPVKAKRVSTFQEFESNTSDAWDAGEDDDELLAMAAESLNSEVVMETANRVLRNHSQRQGRPTLQEGPGLQQKPRPEAEPPSPPSGDLRLVKSVSESHTSCPAESASDAAPLQRSQSLPHSATVTLGGTSDPSTLSSSALSEREASRLDKFKQLLAGPNTDLEELRRLSWSGIPKPVRPMTWKLLSGYLPANVDRRPATLQRKQNINK

SEQ ID NO: 839666 - protein, 163 aa, Homo sapiens [sequence omitted]

SEQ ID NO: 839667 - protein, 251 aa, Homo sapiens
RIAPTHAHWGVRRASLCPVIPVSLGAAELTPRSEMSKLPADSSVPQTGAANGDRDVPQAEVGRGRREPAPAQPEEAGEGAMAAARGGPVPAAREGRMAAARAAPAAAARGAPVAAAALARAAAAGRESPAAAAAREARMAEVARLLGEPVDEEGPEGRPRSRHGNGGLAALPYLRLRHPLSVLGINYQQFLRHYLENYPIAPGRIQELEERRRRFVEACRAREAAFDAEYQAKSSQGGPRYFNLYDSSDCL

SEQ ID NO: 839668 - protein, 267 aa, Homo sapiens
RIAPTHAHWGVRRASLCPVIPVSLGAAELTPRSEMSKLPADSSVPQTGAANGDRDVPQAEVGRGRREPAPAQPEEAGEGAMAAARGGPVPAAREGRMAAARAAPAAAARGAPVAAAALARAAAAGRESPAAAAAREARMAYVFAPGFLPGGGQPHVGHPKGRVPPREGARRPQGPRTRANGKGLAALPYLRLRHPLSVLGINYQQFLRHYLENYPIAPGRIQELEERRRRFVEACRAREAAFDAEYQAKSSQGGPRYFNLYDSSDCL

SEQ ID NO: 839669 - protein, 251 aa, Homo sapiens; identical to SEQ ID NO: 839667

SEQ ID NO: 839670 - protein, 251 aa, Homo sapiens; identical to SEQ ID NO: 839667

SEQ ID NO: 839671 - protein, 434 aa, Homo sapiens
LGSCCRVAGGRAAALRGPGAGGPAARPRLGGDGGGRRHLGQGQPRELAGCGSRADGGFRPSRVVVVAKTTRYEFEQQRYRYAELSEEDLKQLLALKGSSYSGLLERHHIHTKNVEHIIDSLRNEGIEVRLVKRREYDEETVRWADAVIAAGGDGTMLLAASKVLDRLKPVIGVNTDPERSEGHLCLPVRYTHSFPEALQKFYRGEFRWLWRQRIRLYLEGTGINPVPVDLHEQQLSLNQHNRALNIERAHDERSEASGPQLLPVRALNEVFIGESLSSRASYYEISVDDGPWEKQKSSGLNLCTGTGSKAWSFNINRVATQAVEDVLNIAKRQGNLSLPLNRELVEKVTNEYNESLLYSPEEPKILFSIREPIANRVFSSSRQRCFSSKVCVRSRCWDACMVVDGGTSFEFNDGAIASMMINKEDELRTVLLEQ

SEQ ID NO: 839672 - protein, 434 aa, Homo sapiens; identical to SEQ ID NO: 839671

SEQ ID NO: 839673 - protein, 456 aa, Homo sapiens
LGSCCRVAGGRAAALRGPGAGGPAARPRLGGDGGGRRHLGQGQPRELAGCGSRADGGFRPSRVVVVAKTTRYEFEQQRYRYAELSEEDLKQLLALKGSSYSGLLERHHIHTKNVEHIIDSLRNEGIEVRLVKRREYDEETVRWADAVIAAGGDGTMLLAASKVLDRLKPVIGVNTDPERSEGHLCLPVRYTHSFPEALQKFYRGEFRWLWRQRIRLYLEGTGINPVPVDLHEQQLSLNQHNRALNIERAHDERSEASGPQLLPVRALNEVFIGESLSSRMSYSWAVAVDNLRRSIPTLKGLASYYEISVDDGPWEKQKSSGLNLCTGTGSKAWSFNINRVATQAVEDVLNIAKRQGNLSLPLNRELVEKVTNEYNESLLYSPEEPKILFSIREPIANRVFSSSRQRCFSSKVCVRSRCWDACMVVDGGTSFEFNDGAIASMMINKEDELRTVLLEQ

SEQ ID NO: 839674 - protein, 438 aa, Homo sapiens
LGSCCRVAGGRAAALRGPGAGGPAARPRLGGDGGGRRHLGQGQPRELAGCGSRADGGFRPSRVVVVAKTTRYEFEQQRYRYAELSEEDLKQLLALKGSSYSGLLERHHIHTKNVEHIIDSLRNEGIEVRLVKRREYDEETVRWADAVIAAGGDGTMLLAASKVLDRLKPVIGVNTDPERSEGHLCLPVRYTHSFPEALQKFYRGEFRWLWRQRIRLYLEGTGINPVPVDLHEQQLSLNQHNRALNIERAHDERSEASGPQLLPVRALNEVFIGESLSSRMSYSWAVAVDNLRRSIPTLKGLASYYEISVDDGPWEKQKSSGLNLCTGTGSKAWSFNINRVATQAVEDVLNIAKRQGNLSLPLNRELVEKVTNEYNESLLYSPEEPKIIFPSAWVCVRSRCWDACMVVDGGTSFEFNDGAIASMMINKEDELRTVLLEQ

SEQ ID NO: 839675 - protein, 434 aa, Homo sapiens; identical to SEQ ID NO: 839671

SEQ ID NO: 839676 - protein, 279 aa, Homo sapiens
MLLAASKVLDRLKPVIGVNTDPERSEGHLCLPVRYTHSFPEALQKFYRGEFRWLWRQRIRLYLEGTGINPVPVDLHEQQLSLNQHNRALNIERAHDERSEASGPQLLPVRALNEVFIGESLSSRASYYEISVDDGPWEKQKSSGLNLCTGTGSKAWSFNINRVATQAVEDVLNIAKRQGNLSLPLNRELVEKVTNEYNESLLYSPEEPKILFSIREPIANRVFSSSRQRCFSSKVCVRSRCWDACMVVDGGTSFEFNDGAIASMMINKEDELRTVLLEQ

SEQ ID NO: 839677 - protein, 279 aa, Homo sapiens; identical to SEQ ID NO: 839676

SEQ ID NO: 839678 - protein, 416 aa, Homo sapiens
LGSCCRVAGGRAAALRGPGAGGPAARPRLGGDGGGRRHLGQGQPRELAGCGSRADGGFRPSRVVVVAKTTRYEFEQQRYRYAELSEEDLKQLLALKGSSYSGLLERHHIHTKNVEHIIDSLRNEGIEVRLVKRREYDEETVRWADAVIAAGGDGTMLLAASKVLDRLKPVIGVNTDPERSEGHLCLPVRYTHSFPEALQKFYRGEFRWLWRQRIRLYLEGTGINPVPVDLHEQQLSLNQHNRALNIERAHDERSEASGPQLLPVRALNEVFIGESLSSRASYYEISVDDGPWEKQKSSGLNLCTGTGSKAWSFNINRVATQAVEDVLNIVTNEYNESLLYSPEEPKILFSIREPIANRVFSSSRQRCFSSKVCVRSRCWDACMVVDGGTSFEFNDGAIASMMINKEDELRTVLLEQ

SEQ ID NO: 839679 - protein, 434 aa, Homo sapiens; identical to SEQ ID NO: 839671

SEQ ID NO: 839680 - protein, 91 aa, Homo sapiens
VCVVYLCFIHKNSVDFWPPKPICEHMLKEKRWGVEAESAGEKCIEPYSRVLKRWEEMSCKARQRVHERAWRAEMMGVWDRKQKGRGSLPGG

SEQ ID NO: 839681 - protein, 1113 aa, Homo sapiens
RLGFKNSDVNIDIQFPAIMSQPDVLLLVQECLKNSDSFIDVDADFHARVPVVVCREKQSGLLCKVSAGNENACLTTKHLTALGKLEPKLVPLVIAFRYWAKLCSIDRPEEGGLPPYVFALMAIFFLQQRKEPLLPVYLGSWIEGFSLSKLGNFNLQDIEKDVVIWEHTDSAAGDTGITKEEAPRETPIKRGQVSLILDVKHQPSVPVGQLWVELLRFYALEFNLADLVISIRVKELVSRELKDWPKKRIAIEDPYSVKRNVARTLNSQPVFEYILHCLRTTYKYFALPHKITKSSLLKPLNAITCISEHSKEVINHHPDVQTKDDKLKNSVLAQGPGATSSAANTCKVQPLTLKETAESFGSPPKEEMGNEHISVHPENSDCIQADVNSDDYKGDKVYHPETGRKNEKEKVGRKGKHLLTVDQKRGEHVVCGSTRNNESESTLDLEGFQNPTAKECEGLATLDNKADLDGESTEGTEELEDSLNHFTHSVQGQTSEMIPSDEEEEDDEEEEEEEEPRLTINQREDEDGMANEDELDNTYTGSGDEDALSEEDDELGEAAKYEDVKECGKHVERALLVELNKISLKEENVCEEKNSPVDQSDFFYEFSKLIFTKGKSPTVVCSLCKREGHLKKDCPEDFKRIQLEPLPPLTPKFLNILDQVCIQCYKDFSPTIIEDQAREHIRQNLESFIRQDFPGTKLSLFGSSKNGFGFKQSDLDVCMTINGLETAEGLDCVRTIEELARVLRKHSGLRNILPITTAKVPIVKFFHLRSGLEVDISLYNTLALHNTRLLSAYSAIDPRVKYLCYTMKVFTKIYKGEKKPEIFVDGWNIYFFDQIDELPTYWSECGKNTESVGQLWLGLLRFYTEEFDFKEHVISIRRKSLLTTFKKQWTSKYIVIEDPFDLNHNLGAGLSRKMTNFIMKAFINGRRVFGIPVKGFPKDYPSKMEYFFDPDVLTEGELAPNDRCCRICGKIGHFMKDCPMRRKVRRRRDQEDALNQRYPENKEKRSKEDKEIHNKYTEREVSTKEDKPIQCTPQKAKPMRAAADLGREKILRPPVEKWKRQDDKDLREKRCFICGREGHIKKECPQFKGSSGSLSSKYMTQGKASAKRTQQES

SEQ ID NO: 839682 - protein, 746 aa, Homo sapiens
MGNEHISVHPENSDCIQADVNSDDYKGDKVYHPETGRKNEKEKVGRKGKHLLTVDQKRGEHVVCGSTRNNESESTLDLEGFQNPTAKECEGLATLDNKADLDGESTEGTEELEDSLNHFTHSVQGQTSEMIPSDEEEEDDEEEEEEEEPRLTINQREDEDGMANEDELDNTYTGSGDEDALSEEDDELGEAAKYEDVKECGKHVERALLVELNKISLKEENVCEEKNSPVDQSDFFYEFSKLIFTKGKSPTVVCSLCKREGHLKKDCPEDFKRIQLEPLPPLTPKFLNILDQVCIQCYKDFSPTIIEDQAREHIRQNLESFIRQDFPGTKLSLFGSSKNGFGFKQSDLDVCMTINGLETAEGLDCVRTIEELARVLRKHSGLRNILPITTAKVPIVKFFHLRSGLEVDISLYNTLALHNTRLLSAYSAIDPRVKYLCYTMKVFTKIYKGEKKPEIFVDGWNIYFFDQIDELPTYWSECGKNTESVGQLWLGLLRFYTEEFDFKEHVISIRRKSLLTTFKKQWTSKYIVIEDPFDLNHNLGAGLSRKMTNFIMKAFINGRRVFGIPVKGFPKDYPSKMEYFFDPDVLTEGELAPNDRCCRICGKIGHFMKDCPMRRKVRRRRDQEDALNQRYPENKEKRSKEDKEIHNKYTEREVSTKEDKPIQCTPQKAKPMRAAADLGREKILRPPVEKWKRQDDKDLREKRCFICGREGHIKKECPQFKGSSGSLSSKYMTQGKASAKRTQQES

SEQ ID NO: 839683 - protein, 1138 aa, Homo sapiens
RLGFKNSDVNIDIQFPAIMSQPDVLLLVQECLKNSDSFIDVDADFHARVPVVVCREKQSGLLCKVSAGNENACLTTKHLTALGKLEPKLVPLVIAFRYWAKLCSIDRPEEGGLPPYVFALMAIFFLQQRKEPLLPVYLGSWIEGFSLSKLGNFNLQDIEKDVVIWEHTDSAAGDTGITKEEAPRETPIKRGQVSLILDVKHQPSVPVGQLWVELLRFYALEFNLADLVISIRVKELVSRELKDWPKKRIAIEDPYSVKRNVARTLNSQPVFEYILHCLRTTYKYFALPHKITKSSLLKPLNAITCISEHSKEVINHHPDVQTKDDKLKNSVLAQGPGATSSAANTCKVQPLTLKETAESFGSPPKEEMGNEHISVHPENSDCIQADVNSDDYKGDKVYHPETGRKNEKEKVGRKGKHLLTVDQKRGEHVVCGSTRNNESESTLDLEGFQNPTAKECEGLATLDNKADLDGESTEGTEELEDSLNHFTHSVQGQTSEMIPSDEEEEDDEEEEEEEEPRLTINQREDEDGMANEDELDNTYTGSGDEDALSEEDDELGEAAKYEDVKECGKHVERALLVELNKISLKEENVCEEKNSPVDQSDFFYEFSKLIFTKGKSPTVVCSLCKREGHLKKDCPEDFKRIQLEPLPPLTPKFLNILDQVCIQCYKDFSPTIIEDQAREHIRQNLESFIRQDFPGTKLSLFGSSKNGFGFKQSDLDVCMTINGLETAEGLDCVRTIEELARVLRKHSGLRNILPITTAKVPIVKFFHLRSGLEVDISLYNTLALHNTRLLSAYSAIDPRVKYLCYTMKVFTKIYKGEKKPEIFVDGWNIYFFDQIDELPTYWSECGKNTESVGQLWLGLLRFYTEEFDFKEHVISIRRKSLLTTFKKQWTSKYIVIEDPFDLNHNLGAGLSRKMTNFIMKAFINGRRVFGIPVKGFPKDYPSKMEYFFDPDVLTEGELAPNDRCCRICGKIGHFMKDCPMRRKVRRRRDQEDALNQRYPENKEKRSKEDKEIHNKYTEREVSTKEDKPIQCTPQKAKPMRAAADLGREKILRPPVEKWKRQDDKDLREKRCFICGREGHIKKECPQFKGSSGMSKSDCMFGSPSPVPLKPTGLFVQAVLLHEDKKKQKTTIFLSPQSG

SEQ ID NO: 839684 - protein, 1096 aa, Homo sapiens
RLGFKNSDVNIDIQFPAIMSQPDVLLLVQECLKNSDSFIDVDADFHARVPVVVCREKQSGLLCKVSAGNENACLTTKHLTALGKLEPKLVPLVIAFRYWAKLCSIDRPEEGGLPPYVFALMAIFFLQQRKEPLLPVYLGSWIEGFSLSKLGNFNLQDIEKDVVIWEHTDSAAGDTGITKEEAPRETPIKRGQVSLILDVKHQPSVPVGQLWVELLRFYALEFNLADLVISIRVKELVSRELKDWPKKRIAIEDPYSVKRNVARTLNSQPVFEYILHCLRTTYKYFALPHKITKSSLLKPLNAITCISEHSKEVINHHPDVQTKDDKLKNSVLAQGPGATSSAANTCKVQPLTLKETAESFGSPPKEEMGNEHISVHPENSDCIQADVNSDDYKGDKVYHPETGRKNEKEKVGRKGKHLLTVDQKRGEHVVCGSTRNNESESTLDLEGFQNPTAKECEGLATLDNKADLDGESTEGTEELEDSLNHFTHSVQGQTSEMIPSDEEEEDDEEEEEEEEPRLTINQREDEDGMANEDELDNTYTGSGDEDALSEEDDELGEAAKYEDVKECGKHVERALLVELNKISLKEENVCEEKNSPVDQSDFFYEFSKLIFTKGKSPTVVCSLCKREGHLKKDCPEDFKRIQLEPLPPLTPKFLNILDQVCIQCYKDFSPTIIEDQAREHIRQNLESFIRQDFPGTKLSLFGSSKNGFGFKQSDLDVCMTINGLETAEGLDCVRTIEELARVLRKHSGLRNILPITTAKVPIVKFFHLRSGLEVDISLYNTLALHNTRLLSAYSAIDPRVKYLCYTMKVFTKIYKGEKKPEIFVDGWNIYFFDQIDELPTYWSECGKNTESVGQLWLGLLRFYTEEFDFKEHVISIRRKSLLTTFKKQWTSKYIVIEDPFDLNHNLGAGLSRKMTNFIMKAFINGRRVFGIPVKGFPKDYPSKMEYFFDPDVLTEGELAPNDRCCRICGKIGHFMKDCPMRRKVRRRRDQEDALNQRYPENKEKRSKEDKEIHNKYTEREVSTKEDKPIQCTPQKAKPMRAAADLGREKILRPPVEKWKRQDDKDLREKRCFICGREGHIKKECPQFKGSSGSAFT

SEQ ID NO: 839685 - protein, 1113 aa, Homo sapiens; identical to SEQ ID NO: 839681

SEQ ID NO: 839686 - protein, 628 aa, Homo sapiens
RLGFKNSDVNIDIQFPAIMSQPDVLLLVQECLKNSDSFIDVDADFHARVPVVVCREKQSGLLCKVSAGNENACLTTKHLTALGKLEPKLVPLVIAFRYWAKLCSIDRPEEGGLPPYVFALMAIFFLQQRKEPLLPVYLGSWIEGFSLSKLGNFNLQDIEKDVVIWEHTDSAAGDTGITKEEAPRETPIKRGQVSLILDVKHQPSVPVGQLWVELLRFYALEFNLADLVISIRVKELVSRELKDWPKKRIAIEDPYSVKRNVARTLNSQPVFEYILHCLRTTYKYFALPHKITKSSLLKPLNAITCISEHSKEVINHHPDVQTKDDKLKNSVLAQGPGATSSAANTCKVQPLTLKETAESFGSPPKEEMGNEHISVHPENSDCIQADVNSDDYKGDKVYHPETGRKNEKEKVGRKGKHLLTVDQKRGEHVVCGSTRNNESESTLDLEGFQNPTAKECEGLATLDNKADLDGESTEGTEELEDSLNHFTHSVQGQTSEMIPSDEEEEDDEEEEEEEEPRLTINQREDEDGMANEDELDNTYTGSGDEDALSEEDDELGEAAKYEDVKECGKHVERALLVELNKISLKEENVCEEKNSPVDQSDFFYEFSKLIFTKGKVISTTTSHRTRRL

SEQ ID NO: 839687 - protein, 842 aa, Homo sapiens
RLGFKNSDVNIDIQFPAIMSQPDVLLLVQECLKNSDSFIDVDADFHARVPVVVCREKQSGLLCKVSAGNENACLTTKHLTALGKLEPKLVPLVIAFRYWAKLCSIDRPEEGGLPPYVFALMAIFFLQQRKEPLLPVYLGSWIEGFSLSKLGNFNLQDIEKDVVIWEHTDSAAGDTGITKEEAPRETPIKRGQVSLILDVKHQPSVPVGQLWVELLRFYALEFNLADLVISIRVKELVSRELKDWPKKRIAIEDPYSVKRNVARTLNSQPVFEYILHCLRTTYKYFALPHKITKSSLLKPLNAITCISEHSKEVINHHPDVQTKDDKLKNSVLAQGPGATSSAANTCKVQPLTLKETAESFGSPPKEEMGNEHISVHPENSDCIQADVNSDDYKGDKVYHPETGRKNEKEKVGRKGKHLLTVDQKRGEHVVCGSTRNNESESTLDLEGFQNPTAKECEGLATLDNKADLDGESTEGTEELEDSLNHFTHSVQGQTSEMIPSDEEEEDDEEEEEEEEPRLTINQREDEDGMANEDELDNTYTGSGDEDALSEEDDELGEAAKYEDVKECGKHVERALLVELNKISLKEENVCEEKNSPVDQSDFFYEFSKLIFTKGKSPTVVCSLCKREGHLKKDCPEDFKRIQLEPLPPLTPKFLNILDQVCIQCYKDFSPTIIEDQAREHIRQNLESFIRQDFPGTKLSLFGSSKNGFGFKQSDLDVCMTINGLETAEGLDCVRTIEELARVLRKHSGLRNILPITTAKVPIVKFFHLRSGLEVDISLYNTLALHNTRLLSAYSAIDPRVKYLCYTMKVFTKVSMLPYCDLSGNFIASLNTVGNINLFFNEL

SEQ ID NO: 839688 - protein, 142 aa, Homo sapiens
RLGFKNSDVNIDIQFPAIMSQPDVLLLVQECLKNSDSFIDVDADFHARVPVVVCREKQSGLLCKVSAGNENACLTTKHLTALGKLEPKLVPLVIAFRYWAKLCSIDRPEEGGLPPYVFALMAIFFLQQRKEPLLPVYLGSWV

SEQ ID NO: 839689 - protein, 1151 aa, Homo sapiens
RLGFKNSDVNIDIQFPAIMSQPDVLLLVQECLKNSDSFIDVDADFHARVPVVVCREKQSGLLCKVSAGNENACLTTKHLTALGKLEPKLVPLVIAFRYWAKLCSIDRPEEGGLPPYVFALMAIFFLQQRKEPLLPVYLGSWIEGFSLSKLGNFNLQDIEKDVVIWEHTDSAAGDTGITKEEAPRETPIKRGQVSLILDVKHQPSVPVGQLWVELLRFYALEFNLADLVISIRVKELVSRELKDWPKKRIAIEDPYSVKRNVARTLNSQPVFEYILHCLRTTYKYFALPHKITKSSLLKPLNAITCISEHSKEVINHHPDVQTKDDKLKNSVLAQGPGATSSAANTCKVQPLTLKETAESFGSPPKEEMGNEHISVHPENSDCIQADVNSDDYKGDKVYHPETGRKNEKEKVGRKGKHLLTVDQKRGEHVVCGSTRNNESESTLDLEGFQNPTAKECEGLATLDNKADLDGESTEGTEELEDSLNHFTHSVQGQTSEMIPSDEEEEDDEEEEEEEEPRLTINQREDEDGMANEDELDNTYTGSGDEDALSEEDDELGEAAKYEDVKECGKHVERALLVELNKISLKEENVCEEKNSPVDQSDFFYEFSKLIFTKGKSPTVVCSLCKREGHLKKDCPEDFKRIQLEPLPPLTPKFLNILDQVCIQCYKDFSPTIIEDQAREHIRQNLESFIRQDFPGTKLSLFGSSKNGFGFKQSDLDVCMTINGLETAEGLDCVRTIEELARVLRKHSGLRNILPITTAKVPIVKFFHLRSGLEVDISLYNTLALHNTRLLSAYSAIDPRVKYLCYTMKVFTKMCDIGDASRGSLSSYAYTLMVLYFLQQRNPPVIPVLQEIYKGEKKPEIFVDGWNIYFFDQIDELPTYWSECGKNTESVGQLWLGLLRFYTEEFDFKEHVISIRRKSLLTTFKKQWTSKYIVIEDPFDLNHNLGAGLSRKMTNFIMKAFINGRRVFGIPVKGFPKDYPSKMEYFFDPDVLTEGELAPNDRCCRICGKIGHFMKDCPMRRKVRRRRDQEDALNQRYPENKEKRSKEDKEIHNKYTEREVSTKEDKPIQCTPQKAKPMRAAADLGREKILRPPVEKWKRQDDKDLREKRCFICGREGHIKKECPQFKGSSGSLSSKYMTQGKASAKRTQQES

SEQ ID NO: 839690 - protein, 1137 aa, Homo sapiens
RLGFKNSDVNIDIQFPAIMSQPDVLLLVQECLKNSDSFIDVDADFHARVPVVVCREKQSGLLCKVSAGNENACLTTKHLTALGKLEPKLVPLVIAFRYWAKLCSIDRPEEGGLPPYVFALMAIFFLQQRKEPLLPVYLGSWIEGFSLSKLGNFNLQDIEKDVVIWEHTDSAAGDTGITKEEAPRETPIKRGQVSLILDVKHQPSVPVGQLWVELLRFYALEFNLADLVISIRVKELVSRELKDWPKKRIAIEDPYSVKRNVARTLNSQPVFEYILHCLRTTYKYFALPHKITKSSLLKPLNAITCISEHSKEVINHHPDVQTKDDKLKNSVLAQGPGATSSAANTCKVQPLTLKETAESFGSPPKEEMGNEHISVHPENSDCIQADVNSDDYKGDKVYHPETGRKNEKEKVGRKGKHLLTVDQKRGEHVVCGSTRNNESESTLDLEGFQNPTAKECEGLATLDNKADLDGESTEGTEELEDSLNHFTHSVQGQTSEMIPSDEEEEDDEEEEEEEEPRLTINQREDEDGMANEDELDNTYTGSGDEDALSEEDDELGEAAKYEDVKECGKHVERALLVELNKISLKEENVCEEKNSPVDQSDFFYEFSKLIFTKGKSPTVVCSLCKREGHLKKDCPEDFKRIQLEPLPPLTPKFLNILDQVCIQCYKDFSPTIIEDQAREHIRQNLESFIRQDFPGTKLSLFGSSKNGFGFKQSDLDVCMTINGLETAEGLDCVRTIEELARVLRKHSGLRNILPITTAKVPIVKFFHLRSGLEVDISLYNTLALHNTRLLSAYSAIDPRVKYLCYTMKVFTKIYKGEKKPEIFVDGWNIYFFDQIDELPTYWSECGKNTESVGQLWLGLLRFYTEEFDFKEHVISIRRKSLLTTFKKQWTSKYIVIEDPFDLNHNLGAGLSRKMTNFIMKAFINGRRVFGIPVKGFPKDYPSKMEYFFDPDVLTEGELAPNDRCCRICGKIGHFMKDCPMRRKVRRRRDQEDALNQRYPENKEKRSKEDKEIHNKYTEREVSTKEDKPIQCTPQKAKPMRAAADLGREKILRPPVEKWKRQDDKDLREKRCFICGREGHIKKECPQFKGSSGMSKSDCMFGSPSPVPLKPTGLFVQVNLAQTEKEACLSSVHSGAAP

SEQ ID NO: 839691 - protein, 1113 aa, Homo sapiens; identical to SEQ ID NO: 839681

SEQ ID NO: 839692 - protein, 1137 aa, Homo sapiens; identical to SEQ ID NO: 839690

SEQ ID NO: 839693 - protein, 417 aa, Homo sapiens
RLGFKNSDVNIDIQFPAIMSQPDVLLLVQECLKNSDSFIDVDADFHARVPVVVCREKQSGLLCKVSAGNENACLTTKHLTALGKLEPKLVPLVIAFRYWAKLCSIDRPEEGGLPPYVFALMAIFFLQQRKEPLLPVYLGSWIEGFSLSKLGNFNLQDIEKDVVIWEHTDSAAGDTGITKEEAPRETPIKRGQVSLILDVKHQPSVPVGQLWVELLRFYALEFNLADLVISIRVKELVSRELKDWPKKRIAIEDPYSVKRNVARTLNSQPVFEYILHCLRTTYKYFALPHKITKSSLLKPLNAITCISEHSKEVINHHPDVQTKDDKLKNSVLAQGPGATSSAANTCKVQPLTLKETAESFGSPPKEEMGNEHISVHPENSDCIQADVNSDDYKGDKVYHPETGRKNEKEKVLVKKIK

SEQ ID NO: 839694 - protein, 1979 aa, Homo sapiens [sequence omitted]

SEQ ID NO: 839695 - protein, 1979 aa, Homo sapiens [sequence omitted]

SEQ ID NO: 839696 - protein, 1979 aa, Homo sapiens [sequence omitted]

SEQ ID NO: 839697 - protein, 80 aa, Homo sapiens
MSSWLGGLGSGLGQSLGQVGGSLASLTGQISNFTKDMLMEGTEEVEAELPDSRTKEIEAIHAILRSELPLCTHLLSAFYI

SEQ ID NO: 839698 - protein, 57 aa, Homo sapiens
KDRVGAGVGAKTASQTGDEGEPGDEVSGTPLREVSKVLEGQEVSLCLGEGGPWASVP

SEQ ID NO: 839699 - protein, 212 aa, Homo sapiens
MCSVKVNSTVIPAWVVLGIPNFSPPATSPRIVSVRVLTDREMRASLLFMTVKALQVLALRVSPASPGTPLPLACFLQPWWPFIPQTRFLSCPRKGLCRCSSHSLKVPRVAGSSSPSRPPGLSSNASPWERLVLTTTASCLNTADSLSPLESKHQGSKSRVGFIHPGLSKHSKRSGEHVMSGWVTKSYDPRHGTHMGTHPMGRHEPGVRRNWV

SEQ ID NO: 839700 - protein, 32 aa, Homo sapiens
MSVPCRVADYLKLMAVPPGSLAGRNESTKPPE

SEQ ID NO: 839701 - protein, 417 aa, Homo sapiens
AGELPVRFRCTGTWGEALFIKEKGFFWSPTTGPMAAVQMDPELAKRLFFEGATVVILNMPKGTEFGIDYNSWEVGPKFRGVKMIPPGIHFLHYSSVDKANPKEVGPRMGFFLSLHQRGLTVLRWSTLREEVDLSPAPESEVEAMRANLQELDQFLGPYPYATLKKWISLTNFISEATVEKLQPENRQICAFSDVLPVLSMKHTKDRVGQNLPRCGIECKSYQEGLARLPEMKPRAGTEIRFSELPTQMFPEGATPAEITKHSMDLSYALETVLNKQFPSSPQDVLGELQFAFVCFLLGNVYEAFEHWKRLLNLLCRSEAAMMKHHTLYINLISILYHQLGEIPADFFVDIVSQDNFLTSTLQVFFSSACSIAVDATLRKKAEKFQAHLTKKFRWDFAAEPEDCAPVVVELPEGIEMG

SEQ ID NO: 839702 - protein, 417 aa, Homo sapiens; identical to SEQ ID NO: 839701

SEQ ID NO: 839703 - protein, 396 aa, Homo sapiens
AGELPVRFRCTGTWGEALFIKEKGFFWSPTTGPMAAVQMDPELAKRLFFEGATVVILNMPKGTEFGIDYNSWEVGPKFRGVKMIPPGIHFLHYSSVDKANPKEVGPRMGFFLSLHQRGLTVLRWSTLREEVDLSPAPESEVEAMRANLQELDQFLGPYPYATLKKWISLTNFISEATVEKLQPENRQICAFSDVLPVLSMKHTKDRVGQNLPRCGIECKSYQEGLARLPEMKPRAGTEIRFSELPTQMFPEGATPAEITKHSMDLSYALETVLNKQFPSSPQDVLGELQFAFVCFLLGNVYEAFEHWKRLLNLLCRSEAAMMKHHTLYINLISILYHQLGEIPADFFVDIVSQDNFLTSTLQVFFSSACSIAVDATLRTEDCAPVVVELPEGIEMG

SEQ ID NO: 839704 - protein, 335 aa, Homo sapiens
AGELPVRFRCTGTWGEALFIKEKGFFWSPTTGPMAAVQMDPELAKRLFFEGATVVILNMPKGTEFGIDYNSWEVGPKFRGVKMIPPGIHFLHYSSVDKANPKEVGPRMGFFLSLHQRGLTVLRWSTLREEVDLSPAPESEVEAMRANLQELDQFLGPYPYATLKKWISLTNFISEATVEKLQPENRQICAFSDVLPVLSMKHTKDRVGQNLPRCGIECKSYQEGLARLPEMKPRAGTEIRFSELPTQMFPEGATPAEITKHSMDLSYALETVLNKQFPSSPQDVLGELQFAFVCFLLGNVYEAFEHWKRLLNLLCRSEAAMMKHHTRKLKSSKLT

SEQ ID NO: 839705 - protein, 384 aa, Homo sapiens
MAAVQMDPELAKRLFFEGATVVILNMPKGTEFGIDYNSWEVGPKFRGVKMIPPGIHFLHYSSVDKANPKEVGPRMGFFLSLHQRGLTVLRWSTLREEVDLSPAPESEVEAMRANLQELDQFLGPYPYATLKKWISLTNFISEATVEKLQPENRQICAFSDVLPVLSMKHTKDRVGQNLPRCGIECKSYQEGLARLPEMKPRAGTEIRFSELPTQMFPEGATPAEITKHSMDLSYALETVLNKQFPSSPQDVLGELQFAFVCFLLGNVYEAFEHWKRLLNLLCRSEAAMMKHHTLYINLISILYHQLGEIPADFFVDIVSQDNFLTSTLQVFFSSACSIAVDATLRKKAEKFQAHLTKKFRWDFAAEPEDCAPVVVELPEGIEMG

SEQ ID NO: 839706 - protein, 175 aa, Homo sapiens
GLHGIVQYFLTLEQTIHIENHLGSLLELQIRRPHHLSSTRTSEGELQFAFVCFLLGNVYEAFEHWKRLLNLLCRSEAAMMKHHTLYINLISILYHQLGEIPADFFVDIVSQDNFLTSTLQVFFSSACSIAVDATLRKKAEKFQAHLTKKFRWDFAAEPEDCAPVVVELPEGIEMG

SEQ ID NO: 839707 - protein, 307 aa, Homo sapiens
AGELPVRFRCTGTWGEALFIKEKGFFWSPTTGPMAAVQMDPELAKRLFFEGATVVILNMPKGTEFGIDYNSWEVGPKFRGVKMIPPGIHFLHYSSVDKANPKEVGPRMGFFLSLHQRGLTVLRWSTLREEVDLSPAPESEVEAMRANLQELDQFLGPYPYATLKKWISLTNFISEATVEKLQPENRQICAFSDVLPVLSMKHTKDRVGQNLPRCGIECKSYQEGLARLPEMKPRAGTEIRFSELPTQMFPEGATPAEITKHSMDLSYALETVLNKQFPSSPQDVLGEKEQGSLGVGQGEDISRGVLE

SEQ ID NO: 839708 - protein, 417 aa, Homo sapiens; identical to SEQ ID NO: 839701

SEQ ID NO: 839709 - protein, 417 aa, Homo sapiens; identical to SEQ ID NO: 839701

SEQ ID NO: 839710 - protein, 384 aa, Homo sapiens; identical to SEQ ID NO: 839705

SEQ ID NO: 839711 - protein, 384 aa, Homo sapiens; identical to SEQ ID NO: 839705

SEQ ID NO: 839712 - protein, 399 aa, Homo sapiens
AGELPVRFRCTGTWGEALFIKEKGFFWSPTTGPMAAVQMDPELAKRLFFEGATVVILNMPKGTEFGIDYNSWEVGPKFRGVKMIPPGIHFLHYSSVDKANPKEVGPRMGFFLSLHQRGLTVLRWSTLREEVDLSPAPESEVEAMRANLQELDQFLGPYPYATLKKWISLTNFISEATVEKLQPENRQICAFSDVLPVLSMKHTKDRVGQNLPRCGIECKKIRFSELPTQMFPEGATPAEITKHSMDLSYALETVLNKQFPSSPQDVLGELQFAFVCFLLGNVYEAFEHWKRLLNLLCRSEAAMMKHHTLYINLISILYHQLGEIPADFFVDIVSQDNFLTSTLQVFFSSACSIAVDATLRKKAEKFQAHLTKKFRWDFAAEPEDCAPVVVELPEGIEMG

SEQ ID NO: 839713 - protein, 338 aa, Homo sapiens
MNDFDECGQSAASMYLPGCAYYVAPSDFASKPSFLSQPSSCQMTFPYSSNLAPHVQPVREVAFRDYGLERAKWPYRGGGGGGSAGGGSSGGGPGGGGGGAGGYAPYYAAAAAAAAAAAAAEEAAMQRELLPPAGRRPDVLFKAPEPVCAAPGPPHGPAGAASNFYSAVGRNGILPQGFDQFYEAAPGPPFAGPQPPPPPAPPQPEGAADKGDPRTGAGGGGGSPCTKATPGSEPKGAAEGSGGDGEGPPGEAGAEKSSSAVAPQRSRKKRCPYTKYQIRELEREFFFNVYINKEKRLQLSRMLNLTDRQVKIWFQNRRMKEKKLNRDRLQYFTGNPLF

SEQ ID NO: 839714 - protein, 338 aa, Homo sapiens; identical to SEQ ID NO: 839713

SEQ ID NO: 839715 - protein, 309 aa, Homo sapiens
MNDFDECGQSAASMYLPGCAYYVAPSDFASKPSFLSQPSSCQMTFPYSSNLAPHVQPVREVAFRDYGLERAKWPYRGGGGGGSAGGGSSGGGPGGGGGGAGGYAPYYAAAAAAAAAAAAAEEAAMQRELLPPAGRRPDVLFKAPEPVCAAPGPPHGPAGAASNFYSAVGRNGILPQGFDQFYEAAPGPPFGGGSPCTKATPGSEPKGAAEGSGGDGEGPPGEAGAEKSSSAVAPQRSRKKRCPYTKYQIRELEREFFFNVYINKEKRLQLSRMLNLTDRQVKIWFQNRRMKEKKLNRDRLQYFTGNPLF

SEQ ID NO: 839716 - protein, 1136 aa, Homo sapiens
  misc_feature (1118)..(1118): Xaa can be any naturally occurring amino acid
RPPAAERGRAGRGRSRRARGAARHVAAGSRVRVRLSARGPAMAGMDSGNLKTARLWRDAALRARKLRSNLRQLTLTAAGACPGAGADALESPASPQLVLPANLGDIEALNLGNNGLEEVPEGLGSALGSLRVLVLRRNRFARLPPAVAELGHHLTELDVSHNRLTALGAEVVSALRELRKLNLSHNQLPALPAQLGALAHLEELDVSFNRLAHLPDSLSCLSRLRTLDVDHNQLTAFPRQLLQLVALEELDVSSNRLRGLPEDISALRALKILWLSGAELGTLPAGFCELASLESLMLDNNGLQALPAQFSCLQRLKMLNLSSNLFEEFPAALLPLAGLEELYLSRNQLTSVPSLISGLGRLLTLWLDNNRIRYLPDSIVELTGLEELVLQGNQIAVLPDHFGQLSRVGLWKIKDNPLIQPPYEVCMKGIPYIAAYQKELAHSQPAVQPRLKLLLMGHKAAGKTLLRHCLTEERVEGCPGGGDKEKCYPPSPPPVSKGIEVTSWTADASRGLRFIVYDLAGDESYEVIQPFFLSPGALYVLVVNLATYEPRHFPTTVGSFLHRVGARVPHAVVCIVGTHADLCGERELEEKCLDIHRQIALQEKHDAEGLSRLAKVVDEALARDFELRSASPHAAYYGVSDKNLRRRKAHFQYLLNHRLQILSPVLPVSCRDPRHLRRLRDKLLSVAEHREIFPNLHRVLPRSWQVLEELHFQPPQAQRLWLSWWDSARLGLQAGLTEDRLQSALSYLHESGKLLYFEDSPALKEHVFHNLTRLIDILNVFFQRDPSLLLHKLLLGTSGEGKAEGESSPPMARSTPSQELLRATQLHQYVEGFLLHGLLPAHVIRLLLKPHVQAQQDLQLLLELLEKMGLCYCLNKPKGKPLNGSTAWYKFPCYVQNEVPHAEAWINGTNLAGQSFVAEQLQIEYSFPFTFPPGLFARYSVQINSHVVHRSDGKFQIFAYRGKVPVVVSYRPARGVLQPDTLSIASHASLPNIWTAWQAITPLVEELNVLLQEWPGLHYTVHILCSKCLKRGSPNPHAFPGELLSQPRPEGVAEIICPKNGSERVNVALVYPPTPTVISPCSNTRLQEESGYRDEHAVTFVPGASLWSKEGIKRQQSXEETQYRRAEERGVLALKD

SEQ ID NO: 839717 - protein, 1093 aa, Homo sapiens
RPPAAERGRAGRGRSRRARGAARHVAAGSRVRVRLSARGPAMAGMDSGNLKTARLWRDAALRARKLRSNLRQLTLTAAGACPGAGADALESPASPQLVLPANLGDIEALNLGNNGLEEVPEGLGSALGSLRVLVLRRNRFARLPPAVAELGHHLTELDVSHNRLTALGAEVVSALRELRKLNLSHNQLPALPAQLGALAHLEELDVSFNRLAHLPDSLSCLSRLRTLDVDHNQLTAFPRQLLQLVALEELDVSSNRLRGLPEDISALRALKILWLSGAELGTLPAGFCELASLESLMLDNNGLQALPAQFSCLQRLKMLNLSSNLFEEFPAALLPLAGLEELYLSRNQLTSVPSLISGLGRLLTLWLDNNRIRYLPDSIVELTGLEELVLQGNQIAVLPDHFGQLSRVGLWKIKDNPLIQPPYEVCMKGIPYIAAYQKELAHSQPAVQPRLKLLLMGHKAAGKTLLRHCLTEERVEGCPGGGDKEKCYPPSPPPVSKGIEVTSWTADASRGLRFIVYDLAGDESYEVIQPFFLSPGALYVLVVNLATYEPRHFPTTVGSFLHRVGARVPHAVVCIVGTHADLCGERELEEKCLDIHRQIALQEKHDAEGLSRLAKVVDEALARDFELRSASPHAAYYGVSDKNLRRRKAHFQYLLNHRLQILSPVLPVSCRDPRHLRRLRDKLLSVAEHREIFPNLHRVLPRSWQVLEELHFQPPQAQRLWLSWWDSARLGLQAGLTEDRLQSALSYLHESGKLLYFEDSPALKEHVFHNLTRLIDILNVFFQRDPSLLLHKLLLGTSGEGKAEGESSPPMARSTPSQELLRATQLHQYVEGFLLHGLLPAHVIRLLLKPHVQAQQDLQLLLELLEKMGLCYCLNKPKGKPLNGSTAWYKFPCYVQNEVPHAEAWINGTNLAGQSFVAEQLQIEYSFPFTFPPGLFARYSVQINSHVVHRSDGKFQIFAYRGKVPVVVSYRPARGVLQPDTLSIASHASLPNIWTAWQAITPLVEELNVLLQEWPGLHYTVHILCSKCLKRGSPNPHAFPGELLSQPRPEGVAEIICPKNGSERVNVALVYPPTPTVISPCSKKNVGEKHRNQ

SEQ ID NO: 839718 - protein, 1091 aa, Homo sapiens
RPPAAERGRAGRGRSRRARGAARHVAAGSRVRVRLSARGPAMAGMDSGNLKTARLWRDAALRARKLRSNLRQLTLTAAGACPGAGADALESPASPQLVLPANLGDIEALNLGNNGLEEVPEGLGSALGSLRVLVLRRNRFARLPPAVAELGHHLTELDVSHNRLTALGAEVVSALRELRKLNLSHNQLPALPAQLGALAHLEELDVSFNRLAHLPDSLSCLSRLRTLDVDHNQLTAFPRQLLQLVALEELDVSSNRLRGLPEDISALRALKILWLSGAELGTLPAGFCELASLESLMLDNNGLQALPAQFSCLQRLKMLNLSSNLFEEFPAALLPLAGLEELYLSRNQLTSVPSLISGLGRLLTLWLDNNRIRYLPDSIVELTGLEELVLQGNQIAVLPDHFGQLSRVGLWKIKDNPLIQPPYEVCMKGIPYIAAYQKELAHSQPAVQPRLKLLLMGHKAAGKTLLRHCLTEERVEGCPGGGDKEKCYPPSPPPVSKGIEVTSWTADASRGLRFIVYDLAGDESYEVIQPFFLSPGALYVLVVNLATYEPRHFPTTVGSFLHRVGARVPHAVVCIVGTHADLCGERELEEKCLDIHRQIALQEKHDAEGLSRLAKVVDEALARDFELRSASPHAAYYGVSDKNLRRRKAHFQYLLNHRLQILSPVLPVSCRDPRHLRRLRDKLLSVAEHREIFPNLHRVLPRSWQVLEELHFQPPQAQRLWLSWWDSARLGLQAGLTEDRLQSALSYLHESGKLLYFEDSPALKEHVFHNLTRLIDILNVFFQRDPSLLLHKLLLGTSGEGKAEGESSPPMARSTPSQELLRATQLHQYVEGFLLHGLLPAHVIRLLLKPHVQAQQDLQLLLELLEKMGLCYCLNKPKGKPLNGSTAWYKFPCYVQNEVPHAEAWINGTNLAGQSFVAEQLQIEYSFPFTFPPGLFARYSVQINSHVVHRSDGKFQIFAYRGKVPVVVSYRPARGVLQPDTLSIASHASLPNIWTAWQAITPLVEELNVLLQEWPGLHYTVHILCSKCLKRGSPNPHAFPGELLSQPRPEGVAEIICPKNGSERVNVALVYPPTPTVISPCSKYLHTFLEN

SEQ ID NO: 839719 - protein, 100 aa, Homo sapiens
AFTQTGRQRETYTTQAPSSAATHTKSFGGPGSTQALPQRALEASLGAIFPTVGSLRNKIKCGQVQWLTPIIPALWEAKTDGSRGQEIETILANTVKPHLY

SEQ ID NO: 839720 - protein, 957 aa, Homo sapiens
MLNWAGSGFPPAASFASGEMSGAEYGRKGGPATLWLDTALIGPFTRRFWFYVDPEKPKPQGLGRVEREGTTFPSRLRKRDCGHYFSACTERLASGVYRETGVRCAGGHMDPGSRWRNLPSGPSLKHLTDPSYGIPREQQKAALQELTRAHVESFNYAVHEGLGLAVQAIPPFEFAFKDERISFTILDAVISPPTVPKGTICKEANVYPAECRGRRSTYRGKLTADINWAVNGISKGIIKQFLGYVPIMVKSKLCNLRNLPPQALIEHHEEAEEMGGYFIINGIEKVIRMLIMPRRNFPIAMIRPKWKTRGPGYTQYGVSMHCVREEHSAVNMNLHYLENGTVMLNFIYRKELFFLPLGFALKALVSFSDYQIFQELIKGKEDDSFLRNSVSQMLRIVMEEGCLTQKQVLNYLGECFRVKLNVPDWYPNEQAAEFLFNQCICIHLKSNTEKFYMLCLMTRKLFALAKGECMEDNPDSLVNQEVLTPGQLFLMFLKEKLEGWLVSIKIAFDKKAQKTSVSMNTDNLMRIFTMGIDLTKPFEYLFATGNLRSKTGLGLLQDSGLCVVADKLNFIRYLSHFRCVHRGADFAKMRTTTVRRLLPESWGFLCPVHTPDGEPCGLMNHLTAVCEVVTQFVYTASIPALLCNLGVTPIDGAPHRSYSECYPVLLDGVMVGWVDKDLAPGIADSLRHFKVLREKRIPPWMEVVLIPMTGKPSLYPGLFLFTTPCRLVRPVQNLALGKEELIGTMEQIFMNVAIFEDEVFAGVTTHQELFPHSLLSVIANFIPFSDHNQSPRNMYQCQMGKQTMGFPLLTYQDRSDNKLYRLQTPQSPLVRPSMYDYYDMDNYPIGTNAIVAVISYTGYDMEDAMIVNKASWERGFAHGSVYKSEFIDLSEKIKQGDSSLVFGIKPGDPRVLQKLDDDGLPFIGAKLQYGDPYYSYLNLNTGESFVMYYNETGCCLT

SEQ ID NO: 839721 - protein, 1243 aa, Homo sapiens
MLNWAGSGFPPAASFASGEMSGAEYGRKGGPATLWLDTALIGPFTRRFWFYVDPEKPKPQGLGRVEREGTTFPSRLRKRDCGHYFAACTERLASGVYRETGVRCAGGHMDPGSRWRNLPSGPSLKHLTDPSYGIPREQQKAALQELTRAHVESFNYAVHEGLGLAVQAIPPFEFAFKDERISFTILDAVISPPTVPKGTICKEANVYPAECRGRRSTYRGKLTADINWAVNGISKGIIKQFLGYVPIMVKSKLCNLRNLPPQALIEHHEEAEEMGGYFIINGIEKVIRMLIMPRRNFPIAMIRPKWKTRGPGYTQYGVSMHCVREEHSAVNMNLHYLENGTVMLNFIYRKELFFLPLGFALKALVSFSDYQIFQELIKGKEDDSFLRNSVSQMLRIVMEEGCLTQKQVLNYLGECFRVKLNVPDWYPNEQAAEFLFNQCICIHLKSNTEKFYMLCLMTRKLFALAKGECMEDNPDSLVNQEVLTPGQLFLMFLKEKLEGWLVSIKIAFDKKAQKTSVSMNTDNLMRIFTMGIDLTKPFEYLFATGNLRSKTGLGLLQDSGLCVVADKLNFIRYLSHFRCVHRGADFAKMRTTTVRRLLPESWGFLCPVHTPDGEPCGLMNHLTAVCEVVTQFVYTASIPALLCNLGVTPIDGAPHRSYSECYPVLLDGVMVGWVDKDLAPGIADSLRHFKVLREKRIPPWMEVVLIPMTGKPSLYPGLFLFTTPCRLVRPVQNLALGKEELIGTMEQIFMNVAIFEDEVFAGVTTHQELFPHSLLSVIANFIPFSDHNQSPRNMYQCQMGKQTMGFPLLTYQDRSDNKLYRLQTPQSPLVRPSMYDYYDMDNYPIGTNAIVAVISYTGYDMEDAMIVNKASWERGFAHGSVYKSEFIDLSEKIKQGDSSLVFGIKPGDPRVLQKLDDDGLPFIGAKLQYGDPYYSYLNLNTGESFVMYYKSKENCVVDNIKVCSNDTGSGKFKCVCITMRVPRNPTIGDKFASRHGQKGILSRLWPAEDMPFTESGMVPDILFNPHGFPSRMTIGMLIESMAGKSAALHGLCHDATPFIFSEENSALEYFGEMLKAAGYNFYGTERLYSGISGLELEADIFIGVVYYQRLRHMVSDKFQVRTTGARDRVTNQPIGGRNVQGGIRFGEMERDALLAHGTSFLLHDRLFNCSDRSVAHVCVKCGSLLSPLLEKPPPSWSAMRNRKYNCTLCSRSDTIDTVSVPYVFRYFVAELAAMNIKVKLDVV

SEQ ID NO: 839722 - protein, 1243 aa, Homo sapiens; identical to SEQ ID NO: 839721

SEQ ID NO: 839723 - protein, 574 aa, Homo sapiens [sequence omitted]

SEQ ID NO: 839724 - protein, 543 aa, Homo sapiens [sequence omitted]

SEQ ID NO: 839725 - protein, 1187 aa, Homo sapiens
MLNWAGSGFPPAASFASGEMSGAEYGRKGGPATLWLDTALIGPFTRRFWFYVDPEKPKPQGLGRVEREGTTFPSRLRKRDCGHYFAACTERLASGVYRETGVRCAGGHMDPGSRWRNLPSGPSLKHLTDPSYGIPREQQKAALQELTRAHVESFNYAVHEGLGLAVQADINWAVNGISKGIIKQFLGYVPIMVKSKLCNLRNLPPQALIEHHEEAEEMGGYFIINGIEKVIRMLIMPRRNFPIAMIRPKWKTRGPGYTQYGVSMHCVREEHSAVNMNLHYLENGTVMLNFIYRKELFFLPLGFALKALVSFSDYQIFQELIKGKEDDSFLRNSVSQMLRIVMEEGCLTQKQVLNYLGECFRVKLNVPDWYPNEQAAEFLFNQCICIHLKSNTEKFYMLCLMTRKLFALAKGECMEDNPDSLVNQEVLTPGQLFLMFLKEKLEGWLVSIKIAFDKKAQKTSVSMNTDNLMRIFTMGIDLTKPFEYLFATGNLRSKTGLGLLQDSGLCVVADKLNFIRYLSHFRCVHRGADFAKMRTTTVRRLLPESWGFLCPVHTPDGEPCGLMNHLTAVCEVVTQFVYTASIPALLCNLGVTPIDGAPHRSYSECYPVLLDGVMVGWVDKDLAPGIADSLRHFKVLREKRIPPWMEVVLIPMTGKPSLYPGLFLFTTPCRLVRPVQNLALGKEELIGTMEQIFMNVAIFEDEVFAGVTTHQELFPHSLLSVIANFIPFSDHNQSPRNMYQCQMGKQTMGFPLLTYQDRSDNKLYRLQTPQSPLVRPSMYDYYDMDNYPIGTNAIVAVISYTGYDMEDAMIVNKASWERGFAHGSVYKSEFIDLSEKIKQGDSSLVFGIKPGDPRVLQKLDDDGLPFIGAKLQYGDPYYSYLNLNTGESFVMYYKSKENCVVDNIKVCSNDTGSGKFKCVCITMRVPRNPTIGDKFASRHGQKGILSRLWPAEDMPFTESGMVPDILFNPHGFPSRMTIGMLIESMAGKSAALHGLCHDATPFIFSEENSALEYFGEMLKAAGYNFYGTERLYSGISGLELEADIFIGVVYYQRLRHMVSDKFQVRTTGARDRVTNQPIGGRNVQGGIRFGEMERDALLAHGTSFLLHDRLFNCSDRSVAHVCVKCGSLLSPLLEKPPPSWSAMRNRKYNCTLCSRSDTIDTVSVPYVFRYFVAELAAMNIKVKLDVV

SEQ ID NO: 839726 - protein, 1187 aa, Homo sapiens; identical to SEQ ID NO: 839725

SEQ ID NO: 839727 - protein, 1274 aa, Homo sapiens
MLNWAGSGFPPAASFASGEMSGAEYGRKGGPATLWLDTALIGPFTRRFWFYVDPEKPKPQGLGRVEREGTTFPSRLRKRDCGHYFAACTERLASGVYRETGVRCAGGHMDPGSRWRNLPSGPSLKHLTDPSYGIPREQQKAALQELTRAHVESFNYAVHEGLGLAVQRRGLPYVAQPGLKLLSSSSPPLSVSQILGLQAIPPFEFAFKDERISFTILDAVISPPTVPKGTICKEANVYPAECRGRRSTYRGKLTADINWAVNGISKGIIKQFLGYVPIMVKSKLCNLRNLPPQALIEHHEEAEEMGGYFIINGIEKVIRMLIMPRRNFPIAMIRPKWKTRGPGYTQYGVSMHCVREEHSAVNMNLHYLENGTVMLNFIYRKELFFLPLGFALKALVSFSDYQIFQELIKGKEDDSFLRNSVSQMLRIVMEEGCLTQKQVLNYLGECFRVKLNVPDWYPNEQAAEFLFNQCICIHLKSNTEKFYMLCLMTRKLFALAKGECMEDNPDSLVNQEVLTPGQLFLMFLKEKLEGWLVSIKIAFDKKAQKTSVSMNTDNLMRIFTMGIDLTKPFEYLFATGNLRSKTGLGLLQDSGLCVVADKLNFIRYLSHFRCVHRGADFAKMRTTTVRRLLPESWGFLCPVHTPDGEPCGLMNHLTAVCEVVTQFVYTASIPALLCNLGVTPIDGAPHRSYSECYPVLLDGVMVGWVDKDLAPGIADSLRHFKVLREKRIPPWMEVVLIPMTGKPSLYPGLFLFTTPCRLVRPVQNLALGKEELIGTMEQIFMNVAIFEDEVFAGVTTHQELFPHSLLSVIANFIPFSDHNQSPRNMYQCQMGKQTMGFPLLTYQDRSDNKLYRLQTPQSPLVRPSMYDYYDMDNYPIGTNAIVAVISYTGYDMEDAMIVNKASWERGFAHGSVYKSEFIDLSEKIKQGDSSLVFGIKPGDPRVLQKLDDDGLPFIGAKLQYGDPYYSYLNLNTGESFVMYYKSKENCVVDNIKVCSNDTGSGKFKCVCITMRVPRNPTIGDKFASRHGQKGILSRLWPAEDMPFTESGMVPDILFNPHGFPSRMTIGMLIESMAGKSAALHGLCHDATPFIFSEENSALEYFGEMLKAAGYNFYGTERLYSGISGLELEADIFIGVVYYQRLRHMVSDKFQVRTTGARDRVTNQPIGGRNVQGGIRFGEMERDALLAHGTSFLLHDRLFNCSDRSVAHVCVKCGSLLSPLLEKPPPSWSAMRNRKYNCTLCSRSDTIDTVSVPYVFRYFVAELAAMNIKVKLDVV

SEQ ID NO: 839728 - protein, 567 aa, Homo sapiens
MVAAVDTEGDRHVLVSPWQFVPSVITIALCVGSGYARVLSSHVNHLRATRNDADNRAYLSWERGVLPEMSEIFMNVAIFEDEVFAGVTTHQELFPHSLLSVIANFIPFSDHNQSPRNMYQCQMGKQTMGFPLLTYQDRSDNKLYRLQTPQSPLVRPSMYDYYDMDNYPIGTNAIVAVISYTGYDMEDAMIVNKASWERGFAHGSVYKSEFIDLSEKIKQGDSSLVFGIKPGDPRVLQKLDDDGLPFIGAKLQYGDPYYSYLNLNTGESFVMYYKSKENCVVDNIKVCSNDTGSGKFKCVCITMRVPRNPTIGDKFASRHGQKGILSRLWPAEDMPFTESGMVPDILFNPHGFPSRMTIGMLIESMAGKSAALHGLCHDATPFIFSEENSALEYFGEMLKAAGYNFYGTERLYSGISGLELEADIFIGVVYYQRLRHMVSDKFQVRTTGARDRVTNQPIGGRNVQGGIRFGEMERDALLAHGTSFLLHDRLFNCSDRSVAHVCVKCGSLLSPLLEKPPPSWSAMRNRKYNCTLCSRSDTIDTVSVPYVFRYFVAELAAMNIKVKLDVV

SEQ ID NO: 839729 - protein, 145 aa, Homo sapiens
MVSMSFKRNRSDRFYSTRCCGCCHVRTGTIILGTWYMVVNLLMAILLTVEVTHPNSMPAVNIQYEVIGNYYSSERMADNACVLFAVSVLMFIISSMLVYGAISYQVGWLIPFFCYRLFDFVLSCLVAISSLTYLPRIKEYLGSTT

SEQ ID NO: 839730 - protein, 87 aa, Homo sapiens
MAILLTVEVTHPNSMPAVNIQYEVIGNYYSSERMADNACVLFAVSVLMFIISSMLVYGAISYQVGWLIPFFCYRLFDFVLKPIWVRA

SEQ ID NO: 839731 - protein, 145 aa, Homo sapiens; identical to SEQ ID NO: 839729

SEQ ID NO: 839732 - protein, 145 aa, Homo sapiens; identical to SEQ ID NO: 839729

SEQ ID NO: 839733 - protein, 145 aa, Homo sapiens; identical to SEQ ID NO: 839729

SEQ ID NO: 839734 - protein, 145 aa, Homo sapiens; identical to SEQ ID NO: 839729

SEQ ID NO: 839735 - protein, 145 aa, Homo sapiens; identical to SEQ ID NO: 839729

SEQ ID NO: 839736 - protein, 145 aa, Homo sapiens; identical to SEQ ID NO: 839729

SEQ ID NO: 839737 - protein, 198 aa, Homo sapiens
DDLMWCVGTVRLNNMPGLDCLELVRGCDETVMFKSSRRGLGSERPTSYNYLVDLIRCYHWRNRSDRFYSTRCCGCCHVRTGTIILGTWYMVVNLLMAILLTVEVTHPNSMPAVNIQYEVIGNYYSSERMADNACVLFAVSVLMFIISSMLVYGAISYQVGWLIPFFCYRLFDFVLSCLVAISSLTYLPRIKEYLGSTT

SEQ ID NO: 839738 - protein, 145 aa, Homo sapiens; identical to SEQ ID NO: 839729

SEQ ID NO: 839739 - protein, 129 aa, Homo sapiens
MVSMSFKRNRSDRFYSTRCCGCCHVRTGTIILGTWYMVVNLLMAILLTVEVTHPNSMPAVNNNACVLFAVSVLMFIISSMLVYGAISYQVGWLIPFFCYRLFDFVLSCLVAISSLTYLPRIKEYLGSTT

SEQ ID NO: 839740 - protein, 145 aa, Homo sapiens; identical to SEQ ID NO: 839729

SEQ ID NO: 839741 - protein, 145 aa, Homo sapiens; identical to SEQ ID NO: 839729

SEQ ID NO: 839742 - protein, 159 aa, Homo sapiens
  misc_feature (151)..(151): Xaa can be any naturally occurring amino acid
MVSMSFKRNRSDRFYSTRCCGCCHVRTGTIILGTWYMVVNLLMAILLTVEVTHPNSMPAVNIQYEVIGNYYSSERMADNACVLFAVSVLMFIISSMLVYGAISYQVGWLIPFFCYRLFDFVLSCLVAISSLTYLPRIKEYLGSTIGLQVPXVHWSWVPC

SEQ ID NO: 839743 - protein, 87 aa, Homo sapiens
MVSMSFKRNRSDRFYSTRCCGCCHVRTGTIILGTWYMVVNLLMAILLTVEVTHPNSMPAVNIQYEVIGNYYSSERMAGMCLIEKQKN

SEQ ID NO: 839744 - protein, 106 aa, Homo sapiens
MVSMSFKRNRSDRFYSTRCCGCCHVRTGTIILGTWYMVVNLLMAILLTVEVTHPNSMPAVNRFCNSSSIIFSFVIIGLEMPCFFFLIFFFLFLSPFATFFFEYLFS

SEQ ID NO: 839745 - protein, 145 aa, Homo sapiens; identical to SEQ ID NO: 839729

SEQ ID NO: 839746 - protein, 145 aa, Homo sapiens; identical to SEQ ID NO: 839729

SEQ ID NO: 839747 - protein, 145 aa, Homo sapiens; identical to SEQ ID NO: 839729

SEQ ID NO: 839748 - protein, 103 aa, Homo sapiens
MAILLTVEVTHPNSMPAVNIQYEVIGNYYSSERMADNACVLFAVSVLMFIISSMLVYGAISYQVGWLIPFFCYRLFDFVLSCLVAISSLTYLPRIKEYLGSTT

SEQ ID NO: 839749 - protein, 159 aa, Homo sapiens
LSEQILLVEEQDHRDGAQPSVVPDALEEVQSLLQAVGLVVLPDDHVVAAAGHHEDDGSHIVEALDPLAAFIALATIQYEVIGNYYSSERMADNACVLFAVSVLMFIISSMLVYGAISYQVGWLIPFFCYRLFDFVLSCLVAISSLTYLPRIKEYLGSTT

SEQ ID NO: 839750 - protein, 145 aa, Homo sapiens; identical to SEQ ID NO: 839729

SEQ ID NO: 839751 - protein, 145 aa, Homo sapiens; identical to SEQ ID NO: 839729

SEQ ID NO: 839752 - protein, 159 aa, Homo sapiens
MVSMSFKRNRSDRFYSTRCCGCCHVRTGTIILGTWYMVVNLLMAILLTVEVTHPNSMPAVNIQYEVIGNYYSSERMADNACVLFAVSVLMFIISSMLVYGAISYQVGWLIPFFCYRLFDFVLSCLVAISSLTYLPRIKEYLGSTKIPGFPLQINLGAWL

SEQ ID NO: 839753 - protein, 122 aa, Homo sapiens
MVSMSFKRNRSDRFYSTRCCGCCHVRTGTIILGTWYMVVNLLMAILLTVEVTHPNSMPAVNIQYEVIGNYYSSERMADNACVLFAVSVLMFIISSMLVYGAISLYSSGVGLIPISFWLTGLF

SEQ ID NO: 839754 - protein, 366 aa, Homo sapiens
MTEWETAAPAVGKETPDIKLFGKWSTDDVQINDISLQDYHCSERTNVIAQVTCLHKWQGRVMHGQNSFPGKSLQVGPHLWGAGPSLRPSMDGIAPGRQQTEPRKGSMDLVAGNSVQRHWPFPTGLHYTLASTRAEETPSCKGSLGGKRPIIQSKVGVPPGGRGTSHLAAIVGGGRPRGTRSEDPEPGLGWRNRCSPPTCRPVGGNPGASSLRLGVVVHPGRATLAAGFGPFSRGDTTFQGNPSCRGDENAWAAWGHEELHCLQVHNRPWPQRGVSPFGKTLSLNLPPARHETAQGNRTRLGQGRLSGRPKFPQSQDLVLCSPPGLRLGHPRVTRPLVVFGPPHRRAQTSPALRTSIMTKTQRHQTK

SEQ ID NO: 839755 - protein, 204 aa, Homo sapiens [sequence omitted]

SEQ ID NO: 839756 - protein, 204 aa, Homo sapiens [sequence omitted]

SEQ ID NO: 839757 - protein, 161 aa, Homo sapiens
MPPANQTHNAHTPHTHHLGGRAPPPRRTQLPPKPTLGRPARPPTTTRTPPPNDVPKRNRGQTRRHLPNKTPPEDHAVVTPRKGPRPPRTPHGIHSPLHRARGPRPTSHSPHITRRPPHNRNPPTTHPPDTSTLTTPTPTQHQQHHPPHPHPPPTPPHTPQP

SEQ ID NO: 839758 - protein, 94 aa, Homo sapiens
TDDVQINGAPLPKELACLGSLPPLVLLSNDISLHSVIKLFGKWSTDDVQINDISLQDYIAVKEKYAKYLPHSAGRYAARERFRKAQCPIVGAPH

SEQ ID NO: 839759 - protein, 91 aa, Homo sapiens
RTNIKARYEAGCYRMTEWETAAPAVGKETPDPDIKLFGKWSTDDVQINDISLQDYIAVKEKYAKYLPHSAGRYAARERFRKAQCPIVGAPH

SEQ ID NO: 839760 - protein, 102 aa, Homo sapiens
MMHGRNNGQRSFMDCAHRSKHAFSEDSLHLAFTGRRTLLAGSLGERPSFNSWFPRGGLPTAHLGRAGTVRRQGCGMCPPCARVNPRPSGCCTYARKDRDPLD

SEQ ID NO: 839761 - protein, 118 aa, Homo sapiens
SAQTSRLGTRLGVSGSASLTSMMMHGRNNGQRSFMDCAHRSKHAFSEDSLHLAFTGRRTLLAGSLGERPSFNSWFPRGGLPTAHLGRAGTVRRQGCGMCPPCARVNPRPSGCLCTGRS

SEQ ID NO: 839762 - protein, 47 aa, Homo sapiens
MTQPEDKKKSKHEERDTTETNTSTRQRSKCSDKKANTKETQAGNEHE

SEQ ID NO: 839763 - protein, 106 aa, Homo sapiens
MTEWETAAPAVGKETPDPDIKLFGKWSTDDVQINDISLQDYIAVKEKYAKYLPQWERLTNFHDDARPQQRAKKLHGLCASFKACLFGRFITPCFHRAKNPSCKVPG

SEQ ID NO: 839764 - protein, 91 aa, Homo sapiens
MTEWETAAPAVGKETPDPDIKLFGKWSTDDVQINDISLQDYIAVKEKYAKYLPHAKCFRKAQWGFVPRLKKRPMMRFAAPKISSRLSDEYS

SEQ ID NO: 839765 - protein, 95 aa, Homo sapiens
NNLTARYRGLGVRRSGCVLRMTEWETAAPAVGKETPDIKLFGKWSTDDVQINDISLQDYIAVKEKYAKYLPHSAGRYAARERFRKAQCPIVGAPH

SEQ ID NO: 839766 - protein, 140 aa, Homo sapiens
PTTTTTKFAAASTRGLHCSEGEVCQVPASQCRAVCRQKTLPQSSVSHCGSASLTSMMMHGRNNGQRSFMDCAHRSKHAFSEDSLHLAFTGRRTLLAGSLGERPSFNSGPRGDTSTACRLTVPAGTMRVESSRGSTRPEIK

SEQ ID NO: 839767 - protein, 112 aa, Homo sapiens
  misc_feature (51)..(51): Xaa can be any naturally occurring amino acid
  misc_feature (63)..(63): Xaa can be any naturally occurring amino acid
  misc_feature (104)..(104): Xaa can be any naturally occurring amino acid
MLHGTTTLAFKFRHGVIVAADSRATAGAYIASQTVKKVIEINPYLLGTMAXGAADCSSGERCXARIVESMSFEIGTHLCSSCLQTACNIVYQYKAWACHGTMIXAGIRKACL

SEQ ID NO: 839768 - protein, 113 aa, Homo sapiens
GYLRAPPRDGSRCSRRRNPGPSCRRSPLFHGRDYCKHRMTEWETAAPAVGKETPDIKLFGKWSTDDVQINDISLQDYIAVKEKYAKYLPHSAGRYAARKRFRKAQCPIVGAPH

SEQ ID NO: 839769 - protein, 174 aa, Homo sapiens
TDDVQINGAPLPKELACLGSLPPLVLLSNDISLPLVGLHCSEGEVCQVPASQCRAVCRQKTLPQSSVSHCGSASLTSMMMHGRNNGQRSFMDCAHRSKHAFSEDSLHLAFTGRRTLLARSLGERPSFNSWFPRGGLPTAHLGRAGTVRRQGCGMCPPCARVNPRPSGCLCTGRS

SEQ ID NO: 839770 - protein, 105 aa, Homo sapiens
MMHGRNNGQRSFMDCAHRSKHAFSEDSLHLAFTGRRTLLAGSLGERPSFNSWFPRGGLPTAHLGRAGTVRRQGCGMCPPCARVNPRPSGSLCTGAREDAQTRRVL

SEQ ID NO: 839771 - protein, 79 aa, Homo sapiens
ERERERERERERERERETGKEASWTVRIVQSMPFRKIHYTLLSQGEEPFLQGPWVNAHHSTVGSPGEDFPQRIWGAPGL

SEQ ID NO: 839772 - protein, 122 aa, Homo sapiens
MTEWETAAPAVGKETPDIKLFGKWSTDDVQINDISLQDYIAVKEKYAKYLQGNVIDQQHQRCPDIKLFGKWSTDDVQINDISLQDYIAVKEKYAKYLPHSAGRYAARERFRKAQCPIVGAPH

SEQ ID NO: 839773 - protein, 112 aa, Homo sapiens
MTTTSVMRGLLHQKEHHISHMVFLLLFLAHTPYHPASLLLHVTTLLFQYPFPHRGPLSPYIDTASGPLAIPPPGLALLSHLLSPLSSCPHPPRRLSSLPPPLPLLSPRPVLL

SEQ ID NO: 839774 - protein, 204 aa, Homo sapiens [sequence omitted]

SEQ ID NO: 839775 - protein, 204 aa, Homo sapiens [sequence omitted]

SEQ ID NO: 839776 - protein, 1488 aa, Homo sapiens
RVGSAHPARGLAQAVVRVLSRSCHHSSCCCLYRCGYRGGAEIAERDARGRCERGGLSSPRLVSERAYWEALWSGKTVPLLRQDPDWAGDCPKGFLVIMAVEGSTITSRIKNLLRSPSIKLRRSKAGNRREDLSSKVTLEKVLGITVSGGRGLACDPRSGLVAYPAGCVVVLFNPRKHKQHHILNSSRKTITALAFSPDGKYLVTGESGHMPAVRVWDVAEHSQVAELQEHKYGVACVAFSPSAKYIVSVGYQHDMIVNVWAWKKNIVVASNKVSSRVTAVSFSEDCSYFVTAGNRHIKFWYLDDSKTSKVNATVPLLGRSGLLGELRNNLFTDVACGRGKKADSTFCITSSGLLCEFSDRRLLDKWVELRVYPEVKDSNQACLPPSSFITCSSDNTIRLWNTESSGVHGSTLHRNILSSDLIKIIYVDGNTQALLDTELPGGDKADASLLDPRVGIRSVCVSPNGQHLASGDRMGTLRVHELQSLSEMLKVEAHDSEILCLEYSKPDTGLKLLASASRDRLIHVLDAGREYSLQQTLDEHSSSITAVKFAASDGQVRMISCGADKSIYFRTAQKSGDGVQFTRTHHVVRKTTLYDMDVEPSWKYTAIGCQDRNIRIFNISSGKQKKLFKGSQGEDGTLIKVQTDPSGIYIATSCSDKNLSIFDFSSGECVATMFGHSEIVTGMKFSNDCKHLISVSGDSCIFVWRLSSEMTISMRQRLAELRQRQRGGKQQGPSSPQRASGPNRHQAPSMLSPGPALSSDSDKEGEDEGTEEELPALPVLAKSTKKALASVPSPALPRSLSHWEMSRAQESVGFLDPAPAANPGPRRRGRWVQPGVELSVRSMLDLRQLETLAPSLQDPSQDSLAIIPSGPRKHGQEALETSLTSQNEKPPRPQASQPCSYPHIIRLLSQEEGVFAQDLEPAPIEDGIVYPEPSDNPTMDTSEFQVQAPARGTLGRVYPGSRSSEKHSPDSACSVDYSSSCLSSPEHPTEDSESTEPLSVDGISSDLEEPAEGDEEEEEEEGGMGPYGLQEGSPQTPDQEQFLKQHFETLASGAAPGAPVQVPERSESRSISSRFLLQVQTRPLREPSPSSSSLALMSRPAQVPQASGEQPRGNGANPPGAPPEVEPSSGNPSPQQAASVLLPRCRLNPDSSWAPKRVATASPFSGLQKAQSVHSLVPQERHEASLQAPSPGALLSREIEAQDGLGSLPPADGRPSRPHSYQNPTTSSMAKISRSISVGENLGLVAEPQAHAPIRVSPLSKLALPSRAHLVLDIPKPLPDRPTLAAFSPVTKGRAPGEAEKPGFPVGLGKAHSTTERWACLGEGTTPKPRTECQAHPGPSSPCAQQLPVSSLFQGPENLQPPPPEKTPNPMECTKPGAALSQDSEPAVSLEQCEQLVAELRGSVRQAVRLYHSVAGCKMPSAEQSRIAQLLRDTFSSVRQELEAVAGAVLSSPGSSPGAVGAEQTQALLEQYSELLLRAVERRMERKL

SEQ ID NO: 839777 - protein, 1488 aa, Homo sapiens; identical to SEQ ID NO: 839776

SEQ ID NO: 839778 - protein, 646 aa, Homo sapiens [sequence omitted]

SEQ ID NO: 839779 - protein, 312 aa, Homo sapiens
RVGSAHPARGLAQAVVRVLSRSCHHSSCCCLYRCGYRGGAEIAERDARGRCERGGLSSPRLVSERAYWEALWSGKTVPLLRQDPDWAGDCPKGFLVIMAVEGSTITSRIKNLLRSPSIKLRRSKAGNRREDLSSKVTLEKVLGITVSGGRGLACDPRSGLVAYPAGCVVVLFNPRKHKQHHILNSSRKTITALAFSPDGKYLVTGESGHMPAVRVWDVAEHSQVAELQEHKYGVACVAFSPSAKYIVSVGYQHDMIVNVWAWKKNIVVASNKVSSRVTAVSFSEDCSYFVTAGNRHIKFWYLDDSKTSKVRC

SEQ ID NO: 839780 - protein, 93 aa, Homo sapiens
QESVGFLDPAPAANPGPRRRGRWVQPGVELSVRSMLDLRQLETLAPSLQDPSQDSLAIIPSGPRKHGQEALETSLTSQVSLLSPSSLESSKGP

SEQ ID NO: 839781 - protein, 120 aa, Homo sapiens
TVWLYPSCIFVWRLSSEMTISMRQRLAELRQRQRGGKQQGPSSPQRASGPNRHQAPSMLSPGPALSSDSDKEGEDEGTEEELPALPVLAKSTKKALASVPSPALPRSLSHWEMSRVSRHC

SEQ ID NO: 839782 - protein, 1001 aa, Homo sapiens
MLKVEAHDSEILCLEYSKPDTGLKLLASASRDRLIHVLDAGREYSLQQTLDEHSSSITAVKFAASDGQVRMISCGADKSIYFRTAQKSGDGVQFTRTHHVVRKTTLYDMDVEPSWKYTAIGCQDRNIRIFNISSGKQKKLFKGSQGEDGTLIKVQTDPSGIYIATSCSDKNLSIFDFSSGECVATMFGHSEIVTGMKFSNDCKHLISVSGDSCIFVWRLSSEMTISMRQRLAELRQRQRGGKQQGPSSPQRASGPNRHQAPSMLSPGPALSSDSDKEGEDEGTEEELPALPVLAKSTKKALASVPSPALPRSLSHWEMSRAQESVGFLDPAPAANPGPRRRGRWVQPGVELSVRSMLDLRQLETLAPSLQDPSQDSLAIIPSGPRKHGQEALETSLTSQNEKPPRPQASQPCSYPHIIRLLSQEEGVFAQDLEPAPIEDGIVYPEPSDNPTMDTSEFQVQAPARGTLGRVYPGSRSSEKHSPDSACSVDYSSSCLSSPEHPTEDSESTEPLSVDGISSDLEEPAEGDEEEEEEEGGMGPYGLQEGSPQTPDQEQFLKQHFETLASGAAPGAPVQVPERSESRSISSRFLLQVQTRPLREPSPSSSSLALMSRPAQVPQASGEQPRGNGANPPGAPPEVEPSSGNPSPQQAASVLLPRCRLNPDSSWAPKRVATASPFSGLQKAQSVHSLVPQERHEASLQAPSPGALLSREIEAQDGLGSLPPADGRPSRPHSYQNPTTSSMAKISRSISVGENLGLVAEPQAHAPIRVSPLSKLALPSRAHLVLDIPKPLPDRPTLAAFSPVTKGRAPGEAEKPGFPVGLGKAHSTTERWACLGEGTTPKPRTECQAHPGPSSPCAQQLPVSSLFQGPENLQPPPPEKTPNPMECTKPGAALSQDSEPAVSLEQCEQLVAELRGSVRQAVRLYHSVAGCKMPSAEQSRIAQLLRDTFSSVRQELEAVAGAVLSSPGSSPGAVGAEQTQALLEQYSELLLRAVERRMERKL

SEQ ID NO: 839783 - protein, 1488 aa, Homo sapiens; identical to SEQ ID NO: 839776

SEQ ID NO: 839784 - protein, 123 aa, Homo sapiens
RVGSAHPARGLAQAVVRVLSRSCHHSSCCCLYRCGYRGGAEIAERDARGRCERGGLSSPRLVSERAYWEALWSGKTVPLLRQDPGLGRGLSQRVSRHNGCGRVNHYQPDQESVEISIHQTAQE

SEQ ID NO: 839785 - protein, 244 aa, Homo sapiens
MESETEPEPVTLLVKSPNQRHRDLELSGDRGWSVGHLKAHLSRVYPERPRPEDQRLIYSGKLLLDHQCLRDLLPKQEKRHVLHLVCNVKSPSKMPEINAKVAESTEEPAGSNRGQYPEDSSSDGLRQREVLRNLSSPGWENISRPEAAQQAFQGLGPGFSGYTPYGWLQLSWFQQIYARQYYMQYLAATAASGAFVPPPSAQEIPVVSAPAPAPIHNQFPAENQPANQNAAPQVVVNPGAIKLR

SEQ ID NO: 839786 - protein, 416 aa, Homo sapiens
MNDPAETTPKHTTTYTPQNKTHTPQSTKKKGGNPQENPQGGTTQKKKKRLSQTEAHKRRNNTANDGRLHNKSRENRQDTSKTKPERAHANHPRQRPRHQQLKLHSQTRKLRKSNKPEEKRRKTQHRSERGHNRRRENKETDKKRKGTEQKGTAARTTALTGSKKESKRRERLRRIATEQTSAAQQRPQQPTDEHTERSKRERRTRERPAKRDRTRAETRHTTPEREARAAGEQTSRTRRDQDSHTSRREDSRRQRQTATERSTDEESRAAERVEQRESKGRGHTKTNQKRHARDRAQRAQRREEKRNGRRAERVIESHERYSRGKRTDTVWVCEVISDGNREQCHHKGGSESDRGVKKEGESRIAEEERGGYERVDGGEELRRNRVRERGEIRSEESDEQRDKRRSLETDGRAMKG

SEQ ID NO: 839787 - protein, 183 aa, Homo sapiens
TGSTEKPGFSTHGSFACLRTKAPSRPEAAQQAFQGLGPGFSGYTPYGWLQLSWFQQIYARQYYMQYLAATAASGAFVPPPSAQEIPVVSAPAPAPIHNQFPAENQPANQNAAPQVVVNPGANQNLRMNAQGGPIVEEDDEINRDWLDWTYSAATFSVFLSILYFYSSLSRFLMVMGATVVMYL

SEQ ID NO: 839788 - protein, 391 aa, Homo sapiens
MESETEPEPVTLLVKSPNQRHRDLELSGDRGWSVGHLKAHLSRVYPERPRPEDQRLIYSGKLLLDHQCLRDLLPKQEKRHVLHLVCNVKSPSKMPEINAKVAESTEEPAGSNRGQYPEDSSSDGLRQREVLRNLSSPGWENISRPEAAQQAFQGLGPGFSGYTPYGWLQLSWFQQIYARQYYMQYLAATAASGAFVPPPSAQEIPVVSAPAPAPIHNQFPAENQPANQNAAPQVVVNPGANQNLRMNAQGGPIVEEDDEINRDWLDWTYSAATFSVFLSILYFYSSLSRFLMVMGATVVMYLHHVGWFPFRPRPVQNFPNDGPPPDVVNQDPNNNLQEGTDPETEDPNHLPPDRDVLDGEQTSPSFMSTAWLVFKTFFASLLPEGPPAIAN

SEQ ID NO: 839789 - protein, 351 aa, Homo sapiens
MGGSHRAFCPQSQARGFYKRRPKRGRGPQRRELSLQRLRAAETPPAWHLGAQRSPDTAAAAMESETEPEPVTLLVKSPNQRHRDLELSGDRGWSVGHLKAHLSRVYPERPRPEDQRLIYSGKLLLDHQCLRDLLPKQEKRHVLHLVCNVKSPSKMPEINAKVAESTEEPAGSNRGQYPEDSSSDGLRQREVLRNLSSPGWENISRPEAAQQAFQGLGPGFSGYTPYGWLQLSWFQQIYARQYYMQYLAATAASGAFVPPPSAQEIPVVSAPAPAPIHNQFPAENQPANQNAAPQVVVNPGAKSRLVGLDLFSSYIFCFSQYPLLLLLPEQIPHGHGGHRCYVPASRWVVSI

SEQ ID NO: 839790 - protein, 104 aa, Homo sapiens
MGLLRKCFPVMLGGNTHIQITCIKQFILCLGTCRGEMLTCVTLSFHDQRPEDQRLIYSGKLLLDHQCLRDLLPKQEKRHVLHLVCNVKSPSKMPEINAKVSASS

SEQ ID NO: 839791 - protein, 427 aa, Homo sapiens
MGGSHRAFCPQSQARGFYKRRPKRGRGPQRRELSLQRLRAAETPPAWHLGAQRSPDTAAAAMESETEPEPVTLLVKSPNQRHRDLELSGDRGWSVGHLKAHLSRVYPERPRPEDQRLIYSGKLLLDHQCLRDLLPKVAESTEEPAGSNRGQYPEDSSSDGLRQREVLRNLSSPGWENISRPEAAQQAFQGLGPGFSGYTPYGWLQLSWFQQIYARQYYMQYLAATAASGAFVPPPSAQEIPVVSAPAPAPIHNQFPAENQPANQNAAPQVVVNPGANQNLRMNAQGGPIVEEDDEINRDWLDWTYSAATFSVFLSILYFYSSLSRFLMVMGATVVMYLHHVGWFPFRPRPVQNFPNDGPPPDVVNQDPNNNLQEGTDPETEDPNHLPPDRDVLDGEQTSPSFMSTAWLVFKTFFASLLPEGPPAIAN

SEQ ID NO: 839792 - protein, 250 aa, Homo sapiens [sequence omitted]

SEQ ID NO: 839793 - protein, 272 aa, Homo sapiens
TGSTEKPGFSTHGSFACLRTKAPSRPEAAQQAFQGLGPGFSGYTPYGWLQLSWFQQIYARQYYMQYLAATAASGAFVPPPSAQEIPVVSAPAPAPIHNQFPAENQPANQNAAPQVVVNPGANQNLRMNAQGGPIVEEDDEINRDWLDWTYSAATFSVFLSILYFYSSLSRFLMVMGATVVMYLHHVGWFPFRPRPVQNFPNDGPPPDVVNQDPNNNLQEGTDPETEDPNHLPPDRDVLDGEQTSPSFMSTAWLVFKTFFASLLPEGPPAIAN

SEQ ID NO: 839794 - protein, 245 aa, Homo sapiens
GCGRSRVSPWSVFSGYTPYGWLQLSWFQQIYARQYYMQYLAATAASGAFVPPPSAQEIPVVSAPAPAPIHNQFPAENQPANQNAAPQVVVNPGANQNLRMNAQGGPIVEEDDEINRDWLDWTYSAATFSVFLSILYFYSSLSRFLMVMGATVVMYLHHVGWFPFRPRPVQNFPNDGPPPDVVNQDPNNNLQEGTDPETEDPNHLPPDRDVLDGEQTSPSFMSTAWLVFKTFFASLLPEGPPAIAN

SEQ ID NO: 839795 - protein, 358 aa, Homo sapiens
MGGSHRAFCPQSQARGFYKRRPKRGRGPQRRELSLQRLRAAETPPAWHLGAQRSPDTAAAAMESETEPEPVTLLVKSPNQRHRDLELSGDRGWSVGHLKAHLSRVYPERPRPEDQRLIYSGKLLLDHQCLRDLLPKQEKRHVLHLVCNVKSPSKMPEINAKVAESTEEPAGSNRGQYPEDSSSDGLRQREVLRNLSSPGWENISRPEAAQQAFQGLGPGFSGYTPYGWLQLSWFQQIYARQYYMQYILYFYSSLSRFLMVMGATVVMYLHHVGWFPFRPRPVQNFPNDGPPPDVVNQDPNNNLQEGTDPETEDPNHLPPDRDVLDGEQTSPSFMSTAWLVFKTFFASLLPEGPPAIAN

SEQ ID NO: 839796 - protein, 149 aa, Homo sapiens
MGGSHRAFCPQSQARGFYKRRPKRGRGPQRRELSLQRLRAAETPPAWHLGAQRSPDTAAAAMESETEPEPVTLLVKSPNQRHRDLELSGDRGWSVGHLKAHLSRVYPERPRPEDQRLIYSGKLLLDHQCLRDLLPKAGELLELGRQRLQ

SEQ ID NO: 839797 - protein, 413 aa, Homo sapiens
MGGSHRAFCPQSQARGFYKRRPKRGRGPQRRELSLQRLRAAETPPAWHLGAQRSPDTAAAAMESETEPEPVTLLVKSPNQRHRDLELSGDRGWSVGHLKAHLSRVYPERPRPEDQRLIYSGKLLLDHQCLRDLLPKQEKRHVLHLVCNVKSPSKMPEINAKVAESTEEPAGSNRGQYPEDSSSDGLRQREVLRNLSSPGWENISRPEAAQQAFQGLGPGFSGYTPYGWLQLSWFQQIYARQYYMQYLAATAASGAFVPPPSAQEIPVVSAPAPAPIHNQFPAENQPANQNAAPQVVVNPGANQNLRMNAQGGPIVEEDDEINRDWLDWTYSAATFSVFLSILYFYSSLSRFLMVMGATVVMYLHHVGWFPFRPRPVQNFPNDGPPPDVVNQDPNNNLQAQDGSARIWLGGISL

SEQ ID NO: 839798 - protein, 340 aa, Homo sapiens
MGGSHRAFCPQSQARGFYKRRPKRGRGPQRRELSLQRLRAAETPPAWHLGAQRSPDTAAAAMESETEPEPVTLLVKSPNQRHRDLELSGDRGWSVGHLKAHLSRVYPERPRPEDQRLIYSGKLLLDHQCLRDLLPKQEKRHVLHLVCNVKSPSKMPEINAKVAESTEEPAGSNRGQYPEDSSSDGLRQREVLRNLSSPGWENISRPEAAQQAFQGLGPGFSGYTPYGWLQLSWFQQIYARQYYMQYLAATAASGAFVPPPSAQEIPVVSAPAPAPIHNQFPAENQPANQNAAPQVVVNPGANQNLRMNAQGGPIVEEDDEIIRDAGSAPRSYDNTNIDDT

SEQ ID NO: 839799 - protein, 338 aa, Homo sapiens
MGGSHRAFCPQSQARGFYKRRPKRGRGPQRRELSLQRLRAAETPPAWHLGAQRSPDTAAAAMESETEPEPVTLLVKSPNQRHRDLELSGDRGWSVGHLKAHLSRVYPERPRPEDQRLIYSGKLLLDHQCLRDLLPKQEKRHVLHLVCNVKSPSKMPEINAKVAESTEEPAGSNRGQYPEDSSSDGLRQREVLRNLSSPGWENISRPEAAQQAFQGLGPGFSGYTPYGWLQLSWFQQIYARQYYMQYLAATAASGAFVPPPSAQEIPVVSAPAPAPIHNQFPAENQPANQNAAPQVVVNPGATKFGVMPRGHLAKGAKPQVGELPDYWGTVHNPERPMA

SEQ ID NO: 839800 - protein, 180 aa, Homo sapiens
MGGSHRAFCPQSQARGFYKRRPKRGRGPQRRELSLQRLRAAETPPAWHLGAQRSPDTAAAAMESETEPEPVTLLVKSPNQRHRDLELSGDRGWSVGHLKAHLSRVYPERPRPEDQRLIYSGKLLLDHQCLRDLLPKQEKRHVLHLVCNVKSPSKMPEINAKMQKWFCWYDLIPVGMFKLH

SEQ ID NO: 839801 - protein, 241 aa, Homo sapiens
PPELGASQVSDQAPRAACSAPKHGHRTRVPGAQPRLWVTQTRRVASARAHVLGPPSATRIRTPIGPRWESASASANGRQPQSVLSAEPARGFYKRRPKRGRGPQRRELSLQRLRAAETPPAWHLGAQRSPDTAAAAMESETEPEPVTLLVKSPNQRHRDLELSGDRGWSVGHLKAHLSRVYPERPRPEDQRLIYSGKLLLDHQCLRDLLPKQEKRHVLHLVCNVKSPSKMPEINAKVSASS

SEQ ID NO: 839802 - protein, 318 aa, Homo sapiens
  misc_feature (2)..(2): Xaa can be any naturally occurring amino acid
TXNRLRSRAVCELSLQRLRAAETPPAWHLGAQRSPDTAAAAMESETEPEPVTLLVKSPNQRHRDLELSGDRGWSVGHLKAHLSRVYPERPRPEDQRLIYSGKLLLDHQCLRDLLPKQEKRHVLHLVCNVKSPSKMPEINAKVAESTEEPAGSNRGQYPEDSSSDGLRQREVLRNLSSPGWENISRPEAAQQAFQGLGPGFSGYTPYGWLQLSWFQQIYARQYYMQYLAATAASGAFVPPPSAQEIPVVSAPAPAPIHNQFPAENQPANQNAAPQVVVNPGATKFGVMPRGHLAKGAKPQVGELPDYWGTVHNPERPMA

SEQ ID NO: 839803 - protein, 161 aa, Homo sapiens
MYRPEAAQQAFQGLGPGFSGYTPYGWLQLSWFQQIYARQYYMQYLAATAASGAFVPPPSAQEIPVVSAPAPAPIHNQFPAENQPANQNAAPQVVVNPGANQNLRMNAQGGPIVEEDDEINRDWLDWTYSAATFSVFLSILYFYSSLSRFLMVMGATVVMYL

SEQ ID NO: 839804 - protein, 452 aa, Homo sapiens
MGGSHRAFCPQSQARGFYKRRPKRGRGPQRRELSLQRLRAAETPPAWHLGAQRSPDTAAAAMESETEPEPVTLLVKSPNQRHRDLELSGDRGWSVGHLKAHLSRVYPERPRPEDQRLIYSGKLLLDHQCLRDLLPKQEKRHVLHLVCNVKSPSKMPEINAKVAESTEEPAGSNRGQYPEDSSSDGLRQREVLRNLSSPGWENISRPEAAQQAFQGLGPGFSGYTPYGWLQLSWFQQIYARQYYMQYLAATAASGAFVPPPSAQEIPVVSAPAPAPIHNQFPAENQPANQNAAPQVVVNPGANQNLRMNAQGGPIVEEDDEINRDWLDWTYSAATFSVFLSILYFYSSLSRFLMVMGATVVMYLHHVGWFPFRPRPVQNFPNDGPPPDVVNQDPNNNLQEGTDPETEDPNHLPPDRDVLDGEQTSPSFMSTAWLVFKTFFASLLPEGPPAIAN

SEQ ID NO: 839805 - protein, 241 aa, Homo sapiens; identical to SEQ ID NO: 839801

SEQ ID NO: 839806 - protein, 298 aa, Homo sapiens
MPEINAKVAESTEEPAGSNRGQYPEDSSSDGLRQREVLRNLSSPGWENISRPEAAQQAFQGLGPGFSGYTPYGWLQLSWFQQIYARQYYMQYLAATAASGAFVPPPSAQEIPVVSAPAPAPIHNQFPAENQPANQNAAPQVVVNPGANQNLRMNAQGGPIVEEDDEINRDWLDWTYSAATFSVFLSILYFYSSLSRFLMVMGATVVMYLHHVGWFPFRPRPVQNFPNDGPPPDVVNQDPNNNLQEGTDPETEDPNHLPPDRDVLDGEQTSPSFMSTAWLVFKTFFASLLPEGPPAIAN

SEQ ID NO: 839807 - protein, 411 aa, Homo sapiens
MGGSHRAFCPQSQARGFYKRRPKRGRGPQRRELSLQRLRAAETPPAWHLGAQRSPDTAAAAMESETEPEPVTLLVKSPNQRHRDLELSGDRGWSVGHLKAHLSRVYPERPRPEDQRLIYSGKLLLDHQCLRDLLPKQEKRHVLHLVCNVKSPSKMPEINAKVAESTEEPAGSNRGQYPEDSSSDGLRQREVLRNLSSPGWENISSLAATAASGAFVPPPSAQEIPVVSAPAPAPIHNQFPAENQPANQNAAPQVVVNPGANQNLRMNAQGGPIVEEDDEINRDWLDWTYSAATFSVFLSILYFYSSLSRFLMVMGATVVMYLHHVGWFPFRPRPVQNFPNDGPPPDVVNQDPNNNLQEGTDPETEDPNHLPPDRDVLDGEQTSPSFMSTAWLVFKTFFASLLPEGPPAIAN

SEQ ID NO: 839808 - protein, 256 aa, Homo sapiens
PTLEDPRTRPEAAQQAFQGLGPGFSGYTPYGWLQLSWFQQIYARQYYMQYLAATAASGAFVPPPSAQEIPVVSAPAPAPIHNQFPAENQPANQNAAPQVVVNPGANQNLRMNAQGGPIVEEDDEINRDWLDWTYSAATFSVFLSILYFYSSLSRFLMVMGATVVMYLHHVGWFPFRPRPVQNFPNDGPPPDVVNQDPNNNLQEGTDPETEDPNHLPPDRDVLDGEQTSPSFMSTAWLVFKTFFASLLPEGPPAIAN

SEQ ID NO: 839809 - protein, 209 aa, Homo sapiens
MQYLAATAASGAFVPPPSAQEIPVVSAPAPAPIHNQFPAENQPANQNAAPQVVVNPGANQNLRMNAQGGPIVEEDDEINRDWLDWTYSAATFSVFLSILYFYSSLSRFLMVMGATVVMYLHHVGWFPFRPRPVQNFPNDGPPPDVVNQDPNNNLQEGTDPETEDPNHLPPDRDVLDGEQTSPSFMSTAWLVFKTFFASLLPEGPPAIAN

SEQ ID NO: 839810 - protein, 274 aa, Homo sapiens
MGGSHRAFCPQSQARGFYKRRPKRGRGPQRRELSLQRLRAAETPPAWHLGAQRSPDTAAAAMESETEPEPVTLLVKSPNQRHRDLELSGDRGWSVGHLKAHLSRVYPERPRPEDQRLIYSGKLLLDHQCLRDLLPKQEKRHVLHLVCNVKSPSKMPEINAKVAESTEEPAGSNRGQYPEDSSSDGLRQREVLRNLSSPGWENISRPEAAQQAFQGLGPGFSGYTPYGWLQLSWFQQIYARQYYMQYLAATAASGAFVPPPSAQEIPASRWVVSI

SEQ ID NO: 839811 - protein, 294 aa, Homo sapiens
MGGSHRAFCPQSQARGFYKRRPKRGRGPQRRELSLQRLRAAETPPAWHLGAQRSPDTAAAAMESETEPEPVTLLVKSPNQRHRDLELSGDRGWSVGHLKAHLSRVYPERPRPEDQRLIYSGKLLLDHQCLRDLLPKQEKRHVLHLVCNVKSPSKMPEINAKVAESTEEPAGSNRGQYPEDSSSDGLRQREVLRNLSSPGWENISRHHVGWFPFRPRPVQNFPNDGPPPDVVNQDPNNNLQEGTDPETEDPNHLPPDRDVLDGEQTSPSFMSTAWLVFKTFFASLLPEGPPAIAN

SEQ ID NO: 839812 - protein, 99 aa, Homo sapiens
NGEPPNVMQVHNNGGPPFRPRPVQNFPNDGPPPDVVNQDPNNNLQEGTDPETEDPNHLPPDRDVLDGEQTSPSFMSTAWLVFKTFFASLLPEGPPAIAN

SEQ ID NO: 839813 - protein, 399 aa, Homo sapiens
MGGSHRAFCPQSQARGFYKRRPKRGRGPQRRELSLQRLRAAETPPAWHLGAQRSPDTAAAAMESETEPEPVTLLVKSPNQRHRDLELSGDRGWSVGHLKAHLSRVYPERPRPEDQRLIYSGKLLLDHQCLRDLLPKQEKRHVLHLVCNVKSPSKMPEINAKVAESTEEPAGSNRGQYPEDSSSDGLRQREVLRNLSSPGWENISSLAATAASGAFVPPPSAQEIPVVSAPAPAPIHNQFPAENQPANQNAAPQVVVNPGANQNLRMNAQGGPIVEEDDEINRDWLDWTYSAATFSVFLSILYFYSSLSRFLMVMGATVVMYLHHVGWFPFRPRPVQNFPNDGPPPDVVNQDPNNNLQKAPQPSQTDGVCAVAVGGFDRNGLDHLTPARLPLLDMAMMSF

SEQ ID NO: 839814 - protein, 305 aa, Homo sapiens
MGGSHRAFCPQSQARGFYKRRPKRGRGPQRRELSLQRLRAAETPPAWHLGAQRSPDTAAAAMESETEPEPVTLLVKSPNQRHRDLELSGDRGWSVGHLKAHLSRVYPERPRPEDQRLIYSGKLLLDHQCLRDLLPKQEKRHVLHLVCNVKSPSKMPEINAKVAESTEEPAGSNRGQYPEDSSSDGLRQREVLRNLSSPGWENISRPEAAQQAFQGLGPGFSGYTPYGWLQLSWFQQIYARQYYMQYLAATAASGAFVPPPSAQEIPVVSAPAPAPIHNQFPAENQPANQNAAPQVVVNPGAIKLR

SEQ ID NO: 839815 - protein, 205 aa, Homo sapiens
MGGSHRAFCPQSQARGFYKRRPKRGRGPQRRELSLQRLRAAETPPAWHLGAQRSPDTAAAAMESETEPEPVTLLVKSPNQRHRDLELSGDRGWSVGHLKAHLSRVYPERPRPEDQRLIYSGKLLLDHQCLRDLLPKQEKRHVLHLVCNVKSPSKMPEINAKVAESTEEPAGSNRGQYPEDSSSDGLRQREVLRNLSSPGWENISR

SEQ ID NO: 839816 - protein, 773 aa, Homo sapiens
MARSSSLGRECGTPRSGLGKGGPPRPQGPQARCTLGRRCTVSGKCRRPRPSWTMAPPRNVVKIAIKMRDAIPQLIQLDQAKPLAAVLKEVCDAWSLTHSERYALQFADGHRRYITENNRAEIKNGSILCLSTAPDLEAEQLLGGLQSNSPEGRREALRRLVPLASDMIFAREVISRNGLQILGTIIEDGDDLGEVLALSLRAFSELMEHGVVSWETLSIPFVRKVVCYVNMNLMDASVPPLALGLLESVTLSSPALGQLVKSEVPLDRLLVHLQVMNQQLQTKAMALLTALLQGASPVERKHMLDYLWQRNLRQFIYKNIIHSAAPMGDEMAHHLYVLQALMLGLLEPRMRTPLDPYSQEQREQLQVLRQAAFEVEGESSGAGLSADRRRSLCAREFRKLGFSNSNPAQDLERVPPGLLALDNMLYFSRNAPSAYSRFVLENSSREDKHECPFARGSIQLTVLLCELLRVGEPCSETAQDFSPMFFGQDQSFHELFCVGIQLLNKTWKEMRATQEDFDKVMQVVREQLARTLALKPTSLELFRTKVNALTYGEVLRLRQTERLHQEGTLAPPILELREKLKPELMGLIRQQRLLRLCEGTLFRKISSRRRQDKLWFCCLSPNHKLLQYGDMEEGASPPTLESLPEQLPVADMRALLTGKDCPHVREKGSGKQNKDLYELAFSISYDRGEEEAYLNFIAPSKREFYLWTDGLSALLGSPMGSEQTRLDLEQLLTMETKLRLLELENVPIPERPPPVPPPPTNFNFCYDCSIAEP

SEQ ID NO: 839817 - protein, 471 aa, Homo sapiens
MLDYLWQRNLRQFIYKNIIHSAAPMGDEMAHHLYVLQALMLGLLEPRMRTPLDPYSQEQREQLQVLRQAAFEVEGESSGAGLSADRRRSLCAREFRKLGFSNSNPAQDLERVPPGLLALDNMLYFSRNAPSAYSRFVLENSSREDKHECPFARGSIQLTVLLCELLRVGEPCSETAQDFSPMFFGQDQSFHELFCVGIQLLNKTWKEMRATQEDFDKVMQVVREQLARTLALKPTSLELFRTKVNALTYGEVLRLRQTERLHQEGTLAPPILELREKLKPELMGLIRQQRLLRLCEGTLFRKISSRRRQDKLWFCCLSPNHKLLQYGDMEEGASPPTLESLPEQLPVADMRALLTGKDCPHVREKGSGKQNKDLYELAFSISYDRGEEEAYLNFIAPSKREFYLWTDGLSALLGSPMGSEQTRLDLEQLLTMETKLRLLELENVPIPERPPPVPPPPTNFNFCYDCSIAEP

SEQ ID NO: 839818 - protein, 811 aa, Homo sapiens
MARSSSLGRECGTPRSGLGKGGPPRPQGPQARCTLGRRCTVSGKCRRPRPSWTMAPPRNVVKIAIKMRDAIPQLIQLDQAKPLAAVLKEVCDAWSLTHSERYALQFADGHRRYITENNRAEIKNGSILCLSTAPDLEAEQLLGGLQSNSPEGRREALRRLVPLASDMIFAREVISRNGLQILGTIIEDGDDLGEVLALSLRAFSELMEHGVVSWETLSIPFVRKVVCYVNMNLMDASVPPLALGLLESVTLSSPALGQLVKSEVPLDRLLVHLQVMNQQLQTKAMALLTALLQGASPVERKHMLDYLWQRNLRQFIYKNIIHSAAPMGDEMAHHLYVLQALMLGLLEPRMRTPLDPYSQEQREQLQVLRQAAFEVEGESSGAGLSADRRRSLCAREFRKLGFSNSNPAQDLERVPPGLLALDNMLYFSRNAPSAYSRFVLENSSREDKHECPFARGSIQLTVLLCELLRVGEPCSETAQDFSPMFFGQDQSFHELFCVGIQLLNKTWKEMRATQEDFDKVMQVVREQLARTLALKPTSLELFRTKVNALTYGEVLRLRQTERLHQEGTLAPPILELREKLKPELMGLIRQQRLLRLCEGTLFRKISSRRRQGLRMGMGRGQRAGRGQAEGGWLGVRTSQHSGPLPFLHADKLWFCCLSPNHKLLQYGDMEEGASPPTLESLPEQLPVADMRALLTGKDCPHVREKGSGKQNKDLYELAFSISYDRGEEEAYLNFIAPSKREFYLWTDGLSALLGSPMGSEQTRLDLEQLLTMETKLRLLELENVPIPERPPPVPPPPTNFNFCYDCSIAEP

SEQ ID NO: 839819 - protein, 229 aa, Homo sapiens
MARSSSLGRECGTPRSGLGKGGPPRPQGPQARCTLGRRCTVSGKCRRPRPSWTMAPPRNVVKIAIKMRDAIPQLIQLDQAKPLAAVLKEVCDAWSLTHSERYALQFADGHRRYITENNRAEIKNGSILCLSTAPDLEAEQLLGGLQSNSPEGRREALRRLVPLASDMIFAREVISRNGLQILGTIIEDGDDLGEVLALSLRAFSELMEHGVVSWETLSIPFVRKVGGLS

SEQ ID NO: 839820 - protein, 709 aa, Homo sapiens
IPPCPGRENDHIHLQAKPLAAVLKEVCDAWSLTHSERYALQFADGHRRYITENNRAEIKNGSILCLSTAPDLEAEQLLGGLQSNSPEGRREALRRLVPLASDMIFAREVISRNGLQILGTIIEDGDDLGEVLALSLRAFSELMEHGVVSWETLSIPFVRKVVCYVNMNLMDASVPPLALGLLESVTLSSPALGQLVKSEVPLDRLLVHLQVMNQQLQTKAMALLTALLQGASPVERKHMLDYLWQRNLRQFIYKNIIHSAAPMGDEMAHHLYVLQALMLGLLEPRMRTPLDPYSQEQREQLQVLRQAAFEVEGESSGAGLSADRRRSLCAREFRKLGFSNSNPAQDLERVPPGLLALDNMLYFSRNAPSAYSRFVLENSSREDKHECPFARGSIQLTVLLCELLRVGEPCSETAQDFSPMFFGQDQSFHELFCVGIQLLNKTWKEMRATQEDFDKVMQVVREQLARTLALKPTSLELFRTKVNALTYGEVLRLRQTERLHQEGTLAPPILELREKLKPELMGLIRQQRLLRLCEGTLFRKISSRRRQDKLWFCCLSPNHKLLQYGDMEEGASPPTLESLPEQLPVADMRALLTGKDCPHVREKGSGKQNKDLYELAFSISYDRGEEEAYLNFIAPSKREFYLWTDGLSALLGSPMGSEQTRLDLEQLLTMETKLRLLELENVPIPERPPPVPPPPTNFNFCYDCSIAEP

SEQ ID NO: 839821 - protein, 553 aa, Homo sapiens
EPRMRTPLDPYSQEQREQLQAYARLLESVTLSSPALGQLVKSEVPLDRLLVHLQVMNQQLQTKAMALLTALLQGASPVERKHMLDYLWQRNLRQFIYKNIIHSAAPMGDEMAHHLYVLQALMLGLLEPRMRTPLDPYSQEQREQLQVLRQAAFEVEGESSGAGLSADRRRSLCAREFRKLGFSNSNPAQDLERVPPGLLALDNMLYFSRNAPSAYSRFVLENSSREDKHECPFARGSIQLTVLLCELLRVGEPCSETAQDFSPMFFGQDQSFHELFCVGIQLLNKTWKEMRATQEDFDKVMQVVREQLARTLALKPTSLELFRTKVNALTYGEVLRLRQTERLHQEGTLAPPILELREKLKPELMGLIRQQRLLRLCEGTLFRKISSRRRQDKLWFCCLSPNHKLLQYGDMEEGASPPTLESLPEQLPVADMRALLTGKDCPHVREKGSGKQNKDLYELAFSISYDRGEEEAYLNFIAPSKREFYLWTDGLSALLGSPMGSEQTRLDLEQLLTMETKLRLLELENVPIPERPPPVPPPPTNFNFCYDCSIAEP

SEQ ID NO: 839822 - protein, 291 aa, Homo sapiens
MQVVREQLARTLALKPTSLELFRTKVNALTYGEVLRLRQTERLHQEGTLAPPILELREKLKPELMGLIRQQRLLRLCEGTLFRKISSRRRQGLRMGMGRGQRAGRGQAEGGWLGVRTSQHSGPLPFLHADKLWFCCLSPNHKLLQYGDMEEGASPPTLESLPEQLPVADMRALLTGKDCPHVREKGSGKQNKDLYELAFSISYDRGEEEAYLNFIAPSKREFYLWTDGLSALLGSPMGSEQTRLDLEQLLTMETKLRLLELENVPIPERPPPVPPPPTNFNFCYDCSIAEP

SEQ ID NO: 839823 - protein, 122 aa, Homo sapiens [sequence omitted]

SEQ ID NO: 839824 - protein, 128 aa, Homo sapiens
SAAARSTLKAGMAAAAAAGSGTPREEEGPAGEAAASQPQAPTSVPGARLSRLPLARVKALVKADPDVTLAGQEAIFILARAAELFVETIAKDAYCCAQQGKRKTLQRRDLDNAIEAVDEFAFLEGTLD

SEQ ID NO: 839825 - protein, 128 aa, Homo sapiens
SAAARSTLKAGMAAAAAAGSGTPREEEGPAGEAAASQPQAPTSVPGARLSRLPLARVKALVKADPDVTLAGQEAIFILARAAELFVETIAKDAYCCAQQGKRKTLQRRDLDNAIEAVDEFAFLEEMKC

SEQ ID NO: 839826 - protein, 149 aa, Homo sapiens
SAAARSTLKAGMAAAAAAGSGTPREEEVPAGEAAASQPQAPTSVPGARLSRLPLARVKALVKADPDVTLAGQEAIFILARAAELFVETIAKDAYCCAQQGKRKTLQRRDLDNAIEAVDEFAFLEVVKSPEDVMHFSGCILVVERHMYFD

SEQ ID NO: 839827 - protein, 132 aa, Homo sapiens
SAAARSTLKAGMAAAAAAGSGTPREEEGPAGEAAASQPQAPTSVPGARLSRLPLARVKALVKADPDVTLAGQEAIFILARAAELFVETIAKDAYCCAQQGKRKTLQRRDLDNAIEAVDEFAFLEALFTITKI

SEQ ID NO: 839828 - protein, 128 aa, Homo sapiens; identical to SEQ ID NO: 839824

SEQ ID NO: 839829 - protein, 128 aa, Homo sapiens; identical to SEQ ID NO: 839824

SEQ ID NO: 839830 - protein, 145 aa, Homo sapiens
SAAARSTLKAGMAAAAAAGSGTPREEEGPAGEAAASQPQAPTSVPGARLSRLPLARVKALVKADPDVTLAGQEAIFILARAAELFVETIAKDAYCCAQQGKRKTLQRRDLATGDLISDSCLAGNPHLDNAIEAVDEFAFLEGTLD

SEQ ID NO: 839831 - protein, 142 aa, Homo sapiens
SAAARSTLKAGMAAAAAAGSGTPREEEGPAGEAAASQPQAPTSVPGARLSRLPLARVKALVKADPDVTLAGQEAIFILARAAELFVETIAKDAYCCAQQGKRKTLQRRDLDNAIEAVDEFAFLEGEFPLSGQSFPPVFCMLM

SEQ ID NO: 839832 - protein, 127 aa, Homo sapiens
SAAARSTLKAGMAAAAAAGSGTPREEEGPAGEAAASQPQAPTSVPGARLSRLPLARVKALVKADPDVTLAGQEAIFILARAAELFVETIAKDAYCCAQQGKRKTLLCKVFHYFCLSSISSLDAAAAA

SEQ ID NO: 839833 - protein, 76 aa, Homo sapiens
EDKTAELRGELLTQGELLTQKRAANSGAAAELFVETIAKDAYCCAQQGKRKTLQRRDLDNAIEAVDEFAFLEGTLD

SEQ ID NO: 839834 - protein, 79 aa, Homo sapiens
TCRVQHLLGSQHLSFILSVQRSSSSCICVTEKQQGSWPLVLTLIRGALMGAGFLLTYGLTWIYYTRCGGPQQSRAERPG

SEQ ID NO: 839835 - protein, 205 aa, Homo sapiens
APRSAAGGEGFGSLHASLVGFRGVVAGCARHFRASRNGVANGLQSNMPKFYCDYCDTYLTHDSPSVRKTHCSGRKHKENVKDYYQKWMEEQAQSLIDKTTAAFQQGKIPPTPFSAPPPAGAMIPPPPSLPGPPRPGMMPAPHMGGPPMMPMMGPPPPGMMPVGPAPGMRPPMGGHMPMMPGPPMMRPPARPMMVPTRPGMTRPDR

SEQ ID NO: 839836 - protein, 169 aa, Homo sapiens
NGGRNLARSNMPKFYCDYCDTYLTHDSPSVRKTHCSGRKHKENVKDYYQKWMEEQAQSLIDKTTAAFQQGKIPPTPFSAPPPAGAMIPPPPSLPGPPRPGMMPAPHMGGPPMMPMMGPPPPGMMPVGPAPGMRPPMGGHMPMMPGPPMMRPPARPMMVPTRPGMTRPDR

SEQ ID NO: 839837 - protein, 205 aa, Homo sapiens; identical to SEQ ID NO: 839835

SEQ ID NO: 839838 - protein, 118 aa, Homo sapiens
RLGTRLGVNRPRHSPQPSGSSSPWYDASTPYGGPSHDANDGPSSSWDDASGTCSWNEAAHGRPYANDAWAPNDETSCPSHDGAHSARNDSTRQIRIEGRPYCIGFILPVLLHQEIMLL

SEQ ID NO: 839839 - protein, 135 aa, Homo sapiens
NGGRNLARSNMPKFYCDYCDTYLTHDSPSVRKTHCSGRKHKENVKDYYQKWMEEQAQSLIDKTTAAFQQGKIPPTPFSAPPPAGAMIPPPPSLPGPPRPGMMPAPHMGGPPMMPMMGPPPPGMMPVGPGKFECLS

SEQ ID NO: 839840 - protein, 175 aa, Homo sapiens
PTRPSTHASANGLQSNMPKFYCDYCDTYLTHDSPSVRKTHCSGRKHKENVKDYYQKWMEEQAQSLIDKTTAAFQQGKIPPTPFSAPPPAGAMIPPPPSLPGPPRPGMMPAPHMGGPPMMPMMGPPPPGMMPVGPAPGMRPPMGGHMPMMPGPPMMRPPARPMMVPTRPGMTRPDR

SEQ ID NO: 839841 - protein, 180 aa, Homo sapiens
MNSASVDGHLSGCRLFLFLSPLFRFYCDYCDTYLTHDSPSVRKTHCSGRKHKENVKDYYQKWMEEQAQSLIDKTTAAFQQGKIPPTPFSAPPPAGAMIPPPPSLPGPPRPGMMPAPHMGGPPMMPMMGPPPPGMMPVGPAPGMRPPMGGHMPMMPGPPMMRPPARPMMVPTRPGMTRPDR

SEQ ID NO: 839842 - protein, 118 aa, Homo sapiens
MEEQAQSLIDKTTAAFQQGKIPPTPFSAPPPAGAMIPPPPSLPGPPRPGMMPAPHMGGPPMMPMMGPPPPGMMPVGPAPGMRPPMGGHMPMMPGPPMMRPPARPMMVPTRPGMTRPDR

SEQ ID NO: 839843 - protein, 205 aa, Homo sapiens; identical to SEQ ID NO: 839835

SEQ ID NO: 839844 - protein, 205 aa, Homo sapiens; identical to SEQ ID NO: 839835

SEQ ID NO: 839845 - protein, 162 aa, Homo sapiens
  misc_feature (28)..(28): Xaa can be any naturally occurring amino acid
MPVLSIFGKWRFESGCLPRSLWNTLSSXEKPLRWDSHLSCMLCWQAGFEAEQKVSGSSRKLAISHALLEMLTPPPAGAMIPPPPSLPGPPRPGMMPAPHMGGPPMMPMMGPPPPGMMPVGPAPGMRPPMGGHMPMMPGPPMMRPPARPMMVPTRPGMTRPDR

SEQ ID NO: 839846 - protein, 178 aa, Homo sapiens
IKAKVRGWVWNRPRRLQSNMPKFYCDYCDTYLTHDSPSVRKTHCSGRKHKENVKDYYQKWMEEQAQSLIDKTTAAFQQGKIPPTPFSAPPPAGAMIPPPPSLPGPPRPGMMPAPHMGGPPMMPMMGPPPPGMMPVGPAPGMRPPMGGHMPMMPGPPMMRPPARPMMVPTRPGMTRPDR

SEQ ID NO: 839847 - protein, 178 aa, Homo sapiens; identical to SEQ ID NO: 839846

SEQ ID NO: 839848 - protein, 163 aa, Homo sapiens
ASTRLGVKSAEGDTIPLSHDSPSVRKTHCSGRKHKENVKDYYQKWMEEQAQSLIDKTTAAFQQGKIPPTPFSAPPPAGAMIPPPPSLPGPPRPGMMPAPHMGGPPMMPMMGPPPPGMMPVGPAPGMRPPMGGHMPMMPGPPMMRPPARPMMVPTRPGMTRPDR

SEQ ID NO: 839849 - protein, 175 aa, Homo sapiens
AVVSRYEAGLAAADARCPEFYCDYCDTYLTHDSPSVRKTHCSGRKHKENVKDYYQKWMEEQAQSLIDKTTAAFQQGKIPPTPFSAPPPAGAMIPPPPSLPGPPRPGMMPAPHMGGPPMMPMMGPPPPGMMPVGPAPGMRPPMGGHMPMMPGPPMMRPPARPMMVPTRPGMTRPDR

SEQ ID NO: 839850 - protein, 180 aa, Homo sapiens; identical to SEQ ID NO: 839841

SEQ ID NO: 839851 - protein, 118 aa, Homo sapiens; identical to SEQ ID NO: 839842

SEQ ID NO: 839852 - protein, 140 aa, Homo sapiens
IGWCYCLGCLPPPPPPPVLSYSILCSSSCRGDDTTSPQPSGSSSPWYDASTPYGGPSHDANDGPSSSWDDASGTCSWNEAAHGRPYANDAWAPNDETSCPSHDGAHSARNDSTRQIRIEGRPYCIGFILPVLLHQEIMLL

SEQ ID NO: 839853 - protein, 31 aa, Homo sapiens
MREAIGYQITSGLAGHCNNSGFYPLQERKPL

SEQ ID NO: 839854 - protein, 360 aa, Homo sapiens
MVTLEEFLEESNRSSPTHDTPSCRDDLLSDYFRKASDPPAIGGQPGPPAKKEGAKMPTNFVAPTVKMAAPTSEGRPLKPGQYVKPNFRLTEAEAPPSVAPRQAQPPQSLSLGRPRQAPVPPASHAPASRSASLSRAFSLASADLLRASGPEACKQESPQKLGAPEALGGRETGSHTLQSPAPPSSHSLARERTPLVGKAGSSCQGPGPRSRPLDTRRFSLAPPKEERLAPLHQSATAPAIATAGAGAAAAGSGSNSQLLHFSPAAAPAARTKPKAPPRSGEVATITPVRAGLSLSEGDGVPGQGCSEGLPAKSPGRSPDLAPHLGRALEDCSRGSVSKSSPASPEPGGDPQTVWYEYGCV

SEQ ID NO: 839855 - protein, 1780 aa, Homo sapiens
MLPGLLVEEAASHTLSPYCLCREDKTEQLVDTRHEVDQLVLELQKVKQENIQLAADARSARAYRDELDSLREKANRVERLELELTRCKEKLHDVDFYKARMEELREDNIILIETKAMLEEQLTAARARGDKVHELEKENLQLKSKLHDLELDRDTDKKRIEELLEENMVLEIAQKQSMNESAHLGWELEQLSKNADLSDASRKSFVFELNECASSRILKLEKENQSLQSTIQGLRDASLVLEESGLKCGELEKENHQLSKKIEKLQTQLEREKQSNQDLETLSEELIREKEQLQSDMETLKADKARQIKDLEQEKDHLNRAMWSLRERSQVSSEARMKDVEKENKALHQTVTEANGKLSQLEFEKRQLHRDLEQAKEKGERAEKLERELQRLQEENGRLARKVTSLETATEKVEALEHESQGLQLENRTLRKSLDTLQNVSLQLEGLERDNKQLDAENLELRRLVETMRFTSTKLAQMERENQQLEREKEELRKNVDLLKALGKKSERLELSYQSVSAENLRLQQSLESSSHKTQTLESELGELEAERQALRRDLEALRLANAQLEGAEKDRKALEQEVAQLEKDKKLLEKEAKRLWQQVELKDAVLDDSTAKLSAVEKESRALDKELARCRDAAGKLKELEKDNRDLTKQVTVHARTLTTLREDLVLEKLKSQQLSSELDKLSQELEKVGLNRELLLQEDDSGSDTKYKILEGRNESALKTTLAMKEEKIVLLEAQMEEKASLNRQLESELQMLKKECETLRQNQGEGQHLQNSFKHPAGKTAASHQGKEAWGPGHKEATMELLRVKDRAIELERNNAALQAEKQLLKEQLQHLETQNVTFSSQILTLQKQSAFLQEHNTTLQTQTAKLQVENSTLSSQSAALTAQYTLLQNHHTAKETENESLQRQQEQLTAAYEALLQDHEHLGTLHERQSAEYEALIRQHSCLKTLHRNLELEHKELGERHGDMLKRKAELEEREKVLTTEREALQQEQRTNALAMGENQRLRGELDRVNFLHHQLKGEYEELHAHTKELKTSLNNAQLELNRWQARFDELKEQHQTMDISLTKLDNHCELLSRLKGNLEEENHHLLSQIQLLSQQNQMLLEQNMENKEQYHEEQKQYIDKLNALRRHKEKLEEKIMDQYKFYDPPPKKKNHWIGAKALVKLIKPKKEGSRERLKSTVDSPPWQLESSDPASPAASQPLRSQAENPDTPALGSNCAEERDAHNGSVGKGPGDLKPKRGSPHRGSLDRTDASTDLAMRSWPSELGSRTCSTSATTTAPSNSTPIARHPGRTKGYNSDDNLCEPSLEFEVPNHRQYVSRPSSLESSRNTSSNSSPLNLKGSSEQLHGRSESFSSEDLIPSRDLATLPREASTPGRNALGRHEYPLPRNGPLPQEGAQKRGTAPPYVGVRPCSASPSSEMVTLEEFLEESNRSSPTHDTPSCRDDLLSDYFRKASDPPAIGGQPGPPAKKEGAKMPTNFVAPTVKMAAPTSEGRPLKPGQYVKPNFRLTEAEAPPSVAPRQAQPPQSLSLGRPRQAPVPPASHAPASRSASLSRAFSLASADLLRASGPEACKQESPQKLGAPEALGGRETGSHTLQSPAPPSSHSLARERTPLVGKAGSSCQGPGPRSRPLDTRRFSLAPPKEERLAPLHQSATAPAIATAGAGAAAAGSGSNSQLLHFSPAAAPAARTKPKAPPRSGEVATITPVRAGLSLSEGDGVPGQGCSEGLPAKSPGRSPDLAPHLGRALEDCSRGSVSKSSPASPEPGGDPQTVWYEYGCV

SEQ ID NO: 839856 - protein, 1546 aa, Homo sapiens
GGFCFVLNHGSLRRTDVCTGLGLLVLQIEKLQTQLEREKQSNQDLETLSEELIREKEQLQSDMETLKADKARQIKDLEQEKDHLNRAMWSLRERSQVSSEARMKDVEKENKALHQTVTEANGKLSQLEFEKRQLHRDLEQAKEKGERAEKLERELQRLQEENGRLARKVTSLETATEKVEALEHESQGLQLENRTLRKSLDTLQNVSLQLEGLERDNKQLDAENLELRRLVETMRFTSTKLAQMERENQQLEREKEELRKNVDLLKALGKKSERLELSYQSVSAENLRLQQSLESSSHKTQTLESELGELEAERQALRRDLEALRLANAQLEGAEKDRKALEQEVAQLEKDKKLLEKEAKRLWQQVELKDAVLDDSTAKLSAVEKESRALDKELARCRDAAGKLKELEKDNRDLTKQVTVHARTLTTLREDLVLEKLKSQQLSSELDKLSQELEKVGLNRELLLQEDDSGSDTKYKILEGRNESALKTTLAMKEEKIVLLEAQMEEKASLNRQLESELQMLKKECETLRQNQGEGQHLQNSFKHPAGKTAASHQGKEAWGPGHKEATMELLRVKDRAIELERNNAALQAEKQLLKEQLQHLETQNVTFSSQILTLQKQSAFLQEHNTTLQTQTAKLQVENSTLSSQSAALTAQYTLLQNHHTAKETENESLQRQQEQLTAAYEALLQDHEHLGTLHERQSAEYEALIRQHSCLKTLHRNLELEHKELGERHGDMLKRKAELEEREKVLTTEREALQQEQRTNALAMGENQRLRGELDRVNFLHHQLKGEYEELHAHTKELKTSLNNAQLELNRWQARFDELKEQHQTMDISLTKLDNHCELLSRLKGNLEEENHHLLSQIQLLSQQNQMLLEQNMENKEQYHEEQKQYIDKLNALRRHKEKLEEKIMDQYKFYDPPPKKKNHWIGAKALVKLIKPKKEGSRERLKSTVDSPPWQLESSDPASPAASQPLRSQAENPDTPALGSNCAEERDAHNGSVGKGPGDLKPKRGSPHRGSLDRTDASTDLAMRSWPSELGSRTCSTSATTTAPSNSTPIARHPGRTKGYNSDDNLCEPSLEFEVPNHRQYVSRPSSLESSRNTSSNSSPLNLKGSSEQLHGRSESFSSEDLIPSRDLATLPREASTPGRNALGRHEYPLPRNGPLPQEGAQKRGTAPPYVGVRPCSASPSSEMVTLEEFLEESNRSSPTHDTPSCRDDLLSDYFRKASDPPAIGGQPGPPAKKEGAKMPTNFVAPTVKMAAPTSEGRPLKPGQYVKPNFRLTEAEAPPSVAPRQAQPPQSLSLGRPRQAPVPPASHAPASRSASLSRAFSLASADLLRASGPEACKQESPQKLGAPEALGGRETGSHTLQSPAPPSSHSLARERTPLVGKAGSSCQGPGPRSRPLDTRRFSLAPPKEERLAPLHQSATAPAIATAGAGAAAAGSGSNSQLLHFSPAAAPAARTKPKAPPRSGEVATITPVRAGLSLSEGDGVPGQGCSEGLPAKSPGRSPDLAPHLGRALEDCSRGSVSKSSPASPEPGGDPQTVWYEYGCV

SEQ ID NO: 839857 - protein, 1402 aa, Homo sapiens
YLDLLAYLDLLAYLDLLAYLDLLAYLDLLGALRLANAQLEGAEKDRKALEQEVAQLEKDKKLLEKEAKRLWQQVELKDAVLDDSTAKLSAVEKESRALDKELARCRDAAGKLKELEKDNRDLTKQVTVHARTLTTLREDLVLEKLKSQQLSSELDKLSQELEKVGLNRELLLQEDDSGSDTKYKILEGRNESALKTTLAMKEEKIVLLEAQMEEKASLNRQLESELQMLKKECETLRQNQGEGQHLQNSFKHPAGKTAASHQGKEAWGPGHKEATMELLRVKDRAIELERNNAALQAEKQLLKEQLQHLETQNVTFSSQILTLQKQSAFLQEHNTTLQTQTAKLQVENSTLSSQSAALTAQYTLLQNHHTAKETENESLQRQQEQLTAAYEALLQDHEHLGTLHERQSAEYEALIRQHSCLKTLHRNLELEHKELGERHGDMLKRKAELEEREKVLTTEREALQQEQRTNALAMGENQRLRGELDRVNFLHHQLKGEYEELHAHTKELKTSLNNAQLELNRWQARFDELKEQHQTMDISLTKLDNHCELLSRLKGNLEEENHHLLSQIQLLSQQNQMLLEQNMENKEQYHEEQKQYIDKLNALRRHKEKLEEKIMDQYKFYDPPPKKKNHWIGAKALVKLIKPKKEGSRERLKSTVDSPPWQLESSDPASPAASQPLRSQAENPDTPALGSNCAEERDAHNGSVGKAPPRKKSPFLKSKNKDKDKSPTTHPALSKRLRFWSSSDIPSSPNEPLSFSDIGDFYIPFLYHVSVLCTLLHFRNSNKQKKPASKRPDGRERTPPPAPNFKLKVASVDSDFKIEDEYVTLPGPFLQHNTVLGGASGYTCTCPWARMSVLSPGDLKPKRGSPHRGSLDRTDASTDLAMRSWPSELGSRTCSTSATTTAPSNSTPIARHPGRTKGYNSDDNLCEPSLEFEVPNHRQYVSRPSSLESSRNTSSNSSPLNLKGSSEQLHGRSESFSSEDLIPSRDLATLPREASTPGRNALGRHEYPLPRNGPLPQEGAQKRGTAPPYVGVRPCSASPSSEMVTLEEFLEESNRSSPTHDTPSCRDDLLSDYFRKASDPPAIGGQPGPPAKKEGAKMPTNFVAPTVKMAAPTSEGRPLKPGQYVKPNFRLTEAEAPPSVAPRQAQPPQSLSLGRPRQAPVPPASHAPASRSASLSRAFSLASADLLRASGPEACKQESPQKLGAPEALGGRETGSHTLQSPAPPSSHSLARERTPLVGKAGSSCQGPGPRSRPLDTRRFSLAPPKEERLAPLHQSATAPAIATAGAGAAAAGSGSNSQLLHFSPAAAPAARTKPKAPPRSGEVATITPVRAGLSLSEGDGVPGQGCSEGLPAKSPGRSPDLAPHLGRALEDCSRGSVSKSSPASPEPGGDPQTVWYEYGCV

SEQ ID NO: 839858 - protein, 601 aa, Homo sapiens
KSSSADSTPSPTSSLSSEDKQHLAVELADTKARLRRVRQELEDKTEQLVDTRHEVDQLVLELQKVKQENIQLAADARSARAYRDELDSLREKANRVERLELELTRCKEKLHDVDFYKARMEELREDNIILIETKAMLEEQLTAARARGDKVHELEKENLQLKSKLHDLELDRDTDKKRIEELLEENMVLEIAQKQSMNESAHLGWELEQLSKNADLSDASRKSFVFELNECASSRILKLEKENQSLQSTIQGLRDASLVLEESGLKCGELEKENHQLSKKIEKLQTQLEREKQSNQDLETLSEELIREKEQLQSDMETLKADKARQIKDLEQEKDHLNRAMWSLRERSQVSSEARMKDVEKENKALHQTVTEANGKLSQLEFEKRQLHRDLEQAKEKGERAEKLERELQRLQEENGRLARKVTSLETATEKVEALEHESQGLQLENRTLRKSLDTLQNVSLQLEGLERDNKQLDAENLELRRLVETMRFTSTKLAQMERENQQLAPELTHERAAITRNGNPRIHHQHSQAHPWSGLQEACTSGTQRDSRHSPMKEMRNIQMAHDTQAKQSGSDPKEYRNVPYRSRAQSRRVEAHSRSAVHV

SEQ ID NO: 839859 - protein, 84 aa, Homo sapiens
MLGNQGPTGGVWEGWLCPKHLLLTRKNHWIGAKALVKLIKPKKEGSRERLKSTVDSPPWQLESSDPASPAASQPLRSQAENPDT

SEQ ID NO: 839860 - protein, 1799 aa, Homo sapiens
KSSSADSTPSPTSSLSSEDKQHLAVELADTKARLRRVRQELEDKTEQLVDTRHEVDQLVLELQKVKQENIQLAADARSARAYRDELDSLREKANRVERLELELTRCKEKLHDVDFYKARMEELREDNIILIETKAMLEEQLTAARARGDKVHELEKENLQLKSKLHDLELDRDTDKKRIEELLEENMVLEIAQKQSMNESAHLGWELEQLSKNADLSDASRKSFVFELNECASSRILKLEKENQSLQSTIQGLRDASLVLEESGLKCGELEKENHQLSKKIEKLQTQLEREKQSNQDLETLSEELIREKEQLQSDMETLKADKARQIKDLEQEKDHLNRAMWSLRERSQVSSEARMKDVEKENKALHQTVTEANGKLSQLEFEKRQLHRDLEQAKEKGERAEKLERELQRLQEENGRLARKVTSLETATEKVEALEHESQGLQLENRTLRKSLDTLQNVSLQLEGLERDNKQLDAENLELRRLVETMRFTSTKLAQMERENQQLEREKEELRKNVDLLKALGKKSERLELSYQSVSAENLRLQQSLESSSHKTQTLESELGELEAERQALRRDLEALRLANAQLEGAEKDRKALEQEVAQLEKDKKLLEKEAKRLWQQVELKDAVLDDSTAKLSAVEKESRALDKELARCRDAAGKLKELEKDNRDLTKQVTVHARTLTTLREDLVLEKLKSQQLSSELDKLSQELEKVGLNRELLLQEDDSGSDTKYKILEGRNESALKTTLAMKEEKIVLLEAQMEEKASLNRQLESELQMLKKECETLRQNQGEGQHLQNSFKHPAGKTAASHQGKEAWGPGHKEATMELLRVKDRAIELERNNAALQAEKQLLKEQLQHLETQNVTFSSQILTLQKQSAFLQEHNTTLQTQTAKLQVENSTLSSQSAALTAQYTLLQNHHTAKETENESLQRQQEQLTAAYEALLQDHEHLGTLHERQSAEYEALIRQHSCLKTLHRNLELEHKELGERHGDMLKRKAELEEREKVLTTEREALQQEQRTNALAMGENQRLRGELDRVNFLHHQLKGEYEELHAHTKELKTSLNNAQLELNRWQARFDELKEQHQTMDISLTKLDNHCELLSRLKGNLEEENHHLLSQIQLLSQQNQMLLEQNMENKEQYHEEQKQYIDKLNALRRHKEKLEEKIMDQYKFYDPPPKKKNHWIGAKALVKLIKPKKEGSRERLKSTVDSPPWQLESSDPASPAASQPLRSQAENPDTPALGSNCAEERDAHNGSVGKGPGDLKPKRGSPHRGSLDRTDASTDLAMRSWPSELGSRTCSTSATTTAPSNSTPIARHPGRTKGYNSDDNLCEPSLEFEVPNHRQYVSRPSSLESSRNTSSNSSPLNLKGSSEQLHGRSESFSSEDLIPSRDLATLPREASTPGRNALGRHEYPLPRNGPLPQEGAQKRGTAPPYVGVRPCSASPSSEMVTLEEFLEESNRSSPTHDTPSCRDDLLSDYFRKASDPPAIGGQPGPPAKKEGAKMPTNFVAPTVKMAAPTSEGRPLKPGQYVKPNFRLTEAEAPPSVAPRQAQPPQSLSLGRPRQAPVPPASHAPASRSASLSRAFSLASADLLRASGPEACKQESPQKLGAPEALGGRETGSHTLQSPAPPSSHSLARERTPLVGKAGSSCQGPGPRSRPLDTRRFSLAPPKEERLAPLHQSATAPAIATAGAGAAAAGSGSNSQLLHFSPAAAPAARTKPKAPPRSGEVATITPVRAGLSLSEGDGVPGQGCSEGLPAKSPGRSPDLAPHLGRALEDCSRGSVSKSSPASPEPGGDPQTVWYEYGCV

SEQ ID NO: 839861 - protein, 1947 aa, Homo sapiens
KSSSADSTPSPTSSLSSEDKQHLAVELADTKARLRRVRQELEDKTEQLVDTRHEVDQLVLELQKVKQENIQLAADARSARAYRDELDSLREKANRVERLELELTRCKEKLHDVDFYKARMEELREDNIILIETKAMLEEQLTAARARGDKVHELEKENLQLKSKLHDLELDRDTDKKRIEELLEENMVLEIAQKQSMNESAHLGWELEQLSKNADLSDASRKSFVFELNECASSRILKLEKENQSLQSTIQGLRDASLVLEESGLKCGELEKENHQLSKKIEKLQTQLEREKQSNQDLETLSEELIREKEQLQSDMETLKADKARQIKDLEQEKDHLNRAMWSLRERSQVSSEARMKDVEKENKALHQTVTEANGKLSQLEFEKRQLHRDLEQAKEKGERAEKLERELQRLQEENGRLARKVTSLETATEKVEALEHESQGLQLENRTLRKSLDTLQNVSLQLEGLERDNKQLDAENLELRRLVETMRFTSTKLAQMERENQQLEREKEELRKNVDLLKALGKKSERLELSYQSVSAENLRLQQSLESSSHKTQTLESELGELEAERQALRRDLEALRLANAQLEGAEKDRKALEQEVAQLEKDKKLLEKEAKRLWQQVELKDAVLDDSTAKLSAVEKESRALDKELARCRDAAGKLKELEKDNRDLTKQVTVHARTLTTLREDLVLEKLKSQQLSSELDKLSQELEKVGLNRELLLQEDDSGSDTKYKILEGRNESALKTTLAMKEEKIVLLEAQMEEKASLNRQLESELQMLKKECETLRQNQGEGQHLQNSFKHPAGKTAASHQGKEAWGPGHKEATMELLRVKDRAIELERNNAALQAEKQLLKEQLQHLETQNVTFSSQILTLQKQSAFLQEHNTTLQTQTAKLQVENSTLSSQSAALTAQYTLLQNHHTAKETENESLQRQQEQLTAAYEALLQDHEHLGTLHERQSAEYEALIRQHSCLKTLHRNLELEHKELGERHGDMLKRKAELEEREKVLTTEREALQQEQRTNALAMGENQRLRGELDRVNFLHHQLKGEYEELHAHTKELKTSLNNAQLELNRWQARFDELKEQHQTMDISLTKLDNHCELLSRLKGNLEEENHHLLSQIQLLSQQNQMLLEQNMENKEQYHEEQKQYIDKLNALRRHKEKLEEKIMDQYKFYDPPPKKKNHWIGAKALVKLIKPKKEGSRERLKSTVDSPPWQLESSDPASPAASQPLRSQAENPDTPALGSNCAEERDAHNGSVGKAPPRKKSPFLKSKNKDKDKSPTTHPALSKRLRFWSSSDIPSSPNEPLSFSDIGDFYIPFLYHVSVLCTLLHFRNSNKQKKPASKRPDGRERTPPPAPNFKLKVASVDSDFKIEDEYVTLPGPFLQHNTVLGGASGYTCTCPWARMSVLSPGDLKPKRGSPHRGSLDRTDASTDLAMRSWPSELGSRTCSTSATTTAPSNSTPIARHPGRTKGYNSDDNLCEPSLEFEVPNHRQYVSRPSSLESSRNTSSNSSPLNLKGSSEQLHGRSESFSSEDLIPSRDLATLPREASTPGRNALGRHEYPLPRNGPLPQEGAQKRGTAPPYVGVRPCSASPSSEMVTLEEFLEESNRSSPTHDTPSCRDDLLSDYFRKASDPPAIGGQPGPPAKKEGAKMPTNFVAPTVKMAAPTSEGRPLKPGQYVKPNFRLTEAEAPPSVAPRQAQPPQSLSLGRPRQAPVPPASHAPASRSASLSRAFSLASADLLRASGPEACKQESPQKLGAPEALGGRETGSHTLQSPAPPSSHSLARERTPLVGKAGSSCQGPGPRSRPLDTRRFSLAPPKEERLAPLHQSATAPAIATAGAGAAAAGSGSNSQLLHFSPAAAPAARTKPKAPPRSGEVATITPVRAGLSLSEGDGVPGQGCSEGLPAKSPGRSPDLAPHLGRALEDCSRGSVSKSSPASPEPGGDPQTVWYEYGCV

SEQ ID NO: 839862 - protein, 360 aa, Homo sapiens; identical to SEQ ID NO: 839854

SEQ ID NO: 839863 - protein, 335 aa, Homo sapiens
KSSSADSTPSPTSSLSSEDKQHLAVELADTKARLRRVRQELEDKTEQLVDTRHEVDQLVLELQKVKQENIQLAADARSARAYRDELDSLREKANRVERLELELTRCKEKLHDVDFYKARMEELREDNIILIETKAMLEEQLTAARARGDKVHELEKENLQLKSKLHDLELDRDTDKKRIEELLEENMVLEIAQKQSMNESAHLGWELEQLSKNADLSDASRKSFVFELNECASSRILKLEKENQSLQSTIQGLRDASLVLEESGLKCGELEKENHQLSKKIEKLQTQLEREKQSNQDLETLSEELIREKEQLQSDMETLKADKARQVGASTTNAS

SEQ ID NO: 839864 - protein, 60 aa, Homo sapiens
GFLLYHLHHHHHVQAREGKRGPATLTGDFIRLPGTHTLSLTHSLAGLPAVCVRGGDRLGA

SEQ ID NO: 839865 - protein, 510 aa, Homo sapiens
MPPASGPSVLARLLPLLGLLLGSASRAPGKSPPEPPSPQEILIKVQVYVSGELVPLARASVDVFGNRTLLAAGTTDSEGVATLPLSYRLGTWVLVTAARPGFLTNSVPWRVDKLPLYASVSLYLLPERPATLILYEDLVHILLGSPGARSQPLVQFQRRAARLPVSSTYSQLWASLTPASTQQEMRAFPAFLGTEASSSGNGSWLELMPLTAVSVHLLTGNGTEVPLSGPIHLSLPVPSETRALTVGTSIPAWRFDPKSGLWVRNGTGVIRKEGRQLYWTFVSPQLGYWVAAMASPTAGLVTITSGIQDIGTYHTIFLLTILAALALLVLILLCLLIYYCRRRCLKPRQQHRKLQLSGPSDGNKRDQATSMSQLHLICGGPLEPAPSGDPEAPPPGPLHSAFSSSRDLASSRDDFFRTKPRSASRPAAEPSGARGGESAGLKGARSAEGPGGLEPGLEEHRRGPSGAAAFLHEPPSPPPPFDHYLGHKGAAEGKTPDFLLSQSVDQLARP

SEQ ID NO: 839866 - protein, 537 aa, Homo sapiens
MPPASGPSVLARLLPLLGLLLGSASRAPGKSPPEPPSPQEILIKVQVYVSGELVPLARASVDVFGNRTLLAAGTTDSEGVATLPLSYRLGTWVLVTAARPGFLTNSVPWRVDKLPLYASVSLYLLPERPATLILYEDLVHILLGSPGCASIVAGAGNHGEEEDPLFAFGRSQTSARSQPLVQFQRRAARLPVSSTYSQLWASLTPASTQQEMRAFPAFLGTEASSSGNGSWLELMPLTAVSVHLLTGNGTEVPLSGPIHLSLPVPSETRALTVGTSIPAWRFDPKSGLWVRNGTGVIRKEGRQLYWTFVSPQLGYWVAAMASPTAGLVTITSGIQDIGTYHTIFLLTILAALALLVLILLCLLIYYCRRRCLKPRQQHRKLQLSGPSDGNKRDQATSMSQLHLICGGPLEPAPSGDPEAPPPGPLHSAFSSSRDLASSRDDFFRTKPRSASRPAAEPSGARGGESAGLKGARSAEGPGGLEPGLEEHRRGPSGAAAFLHEPPSPPPPFDHYLGHKGAAEGKTPDFLLSQSVDQLARP

SEQ ID NO: 839867 - protein, 273 aa, Homo sapiens
TTGKAPSPPPLLTDRQVNEKVENLSIQLRLMTRERNELRKRLAFATHGTAFDKRPYHRLNPDYERLKIQCVRAMSDLQSLQNQHTNALKRCEEVAKETDFYHTLHSRLLSDQTRLKDDVDMLRRENGQLLRERNLLQQSWEDMKRLHEEDQKEIGDLRAQQQQVLKHNGSSEILNKLYDTAMDKLEVVKKDYDALRKRYSEKVAIHNADLSRLEQLGEENQRLLKQTEMLTQQRDTAIQLQHQCALSLRRFEAIHHELLQSELTELEYHAVKT

SEQ ID NO: 839868 - protein, 90 aa, Homo sapiens
GLTAACTGCFSTLHSRLLSDQTRLKDDVDMLRRENGQLLRERNLLQQSWEDMKRLHEEDQKEIGDLRAQQQQVGPAPGDWPFLPSSPHSF

SEQ ID NO: 839869 - protein, 261 aa, Homo sapiens
TTGKAPSPPPLLTDRQVNEKVENLSIQLRLMTRERNELRKRLAFATHGTAFDKRPYHRLNPDYERLKIQCVRAMSDLQSLQNQHTNALKSTLHSRLLSDQTRLKDDVDMLRRENGQLLRERNLLQQSWEDMKRLHEEDQKEIGDLRAQQQQVLKHNGSSEILNKLYDTAMDKLEVVKKDYDALRKRYSEKVAIHNADLSRLEQLGEENQRLLKQTEMLTQQRDTAIQLQHQCALSLRRFEAIHHELLQSELTELEYHAVKT

SEQ ID NO: 839870 - protein, 86 aa, Homo sapiens
ACTGCFSTLHSRLLSDQTRLKDDVDMLRRENGQLLRERNLLQQSWEDMKRLHEEDQKEIGDLRAQQQQVGPAPGDWPFLPSSPHSF

SEQ ID NO: 839871 - protein, 1621 aa, Homo sapiens
MEWVLAEALLSQSRDPRALLGALCQGEASAERVETLRFLLQRLEDEEARGSGGAGALPEAAREVAAGYLVPLLRSLRGRPAGGPDPSLQPRHRRRVLRAAGAALRSCVRLAGRPQLAAALAEEALRDLLAGWRAPGAEAAVEVLAAVGPCLRPREDGPLLERVAGTAVALALGGGGDGDEAGPAEDAAALVAGRLLPVLVQCGGAALRAVWGGLAAPGASLGSGRVEEKLLVLSALAEKLLPEPGGDRARGAREAGPDARRCWRFWRTVQAGLGQADALTRKRARYLLQRAVEVSAELGADCTCGPQEGNGPSLFWWSERKKDELLKFWENYILIMETLEGNQIHVIKPVLPKLNNLFEYAVSEENGCWLFHPSWHMCIYKRMFESENKILSKEGVIHFLELYETKILPFSPEFSEFIIGPLMDALSESSLYSRSPGQPIGSCSPLGLKLQKFLVTYISLLPEEIKSSFLLKFIRKMTSRHWCAVPILFLSKALANVPRHKALGIDGLLALRDVIHCTMITHQILLRGAAQCYLLQTAMNLLDVEKVSLSDVSTFLMSLRQEESLGRGTSLWTELCDWLRVNESYFKPSPTCSSIGLHKTSLNAYVKSIVQEYVKSSAWETGENCFMPDWFEAKLVSLMVLLAVDVEGMKTQYSGKQRTENVLRIFLDPLLDVLMKFSTNAYMPLLKTDRCLQLLLKLLNTCRLKGSSAQDDEVSTVLQNFFMSTTESISEFILRRLTMNELNSVSDLDRCHLYLMVLTELINLHLKVGWKRGNPIWRVISLLKNASIQHLQEMDSGQEPTVGSQIQRVVSMAALAMVCEAIDQKPELQLDSLHAGPLESFLSSLQLNQTLQKPHAEEQSSYAHPLECSSVLEESSSSQGWGKIVAQYIHDQWVCLSFLLKKYHTLIPTTGSEILEPFLPAVQMPIRTLQSALEALTVLSSDQVLPVFHCLKVLVPKLLTSSESLCIESFDMAWKIISSLSNTQLIFWANLKAFVQFVFDNKVLTIAAKIKGQAYFKIKEIMYKIIEMSAIKTGVFNTLISYCCQSWIVSASNVSQGSLSSAKNYSELILEACIFGTVFRRDQRLVQDVQTFIENLGHDCAANIVMENTKREDHYVRICAVKFLCLLDGSNMSHKLFIEDLAIKLLDKDELVSKSKKRYYVNSLQHRVKNRVWQTLLVLFPRLDQNFLNGIIDRIFQAGFTNNQASIKYFIEWIIILILHKFPQFLPKFWDCFSYGEENLKTSICTFLAVLSHLDIITQNIPEKKLILKQALIVVLQWCFNHNFSVRLYALVALKKLWTVCKVLSVEEFDALTPVIESSLHQVESMHGAGNAKKNWQRIQEHFFFATFHPLKDYCLETIFYILPRLSGLIEDEWITIDKFTRFTDVPLAAGFQWYLSQTQLSKLKPGDWSQQDIGTNLVEADNQAEWTDVQKKIIPWNSRVSDLDLELLFQDRAARLGKSISRLIVVASLIDKPTNLGGLCRTCEVFGASVLVVGSLQCISDKQFQHLSVSAEQWLPLVEVKPPQLIDYLQQKKTEGYTIIGVEQTAKSLDLTQYCFPEKSLLLLGNEREGIPANLIQQLDVCVEIPQQGIIRSLNVHVSGALLIWEYTRQQLLSHGDTKP

SEQ ID NO: 839872 - protein, 1386 aa, Homo sapiens
MEWVLAEALLSQSRDPRALLGALCQGEASAERVETLRFLLQRLEDEEARGSGGAGALPEAAREVAAGYLVPLLRSLRGRPAGGPDPSLQPRHRRRVLRAAGAALRSCVRLAGRPQLAAALAEEALRDLLAGWRAPGAEAAVEVLAAVGPCLRPREDGPLLERVAGTAVALALGGGGDGDEAGPAEDAAALVAGRLLPVLVQCGGAALRAVWGGLAAPGASLGSGRVEEKLLVLSALAEKLLPEPGGDRARGAREAGPDARRCWRFWRTVQAGLGQADALTRKRARYLLQRAVEVSAELGADCTCGPQEGNGPSLFWWSERKKDELLKFWENYILIMETLEGNQIHVIKPVLPKLNNLFEYAVSEENGCWLFHPSWHMCIYKRMFESENKILSKEGVIHFLELYETKILPFSPEFSEFIIGPLMDALSESSLYSRSPGQPIGSCSPLGLKLQKFLVTYISLLPEEIKSSFLLKFIRKMTSRHWCAVPILFLSKALANVPRHKALGIDGLLALRDVIHCTMITHQILLRGAAQCYLLQTAMNLLDVEKVSLSDVSTFLMSLRQEESLGRGTSLWTELCDWLRVNESYFKPSPTCSSIGLHKTSLNAYVKSIVQEYVKSSAWETGENCFMPDWFEAKLVSLMVLLAVDVEGMKTQYSGKQRTENVLRIFLDPLLDVLMKFSTNAYMPLLKTDRCLQLLLKLLNTCRLKGSSAQDDEVSTVLQNFFMSTTESISEFILRRLTMNELNSVSDLDRCHLYLMVLTELINLHLKVGWKRGNPIWRVISLLKNASIQHLQEMDSGQEPTVGSQIQRVVSMAALAMVCEAIDQKPELQLDSLHAGPLESFLSSLQLNQTLQKPHAEEQSSYAHPLECSSVLEESSSSQGWGKIVAQYIHDQWVCLSFLLKKYHTLIPTTGSEILEPFLPAVQMPIRTLQSALEALTVLSSDQVLPVFHCLKVLVPKLLTSSESLCIESFDMAWKIISSLSNTQLIFWANLKAFVQFVFDNKVLTIAAKIKGQAYFKIKEIMYKIIEMSAIKTGVFNTLISYCCQSWIVSASNVSQGSLSSAKNYSELILEACIFGTVFRRDQRLVQDVQTFIENLGHDCAANIVMENTKREDHYVRICAVKFLCLLDGSNMSHKLFIEDLAIKLLDKDELVSKSKKRYYVNSLQHRVKNRVWQTLLVLFPRLDQNFLNGIIDRIFQAGFTNNQASIKYFIEWIIILILHKFPQFLPKFWDCFSYGEENLKTSICTFLAVLSHLDIITQNIPEKKLILKQALIVVLQWCFNHNFSVRLYALVALKKLWTVCKVLSVEEFDALTPVIESSLHQVESMHGAGNAKKNWQRIQEHFFFATFHPLKDYCLEVLIWLKQITKQSGPTFRRRLSRGTVVFPT

SEQ ID NO: 839873 - protein, 1677 aa, Homo sapiens
MEWVLAEALLSQSRDPRALLGALCQGEASAERVETLRFLLQRLEDEEARGSGGAGALPEAAREVAAGYLVPLLRSLRGRPAGGPDPSLQPRHRRRVLRAAGAALRSCVRLAGRPQLAAALAEEALRDLLAGWRAPGAEAAVEVLAAVGPCLRPREDGPLLERVAGTAVALALGGGGDGDEAGPAEDAAALVAGRLLPVLVQCGGAALRAVWGGLAAPGASLGSGRVEEKLLVLSALAEKLLPEPGGDRARGAREAGPDARRCWRFWRTVQAGLGQADALTRKRARYLLQRAVEVSAELGADCTCGPQEGNGPSLFWWSERKKDELLKFWENYILIMETLEGNQIHVIKPVLPKLNNLFEYAVSEENGCWLFHPSWHMCIYKRMFESENKILSKEGVIHFLELYETKILPFSPEFSEFIIGPLMDALSESSLYSRSPGQPIGSCSPLGLKLQKFLVTYISLLPEEIKSSFLLKFIRKMTSRHWCAVPILFLSKALANVPRHKALGIDGLLALRDVIHCTMITHQILLRGAAQCYLLQTAMNLLDVEKVSLSDVSTFLMSLRQEESLGRGTSLWTELCDWLRVNESYFKPSPTCSSIGLHKTSLNAYVKSIVQEYVKSSAWETGENCFMPDWFEAKLVSLMVLLAVDVEGMKTQYSGKQRTENVLRIFLDPLLDVLMKFSTNAYMPLLKTDRCLQLLLKLLNTCRLKGSSAQDDEVSTVLQNFFMSTTESISEFILRRLTMNELNSVSDLDRCHLYLMVLTELINLHLKVGWKRGNPIWRVISLLKNASIQHLQEMDSGQEPTVGSQIQRVVSMAALAMVCEAIDQKPELQLDSLHAGPLESFLSSLQLNQTLQKPHAEEQSSYAHPLECSSVLEESSSSQGWGKIVAQYIHDQWVCLSFLLKKYHTLIPTTGSEILEPFLPAVQMPIRTLQSALEALTVLSSDQVLPVFHCLKVLVPKLLTSSESLCIESFDMAWKIISSLSNTQLIFWANLKAFVQFVFDNKVLTIAAKIKGQAYFKIKEIMYKIIEMSAIKTGVFNTLISYCCQSWIVSASNVSQGSLSSAKNYSELILEACIFGTVFRRDQRLVQDVQTFIENLGHDCAANIVMENTKREDHYVRICAVKFLCLLDGSNMSHKLFIEDLAIKLLDKDELVSKSKKRYYVNSLQHRVKNRVWQTLLVLFPRLDQNFLNGIIDRIFQAGFTNNQASIKYFIEWIIILILHKFPQFLPKFWDCFSYGEENLKTSICTFLAVLSHLDIITQNIPEKKLILKQALIVVLQWCFNHNFSVRLYALVALKKLWTVCKVLSVEEFDALTPVIESSLHQVESMHGAGQNHTWKLSIKQVTWMGWGAVQDPVSVKPPRWFPCLPLFPRTCHGAEAGCSVISISRNAKKNWQRIQEHFFFATFHPLKDYCLETIFYILPRLSGLIEDEWITIDKFTRFTDVPLAAGFQWYLSQTQLSKLKPGDWSQQDIGTNLVEADNQAEWTDVQKKIIPWNSRVSDLDLELLFQDRAARLGKSISRLIVVASLIDKPTNLGGLCRTCEVFGASVLVVGSLQCISDKQFQHLSVSAEQWLPLVEVKPPQLIDYLQQKKTEGYTIIGVEQTAKSLDLTQYCFPEKSLLLLGNEREGIPANLIQQLDVCVEIPQQGIIRSLNVHVSGALLIWEYTRQQLLSHGDTKP

SEQ ID NO: 839874 - protein, 296 aa, Homo sapiens
MHGAGNAKKNWQRIQEHFFFATFHPLKDYCLETIFYILPRLSGLIEDEWITIDKFTRFTDVPLAAGFQWYLSQTQLSKLKPGDWSQQDIGTNLVEADNQAEWTDVQKKIIPWNSRVSDLDLELLFQDRAARLGKSISRLIVVASLIDKPTNLGGLCRTCEVFGASVLVVGSLQCISDKQFQHLSVSAEQWLPLVEVKPPQLIDYLQQKKTEGYTIIGVEQTAKSLDLTQYCFPEKSLLLLGNEREGIPANLIQQLDVCVEIPQQGIIRSLNVHVSGALLIWEYTRQQLLSHGDTKP

SEQ ID NO: 839875 - protein, 1621 aa, Homo sapiens; identical to SEQ ID NO: 839871

SEQ ID NO: 839876 - protein, 1621 aa, Homo sapiens; identical to SEQ ID NO: 839871

SEQ ID NO: 839877 - protein, 1362 aa, Homo sapiens
MEWVLAEALLSQSRDPRALLGALCQGEASAERVETLRFLLQRLEDEEARGSGGAGALPEAAREVAAGYLVPLLRSLRGRPAGGPDPSLQPRHRRRVLRAAGAALRSCVRLAGRPQLAAALAEEALRDLLAGWRAPGAEAAVEVLAAVGPCLRPREDGPLLERVAGTAVALALGGGGDGDEAGPAEDAAALVAGRLLPVLVQCGGAALRAVWGGLAAPGASLGSGRVEEKLLVLSALAEKLLPEPGGDRARGAREAGPDARRCWRFWRTVQAGLGQADALTRKRARYLLQRAVEVSAELGADCTCGPQEGNGPSLFWWSERKKDELLKFWENYILIMETLEGNQIHVIKPVLPKLNNLFEYAVSEENGCWLFHPSWHMCIYKRMFESENKILSKEGVIHFLELYETKILPFSPEFSEFIIGPLMDALSESSLYSRSPGQPIGSCSPLGLKLQKFLVTYISLLPEEIKSSFLLKFIRKMTSRHWCAVPILFLSKALANVPRHKALGIDGLLALRDVIHCTMITHQILLRGAAQCYLLQTAMNLLDVEKVSLSDVSTFLMSLRQEESLGRGTSLWTELCDWLRVNESYFKPSPTCSSIGLHKTSLNAYVKSIVQEYVKSSAWETGENCFMPDWFEAKLVSLMVLLAVDVEGMKTQYSGKQRTENVLRIFLDPLLDVLMKFSTNAYMPLLKTDRCLQLLLKLLNTCRLKGSSAQDDEVSTVLQNFFMSTTESISEFILRRLTMNELNSVSDLDRCHLYLMVLTELINLHLKVGWKRGNPIWRVISLLKNASIQHLQEMDSGQEPTVGSQIQRVVSMAALAMVCEAIDQKPELQLDSLHAGPLESFLSSLQLNQTLQKPHAEEQSSYAHPLECSSVLEESSSSQGWGKIVAQYIHDQWVCLSFLLKKYHTLIPTTGSEILEPFLPAVQMPIRTLQSALEALTVLSSDQVLPVFHCLKVLVPKLLTSSESLCIESFDMAWKIISSLSNTQLIFWANLKAFVQFVFDNKVLTIAAKIKGQAYFKIKEIMYKIIEMSAIKTGVFNTLISYCCQSWIVSASNVSQGSLSSAKNYSELILEACIFGTVFRRDQRLVQDVQTFIENLGHDCAANIVMENTKREDHYVRICAVKFLCLLDGSNMSHKLFIEDLAIKLLDKDELVSKSKKRYYVNSLQHRVKNRVWQTLLVLFPRLDQNFLNGIIDRIFQAGFTNNQASIKYFIEWIIILILHKFPQFLPKFWDCFSYGEENLKTSICTFLAVLSHLDIITQNIPEKKLILKQALIVVLQWCFNHNFSVRLYALVALKKLWTVCKVLSVEEFDALTPVIESSLHQVESMHGAGNAKKNWQRIQEHFFFATFHPLKDYCLEAVSGL

SEQ ID NO: 839878 - protein, 70 aa, Homo sapiens
VCYRKTNLSSIFFLRNEREGIPANLIQQLDVCVEIPQQGIIRSLNVHVSGALLIWEYTRQQLLSHGDTKP

SEQ ID NO: 839879 - protein, 1362 aa, Homo sapiens; identical to SEQ ID NO: 839877

SEQ ID NO: 839880 - protein, 542 aa, Homo sapiens
NWWANYINIIRRGKGNLVGNDSLNFPRYSTKREDHYVRICAVKFLCLLDGSNMSHKLFIEDLAIKLLDKDELVSKSKKRYYVNSLQHRVKNRVWQTLLVLFPRLDQNFLNGIIDRIFQAGFTNNQASIKYFIEWIIILILHKFPQFLPKFWDCFSYGEENLKTSICTFLAVLSHLDIITQNIPEKKLILKQALIVVLQWCFNHNFSVRLYALVALKKLWTVCKVLSVEEFDALTPVIESSLHQVESMHGAGNAKKNWQRIQEHFFFATFHPLKDYCLETIFYILPRLSGLIEDEWITIDKFTRFTDVPLAAGFQWYLSQTQLSKLKPGDWSQQDIGTNLVEADNQAEWTDVQKKIIPWNSRVSDLDLELLFQDRAARLGKSISRLIVVASLIDKPTNLGGLCRTCEVFGASVLVVGSLQCISDKQFQHLSVSAEQWLPLVEVKPPQLIDYLQQKKTEGYTIIGVEQTAKSLDLTQYCFPEKSLLLLGNEREGIPANLIQQLDVCVEIPQQGIIRSLNVHVSGALLIWEYTRQQLLSHGDTKP

SEQ ID NO: 839881 - protein, 296 aa, Homo sapiens; identical to SEQ ID NO: 839874

SEQ ID NO: 839882 - protein, 1271 aa, Homo sapiens
MEWVLAEALLSQSRDPRALLGALCQGEASAERVETLRFLLQRLEDEEARGSGGAGALPEAAREVAAGYLVPLLRSLRGRPAGGPDPSLQPRHRRRVLRAAGAALRSCVRLAGRPQLAAALAEEALRDLLAGWRAPGAEAAVEVLAAVGPCLRPREDGPLLERVAGTAVALALGGGGDGDEAGPAEDAAALVAGRLLPVLVQCGGAALRAVWGGLAAPGASLGSGRVEEKLLVLSALAEKLLPEPGGDRARGAREAGPDARRCWRFWRTVQAGLGQADALTRKRARYLLQRAVEVSAELGADCTCGPQEGNGPSLFWWSERKKDELLKFWENYILIMETLEGNQIHVIKPVLPKLNNLFEYAVSEENGCWLFHPSWHMCIYKRMFESENKILSKEGVIHFLELYETKILPFSPEFSEFIIGPLMDALSESSLYSRSPGQPIGSCSPLGLKLQKFLVTYISLLPEEIKSSFLLKFIRKMTSRHWCAVPILFLSKALANVPRHKALGIDGLLALRDVIHCTMITHQILLRGAAQCYLLQTAMNLLDVEKVSLSDVSTFLMSLRQEESLGRGTSLWTELCDWLRVNESYFKPSPTCSSIGLHKTSLNAYVKSIVQEYVKSSAWETGENCFMPDWFEAKLVSLMVLLAVDVEGMKTQYSGKQRTENVLRIFLDPLLDVLMKFSTNAYMPLLKTDRCLQLLLKLLNTCRLKGSSAQDDEVSTVLQNFFMSTTESISEFILRRLTMNELNSVSDLDRCHLYLMVLTELINLHLKVGWKRGNPIWRVISLLKNASIQHLQEMDSGQEPTVGSQIQRVVSMAALAMVCEAIDQKPELQLDSLHAGPLESFLSSLQLNQTLQKPHAEEQSSYAHPLECSSVLEESSSSQGWGKIVAQYIHDQWVCLSFLLKKYHTLIPTTGSEILEPFLPAVQMPIRTLQSALEALTVLSSDQVLPVFHCLKVLVPKLLTSSESLCIESFDMAWKIISSLSNTQLIFWANLKAFVQFVFDNKVLTIAAKIKGQAYFKIKEIMYKIIEMSAIKTGVFNTLISYCCQSWIVSASNVSQGSLSSAKNYSELILEACIFGTVFRRDQRLVQDVQTFIENLGHDCAANIVMENTKREDHYVRICAVKFLCLLDGSNMSHKLFIEDLAIKLLDKDELVSKSKKRYYVNSLQHRVKNRVWQTLLVLFPRLDQNFLNGIIDRIFQAGFTNNQASIKYFIEWIIILILHKFPQFLPKFWDCFSYGEENLKTSICTFLAVLSHLDIITQNIPEKVSLFVRI

SEQ ID NO: 839883 - protein, 42 aa, Homo sapiens
KNPVHESLSPAHTPGDGNWVPPPEGALEDLWTYTETSTAPLG

SEQ ID NO: 839884 - protein, 88 aa, Homo sapiens
MEQEMTRLHRRVSEVEAVLSQKEVELKASETQRSLLEQDLATYITECSSLKRSLEQARMEVSQEDDKALQLLHDIREQSRKLQEIKEQ

SEQ ID NO: 839885 - protein, 113 aa, Homo sapiens
PQNGGSTGSLHPESGKATGTQLYHVREATGATSSKATRVEFSKALGAHPLHQCALDMGHEVKGDYLGALRFNDCPAGFLTYMGHVDPFFLPTSPLWNGNVYAMSALSLYFGSQ

SEQ ID NO: 839886 - protein, 116 aa, Homo sapiens
MEGLRTYFLNAFDPGTDYLYLFPFSFTVTFQHCLTVRWAFESLQVPQNRPERWASHPLPTHVPAYLPDNQVRCLRVASFHILTSVWLTFGQRPPLGLAPPPSNADTVVRPQQYRRQ

SEQ ID NO: 839887 - protein, 242 aa, Homo sapiens
SPDFWDVMPNRHLSWHGGPSALPSSPQVMDSSMPLIGEHVEEDRQLMADLVVSKMSQLPMPGGTAPSPLRPWAPQIKSAKSPGQAQLGPQLGQPQPRPPPQGGPRQAQSPQPQRSGSPSQQRLSPQGQQPLSPQSGSPQQQRSPGSPQLSRASSGSSPNQASKPGATLASQPRPPVQGRSTSQQGEESKKPAPPHPHLNKSQSLTNSLSTSDTSQRGTPSEDEAKAETIRNLRKSFASLFSD

SEQ ID NO: 839888 - protein, 580 aa, Homo sapiens
MNFLRRRLSDSSFMANLPNGYMTDLQRPDSSTSSPASPAMERRHPQPLAASFSSPGSSLFSSLSSAMKQAPQATSGLMEPPGPSTPIVQRPRILLVIDDAHTDWSKYFHGKKVNGEIEIRVEQAEFSELNLAAYVTGGCMVDMQVVRNGTKVVSRSFKPDFILVRQHAYSMALGEDYRSLVIGLQYGGLPAVNSLYSVYNFCSKPWVFSQLIKIFHSLGPEKFPLVEQTFFPNHKPMVTAPHFPVVVKLGHAHAGMGKIKVENQLDFQDITSVVAMAKTYATTEAFIDSKYDIRIQKIGSNYKAYMRTSISGNWKANTGSAMLEQVAMTERYRLWVDSCSEMFGGLDICAVKAVHSKDGRDYIIEVMDSSMPLIGEHVEEDRQLMADLVVSKMSQLPMPGGTAPSPLRPWAPQIKSAKSPGQAQLGPQLGQPQPRPPPQGGPRQAQSPQPQRSGSPSQQRLSPQGQQPLSPQSGSPQQQRSPGSPQLSRASSGSSPNQASKPGATLASQPRPPVQGRSTSQQGEESKKPAPPHPHLNKSQSLTNSLSTSDTSQRGTPSEDEAKAETIRNLRKSFASLFSD

SEQ ID NO: 839889 - protein, 327 aa, Homo sapiens
MNFLRRRLSDSSFMANLPNGYMTDLQRPDSSTSSPASPAMERRHPQPLAASFSSPGSSLFSSLSSAMKQAPQATSGLMEPPGPSTPIVQRPRILLVIDDAHTDWSKYFHGKKVNGEIEIRVEQAEFSELNLAAYVTGGCMVDMQVVRNGTKVVSRSFKPDFILVRQHAYSMALGEDYRSLVIGLQYGGLPAVNSLYSVYNFCSKPWVFSQLIKIFHSLGPEKFPLVEQTFFPNHKPMVSPSFPSPGPDHPALFPSRVHALNHPTMWPLPVKGTIRIQRALKEVTYTGSWTRRKIAKRLPGDGSGKIQRKKFIKRLNKPVKDKKDSKR

SEQ ID NO: 839890 - protein, 194 aa, Homo sapiens
PGLLGCDAQPPSLLAWGSLSSPFLPTGNGQLNAADWRACGRGQTADGRPCCLQNEPAPDARRHSALPPQTLGGPRQAQSPQPQRSGSPSQQRLSPQGQQPLSPQSGSPQQQRSPGSPQLSRASSGSSPNQASKPGATLASQPRPPVQGRSTSQQGEESKKPAPPHPHLKSVASPPMTEPPEAGPESYSSYTPVP

SEQ ID NO: 839891 - protein, 210 aa, Homo sapiens
MPLIGEHVEEDRQLMADLVVSKMSQLPMPGGTAPSPLRPWAPQIKSAKSPGQAQLGPQLGQPQPRPPPQGGPRQAQSPQPQRSGSPSQQRLSPQGQQPLSPQSGSPQQQRSPGSPQLSRASSGSSPNQASKPGATLASQPRPPVQGRSTSQQGEESKKPAPPHPHLNKSQSLTNSLSTSDTSQRGTPSEDEAKAETIRNLRKSFASLFSD

SEQ ID NO: 839892 - protein, 251 aa, Homo sapiens
MNFLRRRLSDSSFMANLPNGYMTDLQRPDSSTSSPASPAMERRHPQPLAASFSSPGSSLFSSLSSAMKQAPQATSGLMEPPGPSTPIVQRPRILLVIDDAHTDWSKYFHGKKVNGEIEIRVEQAEFSELNLAAYVTGGCMVDMQVVRNGTKVVSRSFKPDFILVRQHAYSMALGEDYRSLVIGLQYGGLPAVNSLYSVYNFCSKPWVFSQLIKIFHSLGPEKFPLVEQTFFPNHKPMVSALFYSVSLHDAE

SEQ ID NO: 839893 - protein, 170 aa, Homo sapiens
MQNRTGLILCALALLMGFLMVCLGAFFISWGSIFDCQGSLIAAYLLLPLGFVILLSGIFWSNYRQVTESKGVLRHMLRQHLAHGALPVATVDRPDFYPPAYEESLEVEKQSCPAEREASGIPPPLYTETGLEFQDGNDSHPEAPPSYRESIAGLVVTAISEDAQRRGQEC

SEQ ID NO: 839894 - protein, 105 aa, Homo sapiens
MQNRTGLILCALALLMGFLMVCLGAFFISWGSIFDCQGSLIAAYLLLPLGFVILLSGIFWSNYRQVTESKGVLRHMLRQHLAHGALPVATVDSAALLKIMCKQLL

SEQ ID NO: 839895 - protein, 345 aa, Homo sapiens
MYKDCIESTGDYFLLCDAEGPWGIILESLAILGIVVTILLLLAFLFLMRKIQDCSQWNVLPTQLLFLLSVLGLFGLAFAFIIELNQQTAPVRYFLFGVLFALCFSCLLAHASNLVKLVRGCVSFSWTTILCIAIGCSLLQIIIATEYVTLIMTRGMMFVNMTPCQLNVDFVVLLVYVLFLMALTFFVSKATFCGPCENWKQHGRLIFITVLFSIIIWVVWISMLLRGNPQFQRQPQWDDPVVCIALVTNAWVFLLLYIVPELCILYRSCRQECPLQGNACPVTAYQHSFQVENQELSRARDSDGAEEDVALTSYGTPIQPQTVDPTQECFIPQAKLSPQQDAGGV

SEQ ID NO: 839896 - protein, 51 aa, Homo sapiens
MKPHIFMPAAKCLLCGAAVLHTAHTPPGTQCSPVSPHCMNGRSNDRRGLTV

SEQ ID NO: 839897 - protein, 232 aa, Homo sapiens
MQAEITFKKPMPTKVVFMSLCKSFWDCGLVALDDITIQLGSCSSSEKLPPPPGECTFEQDECTFTQEKRNRSSWHRRRGETPTSYTGPKGDHTTGVGYYMYIEASHMVYGQKARLLSRPLRGVSGKHCLTFFYHMYGGGTGLLSVYLKKEEDSEESLLWRRRGEQSISWLRALIEYSCERQHQIIFEAIRGVSIRSDIAIDDVKFQAGPCGEMEDTTQQSSGYSEDLNEIEY

SEQ ID NO: 839898 - protein, 215 aa, Homo sapiens [sequence omitted]

SEQ ID NO: 839899 - protein, 232 aa, Homo sapiens; identical to SEQ ID NO: 839897

SEQ ID NO: 839900 - protein, 306 aa, Homo sapiens
YYLLANTKFTSQPGYIGRLYGPSLPGNLQYCLRFHYAIYGFLKMSDTLAVYIFEENHVVQEKIWSVLESPRGVWMQAEITFKKPMPTKVVFMSLCKSFWDCGLVALDDITIQLGSCSSSEKLPPPPGECTFEQDECTFTQEKRNRSSWHRRRGETPTSYTGPKGDHTTGVGYYMYIEASHMVYGQKARLLSRPLRGVSGKHCLTFFYHMYGGGTGLLSVYLKKEEDSEESLLWRRRGEQSISWLRALIEYSCERQHQIIFEAIRGVSIRSDIAIDDVKFQAGPCGEMEDTTQQSSGYSEDLNEIEY

SEQ ID NO: 839901 - protein, 122 aa, Homo sapiens
MPLALSILTCPHLVLQEVFHRELRSNSMKTWGLRAAGWMAMFMGLNLMTRILYTLVDWFPVFRDLVNIGLKAFAFCVATSLTLLTVAAGWLFYRPLWALLIAGLALVPILVARTRVPAKKLE

SEQ ID NO: 839902 - protein, 182 aa, Homo sapiens
IRRGDFFYHSENPKYPEVGDLRVSFSYAGLSGDDPDLGPAHVVTVIARQRGDQLVPFSTKSGDTLLLLHHGDFSAEEVFHRELRSNSMKTWGLRAAGWMAMFMGLNLMTRILYTLVDWFPVFRDLVNIGLKAFAFCVATSLTLLTVAAGWLFYRPLWALLIAGLALVPILVARTRVPAKKLE

SEQ ID NO: 839903 - protein, 182 aa, Homo sapiens; identical to SEQ ID NO: 839902

SEQ ID NO: 839904 - protein, 65 aa, Homo sapiens
MVPAAVGRPAVVAGEAAGAAITVVGPLSPMSPRQATEPPPPLHDQAHKNPRVGQTGAEDGETKGD

SEQ ID NO: 839905 - protein, 288 aa, Homo sapiens
ACAEETPGLLTSGIRSFFPEQGPPRRKRMAAAALRRFWSRRRAEAGDAVVAKPGVWARLGSWARALLRDYAEACRDASAEARARPGRAAVYVGLLGGAAACFTLAPSEGAFEEALLEASGTLLLLAPATRNRESEAFVQRLLWLRGRGRLRYVNLGLCSLVYEAPFDAQASLYQARCRYLQPRWTDFPGRVLDVGFVGRWWVLGAWMRDCDINDDEFLHLPAHLRVVGPQQLHSETNERLFDEKYKPVVLTDDQVDQALWEEQVLQKEKKDRLALSQAHSLVQAEAPR

SEQ ID NO: 839906 - protein, 288 aa, Homo sapiens; identical to SEQ ID NO: 839905

SEQ ID NO: 839907 - protein, 284 aa, Homo sapiens
SEEQELEPWPSPKKARSGRWLRNGFKRKMEEPEEPADSGQSLVPVYIYSPEYVSMCDSLAKIPKRASMVHSLIEAYALHKQMRIVKPKVASMEEMATFHTDAYLQHLQKVSQEGDDDHPDSIEYGLGYDCPATEGIFDYAAAIGGATITAAQCLIDGMCKVAINWSGGWHHAKKDEASGFCYLNDAVLGILRLRRKFERILYVDLDLHHGDGVEDAFSFTSKVMTVSLHKFSPGFFPGTGDVSDVGLGKGRYYSVNVPIQDGIQDEKYYQICERYEPPAPNPGL

SEQ ID NO: 839908 - protein, 184 aa, Homo sapiens
SEEQELEPWPSPKKARSGRWLRNGFKRKMEEPEEPADSGQSLVPVYIYSPEYVSMCDSLAKIPKRASMVHSLIEAYALHKQMRIVKPKVASMEEMATFHTDAYLQHLQKVSQEGDDDHPDSIEYGLGYDCPATEGIFDYAAAIGGATITAAQCLIDGMCKVAINWSGGWHHAKKYEPPAPNPGL

SEQ ID NO: 839909 - protein, 92 aa, Homo sapiens
SEEQELEPWPSPKKARSGRWLRNGFKRKMEEPEEPADSGQSLVPVYIYSPEYVSMCDSLAKIPKRASMVHSLIEAYALHKQMRSWMRAVTSL

SEQ ID NO: 839910 - protein, 403 aa, Homo sapiens
MGFGGGGGGGGRKSVRKRRGHWAGGNLQKFRVAVSDTYSCIRRKCSHIVSESAACLFGTSNGQASMVHSLIEAYALHKQMRIVKPKVASMEEMATFHTDAYLQHLQKVSQEGDDDHPDSIEYGLGYDCPATEGIFDYAAAIGGATITAAQCLIDGMCKVAINWSGGWHHAKKDEASGFCYLNDAVLGILRLRRKFERILYVDLDLHHGDGVEDAFSFTSKVMTVSLHKFSPGFFPGTGDVSDVGLGKGRYYSVNVPIQDGIQDEKYYQICESVLKEVYQAFNPKAVVLQLGADTIAGDPMCSFNMTPVGIGKCLKYILQWQLATLILGGGGYNLANTARCWTYLTGVILGKTLSSEIPDHEFFTAYGPDYVLEITPSCRPDRNEPHRIQQILNYIKGNLKHVV

SEQ ID NO: 839911 - protein, 314 aa, Homo sapiens
SEEQELEPWPSPKKARSGRWLRNGFKRKMEEPEEPADSGQSLVPVYIYSPEYVSMCDSLAKIPKRASMVHSLIEAYALHKQMRDEASGFCYLNDAVLGILRLRRKFERILYVDLDLHHGDGVEDAFSFTSKVMTVSLHKFSPGFFPGTGDVSDVGLGKGRYYSVNVPIQDGIQDEKYYQICESVLKEVYQAFNPKAVVLQLGADTIAGDPMCSFNMTPVGIGKCLKYILQWQLATLILGGGGYNLANTARCWTYLTGVILGKTLSSEIPDHEFFTAYGPDYVLEITPSCRPDRNEPHRIQQILNYIKGNLKHVV

SEQ ID NO: 839912 - protein, 178 aa, Homo sapiens
SEEQELEPWPSPKKARSGRWLRNGFKRKMEEPEEPADSGQSLVPVYIYSPEYVSMCDSLAKIPKRASMVHSLIEAYALHKQMRIVKPKVASMEEMATFHTDAYLQHLQKVSQEGDDDHPDSIEYGLGYDCPATEGIFDYAAAIGGATITAAQCLIDGMCKVAINWSGGWHHAKNSSST

SEQ ID NO: 839913 - protein, 405 aa, Homo sapiens
SEEQELEPWPSPKKARSGRWLRNGFKRKMEEPEEPADSGQSLVPVYIYSPEYVSMCDSLAKIPKRASMVHSLIEAYALHKQMRIVKPKVASMEEMATFHTDAYLQHLQKVSQEGDDDHPDSIEYGLGYDCPATEGIFDYAAAIGGATITAAQCLIDGMCKVAINWSGGWHHAKKDEASGFCYLNDAVLGILRLRRKFERILYVDLDLHHGDGVEDAFSFTSKVMTVSLHKFSPGFFPGTGDVSDVGLGKGRYYSVNVPIQDGIQDEKYYQICESVLKEVYQAFNPKAVVLQLGADTIAGDPMCSFNMTPVGIGKCLKYILQWQLATLILGGGGYNLANTARCWTYLTGVILGKTLSSEIPDHEFFTAYGPDYVLEITPSCRPDRNEPHRIQQILNYIKGNLKHVV

SEQ ID NO: 839914 - protein, 193 aa, Homo sapiens
SEEQELEPWPSPKKARSGRWLRNGFKRKMEEPEEPADSGQSLVPVYIYSPEYVSMCDSLAKIPKRASMVHSLIEAYALHKQMRIVKPKVASMEEMATFHTDAYLQHLQKVSQEGDDDHPDSIEYGLGYDCPATEGIFDYAAAIGGATITAAQCLIDGMCKVAINWSGGWHHAKKERRVCMWHFTRHSEEIQVK

SEQ ID NO: 839915 - protein, 379 aa, Homo sapiens
SEEQELEPWPSPKKARSGRWLRNGFKRKMEEPEEPADSGQSLVPVYIYSPEYVSMCDSLAKIPKRASMVHSLIEAYALHKQMRIVKPKVASMEEMATFHTDAYLQHLQKVSQEGDDDHPDSIEYGLGYDCPATEGIFDYAAAIGGATITAAQCLIDGMCKVAINWSGGWHHAKKDEASGFCYLNDAVLGILRLRRKFERILYVDLDLHHGDGTGDVSDVGLGKGRYYSVNVPIQDGIQDEKYYQICESVLKEVYQAFNPKAVVLQLGADTIAGDPMCSFNMTPVGIGKCLKYILQWQLATLILGGGGYNLANTARCWTYLTGVILGKTLSSEIPDHEFFTAYGPDYVLEITPSCRPDRNEPHRIQQILNYIKGNLKHVV

SEQ ID NO: 839916 - protein, 174 aa, Homo sapiens
SEEQELEPWPSPKKARSGRWLRNGFKRKMEEPEEPADSGQSLVPVYIYSPEYVSMCDSLAKIPKRASMVHSLIEAYALHKQMRIVKPKVASMEEMATFHTDAYLQHLQKVSQEGDDDHPDSIEYGLGYDCPATEGIFDYAAAIGGATITAAQCLIDGMCKVAINWSGGWHHAKK

SEQ ID NO: 839917 - protein, 123 aa, Homo sapiens
MSRLMVSIITSMGIRGVGVPCGKKWARAFLILERRPIITAPAHKGMAMARFIDSWVVGVNEQGRSPRRAILRLRGGVEWPQEHKCLRIHLLLKGAEAFSGTYADLAQHLSEKPREGLLKTIIL

SEQ ID NO: 839918 - protein, 35 aa, Homo sapiens
MESVPFTSPLSPPWLTSASTLQPAPMLPQMLQHNG

SEQ ID NO: 839919 - protein, 272 aa, Homo sapiens
MSDQQLDCALDLMRRLPPQQIEKNLSDLIDLVPSLCEDLLSSVDQPLKIARDKVVGKDYLLCDYNRDGDSYRSPWSNKYDPPLEDGAMPSARLRKLEVEANNAFDQYRDLYFEGGVSSVYLWDLDHGFAGVILIKKAGDGSKKIKGCWDSIHVVEVQEKSSGRTAHYKLTSTVMLWLQTNKSGSGTMNLGGSLTRQMEKDETVSDCSPHIANIGRLVEDMENKIRSTLNEIYFGKTKDIVNGLRSVQTFADKSKQEALKNDLVEALKRKQQC

SEQ ID NO: 839920 - protein, 336 aa, Homo sapiens
LAAWGAGPGRAGAGKEGGGGPARGEGGADPDVHSWAPGEVEAPGPAAGGRATDAGTGTAAAAATMSDQQLDCALDLMRRLPPQQIEKNLSDLIDLVPSLCEDLLSSVDQPLKIARDKVVGKDYLLCDYNRDGDSYRSPWSNKYDPPLEDGAMPSARLRKLEVEANNAFDQYRDLYFEGGVSSVYLWDLDHGFAGVILIKKAGDGSKKIKGCWDSIHVVEVQEKSSGRTAHYKLTSTVMLWLQTNKSGSGTMNLGGSLTRQMEKDETVSDCSPHIANIGRLVEDMENKIRSTLNEIYFGKTKDIVNGLRSVQTFADKSKQEALKNDLVEALKRKQQC

SEQ ID NO: 839921 - protein, 336 aa, Homo sapiens; identical to SEQ ID NO: 839920

SEQ ID NO: 839922 - protein, 260 aa, Homo sapiens
MRRLPPQQIEKNLSDLIDLVPSLCEDLLSSVDQPLKIARDKVVGKDYLLCDYNRDGDSYRSPWSNKYDPPLEDGAMPSARLRKLEVEANNAFDQYRDLYFEGGVSSVYLWDLDHGFAGVILIKKAGDGSKKIKGCWDSIHVVEVQEKSSGRTAHYKLTSTVMLWLQTNKSGSGTMNLGGSLTRQMEKDETVSDCSPHIANIGRLVEDMENKIRSTLNEIYFGKTKDIVNGLRSVQTFADKSKQEALKNDLVEALKRKQQC

SEQ ID NO: 839923 - protein, 292 aa, Homo sapiens
GWYWSRIGRIGTGTAAAAATMSDQQLDCALDLMRRLPPQQIEKNLSDLIDLVPSLCEDLLSSVDQPLKIARDKVVGKDYLLCDYNRDGDSYRSPWSNKYDPPLEDGAMPSARLRKLEVEANNAFDQYRDLYFEGGVSSVYLWDLDHGFAGVILIKKAGDGSKKIKGCWDSIHVVEVQEKSSGRTAHYKLTSTVMLWLQTNKSGSGTMNLGGSLTRQMEKDETVSDCSPHIANIGRLVEDMENKIRSTLNEIYFGKTKDIVNGLRSVQTFADKSKQEALKNDLVEALKRKQQC

SEQ ID NO: 839924 - protein, 260 aa, Homo sapiens; identical to SEQ ID NO: 839922

SEQ ID NO: 839925 - protein, 302 aa, Homo sapiens
MGLPQTGPDRRPSIAGWAFLPFPPQYIDATMSDQQLDCALDLMRRLPPQQIEKNLSDLIDLVPSLCEDLLSSVDQPLKIARDKVVGKDYLLCDYNRDGDSYRSPWSNKYDPPLEDGAMPSARLRKLEVEANNAFDQYRDLYFEGGVSSVYLWDLDHGFAGVILIKKAGDGSKKIKGCWDSIHVVEVQEKSSGRTAHYKLTSTVMLWLQTNKSGSGTMNLGGSLTRQMEKDETVSDCSPHIANIGRLVEDMENKIRSTLNEIYFGKTKDIVNGLRSVQTFADKSKQEALKNDLVEALKRKQQC

SEQ ID NO: 839926 - protein, 413 aa, Homo sapiens
ALHQGWGGPGAVPSQLPLLGRPPRSQRGKGGHRCAQKAARCSAGPSRGCRRGCCACEAFCRAGRGPRRPGLSGSRGARMGGPQDKDERTIALVRPWPWGATRPWIQQYGLDTMHPSRRSLPFPLNCQLARVGTADYGSPSDQSDQQLDCALDLMRRLPPQQIEKNLSDLIDLVPSLCEDLLSSVDQPLKIARDKVVGKDYLLCDYNRDGDSYRSPWSNKYDPPLEDGAMPSARLRKLEVEANNAFDQYRDLYFEGGVSSVYLWDLDHGFAGVILIKKAGDGSKKIKGCWDSIHVVEVQEKSSGRTAHYKLTSTVMLWLQTNKSGSGTMNLGGSLTRQMEKDETVSDCSPHIANIGRLVEDMENKIRSTLNEIYFGKTKDIVNGLRSVQTFADKSKQEALKNDLVEALKRKQQC

SEQ ID NO: 839927 - protein, 185 aa, Homo sapiens
MPSARLRKLEVEANNAFDQYRDLYFEGGVSSVYLWDLDHGFAGVILIKKAGDGSKKIKGCWDSIHVVEVQEKSSGRTAHYKLTSTVMLWLQTNKSGSGTMNLGGSLTRQMEKDETVSDCSPHIANIGRLVEDMENKIRSTLNEIYFGKTKDIVNGLRSVQTFADKSKQEALKNDLVEALKRKQQC

SEQ ID NO: 839928 - protein, 336 aa, Homo sapiens; identical to SEQ ID NO: 839920

SEQ ID NO: 839929 - protein, 336 aa, Homo sapiens; identical to SEQ ID NO: 839920

SEQ ID NO: 839930 - protein, 188 aa, Homo sapiens
CFFLCVKPGATRRSLTWKNLAEYRDLYFEGGVSSVYLWDLDHGFAGVILIKKAGDGSKKIKGCWDSIHVVEVQEKSSGRTAHYKLTSTVMLWLQTNKSGSGTMNLGGSLTRQMEKDETVSDCSPHIANIGRLVEDMENKIRSTLNEIYFGKTKDIVNGLRSVQTFADKSKQEALKNDLVEALKRKQQC

SEQ ID NO: 839931 - protein, 179 aa, Homo sapiens
VSVTSVVEQHALTVSRLYFEGGVSSVYLWDLDHGFAGVILIKKAGDGSKKIKGCWDSIHVVEVQEKSSGRTAHYKLTSTVMLWLQTNKSGSGTMNLGGSLTRQMEKDETVSDCSPHIANIGRLVEDMENKIRSTLNEIYFGKTKDIVNGLRSVQTFADKSKQEALKNDLVEALKRKQQC

SEQ ID NO: 839932 - protein, 167 aa, Homo sapiens
MSDQQLDCALDLMRRLPPQQIEKNLSDLIDLVPSLCEDLLSSVDQPLKIARDKVVGKDYLLCDYNRDGDSYRSPWSNKYDPPLEDGAMPSARLRKLWSDPHKEGWRWIKEDQRLLGFHPRGRSAGEIQRSHRPLQVDLHGDAVAADQQIWLWHHEPRRQPYQTDGEG

SEQ ID NO: 839933 - protein, 336 aa, Homo sapiens; identical to SEQ ID NO: 839920

SEQ ID NO: 839934 - protein, 336 aa, Homo sapiens; identical to SEQ ID NO: 839920

SEQ ID NO: 839935 - protein, 168 aa, Homo sapiens
MPSARLRKLEVEANNAFDQYRDLYFEGGVSSVYLWDLDHGFGCWDSIHVVEVQEKSSGRTAHYKLTSTVMLWLQTNKSGSGTMNLGGSLTRQMEKDETVSDCSPHIANIGRLVEDMENKIRSTLNEIYFGKTKDIVNGLRSVQTFADKSKQEALKNDLVEALKRKQQC

SEQ ID NO: 839936 - protein, 336 aa, Homo sapiens; identical to SEQ ID NO: 839920

SEQ ID NO: 839937 - protein, 336 aa, Homo sapiens; identical to SEQ ID NO: 839920

SEQ ID NO: 839938 - protein, 92 aa, Homo sapiens
DTVSLIAYEYTDQKIDMEKDETVSDCSPHIANIGRLVEDMENKIRSTLNEIYFGKTKDIVNGLRSVQTFADKSKQEALKNDLVEALKRKQQC

SEQ ID NO: 839939 - protein, 336 aa, Homo sapiens; identical to SEQ ID NO: 839920

SEQ ID NO: 839940 - protein, 317 aa, Homo sapiens
LAAWGAGPGRAGAGKEGGGGPARGEGGADPDVHSWAPGEVEAPGPAAGGRATDAGTGTAAAAATMSDQQLDCALDLMRRLPPQQIEKNLSDLIDLVPSLCEDLLSSVDQPLKIARDKVVGKDYLLCDYNRDGDSYRSPWSNKYDPPLEDGAMPSARLRKLEVEANNAFDQYRDLYFEGGVSSVYLWDLDHGFAGVILIKKAGDGSKKIKGCWDSIHVVEVQEKSSGRTAHYKLTSTVMLWLQTNKSGSGTMNLGGSLTRQMEKDETVSDCSPHIANIGRLVEDMENKIRSTLNEIYFGKTKDIVNGLSCLRWDPLDD

SEQ ID NO: 839941 - protein, 158 aa, Homo sapiens
MSDQQLDCALDLMRRLPPQQIEKNLSDLIDLVPSLCEDLLSSVDQPLKIARDKVVGKDYLLCDYNRDGDSYRSPWSNKYDPPLEDGAMPSARLRKLHPPPAPSLLLPHLALSSLHISIETVWFLFTRAPRLPPCPPIYRHKIHCLPASLPSHLFGTLV

SEQ ID NO: 839942 - protein, 112 aa, Homo sapiens
MSDQQLDCALDLMRRLPPQQIEKNLSDLIDLVPSLCEDLLSSVDQPLKIARDKVVGKDYLLCDYNRDGDSYRSPWSNKYDPPLEDGAMPSARLRKLEVEANNAFDQYRDLCF

SEQ ID NO: 839943 - protein, 112 aa, Homo sapiens; identical to SEQ ID NO: 839942

SEQ ID NO: 839944 - protein, 336 aa, Homo sapiens; identical to SEQ ID NO: 839920

SEQ ID NO: 839945 - protein, 336 aa, Homo sapiens; identical to SEQ ID NO: 839920

SEQ ID NO: 839946 - protein, 336 aa, Homo sapiens; identical to SEQ ID NO: 839920

SEQ ID NO: 839947 - protein, 336 aa, Homo sapiens; identical to SEQ ID NO: 839920

SEQ ID NO: 839948 - protein, 298 aa, Homo sapiens
AAAPGEPGGRRRAPPTPTPRLAAAATMSDQQLDCALDLMRRLPPQQIEKNLSDLIDLVPSLCEDLLSSVDQPLKIARDKVVGKDYLLCDYNRDGDSYRSPWSNKYDPPLEDGAMPSARLRKLEVEANNAFDQYRDLYFEGGVSSVYLWDLDHGFAGVILIKKAGDGSKKIKGCWDSIHVVEVQEKSSGRTAHYKLTSTVMLWLQTNKSGSGTMNLGGSLTRQMEKDETVSDCSPHIANIGRLVEDMENKIRSTLNEIYFGKTKDIVNGLRSVQTFADKSKQEALKNDLVEALKRKQQC

SEQ ID NO: 839949 - protein, 272 aa, Homo sapiens; identical to SEQ ID NO: 839919

SEQ ID NO: 839950 - protein, 185 aa, Homo sapiens; identical to SEQ ID NO: 839927

SEQ ID NO: 839951 - protein, 336 aa, Homo sapiens; identical to SEQ ID NO: 839920

SEQ ID NO: 839952 - protein, 123 aa, Homo sapiens
ALHQGWGGPGAVPSQLPLLGRPPRSQRGKGGHRCAQKAARCSAGPSRGCRRGCCACEAFCRAGRGPRRPGLSGSRGARMGGPQDKDERTIALVRPWPWGATRPWIQHMAWTRCTQAGAASPSL

SEQ ID NO: 839953 - protein, 184 aa, Homo sapiens
PRGSRIEISTVEATMPLTSIEMYFEGGVSSVYLWDLDHGFAGVILIKKAGDGSKKIKGCWDSIHVVEVQEKSSGRTAHYKLTSTVMLWLQTNKSGSGTMNLGGSLTRQMEKDETVSDCSPHIANIGRLVEDMENKIRSTLNEIYFGKTKDIVNGLRSVQTFADKSKQEALKNDLVEALKRKQQC

SEQ ID NO: 839954 - protein, 179 aa, Homo sapiens
VHKIFLFYIFYTNVPKRYFEGGVSSVYLWDLDHGFAGVILIKKAGDGSKKIKGCWDSIHVVEVQEKSSGRTAHYKLTSTVMLWLQTNKSGSGTMNLGGSLTRQMEKDETVSDCSPHIANIGRLVEDMENKIRSTLNEIYFGKTKDIVNGLRSVQTFADKSKQEALKNDLVEALKRKQQC

SEQ ID NO: 839955 - protein, 255 aa, Homo sapiens
MSDQQLDCALDLMRRLPPQQIEKNLSDLIDLVPSLCEDLLSSVDQPLKIARDKVVGKDYLLCDYNRDGDSYRSPWSNKYDPPLEDGAMPSARLRKLEVEANNAFDQYRDLYFEGGVSSVYLWDLDHGFGCWDSIHVVEVQEKSSGRTAHYKLTSTVMLWLQTNKSGSGTMNLGGSLTRQMEKDETVSDCSPHIANIGRLVEDMENKIRSTLNEIYFGKTKDIVNGLRSVQTFADKSKQEALKNDLVEALKRKQQC

SEQ ID NO: 839956 - protein, 341 aa, Homo sapiens
LAAWGAGPGRAGAGKEGGGGPARGEGGADPDVHSWAPGEVEAPGPAAGGRATDAGTGTAAAAATMSDQQLDCALDLMRRLPPQQIEKNLSDLIDLVPSLCEDLLSSVDQPLKIARDKVVGKDYLLCDYNRDGDSYRSPWSNKYDPPLEDGAMPSARLRKLEVEANNAFDQYRDLYFEGGVSSVYLWDLDHGFAGVILIKKAGDGSKKIKGCWDSIHVVEVQEKSSGRTAHYKLTSTVMLWLQTNKSGSGTMNLGGSLTRQMEKDETVSDCSPHIANIGRLVEDMENKIRSTLNEIYFGKTKDIVNGLRSIDAIPDNQKFKQLQRELSQVLTQRQIYIQPDN

SEQ ID NO: 839957 - protein, 95 aa, Homo sapiens
SVPGGYRGTMNLEAALTRQMEKDETVSDCSPHIANIGRLVEDMENKIRSTLNEIYFGKTKDIVNGLRSVQTFADKSKQEALKNDLVEALKRKQQC

SEQ ID NO: 839958 - protein, 336 aa, Homo sapiens; identical to SEQ ID NO: 839920

SEQ ID NO: 839959 - protein, 277 aa, Homo sapiens
MSDQQLDCALDLMRRLPPQQIEKNLSDLIDLVPSLCEDLLSSVDQPLKIARDKVVGKDYLLCDYNRDGDSYRSPWSNKYDPPLEDGAMPSARLRKLEVEANNAFDQYRDLYFEGGVSSVYLWDLDHGFAGVILIKKAGDGSKKIKGCWDSIHVVEVQEKSSGRTAHYKLTSTVMLWLQTNKSGSGTMNLGGSLTRQMEKDETVSDCSPHIANIGRLVEDMENKIRSTLNEIYFGKTKDIVNGLRSIDAIPDNQKFKQLQRELSQVLTQRQIYIQPDN

SEQ ID NO: 839960 - protein, 334 aa, Homo sapiens
LAAWGAGPGRAGAGKEGGGGPARGEGGADPDVHSWAPGEVEAPGPAAGGRATDAGTGTAAAAATMSDQQLDCALDLMRRLPPQQIEKNLSDLIDLVPSLCEDLLSSVDQPLKIARDKVVGKDYLLCDYNRDGDSYRSPWSNKYDPPLEDGAMPSARLRKLEVEANNAFDQYRDLYFEGGVSSVYLWDLDHGFAGVILIKKAGDGSKKIKGCWDSIHVVEVQEKSSGRTAHYKLTSTVMLWLQTNKSGSGTMNLGGSLTRQMEKDETVSDCSPHIANIGRLVEDMENKIRISRPTEAAGWGLGGVPPTVPLFRPGAFLSISMECKRRFLFYFVFL

SEQ ID NO: 839961 - protein, 233 aa, Homo sapiens
MSDQQLDCALDLMRRLPPQQIEKNLSDLIDLVPSLCEDLLSSVDQPLKIARDKVVGKDYLLCDYNRDGDSYRSPWSNKYDPPLEDGAMPSARLRKLEVEANNAFDQYRDLYFEGGVSSVYLWDLDHGFAGVILIKKAGDGSKKIKGCWDSIHVVEVQMEKDETVSDCSPHIANIGRLVEDMENKIRSTLNEIYFGKTKDIVNGLRSVQTFADKSKQEALKNDLVEALKRKQQC

SEQ ID NO: 839962 - protein, 119 aa, Homo sapiens
FIKFFCFTFFTPMYQKGGREGRLADLTVVCEREKKNWKSYSVCVWELLGVGGRGDRGQLWEQRWPSVPSCADSPVPRRPRGGGWGGCRRPFRSSGQVLFCQFLWNAKGGFCFILFFCKA

SEQ ID NO: 839963 - protein, 106 aa, Homo sapiens
GGLHRCSCHFQTTHFKLELGLRPWWLGVGRADCVDRVFNSRFQVLLNCWILMNRNQDYVWLELQPHDHQPHRMTESCQAPATLELRILPWGHCAAASLQGAACFMA

SEQ ID NO: 839964 - protein, 32 aa, Homo sapiens
FGEFELQNAVFQSNFYTPDYFTSKMDIGYFLG

SEQ ID NO: 839965 - protein, 215 aa, Homo sapiens
RFSLFPHVQPIVFKEKLTMKTGLLMEEKLECSLWCCLSDPSIPGRCCVLERHIVPWMQQLHQQWKWLICGLCRLYNLPKHPNVEMPDQPLPMGQNGTTEEVTSKEEEEEEMDEDIEDLDHCEMKEEPTSEKKLEDEGTEKENWAILEKIRKTERQGHLNVLQCLGQCKLQIDLRKSSGTYTDHRVIRQVDPDSPLHSDLQILKEKEEIGDILLMF

SEQ ID NO: 839966 - protein, 210 aa, Homo sapiens
RFSLFPHVQPIVFKEKLTMKTGLLMEEKLECSLWCCLSDPSIPGRCCVLERHIVPWMQQLHQQWKWLICGLCRLYNLPKHPNVEMPDQPLPMGQNGTTEEVTSKEKKKEKEAEPEEQGEDSSRDPRLRRLQNRISEDVEERLPRHRKIGEPEVVGESDSKVEGDAWRMEREDSSEEEGEEIDDEEIERRRGMMRQRAQERKIEEMEVMEV

SEQ ID NO: 839967 - protein, 372 aa, Homo sapiens
MNGDEKAEPSPQSWSSLWKHDKDMEEDRASSSSGTIVQEAYGKISTSDNSMAQILTPDSLNTEQGPECSLRPNQTEEGTTPPIEADTLDSSDAQGGLEPRVEKTRPEPTEVLHACKTQVAELELWLQQANVAVEPETLNADMQQVLEQQLVGCQAMLTEIEHKVAFLLETCKDQGLGDNGATQHEAEALSLKLKTVKCNLEKVQMMLQEKHSEDQHPTILKKSSEPEHQEALQPVNLSELESIVTERPQFSRQKDFQQQQVLELKPMEQKDFIKFIEFNAKKMWPQYCQHDNDTTQESSASNQASSPENDVPDSILSPQGQNGDKWQYLHHELSSKIKLPLPQLVEPQVSTNMGILPSVTIWMPPTLPQKKK

SEQ ID NO: 839968 - protein, 369 aa, Homo sapiens
MNGDEKAEPSPQSWSSLWKHDKDMEEDRASSSSGTIVQEAYGKISTSDNSMAQILTPDSLNTEQGPECSLRPNQTEEGTTPPIEADTLDSSDAQGGLEPRVEKTRPEPTEVLHACKTQVAELELWLQQANVAVEPETLNADMQQVLEQQLVGCQAMLTEIEHKVAFLLETCKDQGLGDNGATQHEAEALSLKLKTVKCNLEKVQMMLQEKHSEDQHPTILKKSSEPEHQEALQPVNLSELESIVTERPQFSRQKDFQQQQVLELKPMEQKDFIKFIEFNAKKMWPQYCQHDNDTTQESSASNQASSPENDVPDSILSPQGQNGDKWQYLHHELSSKIKLPLPQLVEPQVSLYLHGANSLFIFENPTSIH

SEQ ID NO: 839969 - protein, 322 aa, Homo sapiens
MAQILTPDSLNTEQGPECSLRPNQTEEGTTPPIEADTLDSSDAQGGLEPRVEKTRPEPTEVLHACKTQVAELELWLQQANVAVEPETLNADMQQVLEQQLVGCQAMLTEIEHKVAFLLETCKDQGLGDNGATQHEAEALSLKLKTVKCNLEKVQMMLQEKHSEDQHPTILKKSSEPEHQEALQPVNLSELESIVTERPQFSRQKDFQQQQVLELKPMEQKDFIKFIEFNAKKMWPQYCQHDNDTTQESSASNQASSPENDVPDSILSPQGQNGDKWQYLHHELSSKIKLPLPQLVEPQVSTNMGILPSVTIWMPPTLPQKKK

SEQ ID NO: 839970 - protein, 779 aa, Homo sapiens
MDCAPKALLARALYDNCPDCSDELAFSRGDILTILEQHVPESEGWWKCLLHGRQGLAPANRLQILTEVAADRPCPPFLRGLEEAPASSEETYQVPTLPRPPTPGPVYEQMRSWAEGPQPPTAQVYEFPDPPTSARIICEKTLSFPKQAILTLPRPVRASLPTLPSQVYDVPTQHRGPVVLKEPEKQQLYDIPASPKKAGLHPPDSQASGQGVPLISVTTLRRGGYSTLPNPQKSEWIYDTPVSPGKASVRNTPLTSFAEESRPHALPSSSSTFYNPPSGRSRSLTPQLNNNVPMQKKLSLPEIPSYGFLVPRGTFPLDEDVSNKVPSSFSDSPSGQQNTKPNIDIPKATSSVSQAGKELEKAKEVSENSAGHNSSWFSRRTTSPSPEPDRLSGSSSDSRASIVSSCSTTSTDDSSSSSSEESAKELSLDLDVAKETVMALQHKVVSSVAGLMLFVSRKWRFRDYLEANIDAIHRSTDHIEESVREFLDFARGVHGTACNLTDSNLQNRIRDQMQTISNSYRILLETKESLDNRNWPLEVLVTDSVQNSPDDLERFVMVARMLPEDIKRFASIVIANGRLLFKRNCEKEETVQLTPNAEFKCEKYIQPPQRETESHQKSTPSTKQREDEHSSELLKKNRANICGQNPGPLIPQPSSQQTPERKPRLSEHCRLYFGALFKAISAFHGSLSSSQPAEIITQSKLVIMVGQKLVDTLCMETQERDVRNEILRGSSHLCSLLKDVALATKNAVLTYPSPAALGHLQAEAEKLEQHTRQFRGTLG

SEQ ID NO: 839971 - protein, 349 aa, Homo sapiens
MKGTGIMDCAPKALLARALYDNCPDCSDELAFSRGDILTILEQHVPESEGWWKCLLHGRQGLAPANRLQILTEVAADRPCPPFLRGLEEAPASSEETYQVPTLPRPPTPGPVYEQMRSWAEGPQPPTAQVYEFPDPPTSARIICEKTLSFPKQAILTLPRPVRASLPTLPSQVYDVPTQHRGPVVLKEPEKQQLYDIPASPKKAGLHPPDSQASNPGPLIPQPSSQQTPERKPRLSEHCRLYFGALFKAISAFHGSLSSSQPAEIITQSKLVIMVGQKLVDTLCMETQERDVRNEILRGSSHLCSLLKDVALATKNAVLTYPSPAALGHLQAEAEKLEQHTRQFRGTLG

SEQ ID NO: 839972 - protein, 252 aa, Homo sapiens
MSQAAKASASATVAVNPGPDTKGKGAPPAGTSPSPGTTLAPTTVPITSAKAAELPPGNYRLVVFELENFQGRRAEFSGECSNLADRGFDRVRSIIVSAGPWVAFEQSNFRGEMFILEKGEYPRWNTWSSSYRSDRLMSFRPIKMDAQEHKISLFEGANFKGNTIEIQGDDAPSLWVYGFSDRVGSVKVSSGTWVGYQYPGYRGYQYLLEPGDFRHWNEWGAFQPQMQSLRRLRDKQWHLEGSFPVLATEPPK

SEQ ID NO: 839973 - protein, 252 aa, Homo sapiens; identical to SEQ ID NO: 839972

SEQ ID NO: 839974 - protein, 252 aa, Homo sapiens; identical to SEQ ID NO: 839972

SEQ ID NO: 839975 - protein, 200 aa, Homo sapiens
MSQAAKASASATVAVNPGPDTKGKGAPPAGTSPSPGTTLAPTTVPITSAKAAELPPGNYRLVVFELENFQGRRAEFSGECSNLADRGFDRVRSIIVSAGPWVAFEQSNFRGEMFILEKGEYPRWNTWSSSYRSDRLMSFRPIKMDAQEHKISLFEGANFKGNTIEIQSPPSESTPHSATLPQPFFMFNYFPHFSQANKIP

SEQ ID NO: 839976 - protein, 120 aa, Homo sapiens
HAELTLLTTTLHDAQEHKISLFEGANFKGNTIEIQGDDAPSLWVYGFSDRVGSVKVSSGTWVGYQYPGYRGYQYLLEPGDFRHWNEWGAFQPQMQSLRRLRDKQWHLEGSFPVLATEPPK

SEQ ID NO: 839977 - protein, 156 aa, Homo sapiens
AAERQGIPEFLLGGRLLVVFELENFQGRRAEFSGECSNLADRGFDRVRSIIVSAGPWVAFEQSNFRGEMFILEKGEYPRWNTWSSSYRSDRLMSFRPIKMDAQEHKISLFEGANFKGNTIEIQSPPSESTPHSATLPQPFFMFNYFPHFSQANKIP

SEQ ID NO: 839978 - protein, 33 aa, Homo sapiens
TIETLYMAFKGKLDFLLAATLDFRLAGPRAQFI

SEQ ID NO: 839979 - protein, 113 aa, Homo sapiens
FRGYTCSYYLGILCEAEVWTSNVPVATTVNTVPSTQFFSPCPLPPALPPCFWSSQCLLFPSLCPCVPKTYLPLTSESMQYLVFLFCVSSVRIIASSYIHVTAKDLISFFLMAV

SEQ ID NO: 839980 - protein, 71 aa, Homo sapiens
MQEMSSVHWLPSFPPPSPPASLTYYVLLQRSVVCGGSKSPPLSSALIFHSHNACVIFSGSIQVVEDHSIMD

SEQ ID NO: 839981 - protein, 547 aa, Homo sapiens
GGLTTTVIGTRLGVDRPTLSWSAGPSLAAPAAMSSEMEPLLLAWSYFRRRKFQLCADLCTQMLEKSPYDQEPDPELPVHQAAWILKARALTEMVYIDEIDVDQEGIAEMMLDENAIAQVPRPGTSLKLPGTNQTGGPSQAVRPITQAGRPITGFLRPSTQSGRPGTMEQAIRTPRTAYTARPITSSSGRFVRLGTASMLTSPDGPFINLSRLNLTKYSQKPKLAKALFEYIFHHENDVKTALDLAALSTEHSQYKDWWWKVQIGKCYYRLGMYREAEKQFKSALKQQEMVDTFLYLAKVYVSLDQPVTALNLFKQGLDKFPGEVTLLCGIARIYEEMNNMSSAAEYYKEVLKQDNTHVEAIACIGSNHFYSDQPEIALRFYRRLLQMGIYNGQLFNNLGLCCFYAQQYDMTLTSFERALSLAENEEEAADVWYNLGHVAVGIGDTNLAHQCFRLALVNNNNHAEAYNNLAVLEMRKGHVEQARALLQTASSLAPHMYEPHFNFATISDKIGDLQRSYVAAQKSEAAFPDHVDTQHLIKQLRQHFAML

SEQ ID NO: 839982 - protein, 507 aa, Homo sapiens
GGLTTTVIGTRLGVDRPTLSWSAGPSLAAPAAMSSEMEPLLLAWSYFRRRKFQLCADLCTQMLEKSPYDQAAWILKARALTEMVYIDEIDVDQEGIAEMMLDENAIAQVPRPGTSLKLPGTNQTGGPSQAVRPITQAGRPITGFLRPSTQSGRPGTMEQAIRTPRTAYTARPITSSSGRFVRLGTALFEYIFHHENDVKTALDLAALSTEHSQYKDWWWKVQIGKCYYRLGMYREAEKQFKSALKQQEMVDTFLYLAKVYVSLDQPVTALNLFKQGLDKFPGEVTLLCGIARIYEEMNNMSSAAEYYKEVLKQDNTHVEAIACIGSNHFYSDQPEIALRFYRRLLQMGIYNGQLFNNLGLCCFYAQQYDMTLTSFERALSLAENEEEAADVWYNLGHVAVGIGDTNLAHQCFRLALVNNNNHAEAYNNLAVLEMRKGHVEQARALLQTASSLAPHMYEPHFNFATISDKIGDLQRSYVAAQKSEAAFPDHVDTQHLIKQLRQHFAML

SEQ ID NO: 839983 - protein, 519 aa, Homo sapiens
GGLTTTVIGTRLGVDRPTLSWSAGPSLAAPAAMSSEMEPLLLAWSYFRRRKFQLCADLCTQMLEKSPYDQAAWILKARALTEMVYIDEIDVDQEGIAEMMLDDNQTGGPSQAVRPITQAGRPITGFLRPSTQSGRPGTMEQAIRTPRTAYTARPITSSSGRFVRLGTASMLTSPDGPFINLSRLNLTKYSQKPKLAKALFEYIFHHENDVKTALDLAALSTEHSQYKDWWWKVQIGKCYYRLGMYREAEKQFKSALKQQEMVDTFLYLAKVYVSLDQPVTALNLFKQGLDKFPGEVTLLCGIARIYEEMNNMSSAAEYYKEVLKQDNTHVEAIACIGSNHFYSDQPEIALRFYRRLLQMGIYNGQLFNNLGLCCFYAQQYDMTLTSFERALSLAENEEEAADVWYNLGHVAVGIGDTNLAHQCFRLALVNNNNHAEAYNNLAVLEMRKGHVEQARALLQTASSLAPHMYEPHFNFATISDKIGDLQRSYVAAQKSEAAFPDHVDTQHLIKQLRQHFAML

SEQ ID NO: 839984 - protein, 350 aa, Homo sapiens [sequence omitted]

SEQ ID NO: 839985 - protein, 280 aa, Homo sapiens
GGLTTTVIGTRLGVDRPTLSWSAGPSLAAPAAMSSEMEPLLLAWSYFRRRKFQLCADLCTQMLEKSPYDQAAWILKARALTEMVYIDEIDVDQEGIAEMMLDENAIAQVPRPGTSLKLPGTNQTGGPSQAVRPITQAGRPITGFLRPSTQSGRPGTMEQAIRTPRTAYTARPITSSSGRFVRLGTASMLTSPDGPFINLSRLNLTKYSQKPKLAKALFEYIFHHENDVKTALDLAALSTEHSQYKDWWWKVQIGKCYYRLGMIGTKTRYSRERGRRTLAG

SEQ ID NO: 839986 - protein, 537 aa, Homo sapiens
GGLTTTVIGTRLGVDRPTLSWSAGPSLAAPAAMSSEMEPLLLAWSYFRRRKFQLCADLCTQMLEKSPYDQAAWILKARALTEMVYIDEIDVDQEGIAEMMLDENAIAQVPRPGTSLKLPGTNQTGGPSQAVRPITQAGRPITGFLRPSTQSGRPGTMEQAIRTPRTAYTARPITSSSGRFVRLGTASMLTSPDGPFINLSRLNLTKYSQKPKLAKALFEYIFHHENDVKTALDLAALSTEHSQYKDWWWKVQIGKCYYRLGMYREAEKQFKSALKQQEMVDTFLYLAKVYVSLDQPVTALNLFKQGLDKFPGEVTLLCGIARIYEEMNNMSSAAEYYKEVLKQDNTHVEAIACIGSNHFYSDQPEIALRFYRRLLQMGIYNGQLFNNLGLCCFYAQQYDMTLTSFERALSLAENEEEAADVWYNLGHVAVGIGDTNLAHQCFRLALVNNNNHAEAYNNLAVLEMRKGHVEQARALLQTASSLAPHMYEPHFNFATISDKIGDLQRSYVAAQKSEAAFPDHVDTQHLIKQLRQHFAML

SEQ ID NO: 839987 - protein, 509 aa, Homo sapiens
GGLTTTVIGTRLGVDRPTLSWSAGPSLAAPAAMSSEMEPLLLAWSYFRRRKFQLCADLCTQMLEKSPYDQAAWILKARALTEMVYIDEIDVDQEGIAEMMLDENAIAQVPRPGTSLKLPGTNQTGGPSQAVRPITQAGRPITGFLRPSTQSGRPGTMEQAIRTPRTAYTARPITSSSGRFVRLGTASMLTSPDGPFINLSRLNLTKYSQKPKLAKALFEYIFHHENDVKTALDLAALSTEHSQYKDWWWKVQIGKCYYRLGMYREAEKQFKSALKQQEMVDTFLYLAKVYVSLDQPVTALNLFKQGLDKFPGEVTLLCGIARIYEEMNNMSSAAEYYKEVLKQDNTHVEAIACIGSNHFYSDQPEIALRFYRRLLQMGIYNGQLFNNLGLCCFYAQQYDMTLTSFERALSLAENEEEAADVWYNLGHVAVGIGDTNLAHQCFRLALVNNNNHAEAYNNLAVLEMRKGHVEQIGDLQRSYVAAQKSEAAFPDHVDTQHLIKQLRQHFAML

SEQ ID NO: 839988 - protein, 171 aa, Homo sapiens
TRINYKKWLHQNKEHLEISHVLLCNVTQRVSFWFVVTDPSKNHTLPAVEVQSAIRMNKNRINNAFFLNDQTLEFLKIPSTLAPPMDPSVPIWIIIFGVIFCIIIVAIALLILSGIWQRRRKNKEPSEVDDAEDKCENMITIENGIPSDPLDMKGGHINDAFMTEDERLTPL

SEQ ID NO: 839989 - protein, 170 aa, Homo sapiens
MVAFSMRKVPNREATEISHVLLCNVTQRVSFWFVVTDPSKNHTLPAVEVQSAIRMNKNRINNAFFLNDQTLEFLKIPSTLAPPMDPSVPIWIIIFGVIFCIIIVAIALLILSGIWQRRRKNKEPSEVDDAEDKCENMITIENGIPSDPLDMKGGHINDAFMTEDERLTPL

SEQ ID NO: 839990 - protein, 204 aa, Homo sapiens
MLWLLFFLVTAIHAELCQPGAENAFKVRLSIRTALGDKAYAWDTNEEYLFKAMVAFSMRKVPNREATEISHVLLCNVTQRVSFWFVVTDPSKNHTLPAVEVQSAIRMNKNRINNAFFLNDQTLEFLKIPSTLAPPMDPSVPIWIIIFGVIFCIIIVAIALLILSGIWQRRRKNKEPSEVDDAEDKCENMITIAFMTEDERLTPL

SEQ ID NO: 839991 - protein, 222 aa, Homo sapiens
MLWLLFFLVTAIHAELCQPGAENAFKVRLSIRTALGDKAYAWDTNEEYLFKAMVAFSMRKVPNREATEISHVLLCNVTQRVSFWFVVTDPSKNHTLPAVEVQSAIRMNKNRINNAFFLNDQTLEFLKIPSTLAPPMDPSVPIWIIIFGVIFCIIIVAIALLILSGIWQRRRKNKEPSEVDDAEDKCENMITIENGIPSDPLDMKGGHINDAFMTEDERLTPL

SEQ ID NO: 839992 - protein, 170 aa, Homo sapiens
  misc_feature (13)..(13): Xaa can be any naturally occurring amino acid
REKQAGRHNTQQXKPLISHVLLCNVTQRVSFWFVVTDPSKNHTLPAVEVQSAIRMNKNRINNAFFLNDQTLEFLKIPSTLAPPMDPSVPIWIIIFGVIFCIIIVAIALLILSGIWQRRRKNKEPSEVDDAEDKCENMITIENGIPSDPLDMKGGHINDAFMTEDERLTPL

SEQ ID NO: 839993 - protein, 160 aa, Homo sapiens
MKRTLRISHVLLCNVTQRVSFWFVVTDPSKNHTLPAVEVQSAIRMNKNRINNAFFLNDQTLEFLKIPSTLAPPMDPSVPIWIIIFGVIFCIIIVAIALLILSGIWQRRRKNKEPSEVDDAEDKCENMITIENGIPSDPLDMKGGHINDAFMTEDERLTPL

SEQ ID NO: 839994 - protein, 176 aa, Homo sapiens
VWFLKSCSDSLLNAAITLHTSRISHVLLCNVTQRVSFWFVVTDPSKNHTLPAVEVQSAIRMNKNRINNAFFLNDQTLEFLKIPSTLAPPMDPSVPIWIIIFGVIFCIIIVAIALLILSGIWQRRRKNKEPSEVDDAEDKCENMITIENGIPSDPLDMKGGHINDAFMTEDERLTPL

SEQ ID NO: 839995 - protein, 848 aa, Homo sapiens
MWLRLGPPSLSLSPKPTVGRSLCLTLWFLSLALRASTQAPAPTVNTHFGKLRGARVPLPSEILGPVDQYLGVPYAAPPIGEKRFLPPEPPPSWSGIRNATHFPPVCPQNIHTAVPEVMLPVWFTANLDIVATYIQEPNEDCLYLNVYVPTEDVKRISKECARKPNKKICRKGGSGAKKQGEDLADNDGDEDEDIRDSGAKPVMVYIHGGSYMEGTGNMIDGSILASYGNVIVITLNYRVGVLGFLSTGDQAAKGNYGLLDQIQALRWVSENIAFFGGDPRRITVFGSGIGASCVSLLTLSHHSEGLFQRAIIQSGSALSSWAVNYQPVKYTSLLADKVGCNVLDTVDMVDCLRQKSAKELVEQDIQPARYHVAFGPVIDGDVIPDDPEILMEQGEFLNYDIMLGVNQGEGLKFVEGVVDPEDGVSGTDFDYSVSNFVDNLYGYPEGKDTLRETIKFMYTDWADRDNPETRRKTLVALFTDHQWVEPSVVTADLHARYGSPTYFYAFYHHCQSLMKPAWSDAAHGDEVPYVFGVPMVGPTDLFPCNFSKNDVMLSAVVMTYWTNFAKTGDPNKPVPQDTKFIHTKANRFEEVAWSKYNPRDQLYLHIGLKPRVRDHYRATKVAFWKHLVPHLYNLHDMFHYTSTTTKVPPPDTTHSSHITRRPNGKTWSTKRPAISPAYSNENAQGSWNGDQDAGPLLVENPRDYSTELSVTIAVGASLLFLNVLAFAALYYRKDKRRQEPLRQPSPQRGAGAPELGAAPEEELAALQLGPTHHECEAGPPHDTLRLTALPDYTLTLRRSPDDIPLMTPNTITMIPNSLVGLQTLHPYNTFAAGFNSTGLPHSHSTTRV

SEQ ID NO: 839996 - protein, 828 aa, Homo sapiens
MWLRLGPPSLSLSPKPTVGRSLCLTLWFLSLALRASTQAPAPTVNTHFGKLRGARVPLPSEILGPVDQYLGVPYAAPPIGEKRFLPPEPPPSWSGIRNATHFPPVCPQNIHTAVPEVMLPVWFTANLDIVATYIQEPNEDCLYLNVYVPTEDGSGAKKQGEDLADNDGDEDEDIRDSGAKPVMVYIHGGSYMEGTGNMIDGSILASYGNVIVITLNYRVGVLGFLSTGDQAAKGNYGLLDQIQALRWVSENIAFFGGDPRRITVFGSGIGASCVSLLTLSHHSEGLFQRAIIQSGSALSSWAVNYQPVKYTSLLADKVGCNVLDTVDMVDCLRQKSAKELVEQDIQPARYHVAFGPVIDGDVIPDDPEILMEQGEFLNYDIMLGVNQGEGLKFVEGVVDPEDGVSGTDFDYSVSNFVDNLYGYPEGKDTLRETIKFMYTDWADRDNPETRRKTLVALFTDHQWVEPSVVTADLHARYGSPTYFYAFYHHCQSLMKPAWSDAAHGDEVPYVFGVPMVGPTDLFPCNFSKNDVMLSAVVMTYWTNFAKTGDPNKPVPQDTKFIHTKANRFEEVAWSKYNPRDQLYLHIGLKPRVRDHYRATKVAFWKHLVPHLYNLHDMFHYTSTTTKVPPPDTTHSSHITRRPNGKTWSTKRPAISPAYSNENAQGSWNGDQDAGPLLVENPRDYSTELSVTIAVGASLLFLNVLAFAALYYRKDKRRQEPLRQPSPQRGAGAPELGAAPEEELAALQLGPTHHECEAGPPHDTLRLTALPDYTLTLRRSPDDIPLMTPNTITMIPNSLVGLQTLHPYNTFAAGFNSTGLPHSHSTTRV

SEQ ID NO: 839997 - protein, 848 aa, Homo sapiens; identical to SEQ ID NO: 839995

SEQ ID NO: 839998 - protein, 808 aa, Homo sapiens
MWLRLGPPSLSLSPKPTVGRSLCLTLWFLSLALRASTQAPAPTVNTHFGKLRGARVPLPSEILGPVDQYLGVPYAAPPIGEKRFLPPEPPPSWSGIRNATHFPPVCPQNIHTAVPEVMLPVWFTANLDIVATYIQEPNEDCLYLNVYVPTEDDIRDSGAKPVMVYIHGGSYMEGTGNMIDGSILASYGNVIVITLNYRVGVLGFLSTGDQAAKGNYGLLDQIQALRWVSENIAFFGGDPRRITVFGSGIGASCVSLLTLSHHSEGLFQRAIIQSGSALSSWAVNYQPVKYTSLLADKVGCNVLDTVDMVDCLRQKSAKELVEQDIQPARYHVAFGPVIDGDVIPDDPEILMEQGEFLNYDIMLGVNQGEGLKFVEGVVDPEDGVSGTDFDYSVSNFVDNLYGYPEGKDTLRETIKFMYTDWADRDNPETRRKTLVALFTDHQWVEPSVVTADLHARYGSPTYFYAFYHHCQSLMKPAWSDAAHGDEVPYVFGVPMVGPTDLFPCNFSKNDVMLSAVVMTYWTNFAKTGDPNKPVPQDTKFIHTKANRFEEVAWSKYNPRDQLYLHIGLKPRVRDHYRATKVAFWKHLVPHLYNLHDMFHYTSTTTKVPPPDTTHSSHITRRPNGKTWSTKRPAISPAYSNENAQGSWNGDQDAGPLLVENPRDYSTELSVTIAVGASLLFLNVLAFAALYYRKDKRRQEPLRQPSPQRGAGAPELGAAPEEELAALQLGPTHHECEAGPPHDTLRLTALPDYTLTLRRSPDDIPLMTPNTITMIPNSLVGLQTLHPYNTFAAGFNSTGLPHSHSTTRV

SEQ ID NO: 839999 - protein, 161 aa, Homo sapiens
RFEKASVEYQEHLCAMIGVHCCISSFDKSVLTLANAGCNSASPKHCLNGESRKTVLSKPTDSSPEVINYLGNKACECYISIADWAAVQEWQNAIHDLKKSTSSTSFNLKADFNYIKSLSSFESGKFVKCTEQLELLPGENINLLAGGSKEKIDMKKLLRNM

SEQ ID NO: 840000 - protein, 161 aa, Homo sapiens; identical to SEQ ID NO: 839999

SEQ ID NO: 840001 - protein, 56 aa, Homo sapiens
ALISKKLNDYRKVSHSSGPKADSSPKGSRGLGGLKSEFLKQSAARGLRTQDLPAGS

SEQ ID NO: 840002 - protein, 101 aa, Homo sapiens
PGTQGERRGGGQGGQGQKVKTRRSLKNRALGSIKEPTTEAPREGANWETGRGSWERVESVLAAALMLREEGKEPGDKQSVGAVREKEASLSVSQVVVRWLM

SEQ ID NO: 840003 - protein, 79 aa, Homo sapiens
EESDFISRVLAFFAASDGIVNENLVERFSQEVQITEARCFYDFQIAMENTHSEMYSLLIDTYIKDAKEREFLFNTIETP

SEQ ID NO: 840004 - protein, 120 aa, Homo sapiens
INVKRSRSYLYPLGPGPIYSSQWDIAPYWLVIRVYTVPWKVVTPPYLVSSTLSWHLSYAFNSPFLLFVQASIFWVVQNVTGPVIPWSRAIVMPPSPCNERALGSDVMLRGNLCQWVKHSV

SEQ ID NO: 840005 - protein, 213 aa, Homo sapiens
MEKCSVGGLELTEQTPALLGNMAMATSLMDIGDSFGHPACPLVSRSRNSPVEDDDDDDDVVFIESIQPPSISAPAIADQRNFIFASSKNEKPQGNYSVIPPSSRDLASQKGNISETIVIDDEEDIETNGGAEKKSSCFIEWGLPGTKNKTNDLDFSTSSLSRSKVNAGMGNSGITTELTLKYIITNVTTLETGISSVNAGQDVNIIITYKTSL

SEQ ID NO: 840006 - protein, 646 aa, Homo sapiens
MATSLMDIGDSFGHPACPLVSRSRNSPVEDDDDDDDVVFIESIQPPSISAPAIADQRNFIFASSKNEKPQGNYSVIPPSSRDLASQKGNISETIVIDDEEDIETNGGAEKKSSCFIEWGLPGTKNKTNDLDFSTSSLSRSKTKTGVRPFNPGRMNVAGDLFQNGEFATHHSPDSWISQSASFPSNQKQPGVDSLSPVALLRKQNFQPTAQQQLTKPAKITCANCKKPLQKGQTAYQRKGSAHLFCSTTCLSSFSHKRTQNTRSIICKKDASTKKANVILPVESSKSFQEFYSTSCLSPCENNWNLKKGVFNKSRCTICSKLAEIRHEVSVNNVTHKLCSNHCFNKYRLANGLIMNCCEHCGEYMPSKSTGNNILVIGGQQKRFCCQSCINEYKQMMETKSKKLTASENRKRNAFREENEKQLYGSSNTLLKKIEGIPEKKEKTSQLQLSVECGTDTLLIQENVNLPPSSTSTIADTFQEQLEEKNFEDSIVPVVLSADPGTWPRILNIKQRDTLVENVPPQVRNFNFPKDNTGRKFSETYYTRILPNGEKTTRSWLLYSTSKDSVFCLYCKLFGEGKNQLKNENGCKDWQHLSHILSKHEESEMHINNSVKYSKLKSDLKKNKAIDAAERRLYENEKNDGVLLLYT

SEQ ID NO: 840007 - protein, 213 aa, Homo sapiens; identical to SEQ ID NO: 840005

SEQ ID NO: 840008 - protein, 232 aa, Homo sapiens
MATSLMDIGDSFGHPACPLVSRSRNSPVEDDDDDDDVVFIESIQPPSISAPAIADQRNFIFASSKNEKPQGNYSVIPPSSRDLASQKGNISETIVIDDEEDIETNGGAEKKSSCFIEWGLPGTKNKTNDLDFSTSSLSRSKILGSPSQLHFPVIRNSQGWILYHQWPYFVSRISSLQPNNNLLNQLKSLVQIAKSLYRRDRQLINEKDQLTSFALPPAFLPSLINVLKTHEA

SEQ ID NO: 840009 - protein, 252 aa, Homo sapiens [sequence omitted]

SEQ ID NO: 840010 - protein, 185 aa, Homo sapiens
MATSLMDIGDSFGHPACPLVSRSRNSPVEDDDDDDDVVFIESIQPPSISAPAIADQRNFIFASSKNEKPQGNYSVIPPSSRDLASQKGNISETIVIDDEEDIETNGGAEKKSSCFIEWGLPGTKNKTNDLDFSTSSLSRSKTKTGVRPFNPGRMNVAGDLFQNGEFATHHSPEMHLQRRLMSFFQ

SEQ ID NO: 840011 - protein, 359 aa, Homo sapiens
MATSLMDIGDSFGHPACPLVSRSRNSPVEDDDDDDDVVFIESIQPPSISAPAIADQRNFIFASSKNEKPQGNYSVIPPSSRDLASQKGNISETIVIDDEEDIETNGGAEKKSSCFIEWGLPGTKNKTNDLDFSTSSLSRSKTKTGVRPFNPGRMNVAGDLFQNGEFATHHSPDSWISQSASFPSNQKQPGVDSLSPVALLRKQNFQPTAQQQLTKPAKITCANCKKPLQKGQTAYQRKGSAHLFCSTTCLSSFSHKRTQNTRSIICKKDASTKKANVILPVESSKSFQEFYSTSCLSPCENNWNLKKGVFNKSRCTICSKLAEVWIFIPKLLFRLTVIILTFKCYYVLFHLHNARVLDV

SEQ ID NO: 840012 - protein, 646 aa, Homo sapiens; identical to SEQ ID NO: 840006

SEQ ID NO: 840013 - protein, 213 aa, Homo sapiens; identical to SEQ ID NO: 840005

SEQ ID NO: 840014 - protein, 115 aa, Homo sapiens
GHGSGFPRKRRPRGAGLSGRGGRGRSKLKSGIGAVVLPGVSTADISSNKDDEENSMHTTVVLFSSSDKFTLNQDMCVVCGSFGQGAEGRLLACSQCGQCYHPYCVSIKVNILKLS

SEQ ID NO: 840015 - protein, 52 aa, Homo sapiens
MGDWEGGASEDGESGKRSPPETRGSGRGEPGFLMALGPGQGKGAAASGWSSM

SEQ ID NO: 840016 - protein, 198 aa, Homo sapiens
MSNVRVSNGSPSLERMDARQAEHPKPSACRNLFGPVDHEELTRDLEKHCRDMEEASQRKWNFDFQNHKPLEGKYEWQEVEKGSLPEFYYRPPRPPKGACKVPAQESQDVSGSRPAAPLIGAPANSEDTHLVDPKTDPSDSQTGLAEQCAGIRKRPATDDSSTQNKRANRTEENVSDGSPNAGSVEQTPKKPGLRRRQT

SEQ ID NO: 840017 - protein, 198 aa, Homo sapiens; identical to SEQ ID NO: 840016

SEQ ID NO: 840018 - protein, 851 aa, Homo sapiens
VFISVPDPRAQAQLRPPGMDVVDPDIFNRDPRDHYDLLQRLGGGTYGEVFKARDKVSGDLVALKMVKMEPDDDVSTLQKEILILKTCRHANIVAYHGSYLWLQKLWICMEFCGAGSLQDIYQVTGSLSELQISYVCREVLQGLAYLHSQKKIHRDIKGANILINDAGEVRLADFGISAQIGATLARRLSFIGTPYWMAPEVAAVALKGGYNELCDIWSLGITAIELAELQPPLFDVHPLRVLFLMTKSGYQPPRLKEKGKWSAAFHNFIKVTLTKSPKKRPSATKMLSHQLVSQPGLNRGLILDLLDKLKNPGKGPSIGDIEDEEPELPPAIPRRIRSTHRSSSLGIPDADCCRRHMEFRKLRGMETRPPANTARLQPPRDLRSSSPRKQLSESSDDDYDDVDIPTPAEDTPPPLPPKPKFRSPSDEGPGSMGDDGQLSPGVLVRCASGPPPNSPRPGPPPSTSSPHLTAHSEPSLWNPPSRELDKPPLLPPKKEKMKRKGCALLVKLFNGCPLRIHSTAAWTHPSTKDQHLLLGAEEGIFILNRNDQEATLEMLFPSRTTWVYSINNVLMSLSGKTPHLYSHSILGLLERKETRAGNPIAHISPHRLLARKNMVSTKIQDTKGCRACCVAEGASSGGPFLCGALETSVVLLQWYQPMNKFLLVRQVLFPLPTPLSVFALLTGPGSELPAVCIGVSPGRPGKSVLFHTVRFGALSCWLGEMSTEHRGPVQVTQVEEDMVMVLMDGSVKLVTPEGSPVRGLRTPEIPMTEAVEAVAMVGGQLQAFWKHGVQVWALGSDQLLQELRDPTLTFRLLGSPRLECSGTISPHCNLLLPGSSNSPASASRVAGITGL

SEQ ID NO: 840019 - protein, 309 aa, Homo sapiens
  misc_feature (276)..(276): Xaa can be any naturally occurring amino acid
  misc_feature (285)..(285): Xaa can be any naturally occurring amino acid
  misc_feature (287)..(288): Xaa can be any naturally occurring amino acid
  misc_feature (299)..(299): Xaa can be any naturally occurring amino acid
MDVVDPDIFNRDPRDHYDLLQRLGGGTYGEVFKARDKVSGDLVALKMVKMEPDDDVSTLQKEILILKTCRHANIVAYHGSYLWLQKLWICMEFCGAGSLQDIYQVTGSLSELQISYVCREVLQGLAYLHSQKKIHRDIKGANILINDAGEVRLADFGISAQIGATLARRLSFIGTPYWMAPEVAAVALKGGYNELCDIWSLGITAIELAELQPPLFDVHPLRVLFLMTKSGYQPPRLKEKGKWSAAFHNFIKVTLTKSPKKRPSATKMLSHHWYPXGLIEADLDXLXXKSGKDLIGNEXRADYPVSRDN

SEQ ID NO: 840020 - protein, 811 aa, Homo sapiens
MDVVDPDIFNRDPRDHYDLLQRLGGGTYGEVFKARDKVSGDLVALKMVKMEPDDDVSTLQKEILILKTCRHANIVAYHGSYLWLQKLWICMEFCGAGSLQDIYQVTGSLSELQISYVCREVLQGLAYLHSQKKIHRDIKGANILINDAGEVRLADFGISAQIGATLARRLSFIGTPYWMAPEVAAVALKGGYNELCDIWSLGITAIELAELQPPLFDVHPLRVLFLMTKSGYQPPRLKEKGKWSAAFHNFIKVTLTKSPKKRPSATKMLSHQLVSQPGLNRGLILDLLDKLKNPGKGPSIGDIEDEEPEEWRPDPQPTPLAYSLLETSGAAAPGQGPQGGWGGELECGQGPQGSYLSPFRKQLSESSDDDYDDVDIPTPAEDTPPPLPPKPKFRSPSDEGPGSMGDDGQLSPGVLVRCASGPPPNSPRPGPPPSTSSPHLTAHSEPSLWNPPSRELDKPPLLPPKKEKMKRKGCALLVKLFNGCPLRIHSTAAWTHPSTKDQHLLLGAEEGIFILNRNDQEATLEMLFPSRTTWVYSINNVLMSLSGKTPHLYSHSILGLLERKETRAGNPIAHISPHRLLARKNMVSTKIQDTKGCRACCVAEGASSGGPFLCGALETSVVLLQWYQPMNKFLLVRQVLFPLPTPLSVFALLTGPGSELPAVCIGVSPGRPGKSVLFHTVRFGALSCWLGEMSTEHRGPVQVTQVEEDMVMVLMDGSVKLVTPEGSPVRGLRTPEIPMTEAVEAVAMVGGQLQAFWKHGVQVWALGSDQLLQELRDPTLTFRLLGSPRPVVVETRPVDDPTAPSNLYIQE

SEQ ID NO: 840021 - protein, 845 aa, Homo sapiens
RFPGSHPMPGLAGVTFAVTGSLSELQISYVCREVLQVRRGLGILGMGGEGGPTPAPKHSLSPCPPFSPGLAYLHSQKKIHRDIKVVWGCRGAVGGWGPGDGSGISGAQGSGEFELAEWASTGLGRVSAASHIPSHSQGANILINDAGEVRLADFGISAQIGATLARRLSFIGTPYWMAPEVAAVALKGGYNELCDIWSLGITAIELAELQPPLFDVHPLRVLFLMTKSGYQPPRLKEKGKWSAAFHNFIKVTLTKSPKKRPSATKMLSHQLVSQPGLNRGLILDLLDKLKNPGKGPSIGDIEDEEPELPPAIPRRIRSTHRSSSLGIPDADCCRRHMEFRKLRGMETRPPANTARLQPPRDLRSSSPRSGTPGRMGRGLECGQGPQGSYLSPFRKQLSESSDDDYDDVDIPTPAEDTPPPLPPKPKFRSPSDEGPGSMGDDGQLSPGVLVRCASGPPPNSPRPGPPPSTSSPHLTAHSEPSLWNPPSRELDKPPLLPPKKEKMKRKGCALLVKLFNGCPLRIHSTAAWTHPSTKDQHLLLGAEEGIFILNRNDQEATLEMLFPSRTTWVYSINNVLMSLSGKTPHLYSHSILGLLERKETRAGNPIAHISPHRLLARKNMVSTKIQDTKGCRACCVAEGASSGGPFLCGALETSVVLLQWYQPMNKFLLVRQVLFPLPTPLSVFALLTGPGSELPAVCIGVSPGRPGKSVLFHTVRFGALSCWLGEMSTEHRGPVQVTQVEEDMVMVLMDGSVKLVTPEGSPVRGLRTPEIPMTEAVEAVAMVGGQLQAFWKHGVQVWALGSDQLLQELRDPTLTFRLLGSPRPVVVETRPVDDPTAPSNLYIQE

SEQ ID NO: 840022 - protein, 798 aa, Homo sapiens
MDVVDPDIFNRDPRDHYDLLQRLGGGTYGEVFKARDKVSGDLVALKMVKMEPDDDVSTLQKEILILKTCRHANIVAYHGSYLWLQKLWICMEFCGAGSLQDIYQVTGSLSELQISYVCREVLQGLAYLHSQKKIHRDIKGANILINDAGEVRLADFGISAQIGATLARRLSFIGTPYWMAPEVAAVALKGGYNELCDIWSLGITAIELAELQPPLFDVHPLRVLFLMTKSGYQPPRLKEKGKWSAAFHNFIKVTLTKSPKKRPSATKMLSHQLVSQPGLNRGLILDLLDKLKNPGKGPSIGDIEDEEPELPPAIPRRIRSTHRSSSLGIPDADCCRRHMEFRKLRGMETRPPANTARLQPPRDLRSSSPRSGTPGRMGRGLECGQGPQGSYLSPFRKQLSESSDDDYDDVDIPTPAEDTPPPLPPKPKFRSPSDEGPGSMGDDGQLSPGVLVRCASGPPPNSPRPGPPPSTSSPHLTAHSEPSLWNPPSRELDKPPLLPPKKEKMKRKGCALLVKLFNGCPLRIHSTAAWTHPSTKDQHLLLGAEEGIFILNRNDQEATLEMLFPSRTTWVYSINNVLMSLSGKTPHLYSHSILGLLERKETRAGNPIAHISPHRLLARKNMVSTKIQDTKGCRACCVAEGASSGGPFLCGALETSVVLLQWYQPMNKFLLVRQVLFPLPTPLSVFALLTGPGSELPAVCIGVSPGRPGKSVLFHTVRFGALSCWLGEMSTEHRGPVQVTQVEEDMVMVLMDGSVKLVTPEGSPVRGLRTPEIPMTEAVEAVGLCRDGRAQDQGWKLK

SEQ ID NO: 840023 - protein, 847 aa, Homo sapiens
MDVVDPDIFNRDPRDHYDLLQRLGGGTYGEVFKARDKVSGDLVALKMVKMEPDDDVSTLQKEILILKTCRHANIVAYHGSYLWLQKLWICMEFCGAGSLQDIYQVTGSLSELQISYVCREVLQGLAYLHSQKKIHRDIKGANILINDAGEVRLADFGISAQIGATLARRLSFIGTPYWMAPEVAAVALKGGYNELCDIWSLGITAIELAELQPPLFDVHPLRVLFLMTKSGYQPPRLKEKGKWSAAFHNFIKVTLTKSPKKRPSATKMLSHQLVSQPGLNRGLILDLLDKLKNPGKGPSIGDIEDEEPELPPAIPRRIRSTHRSSSLGIPDADCCRRHMEFRKLRGMETRPPANTARLQPPRDLRSSSPRSGTPGRMGRGLECGQGPQGSYLSPFRKQLSESSDDDYDDVDIPTPAEDTPPPLPPKPKFRSPSDEGPGSMGDDGQLSPGVLVRCASGPPPNSPRPGPPPSTSSPHLTAHSEPSLWNPPSRELDKPPLLPPKKEKMKRKGCALLVKLFNGCPLRIHSTAAWTHPSTKDQHLLLGAEEGIFILNRNDQEATLEMLFPSRTTWVYSINNVLMSLSGKTPHLYSHSILGLLERKETRAGNPIAHISPHRLLARKNMVSTKIQDTKGCRACCVAEGASSGGPFLCGALETSVVLLQWYQPMNKFLLVRQVLFPLPTPLSVFALLTGPGSELPAVCIGVSPGRPGKSVLFHTVRFGALSCWLGEMSTEHRGPVQVTQVEEDMVMVLMDGSVKLVTPEGSPVRGLRTPEIPMTEAVEAVAMVGGQLQAFWKHGVQVWALGSDQLLQELRDPTLTFRLLGSPRPVVVETRPVDDPTAPSNLYIQE

SEQ ID NO: 840024 - protein, 827 aa, Homo sapiens
MDVVDPDIFNRDPRDHYDLLQRLGGGTYGEVFKARDKVSGDLVALKMVKMEPDDDVSTLQKEILILKTCRHANIVAYHGSYLWLQKLWICMEFCGAGSLQDIYQVTGSLSELQISYVCREVLQGLAYLHSQKKIHRDIKGANILINDAGEVRLADFGISAQIGATLARRLSFIGTPYWMAPEVAAVALKGGYNELCDIWSLGITAIELAELQPPLFDVHPLRVLFLMTKSGYQPPRLKEKGKWSAAFHNFIKVTLTKSPKKRPSATKMLSHQLVSQPGLNRGLILDLLDKLKNPGKGPSIGDIEDEEPELPPAIPRRIRSTHRSSSLGIPDADCCRRHMEFRKLRGMETRPPANTARLQPPRDLRSSSPRSGTPGRMGRGLECGQGPQGSYLSPFRKQLSESSDDDYDDVDIPTPAEDTPPPLPPKPKFRSPSDEGPGSMGDDGQLSPGVLVRCASGPPPNSPRPGPPPSTSSPHLTAHSEPSLWNPPSRELDKPPLLPPKKEKMKRKGCALLVKLFNGCPLRIHSTAAWTHPSTKDQHLLLGAEEGIFILNRNDQEATLEMLFPSRTTWVYSINNVLMSLSGKTPHLYSHSILGLLERKETRAGNPIAHISPHRLLARKNMVSTKIQDTKGCRACCVAEGASSGGPFLCGALETSVVLLQWYQPMNKFLLVRQVLFPLPTPLSVFALLTGPGSELPAVCIGVSPGRPGKSVLFHTVRFGALSCWLGEMSTEHRGPVQVTQVEEDMVMVLMDGSVKLVTPEGSPVRGLRTPEIPMTEAVEAVAMVGGQLQAFWKHGVQVWALGSDQLLQELRDPTLTFRLLGSPRFK

SEQ ID NO: 840025 - protein, 133 aa, Homo sapiens
VFISVPDPRAQAQLRPPGMDVVDPDIFNRDPRDHYDLLQRLGGGTYGEVFKARDKVSGDLVALKMVKMEPDDDVSTLQKEILILKTCRHANIVAYHGSYLWLQKLWICMEFCGAGSLQDIYQGYRKDNGTQAP

SEQ ID NO: 840026 - protein, 311 aa, Homo sapiens
SRCPLPAVRSRLLAAPAPAWSLWPGSGSVSDRTARLAGRSLGRLWEQPPLFSCAGPGMVLSLTGLIAFSFLQATLALNPEDPNVCSHWESYAVTVQESYAHPFDQIYYTRCTDILNWFKCTRHRISYKTAYRRGLRTMYRRRSQCCPGYYESGDFCIPLCTEECVHGRCVSPDTCHCEPGWGGPDCSSGCDSDHWGPHCSNRCQCQNGALCNPITGACVCAAGFRGWRCEELCAPGTHGKGCQLPCQCRHGASCDPRAGECLCAPGYTGVYCEELCPPGSHGAHCELRCPCQNGGTCHHITGECACPPGWT

SEQ ID NO: 840027 - protein, 158 aa, Homo sapiens
MVPSALCTEECVHGRCVSPDTCHCEPGWGGPDCSSGCDSDHWGPHCSNRCQCQNGALCNPITGACVCAAGFRGWRCEELCAPGTHGKGCQLPCQCRHGASCDPRAGECLCAPGYTGVYCEELCPPGSHGAHCELRCPCQNGGTCHHITGECACPPGWT

SEQ ID NO: 840028 - protein, 382 aa, Homo sapiens
MGSQTMAVALPRDLRQDANLAKRRHAELCRQKRVFNARNRIIGGDTEAWDVQVHDQKIKEATEKARHETFAAEMRQNDKIMCILENRKKRDRKNLCRAINDFQQSFQKPETRREFDLSDPLALKKDLPARQSDNDVRNTISGMQKFMGEDLNFHERKKFQEEQNREWSLQQQREWKNARAEQKCAEALYTETRLQFDETAKHLQKLESTTRKAVCASVKDFNKSQAIESVERKKQEKKQEQEDNLAEITNLLRGDLLSENPQQAASSFGPHRVVPDRWKGMTQEQLEQIRLVQKQQIQEKLRLQEEKRQRDLDWDRRRIQGARATLLFERQQWRRQRDLRRALDSSNLSLAKEQHLQKKYMNEVYTNQPTGDYFTQFNTGSR

SEQ ID NO: 840029 - protein, 105 aa, Homo sapiens
RKEGKGRRREEKREERKEERKKGSREGGRREEGREGRKERRREGKKRDGGRINGAFFSSTRQFSYGLRCNSGMSGTRKTRSFHEPKEFTCSTEAMNGQQDIPWNR

SEQ ID NO: 840030 - protein, 86 aa, Homo sapiens
RPWNLLHPTPRANPQRPSGSRGATGRAHGSKPMNQGRWKGRRLGKCLRTESSAETADCRFLAQWGCLRYRDVRVLIRDAMPRPAAT

SEQ ID NO: 840031 - protein, 72 aa, Homo sapiens
QNMGSKIFCCCRKTSEGSSTTVGFHNPRMFEQHHPRSFNLNTNSLHSAVPKRHPRLPYDNRMMLKACILRRP

SEQ ID NO: 840032 - protein, 107 aa, Homo sapiens
  misc_feature (42)..(42): Xaa can be any naturally occurring amino acid
  misc_feature (44)..(44): Xaa can be any naturally occurring amino acid
  misc_feature (52)..(53): Xaa can be any naturally occurring amino acid
  misc_feature (56)..(56): Xaa can be any naturally occurring amino acid
  misc_feature (64)..(64): Xaa can be any naturally occurring amino acid
  misc_feature (67)..(67): Xaa can be any naturally occurring amino acid
  misc_feature (92)..(92): Xaa can be any naturally occurring amino acid
PKHGVQDLLLLPQDQRGVFHHCWLPQSKNVRTASSTVLHAVXRXEVQDEALXXGGXVVLGPVAXRGXGGGGGGGGGGGGGGGGGGGGGGGGXATTRMMLKACILRRP

SEQ ID NO: 840033 - protein, 128 aa, Homo sapiens
SSIARNWHHLSSKPETTSSLSALFLTCCTQFWPSSANSGSRTALKSLPVSSSRLPDPTPVPIVLRLDLGIACSTGVPLSRPASNKPFSKVSHRDLPSKLHADQAQWLTPVIPALWEAELGGSSEVRSS

SEQ ID NO: 840034 - protein, 81 aa, Homo sapiens
HVDRVYGQYRARGPYSGTLTCCRSRELLGDSCEACGLLLRPAGTPPPRCCQWDVRFTSTSRSLSPRHVRAHHGKMCLATGS

SEQ ID NO: 840035 - protein, 161 aa, Homo sapiens
MSSYQQKQTFTPPPQLQQQQVKQPSQPPPQEIFVPTTKEPCHSKVPQPGNTKIPEPGCTKVPEPGCTKVPEPGCTKVPEPGCTKVPEPGCTKVPEPGYTKVPEPGSIKVPDQGFIKFPEPGAIKVPEQGYTKVPVPGYTKVPEPCPSTVTPGPAQQKTKQK

SEQ ID NO: 840036 - protein, 169 aa, Homo sapiens
MSSYQQKQTFTPPPQLQQQQVKQPSQPPPQEIFVPTTKEPCHSKVPQPGNTKIPEPGCTKVPEPGCTKVPEPGCTKVPEPGCTKVPEPGCTKVPEPGCTKVPEPGYTKVPEPGSIKVPDQGFIKFPEPGAIKVPEQGYTKVPVPGYTKVPEPCPSTVTPGPAQQKTKQK

SEQ ID NO: 840037 - protein, 161 aa, Homo sapiens; identical to SEQ ID NO: 840035

SEQ ID NO: 840038 - protein, 161 aa, Homo sapiens; identical to SEQ ID NO: 840035

SEQ ID NO: 840039 - protein, 135 aa, Homo sapiens
FTRSQRLNSSTFSAQQMIPEQLKTRKATKTFCLIQELRGFFKECVQHPLKHEFLPAEADLYPTTSASTAAGETTQPASTSGNICSHNQGAMPLKGSTTWKHKVNHTYAHHSLTADKPKIKKTIVKAAGVSTHEDL

SEQ ID NO: 840040 - protein, 161 aa, Homo sapiens; identical to SEQ ID NO: 840035

SEQ ID NO: 840041 - protein, 161 aa, Homo sapiens; identical to SEQ ID NO: 840035

SEQ ID NO: 840042 - protein, 123 aa, Homo sapiens
IGVVNSGISFDCASCSHGRDATIRKVPFTGLRDTPRAMSFNGHSRPSSAEDQAEVIWCTDKPLRSQPPDAGHPLPICFCVLIVCRPCNQYILTPSHSLSLICILKIRTIKLLFTHTLKNPVSP

SEQ ID NO: 840043 - protein, 115 aa, Homo sapiens
MQVMNLNVPMRPGILVQRQSKEVLATPLENRRDMEAEEENQINEKQEPENAGETGQEEDDGLQKIHTSVTRTPSVVESQKRPLKGVTFSREVIVVDLGNEYPTPRSYTREHKERK

SEQ ID NO: 840044 - protein, 112 aa, Homo sapiens
MNLNVPMRPGILVQRQSKEVLATPLENRRDMEAEEENQINEKQEPENAGETGQEEDDGLQKIHTSVTRTPSVVESQKRPLKGVTFSREVIVVDLGNEYPTPRSYTREHKERK

SEQ ID NO: 840045 - protein, 112 aa, Homo sapiens; identical to SEQ ID NO: 840044

SEQ ID NO: 840046 - protein, 115 aa, Homo sapiens; identical to SEQ ID NO: 840043

SEQ ID NO: 840047 - protein, 288 aa, Homo sapiens
MAAVLQRVERLSNRVVRVLGCNPGPMTLQGTNTYLVGTGPRRILIDTGEPAIPEYISCLKQALTEFNTAIQEIVVTHWHRDHSGGIGDICKSINNDTTYCIKKLPRNPQREEIIGNGEQQYVYLKDGDVIKTEGATLRVLYTPGHTDDHMALLLEEENAIFSGDCILGEGTTVFEDLYDYMNSLKELLKIKADIIYPGHGPVIHNAEAKIQQYISHRNIREQQILTLFRENFEKSFTVMELVKIIYKNTPENLHEMAKHNLLLHLKKLEKEGKIFSNTDPDKKWKAHL

SEQ ID NO: 840048 - protein, 287 aa, Homo sapiens [sequence omitted]

SEQ ID NO: 840049 - protein, 256 aa, Homo sapiens [sequence omitted]

SEQ ID NO: 840050 - protein, 200 aa, Homo sapiens
MAAVLQRVERLSNRVVRVLGCNPGPMTLQGTNTYLVGTGPRRILIDTGEPAIPEYISCLKQALTEFNTAIQEIVVTHWHRDHSGGIGDICKSINNDTTYCIKKLPRNPQREEIIGNGEQQYVYLKDGDVIKTEGATLRVLYTPGHTDDHMALLLEEENAIFSGDCILGEGTTVFEDLYDYMNSLKELLKIKADIIYPEYS

SEQ ID NO: 840051 - protein, 288 aa, Homo sapiens; identical to SEQ ID NO: 840047

SEQ ID NO: 840052 - protein, 112 aa, Homo sapiens
MAAVLQRVERLSNRVVRVLGCNPGPMTLQGTNTYLVGTGPRRILIDTGEPAIPEYISCLKQALTEFNTAIQEIVVTHWHRDHSGGIGDICKSINNDTTYCIKYVYLDGDVID

SEQ ID NO: 840053 - protein, 200 aa, Homo sapiens; identical to SEQ ID NO: 840050

SEQ ID NO: 840054 - protein, 138 aa, Homo sapiens
MAAVLQRVERLSNRVVRVLGCNPGPMTLQGTNTYLVGTGPRRILIDTGEPAIPEYISCLKQALTEFNTAIQEIVVTHWHRDHSGGIGDICKSINNDTTYCIKKLPRNPQREEIIGNGEQQYVYLKDGDVIKTEGATLR

SEQ ID NO: 840055 - protein, 71 aa, Homo sapiens
DLEDPEDSSVGLYDMQARGFGSDQSENVDRGAGSIREAGGAFGKREQAEEERYFRHRESVPHRESVPHRES

SEQ ID NO: 840056 - protein, 110 aa, Homo sapiens
MAVTALAARTWLGVWGVRTMQARGFGSDQSENVDRGAGSIREAGGAFGKREQAEEERYFRSGEAHRVPSPALDLPMAFQSLNCQSPHPFLPGALGAPSPNRTPGPQSSIP

SEQ ID NO: 840057 - protein, 110 aa, Homo sapiens; identical to SEQ ID NO: 840056

SEQ ID NO: 840058 - protein, 106 aa, Homo sapiens
MAVTALAARTWLGVWGVRTMQARGFGSDQSENVDRGAGSIREAGGAFGKREQAEEERYFRAQSREQLAALKKHHEEEIVHHKKEIERLQKEIERHKQKIKMLKHDD

SEQ ID NO: 840059 - protein, 165 aa, Homo sapiens
MAVTALAARTWLGVWGVRTMQARGFGSDQSENVDRGAGSIREAGGAFGKREQAEEERYFRPGSPNGLPILKLPIAPPVPTWCLGRPIPQQNSRAPIQYTLTLDVPTVATYRALPVTCTTVSGPQTVSTGGSPKQPTAQLLLYHYHLPRGVLLRSCETPPDSSHSV

SEQ ID NO: 840060 - protein, 140 aa, Homo sapiens
MAVTALAARTWLGVWGVRTMQARGFGSDQVRCGSVRCSSPAGGSHLCFRTFTSVPVSLQSENVDRGAGSIREAGGAFGKREQAEEERYFRSGEAHRVPSPALDLPMAFQSLNCQSPHPFLPGALGAPSPNRTPGPQSSIP

SEQ ID NO: 840061 - protein, 85 aa, Homo sapiens
MVSSSFERGQRGSHASMGGRDDSPGAGGYKHGRLSSPRGQRWTRSRSTNSVSGLSSWCAFEVGTPFGAEAIEMGCLTPGPQSSIP

SEQ ID NO: 840062 - protein, 110 aa, Homo sapiens; identical to SEQ ID NO: 840056

SEQ ID NO: 840063 - protein, 110 aa, Homo sapiens; identical to SEQ ID NO: 840056

SEQ ID NO: 840064 - protein, 106 aa, Homo sapiens; identical to SEQ ID NO: 840058

SEQ ID NO: 840065 - protein, 105 aa, Homo sapiens
DLEDPEDSSVGLYDMQARGFGSDQSENVDRGAGSIREAGGAFGKREQAEEERYFRSGEAHRVPSPALDLPMAFQSLNCQSPHPFLPGALGAPSPNRTPGPQSSIP

SEQ ID NO: 840066 - protein, 80 aa, Homo sapiens
DLDSLSVSGVDAAYADGHRAREVHACEPLPLLISPTLLTAALTTSELPRNPSERDSGFYIPVRLTGSQVQPWISQWPSNP

SEQ ID NO: 840067 - protein, 96 aa, Homo sapiens
MSTGARAPSGKPVGPSERESRLKRNDISDITGYALRSLWGEGLKLNPEPPCPCRAQSREQLAALKKHHEEEIVHHKKEIERLQKEIERADAVERAD

SEQ ID NO: 840068 - protein, 677 aa, Homo sapiens
MDFPGHFEQIFQQLNYQRLHGQLCDCVIVVGNRHFKAHRSVLAACSTHFRALFSVAEGDQTMNMIQLDSEVVTAEAFAALIDMMYTSTLMLGESNVMDVLLAASHLHLNSVVKACKHYLTTRTLPMSPPSERVQEQSARMQRSFMLQQLGLSIVSSALNSSQNGEEQPAPMSSSMRSNLDQRTPFPMRRLHKRKQSAEERARQRLRPSIDESAISDVTPENGPSGVHSREEFFSPDSLKIVDNPKADGMTDNQEDSAIMFDQSFGTQEDAQVPSQSDNSAGNMAQLSMASRATQVETSFDQEAAPEKSSFQCENPEVGLGEKEHMRVVVKSEPLSSPEPQDEVSDVTSQAEGSESVEVEGVVVSAEKIDLSPESSDRSFSDPQSSTDRVGDIHILEVTNNLEHKSTFSISNFLNKSRGNNFTANQNNDDNIPNTTSDCRLESEAPYLLSPEAGPAGGPSSAPGSHVENPFSEPADSHFVRPMQEVMGLPCVQTSGYQGGEQFGMDFSRSGLGLHSSFSRVMIGSPRGGASNFPYYRRIAPKMPVVTSVRSSQIPENSTSSQLMMNGATSSFENGHPSQPGPPQLTRASADVLSKCKKALSEHNVLVVEGARKYACKICCKTFLTLTDCKKHIRVHTGEKPYACLKCGKRFSQSSHLYKHSKTTCLRWQSSNLPSTLL

SEQ ID NO: 840069 - protein, 104 aa, Homo sapiens
ARRPYQSICTLTRASADVLSKCKKALSEHNVLVVEGARKYACKICCKTFLTLTDCKKHIRVHTGEKPYACLKCGKRFSQSSHLYKHSKTTCLRWQSSNLPSTLL

SEQ ID NO: 840070 - protein, 677 aa, Homo sapiens; identical to SEQ ID NO: 840068

SEQ ID NO: 840071 - protein, 677 aa, Homo sapiens; identical to SEQ ID NO: 840068

SEQ ID NO: 840072 - protein, 47 aa, Homo sapiens
PVADIDSWLSAKGLNHPWSILEWSDTTGQWMSLCPAWSVSLPGPLLL

SEQ ID NO: 840073 - protein, 102 aa, Homo sapiens
AACPLKTLPLCASALRVGVGGGVADRRQSFLGAKAKGGNKSHVWLKARLKPWGQRQGVFSDVERWVLLLISEERTRNPDMLGRVRWLTPVIPALWEAKAGGS

SEQ ID NO: 840074 - protein, 144 aa, Homo sapiens
RLLLGPGAGLRGGVVLKVSPSPCRGGRRVPVRAEGARGRGPRNKVPGASSGAAVGAARLTAPLLAKAMASKLLRAVILGPPGSGKGTVCQRIAQNFGLQHLSSGHFLRENIKASTEVGEMAKQYIEKSLLVPDHVITRLMMSEL

SEQ ID NO: 840075 - protein, 219 aa, Homo sapiens
GSLTDHGLLGNGLGAAPGWRWPAGAGDFLPPGQTDPCFLFFKIQKASPNICPEECETYFPGLSFTLFYFCVDKQWGKCRASSQADKKTTIPVRPPTRRRHKWPRPRHFSSFCEVGSWVGSMRVVMARLLSEGEQGIPTACAAFAQQPGGRPRRGLAGVGEGGPQCSWVNYRCTLEFLVSLLGTDLARGRGNSASGPTAPADSKQLSCKTFIAVLSLSKE

SEQ ID NO: 840076 - protein, 113 aa, Homo sapiens
YRLGTRLVGSWVGSMRVVMARLLSEGEQGIPTACAAFAQQPGGRPRRGLAGVGEGGPQCSWVNYRCTLEFLVSLLGTDLARGRGNSASGPTAPADSKQLSCKTFIAVLSLSKE

SEQ ID NO: 840077 - protein, 291 aa, Homo sapiens
GSLTDHGLLGNGLGAAPGWRWPAGAGDFLPPGQTDPCFLFFKIQKASPNICPEECETYFPGLSFTLFYFCVDKQWGKCRASSQADKKTTIPVRPPTRRRHKWPRPRHFSSFCEVGSWVGSMRVVMARLLSEGEQGIPTACAAFAQQPGGRPRRGLAGVGEGGPQCSWVNYRCTLEFLVSLLGTDLARGRGNSASGPTAPADSKQLSCKTFIAVLSLSKEAGFCHVVQAGLYSWAQAVLLPQSPKVLELQGMNSGSPARDNAPSQRFCTNLSEGLRFGISPSWREALYGCHA

SEQ ID NO: 840078 - protein, 219 aa, Homo sapiens; identical to SEQ ID NO: 840075

SEQ ID NO: 840079 - protein, 205 aa, Homo sapiens
GSLTDHGLLGNGLGAAPGWRWPAGAGDFLPPGQTDPCFLFFKIQKASPNICPEECETYFPGLSFTLFYFCVDKQWGKCRASSQADKKTTIPVRPPTRRRHKWPRPRHFSSFCEVGSWVGSMRVVMARLLSEGEQGIPTACAAFAQQPGGRPRRGLAGVGEGGPQCSWVNYRCTLEFLVSLLGTDLARGRGNSASGPTAPADSKQL

SEQ ID NO: 840080 - protein, 246 aa, Homo sapiens
GSLTDHGLLGNGLGAAPGWRWPAGAGDFLPPGQTDPCFLFFKIQKASPNICPEECETYFPGLSFTLFYFCVDKQWGKCRASSQADKKTTIPVRPPTRRRHKWPRPRHFSSFCEVGSWVGSMRVVMARLLSEGEQGIPTACAAFAQQPGGRPRRGLAGVGEGGPQCSWVNYRCTLEFLVSLLGTDLARGRGNSASGPTAPADSKQLMNSGSPARDNAPSQRFCTNLSEGLRFGISPSWREALYGCHA

SEQ ID NO: 840081 - protein, 219 aa, Homo sapiens; identical to SEQ ID NO: 840075

SEQ ID NO: 840082 - protein, 219 aa, Homo sapiens; identical to SEQ ID NO: 840075

SEQ ID NO: 840083 - protein, 219 aa, Homo sapiens; identical to SEQ ID NO: 840075

SEQ ID NO: 840084 - protein, 291 aa, Homo sapiens; identical to SEQ ID NO: 840077

SEQ ID NO: 840085 - protein, 219 aa, Homo sapiens; identical to SEQ ID NO: 840075

SEQ ID NO: 840086 - protein, 219 aa, Homo sapiens; identical to SEQ ID NO: 840075

SEQ ID NO: 840087 - protein, 205 aa, Homo sapiens; identical to SEQ ID NO: 840079

SEQ ID NO: 840088 - protein, 113 aa, Homo sapiens; identical to SEQ ID NO: 840076

SEQ ID NO: 840089 - protein, 253 aa, Homo sapiens
GSLTDHGLLGNGLGAAPGWRWPAGAGDFLPPGQTDPCFLFFKIQKASPNICPEECETYFPGLSFTLFYFCVDKQWGKCRASSQADKKTTIPVRPPTRRRHKWPRPRHFSSFCEVGSWVGSMRVVMARLLSEGEQGIPTACAAFAQQPGGRPRRGLAGVGEGGPQCSWVNYRCTLEFLVSLLGTDLARGRGNSASGPTAPADSKQLSCKTFIAVLSLSKGRNARISLQHPPSGLKWSFHLSFLGLQARATTTPG

SEQ ID NO: 840090 - protein, 219 aa, Homo sapiens; identical to SEQ ID NO: 840075

SEQ ID NO: 840091 - protein, 219 aa, Homo sapiens; identical to SEQ ID NO: 840075

SEQ ID NO: 840092 - protein, 219 aa, Homo sapiens; identical to SEQ ID NO: 840075

SEQ ID NO: 840093 - protein, 291 aa, Homo sapiens; identical to SEQ ID NO: 840077

SEQ ID NO: 840094 - protein, 219 aa, Homo sapiens; identical to SEQ ID NO: 840075

SEQ ID NO: 840095 - protein, 220 aa, Homo sapiens
GSLTDHGLLGNGLGAAPGWRWPAGAGDFLPPGQTDPCFLFFKIQKASPNICPEECETYFPGLSFTLFYFCVDKQWGKCRASSQADKKTTIPVRPPTRRRHKWPRPRHFSSFCEVGSWVGSMRVVMARLLSEGEQGIPTACAAFAQQPGGRPRRGLAGVGEGGPQCSWVNYRCTLEFLVSLLGTDLARGRGNSASGPTAPADSKQLVVGHSKASGDISTPP

SEQ ID NO: 840096 - protein, 367 aa, Homo sapiens
MYPESTTGSPARLSLRQTGSPGMIYSTRYGSPKRQLQFYRNLGKSGLRVSCLGLGTWVTFGGQITDEMAEQLMTLAYDNGINLFDTAEVYAAGKAEVVLGNIIKKKGWRRSSLVITTKIFWGGKAETERGLSRKHIIEGLKASLERLQLEYVDVVFANRPDPNTPMEETVRAMTHVINQGMAMYWGTSRWSSMEIMEAYSVARQFNLTPPICEQAEYHMFQREKVEVQLPELFHKIGVGAMTWSPLACGIVSGKYDSGIPPYSRASLKGYQWLKDKILSEEGRRQQAKLKELQAIAERLGCTLPQLAIAWCLRNEGVSSVLLGASNADQLMENIGAIQVLPKLSSSIIHEIDSILGNKPYSKKDYRS

SEQ ID NO: 840097 - protein, 367 aa, Homo sapiens; identical to SEQ ID NO: 840096

SEQ ID NO: 840098 - protein, 353 aa, Homo sapiens
MYPESTTGSPARLSLRQTGSPGMIYRNLGKSGLRVSCLGLGTWVTFGGQITDEMAEQLMTLAYDNGINLFDTAEVYAAGKAEVVLGNIIKKKGWRRSSLVITTKIFWGGKAETERGLSRKHIIEGLKASLERLQLEYVDVVFANRPDPNTPMEETVRAMTHVINQGMAMYWGTSRWSSMEIMEAYSVARQFNLTPPICEQAEYHMFQREKVEVQLPELFHKIGVGAMTWSPLACGIVSGKYDSGIPPYSRASLKGYQWLKDKILSEEGRRQQAKLKELQAIAERLGCTLPQLAIAWCLRNEGVSSVLLGASNADQLMENIGAIQVLPKLSSSIIHEIDSILGNKPYSKKDYRS

SEQ ID NO: 840099 - protein, 194 aa, Homo sapiens
MAAPAASRLLTGKGPRGPFLPSQEAYSVARQFNLTPPICEQAEYHMFQREKVEVQLPELFHKIGVGAMTWSPLACGIVSGKYDSGIPPYSRASLKGYQWLKDKILSEEGRRQQAKLKELQAIAERLGCTLPQLAIAWCLRNEGVSSVLLGASNADQLMENIGAIQVLPKLSSSIIHEIDSILGNKPYSKKDYRS

SEQ ID NO: 840100 - protein, 173 aa, Homo sapiens
MYPESTTGSPARLSLRQTGSPGMIYSTRYGSPKRQLQFYRNLGKSGLRVSCLGLGTWVTFGGQITDEMAEQLMTLAYDNGINLFDTAEVYAAGKAEVVLGNIIKKKGWRQRGERAGQARVTPPCSLGRRARDASKSAGAGCHLQAQACVPSSTQALQTTRGRAPLKPPPPLAS

SEQ ID NO: 840101 - protein, 202 aa, Homo sapiens
MYPESTTGSPARLSLRQTGSPGMIYRNLGKSGLRVSCLGLGTWVTFGGQITDEMAEQLMTLAYDNGINLFDTAEVYAAGKAEVVLGNIIKKKGWRRSSLVITTKIFWGGKAETERGLSRKHIIEGLKASLERLQLEYVDVVFANRPDPNTPMEETVRAMTHVSHSALCSDPRSQGVTGASSHLLSLSSHVNNVLFLSPSLFF

SEQ ID NO: 840102 - protein, 197 aa, Homo sapiens
MYPESTTGSPARLSLRQTGSPGMIYRNLGKSGLRVSCLGLGTWVTFGGQITDEMAEQLMTLAYDNGINLFDTAEVYAAGKAEVVLGNIIKKKGWRIFAASQPLRSSLFPSVRGCVWDRSGRAILRVSGPKSVNHPPSSGRDVSHSSGKWSPPAQTGERSPGVMEPKGRRSGAIHPSLPGAYGPFPGQGPHPPWDQLG

SEQ ID NO: 840103 - protein, 367 aa, Homo sapiens; identical to SEQ ID NO: 840096

SEQ ID NO: 840104 - protein, 367 aa, Homo sapiens; identical to SEQ ID NO: 840096

SEQ ID NO: 840105 - protein, 353 aa, Homo sapiens; identical to SEQ ID NO: 840098

SEQ ID NO: 840106 - protein, 223 aa, Homo sapiens [sequence omitted]

SEQ ID NO: 840107 - protein, 353 aa, Homo sapiens; identical to SEQ ID NO: 840098

SEQ ID NO: 840108 - protein, 164 aa, Homo sapiens
MYPESTTGSPARLSLRQTGSPGMIYRNLGKSGLRVSCLGLGTWVTFGGQITDEMAEQLMTLAYDNGINLFDTAEVYAAGKAEVVLGNIIKKKGWRIFAASQPLRSSLFPSVRGNIRSSYKVGPPSSLPSKCHSESQCQGEPPPPPPWIPDTPSSCPIKFVFWQL

SEQ ID NO: 840109 - protein, 166 aa, Homo sapiens
IPEEDDFGDVLWDIHDEQEQMETFQQASNSAHELGFEKYYQRLNDLVAAPAPIPPLLVSGGPGSGKSLLLSKWIQLQQKNSPNTLILSHFVGRPMSTSSESSLIIKRLTLKLMQHSWSVSALTLDPAKLLEEFPRWLEKLSARHQGSIIIVIDSIDQVQVVAYTSS

SEQ ID NO: 840110 - protein, 270 aa, Homo sapiens
IPEEDDFGDVLWDIHDEQEQMETFQQASNSAHELGFEKYYQRLNDLVAAPAPIPPLLVSGGPGSGKSLLLSKWIQLQQKNSPNTLILSHFVGRPMSTSSESSLIIKRLTLKLMQHSWSVSALTLDPAKLLEEFPRWLEKLSARHQGSIIIVIDSIDQVQQVEKHMKWLIDPLPVNVRVIVSVNVETCPPAWRLWPTLHLDPLSPKDAKSIIIAECHSVDIKLSKEQEKKLERHCRSATTCNALYVTLFGKMIARAGRAGNLDKILHQCFQ

SEQ ID NO: 840111 - protein, 166 aa, Homo sapiens; identical to SEQ ID NO: 840109

SEQ ID NO: 840112 - protein, 166 aa, Homo sapiens; identical to SEQ ID NO: 840109

SEQ ID NO: 840113 - protein, 72 aa, Homo sapiens
RRCEGRCSQEQTEVGMNQYTPTSGPQGRMRGAVGVGRRPLCVMLTVSAESPASAGAVPVGSSVTCLTASFAQ

SEQ ID NO: 840114 - protein, 72 aa, Homo sapiens; identical to SEQ ID NO: 840113

SEQ ID NO: 840115 - protein, 72 aa, Homo sapiens; identical to SEQ ID NO: 840113

SEQ ID NO: 840116 - protein, 134 aa, Homo sapiens
SRVGSEEQRKAVGDVATVPRDHPAMETRELSLRGRGLASKKDREWTGRGPLSSGPKEDSSRRRESERQGPCAGLLLRLQAGSLPEAVQKHSSAGPTRFLSHVKFRSSVKTHSSPAGVLRDARSLWGQFGKLTFM

SEQ ID NO: 840117 - protein, 130 aa, Homo sapiens
MSGRGKQGGKARAKAKSRSSRAGLQFPVGRVHRLLRKGNYAERVGAGAPVYLAAVLEYLTAEILELAGNAARDNKKTRIIPRHLQLAIRNDEELNKLLGRVTIAQGGVLPNIQAVLLPKKTESHHKAKGK

SEQ ID NO: 840118 - protein, 130 aa, Homo sapiens; identical to SEQ ID NO: 840117

SEQ ID NO: 840119 - protein, 130 aa, Homo sapiens; identical to SEQ ID NO: 840117

SEQ ID NO: 840120 - protein, 130 aa, Homo sapiens; identical to SEQ ID NO: 840117

SEQ ID NO: 840121 - protein, 130 aa, Homo sapiens; identical to SEQ ID NO: 840117

SEQ ID NO: 840122 - protein, 130 aa, Homo sapiens; identical to SEQ ID NO: 840117

SEQ ID NO: 840123 - protein, 130 aa, Homo sapiens; identical to SEQ ID NO: 840117

SEQ ID NO: 840124 - protein, 130 aa, Homo sapiens; identical to SEQ ID NO: 840117

SEQ ID NO: 840125 - protein, 130 aa, Homo sapiens; identical to SEQ ID NO: 840117

SEQ ID NO: 840126 - protein, 130 aa, Homo sapiens; identical to SEQ ID NO: 840117

SEQ ID NO: 840127 - protein, 130 aa, Homo sapiens; identical to SEQ ID NO: 840117

SEQ ID NO: 840128 - protein, 503 aa, Homo sapiens
EKPYECKECGEAFRTSRQLTVHHRFHYGEKPYECKECGKAFSVYGRLSRHQSIHTGEKPFECNKCGKSFRLKAGLKVHQSIHTGEKPHECKECGKAFRQFSHLVGHKRIHTGEKPYECKECGKGFTCRYQLTMHQRIYSGEKHYECKENGEAFSSGHQLTAPHTFESVEKPYKCEECGKAFSVHGRLTRHQGIHSGKKPYECNKCGKSFRLNSSLKIHQNIHTGEKPYKCKECGKAFSQRAHLAHHNRIHTGYKPFECKECGKSFRCASYLVIHERIHTGEKPYVCQECGKGFSYSHKLTIHRRVHTGEKPYECKECGKAFSVSGQLTQHLSIHSGKKPFECNKCGKSFRFISVLKAHQNIHSAEKPYECKECGKAFRHATSLIYHDRTHAGEKSYECKECGETFSHASHLIIHERIHTSDKPYECKRCGKAFHCASYLVRHESVHADGNPYMCEECGKAFNSSHELSIHHRVHTGEKPFKCNKCRRSFRLRSILEVHQRIHI

SEQ ID NO: 840129 - protein, 232 aa, Homo sapiens
MGPPSSSGFYVSRAVALLLAGLVAALLLALAVLAALYGHCERVPPSELPGLQGLGSRVFPSPQAEADADPETQQCTRASGDDHPEQLGPPGPWDQLRLPPWLVPLHYDLELWPQLRPDELPAGSLPFTGRVNITVRCTVATSRLLLHSLFQDCERAEVRGPLSPGTGNATVGRVPVDDVWFALDTEYMVLELSEPLKPGSSYELQLSFSGLVKEDLREGLFLNVYTDQGERR

SEQ ID NO: 840130 - protein, 211 aa, Homo sapiens
MQSAMFLAVQHDCRPMDKSAGSGHKSEEKREKMKRTLLKDWKTRLSYFLQNSSTPGKPKTGKKSKQQAFIKPSPEEAQLWSEAFDELLASKYGLAAFRAFLKSEFCEENIEFWLACEDFKKTKSPQKLSSKARKIYTDFIEKEAPKEINIDFQTKTLIAQNIQEATSGCFTTAQKRVYSLMENNSYPRFLESEFYQDLCKKPQITTEPHAT

SEQ ID NO: 840131 - protein, 75 aa, Homo sapiens
GKQPGLQRENDNAKCYVLGCSTRLQTHGQERRQWPQERGEARKDETDPVSMAFFPLPPPPAPHCKLQTRYFRARL

SEQ ID NO: 840132 - protein, 237 aa, Homo sapiens
MQSAMFLAVQHDCRPMDKSAGSGHKSEEKREKMKRTLILRLKRVPSIHTLHDEFSSAYTATGSLKDWKTRLSYFLQNSSTPGKPKTGKKSKQQAFIKPSPEEAQLWSEAFDELLASKYGLAAFRAFLKSEFCEENIEFWLACEDFKKTKSPQKLSSKARKIYTDFIEKEAPKEINIDFQTKTLIAQNIQEATSGCFTTAQKRVYSLMENNSYPRFLESEFYQDLCKKPQITTEPHAT

SEQ ID NO: 840133 - protein, 165 aa, Homo sapiens [sequence omitted]

SEQ ID NO: 840134 - protein, 82 aa, Homo sapiens
ANSRGSSGRTIMQSAMFLAVQHDCRPMDKSAGSGHKSEEKREKMKRTLLKDWKTRLSYFLQNSSTPGKPKTGKKSKQQAFIK

SEQ ID NO: 840135 - protein, 238 aa, Homo sapiens
YCLKFAEYNSDLHQFFEFLYNHGIGTLSSPLYIAWAGHLEAQGELQHASAVLQRGIQNQAEPREFLQQQYRLFQTRLTETHLPAQARTSEPLHNVQVLNQMITSKSNPGNNMACISKNQGSELSGVISSACDKESNMERRVITISKSEYSVHSSLASKVDVEQVVMYCKEKLIRGESEFSFENLIAQNIQEATSGCFTTAQKRVYSLMENNSYPRFLESEFYQDLCKKPQITTEPHAT

SEQ ID NO: 840136 - protein, 194 aa, Homo sapiens
MQSAMFLAVQHDCRPMDKSAGSGHKSEEKREKMKRTLLKDWKTRLSYFLQNSSTPGKPKTGKKSKQQAFIKPSPEEAQLWSEAFDELLASKYGLAAFRAFLKSEFCEENIEFWLACEDFKKTKSPQKLSSKARKIYTDFIEKEAPKEINIDFQTKTLIAQNIQEATSGCFTTAQKRVYSLMGARCAILLPSGFH

SEQ ID NO: 840137 - protein, 75 aa, Homo sapiens; identical to SEQ ID NO: 840131

SEQ ID NO: 840138 - protein, 211 aa, Homo sapiens; identical to SEQ ID NO: 840130

SEQ ID NO: 840139 - protein, 211 aa, Homo sapiens; identical to SEQ ID NO: 840130

SEQ ID NO: 840140 - protein, 211 aa, Homo sapiens; identical to SEQ ID NO: 840130

SEQ ID NO: 840141 - protein, 211 aa, Homo sapiens; identical to SEQ ID NO: 840130

SEQ ID NO: 840142 - protein, 106 aa, Homo sapiens
MFGYRKCGVEVLAATLFLDLPRLTFELSCSQSSSIYQMGETLGQLYKLLFAFFGSATAPIAVTIGEKTKLFHKFHGEESISHWKARNGQDSVFAITNKTLVMKNNL

SEQ ID NO: 840143 - protein, 169 aa, Homo sapiens
MQCLLPYQSKEPSCLPPLPLNLPLPPCLCPLLQLNAAMTRKEKTKEGQRAAQFSAGADAGSGGGLSRQKDTKRPMLLVIHDVVLELLTSSDCHANPRKYPTCQKSEVLGVSIYVSICPSTRPRDKNKTKKRCQVLEAVLVSKPSGSCHQGSFEIVPHVKGNLAFTSSNH

SEQ ID NO: 840144 - protein, 1179 aa, Homo sapiens
RPPPRPGRRALVLARARESAELPLPAGWEEARDYDGRVFYIDHNTRQTSWIDPRDRITKPLTFADCVGDELPLGWETVYDKQIGVYYMDHINKLTQIEDPREQWRREQERMLKEYLIVAQEALNAKKEIYQIKQQRFELAQEEYQQLHKMCEDDSRSYASSFSGYSTNTKYDPHQIKAEIASRRDRLSRLKRELTQMKQELQYKEKGVETLQEIDRKMSSTHTSYKLDEAQAIMSELRTIKKAICTGEKERRDLMHSLAKLTDSFKNSCSVTDSLVDFPHHVGVPGDAGVPQQFCDAGSQTDIIGEFVFDDKTRLVDRVRLNWQYEEARKRVANIQQQLARLDNESWPSTAEADRDRLQLIKEKEALLQELQLIIAQRRSAGDVARLEEERERLEEELRRARATSAQGATERILLQEKRNCLLMQLEEATRLTSYLQSQLKSLCASTLTVSSGSSRGSLASSRGSLASSRGSLSSVSFTDIYGLPQYEKPDAEGSQLLRFDLIPFDSLGRDAPFSEPPGPSGFHKQRRSLDTPQSLASLSSRSSLSSLSPPSSPLDTPFLPASRDSPLAQLADSCEGPGLGALDRLRAHASAMGDEDLPGMAALQPHGVPGDGEGPHERGPPPASAPVGGTVTLREDSAKRLERRARRISACLSDYSLASDSGVFEPLTKRNEDAEEPAYGDTASNGDPQIHVGLLRDSGSECLLVHVLQLKNPAGLAVKEDCKVHIRVYLPPLDSGTPNTYCSKALEFQVPLVFNEVFRIPVHSSALTLKSLQLYVCSVTPQLQEELLGIAQINLADYDSLSEMQLRWHSVQVFTSSEPSRTREAGCAGESSARDPAHTISISGKTDAVTVLLARTTAQLQAVERELAEERAKLEYTEEEVLEMERKEEQAEAISERSWQADSVDSGCSNCTQTSPPYPEPCCMGIDSILGHPFAAQAGPYSPEKFQPSPLKVDKETNTEDLFLEEAASLVKERPSRRARGSPFVRSGTIVRSQTFSPGARSQYVCRLYRSDSDSSTLPRKSPFVRNTLERRTLRYKQSCRSSLAELMARTSLDLELDLQASRTRQRQLNEELCALRELRQRLEDAQLRGQTDLPPWVLRDERLRGLLREAERQTRQTKLDYRHEQAAEKMLKKASKEIYQLRGQSHKEPIQVQTFREKIAFFTRPRINIPPLPADDV

SEQ ID NO: 840145 - protein, 138 aa, Homo sapiens
AAGGRAAGGGPLWPAPACTSLLPAPGSEGSLPDTEVVPEIPHHWALGVPSPSVGCEGGVCVASACIWRLRVLEEGSRALPTLLGEHSGSPVARPDCSHPLASVSWEEFLGGSVGEVGLTPSCHHSLTVVGSSGLQGWQ

SEQ ID NO: 840146 - protein, 115 aa, Homo sapiens
RFPHVTRCPAPGNWAPGISSPGADRWPSFPFSAAASPIPVPGVCGPLPRPWFCRCPQPRGGEMSCHLGSQTCAPALGCGFPVWRVQAGFHPKPDVRRALEGFPTLLELEKSVPKL

SEQ ID NO: 840147 - protein, 1179 aa, Homo sapiens; identical to SEQ ID NO: 840144

SEQ ID NO: 840148 - protein, 1179 aa, Homo sapiens; identical to SEQ ID NO: 840144

SEQ ID NO: 840149 - protein, 1179 aa, Homo sapiens; identical to SEQ ID NO: 840144

SEQ ID NO: 840150 - protein, 210 aa, Homo sapiens
TLEQSVGEWLESIGLQQYESKLLLNGFDDVHFLGSNVMEEQDLRDIGISDPQHRRKLLQAARSLPKVKALGYDGNSPPSVPSWLDSLGLQDYVHSFLSSGYSSIDTVKNLWELELVNVLKVQLLGHRKRIIASLADRPYEEPPQKPPRFSQLRCQDLLSQTSSPLSQNDSCTGRSADLLLPPGDTGRRRHDSLHDPAAPSRAERFRIQVG

SEQ ID NO: 840151 - protein, 613 aa, Homo sapiens
MAATAVAAAVAGTESAQGPPGPAASLELWLNKATDPSMSEQDWSAIQNFCEQVNTDPNGPTHAPWLLAHKIQSPQEKEALYALTVLEMCMNHCEEKFHSEVAKFRFLNELIKVLSPKYLWSWATGKVKGRVIDILFTWTVWFPEDIKIRDAYHMLNKQGIIKQDPKLPVDKILPPPSPWPKSSIFDADEEKSKLLTRLLKSNHPEDLQAANRLIKNLVKEEQEKSEKVSKRVSAVEEVRSHVKVLQEMLSMYRRPGQAPPDQEALQVVYERCEKLRPTLFRLASDTTDDDDALAEILQANDLLTQGVLLYKQVMEGRVTFGNRVTSSLGDIPVSRVFQNPAGCMKTCPLIDLEVDNGPAQMGTVVPSLLHQDLAALGISDAPVTGMVSGQNCCEEKRNPSSSTLPGGGVQNPSADRNLLDLLSPQPAPCPLNYVSQKSVPKEVPPGTKSSPGWSWEAGPLAPSPSSQNTPLAQVFVPLESVKPSSLPPLIVYDRNGFRILLHFSQTGAPGHPEVQVLLLTMMSTAPQPVWDIMFQVAVPKSMRVKLQPASSSKLPAFSPLMPPAVISQMLLLDNPHKEPIRLRYKLTFNQGGQPFSEVGEVKDFPDLAVLGAA

SEQ ID NO: 840152 - protein, 613 aa, Homo sapiens; identical to SEQ ID NO: 840151

SEQ ID NO: 840153 - protein, 613 aa, Homo sapiens; identical to SEQ ID NO: 840151

SEQ ID NO: 840154 - protein, 613 aa, Homo sapiens; identical to SEQ ID NO: 840151

SEQ ID NO: 840155 - protein, 613 aa, Homo sapiens; identical to SEQ ID NO: 840151

SEQ ID NO: 840156 - protein, 613 aa, Homo sapiens; identical to SEQ ID NO: 840151

SEQ ID NO: 840157 - protein, 613 aa, Homo sapiens; identical to SEQ ID NO: 840151

SEQ ID NO: 840158 - protein, 54 aa, Homo sapiens
MRFGQGRHPNYIISSVWKTVVVSMWMLKVADADLLLSGLAVVHYAPSSGSIAVL

SEQ ID NO: 840159 - protein, 112 aa, Homo sapiens
PGGEYRLLDSSILTQGRRSHRFYIFHGEVIFLWICGRDPRAWLKNDVGRWPSKRAPKAGISSTKPATLVGFCLRLHQHGSWPPPVWPPVGTKVPMPFSLKQTGGSGQSSGSP

SEQ ID NO: 840160 - protein, 69 aa, Homo sapiens
GWEAVEAIPNSPNPLQREGRNVGGDSRWGSRMQPAHHSQEERRGHRVKGLFLRSKGSSPSSQADAHSAA

SEQ ID NO: 840161 - protein, 2596 aa, Homo sapiens
MDQTCELPRRNCLLPFSNPVNLDAPEDKDSPFGNGQSNFSEPLNGCTMQLSTVSGTSQNAYGQDSPSCYIPLRRLQDLASMINVEYLNGSADGSESFQDPEKSDSRAQTPIVCTSLSPGGPTALAMKQEPSCNNSPELQVKVTKTIKNGFLHFENFTCVDDADVDSEMDPEQPVTEDESIEEIFEETQTNATCNYETKSENGVKVAMGSEQDSTPESRHGAVKSPFLPLAPQTETQKNKQRNEVDGSNEKAALLPAPFSLGDTNITIEEQLNSINLSFQDDPDSSTSTLGNMLELPGTSSSSTSQELPFVPQKILSKWEASVGLAEQYDVPKGSKNRKCIPGSIKLDSEEDMPFEDCTNDPESEHDLLLNGCLKSLAFDSEHSADEKEKPCAKSRARKSSDNPKRTSVKKGHIQFEAHKDERRGKIPENLGLNFISGDISDTQASNELSRIANSLTGSNTAPGSFLFSSCGKNTAKKEFETSNGDSLLGLPEGALISKCSREKNKPQRSLVCGSKVKLCYIGAGDEEKRSDSISICTTSDDGSSDLDPIEHSSESDNSVLEIPDAFDRTENMLSMQKNEKIKYSRFAATNTRVKAKQKPLISNSHTDHLMGCTKSAEPGTETSQVNLSDLKASTLVHKPQSDFTNDALSPKFNLSSSISSENSLIKGGAANQALLHSKSKQPKFRSIKCKHKENPVMAEPPVINEECSLKCCSSDTKGSPLASISKSGKVDGLKLLNNMHEKTRDSSDIETAVVKHVLSELKELSYRSLGEDVSDSGTSKPSKPLLFSSASSQNHIPIEPDYKFSTLLMMLKDMHDSKTKEQRLMTAQNLVSYRSPGRGDCSTNSPVGVSKVLVSGGSTHNSEKKGDGTQNSANPSPSGGDSALSGELSASLPGLLSDKRDLPASGKSRSDCVTRRNCGRSKPSSKLRDAFSAQMVKNTVNRKALKTERKRKLNQLPSVTLDAVLQGDRERGGSLRGGAEDPSKEDPLQIMGHLTSEDGDHFSDVHFDSKVKQSDPGKISEKGLSFENGKGPELDSVMNSENDELNGVNQVVPKKRWQRLNQRRTKPRKRMNRFKEKENSECAFRVLLPSDPVQEGRDEFPEHRTPSASILEEPLTEQNHADCLDSAGPRLNVCDKSSASIGDMEKEPGIPSLTPQAELPEPAVRSEKKRLRKPSKWLLEYTEEYDQIFAPKKKQKKVQEQVHKVSSRCEEESLLARGRSSAQNKQVDENSLISTKEEPPVLEREAPFLEGPLAQSELGGGHAELPQLTLSVPVAPEVSPRPALESEELLVKTPGNYESKRQRKPTKKLLESNDLDPGFMPKKGDLGLSKKCYEAGHLENGITESCATSYSKDFGGGTTKIFDKPRKRKRQRHAAAKMQCKKVKNDDSSKEIPGSEGELMPHRTATSPKETVEEGVEHDPGMPASKKMQGERGGGAALKENVCQNCEKLGELLLCEAQCCGAFHLECLGLTEMPRGKFICNECRTGIHTCFVCKQSGEDVKRCLLPLCGKFYHEECVQKYPPTVMQNKGFRCSLHICITCHAANPANVSASKGRLMRCVRCPVAYHANDFCLAAGSKILASNSIICPNHFTPRRGCRNHEHVNVSWCFVCSEGGSLLCCDSCPAAFHRECLNIDIPEGNWYCNDCKAGKKPHYREIVWVKVGRYRWWPAEICHPRAVPSNIDKMRHDVGEFPVLFFGSNDYLWTHQARVFPYMEGDVSSKDKMGKGVDGTYKKALQEAAARFEELKAQKELRQLQEDRKNDKKPPPYKHIKVNRPIGRVQIFTADLSEIPRCNCKATDENPCGIDSECINRMLLYECHPTVCPAGGRCQNQCFSKRQYPEVEIFRTLQRGWGLRTQEDIRKGEFVNEYVGELIDEEECMARIKHAHENDITHFYMLTIDKDRIIDAGPKGNYSRFMNHSCQPNCETLKWTVNGDTRVGLFAVCDIPAGTELTFNYNLDCLGNEKTVCRCGASNCSGFLGVRPKNQPIATEEKSKKFKKKQQGKRRTQGEITKEREDECFSCGDAGQLVSCKKPGCPKVYHADCLNLTKRPAGKWECPWHQCDICGKEAASFCEMCPSSFCKQHREGMLFISKLDGRLSCTEHDPCGPNPLEPGEIREYVPPPVPLPPGPSTHLAEQSTGMAAQAPKMSDKPPADTNQMLSLSKKALAGTCQRPLLPERPLERTDSRPQPLDKVRDLAGSGAQSQSLVSSQRPLDRPPAVAGPRPQLSDKPSPVTSPSSSPSVRSQPLESPLGTADPRLDKSIGAASPRPQSLEKTSVPTGLRLPPPDRLLITSSPKPQTSDRPTDKPHASLSQRLPPPEKVLSAVVQTLVAKEKALRPVDQNTQSKNRAALVMDLIDLTPRQKERAASPHQVTPQADEKMPVLESSSWPASKGLGHMPRAVEKGCVSDPLQTSGKAAAPSEDPWQAVKSLTQARLSSQPSAKAFLYEPTTQASGRASAGAEQTQGFFTKSPALVENKGKTKWVGRPTNYLHLAAKSWQSFRSLGKAPPSSPNEEKKLVTTEQSPWALGKASSRAGLWPIVAGQTLAQSCWSAGSTQTLAQTCWSLGRGQDPKPEQNTLPALNQAPSSHKCAESEQK

SEQ ID NO: 840162 - protein, 1301 aa, Homo sapiens
MDQTCELPRRNCLLPFSNPVNLDAPEDKDSPFGNGQSNFSEPLNGCTMQLSTVSGTSQNAYGQDSPSCYIPLRRLQDLASMINVEYLNGSADGSESFQDPEKSDSRAQTPIVCTSLSPGGPTALAMKQEPSCNNSPELQVKVTKTIKNGFLHFENFTCVDDADVDSEMDPEQPVTEDESIEEIFEETQTNATCNYETKSENGVKVAMGSEQDSTPESRHGAVKSPFLPLAPQTETQKNKQRNEVDGSNEKAALLPAPFSLGDTNITIEEQLNSINLSFQDDPDSSTSTLGNMLELPGTSSSSTSQELPFCQPKKKSTPLKYEVGDLIWAKFKRRPWWPCRICSDPLINTHSKMKVSNRRPYRQYYVEAFGDPSERAWVAGKAIVMFEGRHQFEELPVLRRRGKQKEKGYRHKVPQKILSKWEASVGLAEQYDVPKGSKNRKCIPGSIKLDSEEDMPFEDCTNDPESEHDLLLNGCLKSLAFDSEHSADEKEKPCAKSRARKSSDNPKRTSVKKGHIQFEAHKDERRGKIPENLGLNFISGDISDTQASNELSRIANSLTGSNTAPGSFLFSSCGKNTAKKEFETSNGDSLLGLPEGALISKCSREKNKPQRSLVCGSKVKLCYIGAGDEEKRSDSISICTTSDDGSSDLDPIEHSSESDNSVLEIPDAFDRTENMLSMQKNEKIKYSRFAATNTRVKAKQKPLISNSHTDHLMGCTKSAEPGTETSQVNLSDLKASTLVHKPQSDFTNDALSPKFNLSSSISSENSLIKGGAANQALLHSKSKQPKFRSIKCKHKENPVMAEPPVINEECSLKCCSSDTKGSPLASISKSGKVDGLKLLNNMHEKTRDSSDIETAVVKHVLSELKELSYRSLGEDVSDSGTSKPSKPLLFSSASSQNHIPIEPDYKFSTLLMMLKDMHDSKTKEQRLMTAQNLVSYRSPGRGDCSTNSPVGVSKVLVSGGSTHNSEKKGDGTQNSANPSPSGGDSALSGELSASLPGLLSDKRDLPASGKSRSDCVTRRNCGRSKPSSKLRDAFSAQMVKNTVNRKALKTERKRKLNQLPSVTLDAVLQGDRERGGSLRGGAEDPSKEDPLQIMGHLTSEDGDHFSDVHFDSKVKQSDPGKISEKGLSFENGKGPELDSVMNSENDELNGVNQVVPKKRWQRLNQRRTKPRKRMNRFKEKENSECAFRVLLPSDPVQEGRDEFPEHRTPSASILEEPLTEQNHADCLDSAGPRLNVCDKSSASIGDMEKEPGIPSLTPQAELPEPGGVLLCHPGWSAVARSRLTATSASQVQVILLSHPPE

SEQ ID NO: 840163 - protein, 1172 aa, Homo sapiens
MPLKTRTALSDDPDSSTSTLGNMLELPGTSSSSTSQELPFCQPKKKSTPLKYEVGDLIWAKFKRRPWWPCRICSDPLINTHSKMKVSNRRPYRQYYVEAFGDPSERAWVAGKAIVMFEGRHQFEELPVLRRRGKQKEKGYRHKVPQKILSKWEASVGLAEQYDVPKGSKNRKCIPGSIKLDSEEDMPFEDCTNDPESEHDLLLNGCLKSLAFDSEHSADEKEKPCAKSRARKSSDNPKRTSVKKGHIQFEAHKDERRGKIPENLGLNFISGDISDTQASNELSRIANSLTGSNTAPGSFLFSSCGKNTAKKEFETSNGDSLLGLPEGALISKCSREKNKPQRSLVCGSKVKLCYIGAGDEEKRSDSISICTTSDDGSSDLDPIEHSSESDNSVLEIPDAFDRTENMLSMQKNEKIKYSRFAATNTRVKAKQKPLISNSHTDHLMGCTKSAEPGTETSQVNLSDLKASTLVHKPQSDFTNDALSPKFNLSSSISSENSLIKGGAANQALLHSKSKQPKFRSIKCKHKENPVMAEPPVINEECSLKCCSSDTKGSPLASISKSGKVDGLKLLNNMHEKTRDSSDIETAVVKHVLSELKELSYRSLGEDVSDSGTSKPSKPLLFSSASSQNHIPIEPDYKFSTLLMMLKDMHDSKTKEQRLMTAQNLVSYRSPGRGDCSTNSPVGVSKVLVSGGSTHNSEKKGDGTQNSANPSPSGGDSALSGELSASLPGLLSDKRDLPASGKSRSDCVTRRNCGRSKPSSKLRDAFSAQMVKNTVNRKALKTERKRKLNQLPSVTLDAVLQGDRERGGSLRGGAEDPSKEDPLQIMGHLTSEDGDHFSDVHFDSKVKQSDPGKISEKGLSFENGKGPELDSVMNSENDELNGVNQVVPKKRWQRLNQRRTKPRKRMNRFKEKENSECAFRVLLPSDPVQEGRDEFPEHRTPSASILEEPLTEQNHADCLDSAGPRLNVCDKSSASIGDMEKEPGIPSLTPQAELPEPAVRSEKKRLRKPSKWLLEYTEEYDQIFAPKKKQKKVQEQVHKVSSRCEEESLLARGRSSAQNKQVDENSLISTKEEPPVLEREAPFLEGPLAQSELGGGHAELPQLTLSVPVAPEVSPRPALESEELLVKTPGNYESKRQRKPTKKLLESNDLDPGFMPKKGDLGLSKKVCYFCKF

SEQ ID NO: 840164 - protein, 1573 aa, Homo sapiens
MDQTCELPRRNCLLPFSNPVNLDAPEDKDSPFGNGQSNFSEPLNGCTMQLSTVSGTSQNAYGQDSPSCYIPLRRLQDLASMINVEYLNGSADGSESFQDPEKSDSRAQTPIVCTSLSPGGPTALAMKQEPSCNNSPELQVKVTKTIKNGFLHFENFTCVDDADVDSEMDPEQPVTEDESIEEIFEETQTNATCNYETKSENGVKVAMGSEQDSTPESRHGAVKSPFLPLAPQTETQKNKQRNEVDGSNEKAALLPAPFSLGDTNITIEEQLNSINLSFQDDPDSSTSTLGNMLELPGTSSSSTSQELPFCQPKKKSTPLKYEVGDLIWAKFKRRPWWPCRICSDPLINTHSKMKVSNRRPYRQYYVEAFGDPSERAWVAGKAIVMFEGRHQFEELPVLRRRGKQKEKGYRHKVPQKILSKWEASVGLAEQYDVPKGSKNRKCIPGSIKLDSEEDMPFEDCTNDPESEHDLLLNGCLKSLAFDSEHSADEKEKPCAKSRARKSSDNPKRTSVKKGHIQFEAHKDERRGKIPENLGLNFISGDISDTQASNELSRIANSLTGSNTAPGSFLFSSCGKNTAKKEFETSNGDSLLGLPEGALISKCSREKNKPQRSLVCGSKVKLCYIGAGDEEKRSDSISICTTSDDGSSDLDPIEHSSESDNSVLEIPDAFDRTENMLSMQKNEKIKYSRFAATNTRVKAKQKPLISNSHTDHLMGCTKSAEPGTETSQVNLSDLKASTLVHKPQSDFTNDALSPKFNLSSSISSENSLIKGGAANQALLHSKSKQPKFRSIKCKHKENPVMAEPPVINEECSLKCCSSDTKGSPLASISKSGKVDGLKLLNNMHEKTRDSSDIETAVVKHVLSELKELSYRSLGEDVSDSGTSKPSKPLLFSSASSQNHIPIEPDYKFSTLLMMLKDMHDSKTKEQRLMTAQNLVSYRSPGRGDCSTNSPVGVSKVLVSGGSTHNSEKKGDGTQNSANPSPSGGDSALSGELSASLPGLLSDKRDLPASGKSRSDCVTRRNCGRSKPSSKLRDAFSAQMVKNTVNRKALKTERKRKLNQLPSVTLDAVLQGDRERGGSLRGGAEDPSKEDPLQIMGHLTSEDGDHFSDVHFDSKVKQSDPGKISEKGLSFENGKGPELDSVMNSENDELNGVNQVVPKKRWQRLNQRRTKPRKRMNRFKEKENSECAFRVLLPSDPVQEGRDEFPEHRTPSASILEEPLTEQNHADCLDSAGPRLNVCDKSSASIGDMEKEPGIPSLTPQAELPEPAVRSEKKRLRKPSKWLLEYTEEYDQIFAPKKKQKKVQEQVHKVSSRCEEESLLARGRSSAQNKQVDENSLISTKEEPPVLEREAPFLEGPLAQSELGGGHAELPQLTLSVPVAPEVSPRPALESEELLVKTPGNYESKRQRKPTKKLLESNDLDPGFMPKKGDLGLSKKCYEAGHLENGITESCATSYSKDFGGGTTKIFDKPRKRKRQRHAAAKMQCKKVKNDDSSKEIPGSEGELMPHRTATSPKETVEEGVEHDPGMPASKKMQGERGGGAALKENVCQNCEKLGELLLCEAQCCGAFLLLLVQL

SEQ ID NO: 840165 - protein, 1112 aa, Homo sapiens
SAHCNPRLLSSSDSHASASQVAWITVSNRRPYRQYYVEAFGDPSERAWVAGKAIVMFEGRHQFEELPVLRRRGKQKEKGYRHKVPQKILSKWEASVGLAEQYDVPKGSKNRKCIPGSIKLDSEEDMPFEDCTNDPESEHDLLLNGCLKSLAFDSEHSADEKEKPCAKSRARKSSDNPKRTSVKKGHIQFEAHKDERRGKIPENLGLNFISGDISDTQASNELSRIANSLTGSNTAPGSFLFSSCGKNTAKKEFETSNGDSLLGLPEGALISKCSREKNKPQRSLVCGSKVKLCYIGAGDEEKRSDSISICTTSDDGSSDLDPIEHSSESDNSVLEIPDAFDRTENMLSMQKNEKIKYSRFAATNTRVKAKQKPLISNSHTDHLMGCTKSAEPGTETSQVNLSDLKASTLVHKPQSDFTNDALSPKFNLSSSISSENSLIKGGAANQALLHSKSKQPKFRSIKCKHKENPVMAEPPVINEECSLKCCSSDTKGSPLASISKSGKVDGLKLLNNMHEKTRDSSDIETAVVKHVLSELKELSYRSLGEDVSDSGTSKPSKPLLFSSASSQNHIPIEPDYKFSTLLMMLKDMHDSKTKEQRLMTAQNLVSYRSPGRGDCSTNSPVGVSKVLVSGGSTHNSEKKGDGTQNSANPSPSGGDSALSGELSASLPGLLSDKRDLPASGKSRSDCVTRRNCGRSKPSSKLRDAFSAQMVKNTVNRKALKTERKRKLNQLPSVTLDAVLQGDRERGGSLRGGAEDPSKEDPLQIMGHLTSEDGDHFSDVHFDSKVKQSDPGKISEKGLSFENGKGPELDSVMNSENDELNGVNQVVPKKRWQRLNQRRTKPRKRMNRFKEKENSECAFRVLLPSDPVQEGRDEFPEHRTPSASILEEPLTEQNHADCLDSAGPRLNVCDKSSASIGDMEKEPGIPSLTPQAELPEPAVRSEKKRLRKPSKWLLEYTEEYDQIFAPKKKQKKVQEQVHKVSSRCEEESLLARGRSSAQNKQVDENSLISTKEEPPVLEREAPFLEGPLAQSELGGGHAELPQLTLSVPVAPEVSPRPALESEELLVKTPGNYESKRQRKPTKKLLESNDLDPGFMPKKGDLGLSKKVCYFCKF

SEQ ID NO: 840166 - protein, 336 aa, Homo sapiens
MDQTCELPRRNCLLPFSNPVNLDAPEDKDSPFGNGQSNFSEPLNGCTMQLSTVSGTSQNAYGQDSPSCYIPLRRLQDLASMINVEYLNGSADGSESFQDPEKSDSRAQTPIVCTSLSPGGPTALAMKQEPSCNNSPELQVKVTKTIKNGFLHFENFTCVDDADVDSEMDPEQPVTEDESIEEIFEETQTNATCNYETKSENGVKVAMGSEQDSTPESRHGAVKSPFLPLAPQTETQKNKQRNEVDGSNEKAALLPAPFSLGDTNITIEEQLNSINLSFQDDPDSSTSTLGNMLELPGTSSSSTSQELPFRLALSCCPGWRRDSWAHSILLHQLELQ

SEQ ID NO: 840167 - protein, 237 aa, Homo sapiens
MDQTCELPRRNCLLPFSNPVNLDAPEDKDSPFGNGQSNFSEPLNGCTMQLSTVSGTSQNAYGQDSPSCYIPLRRLQDLASMINVEYLNGSADGSESFQDPEKSDSRAQTPIVCTSLSPGGPTALAMKQEPSCNNSPELQVKVTKTIKNGFLHFENFTCVDDADVDSEMDPEQPVTEDESIEEIFEETQTNATCNYETKSENGVKVAMGSEQDSTPESRHGAVKSPFLPLAPQTETQS

SEQ ID NO: 840168 - protein, 1441 aa, Homo sapiens
MDQTCELPRRNCLLPFSNPVNLDAPEDKDSPFGNGQSNFSEPLNGCTMQLSTVSGTSQNAYGQDSPSCYIPLRRLQDLASMINVEYLNGSADGSESFQDPEKSDSRAQTPIVCTSLSPGGPTALAMKQEPSCNNSPELQVKVTKTIKNGFLHFENFTCVDDADVDSEMDPEQPVTEDESIEEIFEETQTNATCNYETKSENGVKVAMGSEQDSTPESRHGAVKSPFLPLAPQTETQKNKQRNEVDGSNEKAALLPAPFSLGDTNITIEEQLNSINLSFQDDPDSSTSTLGNMLELPGTSSSSTSQELPFCQPKKKSTPLKYEVGDLIWAKFKRRPWWPCRICSDPLINTHSKMKVSNRRPYRQYYVEAFGDPSERAWVAGKAIVMFEGRHQFEELPVLRRRGKQKEKGYRHKVPQKILSKWEASVGLAEQYDVPKGSKNRKCIPGSIKLDSEEDMPFEDCTNDPESEHDLLLNGCLKSLAFDSEHSADEKEKPCAKSRARKSSDNPKRTSVKKGHIQFEAHKDERRGKIPENLGLNFISGDISDTQASNELSRIANSLTGSNTAPGSFLFSSCGKNTAKKEFETSNGDSLLGLPEGALISKCSREKNKPQRSLVCGSKVKLCYIGAGDEEKRSDSISICTTSDDGSSDLDPIEHSSESDNSVLEIPDAFDRTENMLSMQKNEKIKYSRFAATNTRVKAKQKPLISNSHTDHLMGCTKSAEPGTETSQVNLSDLKASTLVHKPQSDFTNDALSPKFNLSSSISSENSLIKGGAANQALLHSKSKQPKFRSIKCKHKENPVMAEPPVINEECSLKCCSSDTKGSPLASISKSGKVDGLKLLNNMHEKTRDSSDIETAVVKHVLSELKELSYRSLGEDVSDSGTSKPSKPLLFSSASSQNHIPIEPDYKFSTLLMMLKDMHDSKTKEQRLMTAQNLVSYRSPGRGDCSTNSPVGVSKVLVSGGSTHNSEKKGDGTQNSANPSPSGGDSALSGELSASLPGLLSDKRDLPASGKSRSDCVTRRNCGRSKPSSKLRDAFSAQMVKNTVNRKALKTERKRKLNQLPSVTLDAVLQGDRERGGSLRGGAEDPSKEDPLQIMGHLTSEDGDHFSDVHFDSKVKQSDPGKISEKGLSFENGKGPELDSVMNSENDELNGVNQVVPKKRWQRLNQRRTKPRKRMNRFKEKENSECAFRVLLPSDPVQEGRDEFPEHRTPSASILEEPLTEQNHADCLDSAGPRLNVCDKSSASIGDMEKEPGIPSLTPQAELPEPAVRSEKKRLRKPSKWLLEYTEEYDQIFAPKKKQKKVQEQVHKVSSRCEEESLLARGRSSAQNKQVDENSLISTKEEPPVLEREAPFLEGPLAQSELGGGHAELPQLTLSVPVAPEVSPRPALESEELLVKTPGNYESKRQRKPTKKLLESNDLDPGFMPKKGDLGLSKKVCYFCKF

SEQ ID NO: 840169 - protein, 1463 aa, Homo sapiens
MDQTCELPRRNCLLPFSNPVNLDAPEDKDSPFGNGQSNFSEPLNGCTMQLSTVSGTSQNAYGQDSPSCYIPLRRLQDLASMINVEYLNGSADGSESFQDPEKSDSRAQTPIVCTSLSPGGPTALAMKQEPSCNNSPELQVKVTKTIKNGFLHFENFTCVDDADVDSEMDPEQPVTEDESIEEIFEETQTNATCNYETKSENGVKVAMGSEQDSTPESRHGAVKSPFLPLAPQTETQKNKQRNEVDGSNEKAALLPAPFSLGDTNITIEEQLNSINLSFQDDPDSSTSTLGNMLELPGTSSSSTSQELPFCQPKKKSTPLKYEVGDLIWAKFKRRPWWPCRICSDPLINTHSKMKVSNRRPYRQYYVEAFGDPSERAWVAGKAIVMFEGRHQFEELPVLRRRGKQKEKGYRHKVPQKILSKWEASVGLAEQYDVPKGSKNRKCIPGSIKLDSEEDMPFEDCTNDPESEHDLLLNGCLKSLAFDSEHSADEKEKPCAKSRARKSSDNPKRTSVKKGHIQFEAHKDERRGKIPENLGLNFISGDISDTQASNELSRIANSLTGSNTAPGSFLFSSCGKNTAKKEFETSNGDSLLGLPEGALISKCSREKNKPQRSLVCGSKVKLCYIGAGDEEKRSDSISICTTSDDGSSDLDPIEHSSESDNSVLEIPDAFDRTENMLSMQKNEKIKYSRFAATNTRVKAKQKPLISNSHTDHLMGCTKSAEPGTETSQVNLSDLKASTLVHKPQSDFTNDALSPKFNLSSSISSENSLIKGGAANQALLHSKSKQPKFRSIKCKHKENPVMAEPPVINEECSLKCCSSDTKGSPLASISKSGKVDGLKLLNNMHEKTRDSSDIETAVVKHVLSELKELSYRSLGEDVSDSGTSKPSKPLLFSSASSQNHIPIEPDYKFSTLLMMLKDMHDSKTKEQRLMTAQNLVSYRSPGRGDCSTNSPVGVSKVLVSGGSTHNSEKKGDGTQNSANPSPSGGDSALSGELSASLPGLLSDKRDLPASGKSRSDCVTRRNCGRSKPSSKLRDAFSAQMVKNTVNRKALKTERKRKLNQLPSVTLDAVLQGDRERGGSLRGGAEDPSKEDPLQIMGHLTSEDGDHFSDVHFDSKVKQSDPGKISEKGLSFENGKGPELDSVMNSENDELNGVNQVVPKKRWQRLNQRRTKPRKRMNRFKEKENSECAFRVLLPSDPVQEGRDEFPEHRTPSASILEEPLTEQNHADCLDSAGPRLNVCDKSSASIGDMEKEPGIPSLTPQAELPEPAVRSEKKRLRKPSKWLLEYTEEYDQIFAPKKKQKKVQEQVHKVSSRCEEESLLARGRSSAQNKQVDENSLISTKEEPPVLEREAPFLEGPLAQSELGGGHAELPQLTLSVPVAPEVSPRPALESEELLVKTPGNYESKRQRKPTKKLLESNDLDPGFMPKKGDLGLSKKCYEAGHLENGITESCATSYSKDFGGGEYF

SEQ ID NO: 840170 - protein, 987 aa, Homo sapiens
MPFEDCTNDPESEHDLLLNGCLKSLAFDSEHSADEKEKPCAKSRARKSSDNPKRTSVKKGHIQFEAHKDERRGKIPENLGLNFISGDISDTQASNELSRIANSLTGSNTAPGSFLFSSCGKNTAKKEFETSNGDSLLGLPEGALISKCSREKNKPQRSLVCGSKVKLCYIGAGDEEKRSDSISICTTSDDGSSDLDPIEHSSESDNSVLEIPDAFDRTENMLSMQKNEKIKYSRFAATNTRVKAKQKPLISNSHTDHLMGCTKSAEPGTETSQVNLSDLKASTLVHKPQSDFTNDALSPKFNLSSSISSENSLIKGGAANQALLHSKSKQPKFRSIKCKHKENPVMAEPPVINEECSLKCCSSDTKGSPLASISKSGKVDGLKLLNNMHEKTRDSSDIETAVVKHVLSELKELSYRSLGEDVSDSGTSKPSKPLLFSSASSQNHIPIEPDYKFSTLLMMLKDMHDSKTKEQRLMTAQNLVSYRSPGRGDCSTNSPVGVSKVLVSGGSTHNSEKKGDGTQNSANPSPSGGDSALSGELSASLPGLLSDKRDLPASGKSRSDCVTRRNCGRSKPSSKLRDAFSAQMVKNTVNRKALKTERKRKLNQLPSVTLDAVLQGDRERGGSLRGGAEDPSKEDPLQIMGHLTSEDGDHFSDVHFDSKVKQSDPGKISEKGLSFENGKGPELDSVMNSENDELNGVNQVVPKKRWQRLNQRRTKPRKRMNRFKEKENSECAFRVLLPSDPVQEGRDEFPEHRTPSASILEEPLTEQNHADCLDSAGPRLNVCDKSSASIGDMEKEPGIPSLTPQAELPEPAVRSEKKRLRKPSKWLLEYTEEYDQIFAPKKKQKKVQEQVHKVSSRCEEESLLARGRSSAQNKQVDENSLISTKEEPPVLEREAPFLEGPLAQSELGGGHAELPQLTLSVPVAPEVSPRPALESEELLVKTPGNYESKRQRKPTKKLLESNDLDPGFMPKKGDLGLSKKVCYFCKF

SEQ ID NO: 840171 - protein, 328 aa, Homo sapiens
MDQTCELPRRNCLLPFSNPVNLDAPEDKDSPFGNGQSNFSEPLNGCTMQLSTVSGTSQNAYGQDSPSCYIPLRRLQDLASMINVEYLNGSADGSESFQDPEKSDSRAQTPIVCTSLSPGGPTALAMKQEPSCNNSPELQVKVTKTIKNGFLHFENFTCVDDADVDSEMDPEQPVTEDESIEEIFEETQTNATCNYETKSENGVKVAMGSEQDSTPESRHGAVKSPFLPLAPQTETQKNKQRNEVDGSNEKAALLPAPFSLGDTNITIEEQLNSINLSFQDDPDSSTSTLGNMLELPGTSSSSTSQELPFVSSFWYNLNIYIYVYIQAT

SEQ ID NO: 840172 - protein, 189 aa, Homo sapiens [sequence omitted]

SEQ ID NO: 840173 - protein, 389 aa, Homo sapiens
MEVTTRLTWNDENHLRKLLGNVSLSLLYKSSVHGGSIEDMVERCSRQGCTITMAYIDYNMIVAFMLGNYINLRESSTEPNDSLWFSLQKKNDTTEIETLLLNTAPKIIDEQLVCRLSKTDIFIICRDNKIYLDKMITRNLKLRFYGHRQYLECEVFRVEGIKDNLDDIKRIIKAREHRNRLLADIRDYRPYADLVSEIRILLVGPVGSGKSSFFNSVKSIFHGHVTGQAVVGSDITSITERYRIYSVKDGKNGKSLPFMLCDTMGLDGAEGAGLCMDDIPHILKGCMPDRYQFNSRKPITPEHSTFITSPSLKDRIHCVAYVLDINSIDNLYSKMLAKVKQVHKEVLNCGIAYVALLTKVDDCSEVLQDNFLNMSRSMTSQSRIWNWTP

SEQ ID NO: 840174 - protein, 194 aa, Homo sapiens
MLCDTMGLDGAEGAGLCMDDIPHILKGCMPDRYQFNSRKPITPEHSTFITSPSLKDRIHCVAYVLDINSIDNLYSKMLAKVKQVHKEVLNCGIAYVALLTKVDDCSEVLQDNFLNMSRSMTSQSRVMNVHKMLGIPISNILMVGNYASDLELDPMKDILILSALRQMLRAADDFLEDLPLEETGAIERALQPCI

SEQ ID NO: 840175 - protein, 436 aa, Homo sapiens
MEVTTRLTWNDENHLRKLLGNVSLSLLYKSSVHGGSIEDMVERCSRQGCTITMAYIDYNMIVAFMLGNYINLRESSTEPNDSLWFSLQKKNDTTEIETLLLNTAPKIIDEQLVCRLSKTDIFIICRDNKIYLDKMITRNLKLRFYGHRQYLECEVFRVEGIKDNLDDIKRIIKAREHRNRLLADIRDYRPYADLVSEIRILLVGPVGSGKSSFFNSVKSIFHGHVTGQAVVGSDITSITERYRIYSVKDGKNGKSLPFMLCDTMGLDGAEGAGLCMDDIPHILKGCMPDRYQFNSRKPITPEHSTFITSPSLKDRIHCVAYVLDINSIDNLYSKMLAKVKQVHKEVLNCGIAYVALLTKVDDCSEVLQDNFLNMSRSMTSQSRVMNVHKMLGIPISNILMVGNYASGFCFCSFCLLSLEQSYLKFKGQNLRSGGLR

SEQ ID NO: 840176 - protein, 90 aa, Homo sapiens
WQDTSAGWAKGQNQGNLSQSRVMNVHKMLGIPISNILMVGNYASDLELDPMKDILILSALRQMLRAADDFLEDLPLEETGAIERALQPCI

SEQ ID NO: 840177 - protein, 429 aa, Homo sapiens
MEVTTRLTWNDENHLRKLLGNVSLSLLYKSSVHGGSIEDMVERCSRQGCTITMAYIDYNMIVAFMLGNYINLRESSTEPNDSLWFSLQKKNDTTEIETLLLNTAPKIIDEQLVCRLSKTDIFIICRDNKIYLDKMITRNLKLRFYGHRQYLECEVFRVEGIKDNLDDIKRIIKAREHRNRLLADIRDYRPYADLVSEIRILLVGPVGSGKSSFFNSVKSIFHGHVTGQAVVGSDITSITERYRIYSVKDGKNGKSLPFMLCDTMGLDGAEGAGLCMDDIPHILKGCMPDRYQDRIHCVAYVLDINSIDNLYSKMLAKVKQVHKEVLNCGIAYVALLTKVDDCSEVLQDNFLNMSRSMTSQSRVMNVHKMLGIPISNILMVGNYASDLELDPMKDILILSALRQMLRAADDFLEDLPLEETGAIERALLA

SEQ ID NO: 840178 - protein, 255 aa, Homo sapiens
MEVTTRLTWNDENHLRKLLGNVSLSLLYKSSVHGGSIEDMVERCSRQGCTITMAYIDYNMIVAFMLGNYINLRESSTEPNDSLWFSLQKKNDTTEIETLLLNTAPKIIDEQLVCRLSKTDIFIICRDNKIYLDKMITRNLKLRFYGHRQYLECEVFRVEGIKDNLDDIKRIIKAREHRNRLLADIRDYRPYADLVSEIRILLVGPVGSGKSSFFNSVKSIFHGHVTGQAVVGSDITSITERGNPNIQLNAKSNGK

SEQ ID NO: 840179 - protein, 452 aa, Homo sapiens [sequence omitted]

SEQ ID NO: 840180 - protein, 452 aa, Homo sapiens [sequence omitted]

SEQ ID NO: 840181 - protein, 450 aa, Homo sapiens
MEVTTRLTWNDENHLRKLLGNVSLSLLYKSSVHGGSIEDMVERCSRQGCTITMAYIDYNMIVAFMLGNYINLRESSTEPNDSLWFSLQKKNDTTEIETLLLNTAPKIIDEQLVCRLSKTDIFIICRDNKIYLDKMITRNLKLRFYGHRQYLECEVFRVEGIKDNLDDIKRIIKAREHRNRLLADIRDYRPYADLVSEIRILLVGPVGSGKSSFFNSVKSIFHGHVTGQAVVGSDITSITERYRIYSVKDGKNGKSLPFMLCDTMGLDGAEGAGLCMDDIPHILKGCMPDRYQFNSRKPITPEHSTFITSPSLKDRIHCVAYVLDINSIDNLYSKMLAKVKQVHKEVLNCGIAYVALLTKVDDCSEVLQDNFLNMSRSMTSQSRVMNVHKMLGIPISNILMVGNYASDLELDPMKDILILSALRQMLRAADDFLEDLPLEETGAIERALLA

SEQ ID NO: 840182 - protein, 255 aa, Homo sapiens
MEVTTRLTWNDENHLRKLLGNVSLSLLYKSSVHGGSIEDMVERCSRQGCTITMAYIDYNMIVAFMLGNYINLRESSTEPNDSLWFSLQKKNDTTEIETLLLNTAPKIIDEQLVCRLSKTDIFIICRDNKIYLDKMITRNLKLRFYGHRQYLECEVFRVEGIKDNLDDIKRIIKAREHRNRLLADIRDYRPYADLVSEIRILLVGPVGSGKSSFFNSVKSIFHGHVTGQAVVGSDITSITERITISHRLFSPFWFE

SEQ ID NO: 840183 - protein, 478 aa, Homo sapiens
MLDMGDRKEVKMIPKSSFSINSLVPEGLQNDNHHASHGHHNSHHPQHHHHHHHHHHHPPPPAPQPPPPPQQQQPPPPPPPPLAPQTRGAAPPTDDKGPQLLLLPAAPATTGRRPELKRRRRPAGGAGARRAGREGEGRRRRGGGEEGAGEGGKDGEGGKEGEKKNGKYEKPPFSYNALIMMAIRQSPEKRLTLNGIYEFIMKNFPYYRENKQGWQNSIRHNLSLNKCFVKVPRHYDDPGKGNYWMLDPSSDDVFIGGTTGKLRRRSTTSRAKLAFKRGARLTSTGLTFMDRAGSLYWPMSPFLSLHHPRASSTLSYNGTTSAYPSHPMPYSSVLTQNSLGNNHSFSTANGLSVDRLVNGEIPYATHHLTAAALAASVPCGLSVPCSGTYSLNPCSVNLLAGQTSYFFPHVPHPSMTSQSSTSMSARAASSSTSPQAPSTLPCESLRPSLPSFTTGLSGGLSDYFTHQNQGSSSNPLIH

SEQ ID NO: 840184 - protein, 478 aa, Homo sapiens
MLDMGDRKEVKMIPKSSFSINSLVPEGLQNDNHHASHGHHNSHHPQHHHHHHHHHHHPPPPAPQPPPPPQQQQPPPPPRRGAPRRRPTKRAPSCFCSPPHRHHRPPPGAKAEGWRQGRAGGRPGELAPVGPDEKEKGAGAGGEEKKGAGEGGKDGEGGKEGEKKNGKYEKPPFSYNALIMMAIRQSPEKRLTLNGIYEFIMKNFPYYRENKQGWQNSIRHNLSLNKCFVKVPRHYDDPGKGNYWMLDPSSDDVFIGGTTGKLRRRSTTSRAKLAFKRGARLTSTGLTFMDRAGSLYWPMSPFLSLHHPRASSTLSYNGTTSAYPSHPMPYSSVLTQNSLGNNHSFSTANGLSVDRLVNGEIPYATHHLTAAALAASVPCGLSVPCSGTYSLNPCSVNLLAGQTSYFFPHVPHPSMTSQSSTSMSARAASSSTSPQAPSTLPCESLRPSLPSFTTGLSGGLSDYFTHQNQGSSSNPLIH

SEQ ID NO: 840185 - protein, 478 aa, Homo sapiens; identical to SEQ ID NO: 840184

SEQ ID NO: 840186 - protein, 322 aa, Homo sapiens
  misc_feature (4)..(4): Xaa can be any naturally occurring amino acid
  misc_feature (44)..(44): Xaa can be any naturally occurring amino acid
YTRXRHHDWPIRAAARRVMPAPRLKRTFLRRSLSERHVRRYRTXQRHPKTTEAGATNTSPVADHNLSLNKCFVKVPRHYDDPGKGNYWMLDPSSDDVFIGGTTGKLRRRSTTSRAKLAFKRGARLTSTGLTFMDRAGSLYWPMSPFLSLHHPRASSTLSYNGTTSAYPSHPMPYSSVLTQNSLGNNHSFSTANGLSVDRLVNGEIPYATHHLTAAALAASVPCGLSVPCSGTYSLNPCSVNLLAGQTSYFFPHVPHPSMTSQSSTSMSARAASSSTSPQAPSTLPCESLRPSLPSFTTGLSGGLSDYFTHQNQGSSSNPLIH

SEQ ID NO: 840187 - protein, 109 aa, Homo sapiens
MIIKKKKKKKKKKLKDVLNENLQRKREGLHSLAFKSYKPEIQNKLLIIKKKAKHKKHKSGTVREKTTIAVTSRGYYGLEDEKGTACTSNKASVKREVWQYIKQGSSRTP

SEQ ID NO: 840188 - protein, 850 aa, Homo sapiens
RPPPAAEGEDDEEEVAAAAQTSGPAHGRSASSLEDADDQEEEMEAMVIGGGCCKEQELTYELQQGYRILGEFLQEKHRGLTAPFLQPLGGVATAEEEVAEGPRSGGRGGRAFPQQPGQGMCLLQMEEKFASGQYGGITEFVADFRLMLETCYRLHGVDHWISKQGQKLEMMLEQKLALLSRHLREKTTIAVTSRGYYGLEDEKGTACTSTRRRSTPRSLAGLTSGVFESIMVQVLRQEEQLRAKEEKRLREQERKEAEEASQKEIEEWERKLLAQAAPTCMETMWEIPAIGHFLCLAQQILNLPEIVFYELERCLLMPQCNAFLSKIMTSLLSPPHRRPTLHRRPTLPYRTWEAALRQKVQQWYTAVGQTENPDNCAEKLGLCPQFFKVLGEVNPLEEKPFHELPFYQKVWLLKGLCDFVYETQKEVQDAVLGQPIHECREVILGYDYLENAYVHFPQFCGADVRIYKQRPFQAPEFPIPPIKIQRVPRIKLEKLKCDYVSTSNGEHRCSRDSLPSSFKKEQENNFDPACCPAKMILDNHDISVEMGVKSNYEIRIRRPCEIKKTDCCKENLEKPRSPGEVTGFGEPLSPGEIRFIENQEKYGEASRIKIEPSPLKENTLKSCQIHVNGSHSDHPEINCHKVVRDILLEQSLQSHKKLKLTKMRAKKKKKKKKKLKDVLNENLQRKREGLHSLAFKSYKPEIQNKLLIIKKKAKHKKHKSGKKSVSKKAITKKRKTVIKSPTVPEFQLICTNLDELRELITKIENELKDLENSRKKSGKWYHRRQAVKELHSTLIRLLNELLPWEPKLMKAFQRNRSRLKKDYDDFRRQPDHDTFNRELWTTDEGEGDLG

SEQ ID NO: 840189 - protein, 98 aa, Homo sapiens
PSPLKENTLKSCQIHVNGSHSDHPEINCHKVVRDILLEQSLQSHKKLKLTKMRAKKKKKKKKKLKDVLNENLQRKREGLHSLAFKSYKPEIQNKLLII

SEQ ID NO: 840190 - protein, 220 aa, Homo sapiens
MRKSKWWQRDGSLQRPLQSGIPTLVVGSLRRSPTMVLRPQQFQFYQPQGIPSSPSAVVVEMGSKPALTGEPALTCISRGSEARIHSAASSLIMEDKEIPIKSEPLPKPPASAPPSILVKPENSRNGIEKQVKTVRFQNYSPPPTKHYTSHPTSGKPEQPATLKASQPEAASLGPEMTVLFAHRSGCHSGQQTDLRRKSALAKATTLVSTASGTQTVFPSK

SEQ ID NO: 840191 - protein, 735 aa, Homo sapiens [sequence omitted]

SEQ ID NO: 840192 - protein, 488 aa, Homo sapiens
MDDLTLLDLLECPVCFEKLDVTAKVLPCQHTFCKPCLQRVFKAHKELRCPECRTPVFSNIEALPANLLLVRLLDGVRSGQSSGRGGSFRRPGTMTLQDGRKSRTNPRRLQASPFRLVPNVRIHMDGVPRAKALCNYRGQNPGDLRFNKGDIILLRRQLDENWYQGEINGISGNFPASSVEVIKQLPQPPPLCRALYNFDLRGKDKSENQDCLTFLKDDIITVISRVDENWAEGKLGDKVGIFPILFVEPNLTARHLLEKNKGRQSSCTKNLSLVSSSSRGNTSTLRRGPGSRRKVPGQFSITTALNTLNRMVHSPSGRHMVEISTPVLISSSNPSVITQPMEKADVPSSCVGQVSTYHPAPVSPGHSTAVVSLPGSQQHLSANMFVALHSYSAHGPDELDLQKGEGVRVLGKCQDGWLRGVSLVTGRVGIFPNNYVIPIFRKTSSFPDSRSPGLYTTWTLSTSSVSAISFSLCKVIILAAKGGFLRGV

SEQ ID NO: 840193 - protein, 565 aa, Homo sapiens [sequence omitted]

SEQ ID NO: 840194 - protein, 307 aa, Homo sapiens
MDDLTLLDLLECPVCFEKLDVTAKVLPCQHTFCKPCLQRVFKAHKELRCPECRTPVFSNIEALPANLLLVRLLDGVRSGQSSGRGGSFRRPGTMTLQDGRKSRTNPRRLQASPFRLVPNVRIHMDGVPRAKALCNYRGQNPGDLRFNKGDIILLRRQLDENWYQGEINGISGNFPASSVEVIKQLPQPPPLCRALYNFDLRGKDKSENQDCLTFLKDDIITVISRVDENWAEGKLGDKVGIFPILFVEPNLTARHLLEKNKGRQSSCTKNLSLVSSSSRGNTSTLYNFDLRRKNKSEQDCSDLSSRS

SEQ ID NO: 840195 - protein, 220 aa, Homo sapiens; identical to SEQ ID NO: 840190

SEQ ID NO: 840196 - protein, 255 aa, Homo sapiens
ENVSAVRLGKRLSILGYQEALLTQPHPTYCQPPLLLISLSYNSPDGSLQRPLQSGIPTLVVGSLRRSPTMVLRPQQFQFYQPQGIPSSPSAVVVEMGSKPALTGEPALTCISRGSEARIHSAASSLIMEDKEIPIKSEPLPKPPASAPPSILVKPENSRNGIEKQVKTVRFQNYSPPPTKHYTSHPTSGKPEQPATLKASQPEAASLGPEMTVLFAHRSGCHSGQQTDLRRKSALAKATTLVSTASGTQTVFPSK

SEQ ID NO: 840197 - protein, 400 aa, Homo sapiens
MDDLTLLDLLECPVCFEKLDVTAKVLPCQHTFCKPCLQRVFKAHKELRCPECRTPVFSNIEALPANLLLVRLLDGVRSGQSSGRGGSFRRPGTMTLQDGRKSRTNPRRLQASPFRLVPNVRIHMDGVPRAKALCNYRGQNPGDLRFNKGDIILLRRQLDENWYQGEINGISGNFPASSVEVIKQLPQPPPLCRALYNFDLRGKDKSENQDCLTFLKDDIITVISRVDENWAEGKLGDKVGIFPILFVEPNLTARHLLEKNKGRQSSCTKNLSLVSSSSRGNTSTLRRGPGSRRKVPGQFSITTALNTLNRMVHSPSGRHMVEISTPVLISSSNPSVITQPMEKADVPSSCVGQVSTYHPAPVSPGHSTAVVSLPGSQQHLSANMICSPALLLRATHHLLT

SEQ ID NO: 840198 - protein, 955 aa, Homo sapiens
ARAGGCSIAEEKSSLLAENQVLMERLNQSDSIEDPNSPAGRRHLQLQTQLEQLQEETFRLEAAKDDYRIRCEELEKEISELRQQNDELTTLADEAQSLKDEIDVLRHSSDKVSKLEGQVSLEFSGRCILGRRAPRLGAARTMGLPALEFSDCCLDSPHFRETLKSHEAELDKTNKFIKELIKDGKSLISALKNLSSAKRKFADSLNEFKFQCIGDAETDDEMCIARSLQEFATVLRNLEDERIRMIENASEVLITPLEKFRKEQIGAAKEAKKKYDKETEKYCGILEKHLNLSSKKKESQLQEADSQVDLVRQHFYEVSLEYVFKVQEVQERKMFEFVEPLLAFLQGLFTFYHHGYELAKDFGDFKTQLTISIQNTRNRFEGTRSEVESLMKKMKENPLEHKTISPYTMEGYLYVQEKRHFGTSWVKHYCTYQRDSKQITMVPFDQKSGGKGGEDESVILKSCTRRKTDSIEKRFCFDVEAVDRPGVITMQALSEEDRRLWMEAMDGREPVYNSNKDSQSEGTAQLDSIGFSIIRKCIHAVETRGINEQGLYRIVGVNSRVQKLLSVLMDPKTASETETDICAEWEIKTITSALKTYLRMLPGPLMMYQFQRSFIKAAKLENQESRVSEIHSLVHRLPEKNRQMLQLLMNHLANVANNHKQNLMTVANLGVVFGPTLLRPQEETVAAIMDIKFQNIVIEILIENHEKIFNTVPDMPLTNAQLHLSRKKSSDSKPPSCSERPLTLFHTVQSTEKQEQRNSIINSSLESVSSNPNSILNSSSSLQPNMNSSDPDLAVVKPTRPNSLPPNPSPTSPLSPSWPMFSAPSSPMPTSSTSSDSSPVRSVAGFVWFSVAAVVLSLARSSLHAVFSLLVNFVPCHPNLHLLFDRPEEAVHEDSSTPFRKAKALYACKAEHDSELSFTAGTVFDNVHPSQEPGWLEGTLNGKTGLIPENYVEFL

SEQ ID NO: 840199 - protein, 312 aa, Homo sapiens
MRLGSEAWVVEKLLSVLMDPKTASETETDICAEWEIKTITSALKTYLRMLPGPLMMYQFQRSFIKAAKLENQESRVSEIHSLVHRLPEKNRQMLQLLMNHLANVANNHKQNLMTVANLGVVFGPTLLRPQEETVAAIMDIKFQNIVIEILIENHEKIFNTVPDMPLTNAQLHLSRKKSSDSKPPSCSERPLTLFHTVQSTEKQEQRNSIINSSLESVSSNPNSILNSSSSLQPNMNSSDPDLAVVKPTRPNSLTPFRKAKALYACKAEHDSELSFTAGTVFDNVHPSQEPGWLEGTLNGKTGLIPENYVEFL

SEQ ID NO: 840200 - protein, 318 aa, Homo sapiens
MHACRLCPVLRFTTSLLKLLCVLMDPKTASETETDICAEWEIKTITSALKTYLRMLPGPLMMYQFQRSFIKAAKLENQESRVSEIHSLVHRLPEKNRQMLQLLMNHLANVANNHKQNLMTVANLGVVFGPTLLRPQEETVAAIMDIKFQNIVIEILIENHEKIFNTVPDMPLTNAQLHLSRKKSSDSKPPSCSERPLTLFHTVQSTEKQEQRNSIINSSLESVSSNPNSILNSSSSLQPNMNSSDPDLAVVKPTRPNSLTPFRKAKALYACKAEHDSELSFTAGTVFDNVHPSQEPGWLEGTLNGKTGLIPENYVEFL

SEQ ID NO: 840201 - protein, 922 aa, Homo sapiens
ARAGGCSIAEEKSSLLAENQVLMERLNQSDSIEDPNSPAGRRHLQLQTQLEQLQEETFRLEAAKDDYRIRCEELEKEISELRQQNDELTTLADEAQSLKDEIDVLRHSSDKVSKLEGQVSLEFSGRCILGRRAPRLGAARTMGLPALEFSDCCLDSPHFRETLKSHEAELDKTNKFIKELIKDGKSLISALKNLSSAKRKFADSLNEFKFQCIGDAETDDEMCIARSLQEFATVLRNLEDERIRMIENASEVLITPLEKFRKEQIGAAKEAKKKYDKETEKYCGILEKHLNLSSKKKESQLQEADSQVDLVRQHFYEVSLEYVFKVQEVQERKMFEFVEPLLAFLQGLFTFYHHGYELAKDFGDFKTQLTISIQNTRNRFEGTRSEVESLMKKMKENPLEHKTISPYTMEGYLYVQEKRHFGTSWVKHYCTYQRDSKQITMVPFDQKSGGKGGEDESVILKSCTRRKTDSIEKRFCFDVEAVDRPGVITMQALSEEDRRLWMEAMDGREPVYNSNKDSQSEGTAQLDSIGFSIIRKCIHAVETRGINEQGLYRIVGVNSRVQKLLSVLMDPKTASETETDICAEWEIKTITSALKTYLRMLPGPLMMYQFQRSFIKAAKLENQESRVSEIHSLVHRLPEKNRQMLQLLMNHLANVANNHKQNLMTVANLGVVFGPTLLRPQEETVAAIMDIKFQNIVIEILIENHEKIFNTVPDMPLTNAQLHLSRKKSSDSKPPSCSERPLTLFHTVQSTEKQEQRNSIINSSLESVSSNPNSILNSSSSLQPNMNSSDPDLAVVKPTRPNSLPPNPSPTSPLSPSWPMFSAPSSPMPTSSTSSDSSPVSTPFRKAKALYACKAEHDSELSFTAGTVFDNESVLQLPQPSSLPHRSSGHLHLSPGHFHWPPDTSSHICSCCHNPLFTEQRE

SEQ ID NO: 840202 - protein, 312 aa, Homo sapiens; identical to SEQ ID NO: 840199

SEQ ID NO: 840203 - protein, 158 aa, Homo sapiens
MFSAPSSPMPTSSTSSDSSPVRSVAGFVWFSVAAVVLSLARSSLHAVFSLLVNFVPCHPNLHLLFDRPEEAVHEDSSTPFRKAKALYACKAEHDSELSFTAGTVFDNESVLQLPQPSSLPHRSSGHLHLSPGHFHWPPDTSSHICSCCHNPLFTEQRE

SEQ ID NO: 840204 - protein, 805 aa, Homo sapiens
ARAGGCSIAEEKSSLLAENQVLMERLNQSDSIEDPNSPAGRRHLQLQTQLEQLQEETFRLEAAKDDYRIRCEELEKEISELRQQNDELTTLADEAQSLKDEIDVLRHSSDKVSKLEGQVSLEFSGRCILGRRAPRLGAARTMGLPALEFSDCCLDSPHFRETLKSHEAELDKTNKFIKELIKDGKSLISALKNLSSAKRKFADSLNEFKFQCIGDAETDDEMCIARSLQEFATVLRNLEDERIRMIENASEVLITPLEKFRKEQIGAAKEAKKKYDKETEKYCGILEKHLNLSSKKKESQLQEADSQVDLVRQHFYEVSLEYVFKVQEVQERKMFEFVEPLLAFLQGLFTFYHHGYELAKDFGDFKTQLTISIQNTRNRFEGTRSEVESLMKKMKENPLEHKTISPYTMEGYLYVQEKRHFGTSWVKHYCTYQRDSKQITMVPFDQKSGGKGGEDESVILKSCTRRKTDSIEKRFCFDVEAVDRPGVITMQALSEEDRRLWMEAMDGREPVYNSNKDSQSEGTAQLDSIGFSIIRKCIHAVETRGINEQGLYRIVGVNSRVQKLLSVLMDPKTASETETDICAEWEIKTITSALKTYLRMLPGPLMMYQFQRSFIKAAKLENQESRVSEIHSLVHRLPEKNRQMLQLLMNHLANVANNHKQNLMTVANLGVVFGPTLLRPQEETVAAIMDIKFQNIVIEILIENHEKIFNTVPDMPLTNAQLHLSRKKSSDSKPPSCSERPLTLFHTVQSTEKQEQRNSIINSSLESVSSNPNSILNSSSSLQPNMNSSDPDLAVVKPTRPNSLL

SEQ ID NO: 840205 - protein, 165 aa, Homo sapiens
MHACRLCPVLRFTTSLLKLLCVLMDPKTASETETDICAEWEIKTITSALKTYLRMLPGPLMMYQFQRSFIKAAKLENQESRVSEIHSLVHRLPEKNRQMLQLLMNHLAKENRYNQKRTSASYHHNIHTCAYVSAISPVRQGNPVLLPKGIPFPGTLEPIDSPLDL

SEQ ID NO: 840206 - protein, 272 aa, Homo sapiens
MRLGSEAWVVEKLLSVLMDPKTASETETDICAEWEIKTITSALKTYLRMLPGPLMMYQFQRSFIKAAKLENQESRVSEIHSLVHRLPEKNRQMLQLLMNHLANVANNHKQNLMTVANLGVVFGPTLLRPQEETVAAIMDIKFQNIVIEILIENHEKIFNTVPDMPLTNAQLHLSRKKSSDSKPPSCSERPLTLFHTVQSTEKQEQRNSIINSSLESVSSNPNSILNSSSSLQPNMNSSDPDLAVVKPTRPNSLTTTPNPMPNTPRKSGTSSM

SEQ ID NO: 840207 - protein, 257 aa, Homo sapiens
MYQFQRSFIKAAKLENQESRVSEIHSLVHRLPEKNRQMLQLLMNHLANVANNHKQNLMTVANLGVVFGPTLLRPQEETVAAIMDIKFQNIVIEILIENHEKIFNTVPDMPLTNAQLHLSRKKSSDSKPPSCSERPLTLFHTVQSTEKQEQRNSIINSSLESVSSNPNSILNSSSSLQPNMNSSDPDLAVVKPTRPNSLTPFRKAKALYACKAEHDSELSFTAGTVFDNVHPSQEPGWLEGTLNGKTGLIPENYVEFL

SEQ ID NO: 840208 - protein, 977 aa, Homo sapiens
ARAGGCSIAEEKSSLLAENQVLMERLNQSDSIEDPNSPAGRRHLQLQTQLEQLQEETFRLEAAKDDYRIRCEELEKEISELRQQNDELTTLADEAQSLKDEIDVLRHSSDKVSKLEGQVSLEFSGRCILGRRAPRLGAARTMGLPALEFSDCCLDSPHFRETLKSHEAELDKTNKFIKELIKDGKSLISALKNLSSAKRKFADSLNEFKFQCIGDAETDDEMCIARSLQEFATVLRNLEDERIRMIENASEVLITPLEKFRKEQIGAAKEAKKKYDKETEKYCGILEKHLNLSSKKKESQLQEADSQVDLVRQHFYEVSLEYVFKVQEVQERKMFEFVEPLLAFLQGLFTFYHHGYELAKDFGDFKTQLTISIQNTRNRFEGTRSEVESLMKKMKENPLEHKTISPYTMEGYLYVQEKRHFGTSWVKHYCTYQRDSKQITMVPFDQKSGGKGGEDESVILKSCTRRKTDSIEKRFCFDVEAVDRPGVITMQALSEEDRRLWMEAMDGREPVYNSNKDSQSEGTAQLDSIGFSIIRKCIHAVETRGINEQGLYRIVGVNSRVQKLLSVLMDPKTASETETDICAEWEIKTITSALKTYLRMLPGPLMMYQFQRSFIKAAKLENQESRVSEIHSLVHRLPEKNRQMLQLLMNHLANVANNHKQNLMTVANLGVVFGPTLLRPQEETVAAIMDIKFQNIVIEILIENHEKIFNTVPDMPLTNAQLHLSRKKSSDSKPPSCSERPLTLFHTVQSTEKQEQRNSIINSSLESVSSNPNSILNSSSSLQPNMNSSDPDLAVVKPTRPNSLPPNPSPTSPLSPSWPMFSAPSSPMPTSSTSSDSSPVRSVAGFVWFSVAAVVLSLARSSLHAVFSLLVNFVPCHPNLHLLFDRPEEAVHEDSSTPFRKAKALYACKAEHDSELSFTAGTVFDNESVLQLPQPSSLPHRSSGHLHLSPGHFHWPPDTSSHICSCCHNPLFTEQRE

SEQ ID NO: 840209 - protein, 896 aa, Homo sapiens
ARAGGCSIAEEKSSLLAENQVLMERLNQSDSIEDPNSPAGRRHLQLQTQLEQLQEETFRLEAAKDDYRIRCEELEKEISELRQQNDELTTLADEAQSLKDEIDVLRHSSDKVSKLEGQVSLEFSGRCILGRRAPRLGAARTMGLPALEFSDCCLDSPHFRETLKSHEAELDKTNKFIKELIKDGKSLISALKNLSSAKRKFADSLNEFKFQCIGDAETDDEMCIARSLQEFATVLRNLEDERIRMIENASEVLITPLEKFRKEQIGAAKEAKKKYDKETEKYCGILEKHLNLSSKKKESQLQEADSQVDLVRQHFYEVSLEYVFKVQEVQERKMFEFVEPLLAFLQGLFTFYHHGYELAKDFGDFKTQLTISIQNTRNRFEGTRSEVESLMKKMKENPLEHKTISPYTMEGYLYVQEKRHFGTSWVKHYCTYQRDSKQITMVPFDQKSGGKGGEDESVILKSCTRRKTDSIEKRFCFDVEAVDRPGVITMQALSEEDRRLWMEAMDGREPVYNSNKDSQSEGTAQLDSIGFSIIRKCIHAVETRGINEQGLYRIVGVNSRVQKLLSVLMDPKTASETETDICAEWEIKTITSALKTYLRMLPGPLMMYQFQRSFIKAAKLENQESRVSEIHSLVHRLPEKNRQMLQLLMNHLANVANNHKQNLMTVANLGVVFGPTLLRPQEETVAAIMDIKFQNIVIEILIENHEKIFNTVPDMPLTNAQLHLSRKKSSDSKPPSCSERPLTLFHTVQSTEKQEQRNSIINSSLESVSSNPNSILNSSSSLQPNMNSSDPDLAVVKPTRPNSLPPNPSPTSPLSPSWPMFSAPSSPMPTSSTSSDSSPVRSVAGFVWFSVAAVVLSLARSSLHAVFSLLVNFVPCHPNLHLLFDRPEEAVHEDSR

SEQ ID NO: 840210 - protein, 828 aa, Homo sapiens
ARAGGCSIAEEKSSLLAENQVLMERLNQSDSIEDPNSPAGRRHLQLQTQLEQLQEETFRLEAAKDDYRIRCEELEKEISELRQQNDELTTLADEAQSLKDEIDVLRHSSDKVSKLEGQVSLEFSGRCILGRRAPRLGAARTMGLPALEFSDCCLDSPHFRETLKSHEAELDKTNKFIKELIKDGKSLISALKNLSSAKRKFADSLNEFKFQCIGDAETDDEMCIARSLQEFATVLRNLEDERIRMIENASEVLITPLEKFRKEQIGAAKEAKKKYDKETEKYCGILEKHLNLSSKKKESQLQEADSQVDLVRQHFYEVSLEYVFKVQEVQERKMFEFVEPLLAFLQGLFTFYHHGYELAKDFGDFKTQLTISIQNTRNRFEGTRSEVESLMKKMKENPLEHKTISPYTMEGYLYVQEKRHFGTSWVKHYCTYQRDSKQITMVPFDQKSGGKGGEDESVILKSCTRRKTDSIEKRFCFDVEAVDRPGVITMQALSEEDRRLWMEAMDGREPVYNSNKDSQSEGTAQLDSIGFSIIRKCIHAVETRGINEQGLYRIVGVNSRVQKLLSVLMDPKTASETETDICAEWEIKTITSALKTYLRMLPGPLMMYQFQRSFIKAAKLENQESRVSEIHSLVHRLPEKNRQMLQLLMNHLANVANNHKQNLMTVANLGVVFGPTLLRPQEETVAAIMDIKFQNIVIEILIENHEKIFNTVPDMPLTNAQLHLSRKKSSDSKPPSCSERPLTLFHTVQSTEKQEQRNSIINSSLESVSSNPNSILNSSSSLQPNMNSSDPDLAVVKPTRPNSLVANNHKQNLMTVANLGVVFGPTLL

SEQ ID NO: 840211 - protein, 159 aa, Homo sapiens
MHACRLCPVLRFTTSLLKLLCVLMDPKTASETETDICAEWEIKTITSALKTYLRMLPGPLMMYQFQRSFIKAAKLENQESRVSEIHSLVHRLPEKNRQMLQLLMNHLAKYAGGLGKKCVKCSLQWRTAANAKMAFPEDAGEVLMQPGHQAEFSGGFYLW

SEQ ID NO: 840212 - protein, 171 aa, Homo sapiens
ARCRRRGVAGLWFRVGPRRSQLSARSRSAPPPRSGPGRRRLQGRSRGHMAEGDAGSDQRQVRPRRGAVSPGSAPARLAMPVLLSRGALRLGPPRVPPALATPFAPPRSIFPALPVGRALLGRRLLGGRGLGLSRTVSSSTINTRLSSSGPKAKTGVSIPTLPPPSHLGQIT

SEQ ID NO: 840213 - protein, 365 aa, Homo sapiens
ARCRRRGVAGLWFRVGPRRSQLSARSRSAPPPRSGPGRRRLQGRSRGHMAEGDAGSDQRQNEEIEAMAAIYGEEWCVIDDCAKIFCIRISDDIDDPKWTLCLQVMLPNEYPGTAPPIYQLNAPWLKGQERADLSNSLEEIYIQNIGESILYLWVEKIRDVLIQKSQMTEPGPDVKKKTEEEDVECEDDLILACQPESSVKALDFDISETRTEVEVEELPPIDHGIPITDRRSTFQAHLAPVVCPKQVKMVLSKLYENKKIASATHNIYAYRIYCEDKQTFLQDCEDDGETAAGGRLLHLMEILNVKNVMVVVSRWYGGILLGPDRFKHINNCARNILVEKNYTNSPEESSKALGKNKKAYLGELI

SEQ ID NO: 840214 - protein, 305 aa, Homo sapiens
ARCRRRGVAGLWFRVGPRRSQLSARSRSAPPPRSGPGRRRLQGRSRGHMAEGDAGSDQRQNEEIEAMAAIYGEEWCVIDDCAKIFCIRISDDIDDPKWTLCLQVMLPNEYPGTAPPIYQLNAPWLKGQERADLSNSLEEIYIQNIGESILYLWVEKIRDVLIQKSQMTEPGPDVKKKTEEEDVECEDDLILACQPESSVKALDFDISETRTEVEVEELPPIDHGIPITDRRSTFQAHLAPVVCPKQVKMVLSKLYENKKIASATHNIYAYRIYCEDKQTFLQDCEDDGETAAGGRLLHLMEVGVS

SEQ ID NO: 840215 - protein, 368 aa, Homo sapiens
ARCRRRGVAGLWFRVGPRRSQLSARSRSAPPPRSGPGRRRLQGRSRGHMAEGDAGSDQRQNEEIEAMAAIYGEEWCVIDDCAKIFCIRISDDIDDPKWTLCLQVMLPNEYPGTAPPIYQLNAPWLKGQERADLSNSLEEIYIQNIGESILYLWVEKIRDVLIQKSQMTEPGPDVKKKTEEEDVECEDDLILACQPESSVKALDFDISETRTEVEVEELPPIDHGIPITDRRSTFQAHLAPVVCPKQVKMVLSKLYENKKIASATHNIYAYRIYCEDKQTFLQDCEDDGETAAGGRLLHLMEILNVKNVMVVVSRWYGGILLGPDRFKHINNCARNILVEKNYTNSPEESSKALGKNKKVRKDKKRNEH

SEQ ID NO: 840216 - protein, 368 aa, Homo sapiens; identical to SEQ ID NO: 840215

SEQ ID NO: 840217 - protein, 368 aa, Homo sapiens; identical to SEQ ID NO: 840215

SEQ ID NO: 840218 - protein, 368 aa, Homo sapiens; identical to SEQ ID NO: 840215

SEQ ID NO: 840219 - protein, 102 aa, Homo sapiens
MGREPRFWLLVFLLFLLSDAGAFPWTVYFPWTLWAWFFHECVTLWSFTRPCWWSRWGPQGSDLTCPFSYLLHSLLSHQHSFLSQKCSFQNADLPMSPNDVTY

SEQ ID NO: 840220 - protein, 104 aa, Homo sapiens [sequence omitted]

SEQ ID NO: 840221 - protein, 375 aa, Homo sapiens
SSLPCPRSSRMGVSFEKQDCFYKSVYEPARLTARLTSRLTARLTSPLPRLTSRLPRLTSRLPRLLATASVPVASRGSPSEHARGAGDQTTGVGVRVAVGVPGPEHEPERESAARTPVATRVPGAARSHQRSAAMEPSSKKLTGRLMLAVGGAVLGSLQFGYNTGVINAPQKVIEEFYNQTWVHRYGESILPTTLTTLWSLSVAIFSVGGMIGSFSVGLFVNRFGRRNSMLMMNLLAFVSAVLMGFSKLGKSFEMLILGRFIIGVYCGLTTGFVPMYVGEVSPTSPSWGPWGTLHQLGIVVGILIAQVFGLDSIMGNKDLWPLLLSIIFIQPVMIGCLCQSPVLYNREDRQSVKLRDCVPAVNGDDIGKAPGGRGH

SEQ ID NO: 840222 - protein, 582 aa, Homo sapiens
ANGRGPINATVRALSGKRQEVATASVPVASRGSPSEHARGAGDQTTGVGVRVAVGVPGPEHEPERESAARTPVATRVPGAARSHQRSAAMEPSSKKLTGRLMLAVGGAVLGSLQFGYNTGVINAPQKVIEEFYNQTWVHRYGESILPTTLTTLWSLSVAIFSVGGMIGSFSVGLFVNRFGRRNSMLMMNLLAFVSAVLMGFSKLGKSFEMLILGRFIIGVYCGLTTGFVPMYVGEVSPTSPSWGPWGTLHQLGIVVGILIAQVFGLDSIMGNKDLWPLLLSIIFIPALLQCIVLPFCPESPRFLLINRNEENRAKSVLKKLRGTADVTHDLQEMKEESRQMMREKKVTILELFRSPAYRQPILIAVVLQLSQQLSGINAVFYYSTSIFEKAGVQQPVYATIGSGIVNTAFTVVSLFVVERAGRRTLHLIGLAGMAGCAILMTIALALLEQLPWMSYLSIVAIFGFVAFFEVGPGPIPWFIVAELFSQGPRPAAIAVAGFSNWTSNFIVGMCFQYVEQLCGPYVFIIFTVLLVLFFIFTYFKVPETKGRTFDEIASGFRQGGASQSDKTPEELFHPLGADSQV

SEQ ID NO: 840223 - protein, 582 aa, Homo sapiens; identical to SEQ ID NO: 840222

SEQ ID NO: 840224 - protein, 582 aa, Homo sapiens; identical to SEQ ID NO: 840222

SEQ ID NO: 840225 - protein, 582 aa, Homo sapiens; identical to SEQ ID NO: 840222

SEQ ID NO: 840226 - protein, 524 aa, Homo sapiens
ANGRGPINATVRALSGKRQEVATASVPVASRGSPSEHARGAGDQTTGVGVRVAVGVPGPEHEPERESAARTPVATRVPGAARSHQRSAAMEPSSKKLTGRLMLAVGGAVLGSLQFGYNTGVINAPQKVIEEFYNQTWVHRYGESILPTTLTTLWSLSVAIFSVGGMIGSFSVGLFVNRFGRRNSMLMMNLLAFVSAVLMGFSKLGKSFEMLILGRFIIGVYCGLTTGFVPMYVGEVSPTSPSWGPWGTLHQLGIVVGILIAQVFGLDSIMGNKDLWPLLLSIIFIPALLQCIVLPFCPESPRFLLINRNEENRAKSVLKKLRGTADVTHDLQEMKEESRQMMREKKVTILELFRSPAYRQPILIAVVLQLSQQLSGINAVFYYSTSIFEKAGVQQPVYATIGSGIVNTAFTVVSLFVVERAGRRTLHLIGLAGMAGCAILMTIALALLEQLPWMSYLSIVAIFGFVAFFEVGPGPIPWFIVAELFSQGPRPAAIAVAGFSNWTSNFIVGSFLQPAMMSRRIFRT

SEQ ID NO: 840227 - protein, 481 aa, Homo sapiens
MLAVGGAVLGSLQFGYNTGVINAPQKVIEEFYNQTWVHRYGESILPTTLTTLWSLSVAIFSVGGMIGSFSVGLFVNRFGRRNSMLMMNLLAFVSAVLMGFSKLGKSFEMLILGRFIIGVYCGLTTGFVPMYVGEVSPTSPSWGPWGTLHQLGIVVGILIAQVFGLDSIMGNKDLWPLLLSIIFIPALLQCIVLPFCPESPRFLLINRNEENRAKSVLKKLRGTADVTHDLQEMKEESRQMMREKKVTILELFRSPAYRQPILIAVVLQLSQQLSGINAVFYYSTSIFEKAGVQQPVYATIGSGIVNTAFTVVSLFVVERAGRRTLHLIGLAGMAGCAILMTIALALLEQLPWMSYLSIVAIFGFVAFFEVGPGPIPWFIVAELFSQGPRPAAIAVAGFSNWTSNFIVGMCFQYVEQLCGPYVFIIFTVLLVLFFIFTYFKVPETKGRTFDEIASGFRQGGASQSDKTPEELFHPLGADSQV

SEQ ID NO: 840228 - protein, 417 aa, Homo sapiens
MIGSFSVGLFVNRFGRRNSMLMMNLLAFVSAVLMGFSKLGKSFEMLILGRFIIGVYCGLTTGFVPMYVGEVSPTSPSWGPWGTLHQLGIVVGILIAQVFGLDSIMGNKDLWPLLLSIIFIPALLQCIVLPFCPESPRFLLINRNEENRAKSVLKKLRGTADVTHDLQEMKEESRQMMREKKVTILELFRSPAYRQPILIAVVLQLSQQLSGINAVFYYSTSIFEKAGVQQPVYATIGSGIVNTAFTVVSLFVVERAGRRTLHLIGLAGMAGCAILMTIALALLEQLPWMSYLSIVAIFGFVAFFEVGPGPIPWFIVAELFSQGPRPAAIAVAGFSNWTSNFIVGMCFQYVEQLCGPYVFIIFTVLLVLFFIFTYFKVPETKGRTFDEIASGFRQGGASQSDKTPEELFHPLGADSQV

SEQ ID NO: 840229 - protein, 546 aa, Homo sapiens
ANGRGPINATVRALSGKRQEVATASVPVASRGSPSEHARGAGDQTTGVGVRVAVGVPGPEHEPERESAARTPVATRVPGAARSHQRSAAMEPSSKKLTGRLMLAVGGAVLGSLQFGYNTGVINAPQKVIEEFYNQTWVHRYGESILPTTLTTLWSLSVAIFSVGGMIGSFSVGLFVNRFGRRNSMLMMNLLAFVSAVLMGFSKLGKSFEMLILGRFIIGVYCGLTTGFVPMYVGEVSPTSPSWGPWGTLHQLGIVVGILIAQVFGLDSIMGNKDLWPLLLSIIFIPALLQCIVLPFCPESPRFLLINRNEENRAKSVLKKLRGTADVTHDLQEMKEESRQMMREKKVTILELFRSPAYRQPILIAVVLQLSQQLSGINAVFYYSTSIFEKAGVQQPVYATIGSGIVNTAFTVVSLFVVERAGRRTLHLIGLAGMAGCAILMTIALALLEQLPWMSYLSIVAIFGFVAFFEVGPGPIPWFIVAELFSQGPRPAAIAVAGFSNWTSNFIVGMCFQYVEQLCGPYVFIIFTVLLVLFFILSRHLPSSPS

SEQ ID NO: 840230 - protein, 203 aa, Homo sapiens
ATLDGPLSWTKAGVQQPVYATIGSGIVNTAFTVVSLFVVERAGRRTLHLIGLAGMAGCAILMTIALALLEQLPWMSYLSIVAIFGFVAFFEVGPGPIPWFIVAELFSQGPRPAAIAVAGFSNWTSNFIVGMCFQYVEQLCGPYVFIIFTVLLVLFFIFTYFKVPETKGRTFDEIASGFRQGGASQSDKTPEELFHPLGADSQV

SEQ ID NO: 840231 - protein, 582 aa, Homo sapiens; identical to SEQ ID NO: 840222

SEQ ID NO: 840232 - protein, 287 aa, Homo sapiens
ANGRGPINATVRALSGKRQEVATASVPVASRGSPSEHARGAGDQTTGVGVRVAVGVPGPEHEPERESAARTPVATRVPGAARSHQRSAAMEPSSKKLTGRLMLAVGGAVLGSLQFGYNTGVINAPQKVIEEFYNQTWVHRYGESILPTTLTTLWSLSVAIFSVGGMIGSFSVGLFVNRFGRRNSMLMMNLLAFVSAVLMGFSKLGKSFEMLILGRFIIGVYCGLTTGFVPMYVGEVSPTSPSWGPWGTLHQLGIVVGILIAQGSWMRLPNLTDVSRAGPGAPFSSQQ

SEQ ID NO: 840233 - protein, 589 aa, Homo sapiens
ANGRGPINATVRALSGKRQEVATASVPVASRGSPSEHARGAGDQTTGVGVRVAVGVPGPEHEPERESAARTPVATRVPGAARSHQRSAAMEPSSKKLTGRLMLAVGGAVLGSLQFGYNTGVINAPQKVIEEFYNQTWVHRYGESILPTTLTTLWSLSVAIFSVGGMIGSFSVGLFVNRFGRRNSMLMMNLLAFVSAVLMGFSKLGKSFEMLILGRFIIGVYCGLTTGFVPMYVGEVSPTSPSWGPWGTLHQLGIVVGILIAQVFGLDSIMGNKDLWPLLLSIIFIPALLQCIVLPFCPESPRFLLINRNEENRAKSVLKKLRGTADVTHDLQEMKEESRQMMREKKVTILELFRSPAYRQPILIAVVLQLSQQLSGINAVFYYSTSIFEKAGVQQPVYATIGSGIVNTAFTVVSLFVVERAGRRTLHLIGLAGMAGCAILMTIALALLEQLPWMSYLSIVAIFGFVAFFEVGPGPIPWFIVAELFSQGPRPAAIAVAGFSNWTSNFIVGMCFQYVEQLCGPYVFIIFTVLLVLFFIFTYFKVPETKGRTFDEIASGFRQGGASQSDKTPDSCPVVYRCKIFIYIFGCQY

SEQ ID NO: 840234 - protein, 610 aa, Homo sapiens
ANGRGPINATVRALSGKRQEVATASVPVASRGSPSEHARGAGDQTTGVGVRVAVGVPGPEHEPERESAARTPVATRVPGAARSHQRSAAMEPSSKKLTGRLMLAVGGAVLGSLQFGYNTGVINAPQKVIEEFYNQTWVHRYGESILPTTLTTLWSLSVAIFSVGGMIGSFSVGLFVNRFGRRNSMLMMNLLAFVSAVLMGFSKLGKSFEMLILGRFIIGVYCGLTTGFVPMYVGEVSPTSPSWGPWGTLHQLGIVVGILIAQVFGLDSIMGNKDLWPLLLSIIFIPALLQCIVLPFCPESPRFLLINRNEENRAKSVLKKLRGTADVTHDLQEMKEESRQMMREKKVTILELFRSPAYRQPILIAVVLQLSQQLSGINAVFYYSTSIFEKAGVQQPVYATIGSGIVNTAFTVVSLFVVERAGRRTLHLIGLAGMAGCAILMTIALALLEQLPWMSYLSIVAIFGFVAFFEVGPGPIPWFIVAELFSQGPRPAAIAVAGFSNWTSNFIVGMCFQYVEQLCGPYVFIIFTVLLVLFFIFTYFKVPETKGRTFDEIVPGSSLLCTEGHTITMRRGPVGACKLTAQEDMETPALLCIDARYLYIFLVVNIKYRH

SEQ ID NO: 840235 - protein, 331 aa, Homo sapiens
ANGRGPINATVRALSGKRQEVATASVPVASRGSPSEHARGAGDQTTGVGVRVAVGVPGPEHEPERESAARTPVATRVPGAARSHQRSAAMEPSSKKLTGRLMLAVGGAVLGSLQFGYNTGVINAPQKVIEEFYNQTWVHRYGESILPTTLTTLWSLSVAIFSVGGMIGSFSVGLFVNRFGRRNSMLMMNLLAFVSAVLMGFSKLGKSFEMLILGRFIIGVYCGLTTGFVPMYVGEVSPTSPSWGPWGTLHQLGIVVGILIAQVFGLDSIMGNKDLWPLLLSIIFIQPVMIGCLCQSPVLYNREDRQSVKLRDCVPAVNGDDIGKAPGGRGH

SEQ ID NO: 840236 - protein, 297 aa, Homo sapiens
  misc_feature (292)..(292): Xaa can be any naturally occurring amino acid
  misc_feature (297)..(297): Xaa can be any naturally occurring amino acid
ANGRGPINATVRALSGKRQEVATASVPVASRGSPSEHARGAGDQTTGVGVRVAVGVPGPEHEPERESAARTPVATRVPGAARSHQRSAAMEPSSKKLTGRLMLAVGGAVLGSLQFGYNTGVINAPQKVIEEFYNQTWVHRYGESILPTTLTTLWSLSVAIFSVGGMIGSFSVGLFVNRFGRRNSMLMMNLLAFVSAVLMGFSKLGKSFEMLILGRFIIGVYCGLTTGFVPMYVGEVSPTSPSWGPWGTLHQLGIVVGILIAQSVPAWDFHSLGPTKGPCGPLACLNHSIFHXPNPLX

SEQ ID NO: 840237 - protein, 264 aa, Homo sapiens
ANGRGPINATVRALSGKRQEVATASVPVASRGSPSEHARGAGDQTTGVGVRVAVGVPGPEHEPERESAARTPVATRVPGAARSHQRSAAMEPSSKKLTGRLMLAVGGAVLGSLQFGYNTGVINAPQKVIEEFYNQTWVHRYGESILPTTLTTLWSLSVAIFSVGGMIGSFSVGLFVNRFGRRNSMLMMNLLAFVSAVLMGFSKLGNPKLETTDTPLPKKFPFRPQARKVTAVQCPFCLSICPLHSLLILGPTSTATEAGKGHNV

SEQ ID NO: 840238 - protein, 149 aa, Homo sapiens
ANGRGPINATVRALSGKRQEVATASVPVASRGSPSEHARGAGDQTTGVGVRVAVGVPGPEHEPERESAARTPVATRVPGAARSHQRSAAMEPSSKKLTGRLMLAVGGAVLGSLQFGYNTGVINAPQKVSTVPSLAYGHQPALLHITHAH

SEQ ID NO: 840239 - protein, 126 aa, Homo sapiens
VSAVLMGFSKLGKSFEMLILGRFIIGVYCGLTTGFVPMYVGEVSPTSPSWGPWGTLHQLGIVVGILIAQGKLGQDLPAWHGPCPQLQWLSDLCPAGQSFSSAQPPQPCRGQLWYTGPENTAPWPPS

SEQ ID NO: 840240 - protein, 106 aa, Homo sapiens
  misc_feature (7)..(7): Xaa can be any naturally occurring amino acid
  misc_feature (10)..(10): Xaa can be any naturally occurring amino acid
  misc_feature (20)..(20): Xaa can be any naturally occurring amino acid
  misc_feature (30)..(30): Xaa can be any naturally occurring amino acid
MIWPFPXFSXPNHFKLILSXPEPSRQMMRXKKVTILKLVPGSPAYRQPILINRNEENRAKSVLKKLRGTADVTHDLQEMKEESRQMMREHWSAGRRGEGPVWAAGF

SEQ ID NO: 840241 - protein, 579 aa, Homo sapiens
CLFGRIFSSRRPGRNSRDATASVPVASRGSPSEHARGAGDQTTGVGVRVAVGVPGPEHEPERESAARTPVATRVPGAARSHQRSAAMEPSSKKLTGRLMLAVGGAVLGSLQFGYNTGVINAPQKVIEEFYNQTWVHRYGESILPTTLTTLWSLSVAIFSVGGMIGSFSVGLFVNRFGRRNSMLMMNLLAFVSAVLMGFSKLGKSFEMLILGRFIIGVYCGLTTGFVPMYVGEVSPTSPSWGPWGTLHQLGIVVGILIAQVFGLDSIMGNKDLWPLLLSIIFIPALLQCIVLPFCPESPRFLLINRNEENRAKSVLKKLRGTADVTHDLQEMKEESRQMMREKKVTILELFRSPAYRQPILIAVVLQLSQQLSGINAVFYYSTSIFEKAGVQQPVYATIGSGIVNTAFTVVSLFVVERAGRRTLHLIGLAGMAGCAILMTIALALLEQLPWMSYLSIVAIFGFVAFFEVGPGPIPWFIVAELFSQGPRPAAIAVAGFSNWTSNFIVGMCFQYVEQLCGPYVFIIFTVLLVLFFIFTYFKVPETKGRTFDEIASGFRQGGASQSDKTPEELFHPLGADSQV

SEQ ID NO: 840242 - protein, 626 aa, Homo sapiens
SSLPCPRSSRMGVSFEKQDCFYKSVYEPARLTARLTSRLTARLTSPLPRLTSRLPRLTSRLPRLLATASVPVASRGSPSEHARGAGDQTTGVGVRVAVGVPGPEHEPERESAARTPVATRVPGAARSHQRSAAMEPSSKKLTGRLMLAVGGAVLGSLQFGYNTGVINAPQKVIEEFYNQTWVHRYGESILPTTLTTLWSLSVAIFSVGGMIGSFSVGLFVNRFGRRNSMLMMNLLAFVSAVLMGFSKLGKSFEMLILGRFIIGVYCGLTTGFVPMYVGEVSPTSPSWGPWGTLHQLGIVVGILIAQVFGLDSIMGNKDLWPLLLSIIFIPALLQCIVLPFCPESPRFLLINRNEENRAKSVLKKLRGTADVTHDLQEMKEESRQMMREKKVTILELFRSPAYRQPILIAVVLQLSQQLSGINAVFYYSTSIFEKAGVQQPVYATIGSGIVNTAFTVVSLFVVERAGRRTLHLIGLAGMAGCAILMTIALALLEQLPWMSYLSIVAIFGFVAFFEVGPGPIPWFIVAELFSQGPRPAAIAVAGFSNWTSNFIVGMCFQYVEQLCGPYVFIIFTVLLVLFFIFTYFKVPETKGRTFDEIASGFRQGGASQSDKTPEELFHPLGADSQV

SEQ ID NO: 840243 - protein, 617 aa, Homo sapiens
SSLPCPRSSRMGVSFEKQDCFYKSVYEPARLTARLTSRLTAASRLPCLASRLACLASRLACPVCWQQRACRSLVAGPRVSTPGGVRVAVGVPGPEHEPERESAARTPVATRVPGAARSHQRSAAMEPSSKKLTGRLMLAVGGAVLGSLQFGYNTGVINAPQKVIEEFYNQTWVHRYGESILPTTLTTLWSLSVAIFSVGGMIGSFSVGLFVNRFGRRNSMLMMNLLAFVSAVLMGFSKLGKSFEMLILGRFIIGVYCGLTTGFVPMYVGEVSPTSPSWGPWGTLHQLGIVVGILIAQVFGLDSIMGNKDLWPLLLSIIFIPALLQCIVLPFCPESPRFLLINRNEENRAKSVLKKLRGTADVTHDLQEMKEESRQMMREKKVTILELFRSPAYRQPILIAVVLQLSQQLSGINAVFYYSTSIFEKAGVQQPVYATIGSGIVNTAFTVVSLFVVERAGRRTLHLIGLAGMAGCAILMTIALALLEQLPWMSYLSIVAIFGFVAFFEVGPGPIPWFIVAELFSQGPRPAAIAVAGFSNWTSNFIVGMCFQYVEQLCGPYVFIIFTVLLVLFFIFTYFKVPETKGRTFDEIASGFRQGGASQSDKTPEELFHPLGADSQV

SEQ ID NO: 840244 - protein, 550 aa, Homo sapiens
ANGRGPINATVRALSGKRQEVATASVPVASRGSPSEHARGAGDQTTGVGVRVAVGVPGPEHEPERESAARTPVATRVPGAARSHQRSAAMEPSSKVIEEFYNQTWVHRYGESILPTTLTTLWSLSVAIFSVGGMIGSFSVGLFVNRFGRRNSMLMMNLLAFVSAVLMGFSKLGKSFEMLILGRFIIGVYCGLTTGFVPMYVGEVSPTSPSWGPWGTLHQLGIVVGILIAQVFGLDSIMGNKDLWPLLLSIIFIPALLQCIVLPFCPESPRFLLINRNEENRAKSVLKKLRGTADVTHDLQEMKEESRQMMREKKVTILELFRSPAYRQPILIAVVLQLSQQLSGINAVFYYSTSIFEKAGVQQPVYATIGSGIVNTAFTVVSLFVVERAGRRTLHLIGLAGMAGCAILMTIALALLEQLPWMSYLSIVAIFGFVAFFEVGPGPIPWFIVAELFSQGPRPAAIAVAGFSNWTSNFIVGMCFQYVEQLCGPYVFIIFTVLLVLFFIFTYFKVPETKGRTFDEIASGFRQGGASQSDKTPEELFHPLGADSQV

SEQ ID NO: 840245 - protein, 542 aa, Homo sapiens
ANGRGPINATVRALSGKRQEVATASVPVASRGSPSEHARGAGDQTTGVGVRVAVGVPGPEHEPERESAARTPVATRVPGAARSHQRSAAMEPSSKKLTGRLMLAVGGAVLGSLQFGYNTGVINAPQKVIEEFYNQTWVHRYGESILPTTLTTLWSLSVAIFSVGGMIGSFSVGLFVNRFGRRNSMLMMNLLAFVSAVLMGFSKLGKSFEMLILGRFIIGVYCGLTTGFVPMYVGEVSPTSPSWGPWGTLHQLGIVVGILIAQVFGLDSIMGNKDLWPLLLSIIFIPALLQCIVLPFCPESPRFLLINRNEENRAKSVLKKLRGTADVTHDLQEMKEESRQMMREKKVTILELFRSPAYRQPILIAVVLQLSQQLSGINAVFYYSTSIFEKAGVQQPVYATIGSGIVNTAFTVVSLFVVERAGRRTLHLIGLAGMAGCAILMTIALALLEQLPWMSYLSIVAIFGFVAFFEVGPGPIPWFIVAELFSQGPRPAAIAVAGFSNWTSNFIVGMCFQYVEQLCGPYVFIIFTVLLVLFFIYVLRTH

SEQ ID NO: 840246 - protein, 582 aa, Homo sapiens; identical to SEQ ID NO: 840222

SEQ ID NO: 840247 - protein, 151 aa, Homo sapiens
VIFTYFKVPETKGRTFDEIASGFRQGGASQSDKTTLHLIGLAGMAGCAILMTIALALLEQLPWMSYLSIVAIFGFVAFFEVGPGPIPWFIVAELFSQGPRPAAIAVAGFSNWTSNFIVGMCFQYVEQLCGPYVFIIFTVLLVLFFICSQQP

SEQ ID NO: 840248 - protein, 244 aa, Homo sapiens
ANGRGPINATVRALSGKRQEVATASVPVASRGSPSEHARGAGDQTTGVGVRVAVGVPGPEHEPERESAARTPVATRVPGAARSHQRSAAMEPSSKKLTGRLMLAVGGAVLGSLQFGYNTGVINAPQKVIEEFYNQTWVHRYGESILPTTLTTLWSLSVAIFSVGGMIGSFSVGLFVNRFGRRNSMLMMNLLAFVSAVLMGFSKLGKSFEMLILGRFIIGVYCGLTTGFVLEPLPAPHREASVPS

SEQ ID NO: 840249 - protein, 136 aa, Homo sapiens [sequence omitted]

SEQ ID NO: 840250 - protein, 282 aa, Homo sapiens
AEGHEREESGFLGDGDLGVGRTPKARRPGGGLLALGLDICKREIWGRRSKSGGGGGLGFGPQDPISGPLIQRGLQRDMAEAHQAVGFRPSLTSDGAEVELSAPVLQEIYLSGLRSWKRHLSRFWNDFLTGVFPASPLSWLFLFSAIQLAWFLQLDPSLGLMEKIKELLPDWGGQHHGLRGVLAAALFASCLWGALIFTLHVALRLLLSYHGWLLEPHGAMSSPTKTWLALVRIFSGRHPMLFSYQRSLPRQPVPSVQDTVRKYLESAGHLLEEEFDDGLRGS

SEQ ID NO: 840251 - protein, 792 aa, Homo sapiens
MAEAHQAVGFRPSLTSDGAEVELSAPVLQEIYLSGLRSWKRHLSRFWNDFLTGVFPASPLSWLFLFSAIQLAWFLQLDPSLGLMEKIKELLPDWGGQHHGLRGVLAAALFASCLWGALIFTLHVALRLLLSYHGWLLEPHGAMSSPTKTWLALVRIFSGRHPMLFSYQRSLPRQPVPSVQDTVRKYLESVRPILSDEDFDWTAVLAQEFLRLQASLLQWYLRLKSWWASNYVSDWWEEFVYLRSRNPLMVNSNYYMMAARAGNAVHALLLYRHRLNRQEIPPTLLMGMRPLCSAQYEKIFNTTRIPGVQKDYIRHLHDSQHVAVFHRGRFFRMGTHSRNSLLSPRALEQQFQRILDDPSPACPHEEHLAALTAAPRGTWAQVRTSLKTQAAEALEAVEGAAFFVSLDAEPAGLTREDPAASLDAYAHALLAGRGHDRWFDKSFTLIVFSNGKLGLSVEHSWADCPISGHMWEFTLATECFQLGYSTDGHCKGHPDPTLPQPQRLQWDLPDQIHSSISLALRGAKILSENVDCHVVPFSLFGKSFIRRCHLSSDSFIQIALQLAHFRDRGQFCLTYESAMTRLFLEGRTETVRSCTREACNFVRAMEDKEKTDPQCLALFRVAVDKHQALLKAAMSGQGVDRHLFALYIVSRFLHLQSPFLTQVHSEQWQLSTSQIPVQQMHLFDVHNYPDYVSSGGGFGPADDHGYGVSYIFMGDGMITFHISSKKSSTKTDSHRLGQHIEDALLDVASLFQAGQHFKRRFRGSGKENSRHRCGFLSRQTGASKASMTSTDF

SEQ ID NO: 840252 - protein, 792 aa, Homo sapiens; identical to SEQ ID NO: 840251

SEQ ID NO: 840253 - protein, 792 aa, Homo sapiens; identical to SEQ ID NO: 840251

SEQ ID NO: 840254 - protein, 558 aa, Homo sapiens
MAEAHQAVGFRPSLTSDGAEVELSAPVLQEIYLSGLYRHRLNRQEIPPTLLMGMRPLCSAQYEKIFNTTRIPGVQKDYIRHLHDSQHVAVFHRGRFFRMGTHSRNSLLSPRALEQQFQRILDDPSPACPHEEHLAALTAAPRGTWAQVRTSLKTQAAEALEAVEGAAFFVSLDAEPAGLTREDPAASLDAYAHALLAGRGHDRWFDKSFTLIVFSNGKLGLSVEHSWADCPISGHMWEFTLATECFQLGYSTDGHCKGHPDPTLPQPQRLQWDLPDQIHSSISLALRGAKILSENVDCHVVPFSLFGKSFIRRCHLSSDSFIQIALQLAHFRDRGQFCLTYESAMTRLFLEGRTETVRSCTREACNFVRAMEDKEKTDPQCLALFRVAVDKHQALLKAAMSGQGVDRHLFALYIVSRFLHLQSPFLTQVHSEQWQLSTSQIPVQQMHLFDVHNYPDYVSSGGGFGPADDHGYGVSYIFMGDGMITFHISSKKSSTKTDSHRLGQHIEDALLDVASLFQAGQHFKRRFRGSGKENSRHRCGFLSRQTGASKASMTSTDF

SEQ ID NO: 840255 - protein, 300 aa, Homo sapiens
MAEAHQAVGFRPSLTSDGAEVELSAPVLQEIYLSGLRSWKRHLSRFWNDFLTGVFPASPLSWLFLFSAIQLAWFLQLDPSLGLMEKIKELLPDWGGQHHGLRGVLAAALFASCLWGALIFTLHVALRLLLSYHGWLLEPHGAMSSPTKTWLALVRIFSGRHPMLFSYQRSLPRQPVPSVQDTVRKYLESVRPILSDEDFDWTAVLAQEFLRLQASLLQWYLRLKSWWASNYVSDWWEEFVYLRSRNPLMVNSNYYMMAARAGNAVHALLLYRHRLNRQEIPPVRGPQWVRDGGVVLWPLG

SEQ ID NO: 840256 - protein, 641 aa, Homo sapiens
MLFSYQRSLPRQPVPSVQDTVRKYLESVRPILSDEDFDWTAVLAQEFLRLQASLLQWYLRLKSWWASNYVSDWWEEFVYLRSRNPLMVNSNYYMMDFLYVTPTPLQAARAGNAVHALLLYRHRLNRQEIPPTLLMGMRPLCSAQYEKIFNTTRIPGVQKDYIRHLHDSQHVAVFHRGRFFRMGTHSRNSLLSPRALEQQFQRILDDPSPACPHEEHLAALTAAPRGTWAQVRTSLKTQAAEALEAVEGAAFFVSLDAEPAGLTREDPAASLDAYAHALLAGRGHDRWFDKSFTLIVFSNGKLGLSVEHSWADCPISGHMWEFTLATECFQLGYSTDGHCKGHPDPTLPQPQRLQWDLPDQIHSSISLALRGAKILSENVDCHVVPFSLFGKSFIRRCHLSSDSFIQIALQLAHFRDRGQFCLTYESAMTRLFLEGRTETVRSCTREACNFVRAMEDKEKTDPQCLALFRVAVDKHQALLKAAMSGQGVDRHLFALYIVSRFLHLQSPFLTQVHSEQWQLSTSQIPVQQMHLFDVHNYPDYVSSGGGFGPADDHGYGVSYIFMGDGMITFHISSKKSSTKTDSHRLGQHIEDALLDVASLFQAGQHFKRRFRGSGKENSRHRCGFLSRQTGASKASMTSTDF

SEQ ID NO: 840257 - protein, 159 aa, Homo sapiens [sequence omitted]

SEQ ID NO: 840258 - protein, 66 aa, Homo sapiens
MGSCPQVHSEQWQLSTSQIPVQQMHLFDVHNYPDYVSSGGGFGPVSGAGRAGPQRKEGAGGPALLH

SEQ ID NO: 840259 - protein, 136 aa, Homo sapiens
MGSCPQVHSEQWQLSTSQIPVQQMHLFDVHNYPDYVSSGGGFGPADDHGYGVSYIFMGDGMITFHISSKKSSTKTDSHRLGQHIEDALLDVASLFQAGQHFKRRFRGSGKENSRHRCGFLSRQTGASKASMTSTDF

SEQ ID NO: 840260 - protein, 792 aa, Homo sapiens; identical to SEQ ID NO: 840251

SEQ ID NO: 840261 - protein, 792 aa, Homo sapiens; identical to SEQ ID NO: 840251

SEQ ID NO: 840262 - protein, 869 aa, Homo sapiens
AEGHEREESGFLGDGDLGVGRTPKARRPGGGLLALGLDICKREIWGRRSKSGGGGGLGFGPQDPISGPLIQRGLQRDMAEAHQAVGFRPSLTSDGAEVELSAPVLQEIYLSGLRSWKRHLSRFWNDFLTGVFPASPLSWLFLFSAIQLAWFLQLDPSLGLMEKIKELLPDWGGQHHGLRGVLAAALFASCLWGALIFTLHVALRLLLSYHGWLLEPHGAMSSPTKTWLALVRIFSGRHPMLFSYQRSLPRQPVPSVQDTVRKYLESVRPILSDEDFDWTAVLAQEFLRLQASLLQWYLRLKSWWASNYVSDWWEEFVYLRSRNPLMVNSNYYMMAARAGNAVHALLLYRHRLNRQEIPPTLLMGMRPLCSAQYEKIFNTTRIPGVQKDYIRHLHDSQHVAVFHRGRFFRMGTHSRNSLLSPRALEQQFQRILDDPSPACPHEEHLAALTAAPRGTWAQVRTSLKTQAAEALEAVEGAAFFVSLDAEPAGLTREDPAASLDAYAHALLAGRGHDRWFDKSFTLIVFSNGKLGLSVEHSWADCPISGHMWEFTLATECFQLGYSTDGHCKGHPDPTLPQPQRLQWDLPDQIHSSISLALRGAKILSENVDCHVVPFSLFGKSFIRRCHLSSDSFIQIALQLAHFRDRGQFCLTYESAMTRLFLEGRTETVRSCTREACNFVRAMEDKEKTDPQCLALFRVAVDKHQALLKAAMSGQGVDRHLFALYIVSRFLHLQSPFLTQVHSEQWQLSTSQIPVQQMHLFDVHNYPDYVSSGGGFGPADDHGYGVSYIFMGDGMITFHISSKKSSTKTDSHRLGQHIEDALLDVASLFQAGQHFKRRFRGSGKENSRHRCGFLSRQTGASKASMTSTDF

SEQ ID NO: 840263 - protein, 909 aa, Homo sapiens
AEGHEREESGFLGDGDLGVGRTPKARRPGGGLLALGLDICKREIWGRRSKSGGGGGLGFGPQDPISGPLIQRGLQRDMAEAHQAVGFRPSLTSDGAEVELSAPVLQEIYLSGLRSWKRHLSRFWGLTYFVTQAGGSVTITAHFIPELLGSSDPPASAFQVAGTKNDFLTGVFPASPLSWLFLFSAIQLAWFLQLDPSLGLMEKIKELLPDWGGQHHGLRGVLAAALFASCLWGALIFTLHVALRLLLSYHGWLLEPHGAMSSPTKTWLALVRIFSGRHPMLFSYQRSLPRQPVPSVQDTVRKYLESVRPILSDEDFDWTAVLAQEFLRLQASLLQWYLRLKSWWASNYVSDWWEEFVYLRSRNPLMVNSNYYMMAARAGNAVHALLLYRHRLNRQEIPPTLLMGMRPLCSAQYEKIFNTTRIPGVQKDYIRHLHDSQHVAVFHRGRFFRMGTHSRNSLLSPRALEQQFQRILDDPSPACPHEEHLAALTAAPRGTWAQVRTSLKTQAAEALEAVEGAAFFVSLDAEPAGLTREDPAASLDAYAHALLAGRGHDRWFDKSFTLIVFSNGKLGLSVEHSWADCPISGHMWEFTLATECFQLGYSTDGHCKGHPDPTLPQPQRLQWDLPDQIHSSISLALRGAKILSENVDCHVVPFSLFGKSFIRRCHLSSDSFIQIALQLAHFRDRGQFCLTYESAMTRLFLEGRTETVRSCTREACNFVRAMEDKEKTDPQCLALFRVAVDKHQALLKAAMSGQGVDRHLFALYIVSRFLHLQSPFLTQVHSEQWQLSTSQIPVQQMHLFDVHNYPDYVSSGGGFGPADDHGYGVSYIFMGDGMITFHISSKKSSTKTDSHRLGQHIEDALLDVASLFQAGQHFKRRFRGSGKENSRHRCGFLSRQTGASKASMTSTDF

SEQ ID NO: 840264 - protein, 650 aa, Homo sapiens
MSSPTKTWLALVRIFSGRHPMLFSYQRSLPRQPVPSVQDTVRKYLESVRPILSDEDFDWTAVLAQEFLRLQASLLQWYLRLKSWWASNYVSDWWEEFVYLRSRNPLMVNSNYYMMAARAGNAVHALLLYRHRLNRQEIPPTLLMGMRPLCSAQYEKIFNTTRIPGVQKDYIRHLHDSQHVAVFHRGRFFRMGTHSRNSLLSPRALEQQFQRILDDPSPACPHEEHLAALTAAPRGTWAQVRTSLKTQAAEALEAVEGAAFFVSLDAEPAGLTREDPAASLDAYAHALLAGRGHDRWFDKSFTLIVFSNGKLGLSVEHSWADCPISGHMWEFTLATECFQLGYSTDGHCKGHPDPTLPQPQRLQWDLPDQIHSSISLALRGAKILSENVDCHVVPFSLFGKSFIRRCHLSSDSFIQIALQLAHFRDRGQFCLTYESAMTRLFLEGRTETVRSCTREACNFVRAMEDKEKTDPQCLALFRVAVDKHQALLKAAMSGQGVDRHLFALYIVSRFLHLQSPFLTQVHSEQWQLSTSQIPVQQMHLFDVHNYPDYVSSGGGFGPADDHGYGVSYIFMGDGMITFHISSKKSSTKTDSHRLGQHIEDALLDVASLFQAGQHFKRRFRGSGKENSRHRCGFLSRQTGASKASMTSTDF

SEQ ID NO: 840265 - protein, 1805 aa, Homo sapiens
MSDTKVKVAVRVRPMNRRELELNTKCVVEMEGNQTVLHPPPSNTKQGERKPPKVFAFDYCFWSMDESNTTKYAGQEVVFKCLGEGILEKAFQGYNACIFAYGQTGSGKSFSMMGHAEQLGLIPRLCCALFKRISLEQNESQTFKVEVSYMEIYNEKVRDLLDPKGSRQSLKVREHKVLGPYVDGLSQLAVTSFEDIESLMSEGNKSRTVAATNMNEESSRSHAVFNIIITQTLYDLQSGNSGEKVSKVSLVDLAGSERVSKTGAAGERLKEGSNINKSLTTLGLVISSLADQAAGKGKSKFVPYRDSVLTWLLKDNLGGNSQTSMIATISPAADNYEETLSTLRYADRAKRIVNHAVVNEDPNAKVIRELREEVEKLREQLSQAEAMKAPELKEKLEESEKLIKELTVTWEEKLRKTEEIAQERQRQLESMGISLEMSGIKVGDDKCYLVNLNADPALNELLVYYLKDHTRVGADTSQDIQLFGIGIQPQHCEIDIASDGDVTLTPKENARSCVNGTLVCSTTQLWHGDRILWGNNHFFRINLPKRKRRDWLKDFEKETGPPEHDLDAASEASSEPDYNYEFAQMEVIMKTLNSNDPVQNVVQVLEKQYLEEKRSALEEQRLMYERELEQLRQQLSPDRQPQSSGPDRLAYSSQTAQQKVTQWAEERDELFRQSLAKLREQLVKANTLVREANFLAEEMSKLTDYQVTLQIPAANLSANRKRGAIVSEPAIQVRRKGKSTQVWTIEKLENKLIDMRDLYQEWKEKVPEAKRLYGKRGDPFYEAQENHNLIGVANVFLECLFCDVKLQYAVPIISQQGEVAGRLHVEVMRVTGAVPERVVEDDSSENSSESGSLEVVDSSGEIIHRVKKLTCRVKIKEATGLPLNLSNFVFCQYTFWDQCESTVAAPVVDPEVPSPQSKDAQYTVTFSHCKDYVVNVTEEFLEFISDGALAIEVWGHRCAGNGSSIWEVDSLHAKTRTLHDRWNEVTRRIEMWISILELNELGEYAAVELHQAKDVNTGGIFQLRQGHSRRVQVTVKPVQHSGTLPLMVEAILSVSIGCVTARSTKLQRGLDSYQRDDEDGDDMDSYQEEDLNCVRERWSDALIKRREYLDEQIKKVSNKTEKTEDDVEREAQLVEQWVGLTEERNAVLVPAPGSGIPGAPADWIPPPGMETHIPVLFLDLNADDLSANEQLVGPHASGVNSILPKEHGSQFFYLPIIKHSDDEVSATASWDSSVHDSVHLNRVTPQNERIYLIVKTTVQLSHPAAMELVLRKRIAANIYNKQSFTQSLKRRISLKNIFYSCGVTYEIVSNIPKATEEIEDRETLALLAARSENEGTSDGETYIEKYTRGVLQVENILSLERLRQAVTVKEALSTKARHIRRSLSTPNVHNVSSSRPDLSGFDEDDKGWPENQLDMSDYSSSYQDVACYGTLPRDSPRRNKEGCTSETPHALTVSPFKAFSPQPPKFFKPLMPVKEEHKKRIALEARPLLSQESMPPPQAHNPGCIVPSGSNGSSMPVEHNSKREKKIDSEEEENELEAINRKLISSQPYVPVEFADFSVYNASLENREWFSSKVDLSNSRVLEKEVSRSPTTSSITSGYFSHSASNATLSDMVVPSSDSSDQLAIQTKDADSTEHSTPSLVHDFRPSSNKELTEVEKGLVKDKIIVVPLKENSALAKGSPSSQSIPEKNSKSLCRTGSCSELDACPSKISQPARGFCPREVTVEHTTNILEDHSFTEFMGVSEGKDFDGLTDSSAGELSSRRSLPNKTGGKTVSDGLHHPSQLHSKLENDQVIIPEAAFWVLCCQ

SEQ ID NO: 840266 - protein, 1757 aa, Homo sapiens
MSDTKVKVAVRVRPMNRRELELNTKCVVEMEGNQTVLHPPPSNTKQGERKPPKVFAFDYCFWSMDESNTTKYAGQEVVFKCLGEGILEKAFQGYNACIFAYGQTGSGKSFSMMGHAEQLGLIPRLCCALFKRISLEQNESQTFKVEVSYMEIYNEKVRDLLDPKGSRQSLKVREHKVLGPYVDGLSQLAVTSFEDIESLMSEGNKSRTVAATNMNEESSRSHAVFNIIITQTLYDLQSGNSGEKVSKVSLVDLAGSERVSKTGAAGERLKEGSNINKSLTTLGLVISSLADQAAGKGKSKFVPYRDSVLTWLLKDNLGGNSQTSMIATISPAADNYEETLSTLRYADRAKRIVNHAVVNEDPNAKVIRELREEVEKLREQLSQAEAMKAPELKEKLEESEKLIKELTVTWEEKLRKTEEIAQERQRQLESMGISLEMSGIKVGDDKCYLVNLNADPALNELLVYYLKDHTRVGADTSQDIQLFGIGIQPQHCEIDIASDGDVTLTPKENARSCVNGTLVCSTTQLWHGDRILWGNNHFFRINLPKRKRRDWLKDFEKETGPPEHDLDAASEASSEPDYNYEFAQMEVIMKTLNSNDPVQNVVQVLEKQYLEEKRSALEEQRLMYERELEQLRQQLSPDRQPQSSGPDRLAYSSQTAQQKVTQWAEERDELFRQSLAKLREQLVKANTLVREANFLAEEMSKLTDYQVTLQIPAANLSANRKRGAIVSEPAIQVRRKGKSTQVWTIEKLENKLIDMRDLYQEWKEKVPEAKRLYGKRGDPFYEAQENHNLIGVANVFLECLFCDVKLQYAVPIISQQGEVAGRLHVEVMRVTGAVPERVVEDDSSENSSESGSLEVVDSSGEIIHRVKKLTCRVKIKEATGLPLNLSNFVFCQYTFWDQCESTVAAPVVDPEVPSPQSKDAQYTVTFSHCKDYVVNVTEEFLEFISDGALAIEVWGHRCAGNGSSIWEVDSLHAKTRTLHDRWNEVTRRIEMWISILELNELGEYAAVELHQAKDVNTGGIFQLRQGHSRRVQVTVKPVQHSGTLPLMVEAILSVSIGCVTARSTKLQRGLDSYQEEDLNCVRERWSDALIKRREYLDEQIKKVSNKTEKTEDDVEREAQLVEQWVGLTEERNAVLVPAPGSGIPGAPADWIPPPGMETHIPVLFLDLNADDLSANEQLVGPHASGVNSILPKEHGSQFFYLPIIKHSDDEVSATASWDSSVHDSVHLNRVTPQNERIYLIVKTTVQLSHPAAMELVLRKRIAANIYNKQSFTQSLKRRISLKNIFYSCGVTYEIVSNIPKATEEIEDRETLALLAARSENEGTSDGETYIEKYTRGVLQVENILSLERLRQAVTVKEALSTKARHIRRSLSTPNVHNVSSSRPDLSGFDEDDKGWPENQLDMSDYSSSYQDVACYGTLPRDSPRRNKEGCTSETPHALTVSPFKAFSPQPPKFFKPLMPVKEEHKKRIALEARPLLSQEDSEEEENELEAINRKLISSQPYVPVEFADFSVYNASLENREWFSSKVDLSNSRVLEKEVSRSPTTSSITSGYFSHSASNATLSDMVVPSSDSSDQLAIQTKDADSTEHSTPSLVHDFRPSSNKELTEVEKGLVKDKIIVVPLKENSALAKGSPSSQSIPEKNSKSLCRTGSCSELDACPSKISQPARGFCPREVTVEHTTNILEDHSFTEFMGVSEGKDFDGLTDSSAGELSSRRSLPNKTGGKTVSDGLHHPSQLHSKLENDQVIIPEAAFWVLCCQ

SEQ ID NO: 840267 - protein, 1748 aa, Homo sapiens
MSDTKVKVAVRVRPMNRRELELNTKCVVEMEGNQTVLHPPPSNTKQGERKPPKVFAFDYCFWSMDESNTTKYAGQEVVFKCLGEGILEKAFQGYNACIFAYGQTGSGKSFSMMGHAEQLGLIPRLCCALFKRISLEQNESQTFKVEVSYMEIYNEKVRDLLDPKGSRQSLKVREHKVLGPYVDGLSQLAVTSFEDIESLMSEGNKSRTVAATNMNEESSRSHAVFNIIITQTLYDLQSGNSGEKVSKVSLVDLAGSERVSKTGAAGERLKEGSNINKSLTTLGLVISSLADQAAGKGKSKFVPYRDSVLTWLLKDNLGGNSQTSMIATISPAADNYEETLSTLRYADRAKRIVNHAVVNEDPNAKVIRELREEVEKLREQLSQAEAMKAPELKEKLEESEKLIKELTVTWEEKLRKTEEIAQERQRQLESMGISLEMSGIKVGDDKCYLVNLNADPALNELLVYYLKDHTRVGADTSQDIQLFGIGIQPQHCEIDIASDGDVTLTPKENARSCVNGTLVCSTTQLWHGDRILWGNNHFFRINLPKRKRRDWLKDFEKETGPPEHDLDAASEASSEPDYNYEFAQMEVIMKTLNSNDPVQNVVQVLEKQYLEEKRSALEEQRLMYERELEQLRQQLSPDRQPQSSGPDRLAYSSQTAQQKVTQWAEERDELFRQSLAKLREQLVKANTLVREANFLAEEMSKLTDYQVTLQIPAANLSANRKRGAIVSEPAIQVRRKGKSTQVWTIEKLENKLIDMRDLYQEWKEKVPEAKRLYGKRGDPFYEAQENHNLIGVANVFLECLFCDVKLQYAVPIISQQGEVAGRLHVEVMRVTGAVPERVVEDDSSENSSESGSLEVVDSSGEIIHRVKKLTCRVKIKEATGLPLNLSNFVFCQYTFWDQCESTVAAPVVDPEVPSPQSKDAQYTVTFSHCKDYVVNVTEEFLEFISDGALAIEVWGHRCAGNGSSIWEVDSLHAKTRTLHDRWNEVTRRIEMWISILELNELGEYAAVELHQAKDVNTGGIFQLRQGHSRRVQVTVKPVQHSGTLPLMVEAILSVSIGCVTARSTKLQRGLDSYQEEDLNCVRERWSDALIKRREYLDEQIKKVSNKTEKTEDDVEREAQLVEQWVGLTEERNAVLVPAPGSGIPGAPADWIPPPGMETHIPVLFLDLNADDLSANEQLVGPHASGVNSILPKEHGSQFFYLPIIKHSDDEVSATASWDSSVHDSVHLNRVTPQNERIYLIVKTTVQLSHPAAMELVLRKRIAANIYNKQSFTQSLKRRISLKNIFYSCGVTYEIVSNIPKATEEIEDRETLALLAARSENEGTSDGETYIEKYTRGVLQVENILSLERLRQAVTVKEALSTKARHIRRSLSTPNVHNVSSSRPDLSGFDEDDKGWPENQLDMSDYSSSYQDVACYGTLPRDSPRRNKEGCTSETPHALTVSPFKAFSPQPPKFFKPLMPVKEEHKKRIALEARPLLSQEDSEEEENELEAINRKLISSQPYVPVEFADFSVYNASLENREWFSSKVDLSNSRVLEKEVSRSPTTSSITSGYFSHSASNATLSDMVVPSSDSSDQLAIQTKDADSTEHSTPSLVHDFRPSSNKELTEVEKGLVKDKIIVVPLKENSALAKGSPSSQSIPEKNSKSLCRTGSCSELDACPSKISQPARGFCPREVTVEHTTNILEDHSFTEFMGVSEGKDFDGLTDSSAGELSSRRSLPNKTGGKTVSDGLHHPSQLHSKLENDGGTTSR

SEQ ID NO: 840268 - protein, 684 aa, Homo sapiens
MSDTKVKVAVRVRPMNRRELELNTKCVVEMEGNQTVLHPPPSNTKQGERKPPKVFAFDYCFWSMDESNTTKYAGQEVVFKCLGEGILEKAFQGYNACIFAYGQTGSGKSFSMMGHAEQLGLIPRLCCALFKRISLEQNESQTFKVEVSYMEIYNEKVRDLLDPKGSRQSLKVREHKVLGPYVDGLSQLAVTSFEDIESLMSEGNKSRTVAATNMNEESSRSHAVFNIIITQTLYDLQSGNSGEKVSKVSLVDLAGSERVSKTGAAGERLKEGSNINKSLTTLGLVISSLADQAAGKGKSKFVPYRDSVLTWLLKDNLGGNSQTSMIATISPAADNYEETLSTLRYADRAKRIVNHAVVNEDPNAKVIRELREEVEKLREQLSQAEAMKAPELKEKLEESEKLIKELTVTWEEKLRKTEEIAQERQRQLESMGISLEMSGIKVGDDKCYLVNLNADPALNELLVYYLKDHTRVGADTSQDIQLFGIGIQPQHCEIDIASDGDVTLTPKENARSCVNGTLVCSTTQLWHGDRILWGNNHFFRINLPKRKRRDWLKDFEKETGPPEHDLDAASEASSEPDYNYEFAQMEVIMKTLNSNDPVQNVVQVLEKQYLEEKRSALEEQRLMYERELEQLRQQLSPDRQPQSSGPDRLAYSSQTAQQKVTQWAEESYHLGKTSHTEIGAEGTQ

SEQ ID NO: 840269 - protein, 1104 aa, Homo sapiens
DDLMLLPLQIPAGNLSANRKRGAIVSEPAIQVRRKGKSTQVWTIEKLENKLIDMRDLYQEWKEKVPEAKRLYGKRGDPFYEAQENHNLIGVANVFLECLFCDVKLQYAVPIISQQGEVAGRLHVEVMRVTGAVPERVVEDDSSENSSESGSLEVVDSSGEIIHRVKKLTCRVKIKEATGLPLNLSNFVFCQYTFWDQCESTVAAPVVDPEVPSPQSKDAQYTVTFSHCKDYVVNVTEEFLEFISDGALAIEVWGHRCAGNGSSIWEVDSLHAKTRTLHDRWNEVTRRIEMWISILELNELGEYAAVELHQAKDVNTGGIFQLRQGHSRRVQVTVKPVQHSGTLPLMVEAILSVSIGCVTARSTKLQRGLDSYQRDDEDGDDMDSYQEEDLNCVRERWSDALIKRREYLDEQIKKVSNKTEKTEDDVEREAQLVEQWVGLTEERNAVLVPAPGSGIPGAPADWIPPPGMETHIPVLFLDLNADDLSANEQLVGPHASGVNSILPKEHGSQFFYLPIIKHSDDEVSATASWDSSVHDSVHLNRVTPQNERIYLIVKTTVQLSHPAAMELVLRKRIAANIYNKQSFTQSLKRRISLKNIFYSCGVTYEIVSNIPKATEEIEDRETLALLAARSENEGTSDGETYIEKYTRGVLQVENILSLERLRQAVTVKEALSTKARHIRRSLSTPNVHNVSSSRPDLSGFDEDDKGWPENQLDMSDYSSSYQDVACYGTLPRDSPRRNKEGCTSETPHALTVSPFKAFSPQPPKFFKPLMPVKEEHKKRIALEARPLLSQESMPPPQAHNPGCIVPSGSNGSSMPVEHNSKREKKIDSEEEENELEAINRKLISSQPYVPVEFADFSVYNASLENREWFSSKVDLSNSRVLEKEVSRSPTTSSITSGYFSHSASNATLSDMVVPSSDSSDQLAIQTKDADSTEHSTPSLVHDFRPSSNKELTEVEKGLVKDKIIVVPLKENSALAKGSPSSQSIPEKNSKSLCRTGSCSELDACPSKISQPARGFCPREVTVEHTTNILEDHSFTEFMGVSEGKDFDGLTDSSAGELSSRRSLPNKTGGKTVSDGLHHPSQLHSKLENDQVIIPEAAFWVLCCQ

SEQ ID NO: 840270 - protein, 484 aa, Homo sapiens
MSDTKVKVAVRVRPMNRRELELNTKCVVEMEGNQTVLHPPPSNTKQGERKPPKVFAFDYCFWSMDESNTTKYAGQEVVFKCLGEGILEKAFQGYNACIFAYGQTGSGKSFSMMGHAEQLGLIPRLCCALFKRISLEQNESQTFKVEVSYMEIYNEKVRDLLDPKGSRQSLKVREHKVLGPYVDGLSQLAVTSFEDIESLMSEGNKSRTVAATNMNEESSRSHAVFNIIITQTLYDLQSGNSGEKVSKVSLVDLAGSERVSKTGAAGERLKEGSNINKSLTTLGLVISSLADQAAGKGKSKFVPYRDSVLTWLLKDNLGGNSQTSMIATISPAADNYEETLSTLRYADRAKRIVNHAVVNEDPNAKVIRELREEVEKLREQLSQAEAMKAPELKEKLEESEKLIKELTVTWEEKLRKTEEIAQERQRQLESMGISLEMSGIKVGDDKCYLVNLNADPALNELLVYYLKSFNQSRRFLLGEFMLKE

SEQ ID NO: 840271 - protein, 77 aa, Homo sapiens
AAALEGRAAAAAAAPRVRGRLRPSGRGERPGERSQHVGYQGKSCRPGPAHEPTRTGTEHQVRGGDGRESNGPAPSSF

SEQ ID NO: 840272 - protein, 1770 aa, Homo sapiens
MSDTKVKVAVRVRPMNRRELELNTKCVVEMEGNQTVLHPPPSNTKQGERKPPKVFAFDYCFWSMDESNTTKYAGQEVVFKCLGEGILEKAFQGYNACIFAYGQTGSGKSFSMMGHAEQLGLIPRLCCALFKRISLEQNESQTFKVEVSYMEIYNEKVRDLLDPKGSRQSLKVREHKVLGPYVDGLSQLAVTSFEDIESLMSEGNKSRTVAATNMNEESSRSHAVFNIIITQTLYDLQSGNSGEKVSKVSLVDLAGSERVSKTGAAGERLKEGSNINKSLTTLGLVISSLADQAAGKGKSKFVPYRDSVLTWLLKDNLGGNSQTSMIATISPAADNYEETLSTLRYADRAKRIVNHAVVNEDPNAKVIRELREEVEKLREQLSQAEAMKAPELKEKLEESEKLIKELTVTWEEKLRKTEEIAQERQRQLESMGISLEMSGIKVGDDKCYLVNLNADPALNELLVYYLKDHTRVGADTSQDIQLFGIGIQPQHCEIDIASDGDVTLTPKENARSCVNGTLVCSTTQLWHGDRILWGNNHFFRINLPKRKRRDWLKDFEKETGPPEHDLDAASEASSEPDYNYEFAQMEVIMKTLNSNDPVQNVVQVLEKQYLEEKRSALEEQRLMYERELEQLRQQLSPDRQPQSSGPDRLAYSSQTAQQKVTQWAEERDELFRQSLAKLREQLVKANTLVREANFLAEEMSKLTDYQVTLQIPAANLSANRKRGAIVSEPAIQVRRKGKSTQVWTIEKLENKLIDMRDLYQEWKEKVPEAKRLYGKRGDPFYEAQENHNLIGVANVFLECLFCDVKLQYAVPIISQQGEVAGRLHVEVMRVTGAVPERVVEDDSSENSSESGSLEVVDSSGEIIHRVKKLTCRVKIKEATGLPLNLSNFVFCQYTFWDQCESTVAAPVVDPEVPSPQSKDAQYTVTFSHCKDYVVNVTEEFLEFISDGALAIEVWGHRCAGNGSSIWEVDSLHAKTRTLHDRWNEVTRRIEMWISILELNELGEYAAVELHQAKDVNTGGIFQLRQGHSRRVQVTVKPVQHSGTLPLMVEAILSVSIGCVTARSTKLQRGLDSYQRDDEDGDDMDSYQEEDLNCVRERWSDALIKRREYLDEQIKKVSNKTEKTEDDVEREAQLVEQWVGLTEERNAVLVPAPGSGIPGAPADWIPPPGMETHIPVLFLDLNADDLSANEQLVGPHASGVNSILPKEHGSQFFYLPIIKHSDDEVSATASWDSSVHDSVHLNRVTPQNERIYLIVKTTVQLSHPAAMELVLRKRIAANIYNKQSFTQSLKRRISLKNIFYSCGVTYEIVSNIPKATEEIEDRETLALLAARSENEGTSDGETYIEKYTRGVLQVENILSLERLRQAVTVKEALSTKARHIRRSLSTPNVHNVSSSRPDLSGFDEDDKGWPENQLDMSDYSSSYQDVACYGTLPRDSPRRNKEGCTSETPHALTVSPFKAFSPQPPKFFKPLMPVKEEHKKRIALEARPLLSQEDSEEEENELEAINRKLISSQPYVPVEFADFSVYNASLENREWFSSKVDLSNSRVLEKEVSRSPTTSSITSGYFSHSASNATLSDMVVPSSDSSDQLAIQTKDADSTEHSTPSLVHDFRPSSNKELTEVEKGLVKDKIIVVPLKENSALAKGSPSSQSIPEKNSKSLCRTGSCSELDACPSKISQPARGFCPREVTVEHTTNILEDHSFTEFMGVSEGKDFDGLTDSSAGELSSRRSLPNKTGGKTVSDGLHHPSQLHSKLENDQVIIPEAAFWVLCCQ

SEQ ID NO: 840273 - protein, 1495 aa, Homo sapiens
MSDTKVKVAVRVRPMNRRELELNTKCVVEMEGNQTVLHPPPSNTKQGERKPPKVFAFDYCFWSMDESNTTKYAGQEVVFKCLGEGILEKAFQGYNACIFAYGQTGSGKSFSMMGHAEQLGLIPRLCCALFKRISLEQNESQTFKVEVSYMEIYNEKVRDLLDPKGSRQSLKVREHKVLGPYVDGLSQLAVTSFEDIESLMSEGNKSRTVAATNMNEESSRSHAVFNIIITQTLYDLQSGNSGEKVSKVSLVDLAGSERVSKTGAAGERLKEGSNINKSLTTLGLVISSLADQAAGKGKSKFVPYRDSVLTWLLKDNLGGNSQTSMIATISPAADNYEETLSTLRYADRAKRIVNHAVVNEDPNAKVIRELREEVEKLREQLSQAEAMKAPELKEKLEESEKLIKELTVTWEEKLRKTEEIAQERQRQLESMGISLEMSGIKVGDDKCYLVNLNADPALNELLVYYLKDHTRVGADTSQDIQLFGIGIQPQHCEIDIASDGDVTLTPKENARSCVNGTLVCSTTQLWHGDRILWGNNHFFRINLPKRKRRDWLKDFEKETGPPEHDLDAASEASSEPDYNYEFAQMEVIMKTLNSNDPVQNVVQVLEKQYLEEKRSALEEQRLMYERELEQLRQQLSPDRQPQSSGPDRLAYSSQTAQQKVTQWAEERDELFRQSLAKLREQLVKANTLVREANFLAEEMSKLTDYQVTLQIPAANLSANRKRGAIVSEPAIQVRRKGKSTQVWTIEKLENKLIDMRDLYQEWKEKVPEAKRLYGKRGDPFYEAQENHNLIGVANVFLECLFCDVKLQYAVPIISQQGEVAGRLHVEVMRVTGAVPERVVEDDSSENSSESGSLEVVDSSGEIIHRVKKLTCRVKIKEATGLPLNLSNFVFCQYTFWDQCESTVAAPVVDPEVPSPQSKDAQYTVTFSHCKDYVVNVTEEFLEFISDGALAIEVWGHRCAGNGSSIWEVDSLHAKTRTLHDRWNEVTRRIEMWISILELNELGEYAAVELHQAKDVNTGGIFQLRQGHSRRVQVTVKPVQHSGTLPLMVEAILSVSIGCVTARSTKLQRGLDSYQRDDEDGDDMDSYQEEDLNCVRERWSDALIKRREYLDEQIKKVSNKTEKTEDDVEREAQLVEQWVGLTEERNAVLVPAPGSGIPGAPADWIPPPGMETHIPVLFLDLNADDLSANEQLVGPHASGVNSILPKEHGSQFFYLPIIKHSDDEVSATASWDSSVHDSVHLNRVTPQNERIYLIVKTTVQLSHPAAMELVLRKRIAANIYNKQSFTQSLKRRISLKNIFYSCGVTYEIVSNIPKATEEIEDRETLALLAARSENEGTSDGETYIEKYTRGVLQVENILSLERLRQAVTVKEALSTKARHIRRSLSTPNVHNVSSSRPDLSGFDEDDKGWPENQLDMSDYSSSYQDVACYGTLPRDSPRRNKEGCTSETPHALTVSPFKAFSPQPPKFFKPLMPVKEEHKKRIALEARPLLSQEVNA

SEQ ID NO: 840274 - protein, 1709 aa, Homo sapiens
MSDTKVKVAVRVRPMNRRELELNTKCVVEMEGNQTVLHPPPSNTKQGERKPPKVFAFDYCFWSMDESNTTKYAGQEVVFKCLGEGILEKAFQGYNACIFAYGQTGSGKSFSMMGHAEQLGLIPRLCCALFKRISLEQNESQTFKVEVSYMEIYNEKVRDLLDPKGSRQSLKVREHKVLGPYVDGLSQLAVTSFEDIESLMSEGNKSRTVAATNMNEESSRSHAVFNIIITQTLYDLQSGNSGEKVSKVSLVDLAGSERVSKTGAAGERLKEGSNINKSLTTLGLVISSLADQAAGKGKSKFVPYRDSVLTWLLKDNLGGNSQTSMIATISPAADNYEETLSTLRYADRAKRIVNHAVVNEDPNAKVIRELREEVEKLREQLSQAEAMKAPELKEKLEESEKLIKELTVTWEEKLRKTEEIAQERQRQLESMGISLEMSGIKVGDDKCYLVNLNADPALNELLVYYLKDHTRVGADTSQDIQLFGIGIQPQHCEIDIASDGDVTLTPKENARSCVNGTLVCSTTQLWHGDRILWGNNHFFRINLPKRKRRDWLKDFEKETGPPEHDLDAASEASSEPDYNYEFAQMEVIMKTLNSNDPVQNVVQVLEKQYLEEKRSALEEQRLMYERELEQLRQQLSPDRQPQSSGPDRLAYSSQTAQQKVTQWAEERDELFRQSLAKLREQLVKANTLVREANFLAEEMSKLTDYQVTLQIPAANLSANRKRGAIVSEPAIQVRRKGKSTQVWTIEKLENKLIDMRDLYQEWKEKVPEAKRLYGKRGDPFYEAQENHNLIGVANVFLECLFCDVKLQYAVPIISQQGEVAGRLHVEVMRVTGAVPERVVEDDSSENSSESGSLEVVDSSGEIIHRVKKLTCRVKIKEATGLPLNLSNFVFCQYTFWDQCESTVAAPVVDPEVPSPQSKDAQYTVTFSHCKDYVVNVTEEFLEFISDGALAIEVWGHRCAGNGSSIWEVDSLHAKTRTLHDRWNEVTRRIEMWISILELNELGEYAAVELHQAKDVNTGGIFQLRQGHSRRVQVTVKPVQHSGTLPLMVEAILSVSIGCVTARSTKLQRGLDSYQRDDEDGDDMDSYQEEDLNCVRERWSDALIKRREYLDEQIKKVSNKTEKTEDDVEREAQLVEQWVGLTEERNAVLVPAPGSGIPGAPADWIPPPGMETHIPVLFLDLNADDLSANEQLVGPHASGVNSILPKEHGSQFFYLPIIKHSDDEVSATASWDSSVHDSVHLNRVTPQNERIYLIVKTTVQLSHPAAMELVLRKRIAANIYNKQSFTQSLKRRISLKNIFYSCGVTYEIVSNIPKATEEIEDRETLALLAARSENEGTSDGETYIEKYTRGVLQVENILSLERLRQAVTVKEALSTKARHIRRSLSTPNVHNVSSSRPDLSGFDEDDKGWPENQLDMSDYSSSYQDVACYGTLPRDSPRRNKEGCTSETPHALTVSPFKAFSPQPPKFFKPLMPVKEEHKKRIALEARPLLSQEDSEEEENELEAINRKLISSQPYVPVEFADFSVYNASLENREWFSSKVDLSNSRVLEKEVSRSPTTSSITSGYFSHSASNATLSDMVVPSSDSSDQLAIQTKDADSTEHSTPSLVHDFRPSSNKELTEVEKGLVKDKIIVVPLKENSALAKGSPSSQSIPEKNSKSLCRTGSCSELDACPSKISQPARGFCPREVTVEHTTNIQVIIPEAAFWVLCCQ

SEQ ID NO: 840275 - protein, 627 aa, Homo sapiens
MWLADDLSANEQLVGPHASGVNSILPKEHGSQFFYLPIIKHSDDEVSATASWDSSVHDSVHLNRVTPQNERIYLIVKTTVQLSHPAAMELVLRKRIAANIYNKQSFTQSLKRRISLKNIFYSCGVTYEIVSNIPKATEEIEDRETLALLAARSENEGTSDGETYIEKYTRGVLQVENILSLERLRQAVTVKEALSTKARHIRRSLSTPNVHNVSSSRPDLSGFDEDDKGWPENQLDMSDYSSSYQDVACYGTLPRDSPRRNKEGCTSETPHALTVSPFKAFSPQPPKFFKPLMPVKEEHKKRIALEARPLLSQESMPPPQAHNPGCIVPSGSNGSSMPVEHNSKREKKIDSEEEENELEAINRKLISSQPYVPVEFADFSVYNASLENREWFSSKVDLSNSRVLEKEVSRSPTTSSITSGYFSHSASNATLSDMVVPSSDSSDQLAIQTKDADSTEHSTPSLVHDFRPSSNKELTEVEKGLVKDKIIVVPLKENSALAKGSPSSQSIPEKNSKSLCRTGSCSELDACPSKISQPARGFCPREVTVEHTTNILEDHSFTEFMGVSEGKDFDGLTDSSAGELSSRRSLPNKTGGKTVSDGLHHPSQLHSKLENDQVIIPEAAFWVLCCQ

SEQ ID NO: 840276 - protein, 77 aa, Homo sapiens; identical to SEQ ID NO: 840271

SEQ ID NO: 840277 - protein, 121 aa, Homo sapiens [sequence omitted]

SEQ ID NO: 840278 - protein, 230 aa, Homo sapiens
MTRRCMPARPGFPSSPAPGSSPPRCHLRPGSTAHAAAGKRTESPGDRKQSIIDFFKPASKQDRHMLDSPQKSNIKYGGSRLSITGTEQFERKLSSPKESKPKRVPPEKSPIIEAFMKGVKEHHEDHGIHESRRPCLSLASKYLAKGTNIYVPSSYHLPKEMKSLKKKHRSPERRKSLFIHENNEKNDRDRGKTNADSKKQTTVAEADIFNNSSRSLSSRSSLSRHHPEES

SEQ ID NO: 840279 - protein, 492 aa, Homo sapiens
MALNSGSPPAIGPYYENHGYQPENPYPAQPTVVPTVYEVHPAQYYPSPVPQYAPRVLTQASNPVVCTQPKSPSGTVCTSKTKKALCITLTLGTFLVGAALAAGLLWKFMGSKCSNSGIECDSSGTCINPSNWCDGVSHCPGGEDENRCVRLYGPNFILQMYSSQRKSWHPVCQDDWNENYGRAACRDMGYKNNFYSSQGIVDDSGSTSFMKLNTSAGNVDIYKKLYHSDACSSKAVVSLRCIACGVNLNSSRQSRIVGGESALPGAWPWQVSLHVQNVHVCGGSIITPEWIVTAAHCVEKPLNNPWHWTAFAGILRQSFMFYGAGYQVEKVISHPNYDSKTKNNDIALMKLQKPLTFNDLVKPVCLPNPGMMLQPEQLCWISGWGATEEKGKTSEVLNAAKVLLIETQRCNSRYVYDNLITPAMICAGFLQGNVDSCQGDSGGPLVTSKNNIWWLIGDTSWGSGCAKAYRPGVYGNVMVFTDWIYRQMRADG

SEQ ID NO: 840280 - protein, 492 aa, Homo sapiens; identical to SEQ ID NO: 840279

SEQ ID NO: 840281 - protein, 430 aa, Homo sapiens
MTSKQLWSERCTLLLLPETKKALCITLTLGTFLVGAALAAGLLWKFMGSKCSNSGIECDSSGTCINPSNWCDGVSHCPGGEDENRCVRLYGPNFILQMYSSQRKSWHPVCQDDWNENYGRAACRDMGYKNNFYSSQGIVDDSGSTSFMKLNTSAGNVDIYKKLYHSDACSSKAVVSLRCIACGVNLNSSRQSRIVGGESALPGAWPWQVSLHVQNVHVCGGSIITPEWIVTAAHCVEKPLNNPWHWTAFAGILRQSFMFYGAGYQVEKVISHPNYDSKTKNNDIALMKLQKPLTFNDLVKPVCLPNPGMMLQPEQLCWISGWGATEEKGKTSEVLNAAKVLLIETQRCNSRYVYDNLITPAMICAGFLQGNVDSCQGDSGGPLVTSKNNIWWLIGDTSWGSGCAKAYRPGVYGNVMVFTDWIYRQMRADG

SEQ ID NO: 840282 - protein, 385 aa, Homo sapiens
MDTNRKTPIPHSPLWSPLSTRCIRLSTTRPPCPGGEDENRCVRLYGPNFILQMYSSQRKSWHPVCQDDWNENYGRAACRDMGYKNNFYSSQGIVDDSGSTSFMKLNTSAGNVDIYKKLYHSDACSSKAVVSLRCIACGVNLNSSRQSRIVGGESALPGAWPWQVSLHVQNVHVCGGSIITPEWIVTAAHCVEKPLNNPWHWTAFAGILRQSFMFYGAGYQVEKVISHPNYDSKTKNNDIALMKLQKPLTFNDLVKPVCLPNPGMMLQPEQLCWISGWGATEEKGKTSEVLNAAKVLLIETQRCNSRYVYDNLITPAMICAGFLQGNVDSCQGDSGGPLVTSKNNIWWLIGDTSWGSGCAKAYRPGVYGNVMVFTDWIYRQMRADG

SEQ ID NO: 840283 - protein, 492 aa, Homo sapiens; identical to SEQ ID NO: 840279

SEQ ID NO: 840284 - protein, 492 aa, Homo sapiens; identical to SEQ ID NO: 840279

SEQ ID NO: 840285 - protein, 71 aa, Homo sapiens
AKDLMESKMKGISTNICAHLHLVQAGCYSGAGNAEVNRVRQMSLLSGALPLFWMSVVGTGQVWSDRWETNN

SEQ ID NO: 840286 - protein, 71 aa, Homo sapiens; identical to SEQ ID NO: 840285

SEQ ID NO: 840287 - protein, 132 aa, Homo sapiens
VRAGEGNLGAWDPPMPPAPPGGESGCEERGAAGHIEHSRYLSLLDAVDNSKMALNSGSPPAIGPYYENHGYKLGFWLCQSLQTRSVRECDGIHGLDLSTNEGRRLIHMVFVLDVVLQENNGAGFASPCMIYS

SEQ ID NO: 840288 - protein, 81 aa, Homo sapiens
CPGGEDENRCGESALTLGRDSSAHLGDSSRVQGPLGDWAWRASSTLTHDVIESLLQAEPWGSERLCFRPNLTQQVGDDRAT

SEQ ID NO: 840289 - protein, 250 aa, Homo sapiens
RHVARSWPIRFESHFFPLTPPSGAVVRSDRSKMATVEPETTPTPNPPTTEEEKTESNQEVANPEHYIKHPLQNRWALWFFKNDKSKTWQANLRLISKFDTVEDFWALYNHIQLSSNLMPGCDYSLFKDGIEPMWEDEKNKRGGRWLITLNKQQRRSDLDRFWLETLLCLIGESFDDYSDDVCGAVVNVRAKGDKIAIWTTECENQRSCYTYREGIQGNRLGLPPKIVIGYQSHADTATKSGSTTKNRFVV

SEQ ID NO: 840290 - protein, 135 aa, Homo sapiens
RHVARSWPIRFESHFFPLTPPSGAVVRSDRSKMATVEPETTPTPNPPTTEEEKTESNQEVANPEHYIKHPLQNRWALWFFKNDKSKTWQANLRLISKFDTVEDFWALYNHIQLSSNLMPGCDYSLFKKGGKFGGA

SEQ ID NO: 840291 - protein, 250 aa, Homo sapiens; identical to SEQ ID NO: 840289

SEQ ID NO: 840292 - protein, 239 aa, Homo sapiens
GHARVPEEGDGERAHGGDRSKMATVEPETTPTPNPPTTEEEKTESNQEVANPEHYIKHPLQNRWALWFFKNDKSKTWQANLRLISKFDTVEDFWALYNHIQLSSNLMPGCDYSLFKDGIEPMWEDEKNKRGGRWLITLNKQQRRSDLDRFWLETLLCLIGESFDDYSDDVCGAVVNVRAKGDKIAIWTTECENQRSCYTYREGIQGNRLGLPPKIVIGYQSHADTATKSGSTTKNRFVV

SEQ ID NO: 840293 - protein, 246 aa, Homo sapiens
MKKKQNKKERKKMRAEDGENDAIKKQAESLRESQETTPTPNPPTTEEEKTESNQEVANPEHYIKHPLQNRWALWFFKNDKSKTWQANLRLISKFDTVEDFWALYNHIQLSSNLMPGCDYSLFKDGIEPMWEDEKNKRGGRWLITLNKQQRRSDLDRFWLETLLCLIGESFDDYSDDVCGAVVNVRAKGDKIAIWTTECENQRSCYTYREGIQGNRLGLPPKIVIGYQSHADTATKSGSTTKNRFVV

SEQ ID NO: 840294 - protein, 224 aa, Homo sapiens
EQIASRMAMVEAETTPTPNPPTTEEEKTESNQEVANPEHYIKHPLQNRWALWFFKNDKSKTWQANLRLISKFDTVEDFWALYNHIQLSSNLMPGCDYSLFKDGIEPMWEDEKNKRGGRWLITLNKQQRRSDLDRFWLETLLCLIGESFDDYSDDVCGAVVNVRAKGDKIAIWTTECENQRSCYTYREGIQGNRLGLPPKIVIGYQSHADTATKSGSTTKNRFVV

SEQ ID NO: 840295 - protein, 232 aa, Homo sapiens
RHVARSWPIRFESHFFPLTPPSGAVVRSDRSKMATVEPETTPTPNPPTTEEEKTESNQEVANPEHYIKHPLQNRWALWFFKNDKSKTWQANLRLISKFDTVEDFWALYNHIQLSSNLMPGCDYSLFKDGIEPMWEDESDLDRFWLETLLCLIGESFDDYSDDVCGAVVNVRAKGDKIAIWTTECENQRSCYTYREGIQGNRLGLPPKIVIGYQSHADTATKSGSTTKNRFVV

SEQ ID NO: 840296 - protein, 220 aa, Homo sapiens
GHARVPEEGDGERAHGGDRSKMATVEPETTPTPNPPTTEEEKTESNQEVANPEHYIKHPLQNRWALWFFKNDKSKTWQANLRLISKFDTVEDFWALYNHIQLSSNLMPGCDYSLFKDGIEPMWEDEKNKRGGRWLITLNKQQRRSDLDRFWLETLLCLIGESFDDYSDDVCGAVVNVRAKGDKIAIWTTECVPPKIVIGYQSHADTATKSGSTTKNRFVV

SEQ ID NO: 840297 - protein, 250 aa, Homo sapiens; identical to SEQ ID NO: 840289

SEQ ID NO: 840298 - protein, 250 aa, Homo sapiens; identical to SEQ ID NO: 840289

SEQ ID NO: 840299 - protein, 250 aa, Homo sapiens; identical to SEQ ID NO: 840289

SEQ ID NO: 840300 - protein, 250 aa, Homo sapiens; identical to SEQ ID NO: 840289

SEQ ID NO: 840301 - protein, 133 aa, Homo sapiens
MPGCDYSLFKDGIEPMWEDEKNKRGGRWLITLNKQQRRSDLDRFWLETLLCLIGESFDDYSDDVCGAVVNVRAKGDKIAIWTTECENQRSCYTYREGIQGNRLGLPPKIVIGYQSHADTATKSGSTTKNRFVV

SEQ ID NO: 840302 - protein, 214 aa, Homo sapiens
VTWPEAGQSGLNLIFFLLPPLLERLCDQIDLRWRLSNRWALWFFKNDKSKTWQANLRLISKFDTVEDFWALYNHIQLSSNLMPGCDYSLFKDGIEPMWEDEKNKRGGRWLITLNKQQRRSDLDRFWLETLLCLIGESFDDYSDDVCGAVVNVRAKGDKIAIWTTECENQRSCYTYREGIQGNRLGLPPKIVIGYQSHADTATKSGSTTKNRFVV

SEQ ID NO: 840303 - protein, 133 aa, Homo sapiens; identical to SEQ ID NO: 840301

SEQ ID NO: 840304 - protein, 281 aa, Homo sapiens
RHVARSWPIRFESHFFPLTPPSGAVVRSDRSKMATVEPETTPTPNPPTTEEEKTESNQEVANPEHYIKHPLQNRWALWFFKNDKSKTWQANLRLISKFDTVEDFWALYNHIQLSSNLMPGCDYSLFKDGIEPMWEDEKNKRGGRWLITLNKQQRRSDLDRFWLETRWDLAMLPRLVSNFWPQVILPLQPPKVLELQLLCLIGESFDDYSDDVCGAVVNVRAKGDKIAIWTTECENQRSCYTYREGIQGNRLGLPPKIVIGYQSHADTATKSGSTTKNRFVV

SEQ ID NO: 840305 - protein, 177 aa, Homo sapiens
EQIASRMAMVEAETTPTPNPPTTEEEKTESNQEVANPEHYIKHPLQNRWALWFFKNDKSKTWQANLRLISKFDTVEDFWALYNHIQLSSNLMPGCDYSLFKDGIEPMWEDEKNKRGGRWLITLNKQQRRSDLDRFWLETEGIQGNRLGLPPKIVIGYQSHADTATKSGSTTKNRFVV

SEQ ID NO: 840306 - protein, 240 aa, Homo sapiens
RRAPARGRRQRAAQPSRASRGRPPPCRPPRRASWGARARDPRTQLRRTGGRARALEATGMMLRVLVGAVLPAMLLAAPPPINKLALFPDKSAWCEAKNITQIVGHSGCEAKSIQNRACLGQCFSYSVPNTFPQSTESLVHCDSCMPAQSMWEIVTLECPGHEEVPRVDKLVEKILHCSCQACGKEPSHEGLSVYVQGEDGPGSQPGTHPHPHPHPHPGGQTPEPEDPPGAPHTEEEGAED

SEQ ID NO: 840307 - protein, 216 aa, Homo sapiens
MPGNLMSQTSRAVSIWKFPAKLGKTHGHRALEATGMMLRVLVGAVLPAMLLAAPPPINKLALFPDKSAWCEAKNITQIVGHSGCEAKSIQNRACLGQCFSYSVPNTFPQSTESLVHCDSCMPAQSMWEIVTLECPGHEEVPRVDKLVEKILHCSCQACGKEPSHEGLSVYVQGEDGPGSQPGTHPHPHPHPHPGGQTPEPEDPPGAPHTEEEGAED

SEQ ID NO: 840308 - protein, 240 aa, Homo sapiens; identical to SEQ ID NO: 840306

SEQ ID NO: 840309 - protein, 240 aa, Homo sapiens; identical to SEQ ID NO: 840306

SEQ ID NO: 840310 - protein, 240 aa, Homo sapiens; identical to SEQ ID NO: 840306

SEQ ID NO: 840311 - protein, 161 aa, Homo sapiens
RRAPARGRRQRAAQPSRASRGRPPPCRPPRRASWGARARDPRTQLRRTGGRARALEATGMMLRVLVGAVLPAMLLAAPPPINKLALFPDKSAWCEAKNITQIVGHSGCEAKSIQNRACLGQCFSYSVPNTFPQSTESLVHCDSCMPAQSMWEIPWGCRWYC

SEQ ID NO: 840312 - protein, 240 aa, Homo sapiens; identical to SEQ ID NO: 840306

SEQ ID NO: 840313 - protein, 240 aa, Homo sapiens; identical to SEQ ID NO: 840306

SEQ ID NO: 840314 - protein, 240 aa, Homo sapiens; identical to SEQ ID NO: 840306

SEQ ID NO: 840315 - protein, 206 aa, Homo sapiens
RRAPARGRRQRAAQPSRASRGRPPPCRPPRRASWGARARDPRTQLRRTGGRARALEATGMMLRVLVGAVLPAMLLAAPPPINKLALFPDKSAWCEAKNITQIVGHSGCEAKSIQNRACLGQCFSYSVPNTFPQSTESLVHCDSCMPAQSMWEIVTLECPGHEEVPRVDKLVEKIWLPAHCLLPGVAWPSWLLRRGLLELVTIGQSP

SEQ ID NO: 840316 - protein, 240 aa, Homo sapiens; identical to SEQ ID NO: 840306

SEQ ID NO: 840317 - protein, 240 aa, Homo sapiens; identical to SEQ ID NO: 840306

SEQ ID NO: 840318 - protein, 240 aa, Homo sapiens; identical to SEQ ID NO: 840306

SEQ ID NO: 840319 - protein, 240 aa, Homo sapiens; identical to SEQ ID NO: 840306

SEQ ID NO: 840320 - protein, 240 aa, Homo sapiens; identical to SEQ ID NO: 840306

SEQ ID NO: 840321 - protein, 240 aa, Homo sapiens; identical to SEQ ID NO: 840306

SEQ ID NO: 840322 - protein, 240 aa, Homo sapiens; identical to SEQ ID NO: 840306

SEQ ID NO: 840323 - protein, 282 aa, Homo sapiens
RRAPARGRRQRAAQPSRASRGRPPPCRPPRRASWGARARDPRTQLRRTGGRARALEATGMMLRVLVGAVLPAMLLAAPPPINKLALFPDKSAWCEAKNITQIVGHSGCEAKSIQNRACLGQCFSYSVPNTFPQSTESLVHCDSCMPAQSMWEIVTLECPGHEEVPRVDKLVEKILHCSCQACGKEPSHEGLSVYVQGEDGPGSQPGTHPQHGIGGYRTDWSATAVPVRLVTVDGGGGLGGGDTSMSACRVCQSTGPARCLTACDDVYVAGKAEPEEPGVVRV

SEQ ID NO: 840324 - protein, 62 aa, Homo sapiens
  misc_feature (26)..(26): Xaa can be any naturally occurring amino acid
MKRTQDKDTLPDSQLLPLLEIRFLEXLIRQFGEGFTWRLSNAPILPTQCATRSRRALYLSDP

SEQ ID NO: 840325 - protein, 61 aa, Homo sapiens
  misc_feature (25)..(25): Xaa can be any naturally occurring amino acid
  misc_feature (53)..(53): Xaa can be any naturally occurring amino acid
MKRTQDKTRYLTLSYCRSSKFVSWXGLYASSGKVSPGDYPMLPYYPHNAPPDXAAPCIYQT

SEQ ID NO: 840326 - protein, 56 aa, Homo sapiens
TRVRGFILEVSETKNPSEGTDQGHSFFWRLSGKNPFPCLSQLSEAAYLLWPVASFS

SEQ ID NO: 840327 - protein, 108 aa, Homo sapiens
RGEKKGEGRRRKMEEEEGEGERGGRGEGRGKRRGRGRGRGGREGEASRKKRRSEKRKKHGRKRRNEGTHQAAFPAGPMPCLRGRREPSSASPNGRVQGCFCLIMMGLV

SEQ ID NO: 840328 - protein, 288 aa, Homo sapiens
MSDSGEQNYGERESRSASRSGSAHGSGKSARHTPARSRSKEDSRRSRSKSRSRSESRSRSRRSSRRHYTRSRSRSRSHRRSRSRSYSRDYRRRHSHSHSPMSTRRRHVGNRANPDPNCCLGVFGLSLYTTERDLREVFSKYGPIADVSIVYDQQSRRSRGFAFVYFENVDDAKEAKERANGMELDGRRIRVDFSITKRPHTPTPGIYMGRPTYGSSRRRDYYDRGYDRGYDDRDYYSRSYRGGGGGGGGWRAAQDRDQIYRRRSPSPYYSRGGYRSRSRSRSYSPRRY

SEQ ID NO: 840329 - protein, 288 aa, Homo sapiens; identical to SEQ ID NO: 840328

SEQ ID NO: 840330 - protein, 188 aa, Homo sapiens
MSTRRRHVGNRANPDPNCCLGVFGLSLYTTERDLREVFSKYGPIADVSIVYDQQSRRSRGFAFVYFENVDDAKEAKERANGMELDGRRIRVDFSITKRPHTPTPGIYMGRPTYGSSRRRDYYDRGYDRGYDDRDYYSRSYRGGGGGGGGWRAAQDRDQIYRRRSPSPYYSRGGYRSRSRSRSYSPRRY

SEQ ID NO: 840331 - protein, 268 aa, Homo sapiens
MSDSGEQNYGERESRSASRSGSAHGSGKSARHTPARSRSKEDSRRSRSKSRSRSESRSRSRRSSRRHYTRSRSRSRSHRRSRSRSYSRDYRRRHSHSHSPMSTRRRHVGNRANPDPNCCLGVFGLSLYTTERDLREVFSKYGPIADVSIVYDQQSRRSRGFAFVYFENVDDAKEAKERANGMELDGRRIRVDFSITKRPHTPTPGIYMGRPTYGSSRRRDYYDRGYDRGYDDRDYYSRSYRRRSPSPYYSRGGYRSRSRSRSYSPRRY

SEQ ID NO: 840332 - protein, 188 aa, Homo sapiens; identical to SEQ ID NO: 840330

SEQ ID NO: 840333 - protein, 188 aa, Homo sapiens; identical to SEQ ID NO: 840330

SEQ ID NO: 840334 - protein, 220 aa, Homo sapiens
MSDSGEQNYGERESRSASRSGSAHGSGKSARHTPARSRSKEDSRRSRSKSRSRSESRSRSRRSSRRHYTRSRSRSRSHRRSRSRSYSRDYRRRHSHSHSPMSTRRRHVGNRANPDPNCCLGVFGLSLYTTERDLREVFSKYGPIADVSIVYDQQSRRSRGFAFVYFENVDDAKEAKERANGMELDGRRIRVDFSITKRPHTPTPGIYMGRPTYGSSRRRD

SEQ ID NO: 840335 - protein, 188 aa, Homo sapiens; identical to SEQ ID NO: 840330

SEQ ID NO: 840336 - protein, 107 aa, Homo sapiens
MELDGRRIRVDFSITKRPHTPTPGIYMGRPTYGSSRRRDYYDRGYDRGYDDRDYYSRSYRGGGGGGGGWRAAQDRDQIYRRRSPSPYYSRGGYRSRSRSRSYSPRRY

SEQ ID NO: 840337 - protein, 304 aa, Homo sapiens
MSDSGEQNYGERESRSASRSGSAHGSGKSARHTPARSRSKEDSRRSRSKSRSRSESRSRSRRSSRRHYTRSRSRSRSHRRSRSRSYSRDYRRRHSHSHSPMSTRRRHVGNRANPDPNCCLGVFGLSLYTTERDLREVFSKYGPIADVSIVYDQQSRRSRGFAFVYFENVDDAKEAKERANGMELDGRRIRVDFSITKRPHTPTPGIYMGRPTYGSSRRRDYYDRGYDRGYDDRDYYSRSYRGGGGGGGGWRAAQDRDQIYRNQEFNKKGGQPSSLTNRVGGGTTQNLRYPESFGINIFKLGPGI

SEQ ID NO: 840338 - protein, 264 aa, Homo sapiens
MSDSGEQNYGERESRSASRSGSAHGSGKSARHTPARSRSKEDSRRSRSKSRSRSESRSRSRRSSRRHYTRSRSRSRSHRRSRSRSYSRDYRRRHSHSHSPMSTRRRHVGNRANPDPNCCLGVFGLSLYTTERDLREVFSKYGPIADVSIVYDQQSRRSRGFAFVYFENVDDAKEAKERANGMELDGRRIRVDFSITKRPHTPTPGIYMGRPTYGSSRRRDYYDRGYDRGYDDRDYYSRSYRGGRLRRTERSDWHAAAQDRASDP

SEQ ID NO: 840339 - protein, 164 aa, Homo sapiens
MSDSGEQNYGERESRSASRSGSAHGSGKSARHTPARSRSKEDSRRSRSKSRSRSESRSRSRRSSRRHYTRSRSRSRSHRRSRSRSYSRDYRRRHSHSHSPMSTRRRHVGNRANPDPNCCLGVFGLSLYTTERDLREVFSKYGPIADVSIVYDQQSRRSRGFAKK

SEQ ID NO: 840340 - protein, 38 aa, Homo sapiens
MSDSGEQNYGERVNVEEGKCGSRHLTSFINEYLKLRNK

SEQ ID NO: 840341 - protein, 38 aa, Homo sapiens; identical to SEQ ID NO: 840340

SEQ ID NO: 840342 - protein, 288 aa, Homo sapiens; identical to SEQ ID NO: 840328

SEQ ID NO: 840343 - protein, 288 aa, Homo sapiens; identical to SEQ ID NO: 840328

SEQ ID NO: 840344 - protein, 288 aa, Homo sapiens; identical to SEQ ID NO: 840328

SEQ ID NO: 840345 - protein, 188 aa, Homo sapiens; identical to SEQ ID NO: 840330

SEQ ID NO: 840346 - protein, 188 aa, Homo sapiens; identical to SEQ ID NO: 840330

SEQ ID NO: 840347 - protein, 288 aa, Homo sapiens; identical to SEQ ID NO: 840328

SEQ ID NO: 840348 - protein, 238 aa, Homo sapiens
LTYALTGSRSRRSSRRHYTRSRSRSRSHRRSRSRSYSRDYRRRHSHSHSPMSTRRRHVGNRANPDPNCCLGVFGLSLYTTERDLREVFSKYGPIADVSIVYDQQSRRSRGFAFVYFENVDDAKEAKERANGMELDGRRIRVDFSITKRPHTPTPGIYMGRPTYGSSRRRDYYDRGYDRGYDDRDYYSRSYRGGGGGGGGWRAAQDRDQIYRRRSPSPYYSRGGYRSRSRSRSYSPRRY

SEQ ID NO: 840349 - protein, 134 aa, Homo sapiens
EDLSPDLGTSKFVSAQPPEQAKERANGMELDGRRIRVDFSITKRPHTPTPGIYMGRPTYGSSRRRDYYDRGYDRGYDDRDYYSRSYRGGGGGGGGWRAAQDRDQIYRRRSPSPYYSRGGYRSRSRSRSYSPRRY

SEQ ID NO: 840350 - protein, 247 aa, Homo sapiens
MSDSGEQNYGERESRSASRSGSAHGSGKSARHTPARSRSKEDSRRSRSKSRSRSESRSRSRRSSRRHYTRSRSRSRSHRRSRSRSYSRDYRRRHSHSHSPMSTRRRHVGNRANPDPNCCLGVFGLSLYTTERDLREVFSKYGPIADVSIVYDQQSRRSRGFAFVYFENVDDAKEAKERANGMELDGRRIRVDFSITKRPHTPTPGIYMGRPTYGSSRRRDYYDRGYDRGYDDRDYYSRSYRGGGGGR

SEQ ID NO: 840351 - protein, 113 aa, Homo sapiens
MSDSGEQNYGERESRSASRSGSAHGSGKSARHTPARSRSKEDSRRSRSKSRSRSESRSRSRRSSRRHYTRSRSRSRSHRRSRSRSYSRDYRRRHSHSHSPMSTRRRHVGNRVR

SEQ ID NO: 840352 - protein, 101 aa, Homo sapiens
FCSVVQAGVQWRDLGSLQPPPPGFKRLSRLSLPSSWDYRCPPPRPTTFFVFLVEAGFHHVDQAGLELLTSGNPPASASQSAEITGVSHRARPSSVYSLPTQ

SEQ ID NO: 840353 - protein, 154 aa, Homo sapiens
MSAAEAWGLRSRTIPPPRQSERAPVVTFIYLSVHPKLSLVSLTLRRDSNLKRCSKLLGPSPKHPFDWDPRPCMGPRAEGGVYVCECRGRLGLRPLLLPPLASGVGVGCCGCVCGCGSVPGVLSPGCVQPPLHPPYLRVTNPGCDSPPAGTVQPF

SEQ ID NO: 840354 - protein, 295 aa, Homo sapiens
MEKMSRPLPLNPTFIPPPYGVLRSLLENPLKLPLHHEDAFSKDKDKEKKLDDESNSPTVPQSAFLGPTLWDKTLPYDGDTFQLEYMDLEEFLSENGIPPSPSQHDHSPHPPGLQPASSAAPSVMDLSSRASAPLHPGIPSPNCMQSPIRPGQLLPANRNTPSPIDPDTIQVPVGYEPDPADLALSSIPGQEMFDPRKRKFSEEELKPQPMIKKARKVFIPDDLKDDKYWARRRKNNMAAKRSRDARRLKENQIAIRASFLEKENSALRQEVADLRKELGKCKNILAKYEARHGPL

SEQ ID NO: 840355 - protein, 295 aa, Homo sapiens; identical to SEQ ID NO: 840354

SEQ ID NO: 840356 - protein, 106 aa, Homo sapiens
STGLGRNQGTYNHGGKGNKHVLLHVVARRRMRAERRGKPLIKPSDLMRTYYHANSVEEIPDYLPLGPSHNMWRLWVLQFNMRFGWGHSQTTSTGILYCKFLLNFKS

SEQ ID NO: 840357 - protein, 312 aa, Homo sapiens
SELRARLQGFAGTRAGDRARGSCRGGKGARAPCFRRSGALPGSPALALLAAPAAGRAACKMSVRRGRRPARPGTRLSWLLCCSALLSPAAGYVIVSSVSWAVTNEVDEELDSASTEEAMPALLEDSGSIWQQSFPASAHKEDAHLRPRAGAARARPPPAPPGMFSYRREGGQTASAPPGPRLRAATARSLAHASVWGCWPPCPPTRRSKDCHLGTACPSVMAPSTIALGFLSSTMTAKDPVVADLMKNPMASLMLPESEGEFCRTNIVDPEDPRCVQLTAHWADDSQCLQTEVEFGKQPSFQGTRVRNGLSY

SEQ ID NO: 840358 - protein, 214 aa, Homo sapiens
SELRARLQGFAGTRAGDRARGSCRGGKGARAPCFRRSGALPGSPALALLAAPAAGRAACKMSVRRGRRPARPGTRLSWLLCCSALLSPAAGYVIVSSVSWAVTNEVDEELDSASTEEAMPALLEDSGSIWQQSFPASAHKEDAHLRPRAGAARARPPPAPPGMFSYRREGGQTASAPPGPRLRAATARSLAHASVWGCLATVSTHKKSLVFALK

SEQ ID NO: 840359 - protein, 264 aa, Homo sapiens
SELRARLQGFAGTRAGDRARGSCRGGKGARAPCFRRSGALPGSPALALLAAPAAGRAACKMSVRRGRRPARPGTRLSWLLCCSALLSPAAGYVIVSSVSWAVTNEVDEELDSASTEEAMPALLEDSGSIWQQSFPASAHKEDAHLRPRAGAARARPPPAPPGMFSYRREGGQTASAPPGPRLRAATARSLAHASVWGCWPPCPPTRRSKDCHLGTACPSVMAPSTIALGFLSSTMTAKDPVVADLMKNPMASLMLPESEGEFCR

SEQ ID NO: 840360 - protein, 243 aa, Homo sapiens
SELRARLQGFAGTRAGDRARGSCRGGKGARAPCFRRSGALPGSPALALLAAPAAGRAACKMSVRRGRRPARPGTRLSWLLCCSALLSPAAGYVIVSSVSWAVTNEVDEELDSASTEEAMPALLEDSGSIWQQSFPASAHKEDAHLRPRAGAARARPPPAPPGMFSYRREGGQTASAPPGPRLRAATARSLAHASVWGCLATVSTHKKIQGLPFGNCLPVSDGPFNNSTGIPFFYNDSQGPRGG

SEQ ID NO: 840361 - protein, 243 aa, Homo sapiens; identical to SEQ ID NO: 840360

SEQ ID NO: 840362 - protein, 30 aa, Homo sapiens
RTFPATLVLPTEIGVHGAHLFPQETLGHHL

SEQ ID NO: 840363 - protein, 504 aa, Homo sapiens
MCSRVPLLLPLLLLLALGPGVQGCPSGCQCSQPQTVFCTARQGTTVPRDVPPDTVGLYVFENGITMLDAGSFAGLPGLQLLDLSQNQIASLPSGVFQPLANLSNLDLTANRLHEITNETFRGLRRLERLYLGKNRIRHIQPGAFDTLDRLLELKLQDNELRALPPLRLPRLLLLDLSHNSLLALEPGILDTANVEALRLAGLGLQQLDEGLFSRLRNLHDLDVSDNQLERVPPVIRGLRGLTRLRLAGNTRIAQLRPEDLAGLAALQELDVSNLSLQALPGDLSGLFPRLRLLAAARNPFNCVCPLSWFGPWVRESHVTLASPEETRCHFPPKNAGRLLLELDYADFGCPATTTTATVPTTRPVVREPTALSSSLAPTWLSPTEPATEAPSPPSTAPPTVGPVPQPQDCPPSTCLNGGTCHLGTRHHLACLCPEGFTGLYCESQMGQGTRPSPTPVTPRPPRSLTLGIEPVSPTSLRVGLQRYLQGSSVQLRSLQSPLHAKPYI

SEQ ID NO: 840364 - protein, 436 aa, Homo sapiens
MCSRVPLLLPLLLLLALGPGVQGCPSGCQCSQPQTVFCTARQGTTVPRDVPPDTVGLYVFENGITMLDAGSFAGLPGLQLLDLSQNQIASLPSGVFQPLANLSNLDLTANRLHEITNETFRGLRRLERLYLGKNRIRHIQPGAFDTLDRLLELKLQDNELRALPPLRLPRLLLLDLSHNSLLALEPGILDTANVEALRLAGLGLQQLDEGLFSRLRNLHDLDVSDNQLERVPPVIRGLRGLTRLRLAGNTRIAQLRPEDLAGLAALQELDVSNLSLQALPGDLSGLFPRLRLLAAARNPFNCVCPLSWFGPWVRESHVTLASPEETRCHFPPKNAGRLLLELDYADFGCPATTTTATVPTTRPVVREPTALSSSLAPTWLSPTEPAMKEAPGKSRGRAGRRLCDSSLGPRKRRNKRNWKGRCFRNMFCFFKIYIYL

SEQ ID NO: 840365 - protein, 673 aa, Homo sapiens
MCSRVPLLLPLLLLLALGPGVQGCPSGCQCSQPQTVFCTARQGTTVPRDVPPDTVGLYVFENGITMLDAGSFAGLPGLQLLDLSQNQIASLPSGVFQPLANLSNLDLTANRLHEITNETFRGLRRLERLYLGKNRIRHIQPGAFDTLDRLLELKLQDNELRALPPLRLPRLLLLDLSHNSLLALEPGILDTANVEALRLAGLGLQQLDEGLFSRLRNLHDLDVSDNQLERVPPVIRGLRGLTRLRLAGNTRIAQLRPEDLAGLAALQELDVSNLSLQALPGDLSGLFPRLRLLAAARNPFNCVCPLSWFGPWVRESHVTLASPEETRCHFPPKNAGRLLLELDYADFGCPATTTTATVPTTRPVVREPTALSSSLAPTWLSPTEPATEAPSPPSTAPPTVGPVPQPQDCPPSTCLNGGTCHLGTRHHLACLCPEGFTGLYCESQMGQGTRPSPTPVTPRPPRSLTLGIEPVSPTSLRVGLQRYLQGSSVQLRSLRLTYRNLSGPDKRLVTLRLPASLAEYTVTQLRPNATYSVCVMPLGPGRVPEGEEACGEAHTPPAVHSNHAPVTQAREGNLPLLIAPALAAVLLAALAAVGAAYCVRRGRAMAAAAQDKGQVGPGAGPLELEGVKVPLEPGPKATEGGGEALPSGSECEVPLMGFPGPGLQSPLHAKPYI

SEQ ID NO: 840366 - protein, 673 aa, Homo sapiens; identical to SEQ ID NO: 840365

SEQ ID NO: 840367 - protein, 104 aa, Homo sapiens
SKNHCAEGYCTSKMQAIVITLRTDPDFQALGCLLLGHSFKLIRPLHFCLWGLSCKGTWIRLASVLNLVVIILCNYYHSLGMPPFCRCGYGGLEKLKNTCKTSHS

SEQ ID NO: 840368 - protein, 771 aa, Homo sapiens
MKTDSIQNRTARALGNLAMEPESCGDIHCAGAVPLLVESLTACQDSQCLQSVVRALRNLADSPQHRLALAQQGAVRPLAELLATAPDAALTLALVRALLELSRGCSRACAEQLSLGGGLGPLVSLASHPKRAVREGTILILANLCAQGLIRPALGNAGGVEVLVDELRQRRDPNGASPTSQQPLVRAVCLLCREAINRARLRDAGGLDLLMGLLRDPRASAWHPRIVAALVGFLYDTGALGRLQALGLVPLLAGQLCGEAGEEEEEGREAASWDFPEERTPERAQGGSFRSLRSWLISEGYATGPDDISPDWSPEQCPPEPMEPASPAPTPTSLRAPRTQRTPGRSPAAAIEEPWGREGPALLLLSRFSQAPDPSGALVTGPALYGLLTYVTGAPGPPSPRALRILSRLTCNPACLEAFVRSYGAALLRAWLVLGVAPDDWPAPRARPTLHSRHRELGERLLQNLTVQAESPFGVGALTHLLLSGSPEDRVACALTLPFICRKPSLWRRLLLEQGGLRLLLAALTRPAPHPLFLFFAADSLSCLQDLVSPTVSPAVPQAVPMDLDSPSPCLYEPLLGPAPVPAPDLHFLLDSGLQLPAQRAASATASPFFRALLSGSFAEAQMDLVPLRGLSPGAAWPVLHHLHGCRGCGAALGPVPPPGQPLLGSEAEEALEAAGRFLLPGLEEELEEAVGRIHLGPQGGPESVGEVFRLGRPRLAAHCARWTLGSEQCPRKRGLALVGLVEAAGEEAGPLTEALLAVVMGIELGARVPA

SEQ ID NO: 840369 - protein, 967 aa, Homo sapiens
MAAAKPTLTDSLSFCLAQLAAAAGEALGGEKDPATNETPLSRALLALRTRHIKAAGGIERFRARGGLRPLLALLRRAAAAGSAPSQAGPGSAPSSAASGASSPAPASGPAPSAVSSSSPTPPVRLRKTLDLALSILADCCTEGACRTEVRRLGGILPLVTILQCMKTDSIQNRTARALGNLAMEPESCGDIHCAGAVPLLVESLTACQDSQCLQSVVRALRNLADSPQHRLALAQQGAVRPLAELLATAPDAALTLALVRALLELSRGCSRACAEQLSLGGGLGPLVSLASHPKRAVREGTILILANLCAQGLIRPALGNAGGVEVLVDELRQRRDPNGASPTSQQPLVRAVCLLCREAINRARLRDAGGLDLLMGLLRDPRASAWHPRIVAALVGFLYDTGALGRLQALGLVPLLAGQLCGEAGEEEEEGREAASWDFPEERTPERAQGGSFRSLRSWLISEGYATGPDDISPDWSPEQCPPEPMEPASPAPTPTSLRAPRTQRTPGRSPAAAIEEPWGREGPALLLLSRFSQAPDPSGALVTGPALYGLLTYVTGAPGPPSPRALRILSRLTCNPACLEAFVRSYGAALLRAWLVLGVAPDDWPAPRARPTLHSRHRELGERLLQNLTVQAESPFGVGALTHLLLSGSPEDRVACALTLPFICRGVGSGCLAGLGEECCVSQARCPPFERPSLPCRKPSLWRRLLLEQGGLRLLLAALTRPAPHPLFLFFAADSLSCLQDLVSPTVSPAVPQAVPMDLDSPSPCLYEPLLGPAPVPAPDLHFLLDSGLQLPAQRAASATASPFFRALLSGSFAEAQMDLVPLRGLSPGAAWPVLHHLHGCRGCGAALGPVPPPGQPLLGSEAEEALEAAGRFLLPGLEEELEEAVGRIHLGPQGGPESVGEVFRLGRPRLAAHCARWTLGSEQCPRKRGLALVGLVEAAGEEAGPLTEALLAVVMGIELGARVPA

SEQ ID NO: 840370 - protein, 941 aa, Homo sapiens
MAAAKPTLTDSLSFCLAQLAAAAGEALGGEKDPATNETPLSRALLALRTRHIKAAGGIERFRARGGLRPLLALLRRAAAAGSAPSQAGPGSAPSSAASGASSPAPASGPAPSAVSSSSPTPPVRLRKTLDLALSILADCCTEGACRTEVRRLGGILPLVTILQCMKTDSIQNRTARALGNLAMEPESCGDIHCAGAVPLLVESLTACQDSQCLQSVVRALRNLADSPQHRLALAQQGAVRPLAELLATAPDAALTLALVRALLELSRGCSRACAEQLSLGGGLGPLVSLASHPKRAVREGTILILANLCAQGLIRPALGNAGGVEVLVDELRQRRDPNGASPTSQQPLVRAVCLLCREAINRARLRDAGGLDLLMGLLRDPRASAWHPRIVAALVGFLYDTGALGRLQALGLVPLLAGQLCGEAGEEEEEGREAASWDFPEERTPERAQGGSFRSLRSWLISEGYATGPDDISPDWSPEQCPPEPMEPASPAPTPTSLRAPRTQRTPGRSPAAAIEEPWGREGPALLLLSRFSQAPDPSGALVTGPALYGLLTYVTGAPGPPSPRALRILSRLTCNPACLEAFVRSYGAALLRAWLVLGVAPDDWPAPRARPTLHSRHRELGERLLQNLTVQAESPFGVGALTHLLLSGSPEDRVACALTLPFICRPSLPCRKPSLWRRLLLEQGGLRLLLAALTRPAPHPLFLFFAADSLSCLQDLVSPTVSPAVPQAVPMDLDSPSPCLYEPLLGPAPVPAPDLHFLLDSGLQLPAQRAASATASPFFRALLSGSFAEAQMDLVPLRGLSPGAAWPVLHHLHGCRGCGAALGPVPPPGQPLLGSEAEEALEAAGRFLLPGLEEELEEAVGRIHLGPQGGPESVGEVFRLGRPRLAAHCARWTLGSEQCPRKRGLALVGLVEAAGEEAGPLTEALLAVVMGIELGARVPA

SEQ ID NO: 840371 - protein, 1289 aa, Homo sapiens
MAAAKPTLTDSLSFCLAQLAAAAGEALGGEKDPATNETPLSRALLALRTRHIKAAGGIERFRARGGLRPLLALLRRAAAAGSAPSQAGPGSAPSSAASGASSPAPASGPAPSAVSSSSPTPPVRLRKTLDLALSILADCCTEGACRTEVRRLGGILPLVTILQCMKTDSIQNRTARALGNLAMEPESCGDIHCAGAVPLLVESLTACQDSQCLQSVVRALRNLADSPQHRLALAQQGAVRPLAELLATAPDAALTLALVRALLELSRGCSRACAEQLSLGGGLGPLVSLASHPKRAVREGTILILANLCAQGLIRPALGNAGGVEVLVDELRQRRDPNGASPTSQQPLVRAVCLLCREAINRARLRDAGGLDLLMGLLRDPRASAWHPRIVAALVGFLYDTGALGRLQALGLVPLLAGQLCGEAGEEEEEGREAASWDFPEERTPERAQGGSFRSLRSWLISEGYATGPDDISPDWSPEQCPPEPMEPASPAPTPTSLRAPRTQRTPGRSPAAAIEEPWGREGPALLLLSRFSQAPDPSGALVTGPALYGLLTYVTGAPGPPSPRALRILSRLTCNPACLEAFVRSYGAALLRAWLVLGVAPDDWPAPRARPTLHSRHRELGEFPYPPVSLPPCESPSSPMASMGPEPHLPTHLSSPARPPDNLSPEWGGEQGVPVPPWAHRQSSAVSSALALGPRYPNSRCSPAPRIWAGLCFFPGSAIGSAAVLTAPHQHADLLNPSLTITPSTARDCPVCCALTTGCFMALLLDQGALLLALSGHNRRLALLSSGHTSLCPLSSYLCMAWFFPGYDYESEDYYNIGIKSNYYKLMINDIHISLRSISGITILVLYCIILEQLVSSVSCLGAWVACRPHFRGPDLHPDCPTFCPCPGPQVPSVPSPALSLQCPDFSPRGFTLLHLTGPEPCLTHPTCLRPQFPALTSFPLTGERLLQNLTVQAESPFGVGALTHLLLSGSPEDRVACALTLPFICRGVGSGCLAGLGEECCVSQARCPPFERPSLPCRKPSLWRRLLLEQGGLRLLLAALTRPAPHPLFLFFAADSLSCLQDLVSPTVSPAVPQAVPMDLDSPSPCLYEPLLGPAPVPAPDLHFLLDSGLQLPAQRAASATASPFFRALLSGSFAEAQMDLVPLRGLSPGAAWPVLHHLHGCRGCGAALGPVPPPGQPLLGSEAEEALEAAGRFLLPGLEEELEEAVGRIHLGPQGGPESVGEVFRLGRPRLAAHCARWTLGSEQCPRKRGLALVGLVEAAGEEAGPLTEALLAVVMGIELGARVPA

SEQ ID NO: 840372 - protein, 1257 aa, Homo sapiens
MAAAKPTLTDSLSFCLAQLAAAAGEALGGEKDPATNETPLSRALLALRTRHIKAAGGIERFRARGGLRPLLALLRRAAAAGSAPSQAGPGSAPSSAASGASSPAPASGPAPSAVSSSSPTPPVRLRKTLDLALSILADCCTEGACRTEVRRLGGILPLVTILQCMKTDSIQNRTARALGNLAMEPESCGDIHCAGAVPLLVESLTACQDSQCLQSVVRALRNLADSPQHRLALAQQGAVRPLAELLATAPDAALTLALVRALLELSRGCSRACAEQLSLGGGLGPLVSLASHPKRAVREGTILILANLCAQGLIRPALGNAGGVEVLVDELRQRRDPNGASPTSQQPLVRAVCLLCREAINRARLRDAGGLDLLMGLLRDPRASAWHPRIVAALVGFLYDTGALGRLQALGLVPLLAGQLCGEAGEEEEEGREAASWDFPEERTPERAQGGSFRSLRSWLISEGYATGPDDISPDWSPEQCPPEPMEPASPAPTPTSLRAPRTQRTPGRSPAAAIEEPWGREGPALLLLSRFSQAPDPSGALVTGPALYGLLTYVTGAPGPPSPRALRILSRLTCNPACLEAFVRSYGAALLRAWLVLGVAPDDWPAPRARPTLHSRHRELGEFPYPPVSLPPCESPSSPMASMGPEPHLPTHLSSPARPPDNLSPEWGGEQGVPVPPWAHRQSSAVSSALALGPRYPNSRCSPAPRIWAGLCFFPGSAIGSAAVLTAPHQHADLLNPSLTITPSTARDCPVCCALTTGCFMALLLDQGALLLALSGHNRRLALLSSGHTSLCPLSSYLCMAWFFPGYDYESEDYYNIGIKSNYYKLMINDIHISLRSISGITILVLYCIILEQLVSSVSCLGAWVACRPHFRGPDLHPDCPTFCPCPGPQVPSVPSPALSLQCPDFSPRGFTLLHLTGPEPCLTHPTCLRPQFPALTSFPLTGERLLQNLTVQAESPFGVGALTHLLLSGSPEDRVACALTLPFICRKPSLWRRLLLEQGGLRLLLAALTRPAPHPLFLFFAADSLSCLQDLVSPTVSPAVPQAVPMDLDSPSPCLYEPLLGPAPVPAPDLHFLLDSGLQLPAQRAASATASPFFRALLSGSFAEAQMDLVPLRGLSPGAAWPVLHHLHGCRGCGAALGPVPPPGQPLLGSEAEEALEAAGRFLLPGLEEELEEAVGRIHLGPQGGPESVGEVFRLGRPRLAAHCARWTLGSEQCPRKRGLALVGLVEAAGEEAGPLTEALLAVVMGIELGARVPA

SEQ ID NO: 840373 - protein, 1045 aa, Homo sapiens
PVRLLPADPEDTAMPGRAEAGEAEEEAGAGSGSEAEEDALWERIEGVRHRLARALNPAKLTPYLRQCRVIDEQDEEEVLSTYRFPCRVNRTGRLMDILRCRGKRGYEAFLEALEFYYPEHFTLLTGQEPAQRCSMILDEEGPEGLTQFLMTEVRRLREARKSQLQREQQLQARGRVLEEERAGLEQRLRDQQQAQERCQRLREDWEAGSLELLRLKDENYMIAMRLAQLSEEKNSAVLRSRDLQLAVDQLKLKVSRLEEECALLRRARGPPPGAEEKEKEKEKEKEPDNVDLVSELRAENQRLTASLRELQEGLQQEASRPGAPGSERILLDILEHDWREAQDSRQELCQKLHAVQGELQWAEELRDQYLQEMEDLRLKHRTLQKDCDLYKHRMATVLAQLEEIEKERDQAIQSRDRIQLQYSQSLIEKDQYRKQVRGLEAERDELLTTLTSLEGTKALLEVQLQRAQGGTCLKACASSHSLCSNLSSTWSLSEFPSPLGGPEATGEAAVMGGPEPHNSEEATDSEKEINRLSILPFPPSAGSILRRQREEDPAPPKRSFSSMSDITGSVTLKPWSPGLSSSSSSDSVWPLGKPEGLLARGCGLDFLNRSLAIRVSGRSPPGGPEPQDKGPDGLSFYGDRWSGAVVRRVLSGPGSARMEPREQRVEAAGLEGACLEAEAQQRTLLWNQGSTLPSLMDSKACQSFHEALEAWAKGPGAEPFYIRANLTLPERADPHALCVKAQEILRLVDSAYKRRQEWFCTRVDPLTLRDLDRGTVPNYQRAQQLLEVQEKCLPSSRHRGPRSNLKKRALDQLRLVRPKPVGAPAGDSPDQLLLEPCAEPERSLRPYSLVRPLLVSALRPVVLLPECLAPRLIRNLLDLPSSRLDFQVCPAESLSGEELCPSSAPGAPKAQPATPGLGSRIRAIQESVGKKHCLLELGARGVRELVQNEIYPIVIHVEVTEKNVREVRGLLGRPGWRDSELLRQCRGSEQVLWGLPCSWVQVPAHEWGHAEELAKVVRGRILQEQARLVWVECGSSRGCPSSSEA

SEQ ID NO: 840374 - protein, 1048 aa, Homo sapiens
PGARGDCSVRDPEDTAMPGRAEAGEAEEEAGAGSGSEAEEDALWERIEGVRHRLARALNPAKLTPYLRQCRVIDEQDEEEVLSTYRFPCRVNRTGRLMDILRCRGKRGYEAFLEALEFYYPEHFTLLTGQEPAQRCSMILDEEGPEGLTQFLMTEVRRLREARKSQLQREQQLQARGRVLEEERAGLEQRLRDQQQAQERCQRLREDWEAGSLELLRLKDENYMIAMRLAQLSEEKNSAVLRSRDLQLAVDQLKLKVSRLEEECALLRRARGPPPGAEEKEKEKEKEKEPDNVDLVSELRAENQRLTASLRELQEGLQQEASRPGAPGSERILLDILEHDWREAQDSRQELCQKLHAVQGELQWAEELRDQYLQEMEDLRLKHRTLQKDCDLYKHRMATVLAQLEEIEKERDQAIQSRDRIQLQYSQSLIEKDQYRKQVRGLEAERDELLTTLTSLEGTKALLEVQLQRAQGGTCLKACASSHSLCSNLSSTWSLSEFPSPLGGPEATGEAAVMGGPEPHNSEEATDSEKEINRLSILPFPPSAGSILRRQREEDPAPPKRSFSSMSDITGSVTLKPWSPGLSSSSSSDSVWPLGKPEGLLARGCGLDFLNRSLAIRVSGRSPPGGPEPQDKGPDGLSFYGDRWSGAVVRRVLSGPGSARMEPREQRVEAAGLEGACLEAEAQQRTLLWNQGSTLPSLMDSKACQSFHEALEAWAKGPGAEPFYIRANLTLPERADPHALCVKAQEILRLVDSAYKRRQEWFCTRVDPLTLRDLDRGTVPNYQRAQQLLEVQEKCLPSSRHRGPRSNLKKRALDQLRLVRPKPVGAPAGDSPDQLLLEPCAEPERSLRPYSLVRPLLVSALRPVVLLPECLAPRLIRNLLDLPSSRLDFQVCPAESLSGEELCPSSAPGAPKAQPATPGLGSRIRAIQESVGKKHCLLELGARGVRELVQNEIYPIVIHVEVTEKNVREVRGLLGRPGWRDSELLRQCRGSEQVLWGLPCSWVQVPAHEWGHAEELAKVVRGRILQEQARLVWVECGSSRGCPSSSEA

SEQ ID NO: 840375 - protein, 1048 aa, Homo sapiens; identical to SEQ ID NO: 840374

SEQ ID NO: 840376 - protein, 190 aa, Homo sapiens
MPTIPCTEIEDLRARKNNQGSADNRGNCDPCIECTRTLGLICFAGHHEVEEQDFEEREREQAIQSRDRIQLQYSQSLIEKDQYRKQVRGLEAERDELLTTLTSLEGTKALLEVQLQRAQGGTCLKACASSHSLCSNLSSTWSLSEFPSPLGGPEATGEAAVMGGPEPHNSEEDHRHVNTGDQFGLHTWPY

SEQ ID NO: 840377 - protein, 807 aa, Homo sapiens
MRKLGPEEVDQLKLKVSRLEEECALLRRARGPPPGAEEKEKEKEKEKEPDNVDLVSELRAENQRLTASLRELQEGLQQEASRPGAPGSERILLDILEHDWREAQDSRQELCQKLHAVQGELQWAEELRDQYLQEMEDLRLKHRTLQKDCDLYKHRMATVLAQLEEIEKERDQAIQSRDRIQLQYSQSLIEKDQYRKQVRGLEAERDELLTTLTSLEGTKALLEVQLQRAQGGTCLKACASSHSLCSNLSSTWSLSEFPSPLGGPEATGEAAVMGGPEPHNSEEATDSEKEINRLSILPFPPSAGSILRRQREEDPAPPKRSFSSMSDITGSVTLKPWSPGLSSSSSSDSVWPLGKPEGLLARGCGLDFLNRSLAIRVSGRSPPGGPEPQDKGPDGLSFYGDRWSGAVVRRVLSGPGSARMEPREQRVEAAGLEGACLEAEAQQRTLLWNQGSTLPSLMDSKACQSFHEALEAWAKGPGAEPFYIRANLTLPERADPHALCVKAQEILRLVDSAYKRRQEWFCTRVDPLTLRDLDRGTVPNYQRAQQLLEVQEKCLPSSRHRGPRSNLKKRALDQLRLVRPKPVGAPAGDSPDQLLLEPCAEPERSLRPYSLVRPLLVSALRPVVLLPECLAPRLIRNLLDLPSSRLDFQVCPAESLSGEELCPSSAPGAPKAQPATPGLGSRIRAIQESVGKKHCLLELGARGVRELVQNEIYPIVIHVEVTEKNVREVRGLLGRPGWRDSELLRQCRGSEQVLWGLPCSWVQVPAHEWGHAEELAKVVRGRILQEQARLVWVECGSSRGCPSSSEA

SEQ ID NO: 840378 - protein, 917 aa, Homo sapiens
PGARGDCSVRDPEDTAMPGRAEAGEAEEEAGAGSGSEAEEDALWERIEGVRHRLARALNPAKLTPYLRQCRVIDEQDEEEVLSTYRFPCRVNRTGRLMDILRCRGKRGYEAFLEALEFYYPEHFTLLTGQEPAQRCSMILDEEGPEGLTQFLMTEVRRLREARKSQLQREQQLQARGRVLEEERAGLEQRLRDQQQAQERCQRLREDWEAGSLELLRLKDENYMIAMRLAQLSEEKNSAVLRSRDLQLAVDQLKLKVSRLEEECALLRRARGPPPGAEEKEKEKEKEKEPDNVDLVSELRAENQRLTASLRELQEGLQQEASRPGAPGSERILLDILEHDWREAQDSRQELCQKLHAVQGELQWAEELRDQYLQEMEDLRLKHRTLQKDCDLYKHRMATVLAQLEEIEKERDQAIQSRDRIQLQYSQSLIEKDQYRKQVRGLEAERDELLTTLTSLEGTKALLEVQLQRAQGGTCLKACASSHSLCSNLSSTWSLSEFPSPLGGPEATGEAAVMGGPEPHNSEEATDSEKEINRLSILPFPPSAGSILRRQREEDPAPPKRSFSSMSDITGSVTLKPWSPGLSSSSSSDSVWPLGKPEGLLARGCGLDFLNRSLAIRVSGRSPPGGPEPQDKGPDGLSFYGDRWSGAVVRRVLSGPGSARMEPREQRVEAAGLEGACLEAEAQQRTLLWNQGSTLPSLMDSKACQSFHEALEAWAKGPGAEPFYIRANLTLPERADPHALCVKAQEILRLVDSAYKRRQEWFCTRVDPLTLRDLDRGTVPNYQRAQQLLEVQEKCLPSSRHRGPRSNLKKRALDQLRLVRPKPVGAPAGDSPDQLLLEPCAEPERSLRPYSLVRPLLVSALRPVVLLPECLAPRLIRNLLDLPSSRLDFQVCPAEASLGRNCAHPHTKHQHEVQHQH

SEQ ID NO: 840379 - protein, 133 aa, Homo sapiens [sequence omitted]

SEQ ID NO: 840380 - protein, 78 aa, Homo sapiens
MANVQVAVRVRPLSKRETKEGGRIIVEVDGKVAKIRNLKVDNRPDGFGDSREKVMAFGFDYCYWSVNPEDPQYASQDV

SEQ ID NO: 840381 - protein, 76 aa, Homo sapiens
PILQMTKLRVRKAQGPYSNKCQSQDTNTGLTPHPLGWPLLTSSQITEGPGLPETPPASAQMGLLQAAKEGTASARH

SEQ ID NO: 840382 - protein, 130 aa, Homo sapiens
MTRVEGRYQGHSGELYLAGTPQLLSVGYDTETWLGCKETDWDSRAGGRGDKAGGERQEPRRPQAQRCGAAVVVLRGGLAKLAFAPSEEFLLFFGFGKRSLFTEGAGFVPSRRVRGWRAQCCLSALSLDPA

SEQ ID NO: 840383 - protein, 115 aa, Homo sapiens
IYTDWANHYLAKSGHKRLIRDLQQDVTDGVLLAQIIQVVANEKIEDINGCPKNRSQMIENIDACLNFLAAKGINIQGLSAEEIRNGNLKAILGLFFSLSRYKQQQQQPQKQHLSS

SEQ ID NO: 840384 - protein, 135 aa, Homo sapiens
PLTAIHTPSTAEPYKFPFSTKDSQHVSSVAQTQKQYDTSSKTHSNSQQGTSAMLEDDLQLSDSEDSDSEQTPEKPPSSSAPPSAPQSLPEPVASAHSSSAESESTSDSDSSSDSESESSSSDSEENEPLETPAPE

SEQ ID NO: 840385 - protein, 123 aa, Homo sapiens
PLTAIHTPSTAEPYKFPFSTKDSQHVSSVAQTQKQYDTSSKTHSNSQQGTSAMLEDDLQLSDSEDSDSEQTPEKPPSSSAPPSAPQSLPEPVASAHSSSAESESTSDFLIPVTFLIPVTFLIH

SEQ ID NO: 840386 - protein, 129 aa, Homo sapiens
HQLPTRSPAARLSNRNISSPQDLQLHGSQTGTSAPHQISSCTALKQEHQLPTGSPAARLSNSEQTPEKPPSSSAPPSAPQSLPEPVASAHSSSAESESTSDSDSSSDSESESSSSDSEENEPLETPAPE

SEQ ID NO: 840387 - protein, 605 aa, Homo sapiens
ECVRGCFDLVGAASGTAPRRGASAQVAGLALAPPSPTQSAGRQGGPAAPLQHMPVQLTTALRVVGTSLFALAVLGGILAAYVTGYQFIHTEKHYLSFGLYGAILGLHLLIQSLFAFLEHRRMRRAGQALKLPSPRRGSVALCIAAYQEDPDYLRKCLRSAQRISFPDLKVVMVVDGNRQEDAYMLDIFHEVLGGTEQAGFFVWRSNFHEAGEGETEASLQEGMDRVRDVVRASTFSCIMQKWGGKREVMYTAFKALGDSVDYIQVCDSDTVLDPACTIEMLRVLEEDPQVGGVGGDVQILNKYDSWISFLSSVRYWMAFNVERACQSYFGCVQCISGPLGMYRNSLLQQFLEDWYHQKFLGSKCSFGDDRHLTNRVLSLGYRTKYTARSKCLTETPTKYLRWLNQQTRWSKSYFREWLYNSLWFHKHHLWMTYESVVTGFFPFFLIATVIQLFYRGRIWNILLFLLTVQLVGIIKATYACFLRGNAEMIFMSLYSLLYMSSLLPAKIFAIATINKSGWGTSGRKTIVVNFIGLIPVSIWVAVLLEGLAYTAYCQDLFSETELAFLVSGAILYGCYWVALLMLYLAIIARRCGKKPEQYSLAFAEV

SEQ ID NO: 840388 - protein, 572 aa, Homo sapiens
GAWSRRGPAELRSAAAGGTMPVQLTTALRVVGTSLFALAVLGGILAAYVTGYQFIHTEKHYLSFGLYGAILGLHLLIQSLFAFLEHRRMRRAGQALKLPSPRRGSVALCIAAYQEDPDYLRKCLRSAQRISFPDLKVVMVVDGNRQEDAYMLDIFHEVLGGTEQAGFFVWRSNFHEAGEGETEASLQEGMDRVRDVVRASTFSCIMQKWGGKREVMYTAFKALGDSVDYIQVCDSDTVLDPACTIEMLRVLEEDPQVGGVGGDVQILNKYDSWISFLSSVRYWMAFNVERACQSYFGCVQCISGPLGMYRNSLLQQFLEDWYHQKFLGSKCSFGDDRHLTNRVLSLGYRTKYTARSKCLTETPTKYLRWLNQQTRWSKSYFREWLYNSLWFHKHHLWMTYESVVTGFFPFFLIATVIQLFYRGRIWNILLFLLTVQLVGIIKATYACFLRGNAEMIFMSLYSLLYMSSLLPAKIFAIATINKSGWGTSGRKTIVVNFIGLIPVSIWVAVLLEGLAYTAYCQDLFSETELAFLVSGAILYGCYWVALLMLYLAIIARRCGKKPEQYSLAFAEV

SEQ ID NO: 840389 - protein, 478 aa, Homo sapiens
MATDSWALAVDEQEAAVKSMTNLQIKEEKVKADTNGIIKTSTTAEKTDEEEKEDRAAQSLLNKLIRSNLVDNTNQVEVLQRDPNSPLYSVKSFEELRLKPQLLQGVYAMGFNRPSKIQENALPMMLAEPPQNLIAQSQSGTGKTAAFVLAMLSRVEPSDRYPQCLCLSPTYELALQTGKVIEQMGKFYPELKLAYAVRGNKLERGQKISEQIVIGTPGTVLDWCSKLKFIDPKKIKVFVLDEADVMIATQGHQDQSIRIQRMLPRNCQMLLFSATFEDSVWKFAQKVVPDPNVIKLKREEETLDTIKQYYVLCSSRDEKFQALCNLYGAITIAQAMIFCHTRKTASWLAAELSKEGHQVALLSGEMMVEQRAAVIERFREGKEKVLVTTNVCARGIDVEQVSVVINFDLPVDKDGNPDNETYLHRIGRTGRFGKRGLAVNMVDSKHSMNILNRIQEHFNKKIERLDTDDLDEIEKIAN

SEQ ID NO: 840390 - protein, 478 aa, Homo sapiens; identical to SEQ ID NO: 840389

SEQ ID NO: 840391 - protein, 233 aa, Homo sapiens [sequence omitted]

SEQ ID NO: 840392 - protein, 220 aa, Homo sapiens
QAGRGGVESARRLFSATFEDSVWKFAQKVVPDPNVIKLKREEETLDTIKQYYVLCSSRDEKFQALCNLYGAITIAQAMIFCHTRKTASWLAAELSKEGHQVALLSGEMMVEQRAAVIERFREGKEKVLVTTNVCARGIDVEQVSVVINFDLPVDKDGNPDNETYLHRIGRTGRFGKRGLAVNMVDSKHSMNILNRIQEHFNKKIERLDTDDLDEIEKIAN

SEQ ID NO: 840393 - protein, 478 aa, Homo sapiens; identical to SEQ ID NO: 840389

SEQ ID NO: 840394 - protein, 438 aa, Homo sapiens
MATDSWALAVDEQEAAVKSMTNLQIKEEKVKADTNGIIKTSTTAEKTDEEEKEDRAAQSLLNKLIRSNLVDNTNQVEVLQRDPNSPLYSVKSFEELRLKPQLLQGVYAMGFNRPSKIQENALPMMLAEPPQNLIAQSQSGTGKTAAFVLAMLSRVEPSDRYPQCLCLSPTYELALQTGKVIEQMGKFYPELKLAYAVRGNKLERGQKISEQIVIGTPGTVLDWCSKLKFIDPKKIKVFVLDEADVMIATQGHQDQSIRIQRMLPRNCQMLLFSATFEDSVWKFAQKVVPDPNVIKLKREEETLDTIKQYYVLCSSRDEKFQALCNLYGAITIAQAMIFCHTRKTASWLAAELSKEGHQVALLSGEMMVEQRAAVIERFREGKEKVLVTTNVCARGIDVEQVSVVINFDLPVDKDGNPERKPPPALGAAPPFFYRGGRA

SEQ ID NO: 840395 - protein, 320 aa, Homo sapiens
MATDSWALAVDEQEAAVKSMTNLQIKEEKVKADTNGIIKTSTTAEKTDEEEKEDRAAQSLLNKLIRSNLVDNTNQVEVLQRDPNSPLYSVKSFEELRLKPQLLQGVYAMGFNRPSKIQENALPMMLAEPPQNLIAQSQSGTGKTAAFVLAMLSRVEPSDRYPQCLCLSPTYELALQTGKVIEQMGKFYPELKLAYAVRGNKLERGQKISEQIVIGTPGTVLDWCSKLKFIDPKKIKVFVLDEADVMIATQGHQDQSIRIQRMLPRNCQMLLFSATFEDSVWKFAQKVVPDPNVIKLKREEETLDTIKQYYVLCSSRDENS

SEQ ID NO: 840396 - protein, 125 aa, Homo sapiens
VRVRCILAPVARLGPALRRGAAHIFTSGSPLSGTMATDSWALAVDEQEAAVKSVSSSAPGEEDVAGAQAKPPKSTGSSPGWGGPWATRSCSLLGQSLALDLLLELKRPMSSFLSPSGLVKDFILW

SEQ ID NO: 840397 - protein, 390 aa, Homo sapiens
LSQFTRGQATSSSLKDIVYAMGFNRPSKIQENALPMMLAEPPQNLIAQSQSGTGKTAAFVLAMLSRVEPSDRYPQCLCLSPTYELALQTGKVIEQMGKFYPELKLAYAVRGNKLERGQKISEQIVIGTPGTVLDWCSKLKFIDPKKIKVFVLDEADVMIATQGHQDQSIRIQRMLPRNCQMLLFSATFEDSVWKFAQKVVPDPNVIKLKREEETLDTIKQYYVLCSSRDEKFQALCNLYGAITIAQAMIFCHTRKTASWLAAELSKEGHQVALLSGEMMVEQRAAVIERFREGKEKVLVTTNVCARGIDVEQVSVVINFDLPVDKDGNPDNETYLHRIGRTGRFGKRGLAVNMVDSKHSMNILNRIQEHFNKKIERLDTDDLDEIEKIAN

SEQ ID NO: 840398 - protein, 295 aa, Homo sapiens [sequence omitted]

SEQ ID NO: 840399 - protein, 301 aa, Homo sapiens
MGRALISRAGFAFEIPMKITWVSTVERGQKISEQIVIGTPGTVLDWCSKLKFIDPKKIKVFVLDEADVMIATQGHQDQSIRIQRMLPRNCQMLLFSATFEDSVWKFAQKVVPDPNVIKLKREEETLDTIKQYYVLCSSRDEKFQALCNLYGAITIAQAMIFCHTRKTASWLAAELSKEGHQVALLSGEMMVEQRAAVIERFREGKEKVLVTTNVCARGIDVEQVSVVINFDLPVDKDGNPDNETYLHRIGRTGRFGKRGLAVNMVDSKHSMNILNRIQEHFNKKIERLDTDDLDEIEKIAN

SEQ ID NO: 840400 - protein, 217 aa, Homo sapiens
MLPRNCQMLLFSATFEDSVWKFAQKVVPDPNVIKLKREEETLDTIKQYYVLCSSRDEKFQALCNLYGAITIAQAMIFCHTRKTASWLAAELSKEGHQVALLSGEMMVEQRAAVIERFREGKEKVLVTTNVCARGIDVEQVSVVINFDLPVDKDGNPDNETYLHRIGRTGRFGKRGLAVNMVDSKHSMNILNRIQEHFNKKIERLDTDDLDEIEKIAN

SEQ ID NO: 840401 - protein, 493 aa, Homo sapiens
MATDSWALAVDEQEAAVKSMTNLQIKEEKVKADTNGIIKTSTTAEKTDEEEKEDRAAQSLLNKLIRSNLVDNTNQVEVLQRDPNSPLYSVKSFEELRLKPQLLQGVYAMGFNRPSKIQENALPMMLAEPPQNLIAQSQSGTGKTAAFVLAMLSRVEPSDRYPQCLCLSPTYELALQTGKVIEQMGKFYPELKLAYAVRGNKLERGQKISEQIVIGTPGTVLDWCSKLKFIDPKKIKVFVLDEADVMIATQGHQDQSIRIQRMLPRNCQMLLFSATFEDSVWKFAQKVVPDPNVIKLKREEETLDTIKQYYVLCSSRDEKFQALCNLYGAITIAQAMIFCHTRKTASWLAAELSKEGHQVALLSGEMMVEQRAAVIERFREGKEKVLVTTNVCARGEQRTCPTWSARLGVPGPIRARNPCIQGSRMVSGRWVGLVTLFLSRRDCLDFPEVVRTHTCQVRWLMPAIPRQENCLNPGDRGCSEPRMCYSTPSWVTE

SEQ ID NO: 840402 - protein, 219 aa, Homo sapiens
MATDSWALAVDEQEAAVKSMTNLQIKEEKVKADTNGIIKTSTTAEKTDEEEKEDRAAQSLLNKLIRSNLVDNTNQVEVLQRDPNSPLYSVKSFEELRLKPQLLQGVYAMGFNRPSKIQENALPMMLAEPPQNLIAQSQSGTGKTAAFVLAMLSRVEPSDRYPQCLCLSPTYELALQTGKVIEQMGKFYPELKLAYAVRGNKCEYGRRQLNSEQGRGLGV

SEQ ID NO: 840403 - protein, 116 aa, Homo sapiens [sequence omitted]

SEQ ID NO: 840404 - protein, 169 aa, Homo sapiens
AGRKGSLAALYDLAVLKKKVKEKEEKKKKKIKTIKSEAEDLAEPLSSTEGVAPLSQAPSPLAIPAIKEEPLEDLKPCLGINEISSSFFSLLLEILLLESQASLPMLEERVLDWQSSPASSLNSWFSAAPNWAELVLPALQYLAGESRAVPSSFSPFVEFKEKTQQWKLL

SEQ ID NO: 840405 - protein, 587 aa, Homo sapiens
MASEDIAKLAETLAKTQVAGGQLSFKGKSLKLNTAEDAKDVIKEIEDFDSLEALRLEGNTVGVEAARVIAKALEKKSELKRCHWSDMFTGRLRTEIPPALISLGEGLITAGAQLVELDLSDNAFGPDGVQGFEALLKSSACFTLQELKLNNCGMGIGGGKILAAALTECHRKSSAQGKPLALKVFVAGRNRLENDGATALAEAFRVIGTLEEVHMPQNGINHPGITALAQAFAVNPLLRVINLNDNTFTEKGAVAMAETLKTLRQVEVINFGDCLVRSKGAVAIADAIRGGLPKLKELNLSFCEIKRDAALAVAEAMADKAELEKLDLNGNTLGEEGCEQLQEVLEGFNMAKVLASLSDDEDEEEEEEGEEEEEEAEEEEEEDEEEEEEEEEEEEEEPQQRGQGEKSATPSRKILDPNTGEPAPVLSSPPPADVSTFLAFPSPEKLLRLGPKSSVLIAQQTDTSDPEKVVSAFLKVSSVFKDEATVRMAVQDAVDALMQKAFNSSSFNSNTFLTRLLVHMGLLKSEDKVKAIANLYGPLMALNHMVQQDYFPKALAPLLLAFVTKPNSALESCSFARHSLLQTLYKV

SEQ ID NO: 840406 - protein, 109 aa, Homo sapiens
MASEDIAKLAETLAKTQVAGGQLSFKGKSLKLNTAEDAKDVIKEIEDFDSLEALRLEGNTVGVEAARVIAKALEKKSELKRCHWSDMFTGRLRTEIPPALISPGKEGYR

SEQ ID NO: 840407 - protein, 68 aa, Homo sapiens
YWTVVLDEFCFTMAEAGNKLQELNLSFCEIKRDAALAVAEAMADKAELEKLDLNATPWQKQEALPASA

SEQ ID NO: 840408 - protein, 587 aa, Homo sapiens; identical to SEQ ID NO: 840405

SEQ ID NO: 840409 - protein, 587 aa, Homo sapiens; identical to SEQ ID NO: 840405

SEQ ID NO: 840410 - protein, 587 aa, Homo sapiens; identical to SEQ ID NO: 840405

SEQ ID NO: 840411 - protein, 587 aa, Homo sapiens; identical to SEQ ID NO: 840405

SEQ ID NO: 840412 - protein, 542 aa, Homo sapiens
MASEDIAKLAETLAKTQVAGGQLSFKGKSLKLNTAEDAKDVIKEIEDFDSLEALRLEGNTVGVEAARVIAKALEKKSELKRCHWSDMFTGRLRTEIPPALISLGEGLITAGAQLVELDLSDNAFGPDGVQGFEALLKSSACFTLQELKLNNCGMGIGGGKVIGTLEEVHMPQNGINHPGITALAQAFAVNPLLRVINLNDNTFTEKGAVAMAETLKTLRQVEVINFGDCLVRSKGAVAIADAIRGGLPKLKELNLSFCEIKRDAALAVAEAMADKAELEKLDLNGNTLGEEGCEQLQEVLEGFNMAKVLASLSDDEDEEEEEEGEEEEEEAEEEEEEDEEEEEEEEEEEEEEPQQRGQGEKSATPSRKILDPNTGEPAPVLSSPPPADVSTFLAFPSPEKLLRLGPKSSVLIAQQTDTSDPEKVVSAFLKVSSVFKDEATVRMAVQDAVDALMQKAFNSSSFNSNTFLTRLLVHMGLLKSEDKVKAIANLYGPLMALNHMVQQDYFPKALAPLLLAFVTKPNSALESCSFARHSLLQTLYKV

SEQ ID NO: 840413 - protein, 457 aa, Homo sapiens
MLKSSSAAVATPLGEGAPAHDQGPLPFPNRILAAALTECHRKSSAQGKPLALKVFVAGRNRLENDGATALAEAFRVIGTLEEVHMPQNGINHPGITALAQAFAVNPLLRVINLNDNTFTEKGAVAMAETLKTLRQVEVINFGDCLVRSKGAVAIADAIRGGLPKLKELNLSFCEIKRDAALAVAEAMADKAELEKLDLNGNTLGEEGCEQLQEVLEGFNMAKVLASLSDDEDEEEEEEGEEEEEEAEEEEEEDEEEEEEEEEEEEEEPQQRGQGEKSATPSRKILDPNTGEPAPVLSSPPPADVSTFLAFPSPEKLLRLGPKSSVLIAQQTDTSDPEKVVSAFLKVSSVFKDEATVRMAVQDAVDALMQKAFNSSSFNSNTFLTRLLVHMGLLKSEDKVKAIANLYGPLMALNHMVQQDYFPKALAPLLLAFVTKPNSALESCSFARHSLLQTLYKV

SEQ ID NO: 840414 - protein, 587 aa, Homo sapiens; identical to SEQ ID NO: 840405

SEQ ID NO: 840415 - protein, 139 aa, Homo sapiens
DAWVDPRVRAQQTDTSDPEKVVSAFLKVSSVFKDEATVRMAVQDAVDALMQKAFNSSSFNSNTFLTRLLVHMGLLKSEDKVKAIANLYGPLMALNHMVQQDYFPKALAPLLLAFVTKPNSALESCSFARHSLLQTLYKV

SEQ ID NO: 840416 - protein, 159 aa, Homo sapiens
MPQNGINHPGITALAQAFAVNPLLRVINLNDNTFTEKGAVAMAETLKTLRQVEVINFGDCLVRSKGAVAIADAIRGGLPKLKELNLSFCEIKRDAALAVAEAMADKAELEKLDLNGPTAPWNPAPSPATVCCRRCTRSRLKASPIPWPGPVSWGGTRMN

SEQ ID NO: 840417 - protein, 94 aa, Homo sapiens
TAVHRDAVMATLEGPGQHALTKMSLAPKWPPHLENRPRGIHRPADPSFPAGPTAPWNPAPSPATVCCRRCTRSRLKASPIPWPGPVSWGGTRMN

SEQ ID NO: 840418 - protein, 552 aa, Homo sapiens
MASEDIAKLAETLAKTQVAGGQLSFKGKSLKLNTAEDAKDVIKEIEDFDSLEALRLEGNTVGVEAARVIAKALEKKSELKRCHWSDMFTGRLRTEIPPALISLGEGLITAGAQLVELDLSDNAFGPDGVQGFEALLKSSACFTLQELKLNNCGMGIGGGKILAAALTECHRKSSAQGKPLALKVFVAGRNRLENDGATALAEAFRVIGTLEEVHMPQNGINHPGITALAQAFAVNPLLRVINLNDNTFTEKGAVAMAETLKTLRQVEVINFGDCLVRSKGAVAIADAIRGGLPKLKELNLSFCEIKRDAALAVAEAMADKAELEKLDLNGNTLGEEGCEQLQEVLEGFNMAKVLASLSDDEDEEEEEEGEEEEEEAEEEEEEDEEEEEEEEEEEEEEPQQRGQGEKSATPSRKILDPNTGEPAPVLSSPPPADVSTFLAFPSPEKLLRLGPKSSVLIAQQTDTSDPEKVVSAFLKVSSVFKDEATVRMAVQDAVDALMQKAFNSSSFNSNTFLTRLLVHMGLLKSEDKVKAIANLYGPLMALNHMVQQDYSP

SEQ ID NO: 840419 - protein, 470 aa, Homo sapiens
MASEDIAKLAETLAKTQVAGGQLSFKGKSLKLNTAEDAKDVIKEIEDFDSLEALRLEGNTVGVEAARVIAKALEKKSELKRCHWSDMFTGRLRTEIPPALISLGEGLITAGAQLVELDLSDNAFGPDGVQGFEALLKSSACFTLQELKLNNCGMGIGGGKILAAALTECHRKSSAQGKPLALKVFVAGRNRLENDGATALAEAFRVIGTLEEVHMPQNGINHPGITALAQAFAVNPLLRVINLNDNTFTEKGAVAMAETLKTLRQVEVINFGDCLVRSKGAVAIADAIRGGLPKLKELNLSFCEIKRDAALAVAEAMADKAELEKLDLNGNTLGEEGCEQLQEVLEGFNMAKVLASLSDDEDEEEEEEGEEEEEEAEEEEEEDEEEEEEEEEEEEEEPQQRGQGEKSATPSRKILDPNTGEPAPVLSSHLLFLLFLIFLLLFFCFLFFLFSFLLLLLVLVITEGRQHLAM

SEQ ID NO: 840420 - protein, 109 aa, Homo sapiens
MASEDIAKLAETLAKTQVAGGQLSFKGKSLKLNTAEDAKDVIKEIEDFDSLEALRLEGNTVGVEAARVIAKALEKKSELKRCHWSDMFTGRLRTEIPPALISPGEGGVP

SEQ ID NO: 840421 - protein, 587 aa, Homo sapiens; identical to SEQ ID NO: 840405

SEQ ID NO: 840422 - protein, 141 aa, Homo sapiens
MDEVVARVSTPHELSLGIRRVQYGGSAVCMHTPSVHTTVLTAQPEEQRMPWVGLWGSDRGVVGRGQPWAPHRVDRQTPDCPGAGAAGTALAPDLVGLLLAAEMSSVTGLAGGGVLTTQSCSPVWGGRGRVPNVRAASGRCS

SEQ ID NO: 840423 - protein, 642 aa, Homo sapiens
MGLLRRPPIICGLYSRVAPAEPPPSRPTPAGAPGWRRCPWNRFCRSPGEPTSLVNMASEDIAKLAETLAKTQVAGGQLSFKGKSLKLNTAEDAKDVIKEIEDFDSLEALRLEGNTVGVEAARVIAKALEKKSELKRCHWSDMFTGRLRTEIPPALISLGEGLITAGAQLVELDLSDNAFGPDGVQGFEALLKSSACFTLQELKLNNCGMGIGGGKILAAALTECHRKSSAQGKPLALKVFVAGRNRLENDGATALAEAFRVIGTLEEVHMPQNGINHPGITALAQAFAVNPLLRVINLNDNTFTEKGAVAMAETLKTLRQVEVINFGDCLVRSKGAVAIADAIRGGLPKLKELNLSFCEIKRDAALAVAEAMADKAELEKLDLNGNTLGEEGCEQLQEVLEGFNMAKVLASLSDDEDEEEEEEGEEEEEEAEEEEEEDEEEEEEEEEEEEEEPQQRGQGEKSATPSRKILDPNTGEPAPVLSSPPPADVSTFLAFPSPEKLLRLGPKSSVLIAQQTDTSDPEKVVSAFLKVSSVFKDEATVRMAVQDAVDALMQKAFNSSSFNSNTFLTRLLVHMGLLKSEDKVKAIANLYGPLMALNHMVQQDYFPKALAPLLLAFVTKPNSALESCSFARHSLLQTLYKV

SEQ ID NO: 840424 - protein, 587 aa, Homo sapiens; identical to SEQ ID NO: 840405

SEQ ID NO: 840425 - protein, 587 aa, Homo sapiens; identical to SEQ ID NO: 840405

SEQ ID NO: 840426 - protein, 271 aa, Homo sapiens
MADKAELEKLDLNGNTLGEEGCEQLQEVLEGFNMAKVLASLSDDEDEEEEEEGEEEEEEAEEEEEEDEEEEEEEEEEEEEEPQQRGQGEKSATPSRKILDPNTGEPAPVLSSPPPADVSTFLAFPSPEKLLRLGPKSSVLIAQQTDTSDPEKVVSAFLKVSSVFKDEATVRMAVQDAVDALMQKAFNSSSFNSNTFLTRLLVHMGLLKSEDKVKAIANLYGPLMALNHMVQQDYFPKALAPLLLAFVTKPNSALESCSFARHSLLQTLYKV

SEQ ID NO: 840427 - protein, 358 aa, Homo sapiens [sequence omitted]

SEQ ID NO: 840428 - protein, 225 aa, Homo sapiens
DAWVDPRVRAQQEAEEEEEEDEEEEEEEEEEEEEEPQQRGQGEKSATPSRKILDPNTGEPAPVLSSPPPADVSTFLAFPSPEKLLRLGPKSSVLIAQQTDTSDPEKVVSAFLKVSSVFKDEATVRMAVQDAVDALMQKAFNSSSFNSNTFLTRLLVHMGLLKSEDKVKAIANLYGPLMALNHMVQQDYFPKALAPLLLAFVTKPNSALESCSFARHSLLQTLYKV

SEQ ID NO: 840429 - protein, 373 aa, Homo sapiens
MASEDIAKLAETLAKTQVAGGQLSFKGKSLKLNTAEDAKDVIKEIEDFDSLEALRLEGNTVGVEAARVIAKALEKKSELKRCHWSDMFTGRLRTEIPPALISLGEGLITAGAQLVELDLSDNAFGPDGVQGFEALLKSSACFTLQELKLNNCGMGIGGGKILAAALTECHRKSSAQGKPLALKVFVAGRNRLENDGATALAEAFRVIGTLEEVHMPQNGINHPGITALAQAFAVNPLLRVINLNDNTFTEKGAVAMAETLKTLRQVEVINFGDCLVRSKGAVAIADAIRGGLPKLKELNLSFCEIKRDAALAVAEAMADKAELEKLDLNGPTAPWNPAPSPATVCCRRCTRSRLKASPIPWPGPVSWGGTRMN

SEQ ID NO: 840430 - protein, 614 aa, Homo sapiens
MASEDIAKLAETLAKTQVAGGQLSFKGKSLKLNTAEDAKDVIKEIEDFDSLEALRLEGNTVGVEAARVIAKALEKKSELKRCHWSDMFTGRLRTEIPPALISLGEGLITAGAQLVELDLSDNAFGPDGVQGFEALLKSSACFTLQELKLNNCGMGIGGGKILAAALTECHRKSSAQGKPLALKVFVAGRNRLENDGATALAEAFRVIGTLEEVHMPQNGINHPGITALAQAFAVNPLLRVINLNDNTFTEKGAVAMAETLKTLRQVEVINFGDCLVRSKGAVAIADAIRGGLPKLKELNLSFCEIKRDAALAVAEAMADKAELEKLDLNGNTLGEEGCEQLQEVLEGFNMAKVLASLSDDEDEEEEEEGEEEEEEAEEEEEEDEEEEEEEEEEEEEEPQQRGQGEKSATPSRKILDPNTGEPAPVLSSPPPADVSTFLAFPSPEKLLRLGPKSSVLIAQQTDTSDPEKVVSAFLKVSSVFKDEATVRMAVQDAVDALMQKAFNSSSFNSNTFLTRLLVHMGLLKSEDKVKAIANLYGPLMALNHMVQQDYFPKALAPLLLAFVTKPNSALESCSFARHSLLQTLYKAGEGEAGSPMSELHLDAALKGPPGAGER

SEQ ID NO: 840431 - protein, 430 aa, Homo sapiens
MASEDIAKLAETLAKTQVAGGQLSFKGKSLKLNTAEDAKDVIKEIEDFDSLEALRLEGNTVGVEAARVIAKALEKKSELKRCHWSDMFTGRLRTEIPPALISLGEGLITAGAQLVELDLSDNAFGPDGVQGFEALLKSSACFTLQELKLNNCGMGIGGGKILAAALTECHRKSSAQGKPLALKVFVAGRNRLENDGATALAEAFRVIGTLEEVHMPQNGINHPGITALAQAFAVNPLLRVINLNDNTFTEKGAVAMAETLKTLRQVEVINFGDCLVRSKGAVAIADAIRGGLPKLKELNLSFCEIKRDAALAVAEAMADKAELEKLDLNGNTLGEEGCEQLQEVLEGFNMAKVLASLSDDEDEEEEEEGEEEEEEAEEEEEEDEEEEEEEEEEEEEEPQQRGQGEKSATPSRKILDPNTGVRIQQESSHL

SEQ ID NO: 840432 - protein, 211 aa, Homo sapiens
SRGSLKLLTEDSDLNTGEPAPVLSSPPPADVSTFLAFPSPEKLLRLGPKSSVLIAQQTDTSDPEKVVSAFLKVSSVFKDEATVRMAVQDAVDALMQKAFNSSSFNSNTFLTRLLVHMGLLKSEDKVKAIANLYGPLMALNHMVQQDYFPKALAPLLLAFVTKPNSALESCSFARHSLLQTLYKAGEGEAGSPMSELHLDAALKGPPGAGER

SEQ ID NO: 840433 - protein, 67 aa, Homo sapiens
PCVPCPPVRPPSRRTCSGALPLESVVAPEFGPLGRNCLAGPRVTGQLLTDYVGTPSVRDACIYEGRI

SEQ ID NO: 840434 - protein, 79 aa, Homo sapiens
RITAATHVHEASSRSHAIFTIHYTQAILENNLPSEMASKINLVDLAGSERADPSYCKDRIAEGANINKSLVTLGIVIST

SEQ ID NO: 840435 - protein, 87 aa, Homo sapiens
MGCVQVCVCMCAQVFEHVDGCTCGVCAWGVCTCVCAPRCMSVWMGARIEVRVGEVRLGAEVRLGAEVRLGAEVRLGAEVRLGAEAPG

SEQ ID NO: 840436 - protein, 115 aa, Homo sapiens
MGCVQVCVCMCAQVFEHVDGCTCGVCAWGVCTCVCAPRCMSVWMGARIECVNEMCAYVCVYVCPGVCVDGCVWDVCMGVCVCACVTRYMSGWVCVGCVHGVCARVCVCVPRCMSG

SEQ ID NO: 840437 - protein, 136 aa, Homo sapiens
MGNVSFSCPQPQTVPVTFLSSRSYLALPGNSGEDKVSVTFQFRTWNRAGHLLFGELQRGSGSFVLFLKDGKLKLSLFQAGQSPRNVTAGAGLNDGQWHSVSFSAKWSHMNVVVDDDTAVQPLVAVLIDSGDTYYFG

SEQ ID NO: 840438 - protein, 50 aa, Homo sapiens
MILGIPHQLISPRKCDYNSAAQCRSTSTLLPRIIEDAYHLFMYHDPGLPR

SEQ ID NO: 840439 - protein, 640 aa, Homo sapiens
MENQLAKSTEERTFQYQDSLPSLPVPSLEESLKKYLESVTRTCYQIRGLDPDAKRGFLDLTREGIQVKPFANQEEYKKTEEIVQKFQSGIGEKLHQKLLERAKGKRNWLEEWWLNVAYLDVRIPSQLNVNFAGPAAHFEHYWPPKEGTQLERGSITLWHNLNYWQLLRKEKVPVHKVGNTPLDMNQFRMLFSTCKVPGITRDSIMNYFRTESEGRSPNHIVVLCRGRAFVFDVIHEGCLVTPPELLRQLTYIHKKCHSEPDGPGIAALTSEERTRWAKAREYLIGLDPENLALLEKIQSSLLVYSMEDSSPHVTPEDYSEIIAAILIGDPTVRWGDKSYNLISFSNGVFGCNCDHAPFDAMIMVNISYYVDEKIFQNEGRWKGSEKVRDIPLPEELIFIVDEKVLNDINQAKAQYLREASDLQIAAYAFTSFGKKLTKNKMLHPDTFIQLALQLAYYRLHGHPGCCYETAMTRHFYHGRTETMRSCTVEAVRWCQSMQDPSVNLRERQQKMLQAFAKHNKMMKDCSAGKGFDRHLLGLLLIAKEEGLPVPELFTDPLFSKSGGGGNFVLSTSLVGYLRVQGVVVPMVHNGYGFFYHIRDDRFVVACSAWKSCPETDAEKLVQLTFCAFHDMIQLMNSTHL

SEQ ID NO: 840440 - protein, 612 aa, Homo sapiens
MENQLAKSTEERTFQYQDSLPSLPVPSLEESLKKYLESVKPFANQEEYKKTEEIVQKFQSGIGEKLHQKLLERAKGKRNWLEEWWLNVAYLDVRIPSQLNVNFAGPAAHFEHYWPPKEGTQLERGSITLWHNLNYWQLLRKEKVPVHKVGNTPLDMNQFRMLFSTCKVPGITRDSIMNYFRTESEGRSPNHIVVLCRGRAFVFDVIHEGCLVTPPELLRQLTYIHKKCHSEPDGPGIAALTSEERTRWAKAREYLIGLDPENLALLEKIQSSLLVYSMEDSSPHVTPEDYSEIIAAILIGDPTVRWGDKSYNLISFSNGVFGCNCDHAPFDAMIMVNISYYVDEKIFQNEGRWKGSEKVRDIPLPEELIFIVDEKVLNDINQAKAQYLREASDLQIAAYAFTSFGKKLTKNKMLHPDTFIQLALQLAYYRLHGHPGCCYETAMTRHFYHGRTETMRSCTVEAVRWCQSMQDPSVNLRERQQKMLQAFAKHNKMMKDCSAGKGFDRHLLGLLLIAKEEGLPVPELFTDPLFSKSGGGGNFVLSTSLVGYLRVQGVVVPMVHNGYGFFYHIRDDRFVVACSAWKSCPETDAEKLVQLTFCAFHDMIQLMNSTHL

SEQ ID NO: 840441 - protein, 228 aa, Homo sapiens
MENQLAKSTEERTFQYQDSLPSLPVPSLEESLKKYLESVKPFANQEEYKKTEEIVQKFQSGIGEKLHQKLLERAKGKRNWLEEWWLNVAYLDVRIPSQLNVNFAGPAAHFEHYWPPKEGTQLERGSITLWHNLNYWQLLRKEKVPVHKVGNTPLDMNQFRMLFSTCKVPGITRDSIMNYFRTESEGRSPNHIVVLCRGRAFVFDVIHEGCLVTPPELLRFSDYFLEFH

SEQ ID NO: 840442 - protein, 612 aa, Homo sapiens; identical to SEQ ID NO: 840440

SEQ ID NO: 840443 - protein, 397 aa, Homo sapiens
MENQLAKSTEERTFQYQDSLPSLPVPSLEESLKKYLESVKPFANQEEYKKTEEIVQKFQSGIGEKLHQKLLERAKGKRNWLEEWWLNVAYLDVRIPSQLNVNFAGPAAHFEHYWPPKEGTQLERGSITLWHNLNYWQLLRKEKVPVHKVGNTPLDMNQFRMLFSTCKVPGITRDSIMNYFRTESEGRSPNHIVVLCRGRAFVFDVIHEGCLVTPPELLRQLTYIHKKCHSEPDGPGIAALTSEERTRWAKAREYLIGLDPENLALLEKIQSSLLVYSMEDSSPHVTPEDYSEIIAAILIGDPTVRWGDKSYNLISFSNGVFGCNCDHAPFDAMIMVNISYYVDEKIFQNEGRWKGSEKVRDIPLPEELIFIVDEKVLNDINQAKAQYLREVYFSLFS

SEQ ID NO: 840444 - protein, 119 aa, Homo sapiens
MGPSRMMGHKWRWSRGPWEHRGPQSSPGVGKQLLRWVLRDEQASGAAEASILGRGTWRMQGQQDNWPRVHELLAEVWCPACGLGSKDEAGGVGSQTEKCLGRHAGSKSSAKVTGHHVRL

SEQ ID NO: 840445 - protein, 46 aa, Homo sapiens
GSFYVPAEPKLAFVIRVRGINGVSPKVQKVLQLLRLHQIFNGTLVK

SEQ ID NO: 840446 - protein, 76 aa, Homo sapiens
PSRSLGDAWCKSSSQCREMWVCKEKAGLCGPNRTDCEWAIPPRRGIKSNNVAAEPVWYHTLYWTYSSVKFLLLKEK

SEQ ID NO: 840447 - protein, 138 aa, Homo sapiens
MVPNPYTLLSSIPSSTTHYSILDVKDAFFTIPLHPLSQPLFAFTWTDADTHQSQQLYCHKASGTGLFTSAKLFLMIYFISTPLLLILFNILMTFYFVAPPLSLLNKISSCSFNIYSPKDIKYPPPKLKFLLHRLPALA

SEQ ID NO: 840448 - protein, 72 aa, Homo sapiens
SSLEVCGVRSHLGDRICPAADSGDVFRSGHEDRDGDHENKPSKAITTITAKLHELLTNFKSDTHCAHEDSIL

SEQ ID NO: 840449 - protein, 78 aa, Homo sapiens
KLLNHPCYLPLHQPYPNNHHLLADFNYKPNLTQSQSSPVIKRYPVLLRHHWLTAKALFVHIHPPPPQGGHMIAQAVPA

SEQ ID NO: 840450 - protein, 654 aa, Homo sapiens
MYKWAKPKICSEDLEGAVKLPASGVKTHCPPCNPGFFKTNNSTCQPCPYGSYSNGSDCTRCPAGTEPAVGFEYKWWNTLPTNMETTVLSGINFEYKGMTGWEVAGDHIYTAAGASDNDFMILTLVVPGFRPPQSVMADTENKEVARITFVFETLCSVNCELYFMVGVNSRTNTPVETWKGSKGKQSYTYIIEENTTTSFTWAFQRTTFHEASRKYTNDVAKIYSINVTNVMNGVASYCRPCALEASDVGSSCTSCPAGYYIDRDSGTCHSCPPNTILKAHQPYGVQACVPCGPGTKNNKIHSLCYNDCTFSRNTPTRTFNYNFSALANTVTLAGGPSFTSKGLKYFHHFTLSLCGNQGRKMSVCTDNVTDLRIPEGESGFSKSITAYVCQAVIIPPEVTGYKAGVSSQPVSLADRLIGVTTDMTLDGITSPAELFHLESLGIPDVIFFYRSNDVTQSCSSGRSTTIRVRCSPQKTVPGSLLLPGTCSDGTCDGCNFHFLWESAAACPLCSVADYHAIVSSCVAGIQKTTYVWREPKLCSGGISLPEQRVTICKTIDFWLKVGISAGTCTAILLTVLTCYFWKKNQKLEYKYSKLVMNATLKDCDLPAADSCAIMEGEDVEDDLIFTSKKSLFGKIKSFTSKQPAPVTISLSEDS

SEQ ID NO: 840451 - protein, 663 aa, Homo sapiens
MYKWAKPKICSEDLEGAVKLPASGVKTHCPPCNPGFFKTNNSTCQPCPYGSYSNGSDCTRCPAGTEPAVGFEYKWWNTLPTNMETTVLSGINFEYKGMTGWEVAGDHIYTAAGASDNDFMILTLVVPGFRPPQSVMADTENKEVARITFVFETLCSVNCELYFMVGVNSRTNTPVETWKGSKGKQSYTYIIEENTTTSFTWAFQRTTFHEASRKYTNDVAKIYSINVTNVMNGVASYCRPCALEASDVGSSCTSCPAGYYIDRDSGTCHSCPPNTILKAHQPYGVQACVPCGPGTKNNKIHSLCYNDCTFSRNTPTRTFNYNFSALANTVTLAGGPSFTSKGLKYFHHFTLSLCGNQGRKMSVCTDNVTDLRIPEGESGFSKSITAYVCQAVIIPPEVTGYKAGVSSQPVSLADRLIGVTTDMTLDGITSPAELFHLESLGIPDVIFFYRSNDVTQSCSSGRSTTIRVRCSPQKTVPGSLLLPGTCSDGTCDGCNFHFLWESAAACPLCSVADYHAIVSSCVAGIQKTTYVWREPKLCSGGISLPEQRVTICKTIDFWLKVGISAGTCTAILLTVLTCYFWKKNQKLEYKYSKLVMNATLKDCDLPAADSCAIMEGEDVEDDLIFTSKKSLFGKIKSFTSKRTPDGFDSVPLKTSSGGPDMDL

SEQ ID NO: 840452 - protein, 663 aa, Homo sapiens; identical to SEQ ID NO: 840451

SEQ ID NO: 840453 - protein, 594 aa, Homo sapiens
MYKWAKPKICSEDLEGAVKLPASGVKTHCPPCNPGFFKTNNSTCQPCPYGSYSNGSDCTRCPAGTEPAVGFEYKWWNTLPTNMETTVLSGINFEYKGMTGWEVAGDHIYTAAGASDNDFMILTLVVPGFRPPQSVMADTENKEVARITFVFETLCSVNCELYFMVGVNSRTNTPVETWKGSKGKQSYTYIIEENTTTSFTWAFQRTTFHEASRKYTNDVAKIYSINVTNVMNGVASYCRPCALEASDVGSSCTSCPAGYYIDRDSGTCHSCPPNTILKAHQPYGVQACVPCGPGTKNNKIHSLCYNDCTFSRNTPTRTFNYNFSALANTVTLAGGPSFTSKGLKYFHHFTLSLCGNQGRKMSVCTDNVTDLRIPEGESGFSKSITAYVCQAVIIPPEVTGYKAGVSSQPVSLADRLIGVTTDMTLDGITSPAELFHLESLGIPDVIFFYRSNDVTQSCSSGRSTTIRVRCSPQKTVPGSLLLPGTCSDGTCDGCNFHFLWESAAACPLCSVADYHAIVSSCVAGIQKTTYVWREPKLCSGGISLPEQRVTICKTIDFWLKVGISAGTCTAILLTVLTCYFWKKNQKYMLRYWSV

SEQ ID NO: 840454 - protein, 663 aa, Homo sapiens; identical to SEQ ID NO: 840451

SEQ ID NO: 840455 - protein, 691 aa, Homo sapiens
MYKWAKPKICSEDLEGAVKLPASGVKTHCPPCNPGFFKTNNSTCQPCPYGSYSNGSDCTRCPAGTEPAVGFEYKWWNTLPTNMETTVLSGINFEYKGMTGWEVAGDHIYTAAGASDNDFMILTLVVPGFRPPQSVMADTENKEVARITFVFETLCSVNCELYFMVGVNSRTNTPVETWKGSKGKQSYTYIIEENTTTSFTWAFQRTTFHEASRKYTNDVAKIYSINVTNVMNGVASYCRPCALEASDVGSSCTSCPAGYYIDRDSGTCHSCPPNTILKAHQPYGVQACVPCGPGTKNNKTGEKTATLGCRPSRPFLTSWPDPSLSPQIHSLCYNDCTFSRNTPTRTFNYNFSALANTVTLAGGPSFTSKGLKYFHHFTLSLCGNQGRKMSVCTDNVTDLRIPEGESGFSKSITAYVCQAVIIPPEVTGYKAGVSSQPVSLADRLIGVTTDMTLDGITSPAELFHLESLGIPDVIFFYRSNDVTQSCSSGRSTTIRVRCSPQKTVPGSLLLPGTCSDGTCDGCNFHFLWESAAACPLCSVADYHAIVSSCVAGIQKTTYVWREPKLCSGGISLPEQRVTICKTIDFWLKVGISAGTCTAILLTVLTCYFWKKNQKLEYKYSKLVMNATLKDCDLPAADSCAIMEGEDVEDDLIFTSKKSLFGKIKSFTSKRTPDGFDSVPLKTSSGGPDMDL

SEQ ID NO: 840456 - protein, 331 aa, Homo sapiens
MYKWAKPKICSEDLEGAVKLPASGVKTHCPPCNPGFFKTNNSTCQPCPYGSYSNGSDCTRCPAGTEPAVGFEYKWWNTLPTNMETTVLSGINFEYKGMTGWEVAGDHIYTAAGASDNDFMILTLVVPGFRPPQSVMADTENKEVARITFVFETLCSVNCELYFMVGVNSRTNTPVETWKGSKGKQSYTYIIEENTTTSFTWAFQRTTFHEASRKYTNDVAKIYSINVTNVMNGVASYCRPCALEASDVGSSCTSCPAGYYIDRDSGTCHSCPPNTILKAHQPYGVQACVPCGPGTKNNKITFGLRIDFYSKLNQDLLHFPFGITFVFADRT

SEQ ID NO: 840457 - protein, 104 aa, Homo sapiens
LCCNDSLNFHRYTDFRKYNFKDKLYLFFSITHGYSERLPFIDGVLPCHSGWSAVAQSLLTASLCLPGSSGSSASASWTAGIKGTRHQTSASWTAGITDHFLAFG

SEQ ID NO: 840458 - protein, 554 aa, Homo sapiens
MPLPWSLALPLLLSWVAGGFGNAASARHHGLLASARQPGVCHYGTKLACCYGWRRNSKGVCEATCEPGCKFGECVGPNKCRCFPGYTGKTCSQDVNECGMKPRPCQHRCVNTHGSYKCFCLSGHMLMPDATCVNSRTCAMINCQYSCEDTEEGPQCLCPSSGLRLAPNGRDCLDIDECASGKVICPYNRRCVNTFGSYYCKCHIGFELQYISGRYDCIDINECTMDSHTCSHHANCFNTQGSFKCKCKQGYKGNGLRCSAIPENSVKEVLRAPGTIKDRIKKLLAHKNSMKKKAKIKNVTPEPTRTPTPKVNLQPFNYEEIVSRGGNSHGGKKGNEEKMKEGLEDEKREEKALKNDIEERSLRGDVFFPKVNEAGEFGLILVQRKALTSKLEHKADLNISVDCSFNHGICDWKQDREDDFDWNPADRDNAIGFYMAVPALAGHKKDIGRLKLLLPDLQPQSNFCLLFDYRLAGDKVGKLRVFVKNSNNALAWEKTTSEDEKWKTGKIQLYQGTDATKSIIFEAERGKGKTGEIAVDGVLLVSGLCPDSLLSVDD

SEQ ID NO: 840459 - protein, 437 aa, Homo sapiens
MPLPWSLALPLLLSWVAGGFGNAASARHHGLLASARQPGVCHYGTKLACCYGWRRNSKGVCEATCEPGCKFGECVGPNKCRCFPGYTGKTCSQDVNECGMKPRPCQHRCVNTHGSYKCFCLSGHMLMPDATCVNSRTCAMINCQYSCEDTEEGPQCLCPSSGLRLAPNGRDCLDIDECASGKVICPYNRRCVNTFGSYYCKCHIGFELQYISGRYDCIDINECTMDSHTCSHHANCFNTQGSFKCKCKQGYKGNGLRCSAIPENSVKEVLRAPGTIKDRIKKLLAHKNSMKKKAKIKNVTPEPTRTPTPKVNLQPFNYEEIVSRGGNSHGGKKGNEEKMKEGLEDEKREEKALKNDIEERSLRGDVFFPKVNEAGEFGLILVQRKALTSKLEHKADLNISVDCSFNHGICDWKQDREDDFDWNPADRDNELYHIGSP

SEQ ID NO: 840460 - protein, 566 aa, Homo sapiens
MPLPWSLALPLLLSWVAGGFGNAASARHHGLLASARQPGVCHYGTKLACCYGWRRNSKGVCEATCEPGCKFGECVGPNKCRCFPGYTGKTCSQDVNECGMKPRPCQHRCVNTHGSYKCFCLSGHMLMPDATCVNSRTCAMINCQYSCEDTEEGPQCLCPSSGLRLAPNGRDCLDIDECASGKVICPYNRRCVNTFGSYYCKCHIGFELQYISGRYDCIDINECTMDSHTCSHHANCFNTQGSFKCKCKQGYKGNGLRCSAIPENSVKEVLRAPGTIKDRIKKLLAHKNSMKKKAKIKNVTPEPTRTPTPKVNLQPFNYEEIVSRGGNSHGGKKGNEEKMKEGLEDEKREEKALKNDIEERSLRGDVFFPKVNEAGEFGLILVQRKALTSKLEHKADLNISVDCSFNHGICDWKQDREDDFDWNPADRDNAIGFYMAVPALAGHKKDIGRLKLLLPDLQPQSNFCLLFDYRLAGDKVGKLRVFVKNSNNALAWEKTTSEDEKWKTGKIQLYQGTDATKSTCPQRAWPAITLEHSSAFIRGILRPRHLFLEFFSSRGNLDGGILKDHF

SEQ ID NO: 840461 - protein, 68 aa, Homo sapiens
RVSELGRCSEAPKLVGNISSCSYCVGDNHFCCKSRPVVSQYLRTPTSALPNYEPYPASIPSPTLPLAH

SEQ ID NO: 840462 - protein, 256 aa, Homo sapiens
MPPAQGYEFAAAKGPRDELGPSFPMASPPGLELKTLSNGPQAPRRSAPLGPVAPTREGVENACFSSEEHETHFQNPGNTRLGSSPSPPGGVSSLPRSQRDDLSLHSEEGPALEPVSRPVDYGFVSALVFLVSGILLVVTAYAIPREARVNPDTVTAREMERLEMYYARLGSHLDRCIIAGLGLLTVGGMLLSVLLMVSLCKGELYRRRTFVPGKGSRKTYGSINLRMRQLNGDGGQALVENEVVQVSETSHTLQRS

SEQ ID NO: 840463 - protein, 256 aa, Homo sapiens; identical to SEQ ID NO: 840462

SEQ ID NO: 840464 - protein, 344 aa, Homo sapiens
RPPPPPYSSARREQVRAPRQWLRAGPGRGRETGRARRWRPGPRPPGCAAGERPPQARPPQAYAGCRKADGHRRGRTLARRRPGALRPSVVRRGGRPGTAAKGPRDELGPSFPMASPPGLELKTLSNGPQAPRRSAPLGPVAPTREGVENACFSSEEHETHFQNPGNTRLGSSPSPPGGVSSLPRSQRDDLSLHSEEGPALEPVSRPVDYGFVSALVFLVSGILLVVTAYAIPREARVNPDTVTAREMERLEMYYARLGSHLDRCIIAGLGLLTVGGMLLSVLLMVSLCKGELYRRRTFVPGKGSRKTYGSINLRMRQLNGDGGQALVENEVVQVSETSHTLQRS

SEQ ID NO: 840465 - protein, 131 aa, Homo sapiens [sequence omitted]

SEQ ID NO: 840466 - protein, 365 aa, Homo sapiens
MNIMDFNVKKLAADAGTFLSRAVQFTEEKLGQAEKTELDAHLENLLSKAECTKIWTEKIMKQTEVLLQPNPNARIEEFVYEKLDRKAPSRINNPELLGQYMIDAGTEFGPGTAYGNALIKCGETQKRIGTADRELIQTSALNFLTPLRNFIEGDYKTIAKERKLLQNKRLDLDAAKTRLKKAKAAETRNSSEQELRITQSEFDRQAEITRLLLEGISSTHAHHLRCLNDFVEAQMTYYAQCYQYMLDLQKQLGSFPSNYLSNNNQTSVTPVPSVLPNAIGSSAMASTSGLVITSPSNLSDLKECSGSRKARVLYDYDAANSTELSLLADEVITVFSVVGMDSDWLMGERGNQKGKVPITYLELLN

SEQ ID NO: 840467 - protein, 365 aa, Homo sapiens; identical to SEQ ID NO: 840466

SEQ ID NO: 840468 - protein, 265 aa, Homo sapiens
MIDAGTEFGPGTAYGNALIKCGETQKRIGTADRELIQTSALNFLTPLRNFIEGDYKTIAKERKLLQNKRLDLDAAKTRLKKAKAAETRNSSEQELRITQSEFDRQAEITRLLLEGISSTHAHHLRCLNDFVEAQMTYYAQCYQYMLDLQKQLGSFPSNYLSNNNQTSVTPVPSVLPNAIGSSAMASTSGLVITSPSNLSDLKECSGSRKARVLYDYDAANSTELSLLADEVITVFSVVGMDSDWLMGERGNQKGKVPITYLELLN

SEQ ID NO: 840469 - protein, 131 aa, Homo sapiens [sequence omitted]

SEQ ID NO: 840470 - protein, 326 aa, Homo sapiens
MNIMDFNVKKLAADAGTFLSRAVQFTEEKLGQAEKTELDAHLENLLSKAECTKIWTEKIMKQTEVLLQPNPNARIEEFVYEKLDRKAPSRINNPELLGQYMIDAGTEFGPGTAYGNALIKCGETQKRIGTADRELIQTSALNFLTPLRNFIEGDYKTIAKERKLLQNKRLDLDAAKTRLKKAKAAETRNSSEQELRITQSEFDRQAEITRLLLEGISSTHAHHLRCLNDFVEAQMTYYAQCYQYMLDLQKQLGSFPSNYLSNNNQTSVTPVPSVLPNAIGFRLANGGKGKPEGQGANYLLRTAQLSRWTMERLPIMTLYLYTINSK

SEQ ID NO: 840471 - protein, 365 aa, Homo sapiens; identical to SEQ ID NO: 840466

SEQ ID NO: 840472 - protein, 202 aa, Homo sapiens
MNIMDFNVKKLAADAGTFLSRAVQFTEEKLGQAEKTELDAHLENLLSKAECTKIWTEKIMKQTEVLLQPNPNARIEEFVYEKLDRKAPSRINNPELLGQYMIDAGTEFGPGTAYGNALIKCGETQKRIGTADRELIQTSALNFLTPLRNFIEGDYKTIAKERKLLQNKRLDLDAAKTRLKKAKLANLKFICQNLNYLREFFR

SEQ ID NO: 840473 - protein, 195 aa, Homo sapiens
MNIMDFNVKKLAADAGTFLSRAVQFTEEKLGQAEKTELDAHLENLLSKAECTKIWTEKIMKQTEVLLQPNPNARIEEFVYEKLDRKAPSRINNPELLGQYMIDAGTEFGPGTAYGNALIKCGETQKRIGTADRELIQTSALNFLTPLRNFIEGDYKTIAKERKLLQNKRLDLDAAKTRLKKAKAAETRNSSGTRN

SEQ ID NO: 840474 - protein, 365 aa, Homo sapiens; identical to SEQ ID NO: 840466

SEQ ID NO: 840475 - protein, 386 aa, Homo sapiens
MNIMDFNVKKLAADAGTFLSRAVQFTEEKLGQAEKTELDAHLENLLSKAECTKIWTEKIMKQTEVLLQPNPNARIEEFVYEKLDRKAPSRINNPELLGQYMIDAGTEFGPGTAYGNALIKCGETQKRIGTADRELIQTSALNFLTPLRNFIEGDYKTIAKERKLLQNKRLDLDAAKTRLKKAKAAETRNSQLNSARLEGDNIMIWAEEVTKSEQELRITQSEFDRQAEITRLLLEGISSTHAHHLRCLNDFVEAQMTYYAQCYQYMLDLQKQLGSFPSNYLSNNNQTSVTPVPSVLPNAIGSSAMASTSGLVITSPSNLSDLKECSGSRKARVLYDYDAANSTELSLLADEVITVFSVVGMDSDWLMGERGNQKGKVPITYLELLN

SEQ ID NO: 840476 - protein, 266 aa, Homo sapiens
MEGLGRVTDTDDMRGERGTAGKEALALGAVFCEVDSELSHLWRTKMEAWVGKKKGIKTIAKERKLLQNKRLDLDAAKTRLKKAKAAETRNSSEQELRITQSEFDRQAEITRLLLEGISSTHAHHLRCLNDFVEAQMTYYAQCYQYMLDLQKQLGSFPSNYLSNNNQTSVTPVPSVLPNAIGSSAMASTSGLVITSPSNLSDLKECSGSRKARVLYDYDAANSTELSLLADEVITVFSVVGMDSDWLMGERGNQKGKVPITYLELLN

SEQ ID NO: 840477 - protein, 234 aa, Homo sapiens
MNIMDFNVKKLAADAGTFLSRAVQFTEEKLGQAEKTELDAHLENLLSKAECTKIWTEKIMKQTEVLLQPNPNARIEEFVYEKLDRKAPSRINNPELLGQYMIDAGTEFGPGTAYGNALIKCGETQKRIGTADRELIQTSALNFLTPLRNFIEGDYKTIAKERKLLQNKRLDLDAAKTRLKKAKAAETRNSSEQELRITQSEFDRQAEITRLLLEGISSTHAHHLRCLNDFVEPL

SEQ ID NO: 840478 - protein, 254 aa, Homo sapiens
MNIMDFNVKKLAADAGTFLSRAVQFTEEKLGQAEKTELDAHLENLLSKAECTKIWTEKIMKQTEVLLQPNPNARIEEFVYEKLDRKAPSRINNPELLGQYMIDAGTEFGPGTAYGNALIKCGETQKRIGTADRELIQTSALNFLTPLRNFIEGDYKTIAKERKLLQNKRLDLDAAKTRLKKAKAAETRNSSEQELRITQSEFDRQAEITRLLLEGISSTHAHHLRCLNDFVEAQMTYYAQCYQYMLDLQKQLGR

SEQ ID NO: 840479 - protein, 749 aa, Homo sapiens
GSASGPAGLTSVQSALKAPGLAGCFPSSQHLRGSYHHPSYRRGSRGFVKCPTEEALIYEPGALSPETMLRGSYDHDLATLSLWGYTAFSLHLQGSDSIQRPGPAPKSTPDPSLGQGDFSSFGTQQDTAAVRVSKRMLAGGVRSMPSPLLACWQPILLLVLGSVLSGSATGCPPRCECSAQDRAVLCHRKRFVAVPEGIPTETRLLDLGKNRIKTLNQDEFASFPHLEELELNENIVSAVEPGAFNNLFNLRTLGLRSNRLKLIPLGVFTGLSNLTKLDISENKIVILLDYMFQDLYNLKSLEVGDNDLVYISHRAFSGLNSLEQLTLEKCNLTSIPTEALSHLHGLIVLRLRHLNINAIRDYSFKRLYRLKVLEISHWPYLDTMTPNCLYGLNLTSLSITHCNLTAVPYLAVRHLVYLRFLNLSYNPISTIEGSMLHELLRLQEIQLVGGQLAVVEPYAFRGLNYLRVLNVSGNQLTTLEESVFHSVGNLETLILDSNPLACDCRLLWVFRRRWRLNFNRQQPTCATPEFVQGKEFKDFPDVLLPNYFTCRRARIRDRKAQQVFVDEGHTVQFVCRADGDPPPAILWLSPRKHLVSAKSNGRLTVFPDGTLEVRYAQVQDNGTYLCIAANAGGNDSMPAHLHVRSYSPDWPHQPNKTFAFISNQPGEGEANSTRATVPFPFDIKTLIIATTMGFISFLGVVLFCLVLLFLWSRGKGNTKHNIEIEYVPRKSDAGISSADAPRKFNMKMI

SEQ ID NO: 840480 - protein, 764 aa, Homo sapiens
ADYTEIFSLIEADRSFRAVMYSGFKLCSFLSLNSQIKGSLPSPPCAGACDLDCNDGGSYDHDLATLSLWGYTAFSLHLQGSDSIQRPGPAPKSTPDPSLGQGDFSSFGTQQDTAASQVHAGTATDRLADPRPPEASLFASQRHLTQVSKRMLAGGVRSMPSPLLACWQPILLLVLGSVLSGSATGCPPRCECSAQDRAVLCHRKRFVAVPEGIPTETRLLDLGKNRIKTLNQDEFASFPHLEELELNENIVSAVEPGAFNNLFNLRTLGLRSNRLKLIPLGVFTGLSNLTKLDISENKIVILLDYMFQDLYNLKSLEVGDNDLVYISHRAFSGLNSLEQLTLEKCNLTSIPTEALSHLHGLIVLRLRHLNINAIRDYSFKRLYRLKVLEISHWPYLDTMTPNCLYGLNLTSLSITHCNLTAVPYLAVRHLVYLRFLNLSYNPISTIEGSMLHELLRLQEIQLVGGQLAVVEPYAFRGLNYLRVLNVSGNQLTTLEESVFHSVGNLETLILDSNPLACDCRLLWVFRRRWRLNFNRQQPTCATPEFVQGKEFKDFPDVLLPNYFTCRRARIRDRKAQQVFVDEGHTVQFVCRADGDPPPAILWLSPRKHLVSAKSNGRLTVFPDGTLEVRYAQVQDNGTYLCIAANAGGNDSMPAHLHVRSYSPDWPHQPNKTFAFISNQPGEGEANSTRATVPFPFDIKTLIIATTMGFISFLGVVLFCLVLLFLWSRGKGNTKHNIEIEYVPRKSDAGISSADAPRKFNMKMI

SEQ ID NO: 840481 - protein, 646 aa, Homo sapiens
PGWYAPEVWDPEPRPRLRLGSRPRGADRRTASPARARGLPGGGVGGGGNGGGGWAGAGAWSGRLERHAIGDRAERTEGAPEMQVSKRMLAGGVRSMPSPLLACWQPILLLVLGSVLSGSATGCPPRCECSAQDRAVLCHRKRFVAVPEGIPTETRLLDLGKNRIKTLNQDEFASFPHLEELELNENIVSAVEPGAFNNLFNLRTLGLRSNRLKLIPLGVFTGLSNLTKLDISENKIVILLDYMFQDLYNLKSLEVGDNDLVYISHRAFSGLNSLEQLTLEKCNLTSIPTEALSHLHGLIVLRLRHLNINAIRDYSFKRLYRLKVLEISHWPYLDTMTPNCLYGLNLTSLSITHCNLTAVPYLAVRHLVYLRFLNLSYNPISTIEGSMLHELLRLQEIQLVGGQLAVVEPYAFRGLNYLRVLNVSGNQLTTLEESVFHSVGNLETLILDSNPLACDCRLLWVFRRRWRLNFNRQQPTCATPDILWLSPRKHLVSAKSNGRLTVFPDGTLEVRYAQVQDNGTYLCIAANAGGNDSMPAHLHVRSYSPDWPHQPNKTFAFISNQPGEGEANSTRATVPFPFDIKTLIIATTMGFISFLGVVLFCLVLLFLWSRGKGNTKHNIEIEYVPRKSDAGISSADAPRKFNMKMI

SEQ ID NO: 840482 - protein, 634 aa, Homo sapiens
PGWYAPEVWDPEPRPRLRLGSRPRGADRRTASPARARGLPGGGVGGGGNGGGGWAGAGAWSGRLERHAIGDRAERTEGAPEMQVSKRMLAGGVRSMPSPLLACWQPILLLVLGSVLSGSATGCPPRCECSAQDRAVLCHRKRFVAVPEGIPTETRLLDLGKNRIKTLNQDEFASFPHLEELELNENIVSAVEPGAFNNLFNLRTLGLRSNRLKLIPLGVFTGLSNLTKLDISENKIVILLDYMFQDLYNLKSLEVGDNDLVYISHRAFSGLNSLEQLTLEKCNLTSIPTEALSHLHGLIVLRLRHLNINAIRDYSFKRLYRLKVLEISHWPYLDTMTPNCLYGLNLTSLSITHCNLTAVPYLAVRHLVYLRFLNLSYNPISTIEGSMLHELLRLQEIQLVGGQLAVVEPYAFRGLNYLRVLNVSGNQLTTLEESVFHSVGNLETLILDSNPLACDCRLLWVFRRRWRLNFNRQQPTCATPEFVQGKEFKDFPDVLLPNYFTCRRARIRDRKAQQVFVDEGHTVQFVCRADGDPPPAILWLSPRKHLVSAKSNGRLTVFPDGTLEVRYAQVQDNGTYLCIAANAGGNDSMPAHLHVRSYSPDWPHQPNKTFAFISNQPGEGEANSTRATVPFPST

SEQ ID NO: 840483 - protein, 701 aa, Homo sapiens
PGWYAPEVWDPEPRPRLRLGSRPRGADRRTASPARARGLPGGGVGGGGNGGGGWAGAGAWSGRLERHAIGDRAERTEGAPEMQVSKRMLAGGVRSMPSPLLACWQPILLLVLGSVLSGSATGCPPRCECSAQDRAVLCHRKRFVAVPEGIPTETRLLDLGKNRIKTLNQDEFASFPHLEELELNENIVSAVEPGAFNNLFNLRTLGLRSNRLKLIPLGVFTGLSNLTKLDISENKIVILLDYMFQDLYNLKSLEVGDNDLVYISHRAFSGLNSLEQLTLEKCNLTSIPTEALSHLHGLIVLRLRHLNINAIRDYSFKRLYRLKVLEISHWPYLDTMTPNCLYGLNLTSLSITHCNLTAVPYLAVRHLVYLRFLNLSYNPISTIEGSMLHELLRLQEIQLVGGQLAVVEPYAFRGLNYLRVLNVSGNQLTTLEESVFHSVGNLETLILDSNPLACDCRLLWVFRRRWRLNFNRQQPTCATPEFVQGKEFKDFPDVLLPNYFTCRRARIRDRKAQQVFVDEGHTVQFVCRADGDPPPAILWLSPRKHLVSAKSNGRLTVFPDGTLEVRYAQVQDNGTYLCIAANAGGNDSMPAHLHVRSYSPDWPHQPNKTFAFISNQPGEGEANSTRATVPFPFDIKTLIIATTMGFISFLGVVLFCLVLLFLWSRGKGNTKHNIEIEYVPRKSDAGISSADAPRKFNMKMI

SEQ ID NO: 840484 - protein, 699 aa, Homo sapiens
PGWYAPEVWDPEPRPRLRLGSRPRGADRRTASPARARGLPGGGVGGGGNGGGGWAGAGAWSGRLERHAIGDRAERTEGAPEMQVSKRMLAGGVRSMPSPLLACWQPILLLVLGSVLSGSATGCPPRCECSAQDRAVLCHRKRFVAVPEGIPTETRLLDLGKNRIKTLNQDEFASFPHLEELELNENIVSAVEPGAFNNLFNLRTLGLRSNRLKLIPLGVFTGLSNLTKLDISENKIVILLDYMFQDLYNLKSLEVGDNDLVYISHRAFSGLNSLEQLTLEKCNLTSIPTEALSHLHGLIVLRLRHLNINAIRDYSFKRLYRLKVLEISHWPYLDTMTPNCLYGLNLTSLSITHCNLTAVPYLAVRHLVYLRFLNLSYNPISTIEGSMLHELLRLQEIQLVGGQLAVVEPYAFRGLNYLRVLNVSGNQLTTLEESVFHSVGNLETLILDSNPLACDCRLLWVFRRRWRLNFNRQQPTCATPEFVQGKEFKDFPDVLLPNYFTCRRARIRDRKAQQVFVDEGHTVQFVCRADGDPPPAILWLSPRKHLVSAKSNGRLTVFPDGTLEVRYAQVQDNGTYLCIAANAGGNDSMPAHLHVRSYSPDWPHQPNKTFAFISNQPGEGEANSTRATVPFPFDIKTLIIATTMGFISFLGVVLFCLVLLFLWSRGKGNTKHNIEIEYLPSFYQDLRSPDLGTPPTQGH

SEQ ID NO: 840485 - protein, 435 aa, Homo sapiens
MMKRQLHRMRQLAQTGSLGRTPETAEFLGEDLLQVEQRLEPAKRAAHNIHKRLQACLQGQSGADMDKRVKKLPLMALSTTMAESFKELDPDSSMGKALEMSCAIQNQLARILAEFEMTLERDVLQPLSRLSEEELPAILKHKKSLQKLVSDWNTLKSRLSQATKNSGSSQGLGGSPGSHSHTTMANKVETLKEEEEELKRKVEQCRDEYLADLYHFVTKEDSYANYFIRLLEIQADYHRRSLSSLDTALAELRENHGQADHSPSMTATHFPRVYGVSLATHLQELGREIALPIEACVMMLLSEGMKEEGLFRLAAGASVLKRLKQTMASDPHSLEEFCSDPHAVAGALKSYLRELPEPLMTFDLYDDWMRAASLKEPGARLQALQEVCSRLPPENLSNLRYLMKFLARLAEEQEVNKMTPSNIAIVLGPTLAVAT

SEQ ID NO: 840486 - protein, 701 aa, Homo sapiens
MMKRQLHRMRQLAQTGSLGRTPETAEFLGEDLLQVEQRLEPAKRAAHNIHKRLQACLQGQSGADMDKRVKKLPLMALSTTMAESFKELDPDSSMGKALEMSCAIQNQLARILAEFEMTLERDVLQPLSRLSEEELPAILKHKKSLQKLVSDWNTLKSRLSQATKNSGSSQGLGGSPGSHSHTTMANKVETLKEEEEELKRKVEQCRDEYLADLYHFVTKEDSYANYFIRLLEIQADYHRRSLSSLDTALAELRENHGQADHSPSMTATHFPRVYGVSLATHLQELGREIALPIEACVMMLLSEGMKEEGLFRLAAGASVLKRLKQTMASDPHSLEEFCSDPHAVAGALKSYLRELPEPLMTFDLYDDWMRAASLKEPGARLQALQEVCSRLPPENLSNLRYLMKFLARLAEEQEVNKMTPSNIAIVLGPNLLWPPEKEGDQAQLDAASVSSIQVVGVVEALIQSADTLFPGDINFNVSGLFSAVTLQDTVSDRLASEELPSTAVPTPATTPAPAPAPAPAPAPALASAATKERTESEVPPRPASPKVTRSPPETAAPVEDMARRTKRPAPARPTMPPPQVSGSRSSPPAPPLPPGSGSPGTPQALPRRLVGSSLRAPTVPPPLPPTPPQPARRQSRRSPASPSPASPGPASPSPVSLSNPAQVDLGAATAEGGAPEAISGVPTPPAIPPQPRPRSLASETN

SEQ ID NO: 840487 - protein, 574 aa, Homo sapiens
KLRLVEAGGESAEDKKSLQKLVSDWNTLKSRLSQATKNSGSSQGLGGSPGSHSHTTMANKVETLKEEEEELKRKVEQCRDEYLADLYHFVTKEDSYANYFIRLLEIQADYHRRSLSSLDTALAELRENHGQADHSPSMTATHFPRVYGVSLATHLQELGREIALPIEACVMMLLSEGMKEEGLFRLAAGASVLKRLKQTMASDPHSLEEFCSDPHAVAGALKSYLRELPEPLMTFDLYDDWMRAASLKEPGARLQALQEVCSRLPPENLSNLRYLMKFLARLAEEQEVNKMTPSNIAIVLGPNLLWPPEKEGDQAQLDAASVSSIQVVGVVEALIQSADTLFPGDINFNVSGLFSAVTLQDTVSDRLASEELPSTAVPTPATTPAPAPAPAPAPAPALASAATKERTESEVPPRPASPKVTRSPPETAAPVEDMARRTKRPAPARPTMPPPQVSGSRSSPPAPPLPPGSGSPGTPQALPRRLVGSSLRAPTVPPPLPPTPPQPARRQSRRSPASPSPASPGPASPSPVSLSNPAQVDLGAATAEGGAPEAISGVPTPPAIPPQPRPRSLASETN

SEQ ID NO: 840488 - protein, 701 aa, Homo sapiens; identical to SEQ ID NO: 840486

SEQ ID NO: 840489 - protein, 190 aa, Homo sapiens
MANKVETLKEEEEELKRKVEQCRDEYLADLYHFVTKEDSYANYFIRLLEIQADYHRRSLSSLDTALAELRENHGQADHSPSMTATHFPRVYGVSLATHLQELGREIALPIEACVMMLLSEGMKEEGLFRLAAGASVLKRLKQTMASDPHSLEEFCSDPHAVAGALKSYLRELPEPLMTFDLYDDWMRAAS

SEQ ID NO: 840490 - protein, 207 aa, Homo sapiens
MASDPHSLEEFCSDPHAVAGALKSYLRELPEPLMTFDLYDDWMRAASLKEPGARLQALQEVCSRLPPENLSNLRYLMKFLARLAEEQEVNKMTPSNIAIVLGPNLLWPPEKEGDQAQLDAASVSSIQVVGVVEALIQSADTLFPGDINFNVSGLFSAVTLQDTVSDRLASEELPSTAVPTPATTPAPAPAPAPAPAPALASAATKER

SEQ ID NO: 840491 - protein, 518 aa, Homo sapiens
MANKVETLKEEEEELKRKVEQCRDEYLADLYHFVTKEDSYANYFIRLLEIQADYHRRSLSSLDTALAELRENHGQADHSPSMTATHFPRVYGVSLATHLQELGREIALPIEACVMMLLSEGMKEEGLFRLAAGASVLKRLKQTMASDPHSLEEFCSDPHAVAGALKSYLRELPEPLMTFDLYDDWMRAASLKEPGARLQALQEVCSRLPPENLSNLRYLMKFLARLAEEQEVNKMTPSNIAIVLGPNLLWPPEKEGDQAQLDAASVSSIQVVGVVEALIQSADTLFPGDINFNVSGLFSAVTLQDTVSDRLASEELPSTAVPTPATTPAPAPAPAPAPAPALASAATKERTESEVPPRPASPKVTRSPPETAAPVEDMARRTKRPAPARPTMPPPQVSGSRSSPPAPPLPPGSGSPGTPQALPRRLVGSSLRAPTVPPPLPPTPPQPARRQSRRSPASPSPASPGPASPSPVSLSNPAQVDLGAATAEGGAPEAISGVPTPPAIPPQPRPRSLASETN

SEQ ID NO: 840492 - protein, 616 aa, Homo sapiens
MMKRQLHRMRQLAQTGSLGRTPETAEFLGEDLLQVEQRLEPAKRAAHNIHKRLQACLQGQSGADMDKRVKKLPLMALSTTMAESFKELDPDSSMGKALEMSCAIQNQLARILAEFEMTLERDVLQPLSRLSEEELPAILKHKKSLQKLVSDWNTLKSRLSQATKNSGSSQGLGGSPGSHSHTTMANKVETLKEEEEELKRKVEQCRDEYLADLYHFVTKEDSYANYFIRLLEIQADYHRRSLSSLDTALAELRENHGQADHSPSMTATHFPRVYGVSLATHLQELGREIALPIEACVMMLLSEGMKEEGLFRLAAGASVLKRLKQTMASDPHSLEEFCSDPHAVAGALKSYLRELPEPLMTFDLYDDWMRAASLKEPGARLQALQEVCSRLPPENLSNLRYLMKFLARLAEEQEVNKMTPSNIAIVLGPNLLWPPEKEGDQAQLDAASVSSIQVVGVVEALIQSADTLFPGDINFNVSGLFSAVTLQDTVSDRLASEELPSTAVPTPATTPAPAPAPAPAPAPALASAATKERTESEVPPRPASPKVTRSPPETAAPVEDMARRTKAPGASPGPPCPPHARSPSRVRSCRGLRKACASGRAGTQEEEEIIRTRWRK

SEQ ID NO: 840493 - protein, 270 aa, Homo sapiens
MMKRQLHRMRQLAQTGSLGRTPETAEFLGEDLLQVEQRLEPAKRAAHNIHKRLQACLQGQSGADMDKRVKKLPLMALSTTMAESFKELDPDSSMGKALEMSCAIQNQLARILAEFEMTLERDVLQPLSRLSEEELPAILKHKKSLQKLVSDWNTLKSRLSQATKNSGSSQGLGGSPGSHSHTTMANKVETLKEEEEELKRKVEQCRDEYLADLYHFVTKEDSYANYFIRLLEIQADYHRRSLSSLDTALAELRENHGQAGGDIGPAIPHP

SEQ ID NO: 840494 - protein, 167 aa, Homo sapiens
RRAKSLDSRTTKPSVTPDLLNFKKGWLTKQYEDSQWKKHWFVLADQSLRYYRDSVAEEAADLDGEIDLSACYDVTEYPVQRNYGFQIHTKEGEFTPSAMTSGIRRNWIQTIMKHVHPTTAPDVTSWLPEEKNKSSCSFETCPRPTEKQEAEPGEPDPEQKRSRTWER

SEQ ID NO: 840495 - protein, 634 aa, Homo sapiens [sequence omitted]

SEQ ID NO: 840496 - protein, 466 aa, Homo sapiens
MRGPNSGTEKGRLVIPEKQGFDFLCMPVFHPRFKREFIQEPAKNRPGPQTRSDLLLSGRDWNTLIVGKLSPWIRPDSKVEKIRRNSEALEVQFIITGTNHHSEKEFCSYLQYLEYLSQNRPPPNAYELFAKGYEDYLQSPLQPLMDNLESQTYEVFEKDPIKYSQYQQAIYKCLLDRVPEEEKDTNVQVLMVLGAGRGPLVNASLRAAKQADRRIKLYAVEKNPNAVVTLENWQFEEWGSQVTVVSSDMREWVAPEKADIIVSELLGSFADNELSPECLDGAQHFLKDDGVSIPGEYTSFLAPISSSKLYNEVRACREKDRDPEAQFEMPYVVRLHNFHQLSAPQPCFTFSHPNRDPMIDNNRYCTLEFPVEVNTVLHGFAGYFETVLYQDITLSIRPETHSPGMFSWFPILFPIKQPITVREGQTICVRFWRCSNSKKVWYEWAVTAPVCSAIHNPTGRSYTIGL

SEQ ID NO: 840497 - protein, 356 aa, Homo sapiens
MPYVVRLHNFHQLSAPQPCFTFSHPNRDPMIDNNRYCTLEFPVEVNTVLHGFAGYFETVLYQHFLKDDGVSIPGEYTSFLAPISSSKLYNEVRACREKDRDPGGTNHHSEKEFCSYLQYLEYLSQNRPPPNAYELFAKGYEDYLQSPLQPLMDNLESQTYEVFEKDPIKYSQYQQAIYKCLLDRVPEEEKDTNVQVLMVLGAGRGPLVNASLRAAKQADRRIKLYAVEKNPNAVVTLENWQFEEWGSQVTVVSSDMREWVAPEKADIIVSELLGSFADNELSPECLDGAQHFLKVFSWFPILFPIKQPITVREGQTICVRFWRCSNSKKVWYEWAVTAPVCSAIHNPTGRSYTIGL

SEQ ID NO: 840498 - protein, 634 aa, Homo sapiens [sequence omitted]

SEQ ID NO: 840499 - protein, 531 aa, Homo sapiens
MLQELNFGAYLGLPAFLLPLNQEDNTNLARVLTNHIHTGHHSSMFWMRVPLVAPEDLRDDIIENAPTTHTEEYSGEEKTWMWWHNFRTLCDYSKRIAVALEIGADLPSNHVIDRWLGEPIKAAILPTSIFLTNKKGFPVLSKMHQRLIFRLLKLEVQFIITGTNHHSEKEFCSYLQYLEYLSQNRPPPNAYELFAKGYEDYLQSPLQPLMDNLESQTYEVFEKDPIKYSQYQQAIYKCLLDRVPEEEKDTNVQVLMVLGAGRGPLVNASLRAAKQADRRIKLYAVEKNPNAVVTLENWQFEEWGSQVTVVSSDMREWVAPEKADIIVSELLGSFADNELSPECLDGAQHFLKDDGVSIPGEYTSFLAPISSSKLYNEVRACREKDRDPEAQFEMPYVVRLHNFHQLSAPQPCFTFSHPNRDPMIDNNRYCTLEFPVEVNTVLHGFAGYFETVLYQDITLSIRPETHSPGMFSWFPILFPIKQPITVREGQTICVRFWRCSNSKKVWYEWAVTAPVCSAIHNPTGRSYTIGL

SEQ ID NO: 840500 - protein, 620 aa, Homo sapiens
MRGPNSGTEKGRLVIPEKQGFDFLCMPVFHPRFKREFIQEPAKNRPGPQTRSDLLLSGRDWNTLIVGKLSPWIRPDSKVEKIRRNSEAAMLQELNFGAYLGLPAFLLPLNQEDNTNLARVLTNHIHTGHHSSMFWMRVPLVAPEDLRDDIIENAPTTHTEEYSGEEKTWMWWHNFRTLCDYSKRIAVALEIGADLPSNHVIDRWLGEPIKAAILPTSIFLTNKKGFPVLSKMHQRLIFRLLKLEVQFIITGTNHHSEKEFCSYLQYLEYLSQNRPPPNAYELFAKGYEDYLQSPLQPLMDNLESQTYEVFEKDPIKYSQYQQAIYKCLLDRVPEEEKDTNVQVLMVLGAGRGPLVNASLRAAKQADRRIKLYAVEKNPNAVVTLENWQFEEWGSQVTVVSSDMREWVAPEKADIIVSELLGSFADNELSPECLDGAQHFLKDDGVSIPGEYTSFLAPISSSKLYNEVRACREKDRDPEAQFEMPYVVRLHNFHQLSAPQPCFTFSHPNRDPMIDNNRYCTLEFPVEVNTVLHGFAGYFETVLYQDITLSIRPETHSPGMFSWFPILFPIKQPITVREGQTICVRFWRCSNSKKVWYEWAVTAPVCSAIHNPTGRSYTIGL

SEQ ID NO: 840501 - protein, 703 aa, Homo sapiens
MAVGGAGGSRVSSGRDLNCVPEIADTLGAVAKQGFDFLCMPVFHPRFKREFIQEPAKNRPGPQTRSDLLLSGRDWNTLIVGKLSPWIRPDSKVEKIRRNSEAAMLQELNFGAYLGLPAFLLPLNQEDNTNLARVLTNHIHTGHHSSMFWMRVPLVAPEDLRDDIIENAPTTHTEEYSGEEKTWMWWHNFRTLCDYSKRIAVGESMRILGWVWLLLPPVNKNQEFHIYIQFCYFPSVSDWLSLKEVNRFAQRSKEGFLAWQWLTVFLLPHVALEIGADLPSNHVIDRWLGEPIKAAILPTSIFLTNKKGFPVLSKMHQRLIFRLLKLEVQFIITGTNHHSEKEFCSYLQYLEYLSQNRPPPNAYELFAKGYEDYLQSPLQPLMDNLESQTYEVFEKDPIKYSQYQQAIYKCLLDRVPEEEKDTNVQVLMVLGAGRGPLVNASLRAAKQADRRIKLYAVEKNPNAVVTLENWQFEEWGSQVTVVSSDMREWVAPEKADIIVSELLGSFADNELSPECLDGAQHFLKDDGVSIPGEYTSFLAPISSSKLYNEVRACREKDRDPEAQFEMPYVVRLHNFHQLSAPQPCFTFSHPNRDPMIDNNRYCTLEFPVEVNTVLHGFAGYFETVLYQDITLSIRPETHSPGMFSWFPILFPIKQPITVREGQTICVRFWRCSNSKKVWYEWAVTAPVCSAIHNPTGRSYTIGL

SEQ ID NO: 840502 - protein, 468 aa, Homo sapiens
MAVGGAGGSRVSSGRDLNCVPEIADTLGAVAKQGFDFLCMPVFHPRFKREFIQEPAKNRPGPQTRSDLLLSGRDWNTLIVGKLSPWIRPDSKVEKIRRNSEAAMLQELNFGAYLGLPAFLLPLNQEDNTNLARVLTNHIHTGHHSSMFWMRVPLVAPEDLRDDIIENAPTTHTEEYSGEEKTWMWWHNFRTLCDYSKRIAVALEIGADLPSNHVIDRWLGEPIKAAILPTSIFLTNKKGFPVLSKMHQRLIFRLLKLEVQFIITGTNHHSEKEFCSYLQYLEYLSQNRPPPNAYELFAKGYEDYLQSPLQPLMDNLESQTYEVFEKDPIKYSQYQQAIYKCLLDRVPEEEKDTNVQVLMVLGAGRGPLVNASLRAAKQADRRIKLYAVEKNPNAVVTLENWQFEEWGSQVTVVPSLPPSCTMRSEPVGRRTVTLRPSLRCLMWYGCTTSTSSLHPSPVSPSAIPTEIL

SEQ ID NO: 840503 - protein, 576 aa, Homo sapiens
MRGPNSGTEKGRLVIPEKQGFDFLCMPVFHPRFKREFIQEPAKNRPGPQTRSDLLLSGRAFLLPLNQEDNTNLARVLTNHIHTGHHSSMFWMRVPLVAPEDLRDDIIENAPTTHTEEYSGEEKTWMWWHNFRTLCDYSKRIAVALEIGADLPSNHVIDRWLGEPIKAAILPTSIFLTNKKGFPVLSKMHQRLIFRLLKLEVQFIITGTNHHSEKEFCSYLQYLEYLSQNRPPPNAYELFAKGYEDYLQSPLQPLMDNLESQTYEVFEKDPIKYSQYQQAIYKCLLDRVPEEEKDTNVQVLMVLGAGRGPLVNASLRAAKQADRRIKLYAVEKNPNAVVTLENWQFEEWGSQVTVVSSDMREWVAPEKADIIVSELLGSFADNELSPECLDGAQHFLKDDGVSIPGEYTSFLAPISSSKLYNEVRACREKDRDPEAQFEMPYVVRLHNFHQLSAPQPCFTFSHPNRDPMIDNNRYCTLEFPVEVNTVLHGFAGYFETVLYQDITLSIRPETHSPGMFSWFPILFPIKQPITVREGQTICVRFWRCSNSKKVWYEWAVTAPVCSAIHNPTGRSYTIGL

SEQ ID NO: 840504 - protein, 593 aa, Homo sapiens
MAVGGAGGSRVSSGRDLNCVPEIADTLGAVAKQGFDFLCMPVFHPRFKREFIQEPAKNRPGPQTRSDLLLSGRDWNTLIVGKLSPWIRPDSKVEKIRRNSEAAMLQELNFGAYLGLPAFLLPLNQEDNTNLARVLTNHIHTGHHSSMFWMRVPLVAPEDLRDDIIENAPTTHTEEYSGEEKTWMWWHNFRTLCDYSKRIAVALEIGADLPSNHVIDRWLGEPIKAAILPTSIFLTNKKGFPVLSKMHQRLIFRLLKLEVQFIITGTNHHSEKEFCSYLQYLEYLSQNRPPPNAYELFAKGYEDYLQSPLQPLMDNLESQTYEVFEKDPIKYSQYQQAIYKCLLDRVPEEEKDTNVQVLMVLGAGRGPLVNASLRAAKQADRRIKLYAVEKNPNAVVTLENWQFEEWGSQVTVVSSDMREWVAPEKADIIVSELLGSFADNELSPECLDGAQHFLKDDGVSIPGEYTSFLAPISSSKLYNEVRACREKDRDPEAQFEMPYVVRLHNFHQLSAPQPCFTFSHPNRDPMIDNNRYCTLEFPVEVNTVLHGFAGYFETVLYQDITLSIRPETHSPGMFSWFPILFPIKPRRCGMSGL

SEQ ID NO: 840505 - protein, 634 aa, Homo sapiens [sequence omitted]

SEQ ID NO: 840506 - protein, 634 aa, Homo sapiens [sequence omitted]

SEQ ID NO: 840507 - protein, 659 aa, Homo sapiens
MAVGGAGGSRVSSGRDLNCVPEIADTLGAVAKQGFDFLCMPVFHPRFKREFIQEPAKNRPGPQTRSDLLLSGRDWNTLIVGKLSPWIRPDSKVEKIRRNSEAAMLQELNFGAYLGLPAFLLPLNQEDNTNLARVLTNHIHTGHHSSMFWMRVPLVAPEDLRDDIIENAPTTHTEEYSGEEKTWMWWHNFRTLCDYSKRIAVALEIGADLPSNHVIDRWLGEPIKAAILPTSIFLTNKKGFPVLSKMHQRLIFRLLKLEVQFIITGTNHHSEKEFCSYLQYLEYLSQNRPPPNAYELFAKGYEDYLQSPLQPLMDNLESQTYEVFEKDPIKYSQYQQAIYKCLLDRVPEEEKDTNVQVLMVLGAGRGPLVNASLRAAKQADRRIKLYAVEKNPNAVVTLENWQFEEWGSQVTVVSSDMREWVAPEKADIIVSELLGSFADNELSPECLDGAQHFLKDDGVSIPGEYTSFLAPISSSKLYNEVRACREKDRDPEAQFEMPYVVRLHNFHQLSAPQPCFTFSHPNRDPMIDNNRYCTLEFPVEVNTVLHGFAGYFETVLYQDITLSIRPETHSPGMFSWFPILFPIKQPITVREGQTICVRFWRCSNWLKPPIYEDLRPGGEELVLDLKLRTQPQELPGISLRTWGLNGFSAFFCSCFDGFV

SEQ ID NO: 840508 - protein, 578 aa, Homo sapiens
MAVGGAGGSRVSSGRDLNCVPEIADTLGAVAKQGFDFLCMPVFHPRFKREFIQEPAKNRPGPQTRSDLLLSGRDWNTLIVGKLSPWIRPDSKVEKIRRNSEAAMLQELNFGAYLGLPAFLLPLNQEDNTNLARVLTNHIHTGHHSSMFWMRVPLVAPEDLRDDIIENAPTTHTEEYSGEEKTWMWWHNFRTLCDYSKRIAVALEIGADLPSNHVIDRWLGEPIKAAILPTSIFLTNKKGFPVLSKMHQRLIFRLLKLEVQFIITGTNHHSEKEFCSYLQYLEYLSQNRPPPNAYELFAKGYEDYLQSPLQPLMDNLESQTYEVFEKDPIKYSQYQQAIYKCLLDRVPEEEKDTNVQVLMVLGAGRGPLVNASLRAAKQADRRIKLYAVEKNPNAVVTLENWQFEEWGSQVTVVSSDMREWVAPEKADIIVSELLGSFADNELSPECLDGAQHFLKDDGVSIPGEYTSFLAPISSSKLYNEVRACREKDRDPEAQFEMPYVVRLHNFHQLSAPQPCFTFSHPNRDPMIDNNRYCTLEFPVEVNTVLHGFAGYFETVLYQDITLSIRPETHSPGTAHNGT

SEQ ID NO: 840509 - protein, 592 aa, Homo sapiens
MAVGGAGGSRVSSGRDLNCVPEIADTLGAVAKQGFDFLCMPVFHPRFKREFIQEPAKNRPGPQTRSDLLLSGRDWNTLIVGKLSPWIRPDSKVEKIRRNSEAAMLQELNFGAYLGLPAFLLPLNQEDNTNLARVLTNHIHTGHHSSMFWMRVPLVAPEDLRDDIIENAPTTHTEEYSGEEKTWMWWHNFRTLCDYSKRIAVALEIGADLPSNHVIDRWLGEPIKAAILPTSIFLTNKKGFPVLSKMHQRLIFRLLKLEVQFIITGTNHHSEKEFCSYLQYLEYLSQNRPPPNAYELFAKGYEDYLQSPLQPLMDNLESQTYEVFEKDPIKYSQYQQAIYKCLLDRVPEEEKDTNVQVLMVLGAGRGPLVNASLRAAKQADRRIKLYAVEKNPNAVVTLENWQFEEWGSQVTVVSSDMREWVAPEKADIIVSELLGSFADNELSPECLDGAQHFLKDDGVSIPGEYTSFLAPISSSKLYNEVRACREKDRDPEAQFEMPYVVRLHNFHQLSAPQPCFTFSHPNRDPMIDNNRYCTLEFPVEVNTVLHGFAGYFETVLYQDITLSIRPETHSPGMFSWFPILFPIKVGTAFKTL

SEQ ID NO: 840510 - protein, 218 aa, Homo sapiens
MREWVAPEKADIIVSELLGSFADNELSPECLDGAQHFLKDDGVSIPGEYTSFLAPISSSKLYNEVRACREKDRDPEAQFEMPYVVRLHNFHQLSAPQPCFTFSHPNRDPMIDNNRYCTLEFPVEVNTVLHGFAGYFETVLYQDITLSIRPETHSPGMFSWFPILFPIKQPITVREGQTICVRFWRCSNSKKVWYEWAVTAPVCSAIHNPTGRSYTIGL

SEQ ID NO: 840511 - protein, 151 aa, Homo sapiens
MSGTGFLYSSVLVRGSKSSFSDLLLCAVVENLLSQKLEEPEDEPLVHLRKNRKSLLIGQENASGENGYFETVLYQDITLSIRPETHSPGMFSWFPILFPIKQPITVREGQTICVRFWRCSNSKKVWYEWAVTAPVCSAIHNPTGRSYTIGL

SEQ ID NO: 840512 - protein, 104 aa, Homo sapiens
MAAMAVGGAGGSRVSSGRDLNCVPEIADTLGAVAKQGFDFLCMPVFHPRFKREFIQEPAKNRPGPQTRSDLLLSGRGRDHPICPLIIRGNNNFCFIGALILLLF

SEQ ID NO: 840513 - protein, 634 aa, Homo sapiens [sequence omitted]

SEQ ID NO: 840514 - protein, 595 aa, Homo sapiens [sequence omitted]

SEQ ID NO: 840515 - protein, 644 aa, Homo sapiens
MAVGGAGGSRVSSGRDLNCVPEIADTLGAVAKQGFDFLCMPVFHPRFKREFIQEPAKNRPGPQTRSDLLLSGRVFVFLGWGSADWNTLIVGKLSPWIRPDSKVEKIRRNSEAAMLQELNFGAYLGLPAFLLPLNQEDNTNLARVLTNHIHTGHHSSMFWMRVPLVAPEDLRDDIIENAPTTHTEEYSGEEKTWMWWHNFRTLCDYSKRIAVALEIGADLPSNHVIDRWLGEPIKAAILPTSIFLTNKKGFPVLSKMHQRLIFRLLKLEVQFIITGTNHHSEKEFCSYLQYLEYLSQNRPPPNAYELFAKGYEDYLQSPLQPLMDNLESQTYEVFEKDPIKYSQYQQAIYKCLLDRVPEEEKDTNVQVLMVLGAGRGPLVNASLRAAKQADRRIKLYAVEKNPNAVVTLENWQFEEWGSQVTVVSSDMREWVAPEKADIIVSELLGSFADNELSPECLDGAQHFLKDDGVSIPGEYTSFLAPISSSKLYNEVRACREKDRDPEAQFEMPYVVRLHNFHQLSAPQPCFTFSHPNRDPMIDNNRYCTLEFPVEVNTVLHGFAGYFETVLYQDITLSIRPETHSPGMFSWFPILFPIKQPITVREGQTICVRFWRCSNSKKVWYEWAVTAPVCSAIHNPTGRSYTIGL

SEQ ID NO: 840516 - protein, 590 aa, Homo sapiens
MAVGGAGGSRVSSGRDLNCVPEIADTLGAVAKQGFDFLCMPVFHPRFKREFIQEPAKNRPGPQTRSDLLLSGRAFLLPLNQEDNTNLARVLTNHIHTGHHSSMFWMRVPLVAPEDLRDDIIENAPTTHTEEYSGEEKTWMWWHNFRTLCDYSKRIAVALEIGADLPSNHVIDRWLGEPIKAAILPTSIFLTNKKGFPVLSKMHQRLIFRLLKLEVQFIITGTNHHSEKEFCSYLQYLEYLSQNRPPPNAYELFAKGYEDYLQSPLQPLMDNLESQTYEVFEKDPIKYSQYQQAIYKCLLDRVPEEEKDTNVQVLMVLGAGRGPLVNASLRAAKQADRRIKLYAVEKNPNAVVTLENWQFEEWGSQVTVVSSDMREWVAPEKADIIVSELLGSFADNELSPECLDGAQHFLKDDGVSIPGEYTSFLAPISSSKLYNEVRACREKDRDPEAQFEMPYVVRLHNFHQLSAPQPCFTFSHPNRDPMIDNNRYCTLEFPVEVNTVLHGFAGYFETVLYQDITLSIRPETHSPGMFSWFPILFPIKQPITVREGQTICVRFWRCSNSKKVWYEWAVTAPVCSAIHNPTGRSYTIGL

SEQ ID NO: 840517 - protein, 389 aa, Homo sapiens [sequence omitted]

SEQ ID NO: 840518 - protein, 389 aa, Homo sapiens [sequence omitted]

SEQ ID NO: 840519 - protein, 480 aa, Homo sapiens
MAVGGAGGSRVSSGRDLNCVPEIADTLGAVAKQGFDFLCMPVFHPRFKREFIQEPAKNRPGPQTRSDLLLSGRDWNTLIVGKLSPWIRPDSKVEKIRRNSEALEVQFIITGTNHHSEKEFCSYLQYLEYLSQNRPPPNAYELFAKGYEDYLQSPLQPLMDNLESQTYEVFEKDPIKYSQYQQAIYKCLLDRVPEEEKDTNVQVLMVLGAGRGPLVNASLRAAKQADRRIKLYAVEKNPNAVVTLENWQFEEWGSQVTVVSSDMREWVAPEKADIIVSELLGSFADNELSPECLDGAQHFLKDDGVSIPGEYTSFLAPISSSKLYNEVRACREKDRDPEAQFEMPYVVRLHNFHQLSAPQPCFTFSHPNRDPMIDNNRYCTLEFPVEVNTVLHGFAGYFETVLYQDITLSIRPETHSPGMFSWFPILFPIKQPITVREGQTICVRFWRCSNSKKVWYEWAVTAPVCSAIHNPTGRSYTIGL

SEQ ID NO: 840520 - protein, 659 aa, Homo sapiens; identical to SEQ ID NO: 840507

SEQ ID NO: 840521 - protein, 595 aa, Homo sapiens
MAVGGAGGSRVSSGRDLNCVPEIADTLGAVAKQGFDFLCMPVFHPRFKREFIQEPAKNRPGPQTRSDLLLSGRDWNTLIVGKLSPWIRPDSKVEKIRRNSEAAMLQELNFGAYLGLPAFLLPLNQEDNTNLARVLTNHIHTGHHSSMFWMRVPLVAPEDLRDDIIENAPTTHTEEYSGEEKTWMWWHNFRTLCDYSKRIAVALEIGADLPSNHVIDRWLGEPIKAAILPTSIFLTNKKGFPVLSKMHQRLIFRLLKLEVQFIITGTNHHSEKEFCSYLQYLEYLSQNRPPPNAYELFAKGYEDYLQSPLQPLMDNLESQTYEVFEKDPIKYSQYQQAIYKCLLDRVPEEEKDTNVQVLMVLGAGRGPLVNASLRAAKQADRRIKLYAVEKNPNAVVTLENWQFEEWGSQVTVVSSDMREWVAPEKADIIVSELLGSFADNELSPECLDGAQHFLKDDGVSIPGEYTSFLAPISSSKLYNEVRACREKDRDPEAQFEMPYVVRLHNFHQLSAPQPCFTFSHPNRDPMIDNNRYCTLEFPVEVNTVLHGFAGYFETVLYQDITLSIRPETHSPGMFSWFPILFPIKNPTGRSYTIGL

SEQ ID NO: 840522 - protein, 138 aa, Homo sapiens [sequence omitted]

SEQ ID NO: 840523 - protein, 261 aa, Homo sapiens
MAVGGAGGSRVSSGRDLNCVPEIADTLGAVAKQGFDFLCMPVFHPRFKREFIQEPAKNRPGPQTRSDLLLSGRDWNTLIVGKLSPWIRPDSKVEKIRRNSEAAMLQELNFGAYLGLPAFLLPLNQEDNTNLARVLTNHIHTGHHSSMFWMRVPLVAPEDLRDDIIENAPTTHTEEYSGEEKTWMWWHNFRTLCDYSKRIAVALEIGADLPSNHVIDRWLGEPIKAAILPTSIFLTNKKGFPVLSKMHQRLIFRLLKPCYRS

SEQ ID NO: 840524 - protein, 187 aa, Homo sapiens
MERQEESLSARPALETEGLRFLHTTVGSLLATYGWYIVFSCILLYVVFQKLSARLRALRQRQLDRAAAAVEPDVVVKRQEALAAARLKMQEELNAQVEKHKEKLKQLEEEKRRQKIEMWDSMQEGKSYKGNAKKPQEEDSPGPSTSSVLKRKSDRKPLRGGGYNPLSGEGGGACSWRPGRRGPSSGG

SEQ ID NO: 840525 - protein, 169 aa, Homo sapiens
MERQEESLSARPALETEGLRFLHTTVGSLLATYGWYIVFSCILLYVVFQKLSARLRALRQRQLDRAAAAVEPDVVVKRQEALAAARLKMQEELNAQVEKHKEKLKQLEEEKRRQKIEMWDSMQEGSTSSVLKRKSDRKPLRGGGYNPLSGEGGGACSWRPGRRGPSSGG

SEQ ID NO: 840526 - protein, 187 aa, Homo sapiens; identical to SEQ ID NO: 840524

SEQ ID NO: 840527 - protein, 171 aa, Homo sapiens
PLLRRAAMMVGSLLATYGWYIVFSCILLYVVFQKLSARLRALRQRQLDRAAAAVEPDVVVKRQEALAAARLKMQEELNAQVEKHKEKLKQLEEEKRRQKIEMWDSMQEGKSYKGNAKKPQEEDSPGPSTSSVLKRKSDRKPLRGGGYNPLSGEGGGACSWRPGRRGPSSGG

SEQ ID NO: 840528 - protein, 187 aa, Homo sapiens; identical to SEQ ID NO: 840524

SEQ ID NO: 840529 - protein, 234 aa, Homo sapiens
PLLRRAAMMGGSSAAAPGAGAWEAWERSGVGAYADLGQQARTLRGGFSGAALPWAARLSLVCASLFCEPSPSLGSLLATYGWYIVFSCILLYVVFQKLSARLRALRQRQLDRAAAAVEPDVVVKRQEALAAARLKMQEELNAQVEKHKEKLKQLEEEKRRQKIEMWDSMQEGKSYKGNAKKPQEEDSPGPSTSSVLKRKSDRKPLRGGGYNPLSGEGGGACSWRPGRRGPSSGG

SEQ ID NO: 840530 - protein, 187 aa, Homo sapiens; identical to SEQ ID NO: 840524

SEQ ID NO: 840531 - protein, 187 aa, Homo sapiens
MERQEESLSARPALETEGLRFLHTTVGSLLATYGWYIVFSCILLYVVFQKLSARLRALRQRQLDRAAAAVEPDVVVKRQEALAAARLKMQEELNAQVEKHKEKLKQLEEEKRRQKIEMWDSMQEGKSYKGNAKKPQEEDSPGPSTSSVLKRKSDRKPLRGGGYNPLSGEGGGACSWRPGLSLLTLAR

SEQ ID NO: 840532 - protein, 187 aa, Homo sapiens; identical to SEQ ID NO: 840524

SEQ ID NO: 840533 - protein, 114 aa, Homo sapiens
MERQEESLSARPALETEGLRFLHTTVGSLLATYGWYIVFSCILLYVVFQKLSARLRALRQRQLDRAAAAVEPDVVVKRQEALAAARLKMQEELNAQVEKHKEKLKQLEEEKRRL

SEQ ID NO: 840534 - protein, 1594 aa, Homo sapiens
LPAPPPPPPPPLLPHLPPCRRRRVMSDSLWTALSNFSMPSFPGGSMFRRTKSCRTSNRKSLILTSTSPTLPRPHSPLPGHLGSSPLDSPRNFSPNTPAHFSFASSRRADGRRWSLASLPSSGYGTNTPSSTVSSSCSSQERLHQLPYQPTVDELHFLSKHFGSTESITDEDGGRRSPAVRPRSRSLSPGRSPSSYDNEIVMMNHVYKERFPKATAQMEEKLRDFTRAYEPDSVLPLADGVLSFIHHQIIELARDCLTKSRDGLITTVYFYELQENLEKLLQDAYERSESLEVAFVTQLVKKLLIIISRPARLLECLEFNPEEFYHLLEAAEGHAKEGHLVKTDIPRYIIRQLGLTRDPFPDVVHLEEQDSGGSNTPEQDDLSEGRSSKAKKPPGENDFDTIKLISNGAYGAVYLVRHRDTRQRFAMKKINKQNLILRNQIQQAFVERDILTFAENPFVVGMFCSFETRRHLCMVMEYVEGGDCATLLKNIGALPVEMARMYFAETVLALEYLHNYGIVHRDLKPDNLLITSMGHIKLTDFGLSKMGLMSLTTNLYEGHIEKDAREFLDKQVCGTPEYIAPEVILRQGYGKPVDWWAMGIILYEFLVGCVPFFGDTPEELFGQVISDDILWPEGDEALPTEAQLLISSLLQTNPLVRLGAGGAFEVKQHSFFRDLDWTGLLRQKAEFIPHLESEDDTSYFDTRSDRYHHVNSYDEDDTTEEEPVEIRQFSSCSPRFSKVYSSMEQLSQHEPKTPVAAAGSSKREPSTKGPEEKVAGKREGLGGLTLREKTWRGGSPEIKRFSASEASFLEGEASPPLGARRRFSALLEPSRFSAPQEDEDEARLRRPPRPSSDPAGSLDARAPKEETQGEGTSSAGDSEATDRPRPGDLCPPSKDGDASGPRATNDLVLRRARHQQMSGDVAVEKRPSRTGGKVIKSASATALSVMIPAVDPHGSSPLASPMSPRSLSSNPSSRDSSPSRDYSPAVSGLRSPITIQRSGKKYGFTLRAIRVYMGDTDVYSVHHIVWHVEEGGPAQEAGLCAGDLITHVNGEPVHGMVHPEVVELILKSGNKVAVTTTPFENTSIRIGPARRSSYKAKMARRNKRPSAKEGQESKKRSSLFRKITKQSNLLHTSRSLSSLNRSLSSSDSLPGSPTHGLPARSPTHSYRSTPDSAYLGASSQSSSPASSTPNSPASSASHHIRPSTLHGLSPKLHRQYRSARCKSAGNIPLSPLAHTPSPTQASPPPLPGHTVGSSHTTQSFPAKLHSSPPVVRPRPKSAEPPRSPLLKRVQSAEKLGASLSADKKGALRKHSLEVGHPDFRKDFHGELALHSLAESDGETPPVEGLGAPRQVAVRRLGRQESPLSLGADPLLPEGASRPPVSSKEKESPGGAEACTPPRATTPGGRTLERDVGCTRHQSVQTEDGTGGMARAVAKAALSPVQEHETGRRSSSGEAGTPLVPIVVEPARPGAKAVVPQPLGADSKGLQEPAPLAPSVPEAPRGRERWVLEVVEERTTLSGPRSKPASPKLSPEPQTPSLAPAKCSAPSSAVTPVPPASLLGSGTKPQVGLTSRCPAEAVPPAGLTKKGVSSPAPPGP

SEQ ID NO: 840535 - protein, 134 aa, Homo sapiens
SCWGAHGGSDPGPAPGPQSSCSSQERLHQLPYQPTVDELHFLSKHFGSTESITDEDGGRRSPAVRPRSRSLSPGRSPSSYDNEIVMMNHVYKERFPKVRWDPRRSRGDQAACTLARLIPARPLAASVRSAGSWR

SEQ ID NO: 840536 - protein, 1583 aa, Homo sapiens
AATSLLPPRAEVAAAAAMDDSGLIRRRRLQKDLPLPRKSSSCRTSNRKSLILTSTSPTLPRPHSPLPGHLGSSPLDSPRNFSPNTPAHFSFASSRRADGRRWSLASLPSSGYGTNTPSSTVSSSCSSQERLHQLPYQPTVDELHFLSKHFGSTESITDEDGGRRSPAVRPRSRSLSPGRSPSSYDNEIVMMNHVYKERFPKATAQMEEKLRDFTRAYEPDSVLPLADGVLSFIHHQIIELARDCLTKSRDGLITTVYFYELQENLEKLLQDAYERSESLEVAFVTQLVKKLLIIISRPARLLECLEFNPEEFYHLLEAAEGHAKEGHLVKTDIPRYIIRQLGLTRDPFPDVVHLEEQDSGGSNTPEQDDLSEGRSSKAKKPPGENDFDTIKLISNGAYGAVYLVRHRDTRQRFAMKKINKQNLILRNQIQQAFVERDILTFAENPFVVGMFCSFETRRHLCMVMEYVEGGDCATLLKNIGALPVEMARMYFAETVLALEYLHNYGIVHRDLKPDNLLITSMGHIKLTDFGLSKMGLMSLTTNLYEGHIEKDAREFLDKQVCGTPEYIAPEVILRQGYGKPVDWWAMGIILYEFLVGCVPFFGDTPEELFGQVISDDILWPEGDEALPTEAQLLISSLLQTNPLVRLGAGGAFEVKQHSFFRDLDWTGLLRQKAEFIPHLESEDDTSYFDTRSDRYHHVNSYDEDDTTEEEPVEIRQFSSCSPRFSKVYSSMEQLSQHEPKTPVAAAGSSKREPSTKGPEEKVAGKREGLGGLTLREKTWRGGSPEIKRFSASEASFLEGEASPPLGARRRFSALLEPSRFSAPQEDEDEARLRRPPRPSSDPAGSLDARAPKEETQGEGTSSAGDSEATDRPRPGDLCPPSKDGDASGPRATNDLVLRRARHQQMSGDVAVEKRPSRTGGKVIKSASATALSVMIPAVDPHGSSPLASPMSPRSLSSNPSSRDSSPSRDYSPAVSGLRSPITIQRSGKKYGFTLRAIRVYMGDTDVYSVHHIVWHVEEGGPAQEAGLCAGDLITHVNGEPVHGMVHPEVVELILKSGNKVAVTTTPFENTSIRIGPARRSSYKAKMARRNKRPSAKEGQESKKRSSLFRKITKQSNLLHTSRSLSSLNRSLSSSDSLPGSPTHGLPARSPTHSYRSTPDSAYLGASSQSSSPASSTPNSPASSASHHIRPSTLHGLSPKLHRQYRSARCKSAGNIPLSPLAHTPSPTQASPPPLPGHTVGSSHTTQSFPAKLHSSPPVVRPRPKSAEPPRSPLLKRVQSAEKLGASLSADKKGALRKHSLEVGHPDFRKDFHGELALHSLAESDGETPPVEGLGAPRQVAVRRLGRQESPLSLGADPLLPEGASRPPVSSKEKESPGGAEACTPPRATTPGGRTLERDVGCTRHQSVQTEDGTGGMARAVAKAALSPVQEHETGRRSSSGEAGTPLVPIVVEPARPGAKAVVPQPLGADSKGLQEPAPLAPSVPEAPRGRERWVLEVVEERTTLSGPRSKPASPKLSPEPQTPSLAPAKCSAPSSAVTPVPPASLLGSGTKPQVGLTSRCPAEAVPPAGLTKKGVSSPAPPGP

SEQ ID NO: 840537 - protein, 1640 aa, Homo sapiens
LPAPPPPPPPPLLPHLPPCRRRRVMSDSLWTALSNFSMPSFPGGSMFRRTKSCRTSNRKSLILTSTSPTLPRPHSPLPGHLGSSPLDSPRNFSPNTPAHFSFASSRRADGRRWSLASLPSSGYGTNTPSSTVSSSCSSQERLHQLPYQPTVDELHFLSKHFGSTESITDEDGGRRSPAVRPRSRSLSPGRSPSSYDNEIVMMNHVYKERFPKATAQMEEKLRDFTRAYEPDSVLPLADGVLSFIHHQIIELARDCLTKSRDGLITTVYFYELQENLEKLLQDAYERSESLEVAFVTQLVKKLLIIISRPARLLECLEFNPEEFYHLLEAAEGHAKEGHLVKTDIPRYIIRQLGLTRDPFPDVVHLEEQDSGGSNTPEQDDLSEGRSSKAKKPPGENDFDTIKLISNGAYGAVYLVRHRDTRQRFAMKKINKQNLILRNQIQQAFVERDILTFAENPFVVGMFCSFETRRHLCMVMEYVEGGDCATLLKNIGALPVEMARMYFAETVLALEYLHNYGIVHRDLKPDNLLITSMGHIKLTDFGLSKMGLMSLTTNLYEGHIEKDAREFLDKQVCVRAWGSLRVELTLQDLGNPGPGGGHSSPLRALLWLGRGLTACPQVCGTPEYIAPEVILRQGYGKPVDWWAMGIILYEFLVGCVPFFGDTPEELFGQVISDDILWPEGDEALPTEAQLLISSLLQTNPLVRLGAGGAFEVKQHSFFRDLDWTGLLRQKAEFIPHLESEDDTSYFDTRSDRYHHVNSYDEDDTTEEEPVEIRQFSSCSPRFSKVYSSMEQLSQHEPKTPVAAAGSSKREPSTKGPEEKVAGKREGLGGLTLREKTWRGGSPEIKRFSASEASFLEGEASPPLGARRRFSALLEPSRFSAPQEDEDEARLRRPPRPSSDPAGSLDARAPKEETQGEGTSSAGDSEATDRPRPGDLCPPSKDGDASGPRATNDLVLRRARHQQMSGDVAVEKRPSRTGGKVIKSASATALSVMIPAVDPHGSSPLASPMSPRSLSSNPSSRDSSPSRDYSPAVSGLRSPITIQRSGKKYGFTLRAIRVYMGDTDVYSVHHIVWHVEEGGPAQEAGLCAGDLITHVNGEPVHGMVHPEVVELILKSGNKVAVTTTPFENTSIRIGPARRSSYKAKMARRNKRPSAKEGQESKKRSSLFRKITKQSNLLHTSRSLSSLNRSLSSSDSLPGSPTHGLPARSPTHSYRSTPDSAYLGASSQSSSPASSTPNSPASSASHHIRPSTLHGLSPKLHRQYRSARCKSAGNIPLSPLAHTPSPTQASPPPLPGHTVGSSHTTQSFPAKLHSSPPVVRPRPKSAEPPRSPLLKRVQSAEKLGASLSADKKGALRKHSLEVGHPDFRKDFHGELALHSLAESDGETPPVEGLGAPRQVAVRRLGRQESPLSLGADPLLPEGASRPPVSSKEKESPGGAEACTPPRATTPGGRTLERDVGCTRHQSVQTEDGTGGMARAVAKAALSPVQEHETGRRSSSGEAGTPLVPIVVEPARPGAKAVVPQPLGADSKGLQEPAPLAPSVPEAPRGRERWVLEVVEERTTLSGPRSKPASPKLSPEPQTPSLAPAKCSAPSSAVTPVPPASLLGSGTKPQVGLTSRCPAEAVPPAGLTKKGVSSPAPPGP

SEQ ID NO: 840538 - protein, 386 aa, Homo sapiens
LPAPPPPPPPPLLPHLPPCRRRRVMSDSLWTALSNFSMPSFPGGSMFRRTKSCRTSNRKSLILTSTSPTLPRPHSPLPGHLGSSPLDSPRNFSPNTPAHFSFASSRRADGRRWSLASLPSSGYGTNTPSSTVSSSCSSQERLHQLPYQPTVDELHFLSKHFGSTESITDEDGGRRSPAVRPRSRSLSPGRSPSSYDNEIVMMNHVYKERFPKATAQMEEKLRDFTRAYEPDSVLPLADGVLSFIHHQIIELARDCLTKSRDGLITTVYFYELQENLEKLLQDAYERSESLEVAFVTQLVKKLLIIISRPARLLECLEFNPEEFYHLLEAAEGHAKEGHLVKTDIPRYIIRQLGLTRDPFPDVVHLEEQDSGGSNTPEQDDLSEVME

SEQ ID NO: 840539 - protein, 182 aa, Homo sapiens
VGYGDHPLRVPGGLCALLRRHTRGAIWTGHQWYVAWQCTGAECGVHGEMDRLRVPGISKATPQRIACTQEVKAAVSHDRATALQLGDTVRSCVQTTTTTKTAPKFRFVLQMTSCGPRGMRPYLRRPNSSYPASCRPTLWSGLGQVSPPCRGAEGPLIESRPPKPQAQPVLWPRGGRHGGRGW

SEQ ID NO: 840540 - protein, 119 aa, Homo sapiens
LQLGDTVRSCVQTTTTTKTAPKFRFVLQMTSCGPRGMRPYLRRPNSSYPASCRPTLWSGLGQVSPPCRGAEGPLIESRPPKPQAQPVLWPRGGRHGGRGWAAGLAISCGWNPFRPRRRF

SEQ ID NO: 840541 - protein, 267 aa, Homo sapiens
MSGDVAVEKRPSRTGGKVIKSASATALSVMIPAVDPHGSSPLASPMSPRSLSSNPSSRDSSPSRDYSPAVSGLRSPITIQRSGKKYGFTLRAIRVYMGDTDVYSVHHIVWHVEEGGPAQEAGLCAGDLITHVNGEPVHGMVHPEVVELILKSGNKVAVTTTPFENTSIRIGPARRSSYKAKMARRNKRPSAKEGQESKKRSSLFRKITKQSNLLHTSRSLSSLNRSLSSSDSLPGSPTHGLPARSPTHSYRSTPDSAYLGITSCTCA

SEQ ID NO: 840542 - protein, 1392 aa, Homo sapiens
PRAPPPSLPQATAQMEEKLRDFTRAYEPDSVLPLADGVLSFIHHQIIELARDCLTKSRDGLITTVYFYELQENLEKLLQDAYERSESLEVAFVTQLVKKLLIIISRPARLLECLEFNPEEFYHLLEAAEGHAKEGHLVKTDIPRYIIRQLGLTRDPFPDVVHLEEQDSGGSNTPEQDDLSEGRSSKAKKPPGENDFDTIKLISNGAYGAVYLVRHRDTRQRFAMKKINKQNLILRNQIQQAFVERDILTFAENPFVVGMFCSFETRRHLCMVMEYVEGGDCATLLKNIGALPVEMARMYFAETVLALEYLHNYGIVHRDLKPDNLLITSMGHIKLTDFGLSKMGLMSLTTNLYEGHIEKDAREFLDKQVCGTPEYIAPEVILRQGYGKPVDWWAMGIILYEFLVGCVPFFGDTPEELFGQVISDDILWPEGDEALPTEAQLLISSLLQTNPLVRLGAGGAFEVKQHSFFRDLDWTGLLRQKAEFIPHLESEDDTSYFDTRSDRYHHVNSYDEDDTTEEEPVEIRQFSSCSPRFSKVYSSMEQLSQHEPKTPVAAAGSSKREPSTKGPEEKVAGKREGLGGLTLREKTWRGGSPEIKRFSASEASFLEGEASPPLGARRRFSALLEPSRFSAPQEDEDEARLRRPPRPSSDPAGSLDARAPKEETQGEGTSSAGDSEATDRPRPGDLCPPSKDGDASGPRATNDLVLRRARHQQMSGDVAVEKRPSRTGGKVIKSASATALSVMIPAVDPHGSSPLASPMSPRSLSSNPSSRDSSPSRDYSPAVSGLRSPITIQRSGKKYGFTLRAIRVYMGDTDVYSVHHIVWHVEEGGPAQEAGLCAGDLITHVNGEPVHGMVHPEVVELILKSGNKVAVTTTPFENTSIRIGPARRSSYKAKMARRNKRPSAKEGQESKKRSSLFRKITKQSNLLHTSRSLSSLNRSLSSSDSLPGSPTHGLPARSPTHSYRSTPDSAYLGASSQSSSPASSTPNSPASSASHHIRPSTLHGLSPKLHRQYRSARCKSAGNIPLSPLAHTPSPTQASPPPLPGHTVGSSHTTQSFPAKLHSSPPVVRPRPKSAEPPRSPLLKRVQSAEKLGASLSADKKGALRKHSLEVGHPDFRKDFHGELALHSLAESDGETPPVEGLGAPRQVAVRRLGRQESPLSLGADPLLPEGASRPPVSSKEKESPGGAEACTPPRATTPGGRTLERDVGCTRHQSVQTEDGTGGMARAVAKAALSPVQEHETGRRSSSGEAGTPLVPIVVEPARPGAKAVVPQPLGADSKGLQEPAPLAPSVPEAPRGRERWVLEVVEERTTLSGPRSKPASPKLSPEPQTPSLAPAKCSAPSSAVTPVPPASLLGSGTKPQVGLTSRCPAEAVPPAGLTKKGVSSPAPPGP

SEQ ID NO: 840543 - protein, 503 aa, Homo sapiens
LPAPPPPPPPPLLPHLPPCRRRRVMSDSLWTALSNFSMPSFPGGSMFRRTKSCRTSNRKSLILTSTSPTLPRPHSPLPGHLGSSPLDSPRNFSPNTPAHFSFASSRRADGRRWSLASLPSSGYGTNTPSSTVSSSCSSQERLHQLPYQPTVDELHFLSKHFGSTESITDEDGGRRSPAVRPRSRSLSPGRSPSSYDNEIVMMNHVYKERFPKATAQMEEKLRDFTRAYEPDSVLPLADGVLSFIHHQIIELARDCLTKSRDGLITTVYFYELQENLEKLLQDAYERSESLEVAFVTQLVKKLLIIISRPARLLECLEFNPEEFYHLLEAAEGHAKEGHLVKTDIPRYIIRQLGLTRDPFPDVVHLEEQDSGGSNTPEQDDLSEGRSSKAKKPPGENDFDTIKLISNGAYGAVYLVRHRDTRQRFAMKKINKQNLILRNQIQQAFVERDILTFAENPFVVGMFCSFETRRHLCMVMEYVEGVAACGAAGKMGPCSLVRAAGWPA

SEQ ID NO: 840544 - protein, 44 aa, Homo sapiens
MRRNPVPSVTAHTRSPARSDRYHHVNSYDEDDTTEEEPVEIRQF

SEQ ID NO: 840545 - protein, 128 aa, Homo sapiens
IVFIHKGDSEFLEFLNIFPQVSVKFLKSLPYHTQFPEALPLHLLLCLANRVVMSQKLLTTLVRLSSQASSFLRMRPFSTTQEIKTLFLTRQGYIYSIFKRNNPSGSHANRLNSFITRISPTGPTPAQL

SEQ ID NO: 840546 - protein, 131 aa, Homo sapiens
AAPAFVPKEWGWGSCTCICALRVGMGKLHLHLCPKSGDGEATPAFVPKEWAWGSYTCICALRVGMGKPKLERKQPPVPGLQNEMWGPERDLWVGKYHPHKEDRNEMRVLSVTCGWVNATHTRRRVLRVPGH

SEQ ID NO: 840547 - protein, 124 aa, Homo sapiens
MVATSLSFMILQVNWAQLLSPAARDTDRNCNLQGLGWLECLAPWQGQLEGWALLRWLDLFPLLINSWHFLHVASPHSLDSSIAILDVWQLSSQKCKSSFQTSIIGPESAYFLFCHILFIKMSHR

SEQ ID NO: 840548 - protein, 132 aa, Homo sapiens [sequence omitted]

SEQ ID NO: 840549 - protein, 533 aa, Homo sapiens
MGEKAVPLLRRRRVKRSCPSCGSELGVEEKRGKGNPISIQLFPPELVEHIISFLPVRDLVALGQTCRYFHEVCDGEGVWRRICRRLSPRLQDQDTKGLYFQAFGGRRRCLSKSVAPLLAHGYRRFLPTKDHVFILDYVGTLFFLKNALVSTLGQMQWKRACRYVVLCRGAKDFASDPRCDTVYRKYLYVLATREPQEVVGTTSSRACDCVEVYLQSSGQRVFKMTFHHSMTFKQIVLVGQETQRALLLLTEEGKIYSLVVNETQLDQPRSYTVQLALRKVSHYLPHLRVACMTSNQSSTLYVTDPILCSGYNHLGLVDEFGRIFMQGNNRYGQLGTGDKMDRGEPTQGTLAVCPQVCYLQRPITLWCGLNHSLVLSQSSEFSKELLGCGCGAGGRLPGWPKGSASFVKLQVKVPLCACALCATRECLYILSSHDIEQHAPYRHLPASRVVGTPEPSLGARAPQDPGGMAQACEEYLSQIHSCQTLQDRTEKMKEIVGWMPLMAAQKDFFWEALDMLQRAEGGGGGVGPPAPET

SEQ ID NO: 840550 - protein, 275 aa, Homo sapiens
MTSNQSSTLYVTDQGGVYFEVHTPGVYRDLFGTLQAFDPLDQQMPLALSLPAKILFCALGYNHLGLVDEFGRIFMQGNNRYGQLGTGDKMDRGEPTQVCYLQRPITLWCGLNHSLVLSQSSEFSKELLGCGCGAGGRLPGWPKGSASFVKLQVKVPLCACALCATRECLYILSSHDIEQHAPYRHLPASRVVGTPEPSLGARAPQDPGGMAQACEEYLSQIHSCQTLQDRTEKMKEIVGWMPLMAAQKDFFWEALDMLQRAEGGGGGVGPPAPET

SEQ ID NO: 840551 - protein, 580 aa, Homo sapiens
MGEKAVPLLRRRRVKRSCPSCGSELGVEEKRGKGNPISIQLFPPELVEHIISFLPVRDLVALGQTCRYFHEVCDGEGVWRRICRRLSPRLQDQGSGVRPWKRAAILNYTKGLYFQAFGGRRRCLSKSVAPLLAHGYRRFLPTKDHVFILDYVGTLFFLKNALVSTLGQMQWKRACRYVVLCRGAKDFASDPRCDTVYRKYLYVLATREPQEVVGTTSSRACDCVEVYLQSSGQRVFKMTFHHSMTFKQIVLVGQETQRALLLLTEEGKIYSLVVNETQLDQPRSYTVQLALRKVSHYLPHLRVACMTSNQSSTLYVTDQGGVYFEVHTPGVYRDLFGTLQAFDPLDQQMPLALSLPAKILFCALGYNHLGLVDEFGRIFMQGNNRYGQLGTGDKMDRGEPTQVCYLQRPITLWCGLNHSLVLSQSSEFSKELLGCGCGAGGRLPGWPKGSASFVKLQVKVPLCACALCATRECLYILSSHDIEQHAPYRHLPASRVVGTPEPSLGARAPQDPGGMAQACEEYLSQIHSCQTLQDRTEKMKEIVGWMPLMAAQKDFFWEALDMLQRAEGGGGGVGPPAPET

SEQ ID NO: 840552 - protein, 591 aa, Homo sapiens
MVRGSQRRKLQKFTRLCGREEGLRVKRSCPSCGSELGVEEKRGKGNPISIQLFPPELVEHIISFLPVRDLVALGQTCRYFHEVCDGEGVWRRICRRLSPRLQDQGSGVRPWKRAAILNYTKGLYFQAFGGRRRCLSKSVAPLLAHGYRRFLPTKDHVFILDYVGTLFFLKNALVSTLGQMQWKRACRYVVLCRGAKDFASDPRCDTVYRKYLYVLATREPQEVVGTTSSRACDCVEVYLQSSGQRVFKMTFHHSMTFKQIVLVGQETQRALLLLTEEGKIYSLVVNETQLDQPRSYTVQLALRKVSHYLPHLRVACMTSNQSSTLYVTDQGGVYFEVHTPGVYRDLFGTLQAFDPLDQQMPLALSLPAKILFCALGYNHLGLVDEFGRIFMQGNNRYGQLGTGDKMDRGEPTQVCYLQRPITLWCGLNHSLVLSQSSEFSKELLGCGCGAGGRLPGWPKGSASFVKLQVKVPLCACALCATRECLYILSSHDIEQHAPYRHLPASRVVGTPEPSLGARAPQDPGGMAQACEEYLSQIHSCQTLQDRTEKMKEIVGWMPLMAAQKDFFWEALDMLQRAEGGGGGVGPPAPET

SEQ ID NO: 840553 - protein, 111 aa, Homo sapiens
ISGVSCNLCDNCFSLVSTTKAEPRISRGEGKMIWFLKLTWFFIFKKSRHCNASLVFNSKLKREMVALLLCMAESAQTVAQYQTCGSTAGNPAWPGICSKGCWESLPQQPMG

SEQ ID NO: 840554 - protein, 45 aa, Homo sapiens
MSEAVVDTSSVITTKDFKEKLWRRQKVEETPMLTGTLMRKMGSRR

SEQ ID NO: 840555 - protein, 154 aa, Homo sapiens
LQREAPLASGNHSGTRVSSVASPMDHGRTLHPCHCRGADFLPFLRNLGMLPSYHAYWEEGLEFYIRPLGFSAFFLQTRFRRSPNVTHSQITSHQAKSASSWAEGLGRSNYWARREGDFQVLRMQSGQAWWLTGYPQILREKLPAPRHLVGDELG

SEQ ID NO: 840556 - protein, 727 aa, Homo sapiens
MQACMAVYDIPDLLGGNGCLGSVVFSESFLTSQILVKEKDGTVTTETSSVVLTAAVPRFCSWLVEDNEVKLSEKTQQAVRGDESFLGTYLTGGEGAYLYSSNLQSWPEEGNVHFFSSGLLFSHCRHGSIIISKDHMNSISFYDGDSTSTVAALLIDFKSSLLPHLPVHFHGSSNFLMIALFPKSKIYQAFYSEVFSLWKQQDNSGISLKVIQEDGLSVEQKRLHSSAQKLFSALSQPAGEKRSSLKLLSAKLPELDWFLQHFAISSISQEPVMRTHLPVLLQQAEINTTHRIESDKVIISIVTGLPGCHASELCAFLVTLHKECGRWMVYRQIMDSSECFHAAHFQRYLSSALEAQQNRSARQSAYIRKKTRLLVVLQGYTDVIDVVQALQTHPDSNVKASFTIGAITACVEPMSCYMEHRFLFPKCLDQCSQGLVSNVVFTSHTTEQRHPLLVQLQSLIRAANPAAAFILAENGIVTRNEDIELILSENSFSSPEMLRSRYLMYPGWYEGKLNAGSVYPLMVQICVWFGRPLEKTRFVAKCKAIQSSIKPSPFSGNIYHILGKVKFSDSERTMEVCYNTLANSLSIMPVLEGPTPPPDSKSVSQDSSGQQECYLVFIGCSLKEDSIKDWLRQSAKQKPQRKALKTRGMLTQQEIRSIHVKRHLEPLPAGYFYNGTQFVNFFGDKTDFHPLMDQFMNDYVEEANREIEKYNQELEQQEYHDLFELKP

SEQ ID NO: 840557 - protein, 165 aa, Homo sapiens [sequence omitted]

SEQ ID NO: 840558 - protein, 916 aa, Homo sapiens
MEGCLGQELFSNHMFLTSLSSPNRQPFVLFGNHSTRENLNAGNFNFPSEGHLVRSTGPGGSFAKHMVAQCVSPKGPLACSRTYLFGATHVPYLGGDSKLPKKTEQIRLLSQIYAAVIEAVLAGIACYAKTSSLTKAKEVAEQTLGSGLDSFELIPFKAALRSKMTFHIHAVNNQGRIVPLDSEDSLSFVKTACMAVYDIPDLLGGNGCLGSVVFSESFLTSQILVKEKDGTVTTETSSVVLTAAVPRFCSWLVEDNEVKLSEKTQQAVRGDESFLGTYLTGGEGAYLYSSNLQSWPEEGNVHFFSSGLLFSHCRHGSIIISKDHMNSISFYDGDSTSTVAALLIDFKSSLLPHLPVHFHGSSNFLMIALFPKSKIYQAFYSEVFSLWKQQDNSGISLKVIQEDGLSVEQKRLHSSAQKLFSALSQPAGEKRSSLKLLSAKLPELDWFLQHFAISSISQEPVMRTHLPVLLQQAEINTTHRIESDKVIISIVTGLPGCHASELCAFLVTLHKECGRWMVYRQIMDSSECFHAAHFQRYLSSALEAQQNRSARQSAYIRKKTRLLVVLQGYTDVIDVVQALQTHPDSNVKASFTIGAITACVEPMSCYMEHRFLFPKCLDQCSQGLVSNVVFTSHTTEQRHPLLVQLQSLIRAANPAAAFILAENGIVTRNEDIELILSENSFSSPEMLRSRYLMYPGWYEGKLNAGSVYPLMVQICVWFGRPLEKTRFVAKCKAIQSSIKPSPFSGNIYHILGKVKFSDSERTMEVCYNTLANSLSIMPVLEGPTPPPDSKSVSQDSSGQQECYLVFIGCSLKEDSIKDWLRQSAKQKPQRKALKTRGMLTQQEIRSIHVKRHLEPLPAGYFYNGTQFVNFFGDKTDFHPLMDQFMNDYVEEANREIEKYNQELEQQEYHDLFELKP

SEQ ID NO: 840559 - protein, 232 aa, Homo sapiens
MEGCLGQELFSNHMFLTSLSSPNRQPFVLFGNHSTRENLNAGNFNFPSEGHLVRSTGPGGSFAKHMVAQCVSPKGPLACSRTYLFGATHVPYLGGDSKLPKKTEQIRLLSQIYAAVIEAVLAGIACYAKTSSLTKAKEVAEQTLGSGLDSFELIPFKAALRSKMTFHIHAVNNQGRIVPLDSEDSLSFVKTACMAVYDIPDLLGGNGCLGSVVFSESFLTSQILVKEKGKYM

SEQ ID NO: 840560 - protein, 916 aa, Homo sapiens; identical to SEQ ID NO: 840558

SEQ ID NO: 840561 - protein, 576 aa, Homo sapiens
MDYNATTPLEPEVIQAMTKAMWEAWGNPSSPYSAGRKAKDIINAARESLAKMIGGKPQDIIFTSGGTESNNLVIHSVVKHFHANRTSKGHTGGHHSPVKGAKPHFITSSVEHDSIRLPLEHLVEEQVAAVTLSLVSKVSGQAEVDDILAAVRPTTRLVTIMLANNETGIVMPVPEISQRIKALNQERVAAGLPPILVHTDAAQALGKQRVDVEDLGVDFLTIVGHKFYGPRIGALYIRGLGEFTPLYPMLFGGGQERNFRPGTENTPMIAGLGKAAELVTQNCEAYEAHMRDVRDYLEERLEAEFGQKRIHLNSQFPGTQRLPNTCNFSIRGPRLQGHVVLAQCRVLMASVGAACHSDHGDQPSPVLLSYGVPFDVARNALRLSVGRSTTRAEVDLVVQDLKQAVAQLEDQASTGAAFPTPLLGSPWQGTGLSLQFPPEGCARMTVSCPLCILSWSASECAPPVSFPGPLQSSQGPGHQRRIGLPTWDRPHRTAHIGPPTWDRPHGTAHMGPPTWDRPHGSAHMGPPTWDRPHGTAHIEPSSSGEAETLSFIHPPHWELGTPVVSALSWKVFLSGR

SEQ ID NO: 840562 - protein, 916 aa, Homo sapiens; identical to SEQ ID NO: 840558
